United States Patent Application Publication US 2005/0255487 A1 - sequence listing, part 29

SEQ ID NO: 783951 - RNA, 19 nt, Homo sapiens
  misc_RNA (1)...(19): siRNA sense strand
agagaaacccuaugaaugu

SEQ ID NO: 783952 - RNA, 19 nt, Homo sapiens
  misc_RNA (1)...(19): siRNA sense strand
cuacgaauguacugaaugu

SEQ ID NO: 783953 - RNA, 19 nt, Homo sapiens
  misc_RNA (1)...(19): siRNA sense strand
gaaaacccaugcauguaaa

SEQ ID NO: 783954 - RNA, 19 nt, Homo sapiens
  misc_RNA (1)...(19): siRNA sense strand
gagagagaccguaugaaug

SEQ ID NO: 783955 - RNA, 19 nt, Homo sapiens
  misc_RNA (1)...(19): siRNA sense strand
ggagagaaacccuaugagu

SEQ ID NO: 783956 - RNA, 19 nt, Homo sapiens
  misc_RNA (1)...(19): siRNA sense strand
cagccacgcucaguacuuu

SEQ ID NO: 783957 - RNA, 19 nt, Homo sapiens
  misc_RNA (1)...(19): siRNA sense strand
ggagagaaaccguacgaau

SEQ ID NO: 783958 - RNA, 19 nt, Homo sapiens
  misc_RNA (1)...(19): siRNA sense strand
ggaaagccuucagcuguca

SEQ ID NO: 783959 - RNA, 19 nt, Homo sapiens
  misc_RNA (1)...(19): siRNA sense strand
gaauauccaaugaugaaga

SEQ ID NO: 783960 - RNA, 19 nt, Homo sapiens
  misc_RNA (1)...(19): siRNA sense strand
ggaaaagcguucacuuguu

SEQ ID NO: 783961 - RNA, 19 nt, Homo sapiens
  misc_RNA (1)...(19): siRNA sense strand
ugccaaagcccuccuauga

SEQ ID NO: 783962 - RNA, 19 nt, Homo sapiens
  misc_RNA (1)...(19): siRNA sense strand
gagaacaugucagaacaca

SEQ ID NO: 783963 - RNA, 19 nt, Homo sapiens
  misc_RNA (1)...(19): siRNA sense strand
agugauuccuggucuauuu

SEQ ID NO: 783964 - RNA, 19 nt, Homo sapiens
  misc_RNA (1)...(19): siRNA sense strand
ggagagaagcccuuugagu

SEQ ID NO: 783965 - RNA, 19 nt, Homo sapiens
  misc_RNA (1)...(19): siRNA sense strand
ggagagaaacccugucagu

SEQ ID NO: 783966 - RNA, 19 nt, Homo sapiens
  misc_RNA (1)...(19): siRNA sense strand
gaaaccguaugaauguaag

SEQ ID NO: 783967 - RNA, 19 nt, Homo sapiens
  misc_RNA (1)...(19): siRNA sense strand
ggugaagcccuaucaaugu

SEQ ID NO: 783968 - RNA, 19 nt, Homo sapiens
  misc_RNA (1)...(19): siRNA sense strand
gaaacccuaugaauguaag

SEQ ID NO: 783969 - RNA, 19 nt, Homo sapiens
  misc_RNA (1)...(19): siRNA sense strand
gaaacccugucaguguaaa

SEQ ID NO: 783970 - RNA, 19 nt, Homo sapiens
  misc_RNA (1)...(19): siRNA sense strand
gacgcacacuggagagaaa

SEQ ID NO: 783971 - RNA, 19 nt, Homo sapiens
  misc_RNA (1)...(19): siRNA sense strand
gugggaagaccuuuaugua

SEQ ID NO: 783972 - RNA, 19 nt, Homo sapiens
  misc_RNA (1)...(19): siRNA sense strand
gagacucugugaaaguaau

SEQ ID NO: 783973 - RNA, 19 nt, Homo sapiens
  misc_RNA (1)...(19): siRNA sense strand
agagaaaccguaugaaugu

SEQ ID NO: 783974 - RNA, 19 nt, Homo sapiens
  misc_RNA (1)...(19): siRNA sense strand
uagagaaacccuguaauug

SEQ ID NO: 783975 - RNA, 19 nt, Homo sapiens
  misc_RNA (1)...(19): siRNA sense strand
uggcaaagccuucgagaau

SEQ ID NO: 783976 - RNA, 19 nt, Homo sapiens
  misc_RNA (1)...(19): siRNA sense strand
ggucaucaaugcggagaga

SEQ ID NO: 783977 - RNA, 19 nt, Homo sapiens
  misc_RNA (1)...(19): siRNA sense strand
gaaccuugccuccuuggau

SEQ ID NO: 783978 - RNA, 19 nt, Homo sapiens
  misc_RNA (1)...(19): siRNA sense strand
gaagugauuccuggucuau

SEQ ID NO: 783979 - RNA, 19 nt, Homo sapiens
  misc_RNA (1)...(19): siRNA sense strand
agagaaacccuaugagugu

SEQ ID NO: 783980 - RNA, 19 nt, Homo sapiens
  misc_RNA (1)...(19): siRNA sense strand
aaacgcagacuguagagaa

SEQ ID NO: 783981 - RNA, 19 nt, Homo sapiens
  misc_RNA (1)...(19): siRNA sense strand
ugaaaagucucagcaguaa

SEQ ID NO: 783982 - RNA, 19 nt, Homo sapiens
  misc_RNA (1)...(19): siRNA sense strand
gggugaagcccuaucaaug

SEQ ID NO: 783983 - RNA, 19 nt, Homo sapiens
  misc_RNA (1)...(19): siRNA sense strand
agagaaaccguacgaaugu

SEQ ID NO: 783984 - RNA, 19 nt, Homo sapiens
  misc_RNA (1)...(19): siRNA sense strand
gaagcuaaacccucugagu

SEQ ID NO: 783985 - RNA, 19 nt, Homo sapiens
  misc_RNA (1)...(19): siRNA sense strand
agagaaacccugucagugu

SEQ ID NO: 783986 - RNA, 19 nt, Homo sapiens
  misc_RNA (1)...(19): siRNA sense strand
ucauuugucccucaucuuu

SEQ ID NO: 783987 - RNA, 19 nt, Homo sapiens
  misc_RNA (1)...(19): siRNA sense strand
caggagagaaacccuauga

SEQ ID NO: 783988 - RNA, 19 nt, Homo sapiens
  misc_RNA (1)...(19): siRNA sense strand
agaagcccuuugaguguaa

SEQ ID NO: 783989 - RNA, 19 nt, Homo sapiens
  misc_RNA (1)...(19): siRNA sense strand
ccacuuacuuuagaagaca

SEQ ID NO: 783990 - RNA, 19 nt, Homo sapiens
  misc_RNA (1)...(19): siRNA sense strand
gccaaagcccuccuaugaa

SEQ ID NO: 783991 - RNA, 19 nt, Homo sapiens
  misc_RNA (1)...(19): siRNA sense strand
gucaaacccuacgaaugua

SEQ ID NO: 783992 - RNA, 19 nt, Homo sapiens
  misc_RNA (1)...(19): siRNA sense strand
gagcacacaugagaaugca

SEQ ID NO: 783993 - RNA, 19 nt, Homo sapiens
  misc_RNA (1)...(19): siRNA sense strand
gcagaaaacccaugcaugu

SEQ ID NO: 783994 - RNA, 19 nt, Homo sapiens
  misc_RNA (1)...(19): siRNA sense strand
ggcaaagccuucgagaauc

SEQ ID NO: 783995 - RNA, 19 nt, Homo sapiens
  misc_RNA (1)...(19): siRNA sense strand
gugggaaagccuacaguuu

SEQ ID NO: 783996 - RNA, 19 nt, Homo sapiens
  misc_RNA (1)...(19): siRNA sense strand
acagagaccguguaaggaa

SEQ ID NO: 783997 - RNA, 19 nt, Homo sapiens
  misc_RNA (1)...(19): siRNA sense strand
cuccuuggauuguuacauu

SEQ ID NO: 783998 - RNA, 19 nt, Homo sapiens
  misc_RNA (1)...(19): siRNA sense strand
cagcaucugugacauacgu

SEQ ID NO: 783999 - RNA, 19 nt, Homo sapiens
  misc_RNA (1)...(19): siRNA sense strand
guggagagaaacccuauga

SEQ ID NO: 784000 - RNA, 19 nt, Homo sapiens
  misc_RNA (1)...(19): siRNA sense strand
gaacucacacaggagagaa

SEQ ID NO: 784001 - RNA, 19 nt, Homo sapiens
  misc_RNA (1)...(19): siRNA sense strand
ccaugcauguaaaguaugu

SEQ ID NO: 784002 - RNA, 19 nt, Homo sapiens
  misc_RNA (1)...(19): siRNA sense strand
ggacaugugaauagucauc

SEQ ID NO: 784003 - RNA, 19 nt, Homo sapiens
  misc_RNA (1)...(19): siRNA sense strand
cagagaccguguaaggaau

SEQ ID NO: 784004 - RNA, 19 nt, Homo sapiens
  misc_RNA (1)...(19): siRNA sense strand
guguaagcauugugggaaa

SEQ ID NO: 784005 - RNA, 19 nt, Homo sapiens
  misc_RNA (1)...(19): siRNA sense strand
ggacgcauacuggagagaa

SEQ ID NO: 784006 - RNA, 19 nt, Homo sapiens
  misc_RNA (1)...(19): siRNA sense strand
gaacgcacaguggagagaa

SEQ ID NO: 784007 - RNA, 19 nt, Homo sapiens
  misc_RNA (1)...(19): siRNA sense strand
ggaaaaucauucagcuguu

SEQ ID NO: 784008 - RNA, 19 nt, Homo sapiens
  misc_RNA (1)...(19): siRNA sense strand
agaaaccguaugaauguaa

SEQ ID NO: 784009 - RNA, 19 nt, Homo sapiens
  misc_RNA (1)...(19): siRNA sense strand
ucgagaacaugucagaaca

SEQ ID NO: 784010 - RNA, 19 nt, Homo sapiens
  misc_RNA (1)...(19): siRNA sense strand
gcacguaagaacucacaca

SEQ ID NO: 784011 - RNA, 19 nt, Homo sapiens
  misc_RNA (1)...(19): siRNA sense strand
gaaaccguacgaauguaau

SEQ ID NO: 784012 - RNA, 19 nt, Homo sapiens
  misc_RNA (1)...(19): siRNA sense strand
gagccagacugcgaaccuu

SEQ ID NO: 784013 - RNA, 19 nt, Homo sapiens
  misc_RNA (1)...(19): siRNA sense strand
gaagaccuuuauguauuac

SEQ ID NO: 784014 - RNA, 19 nt, Homo sapiens
  misc_RNA (1)...(19): siRNA sense strand
aaccuugccuccuuggauu

SEQ ID NO: 784015 - RNA, 19 nt, Homo sapiens
  misc_RNA (1)...(19): siRNA sense strand
aacacacacuggagagaaa

SEQ ID NO: 784016 - RNA, 19 nt, Homo sapiens
  misc_RNA (1)...(19): siRNA sense strand
guaauugccaggacucaag

SEQ ID NO: 784017 - RNA, 19 nt, Homo sapiens
  misc_RNA (1)...(19): siRNA sense strand
agaaaccguacgaauguaa

SEQ ID NO: 784018 - RNA, 19 nt, Homo sapiens
  misc_RNA (1)...(19): siRNA sense strand
ggacgcacacuggagagaa

SEQ ID NO: 784019 - RNA, 19 nt, Homo sapiens
  misc_RNA (1)...(19): siRNA sense strand
guaugugggaagaccuuua

SEQ ID NO: 784020 - RNA, 19 nt, Homo sapiens
  misc_RNA (1)...(19): siRNA sense strand
ugggaaagccuacaguugu

SEQ ID NO: 784021 - RNA, 19 nt, Homo sapiens
  misc_RNA (1)...(19): siRNA sense strand
ucacaucucugcugaagaa

SEQ ID NO: 784022 - RNA, 19 nt, Homo sapiens
  misc_RNA (1)...(19): siRNA sense strand
gaucaaagacugcaugaag

SEQ ID NO: 784023 - RNA, 19 nt, Homo sapiens
  misc_RNA (1)...(19): siRNA sense strand
cuuaggagcugccuggauu

SEQ ID NO: 784024 - RNA, 19 nt, Homo sapiens
  misc_RNA (1)...(19): siRNA sense strand
caagaucgccguagacaag

SEQ ID NO: 784025 - RNA, 19 nt, Homo sapiens
  misc_RNA (1)...(19): siRNA sense strand
cugcagaucuuccggaaau

SEQ ID NO: 784026 - RNA, 19 nt, Homo sapiens
  misc_RNA (1)...(19): siRNA sense strand
agaggaacauguuugaguu

SEQ ID NO: 784027 - RNA, 19 nt, Homo sapiens
  misc_RNA (1)...(19): siRNA sense strand
gaagauggaguuccugaag

SEQ ID NO: 784028 - RNA, 19 nt, Homo sapiens
  misc_RNA (1)...(19): siRNA sense strand
ggagcugccuggauugaca

SEQ ID NO: 784029 - RNA, 19 nt, Homo sapiens
  misc_RNA (1)...(19): siRNA sense strand
cagaagauccgcaagacuu

SEQ ID NO: 784030 - RNA, 19 nt, Homo sapiens
  misc_RNA (1)...(19): siRNA sense strand
gcacccugaucaugaagga

SEQ ID NO: 784031 - RNA, 19 nt, Homo sapiens
  misc_RNA (1)...(19): siRNA sense strand
ccucccagaugaucaaaga

SEQ ID NO: 784032 - RNA, 19 nt, Homo sapiens
  misc_RNA (1)...(19): siRNA sense strand
ucaaagacugcaugaagaa

SEQ ID NO: 784033 - RNA, 19 nt, Homo sapiens
  misc_RNA (1)...(19): siRNA sense strand
gaccgacgcuucccugacu

SEQ ID NO: 784034 - RNA, 19 nt, Homo sapiens
  misc_RNA (1)...(19): siRNA sense strand
gcacaugggcuucaaugac

SEQ ID NO: 784035 - RNA, 19 nt, Homo sapiens
  misc_RNA (1)...(19): siRNA sense strand
ccaagaagauggaguuccu

SEQ ID NO: 784036 - RNA, 19 nt, Homo sapiens
  misc_RNA (1)...(19): siRNA sense strand
ccaaccugcucaucacaga

SEQ ID NO: 784037 - RNA, 19 nt, Homo sapiens
  misc_RNA (1)...(19): siRNA sense strand
gaaaagaacauggucauca

SEQ ID NO: 784038 - RNA, 19 nt, Homo sapiens
  misc_RNA (1)...(19): siRNA sense strand
gcagguggaguacauguca

SEQ ID NO: 784039 - RNA, 19 nt, Homo sapiens
  misc_RNA (1)...(19): siRNA sense strand
gaaugcacaugggcuucaa

SEQ ID NO: 784040 - RNA, 19 nt, Homo sapiens
  misc_RNA (1)...(19): siRNA sense strand
gcacggcacccugaucaug

SEQ ID NO: 784041 - RNA, 19 nt, Homo sapiens
  misc_RNA (1)...(19): siRNA sense strand
ucaagaugcagguggagua

SEQ ID NO: 784042 - RNA, 19 nt, Homo sapiens
  misc_RNA (1)...(19): siRNA sense strand
ggucuacacgggugauuau

SEQ ID NO: 784043 - RNA, 19 nt, Homo sapiens
  misc_RNA (1)...(19): siRNA sense strand
ccaucuugcuggaggacua

SEQ ID NO: 784044 - RNA, 19 nt, Homo sapiens
  misc_RNA (1)...(19): siRNA sense strand
ggagcuuccucacaucucu

SEQ ID NO: 784045 - RNA, 19 nt, Homo sapiens
  misc_RNA (1)...(19): siRNA sense strand
ugaaggugcccaucuacuu

SEQ ID NO: 784046 - RNA, 19 nt, Homo sapiens
  misc_RNA (1)...(19): siRNA sense strand
cuacacgggugauuauaac

SEQ ID NO: 784047 - RNA, 19 nt, Homo sapiens
  misc_RNA (1)...(19): siRNA sense strand
ccgagaaggccaaccacua

SEQ ID NO: 784048 - RNA, 19 nt, Homo sapiens
  misc_RNA (1)...(19): siRNA sense strand
gggcgaggccaacuucuuc

SEQ ID NO: 784049 - RNA, 19 nt, Homo sapiens
  misc_RNA (1)...(19): siRNA sense strand
caggaccgaugguuguguu

SEQ ID NO: 784050 - RNA, 19 nt, Homo sapiens
  misc_RNA (1)...(19): siRNA sense strand
uaaagugggcucagagucu

SEQ ID NO: 784051 - RNA, 19 nt, Homo sapiens
  misc_RNA (1)...(19): siRNA sense strand
ucuccuacaucacccagaa

SEQ ID NO: 784052 - RNA, 19 nt, Homo sapiens
  misc_RNA (1)...(19): siRNA sense strand
cagaggaacauguuugagu

SEQ ID NO: 784053 - RNA, 19 nt, Homo sapiens
  misc_RNA (1)...(19): siRNA sense strand
ggaggacuaccgcaagauc

SEQ ID NO: 784054 - RNA, 19 nt, Homo sapiens
  misc_RNA (1)...(19): siRNA sense strand
cagagcaagcccucaaaga

SEQ ID NO: 784055 - RNA, 19 nt, Homo sapiens
  misc_RNA (1)...(19): siRNA sense strand
uggaguuccugaagcagaa

SEQ ID NO: 784056 - RNA, 19 nt, Homo sapiens
  misc_RNA (1)...(19): siRNA sense strand
gugcagaggaacauguuug

SEQ ID NO: 784057 - RNA, 19 nt, Homo sapiens
  misc_RNA (1)...(19): siRNA sense strand
agaagauccgcaagacuuu

SEQ ID NO: 784058 - RNA, 19 nt, Homo sapiens
  misc_RNA (1)...(19): siRNA sense strand
cgagaaggccaaccacuac

SEQ ID NO: 784059 - RNA, 19 nt, Homo sapiens
  misc_RNA (1)...(19): siRNA sense strand
gggagcgcaugaaccugaa

SEQ ID NO: 784060 - RNA, 19 nt, Homo sapiens
  misc_RNA (1)...(19): siRNA sense strand
gcaagaucgccguagacaa

SEQ ID NO: 784061 - RNA, 19 nt, Homo sapiens
  misc_RNA (1)...(19): siRNA sense strand
aucaaagacugcaugaaga

SEQ ID NO: 784062 - RNA, 19 nt, Homo sapiens
  misc_RNA (1)...(19): siRNA sense strand
ccucacaucucugcugaag

SEQ ID NO: 784063 - RNA, 19 nt, Homo sapiens
  misc_RNA (1)...(19): siRNA sense strand
ucuacacgggugauuauaa

SEQ ID NO: 784064 - RNA, 19 nt, Homo sapiens
  misc_RNA (1)...(19): siRNA sense strand
ggcaggugcuggaggucaa

SEQ ID NO: 784065 - RNA, 19 nt, Homo sapiens
  misc_RNA (1)...(19): siRNA sense strand
cagacuuccuggacugugu

SEQ ID NO: 784066 - RNA, 19 nt, Homo sapiens
  misc_RNA (1)...(19): siRNA sense strand
gaaggccaaccacuacuac

SEQ ID NO: 784067 - RNA, 19 nt, Homo sapiens
  misc_RNA (1)...(19): siRNA sense strand
ggaaugcacaugggcuuca

SEQ ID NO: 784068 - RNA, 19 nt, Homo sapiens
  misc_RNA (1)...(19): siRNA sense strand
cacgggugauuauaacaug

SEQ ID NO: 784069 - RNA, 19 nt, Homo sapiens
  misc_RNA (1)...(19): siRNA sense strand
gaccgaugguuguguuugc

SEQ ID NO: 784070 - RNA, 19 nt, Homo sapiens
  misc_RNA (1)...(19): siRNA sense strand
ggaccgaugguuguguuug

SEQ ID NO: 784071 - RNA, 19 nt, Homo sapiens
  misc_RNA (1)...(19): siRNA sense strand
agauggaguuccugaagca

SEQ ID NO: 784072 - RNA, 19 nt, Homo sapiens
  misc_RNA (1)...(19): siRNA sense strand
ccugacuucuccuacauca

SEQ ID NO: 784073 - RNA, 19 nt, Homo sapiens
  misc_RNA (1)...(19): siRNA sense strand
agauuaaagugggcucaga

SEQ ID NO: 784074 - RNA, 19 nt, Homo sapiens
  misc_RNA (1)...(19): siRNA sense strand
gcugguguccucagagcaa

SEQ ID NO: 784075 - RNA, 19 nt, Homo sapiens
  misc_RNA (1)...(19): siRNA sense strand
ggacgccaagggcaucaug

SEQ ID NO: 784076 - RNA, 19 nt, Homo sapiens
  misc_RNA (1)...(19): siRNA sense strand
agcggaagcucgagaugga

SEQ ID NO: 784077 - RNA, 19 nt, Homo sapiens
  misc_RNA (1)...(19): siRNA sense strand
agaaggccaaccacuacua

SEQ ID NO: 784078 - RNA, 19 nt, Homo sapiens
  misc_RNA (1)...(19): siRNA sense strand
cugccuggauugacaagug

SEQ ID NO: 784079 - RNA, 19 nt, Homo sapiens
  misc_RNA (1)...(19): siRNA sense strand
gagcaccagcugcgcuuca

SEQ ID NO: 784080 - RNA, 19 nt, Homo sapiens
  misc_RNA (1)...(19): siRNA sense strand
agagcaagcccucaaagag

SEQ ID NO: 784081 - RNA, 19 nt, Homo sapiens
  misc_RNA (1)...(19): siRNA sense strand
agaugcagguggaguacau

SEQ ID NO: 784082 - RNA, 19 nt, Homo sapiens
  misc_RNA (1)...(19): siRNA sense strand
cuggaggacuaccgcaaga

SEQ ID NO: 784083 - RNA, 19 nt, Homo sapiens
  misc_RNA (1)...(19): siRNA sense strand
gcagaucuuccggaaaugg

SEQ ID NO: 784084 - RNA, 19 nt, Homo sapiens
  misc_RNA (1)...(19): siRNA sense strand
aaaagaacauggucaucau

SEQ ID NO: 784085 - RNA, 19 nt, Homo sapiens
  misc_RNA (1)...(19): siRNA sense strand
ccuggacugugugaucauu

SEQ ID NO: 784086 - RNA, 19 nt, Homo sapiens
  misc_RNA (1)...(19): siRNA sense strand
cacggcacccugaucauga

SEQ ID NO: 784087 - RNA, 19 nt, Homo sapiens
  misc_RNA (1)...(19): siRNA sense strand
gcgagauggugggcuacga

SEQ ID NO: 784088 - RNA, 19 nt, Homo sapiens
  misc_RNA (1)...(19): siRNA sense strand
ccacguacgccacgaccau

SEQ ID NO: 784089 - RNA, 19 nt, Homo sapiens
  misc_RNA (1)...(19): siRNA sense strand
uggacugugugaucauuag

SEQ ID NO: 784090 - RNA, 19 nt, Homo sapiens
  misc_RNA (1)...(19): siRNA sense strand
uggaguacaugucauucag

SEQ ID NO: 784091 - RNA, 19 nt, Homo sapiens
  misc_RNA (1)...(19): siRNA sense strand
gaucaaagacugcaugaag

SEQ ID NO: 784092 - RNA, 19 nt, Homo sapiens
  misc_RNA (1)...(19): siRNA sense strand
cuuaggagcugccuggauu

SEQ ID NO: 784093 - RNA, 19 nt, Homo sapiens
  misc_RNA (1)...(19): siRNA sense strand
caagaucgccguagacaag

SEQ ID NO: 784094 - RNA, 19 nt, Homo sapiens
  misc_RNA (1)...(19): siRNA sense strand
ggagcugccuggauugaca

SEQ ID NO: 784095 - RNA, 19 nt, Homo sapiens
  misc_RNA (1)...(19): siRNA sense strand
cagaagauccgcaagacuu

SEQ ID NO: 784096 - RNA, 19 nt, Homo sapiens
  misc_RNA (1)...(19): siRNA sense strand
ccucccagaugaucaaaga

SEQ ID NO: 784097 - RNA, 19 nt, Homo sapiens
  misc_RNA (1)...(19): siRNA sense strand
ucaaagacugcaugaagaa

SEQ ID NO: 784098 - RNA, 19 nt, Homo sapiens
  misc_RNA (1)...(19): siRNA sense strand
gaccgacgcuucccugacu

SEQ ID NO: 784099 - RNA, 19 nt, Homo sapiens
  misc_RNA (1)...(19): siRNA sense strand
gcacaugggcuucaaugac

SEQ ID NO: 784100 - RNA, 19 nt, Homo sapiens
  misc_RNA (1)...(19): siRNA sense strand
ccaaccugcucaucacaga

SEQ ID NO: 784101 - RNA, 19 nt, Homo sapiens
  misc_RNA (1)...(19): siRNA sense strand
gaaugcacaugggcuucaa

SEQ ID NO: 784102 - RNA, 19 nt, Homo sapiens
  misc_RNA (1)...(19): siRNA sense strand
ggucuacacgggugauuau

SEQ ID NO: 784103 - RNA, 19 nt, Homo sapiens
  misc_RNA (1)...(19): siRNA sense strand
ccaucuugcuggaggacua

SEQ ID NO: 784104 - RNA, 19 nt, Homo sapiens
  misc_RNA (1)...(19): siRNA sense strand
ugaaggugcccaucuacuu

SEQ ID NO: 784105 - RNA, 19 nt, Homo sapiens
  misc_RNA (1)...(19): siRNA sense strand
cuacacgggugauuauaac

SEQ ID NO: 784106 - RNA, 19 nt, Homo sapiens
  misc_RNA (1)...(19): siRNA sense strand
ccgagaaggccaaccacua

SEQ ID NO: 784107 - RNA, 19 nt, Homo sapiens
  misc_RNA (1)...(19): siRNA sense strand
gggcgaggccaacuucuuc

SEQ ID NO: 784108 - RNA, 19 nt, Homo sapiens
  misc_RNA (1)...(19): siRNA sense strand
uaaagugggcucagagucu

SEQ ID NO: 784109 - RNA, 19 nt, Homo sapiens
  misc_RNA (1)...(19): siRNA sense strand
ucuccuacaucacccagaa

SEQ ID NO: 784110 - RNA, 19 nt, Homo sapiens
  misc_RNA (1)...(19): siRNA sense strand
ggaggacuaccgcaagauc

SEQ ID NO: 784111 - RNA, 19 nt, Homo sapiens
  misc_RNA (1)...(19): siRNA sense strand
gugcagaggaacauguuug

SEQ ID NO: 784112 - RNA, 19 nt, Homo sapiens
  misc_RNA (1)...(19): siRNA sense strand
agaagauccgcaagacuuu

SEQ ID NO: 784113 - RNA, 19 nt, Homo sapiens
  misc_RNA (1)...(19): siRNA sense strand
cgagaaggccaaccacuac

SEQ ID NO: 784114 - RNA, 19 nt, Homo sapiens
  misc_RNA (1)...(19): siRNA sense strand
gggagcgcaugaaccugaa

SEQ ID NO: 784115 - RNA, 19 nt, Homo sapiens
  misc_RNA (1)...(19): siRNA sense strand
gcaagaucgccguagacaa

SEQ ID NO: 784116 - RNA, 19 nt, Homo sapiens
  misc_RNA (1)...(19): siRNA sense strand
aucaaagacugcaugaaga

SEQ ID NO: 784117 - RNA, 19 nt, Homo sapiens
  misc_RNA (1)...(19): siRNA sense strand
cagacuuccuggacugugu

SEQ ID NO: 784118 - RNA, 19 nt, Homo sapiens
  misc_RNA (1)...(19): siRNA sense strand
gaaggccaaccacuacuac

SEQ ID NO: 784119 - RNA, 19 nt, Homo sapiens
  misc_RNA (1)...(19): siRNA sense strand
ucuacacgggugauuauaa

SEQ ID NO: 784120 - RNA, 19 nt, Homo sapiens
  misc_RNA (1)...(19): siRNA sense strand
ggaaugcacaugggcuuca

SEQ ID NO: 784121 - RNA, 19 nt, Homo sapiens
  misc_RNA (1)...(19): siRNA sense strand
cacgggugauuauaacaug

SEQ ID NO: 784122 - RNA, 19 nt, Homo sapiens
  misc_RNA (1)...(19): siRNA sense strand
ccugacuucuccuacauca

SEQ ID NO: 784123 - RNA, 19 nt, Homo sapiens
  misc_RNA (1)...(19): siRNA sense strand
agauuaaagugggcucaga

SEQ ID NO: 784124 - RNA, 19 nt, Homo sapiens
  misc_RNA (1)...(19): siRNA sense strand
agaaggccaaccacuacua

SEQ ID NO: 784125 - RNA, 19 nt, Homo sapiens
  misc_RNA (1)...(19): siRNA sense strand
cuggaggacuaccgcaaga

SEQ ID NO: 784126 - RNA, 19 nt, Homo sapiens
  misc_RNA (1)...(19): siRNA sense strand
cugccuggauugacaagug

SEQ ID NO: 784127 - RNA, 19 nt, Homo sapiens
  misc_RNA (1)...(19): siRNA sense strand
ccuggacugugugaucauu

SEQ ID NO: 784128 - RNA, 19 nt, Homo sapiens
  misc_RNA (1)...(19): siRNA sense strand
gcgagauggugggcuacga

SEQ ID NO: 784129 - RNA, 19 nt, Homo sapiens
  misc_RNA (1)...(19): siRNA sense strand
ccacguacgccacgaccau

SEQ ID NO: 784130 - RNA, 19 nt, Homo sapiens
  misc_RNA (1)...(19): siRNA sense strand
uggacugugugaucauuag

SEQ ID NO: 784131 - RNA, 19 nt, Homo sapiens
  misc_RNA (1)...(19): siRNA sense strand
gaacauaugccacguuaaa

SEQ ID NO: 784132 - RNA, 19 nt, Homo sapiens
  misc_RNA (1)...(19): siRNA sense strand
gggaacauaugccacguua

SEQ ID NO: 784133 - RNA, 19 nt, Homo sapiens
  misc_RNA (1)...(19): siRNA sense strand
gcccaagucuuacauguug

SEQ ID NO: 784134 - RNA, 19 nt, Homo sapiens
  misc_RNA (1)...(19): siRNA sense strand
ggccguaccuuucucuuug

SEQ ID NO: 784135 - RNA, 19 nt, Homo sapiens
  misc_RNA (1)...(19): siRNA sense strand
agucuuacauguuggcuua

SEQ ID NO: 784136 - RNA, 19 nt, Homo sapiens
  misc_RNA (1)...(19): siRNA sense strand
gacagucugguauuuauuu

SEQ ID NO: 784137 - RNA, 19 nt, Homo sapiens
  misc_RNA (1)...(19): siRNA sense strand
uagaaucaauuuccaaguc

SEQ ID NO: 784138 - RNA, 19 nt, Homo sapiens
  misc_RNA (1)...(19): siRNA sense strand
gaaucaauuuccaagucaa

SEQ ID NO: 784139 - RNA, 19 nt, Homo sapiens
  misc_RNA (1)...(19): siRNA sense strand
ucaauguucuuggcccuaa

SEQ ID NO: 784140 - RNA, 19 nt, Homo sapiens
  misc_RNA (1)...(19): siRNA sense strand
agaaucaauuuccaaguca

SEQ ID NO: 784141 - RNA, 19 nt, Homo sapiens
  misc_RNA (1)...(19): siRNA sense strand
ggacagucugguauuuauu

SEQ ID NO: 784142 - RNA, 19 nt, Homo sapiens
  misc_RNA (1)...(19): siRNA sense strand
ggaguggacagucugguau

SEQ ID NO: 784143 - RNA, 19 nt, Homo sapiens
  misc_RNA (1)...(19): siRNA sense strand
uggacagucugguauuuau

SEQ ID NO: 784144 - RNA, 19 nt, Homo sapiens
  misc_RNA (1)...(19): siRNA sense strand
ccacugaggauuucauuac

SEQ ID NO: 784145 - RNA, 19 nt, Homo sapiens
  misc_RNA (1)...(19): siRNA sense strand
ugccaggacuugagaagga

SEQ ID NO: 784146 - RNA, 19 nt, Homo sapiens
  misc_RNA (1)...(19): siRNA sense strand
gcugaggaguggacagucu

SEQ ID NO: 784147 - RNA, 19 nt, Homo sapiens
  misc_RNA (1)...(19): siRNA sense strand
gccacaaggccacgccaua

SEQ ID NO: 784148 - RNA, 19 nt, Homo sapiens
  misc_RNA (1)...(19): siRNA sense strand
guggacagucugguauuua

SEQ ID NO: 784149 - RNA, 19 nt, Homo sapiens
  misc_RNA (1)...(19): siRNA sense strand
ucaucgugcccaagucuua

SEQ ID NO: 784150 - RNA, 19 nt, Homo sapiens
  misc_RNA (1)...(19): siRNA sense strand
acauaugccacguuaaaga

SEQ ID NO: 784151 - RNA, 19 nt, Homo sapiens
  misc_RNA (1)...(19): siRNA sense strand
gugcccaagucuuacaugu

SEQ ID NO: 784152 - RNA, 19 nt, Homo sapiens
  misc_RNA (1)...(19): siRNA sense strand
ccacaaggccacgccauag

SEQ ID NO: 784153 - RNA, 19 nt, Homo sapiens
  misc_RNA (1)...(19): siRNA sense strand
caauguucuuggcccuaaa

SEQ ID NO: 784154 - RNA, 19 nt, Homo sapiens
  misc_RNA (1)...(19): siRNA sense strand
acaaggccacgccauagaa

SEQ ID NO: 784155 - RNA, 19 nt, Homo sapiens
  misc_RNA (1)...(19): siRNA sense strand
gccauagaaucaauuucca

SEQ ID NO: 784156 - RNA, 19 nt, Homo sapiens
  misc_RNA (1)...(19): siRNA sense strand
caauuuccaagucaauguu

SEQ ID NO: 784157 - RNA, 19 nt, Homo sapiens
  misc_RNA (1)...(19): siRNA sense strand
caaguacccagcacagagu

SEQ ID NO: 784158 - RNA, 19 nt, Homo sapiens
  misc_RNA (1)...(19): siRNA sense strand
ccagguuacgguagucauu

SEQ ID NO: 784159 - RNA, 19 nt, Homo sapiens
  misc_RNA (1)...(19): siRNA sense strand
gaguggacagucugguauu

SEQ ID NO: 784160 - RNA, 19 nt, Homo sapiens
  misc_RNA (1)...(19): siRNA sense strand
aguggacagucugguauuu

SEQ ID NO: 784161 - RNA, 19 nt, Homo sapiens
  misc_RNA (1)...(19): siRNA sense strand
ggaacauaugccacguuaa

SEQ ID NO: 784162 - RNA, 19 nt, Homo sapiens
  misc_RNA (1)...(19): siRNA sense strand
cagguuacgguagucauuu

SEQ ID NO: 784163 - RNA, 19 nt, Homo sapiens
  misc_RNA (1)...(19): siRNA sense strand
caaggccacgccauagaau

SEQ ID NO: 784164 - RNA, 19 nt, Homo sapiens
  misc_RNA (1)...(19): siRNA sense strand
ucaauuuccaagucaaugu

SEQ ID NO: 784165 - RNA, 19 nt, Homo sapiens
  misc_RNA (1)...(19): siRNA sense strand
cacaaggccacgccauaga

SEQ ID NO: 784166 - RNA, 19 nt, Homo sapiens
  misc_RNA (1)...(19): siRNA sense strand
ccuuggaggccguaccuuu

SEQ ID NO: 784167 - RNA, 19 nt, Homo sapiens
  misc_RNA (1)...(19): siRNA sense strand
ccauagaaucaauuuccaa

SEQ ID NO: 784168 - RNA, 19 nt, Homo sapiens
  misc_RNA (1)...(19): siRNA sense strand
cauaugccacguuaaagag

SEQ ID NO: 784169 - RNA, 19 nt, Homo sapiens
  misc_RNA (1)...(19): siRNA sense strand
acagucugguauuuauuuc

SEQ ID NO: 784170 - RNA, 19 nt, Homo sapiens
  misc_RNA (1)...(19): siRNA sense strand
gagcuguacuccagacaca

SEQ ID NO: 784171 - RNA, 19 nt, Homo sapiens
  misc_RNA (1)...(19): siRNA sense strand
gacguccuguucaauguga

SEQ ID NO: 784172 - RNA, 19 nt, Homo sapiens
  misc_RNA (1)...(19): siRNA sense strand
uggcucaaguuccacauug

SEQ ID NO: 784173 - RNA, 19 nt, Homo sapiens
  misc_RNA (1)...(19): siRNA sense strand
gcaugcgggugcugaaggu

SEQ ID NO: 784174 - RNA, 19 nt, Homo sapiens
  misc_RNA (1)...(19): siRNA sense strand
gugcugaaggugcagaauu

SEQ ID NO: 784175 - RNA, 19 nt, Homo sapiens
  misc_RNA (1)...(19): siRNA sense strand
uaucccaacuggcucaagu

SEQ ID NO: 784176 - RNA, 19 nt, Homo sapiens
  misc_RNA (1)...(19): siRNA sense strand
ugcugaaggugcagaauuc

SEQ ID NO: 784177 - RNA, 19 nt, Homo sapiens
  misc_RNA (1)...(19): siRNA sense strand
ggacguccuguucaaugug

SEQ ID NO: 784178 - RNA, 19 nt, Homo sapiens
  misc_RNA (1)...(19): siRNA sense strand
ucaaguuccacauugguau

SEQ ID NO: 784179 - RNA, 19 nt, Homo sapiens
  misc_RNA (1)...(19): siRNA sense strand
gagcuguacuccagacaca

SEQ ID NO: 784180 - RNA, 19 nt, Homo sapiens
  misc_RNA (1)...(19): siRNA sense strand
gacguccuguucaauguga

SEQ ID NO: 784181 - RNA, 19 nt, Homo sapiens
  misc_RNA (1)...(19): siRNA sense strand
uggcucaaguuccacauug

SEQ ID NO: 784182 - RNA, 19 nt, Homo sapiens
  misc_RNA (1)...(19): siRNA sense strand
gcaugcgggugcugaaggu

SEQ ID NO: 784183 - RNA, 19 nt, Homo sapiens
  misc_RNA (1)...(19): siRNA sense strand
gugcugaaggugcagaauu

SEQ ID NO: 784184 - RNA, 19 nt, Homo sapiens
  misc_RNA (1)...(19): siRNA sense strand
uaucccaacuggcucaagu

SEQ ID NO: 784185 - RNA, 19 nt, Homo sapiens
  misc_RNA (1)...(19): siRNA sense strand
ugcugaaggugcagaauuc

SEQ ID NO: 784186 - RNA, 19 nt, Homo sapiens
  misc_RNA (1)...(19): siRNA sense strand
ggacguccuguucaaugug

SEQ ID NO: 784187 - RNA, 19 nt, Homo sapiens
  misc_RNA (1)...(19): siRNA sense strand
ucaaguuccacauugguau

SEQ ID NO: 784188 - RNA, 19 nt, Homo sapiens
  misc_RNA (1)...(19): siRNA sense strand
gaaccagucuucaacaaau

SEQ ID NO: 784189 - RNA, 19 nt, Homo sapiens
  misc_RNA (1)...(19): siRNA sense strand
aaauagaguugcaaucuug

SEQ ID NO: 784190 - RNA, 19 nt, Homo sapiens
  misc_RNA (1)...(19): siRNA sense strand
uggcagaacuggacaaaga

SEQ ID NO: 784191 - RNA, 19 nt, Homo sapiens
  misc_RNA (1)...(19): siRNA sense strand
gaaggcagcuuugcagcau

SEQ ID NO: 784192 - RNA, 19 nt, Homo sapiens
  misc_RNA (1)...(19): siRNA sense strand
gaaaacuacuuaugcagaa

SEQ ID NO: 784193 - RNA, 19 nt, Homo sapiens
  misc_RNA (1)...(19): siRNA sense strand
ggacaaagagaaaagaaaa

SEQ ID NO: 784194 - RNA, 19 nt, Homo sapiens
  misc_RNA (1)...(19): siRNA sense strand
gaaccuuauucuuccuguu

SEQ ID NO: 784195 - RNA, 19 nt, Homo sapiens
  misc_RNA (1)...(19): siRNA sense strand
cagaaccagucuucaacaa

SEQ ID NO: 784196 - RNA, 19 nt, Homo sapiens
  misc_RNA (1)...(19): siRNA sense strand
gauacuucaucacucaaga

SEQ ID NO: 784197 - RNA, 19 nt, Homo sapiens
  misc_RNA (1)...(19): siRNA sense strand
acauucaucuggauacuuc

SEQ ID NO: 784198 - RNA, 19 nt, Homo sapiens
  misc_RNA (1)...(19): siRNA sense strand
acucaagacucugcauuug

SEQ ID NO: 784199 - RNA, 19 nt, Homo sapiens
  misc_RNA (1)...(19): siRNA sense strand
cuucaucacucaagacucu

SEQ ID NO: 784200 - RNA, 19 nt, Homo sapiens
  misc_RNA (1)...(19): siRNA sense strand
gcagaaccagucuucaaca

SEQ ID NO: 784201 - RNA, 19 nt, Homo sapiens
  misc_RNA (1)...(19): siRNA sense strand
gcacauucaucuggauacu

SEQ ID NO: 784202 - RNA, 19 nt, Homo sapiens
  misc_RNA (1)...(19): siRNA sense strand
gcagaacuggacaaagaga

SEQ ID NO: 784203 - RNA, 19 nt, Homo sapiens
  misc_RNA (1)...(19): siRNA sense strand
gcauuugggaaccuuauuc

SEQ ID NO: 784204 - RNA, 19 nt, Homo sapiens
  misc_RNA (1)...(19): siRNA sense strand
agcaaacucuucaggacaa

SEQ ID NO: 784205 - RNA, 19 nt, Homo sapiens
  misc_RNA (1)...(19): siRNA sense strand
cuggauacuucaucacuca

SEQ ID NO: 784206 - RNA, 19 nt, Homo sapiens
  misc_RNA (1)...(19): siRNA sense strand
agaaccagucuucaacaaa

SEQ ID NO: 784207 - RNA, 19 nt, Homo sapiens
  misc_RNA (1)...(19): siRNA sense strand
aaccuuauucuuccuguuu

SEQ ID NO: 784208 - RNA, 19 nt, Homo sapiens
  misc_RNA (1)...(19): siRNA sense strand
agaacuggacaaagagaaa

SEQ ID NO: 784209 - RNA, 19 nt, Homo sapiens
  misc_RNA (1)...(19): siRNA sense strand
ggagcuagcauugcacucu

SEQ ID NO: 784210 - RNA, 19 nt, Homo sapiens
  misc_RNA (1)...(19): siRNA sense strand
ucaucuggauacuucauca

SEQ ID NO: 784211 - RNA, 19 nt, Homo sapiens
  misc_RNA (1)...(19): siRNA sense strand
ucacucaagacucugcauu

SEQ ID NO: 784212 - RNA, 19 nt, Homo sapiens
  misc_RNA (1)...(19): siRNA sense strand
gcaaacucuucaggacaag

SEQ ID NO: 784213 - RNA, 19 nt, Homo sapiens
  misc_RNA (1)...(19): siRNA sense strand
cacucaagacucugcauuu

SEQ ID NO: 784214 - RNA, 19 nt, Homo sapiens
  misc_RNA (1)...(19): siRNA sense strand
cauccuggagcuagcauug

SEQ ID NO: 784215 - RNA, 19 nt, Homo sapiens
  misc_RNA (1)...(19): siRNA sense strand
gcauauugcagcccaacag

SEQ ID NO: 784216 - RNA, 19 nt, Homo sapiens
  misc_RNA (1)...(19): siRNA sense strand
gaacuggacaaagagaaaa

SEQ ID NO: 784217 - RNA, 19 nt, Homo sapiens
  misc_RNA (1)...(19): siRNA sense strand
caacagaaggcagcuuugc

SEQ ID NO: 784218 - RNA, 19 nt, Homo sapiens
  misc_RNA (1)...(19): siRNA sense strand
cccaacagaaggcagcuuu

SEQ ID NO: 784219 - RNA, 19 nt, Homo sapiens
  misc_RNA (1)...(19): siRNA sense strand
cauauugcagcccaacaga

SEQ ID NO: 784220 - RNA, 19 nt, Homo sapiens
  misc_RNA (1)...(19): siRNA sense strand
uuugggaaccuuauucuuc

SEQ ID NO: 784221 - RNA, 19 nt, Homo sapiens
  misc_RNA (1)...(19): siRNA sense strand
gggcagcucguuucucaaa

SEQ ID NO: 784222 - RNA, 19 nt, Homo sapiens
  misc_RNA (1)...(19): siRNA sense strand
ggaauaccagccugaguga

SEQ ID NO: 784223 - RNA, 19 nt, Homo sapiens
  misc_RNA (1)...(19): siRNA sense strand
gcagcaguaugccuauaag

SEQ ID NO: 784224 - RNA, 19 nt, Homo sapiens
  misc_RNA (1)...(19): siRNA sense strand
aaagacaccugugcaccuu

SEQ ID NO: 784225 - RNA, 19 nt, Homo sapiens
  misc_RNA (1)...(19): siRNA sense strand
cagcagcaguaugccuaua

SEQ ID NO: 784226 - RNA, 19 nt, Homo sapiens
  misc_RNA (1)...(19): siRNA sense strand
ccgggcagcucguuucuca

SEQ ID NO: 784227 - RNA, 19 nt, Homo sapiens
  misc_RNA (1)...(19): siRNA sense strand
gcugaaccgucaccucaag

SEQ ID NO: 784228 - RNA, 19 nt, Homo sapiens
  misc_RNA (1)...(19): siRNA sense strand
ccaaagucuuccuggugaa

SEQ ID NO: 784229 - RNA, 19 nt, Homo sapiens
  misc_RNA (1)...(19): siRNA sense strand
gaugagcucccggaugaga

SEQ ID NO: 784230 - RNA, 19 nt, Homo sapiens
  misc_RNA (1)...(19): siRNA sense strand
aggcauucgucccuacaaa

SEQ ID NO: 784231 - RNA, 19 nt, Homo sapiens
  misc_RNA (1)...(19): siRNA sense strand
gugaggaggaggagaggaa

SEQ ID NO: 784232 - RNA, 19 nt, Homo sapiens
  misc_RNA (1)...(19): siRNA sense strand
gcacguccgcacacacaca

SEQ ID NO: 784233 - RNA, 19 nt, Homo sapiens
  misc_RNA (1)...(19): siRNA sense strand
ggagucccaccugaagaaa

SEQ ID NO: 784234 - RNA, 19 nt, Homo sapiens
  misc_RNA (1)...(19): siRNA sense strand
ggaggaggagaggaaguga

SEQ ID NO: 784235 - RNA, 19 nt, Homo sapiens
  misc_RNA (1)...(19): siRNA sense strand
ggcauucgucccuacaaau

SEQ ID NO: 784236 - RNA, 19 nt, Homo sapiens
  misc_RNA (1)...(19): siRNA sense strand
gcagcagcaguaugccuau

SEQ ID NO: 784237 - RNA, 19 nt, Homo sapiens
  misc_RNA (1)...(19): siRNA sense strand
gaaagacucugaccucugu

SEQ ID NO: 784238 - RNA, 19 nt, Homo sapiens
  misc_RNA (1)...(19): siRNA sense strand
gagaacagcaucuuugaua

SEQ ID NO: 784239 - RNA, 19 nt, Homo sapiens
  misc_RNA (1)...(19): siRNA sense strand
acaaagcacuucagaauug

SEQ ID NO: 784240 - RNA, 19 nt, Homo sapiens
  misc_RNA (1)...(19): siRNA sense strand
ggagaaaccuucagaacag

SEQ ID NO: 784241 - RNA, 19 nt, Homo sapiens
  misc_RNA (1)...(19): siRNA sense strand
ggaauucuuugaacccuuu

SEQ ID NO: 784242 - RNA, 19 nt, Homo sapiens
  misc_RNA (1)...(19): siRNA sense strand
ugaaagaucugccuaccaa

SEQ ID NO: 784243 - RNA, 19 nt, Homo sapiens
  misc_RNA (1)...(19): siRNA sense strand
uaagaagagugugggauua

SEQ ID NO: 784244 - RNA, 19 nt, Homo sapiens
  misc_RNA (1)...(19): siRNA sense strand
ggacuucaccuucuucaaa

SEQ ID NO: 784245 - RNA, 19 nt, Homo sapiens
  misc_RNA (1)...(19): siRNA sense strand
gaagaugcggcuccuguua

SEQ ID NO: 784246 - RNA, 19 nt, Homo sapiens
  misc_RNA (1)...(19): siRNA sense strand
ggaagcaucagcaucauaa

SEQ ID NO: 784247 - RNA, 19 nt, Homo sapiens
  misc_RNA (1)...(19): siRNA sense strand
gguguuggcuguucacauu

SEQ ID NO: 784248 - RNA, 19 nt, Homo sapiens
  misc_RNA (1)...(19): siRNA sense strand
gacaaggagucaucugaaa

SEQ ID NO: 784249 - RNA, 19 nt, Homo sapiens
  misc_RNA (1)...(19): siRNA sense strand
gaggauguauuugaacuuu

SEQ ID NO: 784250 - RNA, 19 nt, Homo sapiens
  misc_RNA (1)...(19): siRNA sense strand
gaaagaagcaaagguguau

SEQ ID NO: 784251 - RNA, 19 nt, Homo sapiens
  misc_RNA (1)...(19): siRNA sense strand
ggaugacgaugaaccagaa

SEQ ID NO: 784252 - RNA, 19 nt, Homo sapiens
  misc_RNA (1)...(19): siRNA sense strand
gaacagcaucuuugauaau

SEQ ID NO: 784253 - RNA, 19 nt, Homo sapiens
  misc_RNA (1)...(19): siRNA sense strand
agagacagguguuguuuga

SEQ ID NO: 784254 - RNA, 19 nt, Homo sapiens
  misc_RNA (1)...(19): siRNA sense strand
ggaagagacugguggaaac

SEQ ID NO: 784255 - RNA, 19 nt, Homo sapiens
  misc_RNA (1)...(19): siRNA sense strand
gaaaaguccuggccuguau

SEQ ID NO: 784256 - RNA, 19 nt, Homo sapiens
  misc_RNA (1)...(19): siRNA sense strand
gauaagaccaagaagcaaa

SEQ ID NO: 784257 - RNA, 19 nt, Homo sapiens
  misc_RNA (1)...(19): siRNA sense strand
ccauguuucugaaggguua

SEQ ID NO: 784258 - RNA, 19 nt, Homo sapiens
  misc_RNA (1)...(19): siRNA sense strand
gagcccaucuccuuuauac

SEQ ID NO: 784259 - RNA, 19 nt, Homo sapiens
  misc_RNA (1)...(19): siRNA sense strand
gaaaucagagucuucagau

SEQ ID NO: 784260 - RNA, 19 nt, Homo sapiens
  misc_RNA (1)...(19): siRNA sense strand
cuacaaagcacuucagaau

SEQ ID NO: 784261 - RNA, 19 nt, Homo sapiens
  misc_RNA (1)...(19): siRNA sense strand
acacgagccugcugagauu

SEQ ID NO: 784262 - RNA, 19 nt, Homo sapiens
  misc_RNA (1)...(19): siRNA sense strand
ggaguugccauuagcagua

SEQ ID NO: 784263 - RNA, 19 nt, Homo sapiens
  misc_RNA (1)...(19): siRNA sense strand
gcaucagcaucauaagaaa

SEQ ID NO: 784264 - RNA, 19 nt, Homo sapiens
  misc_RNA (1)...(19): siRNA sense strand
aagcaaagguguauucuac

SEQ ID NO: 784265 - RNA, 19 nt, Homo sapiens
  misc_RNA (1)...(19): siRNA sense strand
gcaggaagcagagaacuga

SEQ ID NO: 784266 - RNA, 19 nt, Homo sapiens
  misc_RNA (1)...(19): siRNA sense strand
agaacagcaucuuugauaa

SEQ ID NO: 784267 - RNA, 19 nt, Homo sapiens
  misc_RNA (1)...(19): siRNA sense strand
gaaccgaaucaaggaaaua

SEQ ID NO: 784268 - RNA, 19 nt, Homo sapiens
  misc_RNA (1)...(19): siRNA sense strand
ccacagagaagaagcauuc

SEQ ID NO: 784269 - RNA, 19 nt, Homo sapiens
  misc_RNA (1)...(19): siRNA sense strand
gaacuuucugguuuccuua

SEQ ID NO: 784270 - RNA, 19 nt, Homo sapiens
  misc_RNA (1)...(19): siRNA sense strand
ggccauguuugcacucuuu

SEQ ID NO: 784271 - RNA, 19 nt, Homo sapiens
  misc_RNA (1)...(19): siRNA sense strand
ggauggcauuuguugcuuu

SEQ ID NO: 784272 - RNA, 19 nt, Homo sapiens
  misc_RNA (1)...(19): siRNA sense strand
cugcugagauuccacauga

SEQ ID NO: 784273 - RNA, 19 nt, Homo sapiens
  misc_RNA (1)...(19): siRNA sense strand
agacagguguuguuugaug

SEQ ID NO: 784274 - RNA, 19 nt, Homo sapiens
  misc_RNA (1)...(19): siRNA sense strand
gaaaccuucagaacagaua

SEQ ID NO: 784275 - RNA, 19 nt, Homo sapiens
  misc_RNA (1)...(19): siRNA sense strand
gaagcaaagguguauucua

SEQ ID NO: 784276 - RNA, 19 nt, Homo sapiens
  misc_RNA (1)...(19): siRNA sense strand
ggaaauaaagaaagaagca

SEQ ID NO: 784277 - RNA, 19 nt, Homo sapiens
  misc_RNA (1)...(19): siRNA sense strand
agaagaggaugaccaggaa

SEQ ID NO: 784278 - RNA, 19 nt, Homo sapiens
  misc_RNA (1)...(19): siRNA sense strand
ccaaaggacagguggaauu

SEQ ID NO: 784279 - RNA, 19 nt, Homo sapiens
  misc_RNA (1)...(19): siRNA sense strand
gaggaugaccaggaaauaa

SEQ ID NO: 784280 - RNA, 19 nt, Homo sapiens
  misc_RNA (1)...(19): siRNA sense strand
gagguccuauguacagauu

SEQ ID NO: 784281 - RNA, 19 nt, Homo sapiens
  misc_RNA (1)...(19): siRNA sense strand
ggaaccgaaucaaggaaau

SEQ ID NO: 784282 - RNA, 19 nt, Homo sapiens
  misc_RNA (1)...(19): siRNA sense strand
ggauguauuugaacuuucu

SEQ ID NO: 784283 - RNA, 19 nt, Homo sapiens
  misc_RNA (1)...(19): siRNA sense strand
gguguuguuugaugauauu

SEQ ID NO: 784284 - RNA, 19 nt, Homo sapiens
  misc_RNA (1)...(19): siRNA sense strand
gacagguguuguuugauga

SEQ ID NO: 784285 - RNA, 19 nt, Homo sapiens
  misc_RNA (1)...(19): siRNA sense strand
gcacuuugucugcuguuaa

SEQ ID NO: 784286 - RNA, 19 nt, Homo sapiens
  misc_RNA (1)...(19): siRNA sense strand
gcauuaacccuaagaagca

SEQ ID NO: 784287 - RNA, 19 nt, Homo sapiens
  misc_RNA (1)...(19): siRNA sense strand
gagaaaccuucagaacaga

SEQ ID NO: 784288 - RNA, 19 nt, Homo sapiens
  misc_RNA (1)...(19): siRNA sense strand
gaacugggaguacaagucu

SEQ ID NO: 784289 - RNA, 19 nt, Homo sapiens
  misc_RNA (1)...(19): siRNA sense strand
gaagagugugggauuaaug

SEQ ID NO: 784290 - RNA, 19 nt, Homo sapiens
  misc_RNA (1)...(19): siRNA sense strand
ggauauagcaagauacaag

SEQ ID NO: 784291 - RNA, 19 nt, Homo sapiens
  misc_RNA (1)...(19): siRNA sense strand
gauccaagcccuguuugaa

SEQ ID NO: 784292 - RNA, 19 nt, Homo sapiens
  misc_RNA (1)...(19): siRNA sense strand
aaaggaagcaucagcauca

SEQ ID NO: 784293 - RNA, 19 nt, Homo sapiens
  misc_RNA (1)...(19): siRNA sense strand
acaugaaagugaguguuua

SEQ ID NO: 784294 - RNA, 19 nt, Homo sapiens
  misc_RNA (1)...(19): siRNA sense strand
gaagcaguaugcacaucug

SEQ ID NO: 784295 - RNA, 19 nt, Homo sapiens
  misc_RNA (1)...(19): siRNA sense strand
gggugugccuucuggcuuu

SEQ ID NO: 784296 - RNA, 19 nt, Homo sapiens
  misc_RNA (1)...(19): siRNA sense strand
ugccagagccaguuuagua

SEQ ID NO: 784297 - RNA, 19 nt, Homo sapiens
  misc_RNA (1)...(19): siRNA sense strand
gugaaggacuuggaagaug

SEQ ID NO: 784298 - RNA, 19 nt, Homo sapiens
  misc_RNA (1)...(19): siRNA sense strand
caucugagcccaucuccuu

SEQ ID NO: 784299 - RNA, 19 nt, Homo sapiens
  misc_RNA (1)...(19): siRNA sense strand
gggagaaaccuucagaaca

SEQ ID NO: 784300 - RNA, 19 nt, Homo sapiens
  misc_RNA (1)...(19): siRNA sense strand
aaucagagucuucagauga

SEQ ID NO: 784301 - RNA, 19 nt, Homo sapiens
  misc_RNA (1)...(19): siRNA sense strand
ccuccagccuccugucuuu

SEQ ID NO: 784302 - RNA, 19 nt, Homo sapiens
  misc_RNA (1)...(19): siRNA sense strand
gcacggaagaggccauguu

SEQ ID NO: 784303 - RNA, 19 nt, Homo sapiens
  misc_RNA (1)...(19): siRNA sense strand
ggucaaagaguggcagaaa

SEQ ID NO: 784304 - RNA, 19 nt, Homo sapiens
  misc_RNA (1)...(19): siRNA sense strand
aaacugaaccucccucauc

SEQ ID NO: 784305 - RNA, 19 nt, Homo sapiens
  misc_RNA (1)...(19): siRNA sense strand
gaguugccauuagcaguaa

SEQ ID NO: 784306 - RNA, 19 nt, Homo sapiens
  misc_RNA (1)...(19): siRNA sense strand
agaaggccaucucauuguu

SEQ ID NO: 784307 - RNA, 19 nt, Homo sapiens
  misc_RNA (1)...(19): siRNA sense strand
gcugagaaacugaggaaga

SEQ ID NO: 784308 - RNA, 19 nt, Homo sapiens
  misc_RNA (1)...(19): siRNA sense strand
gcugagauuccacaugaaa

SEQ ID NO: 784309 - RNA, 19 nt, Homo sapiens
  misc_RNA (1)...(19): siRNA sense strand
ucgagcuguucacauauua

SEQ ID NO: 784310 - RNA, 19 nt, Homo sapiens
  misc_RNA (1)...(19): siRNA sense strand
cagcaucuuugauaaugga

SEQ ID NO: 784311 - RNA, 19 nt, Homo sapiens
  misc_RNA (1)...(19): siRNA sense strand
gcaaaccgaggaagacugu

SEQ ID NO: 784312 - RNA, 19 nt, Homo sapiens
  misc_RNA (1)...(19): siRNA sense strand
cagaugaggaugacgauga

SEQ ID NO: 784313 - RNA, 19 nt, Homo sapiens
  misc_RNA (1)...(19): siRNA sense strand
cuucagaacagauaagaaa

SEQ ID NO: 784314 - RNA, 19 nt, Homo sapiens
  misc_RNA (1)...(19): siRNA sense strand
ccgaugagaugcaggagau

SEQ ID NO: 784315 - RNA, 19 nt, Homo sapiens
  misc_RNA (1)...(19): siRNA sense strand
gguccuauguacagauuca

SEQ ID NO: 784316 - RNA, 19 nt, Homo sapiens
  misc_RNA (1)...(19): siRNA sense strand
ucacaggcuuuaaaguugu

SEQ ID NO: 784317 - RNA, 19 nt, Homo sapiens
  misc_RNA (1)...(19): siRNA sense strand
gcuucaugcucuuccagua

SEQ ID NO: 784318 - RNA, 19 nt, Homo sapiens
  misc_RNA (1)...(19): siRNA sense strand
uccuguagccgccuaauua

SEQ ID NO: 784319 - RNA, 19 nt, Homo sapiens
  misc_RNA (1)...(19): siRNA sense strand
gcacuuggcauggcaggaa

SEQ ID NO: 784320 - RNA, 19 nt, Homo sapiens
  misc_RNA (1)...(19): siRNA sense strand
uaacgucccugagccaaca

SEQ ID NO: 784321 - RNA, 19 nt, Homo sapiens
  misc_RNA (1)...(19): siRNA sense strand
ccuccacucuggucaaaga

SEQ ID NO: 784322 - RNA, 19 nt, Homo sapiens
  misc_RNA (1)...(19): siRNA sense strand
gagaagaagcuggccauuc

SEQ ID NO: 784323 - RNA, 19 nt, Homo sapiens
  misc_RNA (1)...(19): siRNA sense strand
caagcagguugaacgcuau

SEQ ID NO: 784324 - RNA, 19 nt, Homo sapiens
  misc_RNA (1)...(19): siRNA sense strand
gauauagcaagauacaaga

SEQ ID NO: 784325 - RNA, 19 nt, Homo sapiens
  misc_RNA (1)...(19): siRNA sense strand
gaggggauauagcaagaua

SEQ ID NO: 784326 - RNA, 19 nt, Homo sapiens
  misc_RNA (1)...(19): siRNA sense strand
gagccaguuuaguaccuuu

SEQ ID NO: 784327 - RNA, 19 nt, Homo sapiens
  misc_RNA (1)...(19): siRNA sense strand
agaaagaagcaaaggugua

SEQ ID NO: 784328 - RNA, 19 nt, Homo sapiens
  misc_RNA (1)...(19): siRNA sense strand
ggaaacuguccagagguua

SEQ ID NO: 784329 - RNA, 19 nt, Homo sapiens
  misc_RNA (1)...(19): siRNA sense strand
gagccuugguuguuugcaa

SEQ ID NO: 784330 - RNA, 19 nt, Homo sapiens
  misc_RNA (1)...(19): siRNA sense strand
gccaugaucuucaguucca

SEQ ID NO: 784331 - RNA, 19 nt, Homo sapiens
  misc_RNA (1)...(19): siRNA sense strand
ggacagguggaauucuuug

SEQ ID NO: 784332 - RNA, 19 nt, Homo sapiens
  misc_RNA (1)...(19): siRNA sense strand
guugaacgcuauuuuacua

SEQ ID NO: 784333 - RNA, 19 nt, Homo sapiens
  misc_RNA (1)...(19): siRNA sense strand
gaaacuguccagagguuag

SEQ ID NO: 784334 - RNA, 19 nt, Homo sapiens
  misc_RNA (1)...(19): siRNA sense strand
ucucacaggcuuuaaaguu

SEQ ID NO: 784335 - RNA, 19 nt, Homo sapiens
  misc_RNA (1)...(19): siRNA sense strand
caaggagucaucugaaauc

SEQ ID NO: 784336 - RNA, 19 nt, Homo sapiens
  misc_RNA (1)...(19): siRNA sense strand
aguaugagauugcaaaggu

SEQ ID NO: 784337 - RNA, 19 nt, Homo sapiens
  misc_RNA (1)...(19): siRNA sense strand
gcacauaacuuaacaauug

SEQ ID NO: 784338 - RNA, 19 nt, Homo sapiens
  misc_RNA (1)...(19): siRNA sense strand
gaagaaagcuuaaggacua

SEQ ID NO: 784339 - RNA, 19 nt, Homo sapiens
  misc_RNA (1)...(19): siRNA sense strand
gaaagaaguuggaaucaua

SEQ ID NO: 784340 - RNA, 19 nt, Homo sapiens
  misc_RNA (1)...(19): siRNA sense strand
gcaagagaaugacaaguua

SEQ ID NO: 784341 - RNA, 19 nt, Homo sapiens
  misc_RNA (1)...(19): siRNA sense strand
uaacugaacugcuuaauga

SEQ ID NO: 784342 - RNA, 19 nt, Homo sapiens
  misc_RNA (1)...(19): siRNA sense strand
gcaauuagaagaugcauua

SEQ ID NO: 784343 - RNA, 19 nt, Homo sapiens
  misc_RNA (1)...(19): siRNA sense strand
ggaagaagaucacugaguu

SEQ ID NO: 784344 - RNA, 19 nt, Homo sapiens
  misc_RNA (1)...(19): siRNA sense strand
gaagaaaggucacagagau

SEQ ID NO: 784345 - RNA, 19 nt, Homo sapiens
  misc_RNA (1)...(19): siRNA sense strand
ugaagaagaugaugaguaa

SEQ ID NO: 784346 - RNA, 19 nt, Homo sapiens
  misc_RNA (1)...(19): siRNA sense strand
gcauacagcugcuuuguga

SEQ ID NO: 784347 - RNA, 19 nt, Homo sapiens
  misc_RNA (1)...(19): siRNA sense strand
gcagagcauuugcagauua

SEQ ID NO: 784348 - RNA, 19 nt, Homo sapiens
  misc_RNA (1)...(19): siRNA sense strand
gcaaagguguuacgagaaa

SEQ ID NO: 784349 - RNA, 19 nt, Homo sapiens
  misc_RNA (1)...(19): siRNA sense strand
caaagcagaucuauguuaa

SEQ ID NO: 784350 - RNA, 19 nt, Homo sapiens
  misc_RNA (1)...(19): siRNA sense strand
ggagagaacuuuggaagaa

SEQ ID NO: 784351 - RNA, 19 nt, Homo sapiens
  misc_RNA (1)...(19): siRNA sense strand
gaaagagcauuaagcagaa

SEQ ID NO: 784352 - RNA, 19 nt, Homo sapiens
  misc_RNA (1)...(19): siRNA sense strand
caaaugaagugaaugagaa

SEQ ID NO: 784353 - RNA, 19 nt, Homo sapiens
  misc_RNA (1)...(19): siRNA sense strand
ggagcaagcacauaacuua

SEQ ID NO: 784354 - RNA, 19 nt, Homo sapiens
  misc_RNA (1)...(19): siRNA sense strand
gcucugaaauccaauauug

SEQ ID NO: 784355 - RNA, 19 nt, Homo sapiens
  misc_RNA (1)...(19): siRNA sense strand
gcaaagcagaucuauguua

SEQ ID NO: 784356 - RNA, 19 nt, Homo sapiens
  misc_RNA (1)...(19): siRNA sense strand
aaacagaacugcccucaug

SEQ ID NO: 784357 - RNA, 19 nt, Homo sapiens
  misc_RNA (1)...(19): siRNA sense strand
uaagauaacugaacugcuu

SEQ ID NO: 784358 - RNA, 19 nt, Homo sapiens
  misc_RNA (1)...(19): siRNA sense strand
gaagaucacugaguuaaca

SEQ ID NO: 784359 - RNA, 19 nt, Homo sapiens
  misc_RNA (1)...(19): siRNA sense strand
gaacuuaguaugugugaaa

SEQ ID NO: 784360 - RNA, 19 nt, Homo sapiens
  misc_RNA (1)...(19): siRNA sense strand
gaaaggugcaggauaguaa

SEQ ID NO: 784361 - RNA, 19 nt, Homo sapiens
  misc_RNA (1)...(19): siRNA sense strand
ggaaguaugugaggaaguu

SEQ ID NO: 784362 - RNA, 19 nt, Homo sapiens
  misc_RNA (1)...(19): siRNA sense strand
gcaguagaagucuuaauua

SEQ ID NO: 784363 - RNA, 19 nt, Homo sapiens
  misc_RNA (1)...(19): siRNA sense strand
gagaaggaauuacugcauu

SEQ ID NO: 784364 - RNA, 19 nt, Homo sapiens
  misc_RNA (1)...(19): siRNA sense strand
aaacagcugucugaacuua

SEQ ID NO: 784365 - RNA, 19 nt, Homo sapiens
  misc_RNA (1)...(19): siRNA sense strand
guaguugacuugucuaaau

SEQ ID NO: 784366 - RNA, 19 nt, Homo sapiens
  misc_RNA (1)...(19): siRNA sense strand
uaacaacaaucacagaguu

SEQ ID NO: 784367 - RNA, 19 nt, Homo sapiens
  misc_RNA (1)...(19): siRNA sense strand
agagagaacuugagaaugu

SEQ ID NO: 784368 - RNA, 19 nt, Homo sapiens
  misc_RNA (1)...(19): siRNA sense strand
acaagaaucugcuaaacaa

SEQ ID NO: 784369 - RNA, 19 nt, Homo sapiens
  misc_RNA (1)...(19): siRNA sense strand
gaauaugguugcagagaug

SEQ ID NO: 784370 - RNA, 19 nt, Homo sapiens
  misc_RNA (1)...(19): siRNA sense strand
ugaccaaacugcaucaauu

SEQ ID NO: 784371 - RNA, 19 nt, Homo sapiens
  misc_RNA (1)...(19): siRNA sense strand
gauaauagcucugaaaucc

SEQ ID NO: 784372 - RNA, 19 nt, Homo sapiens
  misc_RNA (1)...(19): siRNA sense strand
gaaguuggcccuuuccauu

SEQ ID NO: 784373 - RNA, 19 nt, Homo sapiens
  misc_RNA (1)...(19): siRNA sense strand
gaagaagaucacugaguua

SEQ ID NO: 784374 - RNA, 19 nt, Homo sapiens
  misc_RNA (1)...(19): siRNA sense strand
cagaaagauuugagagaua

SEQ ID NO: 784375 - RNA, 19 nt, Homo sapiens
  misc_RNA (1)...(19): siRNA sense strand
gauguaagccgccuagaaa

SEQ ID NO: 784376 - RNA, 19 nt, Homo sapiens
  misc_RNA (1)...(19): siRNA sense strand
uaaauaugaugaccgauug

SEQ ID NO: 784377 - RNA, 19 nt, Homo sapiens
  misc_RNA (1)...(19): siRNA sense strand
guuaagaccucuggaacua

SEQ ID NO: 784378 - RNA, 19 nt, Homo sapiens
  misc_RNA (1)...(19): siRNA sense strand
gaacagaaaucaggagaac

SEQ ID NO: 784379 - RNA, 19 nt, Homo sapiens
  misc_RNA (1)...(19): siRNA sense strand
agaaggagcucgacacaau

SEQ ID NO: 784380 - RNA, 19 nt, Homo sapiens
  misc_RNA (1)...(19): siRNA sense strand
gaaauuaaagcccagaaga

SEQ ID NO: 784381 - RNA, 19 nt, Homo sapiens
  misc_RNA (1)...(19): siRNA sense strand
gcaaagaugagcucgcuaa

SEQ ID NO: 784382 - RNA, 19 nt, Homo sapiens
  misc_RNA (1)...(19): siRNA sense strand
gcagaucugucuuccaugu

SEQ ID NO: 784383 - RNA, 19 nt, Homo sapiens
  misc_RNA (1)...(19): siRNA sense strand
acacagauuucuagcuuaa

SEQ ID NO: 784384 - RNA, 19 nt, Homo sapiens
  misc_RNA (1)...(19): siRNA sense strand
gaacugaagaguaugcaaa

SEQ ID NO: 784385 - RNA, 19 nt, Homo sapiens
  misc_RNA (1)...(19): siRNA sense strand
ugacacacaugcaagauga

SEQ ID NO: 784386 - RNA, 19 nt, Homo sapiens
  misc_RNA (1)...(19): siRNA sense strand
gaagagcucauuaucaaau

SEQ ID NO: 784387 - RNA, 19 nt, Homo sapiens
  misc_RNA (1)...(19): siRNA sense strand
gcauugagcaagaaauuaa

SEQ ID NO: 784388 - RNA, 19 nt, Homo sapiens
  misc_RNA (1)...(19): siRNA sense strand
caaacugcaucaauuguug

SEQ ID NO: 784389 - RNA, 19 nt, Homo sapiens
  misc_RNA (1)...(19): siRNA sense strand
gcaaagcuuuagcauuaga

SEQ ID NO: 784390 - RNA, 19 nt, Homo sapiens
  misc_RNA (1)...(19): siRNA sense strand
gaagaaagccaaaacaaaa

SEQ ID NO: 784391 - RNA, 19 nt, Homo sapiens
  misc_RNA (1)...(19): siRNA sense strand
gaaaaugacagcuuaagua

SEQ ID NO: 784392 - RNA, 19 nt, Homo sapiens
  misc_RNA (1)...(19): siRNA sense strand
gaugauaguagaagaguuu

SEQ ID NO: 784393 - RNA, 19 nt, Homo sapiens
  misc_RNA (1)...(19): siRNA sense strand
caacucaccuacacaagug

SEQ ID NO: 784394 - RNA, 19 nt, Homo sapiens
  misc_RNA (1)...(19): siRNA sense strand
gaaagagaagcuaguagaa

SEQ ID NO: 784395 - RNA, 19 nt, Homo sapiens
  misc_RNA (1)...(19): siRNA sense strand
gaaauacacggaaguaaag

SEQ ID NO: 784396 - RNA, 19 nt, Homo sapiens
  misc_RNA (1)...(19): siRNA sense strand
gauaagacaguucucauug

SEQ ID NO: 784397 - RNA, 19 nt, Homo sapiens
  misc_RNA (1)...(19): siRNA sense strand
ugagaaaggugcaggauag

SEQ ID NO: 784398 - RNA, 19 nt, Homo sapiens
  misc_RNA (1)...(19): siRNA sense strand
gcaagcacauaacuuaaca

SEQ ID NO: 784399 - RNA, 19 nt, Homo sapiens
  misc_RNA (1)...(19): siRNA sense strand
gaaggaacuuaguaugugu

SEQ ID NO: 784400 - RNA, 19 nt, Homo sapiens
  misc_RNA (1)...(19): siRNA sense strand
uaaacaaggucagauguau

SEQ ID NO: 784401 - RNA, 19 nt, Homo sapiens
  misc_RNA (1)...(19): siRNA sense strand
gaacagauaaagcaauuag

SEQ ID NO: 784402 - RNA, 19 nt, Homo sapiens
  misc_RNA (1)...(19): siRNA sense strand
agucaaugguuuacaguua

SEQ ID NO: 784403 - RNA, 19 nt, Homo sapiens
  misc_RNA (1)...(19): siRNA sense strand
ugaaaucucuggagcaaca

SEQ ID NO: 784404 - RNA, 19 nt, Homo sapiens
  misc_RNA (1)...(19): siRNA sense strand
aggaagaacugaagaguau

SEQ ID NO: 784405 - RNA, 19 nt, Homo sapiens
  misc_RNA (1)...(19): siRNA sense strand
ucaccuggcugcuaaguau

SEQ ID NO: 784406 - RNA, 19 nt, Homo sapiens
  misc_RNA (1)...(19): siRNA sense strand
gaauagaaaguaugaggaa

SEQ ID NO: 784407 - RNA, 19 nt, Homo sapiens
  misc_RNA (1)...(19): siRNA sense strand
caacagagaaagaacuaaa

SEQ ID NO: 784408 - RNA, 19 nt, Homo sapiens
  misc_RNA (1)...(19): siRNA sense strand
gacacugaaugacacguua

SEQ ID NO: 784409 - RNA, 19 nt, Homo sapiens
  misc_RNA (1)...(19): siRNA sense strand
ugaaagagagguugagaaa

SEQ ID NO: 784410 - RNA, 19 nt, Homo sapiens
  misc_RNA (1)...(19): siRNA sense strand
gagagaacuuuggaagaaa

SEQ ID NO: 784411 - RNA, 19 nt, Homo sapiens
  misc_RNA (1)...(19): siRNA sense strand
caagaaugcauuaagguaa

SEQ ID NO: 784412 - RNA, 19 nt, Homo sapiens
  misc_RNA (1)...(19): siRNA sense strand
uaauagcucugaaauccaa

SEQ ID NO: 784413 - RNA, 19 nt, Homo sapiens
  misc_RNA (1)...(19): siRNA sense strand
ggaaauggagaaauugcua

SEQ ID NO: 784414 - RNA, 19 nt, Homo sapiens
  misc_RNA (1)...(19): siRNA sense strand
cagcagauuggaauaaaua

SEQ ID NO: 784415 - RNA, 19 nt, Homo sapiens
  misc_RNA (1)...(19): siRNA sense strand
gaaaguaugaggaaguaug

SEQ ID NO: 784416 - RNA, 19 nt, Homo sapiens
  misc_RNA (1)...(19): siRNA sense strand
aagagaagcuaguagaaga

SEQ ID NO: 784417 - RNA, 19 nt, Homo sapiens
  misc_RNA (1)...(19): siRNA sense strand
ggaaguaaagaaugugaaa

SEQ ID NO: 784418 - RNA, 19 nt, Homo sapiens
  misc_RNA (1)...(19): siRNA sense strand
gagcuaaacaaacaguuaa

SEQ ID NO: 784419 - RNA, 19 nt, Homo sapiens
  misc_RNA (1)...(19): siRNA sense strand
gaaggagcucgacacaaua

SEQ ID NO: 784420 - RNA, 19 nt, Homo sapiens
  misc_RNA (1)...(19): siRNA sense strand
caggagaacuugggaagaa

SEQ ID NO: 784421 - RNA, 19 nt, Homo sapiens
  misc_RNA (1)...(19): siRNA sense strand
caaaguggcagaaugcaaa

SEQ ID NO: 784422 - RNA, 19 nt, Homo sapiens
  misc_RNA (1)...(19): siRNA sense strand
caugcuagguugcgaauau

SEQ ID NO: 784423 - RNA, 19 nt, Homo sapiens
  misc_RNA (1)...(19): siRNA sense strand
uagaaaguaugaggaagua

SEQ ID NO: 784424 - RNA, 19 nt, Homo sapiens
  misc_RNA (1)...(19): siRNA sense strand
agacacagauuucuagcuu

SEQ ID NO: 784425 - RNA, 19 nt, Homo sapiens
  misc_RNA (1)...(19): siRNA sense strand
caugcaagaugaaguaaau

SEQ ID NO: 784426 - RNA, 19 nt, Homo sapiens
  misc_RNA (1)...(19): siRNA sense strand
gagaaugacaaguuaaaga

SEQ ID NO: 784427 - RNA, 19 nt, Homo sapiens
  misc_RNA (1)...(19): siRNA sense strand
aaagucacaugaugcaauu

SEQ ID NO: 784428 - RNA, 19 nt, Homo sapiens
  misc_RNA (1)...(19): siRNA sense strand
ucaaggagcaagcacauaa

SEQ ID NO: 784429 - RNA, 19 nt, Homo sapiens
  misc_RNA (1)...(19): siRNA sense strand
ucacugaguuaacauugaa

SEQ ID NO: 784430 - RNA, 19 nt, Homo sapiens
  misc_RNA (1)...(19): siRNA sense strand
gaaaauaagcgauuacaga

SEQ ID NO: 784431 - RNA, 19 nt, Homo sapiens
  misc_RNA (1)...(19): siRNA sense strand
gaagaugcauuaaaagaug

SEQ ID NO: 784432 - RNA, 19 nt, Homo sapiens
  misc_RNA (1)...(19): siRNA sense strand
uggauaaagucaaugguuu

SEQ ID NO: 784433 - RNA, 19 nt, Homo sapiens
  misc_RNA (1)...(19): siRNA sense strand
cagacgagcuaaacaaaca

SEQ ID NO: 784434 - RNA, 19 nt, Homo sapiens
  misc_RNA (1)...(19): siRNA sense strand
gaacaugaacagguuaaga

SEQ ID NO: 784435 - RNA, 19 nt, Homo sapiens
  misc_RNA (1)...(19): siRNA sense strand
gacacagauuucuagcuua

SEQ ID NO: 784436 - RNA, 19 nt, Homo sapiens
  misc_RNA (1)...(19): siRNA sense strand
agaaggaauuacugcauuu

SEQ ID NO: 784437 - RNA, 19 nt, Homo sapiens
  misc_RNA (1)...(19): siRNA sense strand
gaacacaucuccaacuaca

SEQ ID NO: 784438 - RNA, 19 nt, Homo sapiens
  misc_RNA (1)...(19): siRNA sense strand
gaauuugaguucuuugaga

SEQ ID NO: 784439 - RNA, 19 nt, Homo sapiens
  misc_RNA (1)...(19): siRNA sense strand
ggaauguccuccuggaaga

SEQ ID NO: 784440 - RNA, 19 nt, Homo sapiens
  misc_RNA (1)...(19): siRNA sense strand
gcaaggcgaugaugacaag

SEQ ID NO: 784441 - RNA, 19 nt, Homo sapiens
  misc_RNA (1)...(19): siRNA sense strand
aaaggaagaucaacucauc

SEQ ID NO: 784442 - RNA, 19 nt, Homo sapiens
  misc_RNA (1)...(19): siRNA sense strand
gcaugaaagucuuccugaa

SEQ ID NO: 784443 - RNA, 19 nt, Homo sapiens
  misc_RNA (1)...(19): siRNA sense strand
guaccuacaucaacaugga

SEQ ID NO: 784444 - RNA, 19 nt, Homo sapiens
  misc_RNA (1)...(19): siRNA sense strand
ccaggaauuugaguucuuu

SEQ ID NO: 784445 - RNA, 19 nt, Homo sapiens
  misc_RNA (1)...(19): siRNA sense strand
aaacagcagugcagcuuca

SEQ ID NO: 784446 - RNA, 19 nt, Homo sapiens
  misc_RNA (1)...(19): siRNA sense strand
ggaacagcaugaaagucuu

SEQ ID NO: 784447 - RNA, 19 nt, Homo sapiens
  misc_RNA (1)...(19): siRNA sense strand
cagcgagacuggccaggaa

SEQ ID NO: 784448 - RNA, 19 nt, Homo sapiens
  misc_RNA (1)...(19): siRNA sense strand
ugaaggaugugcagagagu

SEQ ID NO: 784449 - RNA, 19 nt, Homo sapiens
  misc_RNA (1)...(19): siRNA sense strand
cugaacacaucuccaacua

SEQ ID NO: 784450 - RNA, 19 nt, Homo sapiens
  misc_RNA (1)...(19): siRNA sense strand
gcaagcacgucagccucua

SEQ ID NO: 784451 - RNA, 19 nt, Homo sapiens
  misc_RNA (1)...(19): siRNA sense strand
ggacagcccgugcagaauc

SEQ ID NO: 784452 - RNA, 19 nt, Homo sapiens
  misc_RNA (1)...(19): siRNA sense strand
gagcggccauuccucagau

SEQ ID NO: 784453 - RNA, 19 nt, Homo sapiens
  misc_RNA (1)...(19): siRNA sense strand
gcaguguacccgucauuau

SEQ ID NO: 784454 - RNA, 19 nt, Homo sapiens
  misc_RNA (1)...(19): siRNA sense strand
ggagaagccaugugagcaa

SEQ ID NO: 784455 - RNA, 19 nt, Homo sapiens
  misc_RNA (1)...(19): siRNA sense strand
agaaggcucugccgucugu

SEQ ID NO: 784456 - RNA, 19 nt, Homo sapiens
  misc_RNA (1)...(19): siRNA sense strand
ggaaaggaagaucaacuca

SEQ ID NO: 784457 - RNA, 19 nt, Homo sapiens
  misc_RNA (1)...(19): siRNA sense strand
gaacagcaugaaagucuuc

SEQ ID NO: 784458 - RNA, 19 nt, Homo sapiens
  misc_RNA (1)...(19): siRNA sense strand
gaaaggaagaucaacucau

SEQ ID NO: 784459 - RNA, 19 nt, Homo sapiens
  misc_RNA (1)...(19): siRNA sense strand
caccuacgauguccucuuc

SEQ ID NO: 784460 - RNA, 19 nt, Homo sapiens
  misc_RNA (1)...(19): siRNA sense strand
uugaggagcugcagaucuu

SEQ ID NO: 784461 - RNA, 19 nt, Homo sapiens
  misc_RNA (1)...(19): siRNA sense strand
gcgaugaugacaagaucua

SEQ ID NO: 784462 - RNA, 19 nt, Homo sapiens
  misc_RNA (1)...(19): siRNA sense strand
ucaacgugcugcaggaugu

SEQ ID NO: 784463 - RNA, 19 nt, Homo sapiens
  misc_RNA (1)...(19): siRNA sense strand
auucgaagcugaacacauc

SEQ ID NO: 784464 - RNA, 19 nt, Homo sapiens
  misc_RNA (1)...(19): siRNA sense strand
ggcgagcucuacacuggaa

SEQ ID NO: 784465 - RNA, 19 nt, Homo sapiens
  misc_RNA (1)...(19): siRNA sense strand
gccaggaauuugaguucuu

SEQ ID NO: 784466 - RNA, 19 nt, Homo sapiens
  misc_RNA (1)...(19): siRNA sense strand
gagcgugcaucaccaacag

SEQ ID NO: 784467 - RNA, 19 nt, Homo sapiens
  misc_RNA (1)...(19): siRNA sense strand
cagcggcagucaccuguuc

SEQ ID NO: 784468 - RNA, 19 nt, Homo sapiens
  misc_RNA (1)...(19): siRNA sense strand
ccacucagcauccaagaca

SEQ ID NO: 784469 - RNA, 19 nt, Homo sapiens
  misc_RNA (1)...(19): siRNA sense strand
gaagccaugugagcaaguc

SEQ ID NO: 784470 - RNA, 19 nt, Homo sapiens
  misc_RNA (1)...(19): siRNA sense strand
ucagcggccucuacaagga

SEQ ID NO: 784471 - RNA, 19 nt, Homo sapiens
  misc_RNA (1)...(19): siRNA sense strand
gcaccggaacagcaugaaa

SEQ ID NO: 784472 - RNA, 19 nt, Homo sapiens
  misc_RNA (1)...(19): siRNA sense strand
gugcagacgcagagaagaa

SEQ ID NO: 784473 - RNA, 19 nt, Homo sapiens
  misc_RNA (1)...(19): siRNA sense strand
ggucccgagucuucacuga

SEQ ID NO: 784474 - RNA, 19 nt, Homo sapiens
  misc_RNA (1)...(19): siRNA sense strand
agaugaggguggcagugua

SEQ ID NO: 784475 - RNA, 19 nt, Homo sapiens
  misc_RNA (1)...(19): siRNA sense strand
agacuggccaggaauuuga

SEQ ID NO: 784476 - RNA, 19 nt, Homo sapiens
  misc_RNA (1)...(19): siRNA sense strand
gcaccacaccuacgauguc

SEQ ID NO: 784477 - RNA, 19 nt, Homo sapiens
  misc_RNA (1)...(19): siRNA sense strand
gugagacacagcaguggua

SEQ ID NO: 784478 - RNA, 19 nt, Homo sapiens
  misc_RNA (1)...(19): siRNA sense strand
aaugaaggaugugcagaga

SEQ ID NO: 784479 - RNA, 19 nt, Homo sapiens
  misc_RNA (1)...(19): siRNA sense strand
gagacuggccaggaauuug

SEQ ID NO: 784480 - RNA, 19 nt, Homo sapiens
  misc_RNA (1)...(19): siRNA sense strand
ggcaguguacccgucauua

SEQ ID NO: 784481 - RNA, 19 nt, Homo sapiens
  misc_RNA (1)...(19): siRNA sense strand
ugucaaaacuacaucaaga

SEQ ID NO: 784482 - RNA, 19 nt, Homo sapiens
  misc_RNA (1)...(19): siRNA sense strand
uggcagaccaaacagauga

SEQ ID NO: 784483 - RNA, 19 nt, Homo sapiens
  misc_RNA (1)...(19): siRNA sense strand
caugugagcaaguccaguu

SEQ ID NO: 784484 - RNA, 19 nt, Homo sapiens
  misc_RNA (1)...(19): siRNA sense strand
ggaggugaaccgugagaca

SEQ ID NO: 784485 - RNA, 19 nt, Homo sapiens
  misc_RNA (1)...(19): siRNA sense strand
ggaauuugaguucuuugag

SEQ ID NO: 784486 - RNA, 19 nt, Homo sapiens
  misc_RNA (1)...(19): siRNA sense strand
caacuacacagcccuucug

SEQ ID NO: 784487 - RNA, 19 nt, Homo sapiens
  misc_RNA (1)...(19): siRNA sense strand
acaucaacauggagaacuu

SEQ ID NO: 784488 - RNA, 19 nt, Homo sapiens
  misc_RNA (1)...(19): siRNA sense strand
gacagcccgugcagaaucu

SEQ ID NO: 784489 - RNA, 19 nt, Homo sapiens
  misc_RNA (1)...(19): siRNA sense strand
acacaucuccaacuacaca

SEQ ID NO: 784490 - RNA, 19 nt, Homo sapiens
  misc_RNA (1)...(19): siRNA sense strand
gggaaaggaagaucaacuc

SEQ ID NO: 784491 - RNA, 19 nt, Homo sapiens
  misc_RNA (1)...(19): siRNA sense strand
gacgauggcuuccccuuca

SEQ ID NO: 784492 - RNA, 19 nt, Homo sapiens
  misc_RNA (1)...(19): siRNA sense strand
ucagagaagaggccacuca

SEQ ID NO: 784493 - RNA, 19 nt, Homo sapiens
  misc_RNA (1)...(19): siRNA sense strand
gaugugcacgcucuuugug

SEQ ID NO: 784494 - RNA, 19 nt, Homo sapiens
  misc_RNA (1)...(19): siRNA sense strand
gcgagacuggccaggaauu

SEQ ID NO: 784495 - RNA, 19 nt, Homo sapiens
  misc_RNA (1)...(19): siRNA sense strand
cggaacagcaugaaagucu

SEQ ID NO: 784496 - RNA, 19 nt, Homo sapiens
  misc_RNA (1)...(19): siRNA sense strand
ggccguggauccaggacau

SEQ ID NO: 784497 - RNA, 19 nt, Homo sapiens
  misc_RNA (1)...(19): siRNA sense strand
cgagacuggccaggaauuu

SEQ ID NO: 784498 - RNA, 19 nt, Homo sapiens
  misc_RNA (1)...(19): siRNA sense strand
gcucccaguuuuauucuug

SEQ ID NO: 784499 - RNA, 19 nt, Homo sapiens
  misc_RNA (1)...(19): siRNA sense strand
aagcugaacacaucuccaa

SEQ ID NO: 784500 - RNA, 19 nt, Homo sapiens
  misc_RNA (1)...(19): siRNA sense strand
agaaacagcagugcagcuu

SEQ ID NO: 784501 - RNA, 19 nt, Homo sapiens
  misc_RNA (1)...(19): siRNA sense strand
caguguacccgucauuauc

SEQ ID NO: 784502 - RNA, 19 nt, Homo sapiens
  misc_RNA (1)...(19): siRNA sense strand
gguggcagaccaaacagau

SEQ ID NO: 784503 - RNA, 19 nt, Homo sapiens
  misc_RNA (1)...(19): siRNA sense strand
guggagagcgggugcuaca

SEQ ID NO: 784504 - RNA, 19 nt, Homo sapiens
  misc_RNA (1)...(19): siRNA sense strand
accgagagcucccucaacu

SEQ ID NO: 784505 - RNA, 19 nt, Homo sapiens
  misc_RNA (1)...(19): siRNA sense strand
gccgugcugcucccaguuu

SEQ ID NO: 784506 - RNA, 19 nt, Homo sapiens
  misc_RNA (1)...(19): siRNA sense strand
ggugaugugcacgcucuuu

SEQ ID NO: 784507 - RNA, 19 nt, Homo sapiens
  misc_RNA (1)...(19): siRNA sense strand
gugcagacagguccuacug

SEQ ID NO: 784508 - RNA, 19 nt, Homo sapiens
  misc_RNA (1)...(19): siRNA sense strand
ggccauuccucagauucga

SEQ ID NO: 784509 - RNA, 19 nt, Homo sapiens
  misc_RNA (1)...(19): siRNA sense strand
gaacacaucuccaacuaca

SEQ ID NO: 784510 - RNA, 19 nt, Homo sapiens
  misc_RNA (1)...(19): siRNA sense strand
gaauuugaguucuuugaga

SEQ ID NO: 784511 - RNA, 19 nt, Homo sapiens
  misc_RNA (1)...(19): siRNA sense strand
ggaauguccuccuggaaga

SEQ ID NO: 784512 - RNA, 19 nt, Homo sapiens
  misc_RNA (1)...(19): siRNA sense strand
gcaaggcgaugaugacaag

SEQ ID NO: 784513 - RNA, 19 nt, Homo sapiens
  misc_RNA (1)...(19): siRNA sense strand
aaaggaagaucaacucauc

SEQ ID NO: 784514 - RNA, 19 nt, Homo sapiens
  misc_RNA (1)...(19): siRNA sense strand
gcaugaaagucuuccugaa

SEQ ID NO: 784515 - RNA, 19 nt, Homo sapiens
  misc_RNA (1)...(19): siRNA sense strand
guaccuacaucaacaugga

SEQ ID NO: 784516 - RNA, 19 nt, Homo sapiens
  misc_RNA (1)...(19): siRNA sense strand
ccaggaauuugaguucuuu

SEQ ID NO: 784517 - RNA, 19 nt, Homo sapiens
  misc_RNA (1)...(19): siRNA sense strand
aaacagcagugcagcuuca

SEQ ID NO: 784518 - RNA, 19 nt, Homo sapiens
  misc_RNA (1)...(19): siRNA sense strand
ggaacagcaugaaagucuu

SEQ ID NO: 784519 - RNA, 19 nt, Homo sapiens
  misc_RNA (1)...(19): siRNA sense strand
cagcgagacuggccaggaa

SEQ ID NO: 784520 - RNA, 19 nt, Homo sapiens
  misc_RNA (1)...(19): siRNA sense strand
ugaaggaugugcagagagu

SEQ ID NO: 784521 - RNA, 19 nt, Homo sapiens
  misc_RNA (1)...(19): siRNA sense strand
cugaacacaucuccaacua

SEQ ID NO: 784522 - RNA, 19 nt, Homo sapiens
  misc_RNA (1)...(19): siRNA sense strand
gcaagcacgucagccucua

SEQ ID NO: 784523 - RNA, 19 nt, Homo sapiens
  misc_RNA (1)...(19): siRNA sense strand
ggacagcccgugcagaauc

SEQ ID NO: 784524 - RNA, 19 nt, Homo sapiens
  misc_RNA (1)...(19): siRNA sense strand
gagcggccauuccucagau

SEQ ID NO: 784525 - RNA, 19 nt, Homo sapiens
  misc_RNA (1)...(19): siRNA sense strand
gcaguguacccgucauuau

SEQ ID NO: 784526 - RNA, 19 nt, Homo sapiens
  misc_RNA (1)...(19): siRNA sense strand
ggagaagccaugugagcaa

SEQ ID NO: 784527 - RNA, 19 nt, Homo sapiens
  misc_RNA (1)...(19): siRNA sense strand
agaaggcucugccgucugu

SEQ ID NO: 784528 - RNA, 19 nt, Homo sapiens
  misc_RNA (1)...(19): siRNA sense strand
ggaaaggaagaucaacuca

SEQ ID NO: 784529 - RNA, 19 nt, Homo sapiens
  misc_RNA (1)...(19): siRNA sense strand
gaacagcaugaaagucuuc

SEQ ID NO: 784530 - RNA, 19 nt, Homo sapiens
  misc_RNA (1)...(19): siRNA sense strand
gaaaggaagaucaacucau

SEQ ID NO: 784531 - RNA, 19 nt, Homo sapiens
  misc_RNA (1)...(19): siRNA sense strand
caccuacgauguccucuuc

SEQ ID NO: 784532 - RNA, 19 nt, Homo sapiens
  misc_RNA (1)...(19): siRNA sense strand
uugaggagcugcagaucuu

SEQ ID NO: 784533 - RNA, 19 nt, Homo sapiens
  misc_RNA (1)...(19): siRNA sense strand
gcgaugaugacaagaucua

SEQ ID NO: 784534 - RNA, 19 nt, Homo sapiens
  misc_RNA (1)...(19): siRNA sense strand
ucaacgugcugcaggaugu

SEQ ID NO: 784535 - RNA, 19 nt, Homo sapiens
  misc_RNA (1)...(19): siRNA sense strand
auucgaagcugaacacauc

SEQ ID NO: 784536 - RNA, 19 nt, Homo sapiens
  misc_RNA (1)...(19): siRNA sense strand
ggcgagcucuacacuggaa

SEQ ID NO: 784537 - RNA, 19 nt, Homo sapiens
  misc_RNA (1)...(19): siRNA sense strand
gccaggaauuugaguucuu

SEQ ID NO: 784538 - RNA, 19 nt, Homo sapiens
  misc_RNA (1)...(19): siRNA sense strand
gagcgugcaucaccaacag

SEQ ID NO: 784539 - RNA, 19 nt, Homo sapiens
  misc_RNA (1)...(19): siRNA sense strand
cagcggcagucaccuguuc

SEQ ID NO: 784540 - RNA, 19 nt, Homo sapiens
  misc_RNA (1)...(19): siRNA sense strand
ccacucagcauccaagaca

SEQ ID NO: 784541 - RNA, 19 nt, Homo sapiens
  misc_RNA (1)...(19): siRNA sense strand
gaagccaugugagcaaguc

SEQ ID NO: 784542 - RNA, 19 nt, Homo sapiens
  misc_RNA (1)...(19): siRNA sense strand
ucagcggccucuacaagga

SEQ ID NO: 784543 - RNA, 19 nt, Homo sapiens
  misc_RNA (1)...(19): siRNA sense strand
gcaccggaacagcaugaaa

SEQ ID NO: 784544 - RNA, 19 nt, Homo sapiens
  misc_RNA (1)...(19): siRNA sense strand
gugcagacgcagagaagaa

SEQ ID NO: 784545 - RNA, 19 nt, Homo sapiens
  misc_RNA (1)...(19): siRNA sense strand
ggucccgagucuucacuga

SEQ ID NO: 784546 - RNA, 19 nt, Homo sapiens
  misc_RNA (1)...(19): siRNA sense strand
agaugaggguggcagugua

SEQ ID NO: 784547 - RNA, 19 nt, Homo sapiens
  misc_RNA (1)...(19): siRNA sense strand
agacuggccaggaauuuga

SEQ ID NO: 784548 - RNA, 19 nt, Homo sapiens
  misc_RNA (1)...(19): siRNA sense strand
gcaccacaccuacgauguc

SEQ ID NO: 784549 - RNA, 19 nt, Homo sapiens
  misc_RNA (1)...(19): siRNA sense strand
gugagacacagcaguggua

SEQ ID NO: 784550 - RNA, 19 nt, Homo sapiens
  misc_RNA (1)...(19): siRNA sense strand
aaugaaggaugugcagaga

SEQ ID NO: 784551 - RNA, 19 nt, Homo sapiens
  misc_RNA (1)...(19): siRNA sense strand
gagacuggccaggaauuug

SEQ ID NO: 784552 - RNA, 19 nt, Homo sapiens
  misc_RNA (1)...(19): siRNA sense strand
ggcaguguacccgucauua

SEQ ID NO: 784553 - RNA, 19 nt, Homo sapiens
  misc_RNA (1)...(19): siRNA sense strand
ugucaaaacuacaucaaga

SEQ ID NO: 784554 - RNA, 19 nt, Homo sapiens
  misc_RNA (1)...(19): siRNA sense strand
uggcagaccaaacagauga

SEQ ID NO: 784555 - RNA, 19 nt, Homo sapiens
  misc_RNA (1)...(19): siRNA sense strand
caugugagcaaguccaguu

SEQ ID NO: 784556 - RNA, 19 nt, Homo sapiens
  misc_RNA (1)...(19): siRNA sense strand
ggaggugaaccgugagaca

SEQ ID NO: 784557 - RNA, 19 nt, Homo sapiens
  misc_RNA (1)...(19): siRNA sense strand
ggaauuugaguucuuugag

SEQ ID NO: 784558 - RNA, 19 nt, Homo sapiens
  misc_RNA (1)...(19): siRNA sense strand
caacuacacagcccuucug

SEQ ID NO: 784559 - RNA, 19 nt, Homo sapiens
  misc_RNA (1)...(19): siRNA sense strand
acaucaacauggagaacuu

SEQ ID NO: 784560 - RNA, 19 nt, Homo sapiens
  misc_RNA (1)...(19): siRNA sense strand
gacagcccgugcagaaucu

SEQ ID NO: 784561 - RNA, 19 nt, Homo sapiens
  misc_RNA (1)...(19): siRNA sense strand
acacaucuccaacuacaca

SEQ ID NO: 784562 - RNA, 19 nt, Homo sapiens
  misc_RNA (1)...(19): siRNA sense strand
gggaaaggaagaucaacuc

SEQ ID NO: 784563 - RNA, 19 nt, Homo sapiens
  misc_RNA (1)...(19): siRNA sense strand
gacgauggcuuccccuuca

SEQ ID NO: 784564 - RNA, 19 nt, Homo sapiens
  misc_RNA (1)...(19): siRNA sense strand
ucagagaagaggccacuca

SEQ ID NO: 784565 - RNA, 19 nt, Homo sapiens
  misc_RNA (1)...(19): siRNA sense strand
gaugugcacgcucuuugug

SEQ ID NO: 784566 - RNA, 19 nt, Homo sapiens
  misc_RNA (1)...(19): siRNA sense strand
gcgagacuggccaggaauu

SEQ ID NO: 784567 - RNA, 19 nt, Homo sapiens
  misc_RNA (1)...(19): siRNA sense strand
cggaacagcaugaaagucu

SEQ ID NO: 784568 - RNA, 19 nt, Homo sapiens
  misc_RNA (1)...(19): siRNA sense strand
ggccguggauccaggacau

SEQ ID NO: 784569 - RNA, 19 nt, Homo sapiens
  misc_RNA (1)...(19): siRNA sense strand
cgagacuggccaggaauuu

SEQ ID NO: 784570 - RNA, 19 nt, Homo sapiens
  misc_RNA (1)...(19): siRNA sense strand
gcucccaguuuuauucuug

SEQ ID NO: 784571 - RNA, 19 nt, Homo sapiens
  misc_RNA (1)...(19): siRNA sense strand
aagcugaacacaucuccaa

SEQ ID NO: 784572 - RNA, 19 nt, Homo sapiens
  misc_RNA (1)...(19): siRNA sense strand
agaaacagcagugcagcuu

SEQ ID NO: 784573 - RNA, 19 nt, Homo sapiens
  misc_RNA (1)...(19): siRNA sense strand
caguguacccgucauuauc

SEQ ID NO: 784574 - RNA, 19 nt, Homo sapiens
  misc_RNA (1)...(19): siRNA sense strand
gguggcagaccaaacagau

SEQ ID NO: 784575 - RNA, 19 nt, Homo sapiens
  misc_RNA (1)...(19): siRNA sense strand
guggagagcgggugcuaca

SEQ ID NO: 784576 - RNA, 19 nt, Homo sapiens
  misc_RNA (1)...(19): siRNA sense strand
accgagagcucccucaacu

SEQ ID NO: 784577 - RNA, 19 nt, Homo sapiens
  misc_RNA (1)...(19): siRNA sense strand
gccgugcugcucccaguuu

SEQ ID NO: 784578 - RNA, 19 nt, Homo sapiens
  misc_RNA (1)...(19): siRNA sense strand
ggugaugugcacgcucuuu

SEQ ID NO: 784579 - RNA, 19 nt, Homo sapiens
  misc_RNA (1)...(19): siRNA sense strand
gugcagacagguccuacug

SEQ ID NO: 784580 - RNA, 19 nt, Homo sapiens
  misc_RNA (1)...(19): siRNA sense strand
ggccauuccucagauucga

SEQ ID NO: 784581 - RNA, 19 nt, Homo sapiens
  misc_RNA (1)...(19): siRNA sense strand
gcaagauccucaagugcaa

SEQ ID NO: 784582 - RNA, 19 nt, Homo sapiens
  misc_RNA (1)...(19): siRNA sense strand
gaucugccauuacgagaag

SEQ ID NO: 784583 - RNA, 19 nt, Homo sapiens
  misc_RNA (1)...(19): siRNA sense strand
aagacaaacugcaccugua

SEQ ID NO: 784584 - RNA, 19 nt, Homo sapiens
  misc_RNA (1)...(19): siRNA sense strand
ucaagaugcuccacuccaa

SEQ ID NO: 784585 - RNA, 19 nt, Homo sapiens
  misc_RNA (1)...(19): siRNA sense strand
gccaacagccugaagauca

SEQ ID NO: 784586 - RNA, 19 nt, Homo sapiens
  misc_RNA (1)...(19): siRNA sense strand
gcacaacugcuccaaggau

SEQ ID NO: 784587 - RNA, 19 nt, Homo sapiens
  misc_RNA (1)...(19): siRNA sense strand
aaacugcaccuguaugaga

SEQ ID NO: 784588 - RNA, 19 nt, Homo sapiens
  misc_RNA (1)...(19): siRNA sense strand
ccagcaagcucaccaucau

SEQ ID NO: 784589 - RNA, 19 nt, Homo sapiens
  misc_RNA (1)...(19): siRNA sense strand
gccugaagaucacugagaa

SEQ ID NO: 784590 - RNA, 19 nt, Homo sapiens
  misc_RNA (1)...(19): siRNA sense strand
cagaggaaguggucaaugc

SEQ ID NO: 784591 - RNA, 19 nt, Homo sapiens
  misc_RNA (1)...(19): siRNA sense strand
guuggaggaugucaagaug

SEQ ID NO: 784592 - RNA, 19 nt, Homo sapiens
  misc_RNA (1)...(19): siRNA sense strand
agacagccguggccaagug

SEQ ID NO: 784593 - RNA, 19 nt, Homo sapiens
  misc_RNA (1)...(19): siRNA sense strand
cgacaauaauuaccugaac

SEQ ID NO: 784594 - RNA, 19 nt, Homo sapiens
  misc_RNA (1)...(19): siRNA sense strand
ggccgcucaucgacaauaa

SEQ ID NO: 784595 - RNA, 19 nt, Homo sapiens
  misc_RNA (1)...(19): siRNA sense strand
acaaacugcaccuguauga

SEQ ID NO: 784596 - RNA, 19 nt, Homo sapiens
  misc_RNA (1)...(19): siRNA sense strand
cgugcaagauccucaagug

SEQ ID NO: 784597 - RNA, 19 nt, Homo sapiens
  misc_RNA (1)...(19): siRNA sense strand
gcucaucgacaauaauuac

SEQ ID NO: 784598 - RNA, 19 nt, Homo sapiens
  misc_RNA (1)...(19): siRNA sense strand
uggaggaccuguacuacca

SEQ ID NO: 784599 - RNA, 19 nt, Homo sapiens
  misc_RNA (1)...(19): siRNA sense strand
gggagaggcuagugguaac

SEQ ID NO: 784600 - RNA, 19 nt, Homo sapiens
  misc_RNA (1)...(19): siRNA sense strand
ggacagccagggucucuac

SEQ ID NO: 784601 - RNA, 19 nt, Homo sapiens
  misc_RNA (1)...(19): siRNA sense strand
ccacaccucaggacuuuca

SEQ ID NO: 784602 - RNA, 19 nt, Homo sapiens
  misc_RNA (1)...(19): siRNA sense strand
gaugcuccacuccaacaaa

SEQ ID NO: 784603 - RNA, 19 nt, Homo sapiens
  misc_RNA (1)...(19): siRNA sense strand
agacaaacugcaccuguau

SEQ ID NO: 784604 - RNA, 19 nt, Homo sapiens
  misc_RNA (1)...(19): siRNA sense strand
acccacaccucaggacuuu

SEQ ID NO: 784605 - RNA, 19 nt, Homo sapiens
  misc_RNA (1)...(19): siRNA sense strand
caagcucaccaucaucuuc

SEQ ID NO: 784606 - RNA, 19 nt, Homo sapiens
  misc_RNA (1)...(19): siRNA sense strand
ggagauccaggccaaguac

SEQ ID NO: 784607 - RNA, 19 nt, Homo sapiens
  misc_RNA (1)...(19): siRNA sense strand
cgagaagagcuuucacaag

SEQ ID NO: 784608 - RNA, 19 nt, Homo sapiens
  misc_RNA (1)...(19): siRNA sense strand
ccacuccaacaaagacaaa

SEQ ID NO: 784609 - RNA, 19 nt, Homo sapiens
  misc_RNA (1)...(19): siRNA sense strand
cuaccaggccugcgucuuc

SEQ ID NO: 784610 - RNA, 19 nt, Homo sapiens
  misc_RNA (1)...(19): siRNA sense strand
guucagcccugggauucug

SEQ ID NO: 784611 - RNA, 19 nt, Homo sapiens
  misc_RNA (1)...(19): siRNA sense strand
ccgcucaucgacaauaauu

SEQ ID NO: 784612 - RNA, 19 nt, Homo sapiens
  misc_RNA (1)...(19): siRNA sense strand
gccccgagaucugccauua

SEQ ID NO: 784613 - RNA, 19 nt, Homo sapiens
  misc_RNA (1)...(19): siRNA sense strand
ccuggccgcucaucgacaa

SEQ ID NO: 784614 - RNA, 19 nt, Homo sapiens
  misc_RNA (1)...(19): siRNA sense strand
ggccguccauggcauagag

SEQ ID NO: 784615 - RNA, 19 nt, Homo sapiens
  misc_RNA (1)...(19): siRNA sense strand
ucaaccagcagaucgacuu

SEQ ID NO: 784616 - RNA, 19 nt, Homo sapiens
  misc_RNA (1)...(19): siRNA sense strand
aggaguguguggaccagaa

SEQ ID NO: 784617 - RNA, 19 nt, Homo sapiens
  misc_RNA (1)...(19): siRNA sense strand
gacaaacugcaccuguaug

SEQ ID NO: 784618 - RNA, 19 nt, Homo sapiens
  misc_RNA (1)...(19): siRNA sense strand
gaccuucccauacgagaca

SEQ ID NO: 784619 - RNA, 19 nt, Homo sapiens
  misc_RNA (1)...(19): siRNA sense strand
ccaacagccugaagaucac

SEQ ID NO: 784620 - RNA, 19 nt, Homo sapiens
  misc_RNA (1)...(19): siRNA sense strand
gcaagcucaccaucaucuu

SEQ ID NO: 784621 - RNA, 19 nt, Homo sapiens
  misc_RNA (1)...(19): siRNA sense strand
gugcagccuugcgcagcua

SEQ ID NO: 784622 - RNA, 19 nt, Homo sapiens
  misc_RNA (1)...(19): siRNA sense strand
guaacaggccgagcuggau

SEQ ID NO: 784623 - RNA, 19 nt, Homo sapiens
  misc_RNA (1)...(19): siRNA sense strand
gacccacaccucaggacuu

SEQ ID NO: 784624 - RNA, 19 nt, Homo sapiens
  misc_RNA (1)...(19): siRNA sense strand
gccgcuaccugaccuuugc

SEQ ID NO: 784625 - RNA, 19 nt, Homo sapiens
  misc_RNA (1)...(19): siRNA sense strand
ggaaacaucugagcaauga

SEQ ID NO: 784626 - RNA, 19 nt, Homo sapiens
  misc_RNA (1)...(19): siRNA sense strand
ccaagacucuggccuuuaa

SEQ ID NO: 784627 - RNA, 19 nt, Homo sapiens
  misc_RNA (1)...(19): siRNA sense strand
gaacagaggauuccaacau

SEQ ID NO: 784628 - RNA, 19 nt, Homo sapiens
  misc_RNA (1)...(19): siRNA sense strand
gagcagaggugguggaucu

SEQ ID NO: 784629 - RNA, 19 nt, Homo sapiens
  misc_RNA (1)...(19): siRNA sense strand
gcaagaacauucccacucu

SEQ ID NO: 784630 - RNA, 19 nt, Homo sapiens
  misc_RNA (1)...(19): siRNA sense strand
gagcaaugauuucuugaag

SEQ ID NO: 784631 - RNA, 19 nt, Homo sapiens
  misc_RNA (1)...(19): siRNA sense strand
agaaagcucuggauagugu

SEQ ID NO: 784632 - RNA, 19 nt, Homo sapiens
  misc_RNA (1)...(19): siRNA sense strand
gaaaggcaaacuaggugua

SEQ ID NO: 784633 - RNA, 19 nt, Homo sapiens
  misc_RNA (1)...(19): siRNA sense strand
gaagccagcugucuguacu

SEQ ID NO: 784634 - RNA, 19 nt, Homo sapiens
  misc_RNA (1)...(19): siRNA sense strand
gaucaugaaguaugcagaa

SEQ ID NO: 784635 - RNA, 19 nt, Homo sapiens
  misc_RNA (1)...(19): siRNA sense strand
caagugguaccaucaagaa

SEQ ID NO: 784636 - RNA, 19 nt, Homo sapiens
  misc_RNA (1)...(19): siRNA sense strand
aaacaucugagcaaugauu

SEQ ID NO: 784637 - RNA, 19 nt, Homo sapiens
  misc_RNA (1)...(19): siRNA sense strand
caacaauggaaacaucuga

SEQ ID NO: 784638 - RNA, 19 nt, Homo sapiens
  misc_RNA (1)...(19): siRNA sense strand
acccuaagaagaagaauua

SEQ ID NO: 784639 - RNA, 19 nt, Homo sapiens
  misc_RNA (1)...(19): siRNA sense strand
ucugagcaaugauuucuug

SEQ ID NO: 784640 - RNA, 19 nt, Homo sapiens
  misc_RNA (1)...(19): siRNA sense strand
cagcaugucuuccaaaaug

SEQ ID NO: 784641 - RNA, 19 nt, Homo sapiens
  misc_RNA (1)...(19): siRNA sense strand
acagaggauuccaacauug

SEQ ID NO: 784642 - RNA, 19 nt, Homo sapiens
  misc_RNA (1)...(19): siRNA sense strand
aacagaggauuccaacauu

SEQ ID NO: 784643 - RNA, 19 nt, Homo sapiens
  misc_RNA (1)...(19): siRNA sense strand
gcaagugguaccaucaaga

SEQ ID NO: 784644 - RNA, 19 nt, Homo sapiens
  misc_RNA (1)...(19): siRNA sense strand
gugguaccaucaagaaguu

SEQ ID NO: 784645 - RNA, 19 nt, Homo sapiens
  misc_RNA (1)...(19): siRNA sense strand
ccacugaucccaagacucu

SEQ ID NO: 784646 - RNA, 19 nt, Homo sapiens
  misc_RNA (1)...(19): siRNA sense strand
gcaucaucuuugagccuua

SEQ ID NO: 784647 - RNA, 19 nt, Homo sapiens
  misc_RNA (1)...(19): siRNA sense strand
ugucuguacucgugaacua

SEQ ID NO: 784648 - RNA, 19 nt, Homo sapiens
  misc_RNA (1)...(19): siRNA sense strand
gagaagaggcacaguuggu

SEQ ID NO: 784649 - RNA, 19 nt, Homo sapiens
  misc_RNA (1)...(19): siRNA sense strand
cagaggauuccaacauuga

SEQ ID NO: 784650 - RNA, 19 nt, Homo sapiens
  misc_RNA (1)...(19): siRNA sense strand
gcagaacagaggauuccaa

SEQ ID NO: 784651 - RNA, 19 nt, Homo sapiens
  misc_RNA (1)...(19): siRNA sense strand
ccuuuaacccuaagaagaa

SEQ ID NO: 784652 - RNA, 19 nt, Homo sapiens
  misc_RNA (1)...(19): siRNA sense strand
gagcagcaugucuuccaaa

SEQ ID NO: 784653 - RNA, 19 nt, Homo sapiens
  misc_RNA (1)...(19): siRNA sense strand
gcugaaaggcaaacuaggu

SEQ ID NO: 784654 - RNA, 19 nt, Homo sapiens
  misc_RNA (1)...(19): siRNA sense strand
caucaucuuugagccuuau

SEQ ID NO: 784655 - RNA, 19 nt, Homo sapiens
  misc_RNA (1)...(19): siRNA sense strand
gaagaaccccaaaguggaa

SEQ ID NO: 784656 - RNA, 19 nt, Homo sapiens
  misc_RNA (1)...(19): siRNA sense strand
caugaaguaugcagaacag

SEQ ID NO: 784657 - RNA, 19 nt, Homo sapiens
  misc_RNA (1)...(19): siRNA sense strand
ggaguauggauuccucguu

SEQ ID NO: 784658 - RNA, 19 nt, Homo sapiens
  misc_RNA (1)...(19): siRNA sense strand
gccuuuaacccuaagaaga

SEQ ID NO: 784659 - RNA, 19 nt, Homo sapiens
  misc_RNA (1)...(19): siRNA sense strand
ugaagacccagcaggagaa

SEQ ID NO: 784660 - RNA, 19 nt, Homo sapiens
  misc_RNA (1)...(19): siRNA sense strand
ucccaagacucuggccuuu

SEQ ID NO: 784661 - RNA, 19 nt, Homo sapiens
  misc_RNA (1)...(19): siRNA sense strand
gugaugagcagcaugucuu

SEQ ID NO: 784662 - RNA, 19 nt, Homo sapiens
  misc_RNA (1)...(19): siRNA sense strand
ucucccaguuucccuauca

SEQ ID NO: 784663 - RNA, 19 nt, Homo sapiens
  misc_RNA (1)...(19): siRNA sense strand
ccuaagaagaagaauuaug

SEQ ID NO: 784664 - RNA, 19 nt, Homo sapiens
  misc_RNA (1)...(19): siRNA sense strand
uuacaucccaacaauggaa

SEQ ID NO: 784665 - RNA, 19 nt, Homo sapiens
  misc_RNA (1)...(19): siRNA sense strand
aaauggaucuaugcugaag

SEQ ID NO: 784666 - RNA, 19 nt, Homo sapiens
  misc_RNA (1)...(19): siRNA sense strand
ggauuccucguucagauca

SEQ ID NO: 784667 - RNA, 19 nt, Homo sapiens
  misc_RNA (1)...(19): siRNA sense strand
ggcaagugguaccaucaag

SEQ ID NO: 784668 - RNA, 19 nt, Homo sapiens
  misc_RNA (1)...(19): siRNA sense strand
ugagcagcaugucuuccaa

SEQ ID NO: 784669 - RNA, 19 nt, Homo sapiens
  misc_RNA (1)...(19): siRNA sense strand
caggagaagaggcacaguu

SEQ ID NO: 784670 - RNA, 19 nt, Homo sapiens
  misc_RNA (1)...(19): siRNA sense strand
ucccaacaauggaaacauc

SEQ ID NO: 784671 - RNA, 19 nt, Homo sapiens
  misc_RNA (1)...(19): siRNA sense strand
ugaguacuguguggugugu

SEQ ID NO: 784672 - RNA, 19 nt, Homo sapiens
  misc_RNA (1)...(19): siRNA sense strand
guuuacaucccaacaaugg

SEQ ID NO: 784673 - RNA, 19 nt, Homo sapiens
  misc_RNA (1)...(19): siRNA sense strand
aguacugugugguguguga

SEQ ID NO: 784674 - RNA, 19 nt, Homo sapiens
  misc_RNA (1)...(19): siRNA sense strand
ccaguuucccuaucauaca

SEQ ID NO: 784675 - RNA, 19 nt, Homo sapiens
  misc_RNA (1)...(19): siRNA sense strand
ugagcaaugauuucuugaa

SEQ ID NO: 784676 - RNA, 19 nt, Homo sapiens
  misc_RNA (1)...(19): siRNA sense strand
ggucacugcaagaacauuc

SEQ ID NO: 784677 - RNA, 19 nt, Homo sapiens
  misc_RNA (1)...(19): siRNA sense strand
auuaugagcggcuucagaa

SEQ ID NO: 784678 - RNA, 19 nt, Homo sapiens
  misc_RNA (1)...(19): siRNA sense strand
agaagaggcacaguugguu

SEQ ID NO: 784679 - RNA, 19 nt, Homo sapiens
  misc_RNA (1)...(19): siRNA sense strand
aggagaagaggcacaguug

SEQ ID NO: 784680 - RNA, 19 nt, Homo sapiens
  misc_RNA (1)...(19): siRNA sense strand
ggaaacaucugagcaauga

SEQ ID NO: 784681 - RNA, 19 nt, Homo sapiens
  misc_RNA (1)...(19): siRNA sense strand
ggagggagauaaugaauca

SEQ ID NO: 784682 - RNA, 19 nt, Homo sapiens
  misc_RNA (1)...(19): siRNA sense strand
ccaagacucuggccuuuaa

SEQ ID NO: 784683 - RNA, 19 nt, Homo sapiens
  misc_RNA (1)...(19): siRNA sense strand
ugaaggagaucuacaguga

SEQ ID NO: 784684 - RNA, 19 nt, Homo sapiens
  misc_RNA (1)...(19): siRNA sense strand
ggacagaaccuauuguguu

SEQ ID NO: 784685 - RNA, 19 nt, Homo sapiens
  misc_RNA (1)...(19): siRNA sense strand
gcaaugggcuggucaaugc

SEQ ID NO: 784686 - RNA, 19 nt, Homo sapiens
  misc_RNA (1)...(19): siRNA sense strand
gacagaaccuauuguguug

SEQ ID NO: 784687 - RNA, 19 nt, Homo sapiens
  misc_RNA (1)...(19): siRNA sense strand
agaaacagauggacaaguu

SEQ ID NO: 784688 - RNA, 19 nt, Homo sapiens
  misc_RNA (1)...(19): siRNA sense strand
guaccuagauggaccagaa

SEQ ID NO: 784689 - RNA, 19 nt, Homo sapiens
  misc_RNA (1)...(19): siRNA sense strand
gagcagaggugguggaucu

SEQ ID NO: 784690 - RNA, 19 nt, Homo sapiens
  misc_RNA (1)...(19): siRNA sense strand
gaacagaggauuccaacau

SEQ ID NO: 784691 - RNA, 19 nt, Homo sapiens
  misc_RNA (1)...(19): siRNA sense strand
gcaagaacauucccacucu

SEQ ID NO: 784692 - RNA, 19 nt, Homo sapiens
  misc_RNA (1)...(19): siRNA sense strand
gagcaaugauuucuugaag

SEQ ID NO: 784693 - RNA, 19 nt, Homo sapiens
  misc_RNA (1)...(19): siRNA sense strand
agaaagcucuggauagugu

SEQ ID NO: 784694 - RNA, 19 nt, Homo sapiens
  misc_RNA (1)...(19): siRNA sense strand
gaccagaaccauccauuga

SEQ ID NO: 784695 - RNA, 19 nt, Homo sapiens
  misc_RNA (1)...(19): siRNA sense strand
gaaaggcaaacuaggugua

SEQ ID NO: 784696 - RNA, 19 nt, Homo sapiens
  misc_RNA (1)...(19): siRNA sense strand
gauaaugaaucagaggaau

SEQ ID NO: 784697 - RNA, 19 nt, Homo sapiens
  misc_RNA (1)...(19): siRNA sense strand
gaagccagcugucuguacu

SEQ ID NO: 784698 - RNA, 19 nt, Homo sapiens
  misc_RNA (1)...(19): siRNA sense strand
ggucacacauugucaaacu

SEQ ID NO: 784699 - RNA, 19 nt, Homo sapiens
  misc_RNA (1)...(19): siRNA sense strand
gaucaugaaguaugcagaa

SEQ ID NO: 784700 - RNA, 19 nt, Homo sapiens
  misc_RNA (1)...(19): siRNA sense strand
aaggagaucuacagugaga

SEQ ID NO: 784701 - RNA, 19 nt, Homo sapiens
  misc_RNA (1)...(19): siRNA sense strand
ggaaaucaagaaacagaug

SEQ ID NO: 784702 - RNA, 19 nt, Homo sapiens
  misc_RNA (1)...(19): siRNA sense strand
ggacaucaaaggccaguuc

SEQ ID NO: 784703 - RNA, 19 nt, Homo sapiens
  misc_RNA (1)...(19): siRNA sense strand
ucgaugacguggacauuga

SEQ ID NO: 784704 - RNA, 19 nt, Homo sapiens
  misc_RNA (1)...(19): siRNA sense strand
cagagaauauggaacuauc

SEQ ID NO: 784705 - RNA, 19 nt, Homo sapiens
  misc_RNA (1)...(19): siRNA sense strand
ggacauugaccuccacauc

SEQ ID NO: 784706 - RNA, 19 nt, Homo sapiens
  misc_RNA (1)...(19): siRNA sense strand
caagugguaccaucaagaa

SEQ ID NO: 784707 - RNA, 19 nt, Homo sapiens
  misc_RNA (1)...(19): siRNA sense strand
ggaccagaaccauccauug

SEQ ID NO: 784708 - RNA, 19 nt, Homo sapiens
  misc_RNA (1)...(19): siRNA sense strand
gcacaccucacaccaguuc

SEQ ID NO: 784709 - RNA, 19 nt, Homo sapiens
  misc_RNA (1)...(19): siRNA sense strand
aaacaucugagcaaugauu

SEQ ID NO: 784710 - RNA, 19 nt, Homo sapiens
  misc_RNA (1)...(19): siRNA sense strand
caucaaauaaggaaggauu

SEQ ID NO: 784711 - RNA, 19 nt, Homo sapiens
  misc_RNA (1)...(19): siRNA sense strand
acccuaagaagaagaauua

SEQ ID NO: 784712 - RNA, 19 nt, Homo sapiens
  misc_RNA (1)...(19): siRNA sense strand
caacaauggaaacaucuga

SEQ ID NO: 784713 - RNA, 19 nt, Homo sapiens
  misc_RNA (1)...(19): siRNA sense strand
ucugagcaaugauuucuug

SEQ ID NO: 784714 - RNA, 19 nt, Homo sapiens
  misc_RNA (1)...(19): siRNA sense strand
cagcaugucuuccaaaaug

SEQ ID NO: 784715 - RNA, 19 nt, Homo sapiens
  misc_RNA (1)...(19): siRNA sense strand
acagaggauuccaacauug

SEQ ID NO: 784716 - RNA, 19 nt, Homo sapiens
  misc_RNA (1)...(19): siRNA sense strand
aacagaggauuccaacauu

SEQ ID NO: 784717 - RNA, 19 nt, Homo sapiens
  misc_RNA (1)...(19): siRNA sense strand
gcaagugguaccaucaaga

SEQ ID NO: 784718 - RNA, 19 nt, Homo sapiens
  misc_RNA (1)...(19): siRNA sense strand
caacaucagcuuccucgau

SEQ ID NO: 784719 - RNA, 19 nt, Homo sapiens
  misc_RNA (1)...(19): siRNA sense strand
gaaacagauggacaaguug

SEQ ID NO: 784720 - RNA, 19 nt, Homo sapiens
  misc_RNA (1)...(19): siRNA sense strand
ccacugaucccaagacucu

SEQ ID NO: 784721 - RNA, 19 nt, Homo sapiens
  misc_RNA (1)...(19): siRNA sense strand
gcaucaucuuugagccuua

SEQ ID NO: 784722 - RNA, 19 nt, Homo sapiens
  misc_RNA (1)...(19): siRNA sense strand
ugucuguacucgugaacua

SEQ ID NO: 784723 - RNA, 19 nt, Homo sapiens
  misc_RNA (1)...(19): siRNA sense strand
gugguaccaucaagaaguu

SEQ ID NO: 784724 - RNA, 19 nt, Homo sapiens
  misc_RNA (1)...(19): siRNA sense strand
gacauugaccuccacauca

SEQ ID NO: 784725 - RNA, 19 nt, Homo sapiens
  misc_RNA (1)...(19): siRNA sense strand
caaugcauccuacaccaaa

SEQ ID NO: 784726 - RNA, 19 nt, Homo sapiens
  misc_RNA (1)...(19): siRNA sense strand
ucaagaaacagauggacaa

SEQ ID NO: 784727 - RNA, 19 nt, Homo sapiens
  misc_RNA (1)...(19): siRNA sense strand
caacaggucacacauuguc

SEQ ID NO: 784728 - RNA, 19 nt, Homo sapiens
  misc_RNA (1)...(19): siRNA sense strand
gagaagaggcacaguuggu

SEQ ID NO: 784729 - RNA, 19 nt, Homo sapiens
  misc_RNA (1)...(19): siRNA sense strand
agcaacaggucacacauug

SEQ ID NO: 784730 - RNA, 19 nt, Homo sapiens
  misc_RNA (1)...(19): siRNA sense strand
gauuuucucucucccagua

SEQ ID NO: 784731 - RNA, 19 nt, Homo sapiens
  misc_RNA (1)...(19): siRNA sense strand
cagaggauuccaacauuga

SEQ ID NO: 784732 - RNA, 19 nt, Homo sapiens
  misc_RNA (1)...(19): siRNA sense strand
gauuugggcugggucuuca

SEQ ID NO: 784733 - RNA, 19 nt, Homo sapiens
  misc_RNA (1)...(19): siRNA sense strand
gaucuacagugagaacucu

SEQ ID NO: 784734 - RNA, 19 nt, Homo sapiens
  misc_RNA (1)...(19): siRNA sense strand
gcagaacagaggauuccaa

SEQ ID NO: 784735 - RNA, 19 nt, Homo sapiens
  misc_RNA (1)...(19): siRNA sense strand
uggaucaucucuagcaaca

SEQ ID NO: 784736 - RNA, 19 nt, Homo sapiens
  misc_RNA (1)...(19): siRNA sense strand
gagaauauggaacuaucga

SEQ ID NO: 784737 - RNA, 19 nt, Homo sapiens
  misc_RNA (1)...(19): siRNA sense strand
ccuuuaacccuaagaagaa

SEQ ID NO: 784738 - RNA, 19 nt, Homo sapiens
  misc_RNA (1)...(19): siRNA sense strand
aaagauccuggguauguuu

SEQ ID NO: 784739 - RNA, 19 nt, Homo sapiens
  misc_RNA (1)...(19): siRNA sense strand
gagcagcaugucuuccaaa

SEQ ID NO: 784740 - RNA, 19 nt, Homo sapiens
  misc_RNA (1)...(19): siRNA sense strand
gcugaaaggcaaacuaggu

SEQ ID NO: 784741 - RNA, 19 nt, Homo sapiens
  misc_RNA (1)...(19): siRNA sense strand
ggucccacauugagaacug

SEQ ID NO: 784742 - RNA, 19 nt, Homo sapiens
  misc_RNA (1)...(19): siRNA sense strand
caucaucuuugagccuuau

SEQ ID NO: 784743 - RNA, 19 nt, Homo sapiens
  misc_RNA (1)...(19): siRNA sense strand
gaagaaccccaaaguggaa

SEQ ID NO: 784744 - RNA, 19 nt, Homo sapiens
  misc_RNA (1)...(19): siRNA sense strand
caucagagaauauggaacu

SEQ ID NO: 784745 - RNA, 19 nt, Homo sapiens
  misc_RNA (1)...(19): siRNA sense strand
caugaaguaugcagaacag

SEQ ID NO: 784746 - RNA, 19 nt, Homo sapiens
  misc_RNA (1)...(19): siRNA sense strand
ggaguauggauuccucguu

SEQ ID NO: 784747 - RNA, 19 nt, Homo sapiens
  misc_RNA (1)...(19): siRNA sense strand
acagcuugaugcagacauu

SEQ ID NO: 784748 - RNA, 19 nt, Homo sapiens
  misc_RNA (1)...(19): siRNA sense strand
gccuuuaacccuaagaaga

SEQ ID NO: 784749 - RNA, 19 nt, Homo sapiens
  misc_RNA (1)...(19): siRNA sense strand
aauauggaacuaucgauga

SEQ ID NO: 784750 - RNA, 19 nt, Homo sapiens
  misc_RNA (1)...(19): siRNA sense strand
cagaaccuauuguguugag

SEQ ID NO: 784751 - RNA, 19 nt, Homo sapiens
  misc_RNA (1)...(19): siRNA sense strand
gaaaaggacagcacaggau

SEQ ID NO: 784752 - RNA, 19 nt, Homo sapiens
  misc_RNA (1)...(19): siRNA sense strand
ucccaagacucuggccuuu

SEQ ID NO: 784753 - RNA, 19 nt, Homo sapiens
  misc_RNA (1)...(19): siRNA sense strand
gugaugagcagcaugucuu

SEQ ID NO: 784754 - RNA, 19 nt, Homo sapiens
  misc_RNA (1)...(19): siRNA sense strand
ugaagacccagcaggagaa

SEQ ID NO: 784755 - RNA, 19 nt, Homo sapiens
  misc_RNA (1)...(19): siRNA sense strand
gauccuggguauguuuaca

SEQ ID NO: 784756 - RNA, 19 nt, Homo sapiens
  misc_RNA (1)...(19): siRNA sense strand
gggcugggucuucaguuga

SEQ ID NO: 784757 - RNA, 19 nt, Homo sapiens
  misc_RNA (1)...(19): siRNA sense strand
gucacacauugucaaacua

SEQ ID NO: 784758 - RNA, 19 nt, Homo sapiens
  misc_RNA (1)...(19): siRNA sense strand
uagcaacaggucacacauu

SEQ ID NO: 784759 - RNA, 19 nt, Homo sapiens
  misc_RNA (1)...(19): siRNA sense strand
gcaacaggucacacauugu

SEQ ID NO: 784760 - RNA, 19 nt, Homo sapiens
  misc_RNA (1)...(19): siRNA sense strand
ugcaguggaucaucucuag

SEQ ID NO: 784761 - RNA, 19 nt, Homo sapiens
  misc_RNA (1)...(19): siRNA sense strand
uuacaucccaacaauggaa

SEQ ID NO: 784762 - RNA, 19 nt, Homo sapiens
  misc_RNA (1)...(19): siRNA sense strand
ccuaagaagaagaauuaug

SEQ ID NO: 784763 - RNA, 19 nt, Homo sapiens
  misc_RNA (1)...(19): siRNA sense strand
aaauggaucuaugcugaag

SEQ ID NO: 784764 - RNA, 19 nt, Homo sapiens
  misc_RNA (1)...(19): siRNA sense strand
ggauuccucguucagauca

SEQ ID NO: 784765 - RNA, 19 nt, Homo sapiens
  misc_RNA (1)...(19): siRNA sense strand
cuguauccaucagagaaua

SEQ ID NO: 784766 - RNA, 19 nt, Homo sapiens
  misc_RNA (1)...(19): siRNA sense strand
ucucccaguuucccuauca

SEQ ID NO: 784767 - RNA, 19 nt, Homo sapiens
  misc_RNA (1)...(19): siRNA sense strand
ucccaacaauggaaacauc

SEQ ID NO: 784768 - RNA, 19 nt, Homo sapiens
  misc_RNA (1)...(19): siRNA sense strand
auugagaacuggcauucga

SEQ ID NO: 784769 - RNA, 19 nt, Homo sapiens
  misc_RNA (1)...(19): siRNA sense strand
gcucuauggcagcaccuuu

SEQ ID NO: 784770 - RNA, 19 nt, Homo sapiens
  misc_RNA (1)...(19): siRNA sense strand
ggagaucuacagugagaac

SEQ ID NO: 784771 - RNA, 19 nt, Homo sapiens
  misc_RNA (1)...(19): siRNA sense strand
ugagcagcaugucuuccaa

SEQ ID NO: 784772 - RNA, 19 nt, Homo sapiens
  misc_RNA (1)...(19): siRNA sense strand
ggcaagugguaccaucaag

SEQ ID NO: 784773 - RNA, 19 nt, Homo sapiens
  misc_RNA (1)...(19): siRNA sense strand
caggagaagaggcacaguu

SEQ ID NO: 784774 - RNA, 19 nt, Homo sapiens
  misc_RNA (1)...(19): siRNA sense strand
guuuacaucccaacaaugg

SEQ ID NO: 784775 - RNA, 19 nt, Homo sapiens
  misc_RNA (1)...(19): siRNA sense strand
ggaccgccaagaagcucua

SEQ ID NO: 784776 - RNA, 19 nt, Homo sapiens
  misc_RNA (1)...(19): siRNA sense strand
ugaguacuguguggugugu

SEQ ID NO: 784777 - RNA, 19 nt, Homo sapiens
  misc_RNA (1)...(19): siRNA sense strand
ugggcugggucuucaguug

SEQ ID NO: 784778 - RNA, 19 nt, Homo sapiens
  misc_RNA (1)...(19): siRNA sense strand
gaccuccacaucaacauca

SEQ ID NO: 784779 - RNA, 19 nt, Homo sapiens
  misc_RNA (1)...(19): siRNA sense strand
aguacugugugguguguga

SEQ ID NO: 784780 - RNA, 19 nt, Homo sapiens
  misc_RNA (1)...(19): siRNA sense strand
gcacgaggcuauuuaccua

SEQ ID NO: 784781 - RNA, 19 nt, Homo sapiens
  misc_RNA (1)...(19): siRNA sense strand
guacacaccugcccaccaa

SEQ ID NO: 784782 - RNA, 19 nt, Homo sapiens
  misc_RNA (1)...(19): siRNA sense strand
ccacagagaagccagaauu

SEQ ID NO: 784783 - RNA, 19 nt, Homo sapiens
  misc_RNA (1)...(19): siRNA sense strand
ccaggcagcucucuacauc

SEQ ID NO: 784784 - RNA, 19 nt, Homo sapiens
  misc_RNA (1)...(19): siRNA sense strand
ggaggcacgaggcuauuua

SEQ ID NO: 784785 - RNA, 19 nt, Homo sapiens
  misc_RNA (1)...(19): siRNA sense strand
caacaacaucuaugaagug

SEQ ID NO: 784786 - RNA, 19 nt, Homo sapiens
  misc_RNA (1)...(19): siRNA sense strand
ccauuaccaucaacucuga

SEQ ID NO: 784787 - RNA, 19 nt, Homo sapiens
  misc_RNA (1)...(19): siRNA sense strand
auaaggagcugcccaguac

SEQ ID NO: 784788 - RNA, 19 nt, Homo sapiens
  misc_RNA (1)...(19): siRNA sense strand
ccagguagcugaaaagaau

SEQ ID NO: 784789 - RNA, 19 nt, Homo sapiens
  misc_RNA (1)...(19): siRNA sense strand
gaauugggcccugcucaug

SEQ ID NO: 784790 - RNA, 19 nt, Homo sapiens
  misc_RNA (1)...(19): siRNA sense strand
acaacaacaucuaugaagu

SEQ ID NO: 784791 - RNA, 19 nt, Homo sapiens
  misc_RNA (1)...(19): siRNA sense strand
caaguagccauuaccauca

SEQ ID NO: 784792 - RNA, 19 nt, Homo sapiens
  misc_RNA (1)...(19): siRNA sense strand
ggauggcgaccacagagaa

SEQ ID NO: 784793 - RNA, 19 nt, Homo sapiens
  misc_RNA (1)...(19): siRNA sense strand
gacaacaacaucuaugaag

SEQ ID NO: 784794 - RNA, 19 nt, Homo sapiens
  misc_RNA (1)...(19): siRNA sense strand
ugacaacaacaucuaugaa

SEQ ID NO: 784795 - RNA, 19 nt, Homo sapiens
  misc_RNA (1)...(19): siRNA sense strand
cuaugaaggccaagacuga

SEQ ID NO: 784796 - RNA, 19 nt, Homo sapiens
  misc_RNA (1)...(19): siRNA sense strand
aacaacaucuaugaaguga

SEQ ID NO: 784797 - RNA, 19 nt, Homo sapiens
  misc_RNA (1)...(19): siRNA sense strand
caguggcaccuaccaagua

SEQ ID NO: 784798 - RNA, 19 nt, Homo sapiens
  misc_RNA (1)...(19): siRNA sense strand
gacacaagguccauaaacc

SEQ ID NO: 784799 - RNA, 19 nt, Homo sapiens
  misc_RNA (1)...(19): siRNA sense strand
gugacaacaacaucuauga

SEQ ID NO: 784800 - RNA, 19 nt, Homo sapiens
  misc_RNA (1)...(19): siRNA sense strand
aauaaggagcugcccagua

SEQ ID NO: 784801 - RNA, 19 nt, Homo sapiens
  misc_RNA (1)...(19): siRNA sense strand
ggaucucuguccaucuugu

SEQ ID NO: 784802 - RNA, 19 nt, Homo sapiens
  misc_RNA (1)...(19): siRNA sense strand
caagacugagguccaggua

SEQ ID NO: 784803 - RNA, 19 nt, Homo sapiens
  misc_RNA (1)...(19): siRNA sense strand
gaggcuauuuaccuacauc

SEQ ID NO: 784804 - RNA, 19 nt, Homo sapiens
  misc_RNA (1)...(19): siRNA sense strand
gggauacaacggccucaga

SEQ ID NO: 784805 - RNA, 19 nt, Homo sapiens
  misc_RNA (1)...(19): siRNA sense strand
agggaucucuguccaucuu

SEQ ID NO: 784806 - RNA, 19 nt, Homo sapiens
  misc_RNA (1)...(19): siRNA sense strand
ucagcugcauugccuaucu

SEQ ID NO: 784807 - RNA, 19 nt, Homo sapiens
  misc_RNA (1)...(19): siRNA sense strand
cagagcagccucaaaagaa

SEQ ID NO: 784808 - RNA, 19 nt, Homo sapiens
  misc_RNA (1)...(19): siRNA sense strand
caccaucauuggaucucuu

SEQ ID NO: 784809 - RNA, 19 nt, Homo sapiens
  misc_RNA (1)...(19): siRNA sense strand
cuacagacaguggcaccua

SEQ ID NO: 784810 - RNA, 19 nt, Homo sapiens
  misc_RNA (1)...(19): siRNA sense strand
aaguagccauuaccaucaa

SEQ ID NO: 784811 - RNA, 19 nt, Homo sapiens
  misc_RNA (1)...(19): siRNA sense strand
agccagagaaccaccagua

SEQ ID NO: 784812 - RNA, 19 nt, Homo sapiens
  misc_RNA (1)...(19): siRNA sense strand
ugacacaagguccauaaac

SEQ ID NO: 784813 - RNA, 19 nt, Homo sapiens
  misc_RNA (1)...(19): siRNA sense strand
ggugacaacaacaucuaug

SEQ ID NO: 784814 - RNA, 19 nt, Homo sapiens
  misc_RNA (1)...(19): siRNA sense strand
ucaugaugcuggugacaac

SEQ ID NO: 784815 - RNA, 19 nt, Homo sapiens
  misc_RNA (1)...(19): siRNA sense strand
cacagagaagccagaauug

SEQ ID NO: 784816 - RNA, 19 nt, Homo sapiens
  misc_RNA (1)...(19): siRNA sense strand
caucagcugcauugccuau

SEQ ID NO: 784817 - RNA, 19 nt, Homo sapiens
  misc_RNA (1)...(19): siRNA sense strand
cagagaaccaccaguacca

SEQ ID NO: 784818 - RNA, 19 nt, Homo sapiens
  misc_RNA (1)...(19): siRNA sense strand
gccagcuggugccaacuuc

SEQ ID NO: 784819 - RNA, 19 nt, Homo sapiens
  misc_RNA (1)...(19): siRNA sense strand
ggacuaugaaggccaagac

SEQ ID NO: 784820 - RNA, 19 nt, Homo sapiens
  misc_RNA (1)...(19): siRNA sense strand
ugaucaccaucuauuauga

SEQ ID NO: 784821 - RNA, 19 nt, Homo sapiens
  misc_RNA (1)...(19): siRNA sense strand
gcauguacuuguuccucaa

SEQ ID NO: 784822 - RNA, 19 nt, Homo sapiens
  misc_RNA (1)...(19): siRNA sense strand
cucaauaguucaggacuuu

SEQ ID NO: 784823 - RNA, 19 nt, Homo sapiens
  misc_RNA (1)...(19): siRNA sense strand
aaacgcaacaccuacuuug

SEQ ID NO: 784824 - RNA, 19 nt, Homo sapiens
  misc_RNA (1)...(19): siRNA sense strand
cuauuaugaugucaagguu

SEQ ID NO: 784825 - RNA, 19 nt, Homo sapiens
  misc_RNA (1)...(19): siRNA sense strand
gcugucaguacgauuauug

SEQ ID NO: 784826 - RNA, 19 nt, Homo sapiens
  misc_RNA (1)...(19): siRNA sense strand
ugucaagguucgcuucauc

SEQ ID NO: 784827 - RNA, 19 nt, Homo sapiens
  misc_RNA (1)...(19): siRNA sense strand
gugaucaccaucuauuaug

SEQ ID NO: 784828 - RNA, 19 nt, Homo sapiens
  misc_RNA (1)...(19): siRNA sense strand
ccucaauaguucaggacuu

SEQ ID NO: 784829 - RNA, 19 nt, Homo sapiens
  misc_RNA (1)...(19): siRNA sense strand
guacuuguuccucaauagu

SEQ ID NO: 784830 - RNA, 19 nt, Homo sapiens
  misc_RNA (1)...(19): siRNA sense strand
uccuaccgcugccaagaaa

SEQ ID NO: 784831 - RNA, 19 nt, Homo sapiens
  misc_RNA (1)...(19): siRNA sense strand
caagguucgcuucaucguu

SEQ ID NO: 784832 - RNA, 19 nt, Homo sapiens
  misc_RNA (1)...(19): siRNA sense strand
acucccagauucagugguu

SEQ ID NO: 784833 - RNA, 19 nt, Homo sapiens
  misc_RNA (1)...(19): siRNA sense strand
uauugcaacuccuggucaa

SEQ ID NO: 784834 - RNA, 19 nt, Homo sapiens
  misc_RNA (1)...(19): siRNA sense strand
ccagugcugucaguacgau

SEQ ID NO: 784835 - RNA, 19 nt, Homo sapiens
  misc_RNA (1)...(19): siRNA sense strand
gaaccugggcuugucuuuu

SEQ ID NO: 784836 - RNA, 19 nt, Homo sapiens
  misc_RNA (1)...(19): siRNA sense strand
guggacaguacauuuccua

SEQ ID NO: 784837 - RNA, 19 nt, Homo sapiens
  misc_RNA (1)...(19): siRNA sense strand
gcaaguaacucccugauuu

SEQ ID NO: 784838 - RNA, 19 nt, Homo sapiens
  misc_RNA (1)...(19): siRNA sense strand
gcaaauauguggagaaacu

SEQ ID NO: 784839 - RNA, 19 nt, Homo sapiens
  misc_RNA (1)...(19): siRNA sense strand
ccaggucucucgaaagaaa

SEQ ID NO: 784840 - RNA, 19 nt, Homo sapiens
  misc_RNA (1)...(19): siRNA sense strand
cagcaaauauguggagaaa

SEQ ID NO: 784841 - RNA, 19 nt, Homo sapiens
  misc_RNA (1)...(19): siRNA sense strand
ggaaaugaagccugugauu

SEQ ID NO: 784842 - RNA, 19 nt, Homo sapiens
  misc_RNA (1)...(19): siRNA sense strand
ugucgaccaucauaucuua

SEQ ID NO: 784843 - RNA, 19 nt, Homo sapiens
  misc_RNA (1)...(19): siRNA sense strand
gaaaagaccagaagacuau

SEQ ID NO: 784844 - RNA, 19 nt, Homo sapiens
  misc_RNA (1)...(19): siRNA sense strand
uugcagaucuccaugcuuu

SEQ ID NO: 784845 - RNA, 19 nt, Homo sapiens
  misc_RNA (1)...(19): siRNA sense strand
ccagagaguaucuugauuu

SEQ ID NO: 784846 - RNA, 19 nt, Homo sapiens
  misc_RNA (1)...(19): siRNA sense strand
gaccagaagacuaucuaua

SEQ ID NO: 784847 - RNA, 19 nt, Homo sapiens
  misc_RNA (1)...(19): siRNA sense strand
caaaggacagcaaauaugu

SEQ ID NO: 784848 - RNA, 19 nt, Homo sapiens
  misc_RNA (1)...(19): siRNA sense strand
gaagugcagucagaucuca

SEQ ID NO: 784849 - RNA, 19 nt, Homo sapiens
  misc_RNA (1)...(19): siRNA sense strand
ggccauuagugcaauauau

SEQ ID NO: 784850 - RNA, 19 nt, Homo sapiens
  misc_RNA (1)...(19): siRNA sense strand
caacauggaccuuaaaauu

SEQ ID NO: 784851 - RNA, 19 nt, Homo sapiens
  misc_RNA (1)...(19): siRNA sense strand
aggaagcccugucagcaua

SEQ ID NO: 784852 - RNA, 19 nt, Homo sapiens
  misc_RNA (1)...(19): siRNA sense strand
caacugaggcugaggaagu

SEQ ID NO: 784853 - RNA, 19 nt, Homo sapiens
  misc_RNA (1)...(19): siRNA sense strand
gccauuagugcaauauaua

SEQ ID NO: 784854 - RNA, 19 nt, Homo sapiens
  misc_RNA (1)...(19): siRNA sense strand
aaacaacgaucugugaagu

SEQ ID NO: 784855 - RNA, 19 nt, Homo sapiens
  misc_RNA (1)...(19): siRNA sense strand
gcaaguggacaaggaauug

SEQ ID NO: 784856 - RNA, 19 nt, Homo sapiens
  misc_RNA (1)...(19): siRNA sense strand
agauugaccuccaugcauu

SEQ ID NO: 784857 - RNA, 19 nt, Homo sapiens
  misc_RNA (1)...(19): siRNA sense strand
ccaaaggacagcaaauaug

SEQ ID NO: 784858 - RNA, 19 nt, Homo sapiens
  misc_RNA (1)...(19): siRNA sense strand
ggaagucuuugugccaguu

SEQ ID NO: 784859 - RNA, 19 nt, Homo sapiens
  misc_RNA (1)...(19): siRNA sense strand
cagccucccuguccaagaa

SEQ ID NO: 784860 - RNA, 19 nt, Homo sapiens
  misc_RNA (1)...(19): siRNA sense strand
gggagcaaguggacaagga

SEQ ID NO: 784861 - RNA, 19 nt, Homo sapiens
  misc_RNA (1)...(19): siRNA sense strand
gaauuggacagggcaagua

SEQ ID NO: 784862 - RNA, 19 nt, Homo sapiens
  misc_RNA (1)...(19): siRNA sense strand
gugcggcaguuggcuauuu

SEQ ID NO: 784863 - RNA, 19 nt, Homo sapiens
  misc_RNA (1)...(19): siRNA sense strand
cagcuaugauguccugguu

SEQ ID NO: 784864 - RNA, 19 nt, Homo sapiens
  misc_RNA (1)...(19): siRNA sense strand
gcaggagucccgaccucua

SEQ ID NO: 784865 - RNA, 19 nt, Homo sapiens
  misc_RNA (1)...(19): siRNA sense strand
gcaguuggcuauuuucugu

SEQ ID NO: 784866 - RNA, 19 nt, Homo sapiens
  misc_RNA (1)...(19): siRNA sense strand
gauugaccuccaugcauua

SEQ ID NO: 784867 - RNA, 19 nt, Homo sapiens
  misc_RNA (1)...(19): siRNA sense strand
gaagcccugucagcauauu

SEQ ID NO: 784868 - RNA, 19 nt, Homo sapiens
  misc_RNA (1)...(19): siRNA sense strand
uaaccuccaugccuaucuu

SEQ ID NO: 784869 - RNA, 19 nt, Homo sapiens
  misc_RNA (1)...(19): siRNA sense strand
acacccaggucucucgaaa

SEQ ID NO: 784870 - RNA, 19 nt, Homo sapiens
  misc_RNA (1)...(19): siRNA sense strand
gaugagugcccucuagauc

SEQ ID NO: 784871 - RNA, 19 nt, Homo sapiens
  misc_RNA (1)...(19): siRNA sense strand
caaguaacucccugauuuc

SEQ ID NO: 784872 - RNA, 19 nt, Homo sapiens
  misc_RNA (1)...(19): siRNA sense strand
gucccgaccucuacauguu

SEQ ID NO: 784873 - RNA, 19 nt, Homo sapiens
  misc_RNA (1)...(19): siRNA sense strand
ugaccuccaugcauuauac

SEQ ID NO: 784874 - RNA, 19 nt, Homo sapiens
  misc_RNA (1)...(19): siRNA sense strand
ugaacagcuugguggauga

SEQ ID NO: 784875 - RNA, 19 nt, Homo sapiens
  misc_RNA (1)...(19): siRNA sense strand
acccaggucucucgaaaga

SEQ ID NO: 784876 - RNA, 19 nt, Homo sapiens
  misc_RNA (1)...(19): siRNA sense strand
cagagaguaucuugauuuu

SEQ ID NO: 784877 - RNA, 19 nt, Homo sapiens
  misc_RNA (1)...(19): siRNA sense strand
gagaagugcagucagaucu

SEQ ID NO: 784878 - RNA, 19 nt, Homo sapiens
  misc_RNA (1)...(19): siRNA sense strand
gagauugaccuccaugcau

SEQ ID NO: 784879 - RNA, 19 nt, Homo sapiens
  misc_RNA (1)...(19): siRNA sense strand
guucauauuccagagagua

SEQ ID NO: 784880 - RNA, 19 nt, Homo sapiens
  misc_RNA (1)...(19): siRNA sense strand
ccaaacaacgaucugugaa

SEQ ID NO: 784881 - RNA, 19 nt, Homo sapiens
  misc_RNA (1)...(19): siRNA sense strand
gugucaacauggaccuuaa

SEQ ID NO: 784882 - RNA, 19 nt, Homo sapiens
  misc_RNA (1)...(19): siRNA sense strand
ggagcaaguggacaaggaa

SEQ ID NO: 784883 - RNA, 19 nt, Homo sapiens
  misc_RNA (1)...(19): siRNA sense strand
gcgucaagguggccauuag

SEQ ID NO: 784884 - RNA, 19 nt, Homo sapiens
  misc_RNA (1)...(19): siRNA sense strand
ucagaagguucauauucca

SEQ ID NO: 784885 - RNA, 19 nt, Homo sapiens
  misc_RNA (1)...(19): siRNA sense strand
guggaugagugcccucuag

SEQ ID NO: 784886 - RNA, 19 nt, Homo sapiens
  misc_RNA (1)...(19): siRNA sense strand
cgacgcccaugaacagcuu

SEQ ID NO: 784887 - RNA, 19 nt, Homo sapiens
  misc_RNA (1)...(19): siRNA sense strand
gguggccauuagugcaaua

SEQ ID NO: 784888 - RNA, 19 nt, Homo sapiens
  misc_RNA (1)...(19): siRNA sense strand
ccucaaguacccacccuaa

SEQ ID NO: 784889 - RNA, 19 nt, Homo sapiens
  misc_RNA (1)...(19): siRNA sense strand
gaucugugaaguccuggaa

SEQ ID NO: 784890 - RNA, 19 nt, Homo sapiens
  misc_RNA (1)...(19): siRNA sense strand
caaauauguggagaaacua

SEQ ID NO: 784891 - RNA, 19 nt, Homo sapiens
  misc_RNA (1)...(19): siRNA sense strand
cuacccaagagaaaugaua

SEQ ID NO: 784892 - RNA, 19 nt, Homo sapiens
  misc_RNA (1)...(19): siRNA sense strand
gaccuacccaagagaaaug

SEQ ID NO: 784893 - RNA, 19 nt, Homo sapiens
  misc_RNA (1)...(19): siRNA sense strand
ugcccucccugccauguuu

SEQ ID NO: 784894 - RNA, 19 nt, Homo sapiens
  misc_RNA (1)...(19): siRNA sense strand
caaacaacgaucugugaag

SEQ ID NO: 784895 - RNA, 19 nt, Homo sapiens
  misc_RNA (1)...(19): siRNA sense strand
gaagucuuugugccaguuu

SEQ ID NO: 784896 - RNA, 19 nt, Homo sapiens
  misc_RNA (1)...(19): siRNA sense strand
gcaaacugcagcccuucug

SEQ ID NO: 784897 - RNA, 19 nt, Homo sapiens
  misc_RNA (1)...(19): siRNA sense strand
ccaacucacccucauccuu

SEQ ID NO: 784898 - RNA, 19 nt, Homo sapiens
  misc_RNA (1)...(19): siRNA sense strand
ccagggagcaaguggacaa

SEQ ID NO: 784899 - RNA, 19 nt, Homo sapiens
  misc_RNA (1)...(19): siRNA sense strand
cugccaggcucacagcuau

SEQ ID NO: 784900 - RNA, 19 nt, Homo sapiens
  misc_RNA (1)...(19): siRNA sense strand
cccaaaggacagcaaauau

SEQ ID NO: 784901 - RNA, 19 nt, Homo sapiens
  misc_RNA (1)...(19): siRNA sense strand
gaaaggcaaccccaaagga

SEQ ID NO: 784902 - RNA, 19 nt, Homo sapiens
  misc_RNA (1)...(19): siRNA sense strand
ggaugagauugaccuccau

SEQ ID NO: 784903 - RNA, 19 nt, Homo sapiens
  misc_RNA (1)...(19): siRNA sense strand
ggaugagugcccucuagau

SEQ ID NO: 784904 - RNA, 19 nt, Homo sapiens
  misc_RNA (1)...(19): siRNA sense strand
ccugauuucuggacugagu

SEQ ID NO: 784905 - RNA, 19 nt, Homo sapiens
  misc_RNA (1)...(19): siRNA sense strand
ccuggacugugucaacaug

SEQ ID NO: 784906 - RNA, 19 nt, Homo sapiens
  misc_RNA (1)...(19): siRNA sense strand
gcagaucuccaugcuuucu

SEQ ID NO: 784907 - RNA, 19 nt, Homo sapiens
  misc_RNA (1)...(19): siRNA sense strand
ggcaaguaacucccugauu

SEQ ID NO: 784908 - RNA, 19 nt, Homo sapiens
  misc_RNA (1)...(19): siRNA sense strand
gagaaacuagaggcccuuu

SEQ ID NO: 784909 - RNA, 19 nt, Homo sapiens
  misc_RNA (1)...(19): siRNA sense strand
ugagugcccucuagaucag

SEQ ID NO: 784910 - RNA, 19 nt, Homo sapiens
  misc_RNA (1)...(19): siRNA sense strand
ggaagcccugucagcauau

SEQ ID NO: 784911 - RNA, 19 nt, Homo sapiens
  misc_RNA (1)...(19): siRNA sense strand
ccauguggcacuccaaaca

SEQ ID NO: 784912 - RNA, 19 nt, Homo sapiens
  misc_RNA (1)...(19): siRNA sense strand
ccagaccuacccaagagaa

SEQ ID NO: 784913 - RNA, 19 nt, Homo sapiens
  misc_RNA (1)...(19): siRNA sense strand
ucccagaccuacccaagag

SEQ ID NO: 784914 - RNA, 19 nt, Homo sapiens
  misc_RNA (1)...(19): siRNA sense strand
ggaauuggacagggcaagu

SEQ ID NO: 784915 - RNA, 19 nt, Homo sapiens
  misc_RNA (1)...(19): siRNA sense strand
uccagagaguaucuugauu

SEQ ID NO: 784916 - RNA, 19 nt, Homo sapiens
  misc_RNA (1)...(19): siRNA sense strand
aaugaagccugugauuugg

SEQ ID NO: 784917 - RNA, 19 nt, Homo sapiens
  misc_RNA (1)...(19): siRNA sense strand
gagcaaguggacaaggaau

SEQ ID NO: 784918 - RNA, 19 nt, Homo sapiens
  misc_RNA (1)...(19): siRNA sense strand
cugaggccgucuucgagaa

SEQ ID NO: 784919 - RNA, 19 nt, Homo sapiens
  misc_RNA (1)...(19): siRNA sense strand
ucccugccauguuucaguu

SEQ ID NO: 784920 - RNA, 19 nt, Homo sapiens
  misc_RNA (1)...(19): siRNA sense strand
uucgagaagugcagucaga

SEQ ID NO: 784921 - RNA, 19 nt, Homo sapiens
  misc_RNA (1)...(19): siRNA sense strand
uccaaacaacgaucuguga

SEQ ID NO: 784922 - RNA, 19 nt, Homo sapiens
  misc_RNA (1)...(19): siRNA sense strand
gcacuccaaacaacgaucu

SEQ ID NO: 784923 - RNA, 19 nt, Homo sapiens
  misc_RNA (1)...(19): siRNA sense strand
uacauguugugcugggaaa

SEQ ID NO: 784924 - RNA, 19 nt, Homo sapiens
  misc_RNA (1)...(19): siRNA sense strand
cccaagagaaaugauauau

SEQ ID NO: 784925 - RNA, 19 nt, Homo sapiens
  misc_RNA (1)...(19): siRNA sense strand
ccaucauccuggacugugu

SEQ ID NO: 784926 - RNA, 19 nt, Homo sapiens
  misc_RNA (1)...(19): siRNA sense strand
ccugccauguuucaguuga

SEQ ID NO: 784927 - RNA, 19 nt, Homo sapiens
  misc_RNA (1)...(19): siRNA sense strand
gccaggcucacagcuauga

SEQ ID NO: 784928 - RNA, 19 nt, Homo sapiens
  misc_RNA (1)...(19): siRNA sense strand
gaaggcagcugacauuauc

SEQ ID NO: 784929 - RNA, 19 nt, Homo sapiens
  misc_RNA (1)...(19): siRNA sense strand
caacagaaacugauauuga

SEQ ID NO: 784930 - RNA, 19 nt, Homo sapiens
  misc_RNA (1)...(19): siRNA sense strand
gcaagcggcucucguggaa

SEQ ID NO: 784931 - RNA, 19 nt, Homo sapiens
  misc_RNA (1)...(19): siRNA sense strand
ucagucagauaaagagaua

SEQ ID NO: 784932 - RNA, 19 nt, Homo sapiens
  misc_RNA (1)...(19): siRNA sense strand
ggaaacagguggguucauc

SEQ ID NO: 784933 - RNA, 19 nt, Homo sapiens
  misc_RNA (1)...(19): siRNA sense strand
gaagccacauucagucaga

SEQ ID NO: 784934 - RNA, 19 nt, Homo sapiens
  misc_RNA (1)...(19): siRNA sense strand
acaaagaugucccugucua

SEQ ID NO: 784935 - RNA, 19 nt, Homo sapiens
  misc_RNA (1)...(19): siRNA sense strand
gaccauccaugaaggcaaa

SEQ ID NO: 784936 - RNA, 19 nt, Homo sapiens
  misc_RNA (1)...(19): siRNA sense strand
gaagcucaccagagaaauu

SEQ ID NO: 784937 - RNA, 19 nt, Homo sapiens
  misc_RNA (1)...(19): siRNA sense strand
agagauagaugccuuugug

SEQ ID NO: 784938 - RNA, 19 nt, Homo sapiens
  misc_RNA (1)...(19): siRNA sense strand
gaguggcucuggaaauuca

SEQ ID NO: 784939 - RNA, 19 nt, Homo sapiens
  misc_RNA (1)...(19): siRNA sense strand
gagaaggcagcugacauua

SEQ ID NO: 784940 - RNA, 19 nt, Homo sapiens
  misc_RNA (1)...(19): siRNA sense strand
ggacauccaguuccauuuc

SEQ ID NO: 784941 - RNA, 19 nt, Homo sapiens
  misc_RNA (1)...(19): siRNA sense strand
ccaacuacuugucaacaga

SEQ ID NO: 784942 - RNA, 19 nt, Homo sapiens
  misc_RNA (1)...(19): siRNA sense strand
uggaguggcucuggaaauu

SEQ ID NO: 784943 - RNA, 19 nt, Homo sapiens
  misc_RNA (1)...(19): siRNA sense strand
ccacccagcaggaggcuua

SEQ ID NO: 784944 - RNA, 19 nt, Homo sapiens
  misc_RNA (1)...(19): siRNA sense strand
agagaaggcagcugacauu

SEQ ID NO: 784945 - RNA, 19 nt, Homo sapiens
  misc_RNA (1)...(19): siRNA sense strand
gaguggaggugccaucaac

SEQ ID NO: 784946 - RNA, 19 nt, Homo sapiens
  misc_RNA (1)...(19): siRNA sense strand
aagcggcucucguggaaga

SEQ ID NO: 784947 - RNA, 19 nt, Homo sapiens
  misc_RNA (1)...(19): siRNA sense strand
gaaugcugaugaccucaag

SEQ ID NO: 784948 - RNA, 19 nt, Homo sapiens
  misc_RNA (1)...(19): siRNA sense strand
cugaugaccucaagaaacu

SEQ ID NO: 784949 - RNA, 19 nt, Homo sapiens
  misc_RNA (1)...(19): siRNA sense strand
aagaccaccuggagaucua

SEQ ID NO: 784950 - RNA, 19 nt, Homo sapiens
  misc_RNA (1)...(19): siRNA sense strand
caaucaugaucgcagagaa

SEQ ID NO: 784951 - RNA, 19 nt, Homo sapiens
  misc_RNA (1)...(19): siRNA sense strand
ccacauucagucagauaaa

SEQ ID NO: 784952 - RNA, 19 nt, Homo sapiens
  misc_RNA (1)...(19): siRNA sense strand
gauccagcccaacuacuug

SEQ ID NO: 784953 - RNA, 19 nt, Homo sapiens
  misc_RNA (1)...(19): siRNA sense strand
aacagaaacugauauugag

SEQ ID NO: 784954 - RNA, 19 nt, Homo sapiens
  misc_RNA (1)...(19): siRNA sense strand
ccaggaagccacauucagu

SEQ ID NO: 784955 - RNA, 19 nt, Homo sapiens
  misc_RNA (1)...(19): siRNA sense strand
caacuacuugucaacagaa

SEQ ID NO: 784956 - RNA, 19 nt, Homo sapiens
  misc_RNA (1)...(19): siRNA sense strand
ucaaugccauggucuacgu

SEQ ID NO: 784957 - RNA, 19 nt, Homo sapiens
  misc_RNA (1)...(19): siRNA sense strand
aaagagcuccagccaggaa

SEQ ID NO: 784958 - RNA, 19 nt, Homo sapiens
  misc_RNA (1)...(19): siRNA sense strand
ucagauaaagagauagaug

SEQ ID NO: 784959 - RNA, 19 nt, Homo sapiens
  misc_RNA (1)...(19): siRNA sense strand
ggaaugcugaugaccucaa

SEQ ID NO: 784960 - RNA, 19 nt, Homo sapiens
  misc_RNA (1)...(19): siRNA sense strand
agaaggcagcugacauuau

SEQ ID NO: 784961 - RNA, 19 nt, Homo sapiens
  misc_RNA (1)...(19): siRNA sense strand
gcugaugaccucaagaaac

SEQ ID NO: 784962 - RNA, 19 nt, Homo sapiens
  misc_RNA (1)...(19): siRNA sense strand
agaaacugauauugaggau

SEQ ID NO: 784963 - RNA, 19 nt, Homo sapiens
  misc_RNA (1)...(19): siRNA sense strand
aagcucaccagagaaauuu

SEQ ID NO: 784964 - RNA, 19 nt, Homo sapiens
  misc_RNA (1)...(19): siRNA sense strand
gaaacugauauugaggauu

SEQ ID NO: 784965 - RNA, 19 nt, Homo sapiens
  misc_RNA (1)...(19): siRNA sense strand
gcagugggcguggaguaug

SEQ ID NO: 784966 - RNA, 19 nt, Homo sapiens
  misc_RNA (1)...(19): siRNA sense strand
agaugucccugucuacaag

SEQ ID NO: 784967 - RNA, 19 nt, Homo sapiens
  misc_RNA (1)...(19): siRNA sense strand
gcagagaaggcagcugaca

SEQ ID NO: 784968 - RNA, 19 nt, Homo sapiens
  misc_RNA (1)...(19): siRNA sense strand
gcucaccgaggacaugaau

SEQ ID NO: 784969 - RNA, 19 nt, Homo sapiens
  misc_RNA (1)...(19): siRNA sense strand
gcacugccugcccuacuuc

SEQ ID NO: 784970 - RNA, 19 nt, Homo sapiens
  misc_RNA (1)...(19): siRNA sense strand
cagugggcguggaguaugu

SEQ ID NO: 784971 - RNA, 19 nt, Homo sapiens
  misc_RNA (1)...(19): siRNA sense strand
gucaacagaaacugauauu

SEQ ID NO: 784972 - RNA, 19 nt, Homo sapiens
  misc_RNA (1)...(19): siRNA sense strand
gcaagaccaccuggagauc

SEQ ID NO: 784973 - RNA, 19 nt, Homo sapiens
  misc_RNA (1)...(19): siRNA sense strand
gggcuuaugccagcaagga

SEQ ID NO: 784974 - RNA, 19 nt, Homo sapiens
  misc_RNA (1)...(19): siRNA sense strand
ucaccgaggacaugaaugg

SEQ ID NO: 784975 - RNA, 19 nt, Homo sapiens
  misc_RNA (1)...(19): siRNA sense strand
cacauucagucagauaaag

SEQ ID NO: 784976 - RNA, 19 nt, Homo sapiens
  misc_RNA (1)...(19): siRNA sense strand
cagcccaacuacuugucaa

SEQ ID NO: 784977 - RNA, 19 nt, Homo sapiens
  misc_RNA (1)...(19): siRNA sense strand
ccaagaccacccugugauc

SEQ ID NO: 784978 - RNA, 19 nt, Homo sapiens
  misc_RNA (1)...(19): siRNA sense strand
aaacugagaagugccaauc

SEQ ID NO: 784979 - RNA, 19 nt, Homo sapiens
  misc_RNA (1)...(19): siRNA sense strand
ggaguggcucuggaaauuc

SEQ ID NO: 784980 - RNA, 19 nt, Homo sapiens
  misc_RNA (1)...(19): siRNA sense strand
ccaccuggagaucuacauu

SEQ ID NO: 784981 - RNA, 19 nt, Homo sapiens
  misc_RNA (1)...(19): siRNA sense strand
caaagaugucccugucuac

SEQ ID NO: 784982 - RNA, 19 nt, Homo sapiens
  misc_RNA (1)...(19): siRNA sense strand
gugcagugggcguggagua

SEQ ID NO: 784983 - RNA, 19 nt, Homo sapiens
  misc_RNA (1)...(19): siRNA sense strand
gauuuccgucuguguguga

SEQ ID NO: 784984 - RNA, 19 nt, Homo sapiens
  misc_RNA (1)...(19): siRNA sense strand
ugauccagcccaacuacuu

SEQ ID NO: 784985 - RNA, 19 nt, Homo sapiens
  misc_RNA (1)...(19): siRNA sense strand
gccacauucagucagauaa

SEQ ID NO: 784986 - RNA, 19 nt, Homo sapiens
  misc_RNA (1)...(19): siRNA sense strand
gagugugggcuggcucaaa

SEQ ID NO: 784987 - RNA, 19 nt, Homo sapiens
  misc_RNA (1)...(19): siRNA sense strand
gaaagcagaucaagggaau

SEQ ID NO: 784988 - RNA, 19 nt, Homo sapiens
  misc_RNA (1)...(19): siRNA sense strand
gaacacagagcauuccuaa

SEQ ID NO: 784989 - RNA, 19 nt, Homo sapiens
  misc_RNA (1)...(19): siRNA sense strand
ggaggacucugauggagaa

SEQ ID NO: 784990 - RNA, 19 nt, Homo sapiens
  misc_RNA (1)...(19): siRNA sense strand
ugacgaugcugaagauuga

SEQ ID NO: 784991 - RNA, 19 nt, Homo sapiens
  misc_RNA (1)...(19): siRNA sense strand
gagcauuucucaagagcuu

SEQ ID NO: 784992 - RNA, 19 nt, Homo sapiens
  misc_RNA (1)...(19): siRNA sense strand
aaggagacaugaucuauga

SEQ ID NO: 784993 - RNA, 19 nt, Homo sapiens
  misc_RNA (1)...(19): siRNA sense strand
ggaacagccuggcgaucuu

SEQ ID NO: 784994 - RNA, 19 nt, Homo sapiens
  misc_RNA (1)...(19): siRNA sense strand
ccacugauacccuauuauu

SEQ ID NO: 784995 - RNA, 19 nt, Homo sapiens
  misc_RNA (1)...(19): siRNA sense strand
ggaaggcuuugccauggau

SEQ ID NO: 784996 - RNA, 19 nt, Homo sapiens
  misc_RNA (1)...(19): siRNA sense strand
ggacucugauggagaacug

SEQ ID NO: 784997 - RNA, 19 nt, Homo sapiens
  misc_RNA (1)...(19): siRNA sense strand
gaacagccuggcgaucuuu

SEQ ID NO: 784998 - RNA, 19 nt, Homo sapiens
  misc_RNA (1)...(19): siRNA sense strand
ucaagggaauccauaugau

SEQ ID NO: 784999 - RNA, 19 nt, Homo sapiens
  misc_RNA (1)...(19): siRNA sense strand
gaucaagggaauccauaug

SEQ ID NO: 785000 - RNA, 19 nt, Homo sapiens
  misc_RNA (1)...(19): siRNA sense strand
caagggaauccauaugaug

SEQ ID NO: 785001 - RNA, 19 nt, Homo sapiens
  misc_RNA (1)...(19): siRNA sense strand
ggagagagagacugagaag

SEQ ID NO: 785002 - RNA, 19 nt, Homo sapiens
  misc_RNA (1)...(19): siRNA sense strand
ccauccgccuccacugaua

SEQ ID NO: 785003 - RNA, 19 nt, Homo sapiens
  misc_RNA (1)...(19): siRNA sense strand
gcauuucucaagagcuuaa

SEQ ID NO: 785004 - RNA, 19 nt, Homo sapiens
  misc_RNA (1)...(19): siRNA sense strand
gggcacccauucugaagag

SEQ ID NO: 785005 - RNA, 19 nt, Homo sapiens
  misc_RNA (1)...(19): siRNA sense strand
cuccacugauacccuauua

SEQ ID NO: 785006 - RNA, 19 nt, Homo sapiens
  misc_RNA (1)...(19): siRNA sense strand
caaggagacaugaucuaug

SEQ ID NO: 785007 - RNA, 19 nt, Homo sapiens
  misc_RNA (1)...(19): siRNA sense strand
caaacuguccacccaagga

SEQ ID NO: 785008 - RNA, 19 nt, Homo sapiens
  misc_RNA (1)...(19): siRNA sense strand
cagaucaagggaauccaua

SEQ ID NO: 785009 - RNA, 19 nt, Homo sapiens
  misc_RNA (1)...(19): siRNA sense strand
ugagaaggcuauggaucga

SEQ ID NO: 785010 - RNA, 19 nt, Homo sapiens
  misc_RNA (1)...(19): siRNA sense strand
guuugacgaugcugaagau

SEQ ID NO: 785011 - RNA, 19 nt, Homo sapiens
  misc_RNA (1)...(19): siRNA sense strand
gagagacugagaaggcuau

SEQ ID NO: 785012 - RNA, 19 nt, Homo sapiens
  misc_RNA (1)...(19): siRNA sense strand
gaucgacuagcccguggaa

SEQ ID NO: 785013 - RNA, 19 nt, Homo sapiens
  misc_RNA (1)...(19): siRNA sense strand
agacugagaaggcuaugga

SEQ ID NO: 785014 - RNA, 19 nt, Homo sapiens
  misc_RNA (1)...(19): siRNA sense strand
acaaggagacaugaucuau

SEQ ID NO: 785015 - RNA, 19 nt, Homo sapiens
  misc_RNA (1)...(19): siRNA sense strand
uggaugaggaggacucuga

SEQ ID NO: 785016 - RNA, 19 nt, Homo sapiens
  misc_RNA (1)...(19): siRNA sense strand
gcagaucaagggaauccau

SEQ ID NO: 785017 - RNA, 19 nt, Homo sapiens
  misc_RNA (1)...(19): siRNA sense strand
cacccauucugaagaggaa

SEQ ID NO: 785018 - RNA, 19 nt, Homo sapiens
  misc_RNA (1)...(19): siRNA sense strand
caggagagagagacugaga

SEQ ID NO: 785019 - RNA, 19 nt, Homo sapiens
  misc_RNA (1)...(19): siRNA sense strand
ucugauggagaacugaaua

SEQ ID NO: 785020 - RNA, 19 nt, Homo sapiens
  misc_RNA (1)...(19): siRNA sense strand
gaggcuggcuuugcuacag

SEQ ID NO: 785021 - RNA, 19 nt, Homo sapiens
  misc_RNA (1)...(19): siRNA sense strand
gugagggcacccauucuga

SEQ ID NO: 785022 - RNA, 19 nt, Homo sapiens
  misc_RNA (1)...(19): siRNA sense strand
ccacaaggagacaugaucu

SEQ ID NO: 785023 - RNA, 19 nt, Homo sapiens
  misc_RNA (1)...(19): siRNA sense strand
ugagggcacccauucugaa

SEQ ID NO: 785024 - RNA, 19 nt, Homo sapiens
  misc_RNA (1)...(19): siRNA sense strand
caccauccgccuccacuga

SEQ ID NO: 785025 - RNA, 19 nt, Homo sapiens
  misc_RNA (1)...(19): siRNA sense strand
aaacuguccacccaaggaa

SEQ ID NO: 785026 - RNA, 19 nt, Homo sapiens
  misc_RNA (1)...(19): siRNA sense strand
cauaugaugcugacgacau

SEQ ID NO: 785027 - RNA, 19 nt, Homo sapiens
  misc_RNA (1)...(19): siRNA sense strand
ugaggaggacucugaugga

SEQ ID NO: 785028 - RNA, 19 nt, Homo sapiens
  misc_RNA (1)...(19): siRNA sense strand
cacaaggagacaugaucua

SEQ ID NO: 785029 - RNA, 19 nt, Homo sapiens
  misc_RNA (1)...(19): siRNA sense strand
gaugaggaggacucugaug

SEQ ID NO: 785030 - RNA, 19 nt, Homo sapiens
  misc_RNA (1)...(19): siRNA sense strand
cgacauccaggagagcauu

SEQ ID NO: 785031 - RNA, 19 nt, Homo sapiens
  misc_RNA (1)...(19): siRNA sense strand
gaacaaccuuccauucuaa

SEQ ID NO: 785032 - RNA, 19 nt, Homo sapiens
  misc_RNA (1)...(19): siRNA sense strand
caacaaagauacagugauu

SEQ ID NO: 785033 - RNA, 19 nt, Homo sapiens
  misc_RNA (1)...(19): siRNA sense strand
gaagauagaugccauagag

SEQ ID NO: 785034 - RNA, 19 nt, Homo sapiens
  misc_RNA (1)...(19): siRNA sense strand
caacagaaauugaaacuag

SEQ ID NO: 785035 - RNA, 19 nt, Homo sapiens
  misc_RNA (1)...(19): siRNA sense strand
ccacacauguuuaguagua

SEQ ID NO: 785036 - RNA, 19 nt, Homo sapiens
  misc_RNA (1)...(19): siRNA sense strand
gagcaaagcauauaugaaa

SEQ ID NO: 785037 - RNA, 19 nt, Homo sapiens
  misc_RNA (1)...(19): siRNA sense strand
gaggauggcuauaaaggua

SEQ ID NO: 785038 - RNA, 19 nt, Homo sapiens
  misc_RNA (1)...(19): siRNA sense strand
gaacucaugucgcuguuga

SEQ ID NO: 785039 - RNA, 19 nt, Homo sapiens
  misc_RNA (1)...(19): siRNA sense strand
ggaaaugucucagcuuaug

SEQ ID NO: 785040 - RNA, 19 nt, Homo sapiens
  misc_RNA (1)...(19): siRNA sense strand
ucaugucgcuguugaauuu

SEQ ID NO: 785041 - RNA, 19 nt, Homo sapiens
  misc_RNA (1)...(19): siRNA sense strand
ggccaaucauccuuuauua

SEQ ID NO: 785042 - RNA, 19 nt, Homo sapiens
  misc_RNA (1)...(19): siRNA sense strand
gauauugacuguaauccuu

SEQ ID NO: 785043 - RNA, 19 nt, Homo sapiens
  misc_RNA (1)...(19): siRNA sense strand
caucuugucugaauugaaa

SEQ ID NO: 785044 - RNA, 19 nt, Homo sapiens
  misc_RNA (1)...(19): siRNA sense strand
gaaaggauucaucuaauug

SEQ ID NO: 785045 - RNA, 19 nt, Homo sapiens
  misc_RNA (1)...(19): siRNA sense strand
caaaauggcuuuaacaaga

SEQ ID NO: 785046 - RNA, 19 nt, Homo sapiens
  misc_RNA (1)...(19): siRNA sense strand
uaaaggaaccuacacauug

SEQ ID NO: 785047 - RNA, 19 nt, Homo sapiens
  misc_RNA (1)...(19): siRNA sense strand
caagaaagaucgaauugag

SEQ ID NO: 785048 - RNA, 19 nt, Homo sapiens
  misc_RNA (1)...(19): siRNA sense strand
caaagagaguuguugaaga

SEQ ID NO: 785049 - RNA, 19 nt, Homo sapiens
  misc_RNA (1)...(19): siRNA sense strand
gauggaggauggcuauaaa

SEQ ID NO: 785050 - RNA, 19 nt, Homo sapiens
  misc_RNA (1)...(19): siRNA sense strand
caauacaguucaagagaaa

SEQ ID NO: 785051 - RNA, 19 nt, Homo sapiens
  misc_RNA (1)...(19): siRNA sense strand
uggaagaccuuucggaauu

SEQ ID NO: 785052 - RNA, 19 nt, Homo sapiens
  misc_RNA (1)...(19): siRNA sense strand
gcauagguaccucagauua

SEQ ID NO: 785053 - RNA, 19 nt, Homo sapiens
  misc_RNA (1)...(19): siRNA sense strand
aaacaguaccgacacauua

SEQ ID NO: 785054 - RNA, 19 nt, Homo sapiens
  misc_RNA (1)...(19): siRNA sense strand
gggaggcucuguucacaaa

SEQ ID NO: 785055 - RNA, 19 nt, Homo sapiens
  misc_RNA (1)...(19): siRNA sense strand
guacauaaacauggacuua

SEQ ID NO: 785056 - RNA, 19 nt, Homo sapiens
  misc_RNA (1)...(19): siRNA sense strand
aaggaaaugucucagcuua

SEQ ID NO: 785057 - RNA, 19 nt, Homo sapiens
  misc_RNA (1)...(19): siRNA sense strand
gauauagccacauuacuaa

SEQ ID NO: 785058 - RNA, 19 nt, Homo sapiens
  misc_RNA (1)...(19): siRNA sense strand
cacagaagcuuuagaaucu

SEQ ID NO: 785059 - RNA, 19 nt, Homo sapiens
  misc_RNA (1)...(19): siRNA sense strand
ggagguggauggaacauag

SEQ ID NO: 785060 - RNA, 19 nt, Homo sapiens
  misc_RNA (1)...(19): siRNA sense strand
caagaaagagauguaguua

SEQ ID NO: 785061 - RNA, 19 nt, Homo sapiens
  misc_RNA (1)...(19): siRNA sense strand
ggaauuggaagaccuuaaa

SEQ ID NO: 785062 - RNA, 19 nt, Homo sapiens
  misc_RNA (1)...(19): siRNA sense strand
ggagaggaaucaaaugagu

SEQ ID NO: 785063 - RNA, 19 nt, Homo sapiens
  misc_RNA (1)...(19): siRNA sense strand
ccaauacaguucaagagaa

SEQ ID NO: 785064 - RNA, 19 nt, Homo sapiens
  misc_RNA (1)...(19): siRNA sense strand
cagcagauauagccacauu

SEQ ID NO: 785065 - RNA, 19 nt, Homo sapiens
  misc_RNA (1)...(19): siRNA sense strand
gcugguggauuaggaauaa

SEQ ID NO: 785066 - RNA, 19 nt, Homo sapiens
  misc_RNA (1)...(19): siRNA sense strand
ggaugcaucuugucugaau

SEQ ID NO: 785067 - RNA, 19 nt, Homo sapiens
  misc_RNA (1)...(19): siRNA sense strand
gauuugauauggcacugua

SEQ ID NO: 785068 - RNA, 19 nt, Homo sapiens
  misc_RNA (1)...(19): siRNA sense strand
gagaaguacucaaggaaca

SEQ ID NO: 785069 - RNA, 19 nt, Homo sapiens
  misc_RNA (1)...(19): siRNA sense strand
guacacagaagcuuuagaa

SEQ ID NO: 785070 - RNA, 19 nt, Homo sapiens
  misc_RNA (1)...(19): siRNA sense strand
caaacaagcagaagauaga

SEQ ID NO: 785071 - RNA, 19 nt, Homo sapiens
  misc_RNA (1)...(19): siRNA sense strand
gcaaugucaugaugcaguu

SEQ ID NO: 785072 - RNA, 19 nt, Homo sapiens
  misc_RNA (1)...(19): siRNA sense strand
ggccauaugcugaagaaua

SEQ ID NO: 785073 - RNA, 19 nt, Homo sapiens
  misc_RNA (1)...(19): siRNA sense strand
aaagugagguuccaaaugg

SEQ ID NO: 785074 - RNA, 19 nt, Homo sapiens
  misc_RNA (1)...(19): siRNA sense strand
gcacguagaaaugaugaua

SEQ ID NO: 785075 - RNA, 19 nt, Homo sapiens
  misc_RNA (1)...(19): siRNA sense strand
aacaaaagcugguggauua

SEQ ID NO: 785076 - RNA, 19 nt, Homo sapiens
  misc_RNA (1)...(19): siRNA sense strand
gaagauauggaaguuauga

SEQ ID NO: 785077 - RNA, 19 nt, Homo sapiens
  misc_RNA (1)...(19): siRNA sense strand
caagaagaacguaaacaaa

SEQ ID NO: 785078 - RNA, 19 nt, Homo sapiens
  misc_RNA (1)...(19): siRNA sense strand
ggaagaccuuucggaauug

SEQ ID NO: 785079 - RNA, 19 nt, Homo sapiens
  misc_RNA (1)...(19): siRNA sense strand
ggcaaacacuccugauuca

SEQ ID NO: 785080 - RNA, 19 nt, Homo sapiens
  misc_RNA (1)...(19): siRNA sense strand
gaagaauguuuuccucuaa

SEQ ID NO: 785081 - RNA, 19 nt, Homo sapiens
  misc_RNA (1)...(19): siRNA sense strand
caauaugcaucacaaagug

SEQ ID NO: 785082 - RNA, 19 nt, Homo sapiens
  misc_RNA (1)...(19): siRNA sense strand
acaaagaagugacaaugau

SEQ ID NO: 785083 - RNA, 19 nt, Homo sapiens
  misc_RNA (1)...(19): siRNA sense strand
gcacaccuguacagaacaa

SEQ ID NO: 785084 - RNA, 19 nt, Homo sapiens
  misc_RNA (1)...(19): siRNA sense strand
gauguacacagaagcuuua

SEQ ID NO: 785085 - RNA, 19 nt, Homo sapiens
  misc_RNA (1)...(19): siRNA sense strand
ugaagacucugaauaugau

SEQ ID NO: 785086 - RNA, 19 nt, Homo sapiens
  misc_RNA (1)...(19): siRNA sense strand
cgaacuacauguacuuugu

SEQ ID NO: 785087 - RNA, 19 nt, Homo sapiens
  misc_RNA (1)...(19): siRNA sense strand
acagaaaugugcaauguca

SEQ ID NO: 785088 - RNA, 19 nt, Homo sapiens
  misc_RNA (1)...(19): siRNA sense strand
augcuaaacuucagacuuu

SEQ ID NO: 785089 - RNA, 19 nt, Homo sapiens
  misc_RNA (1)...(19): siRNA sense strand
ugucucagcuuaugcuaaa

SEQ ID NO: 785090 - RNA, 19 nt, Homo sapiens
  misc_RNA (1)...(19): siRNA sense strand
gaaguuagcagggcaaaca

SEQ ID NO: 785091 - RNA, 19 nt, Homo sapiens
  misc_RNA (1)...(19): siRNA sense strand
guaaaacacugauccaaga

SEQ ID NO: 785092 - RNA, 19 nt, Homo sapiens
  misc_RNA (1)...(19): siRNA sense strand
gugauagaguuguguuauu

SEQ ID NO: 785093 - RNA, 19 nt, Homo sapiens
  misc_RNA (1)...(19): siRNA sense strand
cagaaacuccagauaauga

SEQ ID NO: 785094 - RNA, 19 nt, Homo sapiens
  misc_RNA (1)...(19): siRNA sense strand
aaaggaaccuacacauugu

SEQ ID NO: 785095 - RNA, 19 nt, Homo sapiens
  misc_RNA (1)...(19): siRNA sense strand
ccuuaaagaugcuaaacuu

SEQ ID NO: 785096 - RNA, 19 nt, Homo sapiens
  misc_RNA (1)...(19): siRNA sense strand
acagaagggugauagaguu

SEQ ID NO: 785097 - RNA, 19 nt, Homo sapiens
  misc_RNA (1)...(19): siRNA sense strand
cuuugaagguccucuguua

SEQ ID NO: 785098 - RNA, 19 nt, Homo sapiens
  misc_RNA (1)...(19): siRNA sense strand
gaauggauguacacagaag

SEQ ID NO: 785099 - RNA, 19 nt, Homo sapiens
  misc_RNA (1)...(19): siRNA sense strand
gauggaaagacucagauuu

SEQ ID NO: 785100 - RNA, 19 nt, Homo sapiens
  misc_RNA (1)...(19): siRNA sense strand
gagaauagcacaugcaaaa

SEQ ID NO: 785101 - RNA, 19 nt, Homo sapiens
  misc_RNA (1)...(19): siRNA sense strand
gcaauaugcaucacaaagu

SEQ ID NO: 785102 - RNA, 19 nt, Homo sapiens
  misc_RNA (1)...(19): siRNA sense strand
agauauagccacauuacua

SEQ ID NO: 785103 - RNA, 19 nt, Homo sapiens
  misc_RNA (1)...(19): siRNA sense strand
gaguaugccagcagauaua

SEQ ID NO: 785104 - RNA, 19 nt, Homo sapiens
  misc_RNA (1)...(19): siRNA sense strand
cagcaaauguuguuauacu

SEQ ID NO: 785105 - RNA, 19 nt, Homo sapiens
  misc_RNA (1)...(19): siRNA sense strand
cagcauagguaccucagau

SEQ ID NO: 785106 - RNA, 19 nt, Homo sapiens
  misc_RNA (1)...(19): siRNA sense strand
cgaauugaguugugugcaa

SEQ ID NO: 785107 - RNA, 19 nt, Homo sapiens
  misc_RNA (1)...(19): siRNA sense strand
caaacaaguuaccaugcuu

SEQ ID NO: 785108 - RNA, 19 nt, Homo sapiens
  misc_RNA (1)...(19): siRNA sense strand
caaagaagugacaaugauu

SEQ ID NO: 785109 - RNA, 19 nt, Homo sapiens
  misc_RNA (1)...(19): siRNA sense strand
gcaaauguuguuauacuuc

SEQ ID NO: 785110 - RNA, 19 nt, Homo sapiens
  misc_RNA (1)...(19): siRNA sense strand
cagauuagauggaaagacu

SEQ ID NO: 785111 - RNA, 19 nt, Homo sapiens
  misc_RNA (1)...(19): siRNA sense strand
ugaauuggcuggcauuggu

SEQ ID NO: 785112 - RNA, 19 nt, Homo sapiens
  misc_RNA (1)...(19): siRNA sense strand
caaaugagucugcagaauc

SEQ ID NO: 785113 - RNA, 19 nt, Homo sapiens
  misc_RNA (1)...(19): siRNA sense strand
gaaacuagaacaggauaug

SEQ ID NO: 785114 - RNA, 19 nt, Homo sapiens
  misc_RNA (1)...(19): siRNA sense strand
gaagggugauagaguugug

SEQ ID NO: 785115 - RNA, 19 nt, Homo sapiens
  misc_RNA (1)...(19): siRNA sense strand
ucagaagguugguuugaau

SEQ ID NO: 785116 - RNA, 19 nt, Homo sapiens
  misc_RNA (1)...(19): siRNA sense strand
aaagagaguuguugaagac

SEQ ID NO: 785117 - RNA, 19 nt, Homo sapiens
  misc_RNA (1)...(19): siRNA sense strand
uaggaugcaucuugucuga

SEQ ID NO: 785118 - RNA, 19 nt, Homo sapiens
  misc_RNA (1)...(19): siRNA sense strand
gcacaugcaaaacaaauua

SEQ ID NO: 785119 - RNA, 19 nt, Homo sapiens
  misc_RNA (1)...(19): siRNA sense strand
cagcuucaacuauagauaa

SEQ ID NO: 785120 - RNA, 19 nt, Homo sapiens
  misc_RNA (1)...(19): siRNA sense strand
ccaagaaagagauguaguu

SEQ ID NO: 785121 - RNA, 19 nt, Homo sapiens
  misc_RNA (1)...(19): siRNA sense strand
acaaagauguccaaaacua

SEQ ID NO: 785122 - RNA, 19 nt, Homo sapiens
  misc_RNA (1)...(19): siRNA sense strand
gaggcucuguucacaaaga

SEQ ID NO: 785123 - RNA, 19 nt, Homo sapiens
  misc_RNA (1)...(19): siRNA sense strand
gggcaaacacuccugauuc

SEQ ID NO: 785124 - RNA, 19 nt, Homo sapiens
  misc_RNA (1)...(19): siRNA sense strand
gaaaugugcaaugucauga

SEQ ID NO: 785125 - RNA, 19 nt, Homo sapiens
  misc_RNA (1)...(19): siRNA sense strand
ucaagaagaacguaaacaa

SEQ ID NO: 785126 - RNA, 19 nt, Homo sapiens
  misc_RNA (1)...(19): siRNA sense strand
gaagguccucuguuacuau

SEQ ID NO: 785127 - RNA, 19 nt, Homo sapiens
  misc_RNA (1)...(19): siRNA sense strand
aaacaaguuaccaugcuua

SEQ ID NO: 785128 - RNA, 19 nt, Homo sapiens
  misc_RNA (1)...(19): siRNA sense strand
acuaauggcuuaucagaag

SEQ ID NO: 785129 - RNA, 19 nt, Homo sapiens
  misc_RNA (1)...(19): siRNA sense strand
ggauggcuauaaagguaaa

SEQ ID NO: 785130 - RNA, 19 nt, Homo sapiens
  misc_RNA (1)...(19): siRNA sense strand
gcagaagauagaugccaua

SEQ ID NO: 785131 - RNA, 19 nt, Homo sapiens
  misc_RNA (1)...(19): siRNA sense strand
cuaagacccugacccguaa

SEQ ID NO: 785132 - RNA, 19 nt, Homo sapiens
  misc_RNA (1)...(19): siRNA sense strand
gagaggaccuucccaccau

SEQ ID NO: 785133 - RNA, 19 nt, Homo sapiens
  misc_RNA (1)...(19): siRNA sense strand
gugagugacuggcugauug

SEQ ID NO: 785134 - RNA, 19 nt, Homo sapiens
  misc_RNA (1)...(19): siRNA sense strand
ggucccggguggauucuaa

SEQ ID NO: 785135 - RNA, 19 nt, Homo sapiens
  misc_RNA (1)...(19): siRNA sense strand
ucacagagcagaugcagau

SEQ ID NO: 785136 - RNA, 19 nt, Homo sapiens
  misc_RNA (1)...(19): siRNA sense strand
ucuacaaccugacagagaa

SEQ ID NO: 785137 - RNA, 19 nt, Homo sapiens
  misc_RNA (1)...(19): siRNA sense strand
ggaaugcagugcugaacac

SEQ ID NO: 785138 - RNA, 19 nt, Homo sapiens
  misc_RNA (1)...(19): siRNA sense strand
caagcgggacccagaguuu

SEQ ID NO: 785139 - RNA, 19 nt, Homo sapiens
  misc_RNA (1)...(19): siRNA sense strand
ugaagcaagugaugaaugc

SEQ ID NO: 785140 - RNA, 19 nt, Homo sapiens
  misc_RNA (1)...(19): siRNA sense strand
ccuacaaccuccuguucuu

SEQ ID NO: 785141 - RNA, 19 nt, Homo sapiens
  misc_RNA (1)...(19): siRNA sense strand
ggacccagaguuugucuuc

SEQ ID NO: 785142 - RNA, 19 nt, Homo sapiens
  misc_RNA (1)...(19): siRNA sense strand
acccagaguuugucuucua

SEQ ID NO: 785143 - RNA, 19 nt, Homo sapiens
  misc_RNA (1)...(19): siRNA sense strand
gcaccaguucccugaggua

SEQ ID NO: 785144 - RNA, 19 nt, Homo sapiens
  misc_RNA (1)...(19): siRNA sense strand
cgccucugcugcugaagua

SEQ ID NO: 785145 - RNA, 19 nt, Homo sapiens
  misc_RNA (1)...(19): siRNA sense strand
gcacuucagccuccucuac

SEQ ID NO: 785146 - RNA, 19 nt, Homo sapiens
  misc_RNA (1)...(19): siRNA sense strand
gcuccuggccguuggcauu

SEQ ID NO: 785147 - RNA, 19 nt, Homo sapiens
  misc_RNA (1)...(19): siRNA sense strand
ccacuacgacgccuuugga

SEQ ID NO: 785148 - RNA, 19 nt, Homo sapiens
  misc_RNA (1)...(19): siRNA sense strand
acgaggcccugcugucuau

SEQ ID NO: 785149 - RNA, 19 nt, Homo sapiens
  misc_RNA (1)...(19): siRNA sense strand
cggagaugcuggccaugga

SEQ ID NO: 785150 - RNA, 19 nt, Homo sapiens
  misc_RNA (1)...(19): siRNA sense strand
cagaguuugucuucuacga

SEQ ID NO: 785151 - RNA, 19 nt, Homo sapiens
  misc_RNA (1)...(19): siRNA sense strand
gacgaggcccugcugucua

SEQ ID NO: 785152 - RNA, 19 nt, Homo sapiens
  misc_RNA (1)...(19): siRNA sense strand
ggagaucgagccggagaug

SEQ ID NO: 785153 - RNA, 19 nt, Homo sapiens
  misc_RNA (1)...(19): siRNA sense strand
cagagcagaugcagaucca

SEQ ID NO: 785154 - RNA, 19 nt, Homo sapiens
  misc_RNA (1)...(19): siRNA sense strand
ucucccggcucuacaccua

SEQ ID NO: 785155 - RNA, 19 nt, Homo sapiens
  misc_RNA (1)...(19): siRNA sense strand
gaaggccaagacacaguga

SEQ ID NO: 785156 - RNA, 19 nt, Homo sapiens
  misc_RNA (1)...(19): siRNA sense strand
uccagaggcugcucgugaa

SEQ ID NO: 785157 - RNA, 19 nt, Homo sapiens
  misc_RNA (1)...(19): siRNA sense strand
ccuacgagcaguaccagaa

SEQ ID NO: 785158 - RNA, 19 nt, Homo sapiens
  misc_RNA (1)...(19): siRNA sense strand
agagcaaggccgugaguga

SEQ ID NO: 785159 - RNA, 19 nt, Homo sapiens
  misc_RNA (1)...(19): siRNA sense strand
cuacaaccuccuguucuuu

SEQ ID NO: 785160 - RNA, 19 nt, Homo sapiens
  misc_RNA (1)...(19): siRNA sense strand
ggcaauucauggagaucga

SEQ ID NO: 785161 - RNA, 19 nt, Homo sapiens
  misc_RNA (1)...(19): siRNA sense strand
gaccagcugaagcaaguga

SEQ ID NO: 785162 - RNA, 19 nt, Homo sapiens
  misc_RNA (1)...(19): siRNA sense strand
gaagcagcaccacgucaag

SEQ ID NO: 785163 - RNA, 19 nt, Homo sapiens
  misc_RNA (1)...(19): siRNA sense strand
gcccugcugucuaucuaca

SEQ ID NO: 785164 - RNA, 19 nt, Homo sapiens
  misc_RNA (1)...(19): siRNA sense strand
ugaagcagcaccacgucaa

SEQ ID NO: 785165 - RNA, 19 nt, Homo sapiens
  misc_RNA (1)...(19): siRNA sense strand
cguaacacgaggaucauug

SEQ ID NO: 785166 - RNA, 19 nt, Homo sapiens
  misc_RNA (1)...(19): siRNA sense strand
uacaaccuccuguucuuug

SEQ ID NO: 785167 - RNA, 19 nt, Homo sapiens
  misc_RNA (1)...(19): siRNA sense strand
acgaccagcugaagcaagu

SEQ ID NO: 785168 - RNA, 19 nt, Homo sapiens
  misc_RNA (1)...(19): siRNA sense strand
acaugccgguguucacaga

SEQ ID NO: 785169 - RNA, 19 nt, Homo sapiens
  misc_RNA (1)...(19): siRNA sense strand
ucuggaggaggcaaguuua

SEQ ID NO: 785170 - RNA, 19 nt, Homo sapiens
  misc_RNA (1)...(19): siRNA sense strand
ucaugcggcuacuggacuu

SEQ ID NO: 785171 - RNA, 19 nt, Homo sapiens
  misc_RNA (1)...(19): siRNA sense strand
cagcugaagcaagugauga

SEQ ID NO: 785172 - RNA, 19 nt, Homo sapiens
  misc_RNA (1)...(19): siRNA sense strand
gcagcuggacucggugaug

SEQ ID NO: 785173 - RNA, 19 nt, Homo sapiens
  misc_RNA (1)...(19): siRNA sense strand
uggacuggcucaccaacca

SEQ ID NO: 785174 - RNA, 19 nt, Homo sapiens
  misc_RNA (1)...(19): siRNA sense strand
ugaaacagcuguggaauua

SEQ ID NO: 785175 - RNA, 19 nt, Homo sapiens
  misc_RNA (1)...(19): siRNA sense strand
ggaauuagcugcucucugu

SEQ ID NO: 785176 - RNA, 19 nt, Homo sapiens
  misc_RNA (1)...(19): siRNA sense strand
gaaaugcccuuaugaaaca

SEQ ID NO: 785177 - RNA, 19 nt, Homo sapiens
  misc_RNA (1)...(19): siRNA sense strand
cgaaguggcuggaaaugua

SEQ ID NO: 785178 - RNA, 19 nt, Homo sapiens
  misc_RNA (1)...(19): siRNA sense strand
ggaaacagcaaauccaaua

SEQ ID NO: 785179 - RNA, 19 nt, Homo sapiens
  misc_RNA (1)...(19): siRNA sense strand
gaacucuccuaucugaaua

SEQ ID NO: 785180 - RNA, 19 nt, Homo sapiens
  misc_RNA (1)...(19): siRNA sense strand
gcuuuacacuuucgaguua

SEQ ID NO: 785181 - RNA, 19 nt, Homo sapiens
  misc_RNA (1)...(19): siRNA sense strand
gggaagagauggcugugaa

SEQ ID NO: 785182 - RNA, 19 nt, Homo sapiens
  misc_RNA (1)...(19): siRNA sense strand
ugaaggagcuaacaaaaua

SEQ ID NO: 785183 - RNA, 19 nt, Homo sapiens
  misc_RNA (1)...(19): siRNA sense strand
gcggaacucuccuaucuga

SEQ ID NO: 785184 - RNA, 19 nt, Homo sapiens
  misc_RNA (1)...(19): siRNA sense strand
gaagagauggcugugaaua

SEQ ID NO: 785185 - RNA, 19 nt, Homo sapiens
  misc_RNA (1)...(19): siRNA sense strand
cagaagcaauggaauuuga

SEQ ID NO: 785186 - RNA, 19 nt, Homo sapiens
  misc_RNA (1)...(19): siRNA sense strand
gugaggaguuuacaaggua

SEQ ID NO: 785187 - RNA, 19 nt, Homo sapiens
  misc_RNA (1)...(19): siRNA sense strand
gaagcaauggaauuugaua

SEQ ID NO: 785188 - RNA, 19 nt, Homo sapiens
  misc_RNA (1)...(19): siRNA sense strand
agagauggcugugaauauu

SEQ ID NO: 785189 - RNA, 19 nt, Homo sapiens
  misc_RNA (1)...(19): siRNA sense strand
gcaauggaauuugauaucu

SEQ ID NO: 785190 - RNA, 19 nt, Homo sapiens
  misc_RNA (1)...(19): siRNA sense strand
ggauuuguuugaucagauu

SEQ ID NO: 785191 - RNA, 19 nt, Homo sapiens
  misc_RNA (1)...(19): siRNA sense strand
gaagaaccagcaccuuuga

SEQ ID NO: 785192 - RNA, 19 nt, Homo sapiens
  misc_RNA (1)...(19): siRNA sense strand
caagguaccuguuuguuuu

SEQ ID NO: 785193 - RNA, 19 nt, Homo sapiens
  misc_RNA (1)...(19): siRNA sense strand
gaucaugccaaacccauaa

SEQ ID NO: 785194 - RNA, 19 nt, Homo sapiens
  misc_RNA (1)...(19): siRNA sense strand
uccaauagauccgacuuua

SEQ ID NO: 785195 - RNA, 19 nt, Homo sapiens
  misc_RNA (1)...(19): siRNA sense strand
ggaagccuaguaaacguua

SEQ ID NO: 785196 - RNA, 19 nt, Homo sapiens
  misc_RNA (1)...(19): siRNA sense strand
gacagaagcaauggaauuu

SEQ ID NO: 785197 - RNA, 19 nt, Homo sapiens
  misc_RNA (1)...(19): siRNA sense strand
caauagauccgacuuuauc

SEQ ID NO: 785198 - RNA, 19 nt, Homo sapiens
  misc_RNA (1)...(19): siRNA sense strand
cauccucacucuccaaaug

SEQ ID NO: 785199 - RNA, 19 nt, Homo sapiens
  misc_RNA (1)...(19): siRNA sense strand
ggaacucuccuaucugaau

SEQ ID NO: 785200 - RNA, 19 nt, Homo sapiens
  misc_RNA (1)...(19): siRNA sense strand
gacagaauaucaagcuaca

SEQ ID NO: 785201 - RNA, 19 nt, Homo sapiens
  misc_RNA (1)...(19): siRNA sense strand
cgacaggcauauuaaucuu

SEQ ID NO: 785202 - RNA, 19 nt, Homo sapiens
  misc_RNA (1)...(19): siRNA sense strand
aaauugaaaugcccuuaug

SEQ ID NO: 785203 - RNA, 19 nt, Homo sapiens
  misc_RNA (1)...(19): siRNA sense strand
auaauuaccagccucaaua

SEQ ID NO: 785204 - RNA, 19 nt, Homo sapiens
  misc_RNA (1)...(19): siRNA sense strand
acacauggcuccagguuac

SEQ ID NO: 785205 - RNA, 19 nt, Homo sapiens
  misc_RNA (1)...(19): siRNA sense strand
cagcccagcucugcucuaa

SEQ ID NO: 785206 - RNA, 19 nt, Homo sapiens
  misc_RNA (1)...(19): siRNA sense strand
auccggaaguccauaauua

SEQ ID NO: 785207 - RNA, 19 nt, Homo sapiens
  misc_RNA (1)...(19): siRNA sense strand
gaguuucgguucauuccaa

SEQ ID NO: 785208 - RNA, 19 nt, Homo sapiens
  misc_RNA (1)...(19): siRNA sense strand
gcugggcucucgcuucaga

SEQ ID NO: 785209 - RNA, 19 nt, Homo sapiens
  misc_RNA (1)...(19): siRNA sense strand
gaauaucaagcuacacaug

SEQ ID NO: 785210 - RNA, 19 nt, Homo sapiens
  misc_RNA (1)...(19): siRNA sense strand
ucagugggcggacagaaua

SEQ ID NO: 785211 - RNA, 19 nt, Homo sapiens
  misc_RNA (1)...(19): siRNA sense strand
gccaggauuuguuugauca

SEQ ID NO: 785212 - RNA, 19 nt, Homo sapiens
  misc_RNA (1)...(19): siRNA sense strand
cgaagaaccagcaccuuug

SEQ ID NO: 785213 - RNA, 19 nt, Homo sapiens
  misc_RNA (1)...(19): siRNA sense strand
gcguggaccugccgaaaca

SEQ ID NO: 785214 - RNA, 19 nt, Homo sapiens
  misc_RNA (1)...(19): siRNA sense strand
gaggaagccuaguaaacgu

SEQ ID NO: 785215 - RNA, 19 nt, Homo sapiens
  misc_RNA (1)...(19): siRNA sense strand
agacagaagcaauggaauu

SEQ ID NO: 785216 - RNA, 19 nt, Homo sapiens
  misc_RNA (1)...(19): siRNA sense strand
acaggcauauuaaucuuug

SEQ ID NO: 785217 - RNA, 19 nt, Homo sapiens
  misc_RNA (1)...(19): siRNA sense strand
aaagcgaaguggcuggaaa

SEQ ID NO: 785218 - RNA, 19 nt, Homo sapiens
  misc_RNA (1)...(19): siRNA sense strand
gcaagcaacccagugauag

SEQ ID NO: 785219 - RNA, 19 nt, Homo sapiens
  misc_RNA (1)...(19): siRNA sense strand
gcccagcucugcucuaaaa

SEQ ID NO: 785220 - RNA, 19 nt, Homo sapiens
  misc_RNA (1)...(19): siRNA sense strand
caaauccggaaguccauaa

SEQ ID NO: 785221 - RNA, 19 nt, Homo sapiens
  misc_RNA (1)...(19): siRNA sense strand
caaccuucgugaggaguuu

SEQ ID NO: 785222 - RNA, 19 nt, Homo sapiens
  misc_RNA (1)...(19): siRNA sense strand
gagaggaagccuaguaaac

SEQ ID NO: 785223 - RNA, 19 nt, Homo sapiens
  misc_RNA (1)...(19): siRNA sense strand
gaaguggcuggaaauguau

SEQ ID NO: 785224 - RNA, 19 nt, Homo sapiens
  misc_RNA (1)...(19): siRNA sense strand
ccucgacucugcccagguu

SEQ ID NO: 785225 - RNA, 19 nt, Homo sapiens
  misc_RNA (1)...(19): siRNA sense strand
aaacagcaaauccaauaga

SEQ ID NO: 785226 - RNA, 19 nt, Homo sapiens
  misc_RNA (1)...(19): siRNA sense strand
gaaacagcaaauccaauag

SEQ ID NO: 785227 - RNA, 19 nt, Homo sapiens
  misc_RNA (1)...(19): siRNA sense strand
ggguagacaugcacguugu

SEQ ID NO: 785228 - RNA, 19 nt, Homo sapiens
  misc_RNA (1)...(19): siRNA sense strand
caaaucagacagaagcaau

SEQ ID NO: 785229 - RNA, 19 nt, Homo sapiens
  misc_RNA (1)...(19): siRNA sense strand
gagcuugugucugaguuuc

SEQ ID NO: 785230 - RNA, 19 nt, Homo sapiens
  misc_RNA (1)...(19): siRNA sense strand
ggagugcgagcuuccagaa

SEQ ID NO: 785231 - RNA, 19 nt, Homo sapiens
  misc_RNA (1)...(19): siRNA sense strand
uggaccugcuuaugcuuua

SEQ ID NO: 785232 - RNA, 19 nt, Homo sapiens
  misc_RNA (1)...(19): siRNA sense strand
ugaaaugcccuuaugaaac

SEQ ID NO: 785233 - RNA, 19 nt, Homo sapiens
  misc_RNA (1)...(19): siRNA sense strand
uguggaaacagauuacuuu

SEQ ID NO: 785234 - RNA, 19 nt, Homo sapiens
  misc_RNA (1)...(19): siRNA sense strand
aaacagcuguggaauuagc

SEQ ID NO: 785235 - RNA, 19 nt, Homo sapiens
  misc_RNA (1)...(19): siRNA sense strand
aggcggaacucuccuaucu

SEQ ID NO: 785236 - RNA, 19 nt, Homo sapiens
  misc_RNA (1)...(19): siRNA sense strand
gagcaagagcacacguuug

SEQ ID NO: 785237 - RNA, 19 nt, Homo sapiens
  misc_RNA (1)...(19): siRNA sense strand
gacaggcauauuaaucuuu

SEQ ID NO: 785238 - RNA, 19 nt, Homo sapiens
  misc_RNA (1)...(19): siRNA sense strand
ccaauagauccgacuuuau

SEQ ID NO: 785239 - RNA, 19 nt, Homo sapiens
  misc_RNA (1)...(19): siRNA sense strand
cagaauaucaagcuacaca

SEQ ID NO: 785240 - RNA, 19 nt, Homo sapiens
  misc_RNA (1)...(19): siRNA sense strand
ggccaggauuuguuugauc

SEQ ID NO: 785241 - RNA, 19 nt, Homo sapiens
  misc_RNA (1)...(19): siRNA sense strand
ucagacagaagcaauggaa

SEQ ID NO: 785242 - RNA, 19 nt, Homo sapiens
  misc_RNA (1)...(19): siRNA sense strand
ggccuaaaauuaccaaaau

SEQ ID NO: 785243 - RNA, 19 nt, Homo sapiens
  misc_RNA (1)...(19): siRNA sense strand
gagauggcugugaauauuc

SEQ ID NO: 785244 - RNA, 19 nt, Homo sapiens
  misc_RNA (1)...(19): siRNA sense strand
ugcuuaugcuuuacacuuu

SEQ ID NO: 785245 - RNA, 19 nt, Homo sapiens
  misc_RNA (1)...(19): siRNA sense strand
cagccucaauaucauccua

SEQ ID NO: 785246 - RNA, 19 nt, Homo sapiens
  misc_RNA (1)...(19): siRNA sense strand
aaagcaagcaacccaguga

SEQ ID NO: 785247 - RNA, 19 nt, Homo sapiens
  misc_RNA (1)...(19): siRNA sense strand
ggaucaugccaaacccaua

SEQ ID NO: 785248 - RNA, 19 nt, Homo sapiens
  misc_RNA (1)...(19): siRNA sense strand
gcugcucucugucuacaag

SEQ ID NO: 785249 - RNA, 19 nt, Homo sapiens
  misc_RNA (1)...(19): siRNA sense strand
uugaaaugcccuuaugaaa

SEQ ID NO: 785250 - RNA, 19 nt, Homo sapiens
  misc_RNA (1)...(19): siRNA sense strand
gcuuaugcuuuacacuuuc

SEQ ID NO: 785251 - RNA, 19 nt, Homo sapiens
  misc_RNA (1)...(19): siRNA sense strand
acgaagaaccagcaccuuu

SEQ ID NO: 785252 - RNA, 19 nt, Homo sapiens
  misc_RNA (1)...(19): siRNA sense strand
ucuccuaucugaauaaagc

SEQ ID NO: 785253 - RNA, 19 nt, Homo sapiens
  misc_RNA (1)...(19): siRNA sense strand
gaagccuaguaaacguuau

SEQ ID NO: 785254 - RNA, 19 nt, Homo sapiens
  misc_RNA (1)...(19): siRNA sense strand
ggaagagauggcugugaau

SEQ ID NO: 785255 - RNA, 19 nt, Homo sapiens
  misc_RNA (1)...(19): siRNA sense strand
caacucaggcaugacauuc

SEQ ID NO: 785256 - RNA, 19 nt, Homo sapiens
  misc_RNA (1)...(19): siRNA sense strand
uaauuaccagccucaauau

SEQ ID NO: 785257 - RNA, 19 nt, Homo sapiens
  misc_RNA (1)...(19): siRNA sense strand
ggcucucgcuucagauuca

SEQ ID NO: 785258 - RNA, 19 nt, Homo sapiens
  misc_RNA (1)...(19): siRNA sense strand
ugagcaagagcacacguuu

SEQ ID NO: 785259 - RNA, 19 nt, Homo sapiens
  misc_RNA (1)...(19): siRNA sense strand
gaaaauugaaaugcccuua

SEQ ID NO: 785260 - RNA, 19 nt, Homo sapiens
  misc_RNA (1)...(19): siRNA sense strand
ggagacauucaacguucaa

SEQ ID NO: 785261 - RNA, 19 nt, Homo sapiens
  misc_RNA (1)...(19): siRNA sense strand
aaaagcagaugaaaauugg

SEQ ID NO: 785262 - RNA, 19 nt, Homo sapiens
  misc_RNA (1)...(19): siRNA sense strand
gagcguggaccugccgaaa

SEQ ID NO: 785263 - RNA, 19 nt, Homo sapiens
  misc_RNA (1)...(19): siRNA sense strand
gaauauucucuuggacuga

SEQ ID NO: 785264 - RNA, 19 nt, Homo sapiens
  misc_RNA (1)...(19): siRNA sense strand
cgugaggaguuuacaaggu

SEQ ID NO: 785265 - RNA, 19 nt, Homo sapiens
  misc_RNA (1)...(19): siRNA sense strand
ccucaauaucauccuaaua

SEQ ID NO: 785266 - RNA, 19 nt, Homo sapiens
  misc_RNA (1)...(19): siRNA sense strand
gaaaauuggaccugcuuau

SEQ ID NO: 785267 - RNA, 19 nt, Homo sapiens
  misc_RNA (1)...(19): siRNA sense strand
cauucaacguucaaagcaa

SEQ ID NO: 785268 - RNA, 19 nt, Homo sapiens
  misc_RNA (1)...(19): siRNA sense strand
ggcuccagguuacgaagaa

SEQ ID NO: 785269 - RNA, 19 nt, Homo sapiens
  misc_RNA (1)...(19): siRNA sense strand
aggcugggcucucgcuuca

SEQ ID NO: 785270 - RNA, 19 nt, Homo sapiens
  misc_RNA (1)...(19): siRNA sense strand
aacagcaaauccaauagau

SEQ ID NO: 785271 - RNA, 19 nt, Homo sapiens
  misc_RNA (1)...(19): siRNA sense strand
acucaggcaugacauucuu

SEQ ID NO: 785272 - RNA, 19 nt, Homo sapiens
  misc_RNA (1)...(19): siRNA sense strand
uuaccagccucaauaucau

SEQ ID NO: 785273 - RNA, 19 nt, Homo sapiens
  misc_RNA (1)...(19): siRNA sense strand
caggauuuguuugaucaga

SEQ ID NO: 785274 - RNA, 19 nt, Homo sapiens
  misc_RNA (1)...(19): siRNA sense strand
ugaaacagcuguggaauua

SEQ ID NO: 785275 - RNA, 19 nt, Homo sapiens
  misc_RNA (1)...(19): siRNA sense strand
ggaauuagcugcucucugu

SEQ ID NO: 785276 - RNA, 19 nt, Homo sapiens
  misc_RNA (1)...(19): siRNA sense strand
gaaaugcccuuaugaaaca

SEQ ID NO: 785277 - RNA, 19 nt, Homo sapiens
  misc_RNA (1)...(19): siRNA sense strand
cgaaguggcuggaaaugua

SEQ ID NO: 785278 - RNA, 19 nt, Homo sapiens
  misc_RNA (1)...(19): siRNA sense strand
ggaaacagcaaauccaaua

SEQ ID NO: 785279 - RNA, 19 nt, Homo sapiens
  misc_RNA (1)...(19): siRNA sense strand
gaacucuccuaucugaaua

SEQ ID NO: 785280 - RNA, 19 nt, Homo sapiens
  misc_RNA (1)...(19): siRNA sense strand
gcuuuacacuuucgaguua

SEQ ID NO: 785281 - RNA, 19 nt, Homo sapiens
  misc_RNA (1)...(19): siRNA sense strand
gggaagagauggcugugaa

SEQ ID NO: 785282 - RNA, 19 nt, Homo sapiens
  misc_RNA (1)...(19): siRNA sense strand
ugaaggagcuaacaaaaua

SEQ ID NO: 785283 - RNA, 19 nt, Homo sapiens
  misc_RNA (1)...(19): siRNA sense strand
gcggaacucuccuaucuga

SEQ ID NO: 785284 - RNA, 19 nt, Homo sapiens
  misc_RNA (1)...(19): siRNA sense strand
gaagagauggcugugaaua

SEQ ID NO: 785285 - RNA, 19 nt, Homo sapiens
  misc_RNA (1)...(19): siRNA sense strand
cagaagcaauggaauuuga

SEQ ID NO: 785286 - RNA, 19 nt, Homo sapiens
  misc_RNA (1)...(19): siRNA sense strand
gugaggaguuuacaaggua

SEQ ID NO: 785287 - RNA, 19 nt, Homo sapiens
  misc_RNA (1)...(19): siRNA sense strand
gaagcaauggaauuugaua

SEQ ID NO: 785288 - RNA, 19 nt, Homo sapiens
  misc_RNA (1)...(19): siRNA sense strand
agagauggcugugaauauu

SEQ ID NO: 785289 - RNA, 19 nt, Homo sapiens
  misc_RNA (1)...(19): siRNA sense strand
gcaauggaauuugauaucu

SEQ ID NO: 785290 - RNA, 19 nt, Homo sapiens
  misc_RNA (1)...(19): siRNA sense strand
ggauuuguuugaucagauu

SEQ ID NO: 785291 - RNA, 19 nt, Homo sapiens
  misc_RNA (1)...(19): siRNA sense strand
gaagaaccagcaccuuuga

SEQ ID NO: 785292 - RNA, 19 nt, Homo sapiens
  misc_RNA (1)...(19): siRNA sense strand
caagguaccuguuuguuuu

SEQ ID NO: 785293 - RNA, 19 nt, Homo sapiens
  misc_RNA (1)...(19): siRNA sense strand
gaucaugccaaacccauaa

SEQ ID NO: 785294 - RNA, 19 nt, Homo sapiens
  misc_RNA (1)...(19): siRNA sense strand
uccaauagauccgacuuua

SEQ ID NO: 785295 - RNA, 19 nt, Homo sapiens
  misc_RNA (1)...(19): siRNA sense strand
ggaagccuaguaaacguua

SEQ ID NO: 785296 - RNA, 19 nt, Homo sapiens
  misc_RNA (1)...(19): siRNA sense strand
gacagaagcaauggaauuu

SEQ ID NO: 785297 - RNA, 19 nt, Homo sapiens
  misc_RNA (1)...(19): siRNA sense strand
caauagauccgacuuuauc

SEQ ID NO: 785298 - RNA, 19 nt, Homo sapiens
  misc_RNA (1)...(19): siRNA sense strand
cauccucacucuccaaaug

SEQ ID NO: 785299 - RNA, 19 nt, Homo sapiens
  misc_RNA (1)...(19): siRNA sense strand
ggaacucuccuaucugaau

SEQ ID NO: 785300 - RNA, 19 nt, Homo sapiens
  misc_RNA (1)...(19): siRNA sense strand
gacagaauaucaagcuaca

SEQ ID NO: 785301 - RNA, 19 nt, Homo sapiens
  misc_RNA (1)...(19): siRNA sense strand
cgacaggcauauuaaucuu

SEQ ID NO: 785302 - RNA, 19 nt, Homo sapiens
  misc_RNA (1)...(19): siRNA sense strand
aaauugaaaugcccuuaug

SEQ ID NO: 785303 - RNA, 19 nt, Homo sapiens
  misc_RNA (1)...(19): siRNA sense strand
auaauuaccagccucaaua

SEQ ID NO: 785304 - RNA, 19 nt, Homo sapiens
  misc_RNA (1)...(19): siRNA sense strand
acacauggcuccagguuac

SEQ ID NO: 785305 - RNA, 19 nt, Homo sapiens
  misc_RNA (1)...(19): siRNA sense strand
cagcccagcucugcucuaa

SEQ ID NO: 785306 - RNA, 19 nt, Homo sapiens
  misc_RNA (1)...(19): siRNA sense strand
auccggaaguccauaauua

SEQ ID NO: 785307 - RNA, 19 nt, Homo sapiens
  misc_RNA (1)...(19): siRNA sense strand
gaguuucgguucauuccaa

SEQ ID NO: 785308 - RNA, 19 nt, Homo sapiens
  misc_RNA (1)...(19): siRNA sense strand
gcugggcucucgcuucaga

SEQ ID NO: 785309 - RNA, 19 nt, Homo sapiens
  misc_RNA (1)...(19): siRNA sense strand
gaauaucaagcuacacaug

SEQ ID NO: 785310 - RNA, 19 nt, Homo sapiens
  misc_RNA (1)...(19): siRNA sense strand
ucagugggcggacagaaua

SEQ ID NO: 785311 - RNA, 19 nt, Homo sapiens
  misc_RNA (1)...(19): siRNA sense strand
gccaggauuuguuugauca

SEQ ID NO: 785312 - RNA, 19 nt, Homo sapiens
  misc_RNA (1)...(19): siRNA sense strand
cgaagaaccagcaccuuug

SEQ ID NO: 785313 - RNA, 19 nt, Homo sapiens
  misc_RNA (1)...(19): siRNA sense strand
gcguggaccugccgaaaca

SEQ ID NO: 785314 - RNA, 19 nt, Homo sapiens
  misc_RNA (1)...(19): siRNA sense strand
gaggaagccuaguaaacgu

SEQ ID NO: 785315 - RNA, 19 nt, Homo sapiens
  misc_RNA (1)...(19): siRNA sense strand
agacagaagcaauggaauu

SEQ ID NO: 785316 - RNA, 19 nt, Homo sapiens
  misc_RNA (1)...(19): siRNA sense strand
acaggcauauuaaucuuug

SEQ ID NO: 785317 - RNA, 19 nt, Homo sapiens
  misc_RNA (1)...(19): siRNA sense strand
aaagcgaaguggcuggaaa

SEQ ID NO: 785318 - RNA, 19 nt, Homo sapiens
  misc_RNA (1)...(19): siRNA sense strand
gcaagcaacccagugauag

SEQ ID NO: 785319 - RNA, 19 nt, Homo sapiens
  misc_RNA (1)...(19): siRNA sense strand
gcccagcucugcucuaaaa

SEQ ID NO: 785320 - RNA, 19 nt, Homo sapiens
  misc_RNA (1)...(19): siRNA sense strand
caaauccggaaguccauaa

SEQ ID NO: 785321 - RNA, 19 nt, Homo sapiens
  misc_RNA (1)...(19): siRNA sense strand
caaccuucgugaggaguuu

SEQ ID NO: 785322 - RNA, 19 nt, Homo sapiens
  misc_RNA (1)...(19): siRNA sense strand
gagaggaagccuaguaaac

SEQ ID NO: 785323 - RNA, 19 nt, Homo sapiens
  misc_RNA (1)...(19): siRNA sense strand
gaaguggcuggaaauguau

SEQ ID NO: 785324 - RNA, 19 nt, Homo sapiens
  misc_RNA (1)...(19): siRNA sense strand
ccucgacucugcccagguu

SEQ ID NO: 785325 - RNA, 19 nt, Homo sapiens
  misc_RNA (1)...(19): siRNA sense strand
aaacagcaaauccaauaga

SEQ ID NO: 785326 - RNA, 19 nt, Homo sapiens
  misc_RNA (1)...(19): siRNA sense strand
gaaacagcaaauccaauag

SEQ ID NO: 785327 - RNA, 19 nt, Homo sapiens
  misc_RNA (1)...(19): siRNA sense strand
ggguagacaugcacguugu

SEQ ID NO: 785328 - RNA, 19 nt, Homo sapiens
  misc_RNA (1)...(19): siRNA sense strand
caaaucagacagaagcaau

SEQ ID NO: 785329 - RNA, 19 nt, Homo sapiens
  misc_RNA (1)...(19): siRNA sense strand
gagcuugugucugaguuuc

SEQ ID NO: 785330 - RNA, 19 nt, Homo sapiens
  misc_RNA (1)...(19): siRNA sense strand
ggagugcgagcuuccagaa

SEQ ID NO: 785331 - RNA, 19 nt, Homo sapiens
  misc_RNA (1)...(19): siRNA sense strand
uggaccugcuuaugcuuua

SEQ ID NO: 785332 - RNA, 19 nt, Homo sapiens
  misc_RNA (1)...(19): siRNA sense strand
ugaaaugcccuuaugaaac

SEQ ID NO: 785333 - RNA, 19 nt, Homo sapiens
  misc_RNA (1)...(19): siRNA sense strand
uguggaaacagauuacuuu

SEQ ID NO: 785334 - RNA, 19 nt, Homo sapiens
  misc_RNA (1)...(19): siRNA sense strand
aaacagcuguggaauuagc

SEQ ID NO: 785335 - RNA, 19 nt, Homo sapiens
  misc_RNA (1)...(19): siRNA sense strand
aggcggaacucuccuaucu

SEQ ID NO: 785336 - RNA, 19 nt, Homo sapiens
  misc_RNA (1)...(19): siRNA sense strand
gagcaagagcacacguuug

SEQ ID NO: 785337 - RNA, 19 nt, Homo sapiens
  misc_RNA (1)...(19): siRNA sense strand
gacaggcauauuaaucuuu

SEQ ID NO: 785338 - RNA, 19 nt, Homo sapiens
  misc_RNA (1)...(19): siRNA sense strand
ccaauagauccgacuuuau

SEQ ID NO: 785339 - RNA, 19 nt, Homo sapiens
  misc_RNA (1)...(19): siRNA sense strand
cagaauaucaagcuacaca

SEQ ID NO: 785340 - RNA, 19 nt, Homo sapiens
  misc_RNA (1)...(19): siRNA sense strand
ggccaggauuuguuugauc

SEQ ID NO: 785341 - RNA, 19 nt, Homo sapiens
  misc_RNA (1)...(19): siRNA sense strand
ucagacagaagcaauggaa

SEQ ID NO: 785342 - RNA, 19 nt, Homo sapiens
  misc_RNA (1)...(19): siRNA sense strand
ggccuaaaauuaccaaaau

SEQ ID NO: 785343 - RNA, 19 nt, Homo sapiens
  misc_RNA (1)...(19): siRNA sense strand
gagauggcugugaauauuc

SEQ ID NO: 785344 - RNA, 19 nt, Homo sapiens
  misc_RNA (1)...(19): siRNA sense strand
ugcuuaugcuuuacacuuu

SEQ ID NO: 785345 - RNA, 19 nt, Homo sapiens
  misc_RNA (1)...(19): siRNA sense strand
cagccucaauaucauccua

SEQ ID NO: 785346 - RNA, 19 nt, Homo sapiens
  misc_RNA (1)...(19): siRNA sense strand
aaagcaagcaacccaguga

SEQ ID NO: 785347 - RNA, 19 nt, Homo sapiens
  misc_RNA (1)...(19): siRNA sense strand
ggaucaugccaaacccaua

SEQ ID NO: 785348 - RNA, 19 nt, Homo sapiens
  misc_RNA (1)...(19): siRNA sense strand
gcugcucucugucuacaag

SEQ ID NO: 785349 - RNA, 19 nt, Homo sapiens
  misc_RNA (1)...(19): siRNA sense strand
uugaaaugcccuuaugaaa

SEQ ID NO: 785350 - RNA, 19 nt, Homo sapiens
  misc_RNA (1)...(19): siRNA sense strand
gcuuaugcuuuacacuuuc

SEQ ID NO: 785351 - RNA, 19 nt, Homo sapiens
  misc_RNA (1)...(19): siRNA sense strand
acgaagaaccagcaccuuu

SEQ ID NO: 785352 - RNA, 19 nt, Homo sapiens
  misc_RNA (1)...(19): siRNA sense strand
ucuccuaucugaauaaagc

SEQ ID NO: 785353 - RNA, 19 nt, Homo sapiens
  misc_RNA (1)...(19): siRNA sense strand
gaagccuaguaaacguuau

SEQ ID NO: 785354 - RNA, 19 nt, Homo sapiens
  misc_RNA (1)...(19): siRNA sense strand
ggaagagauggcugugaau

SEQ ID NO: 785355 - RNA, 19 nt, Homo sapiens
  misc_RNA (1)...(19): siRNA sense strand
caacucaggcaugacauuc

SEQ ID NO: 785356 - RNA, 19 nt, Homo sapiens
  misc_RNA (1)...(19): siRNA sense strand
uaauuaccagccucaauau

SEQ ID NO: 785357 - RNA, 19 nt, Homo sapiens
  misc_RNA (1)...(19): siRNA sense strand
ggcucucgcuucagauuca

SEQ ID NO: 785358 - RNA, 19 nt, Homo sapiens
  misc_RNA (1)...(19): siRNA sense strand
ugagcaagagcacacguuu

SEQ ID NO: 785359 - RNA, 19 nt, Homo sapiens
  misc_RNA (1)...(19): siRNA sense strand
gaaaauugaaaugcccuua

SEQ ID NO: 785360 - RNA, 19 nt, Homo sapiens
  misc_RNA (1)...(19): siRNA sense strand
ggagacauucaacguucaa

SEQ ID NO: 785361 - RNA, 19 nt, Homo sapiens
  misc_RNA (1)...(19): siRNA sense strand
aaaagcagaugaaaauugg

SEQ ID NO: 785362 - RNA, 19 nt, Homo sapiens
  misc_RNA (1)...(19): siRNA sense strand
gagcguggaccugccgaaa

SEQ ID NO: 785363 - RNA, 19 nt, Homo sapiens
  misc_RNA (1)...(19): siRNA sense strand
gaauauucucuuggacuga

SEQ ID NO: 785364 - RNA, 19 nt, Homo sapiens
  misc_RNA (1)...(19): siRNA sense strand
cgugaggaguuuacaaggu

SEQ ID NO: 785365 - RNA, 19 nt, Homo sapiens
  misc_RNA (1)...(19): siRNA sense strand
ccucaauaucauccuaaua

SEQ ID NO: 785366 - RNA, 19 nt, Homo sapiens
  misc_RNA (1)...(19): siRNA sense strand
gaaaauuggaccugcuuau

SEQ ID NO: 785367 - RNA, 19 nt, Homo sapiens
  misc_RNA (1)...(19): siRNA sense strand
cauucaacguucaaagcaa

SEQ ID NO: 785368 - RNA, 19 nt, Homo sapiens
  misc_RNA (1)...(19): siRNA sense strand
ggcuccagguuacgaagaa

SEQ ID NO: 785369 - RNA, 19 nt, Homo sapiens
  misc_RNA (1)...(19): siRNA sense strand
aggcugggcucucgcuuca

SEQ ID NO: 785370 - RNA, 19 nt, Homo sapiens
  misc_RNA (1)...(19): siRNA sense strand
aacagcaaauccaauagau

SEQ ID NO: 785371 - RNA, 19 nt, Homo sapiens
  misc_RNA (1)...(19): siRNA sense strand
acucaggcaugacauucuu

SEQ ID NO: 785372 - RNA, 19 nt, Homo sapiens
  misc_RNA (1)...(19): siRNA sense strand
uuaccagccucaauaucau

SEQ ID NO: 785373 - RNA, 19 nt, Homo sapiens
  misc_RNA (1)...(19): siRNA sense strand
caggauuuguuugaucaga

SEQ ID NO: 785374 - RNA, 19 nt, Homo sapiens
  misc_RNA (1)...(19): siRNA sense strand
gauaggccauggagcaauu

SEQ ID NO: 785375 - RNA, 19 nt, Homo sapiens
  misc_RNA (1)...(19): siRNA sense strand
gaagaagagaagacggauu

SEQ ID NO: 785376 - RNA, 19 nt, Homo sapiens
  misc_RNA (1)...(19): siRNA sense strand
aagaagagaagacggauug

SEQ ID NO: 785377 - RNA, 19 nt, Homo sapiens
  misc_RNA (1)...(19): siRNA sense strand
gcugcugugugguagagaa

SEQ ID NO: 785378 - RNA, 19 nt, Homo sapiens
  misc_RNA (1)...(19): siRNA sense strand
ggauugaccggaccaugau

SEQ ID NO: 785379 - RNA, 19 nt, Homo sapiens
  misc_RNA (1)...(19): siRNA sense strand
cggauugaccggaccauga

SEQ ID NO: 785380 - RNA, 19 nt, Homo sapiens
  misc_RNA (1)...(19): siRNA sense strand
gagcaauucuaggggcuua

SEQ ID NO: 785381 - RNA, 19 nt, Homo sapiens
  misc_RNA (1)...(19): siRNA sense strand
gcaguucaggagcagauga

SEQ ID NO: 785382 - RNA, 19 nt, Homo sapiens
  misc_RNA (1)...(19): siRNA sense strand
gagauaggccauggagcaa

SEQ ID NO: 785383 - RNA, 19 nt, Homo sapiens
  misc_RNA (1)...(19): siRNA sense strand
caugacaggugcaguucag

SEQ ID NO: 785384 - RNA, 19 nt, Homo sapiens
  misc_RNA (1)...(19): siRNA sense strand
caagggaaaccgagauagg

SEQ ID NO: 785385 - RNA, 19 nt, Homo sapiens
  misc_RNA (1)...(19): siRNA sense strand
ggccauggagcaauucuag

SEQ ID NO: 785386 - RNA, 19 nt, Homo sapiens
  misc_RNA (1)...(19): siRNA sense strand
gaagagaagacggauugac

SEQ ID NO: 785387 - RNA, 19 nt, Homo sapiens
  misc_RNA (1)...(19): siRNA sense strand
gggaaccaaugaauuuugu

SEQ ID NO: 785388 - RNA, 19 nt, Homo sapiens
  misc_RNA (1)...(19): siRNA sense strand
gaugagauccaagggaaac

SEQ ID NO: 785389 - RNA, 19 nt, Homo sapiens
  misc_RNA (1)...(19): siRNA sense strand
gggcugcugugugguagag

SEQ ID NO: 785390 - RNA, 19 nt, Homo sapiens
  misc_RNA (1)...(19): siRNA sense strand
gcaaggaucucuuugauug

SEQ ID NO: 785391 - RNA, 19 nt, Homo sapiens
  misc_RNA (1)...(19): siRNA sense strand
gacccuagcuaacauauua

SEQ ID NO: 785392 - RNA, 19 nt, Homo sapiens
  misc_RNA (1)...(19): siRNA sense strand
ggagauaagugcaagacua

SEQ ID NO: 785393 - RNA, 19 nt, Homo sapiens
  misc_RNA (1)...(19): siRNA sense strand
gauggguccuuguauauua

SEQ ID NO: 785394 - RNA, 19 nt, Homo sapiens
  misc_RNA (1)...(19): siRNA sense strand
cuaaugagauugcgacaua

SEQ ID NO: 785395 - RNA, 19 nt, Homo sapiens
  misc_RNA (1)...(19): siRNA sense strand
guaauggacuuguagauau

SEQ ID NO: 785396 - RNA, 19 nt, Homo sapiens
  misc_RNA (1)...(19): siRNA sense strand
cauaugagguuuggauuua

SEQ ID NO: 785397 - RNA, 19 nt, Homo sapiens
  misc_RNA (1)...(19): siRNA sense strand
gaugauggguccuuguaua

SEQ ID NO: 785398 - RNA, 19 nt, Homo sapiens
  misc_RNA (1)...(19): siRNA sense strand
gauauggccuuaaauccua

SEQ ID NO: 785399 - RNA, 19 nt, Homo sapiens
  misc_RNA (1)...(19): siRNA sense strand
caagaaaguucaagaguca

SEQ ID NO: 785400 - RNA, 19 nt, Homo sapiens
  misc_RNA (1)...(19): siRNA sense strand
gauaaagagucucaaggaa

SEQ ID NO: 785401 - RNA, 19 nt, Homo sapiens
  misc_RNA (1)...(19): siRNA sense strand
caccaaagcuuuccaaaca

SEQ ID NO: 785402 - RNA, 19 nt, Homo sapiens
  misc_RNA (1)...(19): siRNA sense strand
gaagauggaaucaaaguga

SEQ ID NO: 785403 - RNA, 19 nt, Homo sapiens
  misc_RNA (1)...(19): siRNA sense strand
ggaagacucugcuagaaag

SEQ ID NO: 785404 - RNA, 19 nt, Homo sapiens
  misc_RNA (1)...(19): siRNA sense strand
gaaagacccuagcuaacau

SEQ ID NO: 785405 - RNA, 19 nt, Homo sapiens
  misc_RNA (1)...(19): siRNA sense strand
gaucaggucugggugcuaa

SEQ ID NO: 785406 - RNA, 19 nt, Homo sapiens
  misc_RNA (1)...(19): siRNA sense strand
acacaaaucugcacauauc

SEQ ID NO: 785407 - RNA, 19 nt, Homo sapiens
  misc_RNA (1)...(19): siRNA sense strand
ugaacuaacucaggugaua

SEQ ID NO: 785408 - RNA, 19 nt, Homo sapiens
  misc_RNA (1)...(19): siRNA sense strand
gauauuacaccaaagcuuu

SEQ ID NO: 785409 - RNA, 19 nt, Homo sapiens
  misc_RNA (1)...(19): siRNA sense strand
ccaaacaacucacgcuuca

SEQ ID NO: 785410 - RNA, 19 nt, Homo sapiens
  misc_RNA (1)...(19): siRNA sense strand
gaaaauaaguacugugguu

SEQ ID NO: 785411 - RNA, 19 nt, Homo sapiens
  misc_RNA (1)...(19): siRNA sense strand
ugagaucacugaaguugaa

SEQ ID NO: 785412 - RNA, 19 nt, Homo sapiens
  misc_RNA (1)...(19): siRNA sense strand
ggacgacucaauaaauuaa

SEQ ID NO: 785413 - RNA, 19 nt, Homo sapiens
  misc_RNA (1)...(19): siRNA sense strand
gaaagcaauuugacagagu

SEQ ID NO: 785414 - RNA, 19 nt, Homo sapiens
  misc_RNA (1)...(19): siRNA sense strand
gaucagaaacuaagcauca

SEQ ID NO: 785415 - RNA, 19 nt, Homo sapiens
  misc_RNA (1)...(19): siRNA sense strand
uaucugaucuggcauuuca

SEQ ID NO: 785416 - RNA, 19 nt, Homo sapiens
  misc_RNA (1)...(19): siRNA sense strand
gaauuucagaggcacauua

SEQ ID NO: 785417 - RNA, 19 nt, Homo sapiens
  misc_RNA (1)...(19): siRNA sense strand
aaacugaugugcucuuugu

SEQ ID NO: 785418 - RNA, 19 nt, Homo sapiens
  misc_RNA (1)...(19): siRNA sense strand
gaugaagucugucccaaag

SEQ ID NO: 785419 - RNA, 19 nt, Homo sapiens
  misc_RNA (1)...(19): siRNA sense strand
gcagaagaauggccuugga

SEQ ID NO: 785420 - RNA, 19 nt, Homo sapiens
  misc_RNA (1)...(19): siRNA sense strand
cgacauaucucggaagaag

SEQ ID NO: 785421 - RNA, 19 nt, Homo sapiens
  misc_RNA (1)...(19): siRNA sense strand
gaagucaucaccaacacua

SEQ ID NO: 785422 - RNA, 19 nt, Homo sapiens
  misc_RNA (1)...(19): siRNA sense strand
gccagaagaucagaaacua

SEQ ID NO: 785423 - RNA, 19 nt, Homo sapiens
  misc_RNA (1)...(19): siRNA sense strand
ccaguuaaauuacacuaug

SEQ ID NO: 785424 - RNA, 19 nt, Homo sapiens
  misc_RNA (1)...(19): siRNA sense strand
caaggacucucucuucauc

SEQ ID NO: 785425 - RNA, 19 nt, Homo sapiens
  misc_RNA (1)...(19): siRNA sense strand
caauuaacuugaaggacua

SEQ ID NO: 785426 - RNA, 19 nt, Homo sapiens
  misc_RNA (1)...(19): siRNA sense strand
gaagaaggucugggaauug

SEQ ID NO: 785427 - RNA, 19 nt, Homo sapiens
  misc_RNA (1)...(19): siRNA sense strand
gucaaaggauuuaugauuc

SEQ ID NO: 785428 - RNA, 19 nt, Homo sapiens
  misc_RNA (1)...(19): siRNA sense strand
ccaggacaguggcuuguuu

SEQ ID NO: 785429 - RNA, 19 nt, Homo sapiens
  misc_RNA (1)...(19): siRNA sense strand
uuacacaaaucugcacaua

SEQ ID NO: 785430 - RNA, 19 nt, Homo sapiens
  misc_RNA (1)...(19): siRNA sense strand
agaugaagcugcacuacaa

SEQ ID NO: 785431 - RNA, 19 nt, Homo sapiens
  misc_RNA (1)...(19): siRNA sense strand
gaaggaaggccaaccaaag

SEQ ID NO: 785432 - RNA, 19 nt, Homo sapiens
  misc_RNA (1)...(19): siRNA sense strand
gaacuaacucaggugauaa

SEQ ID NO: 785433 - RNA, 19 nt, Homo sapiens
  misc_RNA (1)...(19): siRNA sense strand
gcauuucaaccauccuuua

SEQ ID NO: 785434 - RNA, 19 nt, Homo sapiens
  misc_RNA (1)...(19): siRNA sense strand
ccauaugucucuccagaug

SEQ ID NO: 785435 - RNA, 19 nt, Homo sapiens
  misc_RNA (1)...(19): siRNA sense strand
agaagaaggucugggaauu

SEQ ID NO: 785436 - RNA, 19 nt, Homo sapiens
  misc_RNA (1)...(19): siRNA sense strand
gcagauggcuaugaacaag

SEQ ID NO: 785437 - RNA, 19 nt, Homo sapiens
  misc_RNA (1)...(19): siRNA sense strand
guucaagagucaaaggauu

SEQ ID NO: 785438 - RNA, 19 nt, Homo sapiens
  misc_RNA (1)...(19): siRNA sense strand
acacuuguaucgcaaagaa

SEQ ID NO: 785439 - RNA, 19 nt, Homo sapiens
  misc_RNA (1)...(19): siRNA sense strand
ggacaaagugcuguucuga

SEQ ID NO: 785440 - RNA, 19 nt, Homo sapiens
  misc_RNA (1)...(19): siRNA sense strand
gacggagaauucuaugaaa

SEQ ID NO: 785441 - RNA, 19 nt, Homo sapiens
  misc_RNA (1)...(19): siRNA sense strand
agacaguaauggacuugua

SEQ ID NO: 785442 - RNA, 19 nt, Homo sapiens
  misc_RNA (1)...(19): siRNA sense strand
cuagauggacgacucaaua

SEQ ID NO: 785443 - RNA, 19 nt, Homo sapiens
  misc_RNA (1)...(19): siRNA sense strand
guucugagcugugccauuc

SEQ ID NO: 785444 - RNA, 19 nt, Homo sapiens
  misc_RNA (1)...(19): siRNA sense strand
gagaugauggguccuugua

SEQ ID NO: 785445 - RNA, 19 nt, Homo sapiens
  misc_RNA (1)...(19): siRNA sense strand
gauuguacuuuguauguuc

SEQ ID NO: 785446 - RNA, 19 nt, Homo sapiens
  misc_RNA (1)...(19): siRNA sense strand
gacagaguccuuauuguug

SEQ ID NO: 785447 - RNA, 19 nt, Homo sapiens
  misc_RNA (1)...(19): siRNA sense strand
gugaaaagcuccuuggauu

SEQ ID NO: 785448 - RNA, 19 nt, Homo sapiens
  misc_RNA (1)...(19): siRNA sense strand
gaaugaagcaggaguggau

SEQ ID NO: 785449 - RNA, 19 nt, Homo sapiens
  misc_RNA (1)...(19): siRNA sense strand
gcaaugugcgcuaugaaga

SEQ ID NO: 785450 - RNA, 19 nt, Homo sapiens
  misc_RNA (1)...(19): siRNA sense strand
gaauguuccuccagucauc

SEQ ID NO: 785451 - RNA, 19 nt, Homo sapiens
  misc_RNA (1)...(19): siRNA sense strand
uauagagcauuccaaguga

SEQ ID NO: 785452 - RNA, 19 nt, Homo sapiens
  misc_RNA (1)...(19): siRNA sense strand
gacgacauaucucggaaga

SEQ ID NO: 785453 - RNA, 19 nt, Homo sapiens
  misc_RNA (1)...(19): siRNA sense strand
guaaggguucaguacauua

SEQ ID NO: 785454 - RNA, 19 nt, Homo sapiens
  misc_RNA (1)...(19): siRNA sense strand
ggaaggaaggccaaccaaa

SEQ ID NO: 785455 - RNA, 19 nt, Homo sapiens
  misc_RNA (1)...(19): siRNA sense strand
gauacaacccauagaaugu

SEQ ID NO: 785456 - RNA, 19 nt, Homo sapiens
  misc_RNA (1)...(19): siRNA sense strand
uaagcaaugugcgcuauga

SEQ ID NO: 785457 - RNA, 19 nt, Homo sapiens
  misc_RNA (1)...(19): siRNA sense strand
ggaagacaucaaugacuuu

SEQ ID NO: 785458 - RNA, 19 nt, Homo sapiens
  misc_RNA (1)...(19): siRNA sense strand
uugcaaacgucacuacaaa

SEQ ID NO: 785459 - RNA, 19 nt, Homo sapiens
  misc_RNA (1)...(19): siRNA sense strand
gauggacgacucaauaaau

SEQ ID NO: 785460 - RNA, 19 nt, Homo sapiens
  misc_RNA (1)...(19): siRNA sense strand
gggaaggucaagaugauaa

SEQ ID NO: 785461 - RNA, 19 nt, Homo sapiens
  misc_RNA (1)...(19): siRNA sense strand
agacaucaaugacuuugga

SEQ ID NO: 785462 - RNA, 19 nt, Homo sapiens
  misc_RNA (1)...(19): siRNA sense strand
gugcaagacuacugaauac

SEQ ID NO: 785463 - RNA, 19 nt, Homo sapiens
  misc_RNA (1)...(19): siRNA sense strand
gagaaauacaggaggcuuu

SEQ ID NO: 785464 - RNA, 19 nt, Homo sapiens
  misc_RNA (1)...(19): siRNA sense strand
ucaaugacuuuggagauga

SEQ ID NO: 785465 - RNA, 19 nt, Homo sapiens
  misc_RNA (1)...(19): siRNA sense strand
ggacuuguagauauuaaug

SEQ ID NO: 785466 - RNA, 19 nt, Homo sapiens
  misc_RNA (1)...(19): siRNA sense strand
uuacugaagcccaccaaua

SEQ ID NO: 785467 - RNA, 19 nt, Homo sapiens
  misc_RNA (1)...(19): siRNA sense strand
ggaggcuacuacuucauug

SEQ ID NO: 785468 - RNA, 19 nt, Homo sapiens
  misc_RNA (1)...(19): siRNA sense strand
acagaguccuuauuguuga

SEQ ID NO: 785469 - RNA, 19 nt, Homo sapiens
  misc_RNA (1)...(19): siRNA sense strand
ggcaucagcuguuaauguc

SEQ ID NO: 785470 - RNA, 19 nt, Homo sapiens
  misc_RNA (1)...(19): siRNA sense strand
aaggaucucuuugauugua

SEQ ID NO: 785471 - RNA, 19 nt, Homo sapiens
  misc_RNA (1)...(19): siRNA sense strand
cagagcugcuugccugaaa

SEQ ID NO: 785472 - RNA, 19 nt, Homo sapiens
  misc_RNA (1)...(19): siRNA sense strand
caaaucugcacauaucuga

SEQ ID NO: 785473 - RNA, 19 nt, Homo sapiens
  misc_RNA (1)...(19): siRNA sense strand
uaagugcguuccucaguca

SEQ ID NO: 785474 - RNA, 19 nt, Homo sapiens
  misc_RNA (1)...(19): siRNA sense strand
uggaagacaucaaugacuu

SEQ ID NO: 785475 - RNA, 19 nt, Homo sapiens
  misc_RNA (1)...(19): siRNA sense strand
ccugagaccucccauuauc

SEQ ID NO: 785476 - RNA, 19 nt, Homo sapiens
  misc_RNA (1)...(19): siRNA sense strand
gcuaugaacaagucuauca

SEQ ID NO: 785477 - RNA, 19 nt, Homo sapiens
  misc_RNA (1)...(19): siRNA sense strand
gaucuggcauuucaaccau

SEQ ID NO: 785478 - RNA, 19 nt, Homo sapiens
  misc_RNA (1)...(19): siRNA sense strand
ccacuaccuugucagcauu

SEQ ID NO: 785479 - RNA, 19 nt, Homo sapiens
  misc_RNA (1)...(19): siRNA sense strand
ccacaacacucauuaucac

SEQ ID NO: 785480 - RNA, 19 nt, Homo sapiens
  misc_RNA (1)...(19): siRNA sense strand
caucagcuguuaaugucaa

SEQ ID NO: 785481 - RNA, 19 nt, Homo sapiens
  misc_RNA (1)...(19): siRNA sense strand
ugacggagaauucuaugaa

SEQ ID NO: 785482 - RNA, 19 nt, Homo sapiens
  misc_RNA (1)...(19): siRNA sense strand
caaccauccuuuacugaag

SEQ ID NO: 785483 - RNA, 19 nt, Homo sapiens
  misc_RNA (1)...(19): siRNA sense strand
ggagaagucaucaccaaca

SEQ ID NO: 785484 - RNA, 19 nt, Homo sapiens
  misc_RNA (1)...(19): siRNA sense strand
gaggauauggccuuaaauc

SEQ ID NO: 785485 - RNA, 19 nt, Homo sapiens
  misc_RNA (1)...(19): siRNA sense strand
gacaaguucauuuauguug

SEQ ID NO: 785486 - RNA, 19 nt, Homo sapiens
  misc_RNA (1)...(19): siRNA sense strand
uuuaagugcuggucaguug

SEQ ID NO: 785487 - RNA, 19 nt, Homo sapiens
  misc_RNA (1)...(19): siRNA sense strand
guggaagacucugcuagaa

SEQ ID NO: 785488 - RNA, 19 nt, Homo sapiens
  misc_RNA (1)...(19): siRNA sense strand
uuacuaagguuaccacaac

SEQ ID NO: 785489 - RNA, 19 nt, Homo sapiens
  misc_RNA (1)...(19): siRNA sense strand
gggcaucagcuguuaaugu

SEQ ID NO: 785490 - RNA, 19 nt, Homo sapiens
  misc_RNA (1)...(19): siRNA sense strand
gaagaaagcuggacaguuu

SEQ ID NO: 785491 - RNA, 19 nt, Homo sapiens
  misc_RNA (1)...(19): siRNA sense strand
gaacacagcuauuucuaga

SEQ ID NO: 785492 - RNA, 19 nt, Homo sapiens
  misc_RNA (1)...(19): siRNA sense strand
ggaugcaucuguauauuua

SEQ ID NO: 785493 - RNA, 19 nt, Homo sapiens
  misc_RNA (1)...(19): siRNA sense strand
gaaggacaaugcuuugaua

SEQ ID NO: 785494 - RNA, 19 nt, Homo sapiens
  misc_RNA (1)...(19): siRNA sense strand
gaagagaacacagcuauuu

SEQ ID NO: 785495 - RNA, 19 nt, Homo sapiens
  misc_RNA (1)...(19): siRNA sense strand
ggaguaugaugcugagaua

SEQ ID NO: 785496 - RNA, 19 nt, Homo sapiens
  misc_RNA (1)...(19): siRNA sense strand
gaaagacagaggauuauuu

SEQ ID NO: 785497 - RNA, 19 nt, Homo sapiens
  misc_RNA (1)...(19): siRNA sense strand
gaucacaaauuuccuacaa

SEQ ID NO: 785498 - RNA, 19 nt, Homo sapiens
  misc_RNA (1)...(19): siRNA sense strand
gaaaguugaugcccuuaug

SEQ ID NO: 785499 - RNA, 19 nt, Homo sapiens
  misc_RNA (1)...(19): siRNA sense strand
gaugaugaauccaaacaaa

SEQ ID NO: 785500 - RNA, 19 nt, Homo sapiens
  misc_RNA (1)...(19): siRNA sense strand
cagaauggguggaguauga

SEQ ID NO: 785501 - RNA, 19 nt, Homo sapiens
  misc_RNA (1)...(19): siRNA sense strand
ucacauggcuaaagaguau

SEQ ID NO: 785502 - RNA, 19 nt, Homo sapiens
  misc_RNA (1)...(19): siRNA sense strand
gggaagauaugagcaaauu

SEQ ID NO: 785503 - RNA, 19 nt, Homo sapiens
  misc_RNA (1)...(19): siRNA sense strand
gaagauuucucuacuuucu

SEQ ID NO: 785504 - RNA, 19 nt, Homo sapiens
  misc_RNA (1)...(19): siRNA sense strand
uaaauuacguccuggagaa

SEQ ID NO: 785505 - RNA, 19 nt, Homo sapiens
  misc_RNA (1)...(19): siRNA sense strand
gaagaaauugcuacaacua

SEQ ID NO: 785506 - RNA, 19 nt, Homo sapiens
  misc_RNA (1)...(19): siRNA sense strand
gcacgaaugcaauugauuu

SEQ ID NO: 785507 - RNA, 19 nt, Homo sapiens
  misc_RNA (1)...(19): siRNA sense strand
ggauaggaauaauguugua

SEQ ID NO: 785508 - RNA, 19 nt, Homo sapiens
  misc_RNA (1)...(19): siRNA sense strand
gacaguuucuagacaauuu

SEQ ID NO: 785509 - RNA, 19 nt, Homo sapiens
  misc_RNA (1)...(19): siRNA sense strand
gaacuagaauacuuacuac

SEQ ID NO: 785510 - RNA, 19 nt, Homo sapiens
  misc_RNA (1)...(19): siRNA sense strand
gauauguucuucaauguca

SEQ ID NO: 785511 - RNA, 19 nt, Homo sapiens
  misc_RNA (1)...(19): siRNA sense strand
gagaguaacaaacaaauga

SEQ ID NO: 785512 - RNA, 19 nt, Homo sapiens
  misc_RNA (1)...(19): siRNA sense strand
acaguaagcuugcauaaag

SEQ ID NO: 785513 - RNA, 19 nt, Homo sapiens
  misc_RNA (1)...(19): siRNA sense strand
gagaaucacaguguuauaa

SEQ ID NO: 785514 - RNA, 19 nt, Homo sapiens
  misc_RNA (1)...(19): siRNA sense strand
ggugaacccuuuaaacaug

SEQ ID NO: 785515 - RNA, 19 nt, Homo sapiens
  misc_RNA (1)...(19): siRNA sense strand
cgaaguuccucuuagaauu

SEQ ID NO: 785516 - RNA, 19 nt, Homo sapiens
  misc_RNA (1)...(19): siRNA sense strand
acaaacaaaugaugccuuu

SEQ ID NO: 785517 - RNA, 19 nt, Homo sapiens
  misc_RNA (1)...(19): siRNA sense strand
ggaaacugugcaagaauua

SEQ ID NO: 785518 - RNA, 19 nt, Homo sapiens
  misc_RNA (1)...(19): siRNA sense strand
ggagcaagcuuuuauaaga

SEQ ID NO: 785519 - RNA, 19 nt, Homo sapiens
  misc_RNA (1)...(19): siRNA sense strand
ggaugagacugaaacaaau

SEQ ID NO: 785520 - RNA, 19 nt, Homo sapiens
  misc_RNA (1)...(19): siRNA sense strand
guucaaggauuucucuuug

SEQ ID NO: 785521 - RNA, 19 nt, Homo sapiens
  misc_RNA (1)...(19): siRNA sense strand
ggaggcaagugaauuuaug

SEQ ID NO: 785522 - RNA, 19 nt, Homo sapiens
  misc_RNA (1)...(19): siRNA sense strand
ucacagaacuuccccauaa

SEQ ID NO: 785523 - RNA, 19 nt, Homo sapiens
  misc_RNA (1)...(19): siRNA sense strand
gaaauucuguauguucuuc

SEQ ID NO: 785524 - RNA, 19 nt, Homo sapiens
  misc_RNA (1)...(19): siRNA sense strand
gaauuaugaugcuuucugu

SEQ ID NO: 785525 - RNA, 19 nt, Homo sapiens
  misc_RNA (1)...(19): siRNA sense strand
ccaagacgaugagaguaua

SEQ ID NO: 785526 - RNA, 19 nt, Homo sapiens
  misc_RNA (1)...(19): siRNA sense strand
cagaauugcuguaaaucaa

SEQ ID NO: 785527 - RNA, 19 nt, Homo sapiens
  misc_RNA (1)...(19): siRNA sense strand
gugaaauucugguugcuaa

SEQ ID NO: 785528 - RNA, 19 nt, Homo sapiens
  misc_RNA (1)...(19): siRNA sense strand
ucacgaaguuccucuuaga

SEQ ID NO: 785529 - RNA, 19 nt, Homo sapiens
  misc_RNA (1)...(19): siRNA sense strand
gaguauggauuccgauaug

SEQ ID NO: 785530 - RNA, 19 nt, Homo sapiens
  misc_RNA (1)...(19): siRNA sense strand
caaauaacaugagugacuu

SEQ ID NO: 785531 - RNA, 19 nt, Homo sapiens
  misc_RNA (1)...(19): siRNA sense strand
gaaguuccucuuagaauug

SEQ ID NO: 785532 - RNA, 19 nt, Homo sapiens
  misc_RNA (1)...(19): siRNA sense strand
aagcacaccuguaaaauua

SEQ ID NO: 785533 - RNA, 19 nt, Homo sapiens
  misc_RNA (1)...(19): siRNA sense strand
aagcagaccuagaagauau

SEQ ID NO: 785534 - RNA, 19 nt, Homo sapiens
  misc_RNA (1)...(19): siRNA sense strand
aaacccaggugcuuggaua

SEQ ID NO: 785535 - RNA, 19 nt, Homo sapiens
  misc_RNA (1)...(19): siRNA sense strand
guguggagcuagcaauuaa

SEQ ID NO: 785536 - RNA, 19 nt, Homo sapiens
  misc_RNA (1)...(19): siRNA sense strand
ugaaggaacugacucucaa

SEQ ID NO: 785537 - RNA, 19 nt, Homo sapiens
  misc_RNA (1)...(19): siRNA sense strand
caacaugauuacuccagaa

SEQ ID NO: 785538 - RNA, 19 nt, Homo sapiens
  misc_RNA (1)...(19): siRNA sense strand
guguugauauggauguuua

SEQ ID NO: 785539 - RNA, 19 nt, Homo sapiens
  misc_RNA (1)...(19): siRNA sense strand
gcagaagaaaguaaugaaa

SEQ ID NO: 785540 - RNA, 19 nt, Homo sapiens
  misc_RNA (1)...(19): siRNA sense strand
gcaauaaucccaaaacaaa

SEQ ID NO: 785541 - RNA, 19 nt, Homo sapiens
  misc_RNA (1)...(19): siRNA sense strand
ucaaauaguugggcaugaa

SEQ ID NO: 785542 - RNA, 19 nt, Homo sapiens
  misc_RNA (1)...(19): siRNA sense strand
gcaagauuaucaaccugaa

SEQ ID NO: 785543 - RNA, 19 nt, Homo sapiens
  misc_RNA (1)...(19): siRNA sense strand
gcaaauaacaugagugacu

SEQ ID NO: 785544 - RNA, 19 nt, Homo sapiens
  misc_RNA (1)...(19): siRNA sense strand
ggaaucaacgcaaauaaca

SEQ ID NO: 785545 - RNA, 19 nt, Homo sapiens
  misc_RNA (1)...(19): siRNA sense strand
ggaagaaauugcuacaacu

SEQ ID NO: 785546 - RNA, 19 nt, Homo sapiens
  misc_RNA (1)...(19): siRNA sense strand
gcagucacucucuggauua

SEQ ID NO: 785547 - RNA, 19 nt, Homo sapiens
  misc_RNA (1)...(19): siRNA sense strand
caacuauauugcagaagaa

SEQ ID NO: 785548 - RNA, 19 nt, Homo sapiens
  misc_RNA (1)...(19): siRNA sense strand
ucaacuauauugcagaaga

SEQ ID NO: 785549 - RNA, 19 nt, Homo sapiens
  misc_RNA (1)...(19): siRNA sense strand
ucacacauuugggaauaua

SEQ ID NO: 785550 - RNA, 19 nt, Homo sapiens
  misc_RNA (1)...(19): siRNA sense strand
cgaaauggguacuagaaca

SEQ ID NO: 785551 - RNA, 19 nt, Homo sapiens
  misc_RNA (1)...(19): siRNA sense strand
ucaagagaaugauauguuc

SEQ ID NO: 785552 - RNA, 19 nt, Homo sapiens
  misc_RNA (1)...(19): siRNA sense strand
uauauuacauggccuacaa

SEQ ID NO: 785553 - RNA, 19 nt, Homo sapiens
  misc_RNA (1)...(19): siRNA sense strand
uaaauggccuucguguuga

SEQ ID NO: 785554 - RNA, 19 nt, Homo sapiens
  misc_RNA (1)...(19): siRNA sense strand
gcaauuaagaguacagaau

SEQ ID NO: 785555 - RNA, 19 nt, Homo sapiens
  misc_RNA (1)...(19): siRNA sense strand
uuacauggccuacaaguug

SEQ ID NO: 785556 - RNA, 19 nt, Homo sapiens
  misc_RNA (1)...(19): siRNA sense strand
gaagauaaaguuguucaug

SEQ ID NO: 785557 - RNA, 19 nt, Homo sapiens
  misc_RNA (1)...(19): siRNA sense strand
gauaagagugcuguaauug

SEQ ID NO: 785558 - RNA, 19 nt, Homo sapiens
  misc_RNA (1)...(19): siRNA sense strand
gcaguaccucaauuuaaua

SEQ ID NO: 785559 - RNA, 19 nt, Homo sapiens
  misc_RNA (1)...(19): siRNA sense strand
guaaugcauuugugguuau

SEQ ID NO: 785560 - RNA, 19 nt, Homo sapiens
  misc_RNA (1)...(19): siRNA sense strand
gagauaagacaacuauuag

SEQ ID NO: 785561 - RNA, 19 nt, Homo sapiens
  misc_RNA (1)...(19): siRNA sense strand
acugugaccuugauaauau

SEQ ID NO: 785562 - RNA, 19 nt, Homo sapiens
  misc_RNA (1)...(19): siRNA sense strand
gaaucacaguguuauaaag

SEQ ID NO: 785563 - RNA, 19 nt, Homo sapiens
  misc_RNA (1)...(19): siRNA sense strand
ggagaaauggguauuguca

SEQ ID NO: 785564 - RNA, 19 nt, Homo sapiens
  misc_RNA (1)...(19): siRNA sense strand
uaagagugcuguaauugca

SEQ ID NO: 785565 - RNA, 19 nt, Homo sapiens
  misc_RNA (1)...(19): siRNA sense strand
cugcugauguugaagauuu

SEQ ID NO: 785566 - RNA, 19 nt, Homo sapiens
  misc_RNA (1)...(19): siRNA sense strand
caacauaugagagaagaaa

SEQ ID NO: 785567 - RNA, 19 nt, Homo sapiens
  misc_RNA (1)...(19): siRNA sense strand
uaaccagaauugcuguaaa

SEQ ID NO: 785568 - RNA, 19 nt, Homo sapiens
  misc_RNA (1)...(19): siRNA sense strand
ccagaucucuaaccagaau

SEQ ID NO: 785569 - RNA, 19 nt, Homo sapiens
  misc_RNA (1)...(19): siRNA sense strand
gaacauuuagugcauuuca

SEQ ID NO: 785570 - RNA, 19 nt, Homo sapiens
  misc_RNA (1)...(19): siRNA sense strand
gaagcaagauacaauuuug

SEQ ID NO: 785571 - RNA, 19 nt, Homo sapiens
  misc_RNA (1)...(19): siRNA sense strand
ggacugugggauuccauua

SEQ ID NO: 785572 - RNA, 19 nt, Homo sapiens
  misc_RNA (1)...(19): siRNA sense strand
ccuagaagauaucauuguu

SEQ ID NO: 785573 - RNA, 19 nt, Homo sapiens
  misc_RNA (1)...(19): siRNA sense strand
gaaagucugggaacuacaa

SEQ ID NO: 785574 - RNA, 19 nt, Homo sapiens
  misc_RNA (1)...(19): siRNA sense strand
acaaagcacuggaugauac

SEQ ID NO: 785575 - RNA, 19 nt, Homo sapiens
  misc_RNA (1)...(19): siRNA sense strand
auaagaagcacaccuguaa

SEQ ID NO: 785576 - RNA, 19 nt, Homo sapiens
  misc_RNA (1)...(19): siRNA sense strand
uaguggaucucaagaaguu

SEQ ID NO: 785577 - RNA, 19 nt, Homo sapiens
  misc_RNA (1)...(19): siRNA sense strand
agacggaaauaccauauca

SEQ ID NO: 785578 - RNA, 19 nt, Homo sapiens
  misc_RNA (1)...(19): siRNA sense strand
cuuaggaccuuuagaugaa

SEQ ID NO: 785579 - RNA, 19 nt, Homo sapiens
  misc_RNA (1)...(19): siRNA sense strand
agauaagagugcuguaauu

SEQ ID NO: 785580 - RNA, 19 nt, Homo sapiens
  misc_RNA (1)...(19): siRNA sense strand
ggagaucacaaauuuccua

SEQ ID NO: 785581 - RNA, 19 nt, Homo sapiens
  misc_RNA (1)...(19): siRNA sense strand
guacuuaucuggguauggu

SEQ ID NO: 785582 - RNA, 19 nt, Homo sapiens
  misc_RNA (1)...(19): siRNA sense strand
cagcaguaccucaauuuaa

SEQ ID NO: 785583 - RNA, 19 nt, Homo sapiens
  misc_RNA (1)...(19): siRNA sense strand
gauauucgacauucuucua

SEQ ID NO: 785584 - RNA, 19 nt, Homo sapiens
  misc_RNA (1)...(19): siRNA sense strand
gaugcucgucuauuuauaa

SEQ ID NO: 785585 - RNA, 19 nt, Homo sapiens
  misc_RNA (1)...(19): siRNA sense strand
aggcgaugcucgucuauuu

SEQ ID NO: 785586 - RNA, 19 nt, Homo sapiens
  misc_RNA (1)...(19): siRNA sense strand
ugugaaaccuggugugaug

SEQ ID NO: 785587 - RNA, 19 nt, Homo sapiens
  misc_RNA (1)...(19): siRNA sense strand
guaucaagcucucagucaa

SEQ ID NO: 785588 - RNA, 19 nt, Homo sapiens
  misc_RNA (1)...(19): siRNA sense strand
ggagaaucacaguguuaua

SEQ ID NO: 785589 - RNA, 19 nt, Homo sapiens
  misc_RNA (1)...(19): siRNA sense strand
caagauaagagugcuguaa

SEQ ID NO: 785590 - RNA, 19 nt, Homo sapiens
  misc_RNA (1)...(19): siRNA sense strand
cuacguauguggauaagaa

SEQ ID NO: 785591 - RNA, 19 nt, Homo sapiens
  misc_RNA (1)...(19): siRNA sense strand
agaacaagaucccuuacaa

SEQ ID NO: 785592 - RNA, 19 nt, Homo sapiens
  misc_RNA (1)...(19): siRNA sense strand
acaccaacaucguggagua

SEQ ID NO: 785593 - RNA, 19 nt, Homo sapiens
  misc_RNA (1)...(19): siRNA sense strand
ucgcggaacucuucuccua

SEQ ID NO: 785594 - RNA, 19 nt, Homo sapiens
  misc_RNA (1)...(19): siRNA sense strand
gaaguacgcccuggacaug

SEQ ID NO: 785595 - RNA, 19 nt, Homo sapiens
  misc_RNA (1)...(19): siRNA sense strand
gaacaagaucccuuacaag

SEQ ID NO: 785596 - RNA, 19 nt, Homo sapiens
  misc_RNA (1)...(19): siRNA sense strand
ggccacacgugccucauga

SEQ ID NO: 785597 - RNA, 19 nt, Homo sapiens
  misc_RNA (1)...(19): siRNA sense strand
gagcuacguauguggauaa

SEQ ID NO: 785598 - RNA, 19 nt, Homo sapiens
  misc_RNA (1)...(19): siRNA sense strand
ggagcuacguauguggaua

SEQ ID NO: 785599 - RNA, 19 nt, Homo sapiens
  misc_RNA (1)...(19): siRNA sense strand
gcaacacggcccugcauga

SEQ ID NO: 785600 - RNA, 19 nt, Homo sapiens
  misc_RNA (1)...(19): siRNA sense strand
ccaaggcgcuggccaucau

SEQ ID NO: 785601 - RNA, 19 nt, Homo sapiens
  misc_RNA (1)...(19): siRNA sense strand
ccaugcagcccuucaacua

SEQ ID NO: 785602 - RNA, 19 nt, Homo sapiens
  misc_RNA (1)...(19): siRNA sense strand
ggacacuuccuauuacauc

SEQ ID NO: 785603 - RNA, 19 nt, Homo sapiens
  misc_RNA (1)...(19): siRNA sense strand
gguccuggccuaugacuau

SEQ ID NO: 785604 - RNA, 19 nt, Homo sapiens
  misc_RNA (1)...(19): siRNA sense strand
ccaccaaugccuucaagaa

SEQ ID NO: 785605 - RNA, 19 nt, Homo sapiens
  misc_RNA (1)...(19): siRNA sense strand
ucaagaagacggccuacga

SEQ ID NO: 785606 - RNA, 19 nt, Homo sapiens
  misc_RNA (1)...(19): siRNA sense strand
gcgaguaccugcccaaacc

SEQ ID NO: 785607 - RNA, 19 nt, Homo sapiens
  misc_RNA (1)...(19): siRNA sense strand
ggacaaggacaccacaaac

SEQ ID NO: 785608 - RNA, 19 nt, Homo sapiens
  misc_RNA (1)...(19): siRNA sense strand
ggaaguacgcccuggacau

SEQ ID NO: 785609 - RNA, 19 nt, Homo sapiens
  misc_RNA (1)...(19): siRNA sense strand
gcugggagcuacguaugug

SEQ ID NO: 785610 - RNA, 19 nt, Homo sapiens
  misc_RNA (1)...(19): siRNA sense strand
ccacauggacgccaccaau

SEQ ID NO: 785611 - RNA, 19 nt, Homo sapiens
  misc_RNA (1)...(19): siRNA sense strand
uaagaaacgagaucugcuu

SEQ ID NO: 785612 - RNA, 19 nt, Homo sapiens
  misc_RNA (1)...(19): siRNA sense strand
cguggaagccuuggaauug

SEQ ID NO: 785613 - RNA, 19 nt, Homo sapiens
  misc_RNA (1)...(19): siRNA sense strand
gcagggauuuugacaacaa

SEQ ID NO: 785614 - RNA, 19 nt, Homo sapiens
  misc_RNA (1)...(19): siRNA sense strand
acccggacacuuccuauua

SEQ ID NO: 785615 - RNA, 19 nt, Homo sapiens
  misc_RNA (1)...(19): siRNA sense strand
acacauagcagcccagaac

SEQ ID NO: 785616 - RNA, 19 nt, Homo sapiens
  misc_RNA (1)...(19): siRNA sense strand
gaacggggaaucuuacgaa

SEQ ID NO: 785617 - RNA, 19 nt, Homo sapiens
  misc_RNA (1)...(19): siRNA sense strand
acacgugccucaugaucuc

SEQ ID NO: 785618 - RNA, 19 nt, Homo sapiens
  misc_RNA (1)...(19): siRNA sense strand
caacaccccgcuacacaua

SEQ ID NO: 785619 - RNA, 19 nt, Homo sapiens
  misc_RNA (1)...(19): siRNA sense strand
gcacccagaucggcuuugc

SEQ ID NO: 785620 - RNA, 19 nt, Homo sapiens
  misc_RNA (1)...(19): siRNA sense strand
gcuaucccgugggcagauu

SEQ ID NO: 785621 - RNA, 19 nt, Homo sapiens
  misc_RNA (1)...(19): siRNA sense strand
guauguggauaagaaacga

SEQ ID NO: 785622 - RNA, 19 nt, Homo sapiens
  misc_RNA (1)...(19): siRNA sense strand
ucaccgacccggaugagau

SEQ ID NO: 785623 - RNA, 19 nt, Homo sapiens
  misc_RNA (1)...(19): siRNA sense strand
gagcuggaggcgcugauca

SEQ ID NO: 785624 - RNA, 19 nt, Homo sapiens
  misc_RNA (1)...(19): siRNA sense strand
gcauccgcuuguggaagua

SEQ ID NO: 785625 - RNA, 19 nt, Homo sapiens
  misc_RNA (1)...(19): siRNA sense strand
acauggcuguggacaagga

SEQ ID NO: 785626 - RNA, 19 nt, Homo sapiens
  misc_RNA (1)...(19): siRNA sense strand
uacaagggccaccgugaga

SEQ ID NO: 785627 - RNA, 19 nt, Homo sapiens
  misc_RNA (1)...(19): siRNA sense strand
cgugacggcuacggcauga

SEQ ID NO: 785628 - RNA, 19 nt, Homo sapiens
  misc_RNA (1)...(19): siRNA sense strand
cucaugaucucgugcuaca

SEQ ID NO: 785629 - RNA, 19 nt, Homo sapiens
  misc_RNA (1)...(19): siRNA sense strand
ggauaagaaacgagaucug

SEQ ID NO: 785630 - RNA, 19 nt, Homo sapiens
  misc_RNA (1)...(19): siRNA sense strand
caugaaugcccugaucgaa

SEQ ID NO: 785631 - RNA, 19 nt, Homo sapiens
  misc_RNA (1)...(19): siRNA sense strand
ccacacgugccucaugauc

SEQ ID NO: 785632 - RNA, 19 nt, Homo sapiens
  misc_RNA (1)...(19): siRNA sense strand
gcacccggacacuuccuau

SEQ ID NO: 785633 - RNA, 19 nt, Homo sapiens
  misc_RNA (1)...(19): siRNA sense strand
cggaugagaugcgcaugca

SEQ ID NO: 785634 - RNA, 19 nt, Homo sapiens
  misc_RNA (1)...(19): siRNA sense strand
caagggccaccgugagauc

SEQ ID NO: 785635 - RNA, 19 nt, Homo sapiens
  misc_RNA (1)...(19): siRNA sense strand
gcccuggacaugcaacaga

SEQ ID NO: 785636 - RNA, 19 nt, Homo sapiens
  misc_RNA (1)...(19): siRNA sense strand
caugaucucgugcuacaag

SEQ ID NO: 785637 - RNA, 19 nt, Homo sapiens
  misc_RNA (1)...(19): siRNA sense strand
guaccaugcagcccuucaa

SEQ ID NO: 785638 - RNA, 19 nt, Homo sapiens
  misc_RNA (1)...(19): siRNA sense strand
uagcagcccagaacaacug

SEQ ID NO: 785639 - RNA, 19 nt, Homo sapiens
  misc_RNA (1)...(19): siRNA sense strand
gacaaggacaccacaaacg

SEQ ID NO: 785640 - RNA, 19 nt, Homo sapiens
  misc_RNA (1)...(19): siRNA sense strand
ccuauuacauccguuacag

SEQ ID NO: 785641 - RNA, 19 nt, Homo sapiens
  misc_RNA (1)...(19): siRNA sense strand
ccggacacuuccuauuaca

SEQ ID NO: 785642 - RNA, 19 nt, Homo sapiens
  misc_RNA (1)...(19): siRNA sense strand
ggacacaucucggcgaaua

SEQ ID NO: 785643 - RNA, 19 nt, Homo sapiens
  misc_RNA (1)...(19): siRNA sense strand
guaauugucuucucauuug

SEQ ID NO: 785644 - RNA, 19 nt, Homo sapiens
  misc_RNA (1)...(19): siRNA sense strand
guaauaaacugccgugugu

SEQ ID NO: 785645 - RNA, 19 nt, Homo sapiens
  misc_RNA (1)...(19): siRNA sense strand
gccaaucacuaaucaauuu

SEQ ID NO: 785646 - RNA, 19 nt, Homo sapiens
  misc_RNA (1)...(19): siRNA sense strand
gcaaggcgauuucgagcaa

SEQ ID NO: 785647 - RNA, 19 nt, Homo sapiens
  misc_RNA (1)...(19): siRNA sense strand
uauguuagaugcccuugua

SEQ ID NO: 785648 - RNA, 19 nt, Homo sapiens
  misc_RNA (1)...(19): siRNA sense strand
ggcaauugcuuaucuccua

SEQ ID NO: 785649 - RNA, 19 nt, Homo sapiens
  misc_RNA (1)...(19): siRNA sense strand
caguaaugcuuauuucuga

SEQ ID NO: 785650 - RNA, 19 nt, Homo sapiens
  misc_RNA (1)...(19): siRNA sense strand
gugguuaagugcacaguuu

SEQ ID NO: 785651 - RNA, 19 nt, Homo sapiens
  misc_RNA (1)...(19): siRNA sense strand
gugcauauauuaccauugg

SEQ ID NO: 785652 - RNA, 19 nt, Homo sapiens
  misc_RNA (1)...(19): siRNA sense strand
caacaggcaagaaauaugu

SEQ ID NO: 785653 - RNA, 19 nt, Homo sapiens
  misc_RNA (1)...(19): siRNA sense strand
cgaagacgcugcugugcau

SEQ ID NO: 785654 - RNA, 19 nt, Homo sapiens
  misc_RNA (1)...(19): siRNA sense strand
gcaagaaauauguuagaug

SEQ ID NO: 785655 - RNA, 19 nt, Homo sapiens
  misc_RNA (1)...(19): siRNA sense strand
gcaaugaagcuacgccaau

SEQ ID NO: 785656 - RNA, 19 nt, Homo sapiens
  misc_RNA (1)...(19): siRNA sense strand
uauccgagcuuguuauugg

SEQ ID NO: 785657 - RNA, 19 nt, Homo sapiens
  misc_RNA (1)...(19): siRNA sense strand
uagaugcccuuguaauugu

SEQ ID NO: 785658 - RNA, 19 nt, Homo sapiens
  misc_RNA (1)...(19): siRNA sense strand
ccaccguacuugcaagaaa

SEQ ID NO: 785659 - RNA, 19 nt, Homo sapiens
  misc_RNA (1)...(19): siRNA sense strand
caauuuggauggcaagcuu

SEQ ID NO: 785660 - RNA, 19 nt, Homo sapiens
  misc_RNA (1)...(19): siRNA sense strand
gcgaauaggaugcccaaga

SEQ ID NO: 785661 - RNA, 19 nt, Homo sapiens
  misc_RNA (1)...(19): siRNA sense strand
guuagaugcccuuguaauu

SEQ ID NO: 785662 - RNA, 19 nt, Homo sapiens
  misc_RNA (1)...(19): siRNA sense strand
uugcuuaucuccuaggauu

SEQ ID NO: 785663 - RNA, 19 nt, Homo sapiens
  misc_RNA (1)...(19): siRNA sense strand
gagcucccaccuccauaua

SEQ ID NO: 785664 - RNA, 19 nt, Homo sapiens
  misc_RNA (1)...(19): siRNA sense strand
cgaauaggaugcccaagac

SEQ ID NO: 785665 - RNA, 19 nt, Homo sapiens
  misc_RNA (1)...(19): siRNA sense strand
caaugaagcuacgccaauc

SEQ ID NO: 785666 - RNA, 19 nt, Homo sapiens
  misc_RNA (1)...(19): siRNA sense strand
aacuguagacggauaauua

SEQ ID NO: 785667 - RNA, 19 nt, Homo sapiens
  misc_RNA (1)...(19): siRNA sense strand
gcauauauuaccauuggaa

SEQ ID NO: 785668 - RNA, 19 nt, Homo sapiens
  misc_RNA (1)...(19): siRNA sense strand
agacgcugcugugcauaua

SEQ ID NO: 785669 - RNA, 19 nt, Homo sapiens
  misc_RNA (1)...(19): siRNA sense strand
ggcaagaaauauguuagau

SEQ ID NO: 785670 - RNA, 19 nt, Homo sapiens
  misc_RNA (1)...(19): siRNA sense strand
gagcaaccuauguuucuug

SEQ ID NO: 785671 - RNA, 19 nt, Homo sapiens
  misc_RNA (1)...(19): siRNA sense strand
gcucccaccuccauauaca

SEQ ID NO: 785672 - RNA, 19 nt, Homo sapiens
  misc_RNA (1)...(19): siRNA sense strand
gcccaguaaugcuuauuuc

SEQ ID NO: 785673 - RNA, 19 nt, Homo sapiens
  misc_RNA (1)...(19): siRNA sense strand
ccagugguauuccaguaau

SEQ ID NO: 785674 - RNA, 19 nt, Homo sapiens
  misc_RNA (1)...(19): siRNA sense strand
aagagucaguuauccagaa

SEQ ID NO: 785675 - RNA, 19 nt, Homo sapiens
  misc_RNA (1)...(19): siRNA sense strand
uuagaugcccuuguaauug

SEQ ID NO: 785676 - RNA, 19 nt, Homo sapiens
  misc_RNA (1)...(19): siRNA sense strand
gcccaagacccaacuguag

SEQ ID NO: 785677 - RNA, 19 nt, Homo sapiens
  misc_RNA (1)...(19): siRNA sense strand
acgcugcugugcauauauu

SEQ ID NO: 785678 - RNA, 19 nt, Homo sapiens
  misc_RNA (1)...(19): siRNA sense strand
gaagcuacgccaaucaaaa

SEQ ID NO: 785679 - RNA, 19 nt, Homo sapiens
  misc_RNA (1)...(19): siRNA sense strand
cagcaucccacuccggaaa

SEQ ID NO: 785680 - RNA, 19 nt, Homo sapiens
  misc_RNA (1)...(19): siRNA sense strand
gguagugcacuuccacgaa

SEQ ID NO: 785681 - RNA, 19 nt, Homo sapiens
  misc_RNA (1)...(19): siRNA sense strand
cgccagugguauuccagua

SEQ ID NO: 785682 - RNA, 19 nt, Homo sapiens
  misc_RNA (1)...(19): siRNA sense strand
gcuuaucuccuaggauuga

SEQ ID NO: 785683 - RNA, 19 nt, Homo sapiens
  misc_RNA (1)...(19): siRNA sense strand
ccaguaaugcuuauuucug

SEQ ID NO: 785684 - RNA, 19 nt, Homo sapiens
  misc_RNA (1)...(19): siRNA sense strand
uaaccuuggcccaguaaug

SEQ ID NO: 785685 - RNA, 19 nt, Homo sapiens
  misc_RNA (1)...(19): siRNA sense strand
ccaacaggcaagaaauaug

SEQ ID NO: 785686 - RNA, 19 nt, Homo sapiens
  misc_RNA (1)...(19): siRNA sense strand
cgagcaaccuauguuucuu

SEQ ID NO: 785687 - RNA, 19 nt, Homo sapiens
  misc_RNA (1)...(19): siRNA sense strand
gcaucccacuccggaaaug

SEQ ID NO: 785688 - RNA, 19 nt, Homo sapiens
  misc_RNA (1)...(19): siRNA sense strand
acaggcaagaaauauguua

SEQ ID NO: 785689 - RNA, 19 nt, Homo sapiens
  misc_RNA (1)...(19): siRNA sense strand
guagacggauaauuaaccu

SEQ ID NO: 785690 - RNA, 19 nt, Homo sapiens
  misc_RNA (1)...(19): siRNA sense strand
gagccauaagagucaguua

SEQ ID NO: 785691 - RNA, 19 nt, Homo sapiens
  misc_RNA (1)...(19): siRNA sense strand
ucaacacucuggcaaaaug

SEQ ID NO: 785692 - RNA, 19 nt, Homo sapiens
  misc_RNA (1)...(19): siRNA sense strand
gccagugguauuccaguaa

SEQ ID NO: 785693 - RNA, 19 nt, Homo sapiens
  misc_RNA (1)...(19): siRNA sense strand
caacuguagacggauaauu

SEQ ID NO: 785694 - RNA, 19 nt, Homo sapiens
  misc_RNA (1)...(19): siRNA sense strand
aauuaaccuuggcccagua

SEQ ID NO: 785695 - RNA, 19 nt, Homo sapiens
  misc_RNA (1)...(19): siRNA sense strand
ggcccaguaaugcuuauuu

SEQ ID NO: 785696 - RNA, 19 nt, Homo sapiens
  misc_RNA (1)...(19): siRNA sense strand
caccguacuugcaagaaag

SEQ ID NO: 785697 - RNA, 19 nt, Homo sapiens
  misc_RNA (1)...(19): siRNA sense strand
gugccaaucacuaaucaau

SEQ ID NO: 785698 - RNA, 19 nt, Homo sapiens
  misc_RNA (1)...(19): siRNA sense strand
gaagacgcugcugugcaua

SEQ ID NO: 785699 - RNA, 19 nt, Homo sapiens
  misc_RNA (1)...(19): siRNA sense strand
guucaacacucuggcaaaa

SEQ ID NO: 785700 - RNA, 19 nt, Homo sapiens
  misc_RNA (1)...(19): siRNA sense strand
ggucgugugugggcacugu

SEQ ID NO: 785701 - RNA, 19 nt, Homo sapiens
  misc_RNA (1)...(19): siRNA sense strand
ccuuguaauugucuucuca

SEQ ID NO: 785702 - RNA, 19 nt, Homo sapiens
  misc_RNA (1)...(19): siRNA sense strand
agaacacaguuuugcauaa

SEQ ID NO: 785703 - RNA, 19 nt, Homo sapiens
  misc_RNA (1)...(19): siRNA sense strand
gcaagcuucaccagcaugu

SEQ ID NO: 785704 - RNA, 19 nt, Homo sapiens
  misc_RNA (1)...(19): siRNA sense strand
acccaacuguagacggaua

SEQ ID NO: 785705 - RNA, 19 nt, Homo sapiens
  misc_RNA (1)...(19): siRNA sense strand
ccaaucacuaaucaauuug

SEQ ID NO: 785706 - RNA, 19 nt, Homo sapiens
  misc_RNA (1)...(19): siRNA sense strand
uaggauugaucugccuuau

SEQ ID NO: 785707 - RNA, 19 nt, Homo sapiens
  misc_RNA (1)...(19): siRNA sense strand
uuucuugggcaauugcuua

SEQ ID NO: 785708 - RNA, 19 nt, Homo sapiens
  misc_RNA (1)...(19): siRNA sense strand
cuauguuucuugggcaauu

SEQ ID NO: 785709 - RNA, 19 nt, Homo sapiens
  misc_RNA (1)...(19): siRNA sense strand
ccaauccaaccagaaggua

SEQ ID NO: 785710 - RNA, 19 nt, Homo sapiens
  misc_RNA (1)...(19): siRNA sense strand
acuguagacggauaauuaa

SEQ ID NO: 785711 - RNA, 19 nt, Homo sapiens
  misc_RNA (1)...(19): siRNA sense strand
cgugugugccaaucacuaa

SEQ ID NO: 785712 - RNA, 19 nt, Homo sapiens
  misc_RNA (1)...(19): siRNA sense strand
gugugccaaucacuaauca

SEQ ID NO: 785713 - RNA, 19 nt, Homo sapiens
  misc_RNA (1)...(19): siRNA sense strand
guaaugcuuauuucugaag

SEQ ID NO: 785714 - RNA, 19 nt, Homo sapiens
  misc_RNA (1)...(19): siRNA sense strand
uuucauuggaguuggguua

SEQ ID NO: 785715 - RNA, 19 nt, Homo sapiens
  misc_RNA (1)...(19): siRNA sense strand
ugaagcuacgccaaucaaa

SEQ ID NO: 785716 - RNA, 19 nt, Homo sapiens
  misc_RNA (1)...(19): siRNA sense strand
gaaaugugcucacucuguu

SEQ ID NO: 785717 - RNA, 19 nt, Homo sapiens
  misc_RNA (1)...(19): siRNA sense strand
gaagaaaugugcucacucu

SEQ ID NO: 785718 - RNA, 19 nt, Homo sapiens
  misc_RNA (1)...(19): siRNA sense strand
caacuuugcugcugugguu

SEQ ID NO: 785719 - RNA, 19 nt, Homo sapiens
  misc_RNA (1)...(19): siRNA sense strand
uaaagaggauagcaacuga

SEQ ID NO: 785720 - RNA, 19 nt, Homo sapiens
  misc_RNA (1)...(19): siRNA sense strand
ggaccacccucucugaguu

SEQ ID NO: 785721 - RNA, 19 nt, Homo sapiens
  misc_RNA (1)...(19): siRNA sense strand
ccaaugcauucucuuacua

SEQ ID NO: 785722 - RNA, 19 nt, Homo sapiens
  misc_RNA (1)...(19): siRNA sense strand
gguggaagaugcaguggaa

SEQ ID NO: 785723 - RNA, 19 nt, Homo sapiens
  misc_RNA (1)...(19): siRNA sense strand
gcaagagcguuuauuucug

SEQ ID NO: 785724 - RNA, 19 nt, Homo sapiens
  misc_RNA (1)...(19): siRNA sense strand
gaaagugcaagguaugaug

SEQ ID NO: 785725 - RNA, 19 nt, Homo sapiens
  misc_RNA (1)...(19): siRNA sense strand
gaagcugucuguucucacu

SEQ ID NO: 785726 - RNA, 19 nt, Homo sapiens
  misc_RNA (1)...(19): siRNA sense strand
gcaaucgccaccuuaaaga

SEQ ID NO: 785727 - RNA, 19 nt, Homo sapiens
  misc_RNA (1)...(19): siRNA sense strand
caugaaagccagagcuaaa

SEQ ID NO: 785728 - RNA, 19 nt, Homo sapiens
  misc_RNA (1)...(19): siRNA sense strand
gaggacuuauuccagcuaa

SEQ ID NO: 785729 - RNA, 19 nt, Homo sapiens
  misc_RNA (1)...(19): siRNA sense strand
gagcaugaaguccagauug

SEQ ID NO: 785730 - RNA, 19 nt, Homo sapiens
  misc_RNA (1)...(19): siRNA sense strand
agccagagcuaaauguauu

SEQ ID NO: 785731 - RNA, 19 nt, Homo sapiens
  misc_RNA (1)...(19): siRNA sense strand
gugacucuguggauuauug

SEQ ID NO: 785732 - RNA, 19 nt, Homo sapiens
  misc_RNA (1)...(19): siRNA sense strand
gaaagccagagcuaaaugu

SEQ ID NO: 785733 - RNA, 19 nt, Homo sapiens
  misc_RNA (1)...(19): siRNA sense strand
gaccauggcccugugcuuu

SEQ ID NO: 785734 - RNA, 19 nt, Homo sapiens
  misc_RNA (1)...(19): siRNA sense strand
gaaauaucucagaccagua

SEQ ID NO: 785735 - RNA, 19 nt, Homo sapiens
  misc_RNA (1)...(19): siRNA sense strand
cgaguuccuucccaugaaa

SEQ ID NO: 785736 - RNA, 19 nt, Homo sapiens
  misc_RNA (1)...(19): siRNA sense strand
gcuguggacucuguacuau

SEQ ID NO: 785737 - RNA, 19 nt, Homo sapiens
  misc_RNA (1)...(19): siRNA sense strand
gaacucuggcucucaggaa

SEQ ID NO: 785738 - RNA, 19 nt, Homo sapiens
  misc_RNA (1)...(19): siRNA sense strand
ccaaggaguuugccaaucc

SEQ ID NO: 785739 - RNA, 19 nt, Homo sapiens
  misc_RNA (1)...(19): siRNA sense strand
guaccugacucuggcaguu

SEQ ID NO: 785740 - RNA, 19 nt, Homo sapiens
  misc_RNA (1)...(19): siRNA sense strand
guuuauuucuggaggcuuu

SEQ ID NO: 785741 - RNA, 19 nt, Homo sapiens
  misc_RNA (1)...(19): siRNA sense strand
gcugugguuuauaugguuu

SEQ ID NO: 785742 - RNA, 19 nt, Homo sapiens
  misc_RNA (1)...(19): siRNA sense strand
guuuaucuguguuggaaga

SEQ ID NO: 785743 - RNA, 19 nt, Homo sapiens
  misc_RNA (1)...(19): siRNA sense strand
gcagcugccgguugugaaa

SEQ ID NO: 785744 - RNA, 19 nt, Homo sapiens
  misc_RNA (1)...(19): siRNA sense strand
gccaaucccacugaugaua

SEQ ID NO: 785745 - RNA, 19 nt, Homo sapiens
  misc_RNA (1)...(19): siRNA sense strand
gagauggucggccgaggaa

SEQ ID NO: 785746 - RNA, 19 nt, Homo sapiens
  misc_RNA (1)...(19): siRNA sense strand
caucaucuccagacaggaa

SEQ ID NO: 785747 - RNA, 19 nt, Homo sapiens
  misc_RNA (1)...(19): siRNA sense strand
uggcauccuuagugcauuu

SEQ ID NO: 785748 - RNA, 19 nt, Homo sapiens
  misc_RNA (1)...(19): siRNA sense strand
ggcaaucgccaccuuaaag

SEQ ID NO: 785749 - RNA, 19 nt, Homo sapiens
  misc_RNA (1)...(19): siRNA sense strand
agcaugaaguccagauuga

SEQ ID NO: 785750 - RNA, 19 nt, Homo sapiens
  misc_RNA (1)...(19): siRNA sense strand
uugcugcugugguuuauau

SEQ ID NO: 785751 - RNA, 19 nt, Homo sapiens
  misc_RNA (1)...(19): siRNA sense strand
gaagaccgaggcaaaauga

SEQ ID NO: 785752 - RNA, 19 nt, Homo sapiens
  misc_RNA (1)...(19): siRNA sense strand
ccgaguuccuucccaugaa

SEQ ID NO: 785753 - RNA, 19 nt, Homo sapiens
  misc_RNA (1)...(19): siRNA sense strand
gauggucggccgaggaaug

SEQ ID NO: 785754 - RNA, 19 nt, Homo sapiens
  misc_RNA (1)...(19): siRNA sense strand
gcuggaauccucuguguac

SEQ ID NO: 785755 - RNA, 19 nt, Homo sapiens
  misc_RNA (1)...(19): siRNA sense strand
gcagcggcauggcaagagu

SEQ ID NO: 785756 - RNA, 19 nt, Homo sapiens
  misc_RNA (1)...(19): siRNA sense strand
agaaggcuguagaggcaaa

SEQ ID NO: 785757 - RNA, 19 nt, Homo sapiens
  misc_RNA (1)...(19): siRNA sense strand
gcaugaaguccagauugaa

SEQ ID NO: 785758 - RNA, 19 nt, Homo sapiens
  misc_RNA (1)...(19): siRNA sense strand
acaggaagaccgaggcaaa

SEQ ID NO: 785759 - RNA, 19 nt, Homo sapiens
  misc_RNA (1)...(19): siRNA sense strand
caagcuggcagguggcauu

SEQ ID NO: 785760 - RNA, 19 nt, Homo sapiens
  misc_RNA (1)...(19): siRNA sense strand
agaaaugugcucacucugu

SEQ ID NO: 785761 - RNA, 19 nt, Homo sapiens
  misc_RNA (1)...(19): siRNA sense strand
uaucuguguuggaagaaau

SEQ ID NO: 785762 - RNA, 19 nt, Homo sapiens
  misc_RNA (1)...(19): siRNA sense strand
gccugaaagugcaagguau

SEQ ID NO: 785763 - RNA, 19 nt, Homo sapiens
  misc_RNA (1)...(19): siRNA sense strand
cccagucggugacgcugua

SEQ ID NO: 785764 - RNA, 19 nt, Homo sapiens
  misc_RNA (1)...(19): siRNA sense strand
uguggacucuguacuaugg

SEQ ID NO: 785765 - RNA, 19 nt, Homo sapiens
  misc_RNA (1)...(19): siRNA sense strand
gaccacccucucugaguuu

SEQ ID NO: 785766 - RNA, 19 nt, Homo sapiens
  misc_RNA (1)...(19): siRNA sense strand
aaagccagagcuaaaugua

SEQ ID NO: 785767 - RNA, 19 nt, Homo sapiens
  misc_RNA (1)...(19): siRNA sense strand
ggaggacuuauuccagcua

SEQ ID NO: 785768 - RNA, 19 nt, Homo sapiens
  misc_RNA (1)...(19): siRNA sense strand
ugaaagccagagcuaaaug

SEQ ID NO: 785769 - RNA, 19 nt, Homo sapiens
  misc_RNA (1)...(19): siRNA sense strand
ucucaucacuccguucauc

SEQ ID NO: 785770 - RNA, 19 nt, Homo sapiens
  misc_RNA (1)...(19): siRNA sense strand
cagcugugcccaaggaguu

SEQ ID NO: 785771 - RNA, 19 nt, Homo sapiens
  misc_RNA (1)...(19): siRNA sense strand
aagaggauagcaacugaaa

SEQ ID NO: 785772 - RNA, 19 nt, Homo sapiens
  misc_RNA (1)...(19): siRNA sense strand
aguggaagcugucuguucu

SEQ ID NO: 785773 - RNA, 19 nt, Homo sapiens
  misc_RNA (1)...(19): siRNA sense strand
cuugugacucuguggauua

SEQ ID NO: 785774 - RNA, 19 nt, Homo sapiens
  misc_RNA (1)...(19): siRNA sense strand
ucacuggcuuggcuuggau

SEQ ID NO: 785775 - RNA, 19 nt, Homo sapiens
  misc_RNA (1)...(19): siRNA sense strand
auacuuucaugguggaaga

SEQ ID NO: 785776 - RNA, 19 nt, Homo sapiens
  misc_RNA (1)...(19): siRNA sense strand
gugaggaggauuacaugga

SEQ ID NO: 785777 - RNA, 19 nt, Homo sapiens
  misc_RNA (1)...(19): siRNA sense strand
gacgcuguaugccgaguuc

SEQ ID NO: 785778 - RNA, 19 nt, Homo sapiens
  misc_RNA (1)...(19): siRNA sense strand
gcugaugccauggagauga

SEQ ID NO: 785779 - RNA, 19 nt, Homo sapiens
  misc_RNA (1)...(19): siRNA sense strand
ucuuugccgugcuguguuu

SEQ ID NO: 785780 - RNA, 19 nt, Homo sapiens
  misc_RNA (1)...(19): siRNA sense strand
gccgaguuccuucccauga

SEQ ID NO: 785781 - RNA, 19 nt, Homo sapiens
  misc_RNA (1)...(19): siRNA sense strand
accugacucuggcaguuua

SEQ ID NO: 785782 - RNA, 19 nt, Homo sapiens
  misc_RNA (1)...(19): siRNA sense strand
gcucucaucacuccguuca

SEQ ID NO: 785783 - RNA, 19 nt, Homo sapiens
  misc_RNA (1)...(19): siRNA sense strand
ugcaagagcguuuauuucu

SEQ ID NO: 785784 - RNA, 19 nt, Homo sapiens
  misc_RNA (1)...(19): siRNA sense strand
aaaugugcucacucuguua

SEQ ID NO: 785785 - RNA, 19 nt, Homo sapiens
  misc_RNA (1)...(19): siRNA sense strand
ccauggcccugugcuuugu

SEQ ID NO: 785786 - RNA, 19 nt, Homo sapiens
  misc_RNA (1)...(19): siRNA sense strand
gagugaggaggauuacaug

SEQ ID NO: 785787 - RNA, 19 nt, Homo sapiens
  misc_RNA (1)...(19): siRNA sense strand
cauuuuagauggacaacuu

SEQ ID NO: 785788 - RNA, 19 nt, Homo sapiens
  misc_RNA (1)...(19): siRNA sense strand
uuuccaaugcauucucuua

SEQ ID NO: 785789 - RNA, 19 nt, Homo sapiens
  misc_RNA (1)...(19): siRNA sense strand
uggaagcugucuguucuca

SEQ ID NO: 785790 - RNA, 19 nt, Homo sapiens
  misc_RNA (1)...(19): siRNA sense strand
ccauggagaugaugauccu

SEQ ID NO: 785791 - RNA, 19 nt, Homo sapiens
  misc_RNA (1)...(19): siRNA sense strand
ugagugaggaggauuacau

SEQ ID NO: 785792 - RNA, 19 nt, Homo sapiens
  misc_RNA (1)...(19): siRNA sense strand
ccaugaaagccagagcuaa

SEQ ID NO: 785793 - RNA, 19 nt, Homo sapiens
  misc_RNA (1)...(19): siRNA sense strand
ucaagcggcauauguuuac

SEQ ID NO: 785794 - RNA, 19 nt, Homo sapiens
  misc_RNA (1)...(19): siRNA sense strand
cuguuuaucuguguuggaa

SEQ ID NO: 785795 - RNA, 19 nt, Homo sapiens
  misc_RNA (1)...(19): siRNA sense strand
guaccugagugaggaggau

SEQ ID NO: 785796 - RNA, 19 nt, Homo sapiens
  misc_RNA (1)...(19): siRNA sense strand
uuaaagaggauagcaacug

SEQ ID NO: 785797 - RNA, 19 nt, Homo sapiens
  misc_RNA (1)...(19): siRNA sense strand
gcccugugcuuugucaucu

SEQ ID NO: 785798 - RNA, 19 nt, Homo sapiens
  misc_RNA (1)...(19): siRNA sense strand
cagguguccuugugacucu

SEQ ID NO: 785799 - RNA, 19 nt, Homo sapiens
  misc_RNA (1)...(19): siRNA sense strand
caugaaguccagauugaag

SEQ ID NO: 785800 - RNA, 19 nt, Homo sapiens
  misc_RNA (1)...(19): siRNA sense strand
gcccuggccuccugcuuuu

SEQ ID NO: 785801 - RNA, 19 nt, Homo sapiens
  misc_RNA (1)...(19): siRNA sense strand
uucaagcggcauauguuua

SEQ ID NO: 785802 - RNA, 19 nt, Homo sapiens
  misc_RNA (1)...(19): siRNA sense strand
ccugugcuuugucaucuuc

SEQ ID NO: 785803 - RNA, 19 nt, Homo sapiens
  misc_RNA (1)...(19): siRNA sense strand
aaauaucucagaccaguac

SEQ ID NO: 785804 - RNA, 19 nt, Homo sapiens
  misc_RNA (1)...(19): siRNA sense strand
caaucccacugaugauacu

SEQ ID NO: 785805 - RNA, 19 nt, Homo sapiens
  misc_RNA (1)...(19): siRNA sense strand
uuucaagcggcauauguuu

SEQ ID NO: 785806 - RNA, 19 nt, Homo sapiens
  misc_RNA (1)...(19): siRNA sense strand
cuguuacucuucauugcaa

SEQ ID NO: 785807 - RNA, 19 nt, Homo sapiens
  misc_RNA (1)...(19): siRNA sense strand
uugccaaucccacugauga

SEQ ID NO: 785808 - RNA, 19 nt, Homo sapiens
  misc_RNA (1)...(19): siRNA sense strand
gcccaaggaguuugccaau

SEQ ID NO: 785809 - RNA, 19 nt, Homo sapiens
  misc_RNA (1)...(19): siRNA sense strand
ggacagacaugacuuugga

SEQ ID NO: 785810 - RNA, 19 nt, Homo sapiens
  misc_RNA (1)...(19): siRNA sense strand
gcaagaaaguuuaagaagu

SEQ ID NO: 785811 - RNA, 19 nt, Homo sapiens
  misc_RNA (1)...(19): siRNA sense strand
ucaacaaacuugcaagaaa

SEQ ID NO: 785812 - RNA, 19 nt, Homo sapiens
  misc_RNA (1)...(19): siRNA sense strand
gagcagaaaucaugagauc

SEQ ID NO: 785813 - RNA, 19 nt, Homo sapiens
  misc_RNA (1)...(19): siRNA sense strand
caacaaacuugcaagaaag

SEQ ID NO: 785814 - RNA, 19 nt, Homo sapiens
  misc_RNA (1)...(19): siRNA sense strand
gaaucacucucuaucugaa

SEQ ID NO: 785815 - RNA, 19 nt, Homo sapiens
  misc_RNA (1)...(19): siRNA sense strand
gcagaaaucaugagaucuu

SEQ ID NO: 785816 - RNA, 19 nt, Homo sapiens
  misc_RNA (1)...(19): siRNA sense strand
gaaggacagacaugacuuu

SEQ ID NO: 785817 - RNA, 19 nt, Homo sapiens
  misc_RNA (1)...(19): siRNA sense strand
ccuggaagccugugugaua

SEQ ID NO: 785818 - RNA, 19 nt, Homo sapiens
  misc_RNA (1)...(19): siRNA sense strand
agacaugacuuuggauuuc

SEQ ID NO: 785819 - RNA, 19 nt, Homo sapiens
  misc_RNA (1)...(19): siRNA sense strand
gaagaaauacagcccuugu

SEQ ID NO: 785820 - RNA, 19 nt, Homo sapiens
  misc_RNA (1)...(19): siRNA sense strand
gaaauacuuccaaagaauc

SEQ ID NO: 785821 - RNA, 19 nt, Homo sapiens
  misc_RNA (1)...(19): siRNA sense strand
ggccuugaccuuugcuuua

SEQ ID NO: 785822 - RNA, 19 nt, Homo sapiens
  misc_RNA (1)...(19): siRNA sense strand
gaugagacccuccuagaca

SEQ ID NO: 785823 - RNA, 19 nt, Homo sapiens
  misc_RNA (1)...(19): siRNA sense strand
gcagcugaaugaccuggaa

SEQ ID NO: 785824 - RNA, 19 nt, Homo sapiens
  misc_RNA (1)...(19): siRNA sense strand
cagaaaucaugagaucuuu

SEQ ID NO: 785825 - RNA, 19 nt, Homo sapiens
  misc_RNA (1)...(19): siRNA sense strand
caaagaaucacucucuauc

SEQ ID NO: 785826 - RNA, 19 nt, Homo sapiens
  misc_RNA (1)...(19): siRNA sense strand
gcugugaucugccucaaac

SEQ ID NO: 785827 - RNA, 19 nt, Homo sapiens
  misc_RNA (1)...(19): siRNA sense strand
gugcucagcugcaagucaa

SEQ ID NO: 785828 - RNA, 19 nt, Homo sapiens
  misc_RNA (1)...(19): siRNA sense strand
ccaaagaaucacucucuau

SEQ ID NO: 785829 - RNA, 19 nt, Homo sapiens
  misc_RNA (1)...(19): siRNA sense strand
aagaaucacucucuaucug

SEQ ID NO: 785830 - RNA, 19 nt, Homo sapiens
  misc_RNA (1)...(19): siRNA sense strand
ugucagagcagaaaucaug

SEQ ID NO: 785831 - RNA, 19 nt, Homo sapiens
  misc_RNA (1)...(19): siRNA sense strand
gggaugagacccuccuaga

SEQ ID NO: 785832 - RNA, 19 nt, Homo sapiens
  misc_RNA (1)...(19): siRNA sense strand
ugaaagagaagaaauacag

SEQ ID NO: 785833 - RNA, 19 nt, Homo sapiens
  misc_RNA (1)...(19): siRNA sense strand
gaaaguuuaagaaguaagg

SEQ ID NO: 785834 - RNA, 19 nt, Homo sapiens
  misc_RNA (1)...(19): siRNA sense strand
gacaaauucuacacugaac

SEQ ID NO: 785835 - RNA, 19 nt, Homo sapiens
  misc_RNA (1)...(19): siRNA sense strand
agacaaauucuacacugaa

SEQ ID NO: 785836 - RNA, 19 nt, Homo sapiens
  misc_RNA (1)...(19): siRNA sense strand
cagacaugacuuuggauuu

SEQ ID NO: 785837 - RNA, 19 nt, Homo sapiens
  misc_RNA (1)...(19): siRNA sense strand
uccaaagaaucacucucua

SEQ ID NO: 785838 - RNA, 19 nt, Homo sapiens
  misc_RNA (1)...(19): siRNA sense strand
uucaaucucuucagcacaa

SEQ ID NO: 785839 - RNA, 19 nt, Homo sapiens
  misc_RNA (1)...(19): siRNA sense strand
gagguugucagagcagaaa

SEQ ID NO: 785840 - RNA, 19 nt, Homo sapiens
  misc_RNA (1)...(19): siRNA sense strand
agaaucacucucuaucuga

SEQ ID NO: 785841 - RNA, 19 nt, Homo sapiens
  misc_RNA (1)...(19): siRNA sense strand
gguagcaggaggaccuuga

SEQ ID NO: 785842 - RNA, 19 nt, Homo sapiens
  misc_RNA (1)...(19): siRNA sense strand
ggaguuuggcaaccaguuc

SEQ ID NO: 785843 - RNA, 19 nt, Homo sapiens
  misc_RNA (1)...(19): siRNA sense strand
agacccuccuagacaaauu

SEQ ID NO: 785844 - RNA, 19 nt, Homo sapiens
  misc_RNA (1)...(19): siRNA sense strand
caaauucuacacugaacuc

SEQ ID NO: 785845 - RNA, 19 nt, Homo sapiens
  misc_RNA (1)...(19): siRNA sense strand
gaccuggaagccuguguga

SEQ ID NO: 785846 - RNA, 19 nt, Homo sapiens
  misc_RNA (1)...(19): siRNA sense strand
gacagagacuccccugaug

SEQ ID NO: 785847 - RNA, 19 nt, Homo sapiens
  misc_RNA (1)...(19): siRNA sense strand
cauucuggcugugaggaaa

SEQ ID NO: 785848 - RNA, 19 nt, Homo sapiens
  misc_RNA (1)...(19): siRNA sense strand
gcaagucaagcugcucugu

SEQ ID NO: 785849 - RNA, 19 nt, Homo sapiens
  misc_RNA (1)...(19): siRNA sense strand
aaagaaucacucucuaucu

SEQ ID NO: 785850 - RNA, 19 nt, Homo sapiens
  misc_RNA (1)...(19): siRNA sense strand
aaccaucccuguccuccau

SEQ ID NO: 785851 - RNA, 19 nt, Homo sapiens
  misc_RNA (1)...(19): siRNA sense strand
ggaugagacccuccuagac

SEQ ID NO: 785852 - RNA, 19 nt, Homo sapiens
  misc_RNA (1)...(19): siRNA sense strand
acagacaugacuuuggauu

SEQ ID NO: 785853 - RNA, 19 nt, Homo sapiens
  misc_RNA (1)...(19): siRNA sense strand
gcaggaggaccuugaugcu

SEQ ID NO: 785854 - RNA, 19 nt, Homo sapiens
  misc_RNA (1)...(19): siRNA sense strand
gccuugaccuuugcuuuac

SEQ ID NO: 785855 - RNA, 19 nt, Homo sapiens
  misc_RNA (1)...(19): siRNA sense strand
cagagcagaaaucaugaga

SEQ ID NO: 785856 - RNA, 19 nt, Homo sapiens
  misc_RNA (1)...(19): siRNA sense strand
auucuacacugaacucuac

SEQ ID NO: 785857 - RNA, 19 nt, Homo sapiens
  misc_RNA (1)...(19): siRNA sense strand
ccaucccuguccuccauga

SEQ ID NO: 785858 - RNA, 19 nt, Homo sapiens
  misc_RNA (1)...(19): siRNA sense strand
gucaacaaacuugcaagaa

SEQ ID NO: 785859 - RNA, 19 nt, Homo sapiens
  misc_RNA (1)...(19): siRNA sense strand
gcugcucugugggcuguga

SEQ ID NO: 785860 - RNA, 19 nt, Homo sapiens
  misc_RNA (1)...(19): siRNA sense strand
ggagguugucagagcagaa

SEQ ID NO: 785861 - RNA, 19 nt, Homo sapiens
  misc_RNA (1)...(19): siRNA sense strand
gcuugaaggacagacauga

SEQ ID NO: 785862 - RNA, 19 nt, Homo sapiens
  misc_RNA (1)...(19): siRNA sense strand
gaacaagcaugaggacuuc

SEQ ID NO: 785863 - RNA, 19 nt, Homo sapiens
  misc_RNA (1)...(19): siRNA sense strand
gcaccagcaucuucuacaa

SEQ ID NO: 785864 - RNA, 19 nt, Homo sapiens
  misc_RNA (1)...(19): siRNA sense strand
ugugggagguguucaauga

SEQ ID NO: 785865 - RNA, 19 nt, Homo sapiens
  misc_RNA (1)...(19): siRNA sense strand
ggagcuggaugaccuacau

SEQ ID NO: 785866 - RNA, 19 nt, Homo sapiens
  misc_RNA (1)...(19): siRNA sense strand
gaaacucacacaacaccuu

SEQ ID NO: 785867 - RNA, 19 nt, Homo sapiens
  misc_RNA (1)...(19): siRNA sense strand
guggacaucugcaagaaca

SEQ ID NO: 785868 - RNA, 19 nt, Homo sapiens
  misc_RNA (1)...(19): siRNA sense strand
guaacgaacaggagcagaa

SEQ ID NO: 785869 - RNA, 19 nt, Homo sapiens
  misc_RNA (1)...(19): siRNA sense strand
cuacaaggccauugagaug

SEQ ID NO: 785870 - RNA, 19 nt, Homo sapiens
  misc_RNA (1)...(19): siRNA sense strand
aggaacugcugguguggua

SEQ ID NO: 785871 - RNA, 19 nt, Homo sapiens
  misc_RNA (1)...(19): siRNA sense strand
gcuagaggaggaccagaaa

SEQ ID NO: 785872 - RNA, 19 nt, Homo sapiens
  misc_RNA (1)...(19): siRNA sense strand
caagaacaacaaccucaug

SEQ ID NO: 785873 - RNA, 19 nt, Homo sapiens
  misc_RNA (1)...(19): siRNA sense strand
caagugugcacguaacgaa

SEQ ID NO: 785874 - RNA, 19 nt, Homo sapiens
  misc_RNA (1)...(19): siRNA sense strand
uacggaaacucacacaaca

SEQ ID NO: 785875 - RNA, 19 nt, Homo sapiens
  misc_RNA (1)...(19): siRNA sense strand
gaucggcaccagcaucuuc

SEQ ID NO: 785876 - RNA, 19 nt, Homo sapiens
  misc_RNA (1)...(19): siRNA sense strand
acaaggccauugagaugau

SEQ ID NO: 785877 - RNA, 19 nt, Homo sapiens
  misc_RNA (1)...(19): siRNA sense strand
guacggaaacucacacaac

SEQ ID NO: 785878 - RNA, 19 nt, Homo sapiens
  misc_RNA (1)...(19): siRNA sense strand
gcaagaacaacaaccucau

SEQ ID NO: 785879 - RNA, 19 nt, Homo sapiens
  misc_RNA (1)...(19): siRNA sense strand
agaacaagcaugaggacuu

SEQ ID NO: 785880 - RNA, 19 nt, Homo sapiens
  misc_RNA (1)...(19): siRNA sense strand
gaggugaucaucgcucaga

SEQ ID NO: 785881 - RNA, 19 nt, Homo sapiens
  misc_RNA (1)...(19): siRNA sense strand
caucaagugugcacguaac

SEQ ID NO: 785882 - RNA, 19 nt, Homo sapiens
  misc_RNA (1)...(19): siRNA sense strand
gaccaccggagcuggauga

SEQ ID NO: 785883 - RNA, 19 nt, Homo sapiens
  misc_RNA (1)...(19): siRNA sense strand
uacaucaagugugcacgua

SEQ ID NO: 785884 - RNA, 19 nt, Homo sapiens
  misc_RNA (1)...(19): siRNA sense strand
gguuaucaccuccgacauc

SEQ ID NO: 785885 - RNA, 19 nt, Homo sapiens
  misc_RNA (1)...(19): siRNA sense strand
ggugugguacggaaacuca

SEQ ID NO: 785886 - RNA, 19 nt, Homo sapiens
  misc_RNA (1)...(19): siRNA sense strand
gcucaagaccgggcugaag

SEQ ID NO: 785887 - RNA, 19 nt, Homo sapiens
  misc_RNA (1)...(19): siRNA sense strand
ggaagcuauugcagacuua

SEQ ID NO: 785888 - RNA, 19 nt, Homo sapiens
  misc_RNA (1)...(19): siRNA sense strand
gcuggaggacguuuagaua

SEQ ID NO: 785889 - RNA, 19 nt, Homo sapiens
  misc_RNA (1)...(19): siRNA sense strand
ccagcaaucucaacaagca

SEQ ID NO: 785890 - RNA, 19 nt, Homo sapiens
  misc_RNA (1)...(19): siRNA sense strand
gcaaguaugggcucaagau

SEQ ID NO: 785891 - RNA, 19 nt, Homo sapiens
  misc_RNA (1)...(19): siRNA sense strand
gaucuucuaccgagcauug

SEQ ID NO: 785892 - RNA, 19 nt, Homo sapiens
  misc_RNA (1)...(19): siRNA sense strand
cuuauuacccgcucaaauu

SEQ ID NO: 785893 - RNA, 19 nt, Homo sapiens
  misc_RNA (1)...(19): siRNA sense strand
ccacagcgacuccgacuca

SEQ ID NO: 785894 - RNA, 19 nt, Homo sapiens
  misc_RNA (1)...(19): siRNA sense strand
gagcugacagugugguauu

SEQ ID NO: 785895 - RNA, 19 nt, Homo sapiens
  misc_RNA (1)...(19): siRNA sense strand
ccuucaagcugggcaagua

SEQ ID NO: 785896 - RNA, 19 nt, Homo sapiens
  misc_RNA (1)...(19): siRNA sense strand
ugacagugugguauucuaa

SEQ ID NO: 785897 - RNA, 19 nt, Homo sapiens
  misc_RNA (1)...(19): siRNA sense strand
gaguccaucuccuacuuca

SEQ ID NO: 785898 - RNA, 19 nt, Homo sapiens
  misc_RNA (1)...(19): siRNA sense strand
uggaagcuauugcagacuu

SEQ ID NO: 785899 - RNA, 19 nt, Homo sapiens
  misc_RNA (1)...(19): siRNA sense strand
ugaaguauccggaguccau

SEQ ID NO: 785900 - RNA, 19 nt, Homo sapiens
  misc_RNA (1)...(19): siRNA sense strand
cgaguucugcggcaaggua

SEQ ID NO: 785901 - RNA, 19 nt, Homo sapiens
  misc_RNA (1)...(19): siRNA sense strand
gggaggagcgcuacaucug

SEQ ID NO: 785902 - RNA, 19 nt, Homo sapiens
  misc_RNA (1)...(19): siRNA sense strand
cggccaccaccgcuuauua

SEQ ID NO: 785903 - RNA, 19 nt, Homo sapiens
  misc_RNA (1)...(19): siRNA sense strand
cagcaucgaccgagagauc

SEQ ID NO: 785904 - RNA, 19 nt, Homo sapiens
  misc_RNA (1)...(19): siRNA sense strand
gcgcaaguaugggcucaag

SEQ ID NO: 785905 - RNA, 19 nt, Homo sapiens
  misc_RNA (1)...(19): siRNA sense strand
ggcgugcgcucagcuuuca

SEQ ID NO: 785906 - RNA, 19 nt, Homo sapiens
  misc_RNA (1)...(19): siRNA sense strand
ccaagagcgacgacaguga

SEQ ID NO: 785907 - RNA, 19 nt, Homo sapiens
  misc_RNA (1)...(19): siRNA sense strand
ggagagcagcagcaagcaa

SEQ ID NO: 785908 - RNA, 19 nt, Homo sapiens
  misc_RNA (1)...(19): siRNA sense strand
ggacgcacacgggcuacaa

SEQ ID NO: 785909 - RNA, 19 nt, Homo sapiens
  misc_RNA (1)...(19): siRNA sense strand
uuaaggcacaccugcguuu

SEQ ID NO: 785910 - RNA, 19 nt, Homo sapiens
  misc_RNA (1)...(19): siRNA sense strand
gaccgugcccuggacauga

SEQ ID NO: 785911 - RNA, 19 nt, Homo sapiens
  misc_RNA (1)...(19): siRNA sense strand
ccagaaacucccaggaaca

SEQ ID NO: 785912 - RNA, 19 nt, Homo sapiens
  misc_RNA (1)...(19): siRNA sense strand
gaccuggagcgacauguca

SEQ ID NO: 785913 - RNA, 19 nt, Homo sapiens
  misc_RNA (1)...(19): siRNA sense strand
gagaucgccaugcacaauc

SEQ ID NO: 785914 - RNA, 19 nt, Homo sapiens
  misc_RNA (1)...(19): siRNA sense strand
cugacagugugguauucua

SEQ ID NO: 785915 - RNA, 19 nt, Homo sapiens
  misc_RNA (1)...(19): siRNA sense strand
aguaugggcucaagaucca

SEQ ID NO: 785916 - RNA, 19 nt, Homo sapiens
  misc_RNA (1)...(19): siRNA sense strand
uuauuacccgcucaaauug

SEQ ID NO: 785917 - RNA, 19 nt, Homo sapiens
  misc_RNA (1)...(19): siRNA sense strand
gcuuauuacccgcucaaau

SEQ ID NO: 785918 - RNA, 19 nt, Homo sapiens
  misc_RNA (1)...(19): siRNA sense strand
ccggaggacagaucuucua

SEQ ID NO: 785919 - RNA, 19 nt, Homo sapiens
  misc_RNA (1)...(19): siRNA sense strand
gagagaucgccaugcacaa

SEQ ID NO: 785920 - RNA, 19 nt, Homo sapiens
  misc_RNA (1)...(19): siRNA sense strand
gagcagcagcaagcaagga

SEQ ID NO: 785921 - RNA, 19 nt, Homo sapiens
  misc_RNA (1)...(19): siRNA sense strand
agaucgccaugcacaauca

SEQ ID NO: 785922 - RNA, 19 nt, Homo sapiens
  misc_RNA (1)...(19): siRNA sense strand
ggaccuggagcgacauguc

SEQ ID NO: 785923 - RNA, 19 nt, Homo sapiens
  misc_RNA (1)...(19): siRNA sense strand
gcaaggaaguaugggauua

SEQ ID NO: 785924 - RNA, 19 nt, Homo sapiens
  misc_RNA (1)...(19): siRNA sense strand
ggaaggcccuguacaguga

SEQ ID NO: 785925 - RNA, 19 nt, Homo sapiens
  misc_RNA (1)...(19): siRNA sense strand
ggccagaacugccuaaauu

SEQ ID NO: 785926 - RNA, 19 nt, Homo sapiens
  misc_RNA (1)...(19): siRNA sense strand
ggacauggcucugaagaug

SEQ ID NO: 785927 - RNA, 19 nt, Homo sapiens
  misc_RNA (1)...(19): siRNA sense strand
gcauuggucuagagcuuua

SEQ ID NO: 785928 - RNA, 19 nt, Homo sapiens
  misc_RNA (1)...(19): siRNA sense strand
gaaagcuggucauaugguu

SEQ ID NO: 785929 - RNA, 19 nt, Homo sapiens
  misc_RNA (1)...(19): siRNA sense strand
cagcaugucucuucucgaa

SEQ ID NO: 785930 - RNA, 19 nt, Homo sapiens
  misc_RNA (1)...(19): siRNA sense strand
acacagagccaccuaguuu

SEQ ID NO: 785931 - RNA, 19 nt, Homo sapiens
  misc_RNA (1)...(19): siRNA sense strand
gaacgcaggagcugucauu

SEQ ID NO: 785932 - RNA, 19 nt, Homo sapiens
  misc_RNA (1)...(19): siRNA sense strand
ucugaaagcuggucauaug

SEQ ID NO: 785933 - RNA, 19 nt, Homo sapiens
  misc_RNA (1)...(19): siRNA sense strand
gcaaggaugccuacauguu

SEQ ID NO: 785934 - RNA, 19 nt, Homo sapiens
  misc_RNA (1)...(19): siRNA sense strand
ggagucgagucuagaauuc

SEQ ID NO: 785935 - RNA, 19 nt, Homo sapiens
  misc_RNA (1)...(19): siRNA sense strand
gacccuaaaucuuuggaaa

SEQ ID NO: 785936 - RNA, 19 nt, Homo sapiens
  misc_RNA (1)...(19): siRNA sense strand
acaguuccauucuacauuu

SEQ ID NO: 785937 - RNA, 19 nt, Homo sapiens
  misc_RNA (1)...(19): siRNA sense strand
uaagccagcucaugaaugg

SEQ ID NO: 785938 - RNA, 19 nt, Homo sapiens
  misc_RNA (1)...(19): siRNA sense strand
acagugacccuaaaucuuu

SEQ ID NO: 785939 - RNA, 19 nt, Homo sapiens
  misc_RNA (1)...(19): siRNA sense strand
gaccuuaccuguacagcau

SEQ ID NO: 785940 - RNA, 19 nt, Homo sapiens
  misc_RNA (1)...(19): siRNA sense strand
ccaccuaguuugucuuugu

SEQ ID NO: 785941 - RNA, 19 nt, Homo sapiens
  misc_RNA (1)...(19): siRNA sense strand
ccaaggaccuggcuauggu

SEQ ID NO: 785942 - RNA, 19 nt, Homo sapiens
  misc_RNA (1)...(19): siRNA sense strand
ggaucaacgugacggugua

SEQ ID NO: 785943 - RNA, 19 nt, Homo sapiens
  misc_RNA (1)...(19): siRNA sense strand
gaacauggaggaggacuuc

SEQ ID NO: 785944 - RNA, 19 nt, Homo sapiens
  misc_RNA (1)...(19): siRNA sense strand
uaugguggcuucagacaug

SEQ ID NO: 785945 - RNA, 19 nt, Homo sapiens
  misc_RNA (1)...(19): siRNA sense strand
gcacuggauuuggaaacuu

SEQ ID NO: 785946 - RNA, 19 nt, Homo sapiens
  misc_RNA (1)...(19): siRNA sense strand
ggaaguaugggauuaugug

SEQ ID NO: 785947 - RNA, 19 nt, Homo sapiens
  misc_RNA (1)...(19): siRNA sense strand
ccacaaagaauuccagaca

SEQ ID NO: 785948 - RNA, 19 nt, Homo sapiens
  misc_RNA (1)...(19): siRNA sense strand
ccgcaaggaugccuacaug

SEQ ID NO: 785949 - RNA, 19 nt, Homo sapiens
  misc_RNA (1)...(19): siRNA sense strand
ggaaacaucugcuuuuguc

SEQ ID NO: 785950 - RNA, 19 nt, Homo sapiens
  misc_RNA (1)...(19): siRNA sense strand
guacugaaugccguaaaua

SEQ ID NO: 785951 - RNA, 19 nt, Homo sapiens
  misc_RNA (1)...(19): siRNA sense strand
acaaagaauuccagacagu

SEQ ID NO: 785952 - RNA, 19 nt, Homo sapiens
  misc_RNA (1)...(19): siRNA sense strand
gaaugguaguggugccuau

SEQ ID NO: 785953 - RNA, 19 nt, Homo sapiens
  misc_RNA (1)...(19): siRNA sense strand
cuaaaucuuuggaaacauc

SEQ ID NO: 785954 - RNA, 19 nt, Homo sapiens
  misc_RNA (1)...(19): siRNA sense strand
ccagacaguuccauucuac

SEQ ID NO: 785955 - RNA, 19 nt, Homo sapiens
  misc_RNA (1)...(19): siRNA sense strand
caaggaugccuacauguuc

SEQ ID NO: 785956 - RNA, 19 nt, Homo sapiens
  misc_RNA (1)...(19): siRNA sense strand
acagcuggaucucaucgua

SEQ ID NO: 785957 - RNA, 19 nt, Homo sapiens
  misc_RNA (1)...(19): siRNA sense strand
uggcagaggugucuaaggu

SEQ ID NO: 785958 - RNA, 19 nt, Homo sapiens
  misc_RNA (1)...(19): siRNA sense strand
gaaguaugggauuauguga

SEQ ID NO: 785959 - RNA, 19 nt, Homo sapiens
  misc_RNA (1)...(19): siRNA sense strand
gagggaccaucaagugcaa

SEQ ID NO: 785960 - RNA, 19 nt, Homo sapiens
  misc_RNA (1)...(19): siRNA sense strand
aaacugaaguggccagaac

SEQ ID NO: 785961 - RNA, 19 nt, Homo sapiens
  misc_RNA (1)...(19): siRNA sense strand
caacgucuuugugaacaug

SEQ ID NO: 785962 - RNA, 19 nt, Homo sapiens
  misc_RNA (1)...(19): siRNA sense strand
gcagagcaaguacugaaug

SEQ ID NO: 785963 - RNA, 19 nt, Homo sapiens
  misc_RNA (1)...(19): siRNA sense strand
guacagugacccuaaaucu

SEQ ID NO: 785964 - RNA, 19 nt, Homo sapiens
  misc_RNA (1)...(19): siRNA sense strand
ugacagugaucucaaacca

SEQ ID NO: 785965 - RNA, 19 nt, Homo sapiens
  misc_RNA (1)...(19): siRNA sense strand
cuaccaacgucuuugugaa

SEQ ID NO: 785966 - RNA, 19 nt, Homo sapiens
  misc_RNA (1)...(19): siRNA sense strand
acaauggagucgagucuag

SEQ ID NO: 785967 - RNA, 19 nt, Homo sapiens
  misc_RNA (1)...(19): siRNA sense strand
gucauaugguuccuucuga

SEQ ID NO: 785968 - RNA, 19 nt, Homo sapiens
  misc_RNA (1)...(19): siRNA sense strand
ucaacgugacgguguauaa

SEQ ID NO: 785969 - RNA, 19 nt, Homo sapiens
  misc_RNA (1)...(19): siRNA sense strand
gccaccaacuccugcaaga

SEQ ID NO: 785970 - RNA, 19 nt, Homo sapiens
  misc_RNA (1)...(19): siRNA sense strand
cacuggauuuggaaacuuu

SEQ ID NO: 785971 - RNA, 19 nt, Homo sapiens
  misc_RNA (1)...(19): siRNA sense strand
ccagaacugccuaaauuca

SEQ ID NO: 785972 - RNA, 19 nt, Homo sapiens
  misc_RNA (1)...(19): siRNA sense strand
caaagaauuccagacaguu

SEQ ID NO: 785973 - RNA, 19 nt, Homo sapiens
  misc_RNA (1)...(19): siRNA sense strand
uggaaacuuugaggaaauu

SEQ ID NO: 785974 - RNA, 19 nt, Homo sapiens
  misc_RNA (1)...(19): siRNA sense strand
ggggugaacuucuauaaca

SEQ ID NO: 785975 - RNA, 19 nt, Homo sapiens
  misc_RNA (1)...(19): siRNA sense strand
cuucuucaguugccacaaa

SEQ ID NO: 785976 - RNA, 19 nt, Homo sapiens
  misc_RNA (1)...(19): siRNA sense strand
caugaugguucuccugaag

SEQ ID NO: 785977 - RNA, 19 nt, Homo sapiens
  misc_RNA (1)...(19): siRNA sense strand
ucaguugccacaaagaauu

SEQ ID NO: 785978 - RNA, 19 nt, Homo sapiens
  misc_RNA (1)...(19): siRNA sense strand
gcacucccacgucuacaau

SEQ ID NO: 785979 - RNA, 19 nt, Homo sapiens
  misc_RNA (1)...(19): siRNA sense strand
gcuuucuacuggauucuga

SEQ ID NO: 785980 - RNA, 19 nt, Homo sapiens
  misc_RNA (1)...(19): siRNA sense strand
gaagccagucauuagcauu

SEQ ID NO: 785981 - RNA, 19 nt, Homo sapiens
  misc_RNA (1)...(19): siRNA sense strand
gcuaccaacgucuuuguga

SEQ ID NO: 785982 - RNA, 19 nt, Homo sapiens
  misc_RNA (1)...(19): siRNA sense strand
acaacgagaugccuuaagc

SEQ ID NO: 785983 - RNA, 19 nt, Homo sapiens
  misc_RNA (1)...(19): siRNA sense strand
gacaguuccauucuacauu

SEQ ID NO: 785984 - RNA, 19 nt, Homo sapiens
  misc_RNA (1)...(19): siRNA sense strand
ccacagaggagggcaagga

SEQ ID NO: 785985 - RNA, 19 nt, Homo sapiens
  misc_RNA (1)...(19): siRNA sense strand
ucugguggcucuauuaugc

SEQ ID NO: 785986 - RNA, 19 nt, Homo sapiens
  misc_RNA (1)...(19): siRNA sense strand
gaacacagauggggugaac

SEQ ID NO: 785987 - RNA, 19 nt, Homo sapiens
  misc_RNA (1)...(19): siRNA sense strand
cagugacccuaaaucuuug

SEQ ID NO: 785988 - RNA, 19 nt, Homo sapiens
  misc_RNA (1)...(19): siRNA sense strand
caacgugacgguguauaau

SEQ ID NO: 785989 - RNA, 19 nt, Homo sapiens
  misc_RNA (1)...(19): siRNA sense strand
caaggaaguaugggauuau

SEQ ID NO: 785990 - RNA, 19 nt, Homo sapiens
  misc_RNA (1)...(19): siRNA sense strand
agucuagaauucacacaga

SEQ ID NO: 785991 - RNA, 19 nt, Homo sapiens
  misc_RNA (1)...(19): siRNA sense strand
ggcugccagucuccuauuu

SEQ ID NO: 785992 - RNA, 19 nt, Homo sapiens
  misc_RNA (1)...(19): siRNA sense strand
gacauggcucugaagauga

SEQ ID NO: 785993 - RNA, 19 nt, Homo sapiens
  misc_RNA (1)...(19): siRNA sense strand
ugaaguggaaggcccugua

SEQ ID NO: 785994 - RNA, 19 nt, Homo sapiens
  misc_RNA (1)...(19): siRNA sense strand
gccuuaagccagcucauga

SEQ ID NO: 785995 - RNA, 19 nt, Homo sapiens
  misc_RNA (1)...(19): siRNA sense strand
gggugaacuucuauaacau

SEQ ID NO: 785996 - RNA, 19 nt, Homo sapiens
  misc_RNA (1)...(19): siRNA sense strand
ucauugaacagaacacaga

SEQ ID NO: 785997 - RNA, 19 nt, Homo sapiens
  misc_RNA (1)...(19): siRNA sense strand
uacugaaugccguaaauaa

SEQ ID NO: 785998 - RNA, 19 nt, Homo sapiens
  misc_RNA (1)...(19): siRNA sense strand
ccuguacagugacccuaaa

SEQ ID NO: 785999 - RNA, 19 nt, Homo sapiens
  misc_RNA (1)...(19): siRNA sense strand
ggucauaugguuccuucug

SEQ ID NO: 786000 - RNA, 19 nt, Homo sapiens
  misc_RNA (1)...(19): siRNA sense strand
cuucagacaugaugguucu

SEQ ID NO: 786001 - RNA, 19 nt, Homo sapiens
  misc_RNA (1)...(19): siRNA sense strand
cccuaaaucuuuggaaaca

SEQ ID NO: 786002 - RNA, 19 nt, Homo sapiens
  misc_RNA (1)...(19): siRNA sense strand
gaaacugaaguggccagaa

SEQ ID NO: 786003 - RNA, 19 nt, Homo sapiens
  misc_RNA (1)...(19): siRNA sense strand
uuuggaaacuuugaggaaa

SEQ ID NO: 786004 - RNA, 19 nt, Homo sapiens
  misc_RNA (1)...(19): siRNA sense strand
ggaaagcagaaaugaucau

SEQ ID NO: 786005 - RNA, 19 nt, Homo sapiens
  misc_RNA (1)...(19): siRNA sense strand
gaggagggcaaggaaguau

SEQ ID NO: 786006 - RNA, 19 nt, Homo sapiens
  misc_RNA (1)...(19): siRNA sense strand
uggcauuggucuagagcuu

SEQ ID NO: 786007 - RNA, 19 nt, Homo sapiens
  misc_RNA (1)...(19): siRNA sense strand
cagauggggugaacuucua

SEQ ID NO: 786008 - RNA, 19 nt, Homo sapiens
  misc_RNA (1)...(19): siRNA sense strand
acauggcucugaagaugau

SEQ ID NO: 786009 - RNA, 19 nt, Homo sapiens
  misc_RNA (1)...(19): siRNA sense strand
gaaguggaaggcccuguac

SEQ ID NO: 786010 - RNA, 19 nt, Homo sapiens
  misc_RNA (1)...(19): siRNA sense strand
ccuacaacgagaugccuua

SEQ ID NO: 786011 - RNA, 19 nt, Homo sapiens
  misc_RNA (1)...(19): siRNA sense strand
aaagaauuccagacaguuc

SEQ ID NO: 786012 - RNA, 19 nt, Homo sapiens
  misc_RNA (1)...(19): siRNA sense strand
ggagggcaaggaaguaugg

SEQ ID NO: 786013 - RNA, 19 nt, Homo sapiens
  misc_RNA (1)...(19): siRNA sense strand
ggucuagagcuuuauaagg

SEQ ID NO: 786014 - RNA, 19 nt, Homo sapiens
  misc_RNA (1)...(19): siRNA sense strand
uccagacaguuccauucua

SEQ ID NO: 786015 - RNA, 19 nt, Homo sapiens
  misc_RNA (1)...(19): siRNA sense strand
uggcuaugguggcuucaga

SEQ ID NO: 786016 - RNA, 19 nt, Homo sapiens
  misc_RNA (1)...(19): siRNA sense strand
caucagaaagaagcucaaa

SEQ ID NO: 786017 - RNA, 19 nt, Homo sapiens
  misc_RNA (1)...(19): siRNA sense strand
gugaacuucuauaacaucu

SEQ ID NO: 786018 - RNA, 19 nt, Homo sapiens
  misc_RNA (1)...(19): siRNA sense strand
uuggaaacuuugaggaaau

SEQ ID NO: 786019 - RNA, 19 nt, Homo sapiens
  misc_RNA (1)...(19): siRNA sense strand
gggaaagcagaaaugauca

SEQ ID NO: 786020 - RNA, 19 nt, Homo sapiens
  misc_RNA (1)...(19): siRNA sense strand
cagagcaaguacugaaugc

SEQ ID NO: 786021 - RNA, 19 nt, Homo sapiens
  misc_RNA (1)...(19): siRNA sense strand
ccacgugagacaccuacaa

SEQ ID NO: 786022 - RNA, 19 nt, Homo sapiens
  misc_RNA (1)...(19): siRNA sense strand
ugaagccagucauuagcau

SEQ ID NO: 786023 - RNA, 19 nt, Homo sapiens
  misc_RNA (1)...(19): siRNA sense strand
ggacaaaccuaucacauuu

SEQ ID NO: 786024 - RNA, 19 nt, Homo sapiens
  misc_RNA (1)...(19): siRNA sense strand
gaagucagauggacacauu

SEQ ID NO: 786025 - RNA, 19 nt, Homo sapiens
  misc_RNA (1)...(19): siRNA sense strand
gguaauaaaucuccuaaug

SEQ ID NO: 786026 - RNA, 19 nt, Homo sapiens
  misc_RNA (1)...(19): siRNA sense strand
gaggagauauucagacauu

SEQ ID NO: 786027 - RNA, 19 nt, Homo sapiens
  misc_RNA (1)...(19): siRNA sense strand
ucagaaggcuguaauagaa

SEQ ID NO: 786028 - RNA, 19 nt, Homo sapiens
  misc_RNA (1)...(19): siRNA sense strand
ccagagaguucuuuaaugu

SEQ ID NO: 786029 - RNA, 19 nt, Homo sapiens
  misc_RNA (1)...(19): siRNA sense strand
ggaggaaagugucaauaau

SEQ ID NO: 786030 - RNA, 19 nt, Homo sapiens
  misc_RNA (1)...(19): siRNA sense strand
gaaacuggguaauaaaucu

SEQ ID NO: 786031 - RNA, 19 nt, Homo sapiens
  misc_RNA (1)...(19): siRNA sense strand
ggaccucuauguucauuga

SEQ ID NO: 786032 - RNA, 19 nt, Homo sapiens
  misc_RNA (1)...(19): siRNA sense strand
gaaaagagguguucaaagg

SEQ ID NO: 786033 - RNA, 19 nt, Homo sapiens
  misc_RNA (1)...(19): siRNA sense strand
gaugaaauccuaaguagug

SEQ ID NO: 786034 - RNA, 19 nt, Homo sapiens
  misc_RNA (1)...(19): siRNA sense strand
uaaagaaaguggucaugga

SEQ ID NO: 786035 - RNA, 19 nt, Homo sapiens
  misc_RNA (1)...(19): siRNA sense strand
gaggaaagugucaauaauu

SEQ ID NO: 786036 - RNA, 19 nt, Homo sapiens
  misc_RNA (1)...(19): siRNA sense strand
ggagauauucagacauuaa

SEQ ID NO: 786037 - RNA, 19 nt, Homo sapiens
  misc_RNA (1)...(19): siRNA sense strand
guaaaucucuuugaacaag

SEQ ID NO: 786038 - RNA, 19 nt, Homo sapiens
  misc_RNA (1)...(19): siRNA sense strand
ggguaaaucucuuugaaca

SEQ ID NO: 786039 - RNA, 19 nt, Homo sapiens
  misc_RNA (1)...(19): siRNA sense strand
ggaacaacaugcugaaacu

SEQ ID NO: 786040 - RNA, 19 nt, Homo sapiens
  misc_RNA (1)...(19): siRNA sense strand
gcaaggcuauccagcacuu

SEQ ID NO: 786041 - RNA, 19 nt, Homo sapiens
  misc_RNA (1)...(19): siRNA sense strand
gaagauggucggaaucaga

SEQ ID NO: 786042 - RNA, 19 nt, Homo sapiens
  misc_RNA (1)...(19): siRNA sense strand
gaacggacgaucuccuuga

SEQ ID NO: 786043 - RNA, 19 nt, Homo sapiens
  misc_RNA (1)...(19): siRNA sense strand
gcaaagagagggacagaag

SEQ ID NO: 786044 - RNA, 19 nt, Homo sapiens
  misc_RNA (1)...(19): siRNA sense strand
gaugauuucugaagagagu

SEQ ID NO: 786045 - RNA, 19 nt, Homo sapiens
  misc_RNA (1)...(19): siRNA sense strand
guacuuucuucuauccuaa

SEQ ID NO: 786046 - RNA, 19 nt, Homo sapiens
  misc_RNA (1)...(19): siRNA sense strand
gacgaucuccuugaacuua

SEQ ID NO: 786047 - RNA, 19 nt, Homo sapiens
  misc_RNA (1)...(19): siRNA sense strand
gagaugauuucugaagaga

SEQ ID NO: 786048 - RNA, 19 nt, Homo sapiens
  misc_RNA (1)...(19): siRNA sense strand
cagagaagauggucggaau

SEQ ID NO: 786049 - RNA, 19 nt, Homo sapiens
  misc_RNA (1)...(19): siRNA sense strand
caaagcccaugguaacuuc

SEQ ID NO: 786050 - RNA, 19 nt, Homo sapiens
  misc_RNA (1)...(19): siRNA sense strand
gacaaaccuaucacauuua

SEQ ID NO: 786051 - RNA, 19 nt, Homo sapiens
  misc_RNA (1)...(19): siRNA sense strand
gggacaaaccuaucacauu

SEQ ID NO: 786052 - RNA, 19 nt, Homo sapiens
  misc_RNA (1)...(19): siRNA sense strand
gaaauagugaucugaaucu

SEQ ID NO: 786053 - RNA, 19 nt, Homo sapiens
  misc_RNA (1)...(19): siRNA sense strand
ggacacugaugaaauacca

SEQ ID NO: 786054 - RNA, 19 nt, Homo sapiens
  misc_RNA (1)...(19): siRNA sense strand
agagaaguaccgaaaguua

SEQ ID NO: 786055 - RNA, 19 nt, Homo sapiens
  misc_RNA (1)...(19): siRNA sense strand
acagauggcugguuaggau

SEQ ID NO: 786056 - RNA, 19 nt, Homo sapiens
  misc_RNA (1)...(19): siRNA sense strand
aaguagugcuuucaaauug

SEQ ID NO: 786057 - RNA, 19 nt, Homo sapiens
  misc_RNA (1)...(19): siRNA sense strand
caugguaacuucugcuugu

SEQ ID NO: 786058 - RNA, 19 nt, Homo sapiens
  misc_RNA (1)...(19): siRNA sense strand
uguggaauguuuacuugua

SEQ ID NO: 786059 - RNA, 19 nt, Homo sapiens
  misc_RNA (1)...(19): siRNA sense strand
gcacuucauguauucagua

SEQ ID NO: 786060 - RNA, 19 nt, Homo sapiens
  misc_RNA (1)...(19): siRNA sense strand
gaacucagaaggcuguaau

SEQ ID NO: 786061 - RNA, 19 nt, Homo sapiens
  misc_RNA (1)...(19): siRNA sense strand
gaauaagugacuauccaaa

SEQ ID NO: 786062 - RNA, 19 nt, Homo sapiens
  misc_RNA (1)...(19): siRNA sense strand
caaauuaucacaguucuca

SEQ ID NO: 786063 - RNA, 19 nt, Homo sapiens
  misc_RNA (1)...(19): siRNA sense strand
gagaaguaccgaaaguuau

SEQ ID NO: 786064 - RNA, 19 nt, Homo sapiens
  misc_RNA (1)...(19): siRNA sense strand
gcgaauuacucgaggagau

SEQ ID NO: 786065 - RNA, 19 nt, Homo sapiens
  misc_RNA (1)...(19): siRNA sense strand
gagugauuguggaauguuu

SEQ ID NO: 786066 - RNA, 19 nt, Homo sapiens
  misc_RNA (1)...(19): siRNA sense strand
auaagugacuauccaaaga

SEQ ID NO: 786067 - RNA, 19 nt, Homo sapiens
  misc_RNA (1)...(19): siRNA sense strand
gugaaacgauggaccaaag

SEQ ID NO: 786068 - RNA, 19 nt, Homo sapiens
  misc_RNA (1)...(19): siRNA sense strand
aaagagagaaguaccgaaa

SEQ ID NO: 786069 - RNA, 19 nt, Homo sapiens
  misc_RNA (1)...(19): siRNA sense strand
ccacaaagcccaugguaac

SEQ ID NO: 786070 - RNA, 19 nt, Homo sapiens
  misc_RNA (1)...(19): siRNA sense strand
caugaaaccacacgagauu

SEQ ID NO: 786071 - RNA, 19 nt, Homo sapiens
  misc_RNA (1)...(19): siRNA sense strand
guaauaaaucuccuaaugg

SEQ ID NO: 786072 - RNA, 19 nt, Homo sapiens
  misc_RNA (1)...(19): siRNA sense strand
ccuaaguagugcuuucaaa

SEQ ID NO: 786073 - RNA, 19 nt, Homo sapiens
  misc_RNA (1)...(19): siRNA sense strand
gaaaguaagaccaaaagaa

SEQ ID NO: 786074 - RNA, 19 nt, Homo sapiens
  misc_RNA (1)...(19): siRNA sense strand
ggaugaaaguaagaccaaa

SEQ ID NO: 786075 - RNA, 19 nt, Homo sapiens
  misc_RNA (1)...(19): siRNA sense strand
gguaacuucugcuuguaau

SEQ ID NO: 786076 - RNA, 19 nt, Homo sapiens
  misc_RNA (1)...(19): siRNA sense strand
caaagguaauccagagagu

SEQ ID NO: 786077 - RNA, 19 nt, Homo sapiens
  misc_RNA (1)...(19): siRNA sense strand
aagaucagagugacaguua

SEQ ID NO: 786078 - RNA, 19 nt, Homo sapiens
  misc_RNA (1)...(19): siRNA sense strand
cauuccagcugaccacaaa

SEQ ID NO: 786079 - RNA, 19 nt, Homo sapiens
  misc_RNA (1)...(19): siRNA sense strand
ggaauaagugacuauccaa

SEQ ID NO: 786080 - RNA, 19 nt, Homo sapiens
  misc_RNA (1)...(19): siRNA sense strand
cgaauuacucgaggagaua

SEQ ID NO: 786081 - RNA, 19 nt, Homo sapiens
  misc_RNA (1)...(19): siRNA sense strand
gaaaaggaaaucaguaaug

SEQ ID NO: 786082 - RNA, 19 nt, Homo sapiens
  misc_RNA (1)...(19): siRNA sense strand
gagaagauggucggaauca

SEQ ID NO: 786083 - RNA, 19 nt, Homo sapiens
  misc_RNA (1)...(19): siRNA sense strand
gguggugauugaccuaaga

SEQ ID NO: 786084 - RNA, 19 nt, Homo sapiens
  misc_RNA (1)...(19): siRNA sense strand
cuucauguauucaguacuu

SEQ ID NO: 786085 - RNA, 19 nt, Homo sapiens
  misc_RNA (1)...(19): siRNA sense strand
aaagagagggacagaagaa

SEQ ID NO: 786086 - RNA, 19 nt, Homo sapiens
  misc_RNA (1)...(19): siRNA sense strand
agagagaaguaccgaaagu

SEQ ID NO: 786087 - RNA, 19 nt, Homo sapiens
  misc_RNA (1)...(19): siRNA sense strand
gauucuccuucaguauuua

SEQ ID NO: 786088 - RNA, 19 nt, Homo sapiens
  misc_RNA (1)...(19): siRNA sense strand
agauucuccuucaguauuu

SEQ ID NO: 786089 - RNA, 19 nt, Homo sapiens
  misc_RNA (1)...(19): siRNA sense strand
cagauggacacauuaaaga

SEQ ID NO: 786090 - RNA, 19 nt, Homo sapiens
  misc_RNA (1)...(19): siRNA sense strand
agaaguaccgaaaguuauu

SEQ ID NO: 786091 - RNA, 19 nt, Homo sapiens
  misc_RNA (1)...(19): siRNA sense strand
ggagccugguggugauuga

SEQ ID NO: 786092 - RNA, 19 nt, Homo sapiens
  misc_RNA (1)...(19): siRNA sense strand
aaagaaaguggucauggaa

SEQ ID NO: 786093 - RNA, 19 nt, Homo sapiens
  misc_RNA (1)...(19): siRNA sense strand
agaaggcuguaauagaaga

SEQ ID NO: 786094 - RNA, 19 nt, Homo sapiens
  misc_RNA (1)...(19): siRNA sense strand
gaaauccuaaguagugcuu

SEQ ID NO: 786095 - RNA, 19 nt, Homo sapiens
  misc_RNA (1)...(19): siRNA sense strand
ccaaaacaauauagacuug

SEQ ID NO: 786096 - RNA, 19 nt, Homo sapiens
  misc_RNA (1)...(19): siRNA sense strand
guccuguaacuucaaauua

SEQ ID NO: 786097 - RNA, 19 nt, Homo sapiens
  misc_RNA (1)...(19): siRNA sense strand
guaccgaaaguuauuggaa

SEQ ID NO: 786098 - RNA, 19 nt, Homo sapiens
  misc_RNA (1)...(19): siRNA sense strand
gcugaaacuggguaauaaa

SEQ ID NO: 786099 - RNA, 19 nt, Homo sapiens
  misc_RNA (1)...(19): siRNA sense strand
acaaaccuaucacauuuac

SEQ ID NO: 786100 - RNA, 19 nt, Homo sapiens
  misc_RNA (1)...(19): siRNA sense strand
gaccaagauuagauugcuu

SEQ ID NO: 786101 - RNA, 19 nt, Homo sapiens
  misc_RNA (1)...(19): siRNA sense strand
gagagaaguaccgaaaguu

SEQ ID NO: 786102 - RNA, 19 nt, Homo sapiens
  misc_RNA (1)...(19): siRNA sense strand
aaauuauucuggugccuau

SEQ ID NO: 786103 - RNA, 19 nt, Homo sapiens
  misc_RNA (1)...(19): siRNA sense strand
caaagagagggacagaaga

SEQ ID NO: 786104 - RNA, 19 nt, Homo sapiens
  misc_RNA (1)...(19): siRNA sense strand
guuauuggaacgacuuaaa

SEQ ID NO: 786105 - RNA, 19 nt, Homo sapiens
  misc_RNA (1)...(19): siRNA sense strand
gaaguaccgaaaguuauug

SEQ ID NO: 786106 - RNA, 19 nt, Homo sapiens
  misc_RNA (1)...(19): siRNA sense strand
caaaagaaauagugaucug

SEQ ID NO: 786107 - RNA, 19 nt, Homo sapiens
  misc_RNA (1)...(19): siRNA sense strand
gaagauggugugggaaauc

SEQ ID NO: 786108 - RNA, 19 nt, Homo sapiens
  misc_RNA (1)...(19): siRNA sense strand
cacacgagauuccucaaca

SEQ ID NO: 786109 - RNA, 19 nt, Homo sapiens
  misc_RNA (1)...(19): siRNA sense strand
ugcugaaacuggguaauaa

SEQ ID NO: 786110 - RNA, 19 nt, Homo sapiens
  misc_RNA (1)...(19): siRNA sense strand
uggaacgacuuaaagaaag

SEQ ID NO: 786111 - RNA, 19 nt, Homo sapiens
  misc_RNA (1)...(19): siRNA sense strand
ugaccuaucagaagaagug

SEQ ID NO: 786112 - RNA, 19 nt, Homo sapiens
  misc_RNA (1)...(19): siRNA sense strand
ugugggaaauccuucauca

SEQ ID NO: 786113 - RNA, 19 nt, Homo sapiens
  misc_RNA (1)...(19): siRNA sense strand
gcaugaaaccacacgagau

SEQ ID NO: 786114 - RNA, 19 nt, Homo sapiens
  misc_RNA (1)...(19): siRNA sense strand
ucgaggagauauucagaca

SEQ ID NO: 786115 - RNA, 19 nt, Homo sapiens
  misc_RNA (1)...(19): siRNA sense strand
cuaauggaauaagugacua

SEQ ID NO: 786116 - RNA, 19 nt, Homo sapiens
  misc_RNA (1)...(19): siRNA sense strand
aggaggaaagugucaauaa

SEQ ID NO: 786117 - RNA, 19 nt, Homo sapiens
  misc_RNA (1)...(19): siRNA sense strand
gaaacaaggggaccucuau

SEQ ID NO: 786118 - RNA, 19 nt, Homo sapiens
  misc_RNA (1)...(19): siRNA sense strand
agaaaguggucauggaaac

SEQ ID NO: 786119 - RNA, 19 nt, Homo sapiens
  misc_RNA (1)...(19): siRNA sense strand
ccucuauguucauugagaa

SEQ ID NO: 786120 - RNA, 19 nt, Homo sapiens
  misc_RNA (1)...(19): siRNA sense strand
gggagugauuguggaaugu

SEQ ID NO: 786121 - RNA, 19 nt, Homo sapiens
  misc_RNA (1)...(19): siRNA sense strand
gaacuaucacuggcucaau

SEQ ID NO: 786122 - RNA, 19 nt, Homo sapiens
  misc_RNA (1)...(19): siRNA sense strand
cuaaguagugcuuucaaau

SEQ ID NO: 786123 - RNA, 19 nt, Homo sapiens
  misc_RNA (1)...(19): siRNA sense strand
ggaagaagcuggaugacau

SEQ ID NO: 786124 - RNA, 19 nt, Homo sapiens
  misc_RNA (1)...(19): siRNA sense strand
ccaccacccugaagacuua

SEQ ID NO: 786125 - RNA, 19 nt, Homo sapiens
  misc_RNA (1)...(19): siRNA sense strand
cauaagaccuucacgacaa

SEQ ID NO: 786126 - RNA, 19 nt, Homo sapiens
  misc_RNA (1)...(19): siRNA sense strand
caggagagauggugaaguu

SEQ ID NO: 786127 - RNA, 19 nt, Homo sapiens
  misc_RNA (1)...(19): siRNA sense strand
gaagugaacaucagcugua

SEQ ID NO: 786128 - RNA, 19 nt, Homo sapiens
  misc_RNA (1)...(19): siRNA sense strand
ugacaaagacgacaacuug

SEQ ID NO: 786129 - RNA, 19 nt, Homo sapiens
  misc_RNA (1)...(19): siRNA sense strand
gaacagcaagaacuauuug

SEQ ID NO: 786130 - RNA, 19 nt, Homo sapiens
  misc_RNA (1)...(19): siRNA sense strand
gauacacgcugcaggugaa

SEQ ID NO: 786131 - RNA, 19 nt, Homo sapiens
  misc_RNA (1)...(19): siRNA sense strand
acacaugccugcagacaga

SEQ ID NO: 786132 - RNA, 19 nt, Homo sapiens
  misc_RNA (1)...(19): siRNA sense strand
ggaacagcaagaacuauuu

SEQ ID NO: 786133 - RNA, 19 nt, Homo sapiens
  misc_RNA (1)...(19): siRNA sense strand
guaacaaccuccuccucuu

SEQ ID NO: 786134 - RNA, 19 nt, Homo sapiens
  misc_RNA (1)...(19): siRNA sense strand
ggagucagacaagaaauuu

SEQ ID NO: 786135 - RNA, 19 nt, Homo sapiens
  misc_RNA (1)...(19): siRNA sense strand
gaacaucagcuguaacaac

SEQ ID NO: 786136 - RNA, 19 nt, Homo sapiens
  misc_RNA (1)...(19): siRNA sense strand
ggccuggacuggcgagauu

SEQ ID NO: 786137 - RNA, 19 nt, Homo sapiens
  misc_RNA (1)...(19): siRNA sense strand
caacagcuuucaggagaug

SEQ ID NO: 786138 - RNA, 19 nt, Homo sapiens
  misc_RNA (1)...(19): siRNA sense strand
cagaugagcacuucacaga

SEQ ID NO: 786139 - RNA, 19 nt, Homo sapiens
  misc_RNA (1)...(19): siRNA sense strand
guaccugaauggugucaau

SEQ ID NO: 786140 - RNA, 19 nt, Homo sapiens
  misc_RNA (1)...(19): siRNA sense strand
gagauggagucagacaaga

SEQ ID NO: 786141 - RNA, 19 nt, Homo sapiens
  misc_RNA (1)...(19): siRNA sense strand
ucacugcaaucaucuucaa

SEQ ID NO: 786142 - RNA, 19 nt, Homo sapiens
  misc_RNA (1)...(19): siRNA sense strand
cgcaagggcuccuggaaga

SEQ ID NO: 786143 - RNA, 19 nt, Homo sapiens
  misc_RNA (1)...(19): siRNA sense strand
cgaaccggaugguagugua

SEQ ID NO: 786144 - RNA, 19 nt, Homo sapiens
  misc_RNA (1)...(19): siRNA sense strand
gauggagucagacaagaaa

SEQ ID NO: 786145 - RNA, 19 nt, Homo sapiens
  misc_RNA (1)...(19): siRNA sense strand
caagcugccugucaccaau

SEQ ID NO: 786146 - RNA, 19 nt, Homo sapiens
  misc_RNA (1)...(19): siRNA sense strand
gaaaucgugggcuacuauu

SEQ ID NO: 786147 - RNA, 19 nt, Homo sapiens
  misc_RNA (1)...(19): siRNA sense strand
cuggaucgguacagaagua

SEQ ID NO: 786148 - RNA, 19 nt, Homo sapiens
  misc_RNA (1)...(19): siRNA sense strand
gaagaagcuggaugacaug

SEQ ID NO: 786149 - RNA, 19 nt, Homo sapiens
  misc_RNA (1)...(19): siRNA sense strand
ccaggaacagcaagaacua

SEQ ID NO: 786150 - RNA, 19 nt, Homo sapiens
  misc_RNA (1)...(19): siRNA sense strand
ugaaguuccucacugcaau

SEQ ID NO: 786151 - RNA, 19 nt, Homo sapiens
  misc_RNA (1)...(19): siRNA sense strand
acagagcacuggugugaag

SEQ ID NO: 786152 - RNA, 19 nt, Homo sapiens
  misc_RNA (1)...(19): siRNA sense strand
cagcaagaacuauuuguca

SEQ ID NO: 786153 - RNA, 19 nt, Homo sapiens
  misc_RNA (1)...(19): siRNA sense strand
ggagauggagucagacaag

SEQ ID NO: 786154 - RNA, 19 nt, Homo sapiens
  misc_RNA (1)...(19): siRNA sense strand
gcccaauguucgauacuca

SEQ ID NO: 786155 - RNA, 19 nt, Homo sapiens
  misc_RNA (1)...(19): siRNA sense strand
cagaaaucgugggcuacua

SEQ ID NO: 786156 - RNA, 19 nt, Homo sapiens
  misc_RNA (1)...(19): siRNA sense strand
ccacuucaccuacaccaau

SEQ ID NO: 786157 - RNA, 19 nt, Homo sapiens
  misc_RNA (1)...(19): siRNA sense strand
gcaagcugccugucaccaa

SEQ ID NO: 786158 - RNA, 19 nt, Homo sapiens
  misc_RNA (1)...(19): siRNA sense strand
cgaucucgcugcucuucaa

SEQ ID NO: 786159 - RNA, 19 nt, Homo sapiens
  misc_RNA (1)...(19): siRNA sense strand
uaacaaccuccuccucuuc

SEQ ID NO: 786160 - RNA, 19 nt, Homo sapiens
  misc_RNA (1)...(19): siRNA sense strand
gaaccggaugguaguguau

SEQ ID NO: 786161 - RNA, 19 nt, Homo sapiens
  misc_RNA (1)...(19): siRNA sense strand
guuccucacugcaaucauc

SEQ ID NO: 786162 - RNA, 19 nt, Homo sapiens
  misc_RNA (1)...(19): siRNA sense strand
auaagaccuucacgacaaa

SEQ ID NO: 786163 - RNA, 19 nt, Homo sapiens
  misc_RNA (1)...(19): siRNA sense strand
gugaacaucagcuguaaca

SEQ ID NO: 786164 - RNA, 19 nt, Homo sapiens
  misc_RNA (1)...(19): siRNA sense strand
uggaugacaugcagaacau

SEQ ID NO: 786165 - RNA, 19 nt, Homo sapiens
  misc_RNA (1)...(19): siRNA sense strand
gagcacuggugugaagauc

SEQ ID NO: 786166 - RNA, 19 nt, Homo sapiens
  misc_RNA (1)...(19): siRNA sense strand
ccugaagacuuaccuagac

SEQ ID NO: 786167 - RNA, 19 nt, Homo sapiens
  misc_RNA (1)...(19): siRNA sense strand
gagcuuugucucagaaauc

SEQ ID NO: 786168 - RNA, 19 nt, Homo sapiens
  misc_RNA (1)...(19): siRNA sense strand
aaacaacacgcacuuucug

SEQ ID NO: 786169 - RNA, 19 nt, Homo sapiens
  misc_RNA (1)...(19): siRNA sense strand
ggacacaugccugcagaca

SEQ ID NO: 786170 - RNA, 19 nt, Homo sapiens
  misc_RNA (1)...(19): siRNA sense strand
gguagacgucaacagcuuu

SEQ ID NO: 786171 - RNA, 19 nt, Homo sapiens
  misc_RNA (1)...(19): siRNA sense strand
aagugaacaucagcuguaa

SEQ ID NO: 786172 - RNA, 19 nt, Homo sapiens
  misc_RNA (1)...(19): siRNA sense strand
aaucgugggcuacuauuau

SEQ ID NO: 786173 - RNA, 19 nt, Homo sapiens
  misc_RNA (1)...(19): siRNA sense strand
gaccuucacgacaaaguau

SEQ ID NO: 786174 - RNA, 19 nt, Homo sapiens
  misc_RNA (1)...(19): siRNA sense strand
uucaggagauggagucaga

SEQ ID NO: 786175 - RNA, 19 nt, Homo sapiens
  misc_RNA (1)...(19): siRNA sense strand
agaaaucgugggcuacuau

SEQ ID NO: 786176 - RNA, 19 nt, Homo sapiens
  misc_RNA (1)...(19): siRNA sense strand
ggcaaggccucaucuaccu

SEQ ID NO: 786177 - RNA, 19 nt, Homo sapiens
  misc_RNA (1)...(19): siRNA sense strand
gcaagggcuccuggaagaa

SEQ ID NO: 786178 - RNA, 19 nt, Homo sapiens
  misc_RNA (1)...(19): siRNA sense strand
ggagcccaauguucgauac

SEQ ID NO: 786179 - RNA, 19 nt, Homo sapiens
  misc_RNA (1)...(19): siRNA sense strand
gaaugcuaccgcuggaaga

SEQ ID NO: 786180 - RNA, 19 nt, Homo sapiens
  misc_RNA (1)...(19): siRNA sense strand
aaaucgugggcuacuauua

SEQ ID NO: 786181 - RNA, 19 nt, Homo sapiens
  misc_RNA (1)...(19): siRNA sense strand
ccaucuuccugcccacuga

SEQ ID NO: 786182 - RNA, 19 nt, Homo sapiens
  misc_RNA (1)...(19): siRNA sense strand
cacuucaccuacaccaauu

SEQ ID NO: 786183 - RNA, 19 nt, Homo sapiens
  misc_RNA (1)...(19): siRNA sense strand
gcuacuauuaucccaguga

SEQ ID NO: 786184 - RNA, 19 nt, Homo sapiens
  misc_RNA (1)...(19): siRNA sense strand
cuacccagaugagcacuuc

SEQ ID NO: 786185 - RNA, 19 nt, Homo sapiens
  misc_RNA (1)...(19): siRNA sense strand
uagacacccucccugaagu

SEQ ID NO: 786186 - RNA, 19 nt, Homo sapiens
  misc_RNA (1)...(19): siRNA sense strand
ccuggaagaagcuggauga

SEQ ID NO: 786187 - RNA, 19 nt, Homo sapiens
  misc_RNA (1)...(19): siRNA sense strand
gaaguuccucacugcaauc

SEQ ID NO: 786188 - RNA, 19 nt, Homo sapiens
  misc_RNA (1)...(19): siRNA sense strand
aacaucuucuggugccaua

SEQ ID NO: 786189 - RNA, 19 nt, Homo sapiens
  misc_RNA (1)...(19): siRNA sense strand
guguaccgccuguguguga

SEQ ID NO: 786190 - RNA, 19 nt, Homo sapiens
  misc_RNA (1)...(19): siRNA sense strand
gggcacguguggugaaagc

SEQ ID NO: 786191 - RNA, 19 nt, Homo sapiens
  misc_RNA (1)...(19): siRNA sense strand
gagagauggugaaguuccu

SEQ ID NO: 786192 - RNA, 19 nt, Homo sapiens
  misc_RNA (1)...(19): siRNA sense strand
ugguagacgucaacagcuu

SEQ ID NO: 786193 - RNA, 19 nt, Homo sapiens
  misc_RNA (1)...(19): siRNA sense strand
cuccucuucugguugguua

SEQ ID NO: 786194 - RNA, 19 nt, Homo sapiens
  misc_RNA (1)...(19): siRNA sense strand
gacgacggccugaagaucu

SEQ ID NO: 786195 - RNA, 19 nt, Homo sapiens
  misc_RNA (1)...(19): siRNA sense strand
gagacgacggccugaagau

SEQ ID NO: 786196 - RNA, 19 nt, Homo sapiens
  misc_RNA (1)...(19): siRNA sense strand
ucaacagcuuucaggagau

SEQ ID NO: 786197 - RNA, 19 nt, Homo sapiens
  misc_RNA (1)...(19): siRNA sense strand
guacuguagccgcaucugu

SEQ ID NO: 786198 - RNA, 19 nt, Homo sapiens
  misc_RNA (1)...(19): siRNA sense strand
caucugugcagcaggauuc

SEQ ID NO: 786199 - RNA, 19 nt, Homo sapiens
  misc_RNA (1)...(19): siRNA sense strand
ugacaugcagaacaucuuc

SEQ ID NO: 786200 - RNA, 19 nt, Homo sapiens
  misc_RNA (1)...(19): siRNA sense strand
agaccuucacgacaaagua

SEQ ID NO: 786201 - RNA, 19 nt, Homo sapiens
  misc_RNA (1)...(19): siRNA sense strand
cgagacgacggccugaaga

SEQ ID NO: 786202 - RNA, 19 nt, Homo sapiens
  misc_RNA (1)...(19): siRNA sense strand
uggagucagacaagaaauu

SEQ ID NO: 786203 - RNA, 19 nt, Homo sapiens
  misc_RNA (1)...(19): siRNA sense strand
cuagacacccucccugaag

SEQ ID NO: 786204 - RNA, 19 nt, Homo sapiens
  misc_RNA (1)...(19): siRNA sense strand
cugaagacuuaccuagaca

SEQ ID NO: 786205 - RNA, 19 nt, Homo sapiens
  misc_RNA (1)...(19): siRNA sense strand
ccaaugcuccaucauccau

SEQ ID NO: 786206 - RNA, 19 nt, Homo sapiens
  misc_RNA (1)...(19): siRNA sense strand
gagcugaggccaggaacag

SEQ ID NO: 786207 - RNA, 19 nt, Homo sapiens
  misc_RNA (1)...(19): siRNA sense strand
gugggcacguguggugaaa

SEQ ID NO: 786208 - RNA, 19 nt, Homo sapiens
  misc_RNA (1)...(19): siRNA sense strand
aggaacagcaagaacuauu

SEQ ID NO: 786209 - RNA, 19 nt, Homo sapiens
  misc_RNA (1)...(19): siRNA sense strand
gaacaaaucaagcacaucu

SEQ ID NO: 786210 - RNA, 19 nt, Homo sapiens
  misc_RNA (1)...(19): siRNA sense strand
agaaauuccuccucugaaa

SEQ ID NO: 786211 - RNA, 19 nt, Homo sapiens
  misc_RNA (1)...(19): siRNA sense strand
gaacagagaccagaaagag

SEQ ID NO: 786212 - RNA, 19 nt, Homo sapiens
  misc_RNA (1)...(19): siRNA sense strand
gaaagcaucuucacaaaag

SEQ ID NO: 786213 - RNA, 19 nt, Homo sapiens
  misc_RNA (1)...(19): siRNA sense strand
caacagggaacacugauga

SEQ ID NO: 786214 - RNA, 19 nt, Homo sapiens
  misc_RNA (1)...(19): siRNA sense strand
gcacaucuuugcuaauuuu

SEQ ID NO: 786215 - RNA, 19 nt, Homo sapiens
  misc_RNA (1)...(19): siRNA sense strand
gaagaacagagaccagaaa

SEQ ID NO: 786216 - RNA, 19 nt, Homo sapiens
  misc_RNA (1)...(19): siRNA sense strand
gaaagcacgauaaucacua

SEQ ID NO: 786217 - RNA, 19 nt, Homo sapiens
  misc_RNA (1)...(19): siRNA sense strand
guaaggauggucaguauga

SEQ ID NO: 786218 - RNA, 19 nt, Homo sapiens
  misc_RNA (1)...(19): siRNA sense strand
gcacgauaaucacuagugu

SEQ ID NO: 786219 - RNA, 19 nt, Homo sapiens
  misc_RNA (1)...(19): siRNA sense strand
cagaagaugcucaguaaga

SEQ ID NO: 786220 - RNA, 19 nt, Homo sapiens
  misc_RNA (1)...(19): siRNA sense strand
ucacuaguguugauauugu

SEQ ID NO: 786221 - RNA, 19 nt, Homo sapiens
  misc_RNA (1)...(19): siRNA sense strand
gaaugaagaacaaaucaag

SEQ ID NO: 786222 - RNA, 19 nt, Homo sapiens
  misc_RNA (1)...(19): siRNA sense strand
ugaaaguacugaggaugaa

SEQ ID NO: 786223 - RNA, 19 nt, Homo sapiens
  misc_RNA (1)...(19): siRNA sense strand
aaagaagccuacaagaagu

SEQ ID NO: 786224 - RNA, 19 nt, Homo sapiens
  misc_RNA (1)...(19): siRNA sense strand
gaggaugaaguuacugaaa

SEQ ID NO: 786225 - RNA, 19 nt, Homo sapiens
  misc_RNA (1)...(19): siRNA sense strand
ucucugacauuuacaagau

SEQ ID NO: 786226 - RNA, 19 nt, Homo sapiens
  misc_RNA (1)...(19): siRNA sense strand
acaaaucaagcacaucuuu

SEQ ID NO: 786227 - RNA, 19 nt, Homo sapiens
  misc_RNA (1)...(19): siRNA sense strand
caaaagaagccuacaagaa

SEQ ID NO: 786228 - RNA, 19 nt, Homo sapiens
  misc_RNA (1)...(19): siRNA sense strand
aggaaagcaucuucacaaa

SEQ ID NO: 786229 - RNA, 19 nt, Homo sapiens
  misc_RNA (1)...(19): siRNA sense strand
aaccaucacuugcaggaaa

SEQ ID NO: 786230 - RNA, 19 nt, Homo sapiens
  misc_RNA (1)...(19): siRNA sense strand
caggaaagcaucuucacaa

SEQ ID NO: 786231 - RNA, 19 nt, Homo sapiens
  misc_RNA (1)...(19): siRNA sense strand
ggaaugaagaacaaaucaa

SEQ ID NO: 786232 - RNA, 19 nt, Homo sapiens
  misc_RNA (1)...(19): siRNA sense strand
gaaauuccuccucugaaag

SEQ ID NO: 786233 - RNA, 19 nt, Homo sapiens
  misc_RNA (1)...(19): siRNA sense strand
uaacagggaaugaagaaca

SEQ ID NO: 786234 - RNA, 19 nt, Homo sapiens
  misc_RNA (1)...(19): siRNA sense strand
ccguaaggauggucaguau

SEQ ID NO: 786235 - RNA, 19 nt, Homo sapiens
  misc_RNA (1)...(19): siRNA sense strand
ggaugaaguuacugaaagc

SEQ ID NO: 786236 - RNA, 19 nt, Homo sapiens
  misc_RNA (1)...(19): siRNA sense strand
caugaaaucaaucaacgaa

SEQ ID NO: 786237 - RNA, 19 nt, Homo sapiens
  misc_RNA (1)...(19): siRNA sense strand
ucugggagaucacaaaugg

SEQ ID NO: 786238 - RNA, 19 nt, Homo sapiens
  misc_RNA (1)...(19): siRNA sense strand
acugaaagcacgauaauca

SEQ ID NO: 786239 - RNA, 19 nt, Homo sapiens
  misc_RNA (1)...(19): siRNA sense strand
gaacuaccguaaggauggu

SEQ ID NO: 786240 - RNA, 19 nt, Homo sapiens
  misc_RNA (1)...(19): siRNA sense strand
guacugaggaugaaguuac

SEQ ID NO: 786241 - RNA, 19 nt, Homo sapiens
  misc_RNA (1)...(19): siRNA sense strand
gaagaugcucaguaagaca

SEQ ID NO: 786242 - RNA, 19 nt, Homo sapiens
  misc_RNA (1)...(19): siRNA sense strand
ggaaguggagcagaagaug

SEQ ID NO: 786243 - RNA, 19 nt, Homo sapiens
  misc_RNA (1)...(19): siRNA sense strand
gcaggaaagcaucuucaca

SEQ ID NO: 786244 - RNA, 19 nt, Homo sapiens
  misc_RNA (1)...(19): siRNA sense strand
agggaacacugaugacuca

SEQ ID NO: 786245 - RNA, 19 nt, Homo sapiens
  misc_RNA (1)...(19): siRNA sense strand
gggaaugaagaacaaauca

SEQ ID NO: 786246 - RNA, 19 nt, Homo sapiens
  misc_RNA (1)...(19): siRNA sense strand
uauaacagggaaugaagaa

SEQ ID NO: 786247 - RNA, 19 nt, Homo sapiens
  misc_RNA (1)...(19): siRNA sense strand
aaagcacgauaaucacuag

SEQ ID NO: 786248 - RNA, 19 nt, Homo sapiens
  misc_RNA (1)...(19): siRNA sense strand
ggaaagcaucuucacaaaa

SEQ ID NO: 786249 - RNA, 19 nt, Homo sapiens
  misc_RNA (1)...(19): siRNA sense strand
ugguugcucugcugaacua

SEQ ID NO: 786250 - RNA, 19 nt, Homo sapiens
  misc_RNA (1)...(19): siRNA sense strand
aaauccaccuggcaugguu

SEQ ID NO: 786251 - RNA, 19 nt, Homo sapiens
  misc_RNA (1)...(19): siRNA sense strand
aagaacaaaucaagcacau

SEQ ID NO: 786252 - RNA, 19 nt, Homo sapiens
  misc_RNA (1)...(19): siRNA sense strand
agacaacagggaacacuga

SEQ ID NO: 786253 - RNA, 19 nt, Homo sapiens
  misc_RNA (1)...(19): siRNA sense strand
gagaccagaaagagugaaa

SEQ ID NO: 786254 - RNA, 19 nt, Homo sapiens
  misc_RNA (1)...(19): siRNA sense strand
ucacucauuggcagaaauu

SEQ ID NO: 786255 - RNA, 19 nt, Homo sapiens
  misc_RNA (1)...(19): siRNA sense strand
acgauaaucacuaguguug

SEQ ID NO: 786256 - RNA, 19 nt, Homo sapiens
  misc_RNA (1)...(19): siRNA sense strand
gaccucaucagccacaaug

SEQ ID NO: 786257 - RNA, 19 nt, Homo sapiens
  misc_RNA (1)...(19): siRNA sense strand
aggaugaaguuacugaaag

SEQ ID NO: 786258 - RNA, 19 nt, Homo sapiens
  misc_RNA (1)...(19): siRNA sense strand
uuacaaaccaucacuugca

SEQ ID NO: 786259 - RNA, 19 nt, Homo sapiens
  misc_RNA (1)...(19): siRNA sense strand
gccuggaaguggagcagaa

SEQ ID NO: 786260 - RNA, 19 nt, Homo sapiens
  misc_RNA (1)...(19): siRNA sense strand
aacagggaaugaagaacaa

SEQ ID NO: 786261 - RNA, 19 nt, Homo sapiens
  misc_RNA (1)...(19): siRNA sense strand
ccaguucuuuauuggugaa

SEQ ID NO: 786262 - RNA, 19 nt, Homo sapiens
  misc_RNA (1)...(19): siRNA sense strand
aaaagaagccuacaagaag

SEQ ID NO: 786263 - RNA, 19 nt, Homo sapiens
  misc_RNA (1)...(19): siRNA sense strand
gaagccuacaagaaguaua

SEQ ID NO: 786264 - RNA, 19 nt, Homo sapiens
  misc_RNA (1)...(19): siRNA sense strand
cugaaaguacugaggauga

SEQ ID NO: 786265 - RNA, 19 nt, Homo sapiens
  misc_RNA (1)...(19): siRNA sense strand
aagaagccuacaagaagua

SEQ ID NO: 786266 - RNA, 19 nt, Homo sapiens
  misc_RNA (1)...(19): siRNA sense strand
ugaagaacagagaccagaa

SEQ ID NO: 786267 - RNA, 19 nt, Homo sapiens
  misc_RNA (1)...(19): siRNA sense strand
uuacugaaagcacgauaau

SEQ ID NO: 786268 - RNA, 19 nt, Homo sapiens
  misc_RNA (1)...(19): siRNA sense strand
cugcugaacuaccguaagg

SEQ ID NO: 786269 - RNA, 19 nt, Homo sapiens
  misc_RNA (1)...(19): siRNA sense strand
guuacugaaagcacgauaa

SEQ ID NO: 786270 - RNA, 19 nt, Homo sapiens
  misc_RNA (1)...(19): siRNA sense strand
gcugaacuaccguaaggau

SEQ ID NO: 786271 - RNA, 19 nt, Homo sapiens
  misc_RNA (1)...(19): siRNA sense strand
aagccuacaagaaguauau

SEQ ID NO: 786272 - RNA, 19 nt, Homo sapiens
  misc_RNA (1)...(19): siRNA sense strand
agaagaugcucaguaagac

SEQ ID NO: 786273 - RNA, 19 nt, Homo sapiens
  misc_RNA (1)...(19): siRNA sense strand
cagccacaaugagauguuc

SEQ ID NO: 786274 - RNA, 19 nt, Homo sapiens
  misc_RNA (1)...(19): siRNA sense strand
gaccagaaagagugaaacu

SEQ ID NO: 786275 - RNA, 19 nt, Homo sapiens
  misc_RNA (1)...(19): siRNA sense strand
cacuaguguugauauuguu

SEQ ID NO: 786276 - RNA, 19 nt, Homo sapiens
  misc_RNA (1)...(19): siRNA sense strand
gaaaguacugaggaugaag

SEQ ID NO: 786277 - RNA, 19 nt, Homo sapiens
  misc_RNA (1)...(19): siRNA sense strand
ccuacaagaaguauaucaa

SEQ ID NO: 786278 - RNA, 19 nt, Homo sapiens
  misc_RNA (1)...(19): siRNA sense strand
gcaaccauauccauaauuu

SEQ ID NO: 786279 - RNA, 19 nt, Homo sapiens
  misc_RNA (1)...(19): siRNA sense strand
ugaaggagcugucacaauu

SEQ ID NO: 786280 - RNA, 19 nt, Homo sapiens
  misc_RNA (1)...(19): siRNA sense strand
ggacuaaauucucuuauuc

SEQ ID NO: 786281 - RNA, 19 nt, Homo sapiens
  misc_RNA (1)...(19): siRNA sense strand
uagaauggcugauaauuga

SEQ ID NO: 786282 - RNA, 19 nt, Homo sapiens
  misc_RNA (1)...(19): siRNA sense strand
gaaauacggaaucaaguua

SEQ ID NO: 786283 - RNA, 19 nt, Homo sapiens
  misc_RNA (1)...(19): siRNA sense strand
caacgagacucaauuccua

SEQ ID NO: 786284 - RNA, 19 nt, Homo sapiens
  misc_RNA (1)...(19): siRNA sense strand
gaaucucucucacauauau

SEQ ID NO: 786285 - RNA, 19 nt, Homo sapiens
  misc_RNA (1)...(19): siRNA sense strand
ggagaugccaccugaguua

SEQ ID NO: 786286 - RNA, 19 nt, Homo sapiens
  misc_RNA (1)...(19): siRNA sense strand
gaaacuggaugaauuggau

SEQ ID NO: 786287 - RNA, 19 nt, Homo sapiens
  misc_RNA (1)...(19): siRNA sense strand
caaaaugacuucccaauau

SEQ ID NO: 786288 - RNA, 19 nt, Homo sapiens
  misc_RNA (1)...(19): siRNA sense strand
ccaauucucuauacucuga

SEQ ID NO: 786289 - RNA, 19 nt, Homo sapiens
  misc_RNA (1)...(19): siRNA sense strand
gagcuugacugugaugaaa

SEQ ID NO: 786290 - RNA, 19 nt, Homo sapiens
  misc_RNA (1)...(19): siRNA sense strand
cauaacagcaacugaaaua

SEQ ID NO: 786291 - RNA, 19 nt, Homo sapiens
  misc_RNA (1)...(19): siRNA sense strand
ggaguaugcuucccucuuc

SEQ ID NO: 786292 - RNA, 19 nt, Homo sapiens
  misc_RNA (1)...(19): siRNA sense strand
ggaaaaugcagaacaauua

SEQ ID NO: 786293 - RNA, 19 nt, Homo sapiens
  misc_RNA (1)...(19): siRNA sense strand
gaaggcaaccauauccaua

SEQ ID NO: 786294 - RNA, 19 nt, Homo sapiens
  misc_RNA (1)...(19): siRNA sense strand
uaacauuucugacauugga

SEQ ID NO: 786295 - RNA, 19 nt, Homo sapiens
  misc_RNA (1)...(19): siRNA sense strand
gauaaucaccucagucgaa

SEQ ID NO: 786296 - RNA, 19 nt, Homo sapiens
  misc_RNA (1)...(19): siRNA sense strand
aaacauaugcuccaucauu

SEQ ID NO: 786297 - RNA, 19 nt, Homo sapiens
  misc_RNA (1)...(19): siRNA sense strand
gaauuggauuuaggaagua

SEQ ID NO: 786298 - RNA, 19 nt, Homo sapiens
  misc_RNA (1)...(19): siRNA sense strand
uagaagggauugaaauuuc

SEQ ID NO: 786299 - RNA, 19 nt, Homo sapiens
  misc_RNA (1)...(19): siRNA sense strand
agacuagaauggcugauaa

SEQ ID NO: 786300 - RNA, 19 nt, Homo sapiens
  misc_RNA (1)...(19): siRNA sense strand
gaucggaggcuuugaccua

SEQ ID NO: 786301 - RNA, 19 nt, Homo sapiens
  misc_RNA (1)...(19): siRNA sense strand
gaaaacauaugcuccauca

SEQ ID NO: 786302 - RNA, 19 nt, Homo sapiens
  misc_RNA (1)...(19): siRNA sense strand
caacugaaauacggaauca

SEQ ID NO: 786303 - RNA, 19 nt, Homo sapiens
  misc_RNA (1)...(19): siRNA sense strand
ggacaacuguggagacaac

SEQ ID NO: 786304 - RNA, 19 nt, Homo sapiens
  misc_RNA (1)...(19): siRNA sense strand
ccacaagaccauuuaaaga

SEQ ID NO: 786305 - RNA, 19 nt, Homo sapiens
  misc_RNA (1)...(19): siRNA sense strand
ucaaauauccaacaaagga

SEQ ID NO: 786306 - RNA, 19 nt, Homo sapiens
  misc_RNA (1)...(19): siRNA sense strand
ccugauugcuucaagaauu

SEQ ID NO: 786307 - RNA, 19 nt, Homo sapiens
  misc_RNA (1)...(19): siRNA sense strand
ggacagcaaaggucagaaa

SEQ ID NO: 786308 - RNA, 19 nt, Homo sapiens
  misc_RNA (1)...(19): siRNA sense strand
guuuagaccucuuaugaau

SEQ ID NO: 786309 - RNA, 19 nt, Homo sapiens
  misc_RNA (1)...(19): siRNA sense strand
cugauugcuucaagaauua

SEQ ID NO: 786310 - RNA, 19 nt, Homo sapiens
  misc_RNA (1)...(19): siRNA sense strand
gaaaaucuauggacagcaa

SEQ ID NO: 786311 - RNA, 19 nt, Homo sapiens
  misc_RNA (1)...(19): siRNA sense strand
ugaauuggauuuaggaagu

SEQ ID NO: 786312 - RNA, 19 nt, Homo sapiens
  misc_RNA (1)...(19): siRNA sense strand
ggacugaauagccuuacua

SEQ ID NO: 786313 - RNA, 19 nt, Homo sapiens
  misc_RNA (1)...(19): siRNA sense strand
gaaagcuuccuccugauug

SEQ ID NO: 786314 - RNA, 19 nt, Homo sapiens
  misc_RNA (1)...(19): siRNA sense strand
ucauuuggauuacugguuu

SEQ ID NO: 786315 - RNA, 19 nt, Homo sapiens
  misc_RNA (1)...(19): siRNA sense strand
guucgcagcuguaaaccaa

SEQ ID NO: 786316 - RNA, 19 nt, Homo sapiens
  misc_RNA (1)...(19): siRNA sense strand
ugaauagccuuacuaaacu

SEQ ID NO: 786317 - RNA, 19 nt, Homo sapiens
  misc_RNA (1)...(19): siRNA sense strand
uuacauccaucuccaucua

SEQ ID NO: 786318 - RNA, 19 nt, Homo sapiens
  misc_RNA (1)...(19): siRNA sense strand
gagacucaauuccuauuca

SEQ ID NO: 786319 - RNA, 19 nt, Homo sapiens
  misc_RNA (1)...(19): siRNA sense strand
gcaaaggucagaaaacaua

SEQ ID NO: 786320 - RNA, 19 nt, Homo sapiens
  misc_RNA (1)...(19): siRNA sense strand
ugauaaaccucucugucaa

SEQ ID NO: 786321 - RNA, 19 nt, Homo sapiens
  misc_RNA (1)...(19): siRNA sense strand
cacaagaccauuuaaagaa

SEQ ID NO: 786322 - RNA, 19 nt, Homo sapiens
  misc_RNA (1)...(19): siRNA sense strand
gagcccagauuuauucagu

SEQ ID NO: 786323 - RNA, 19 nt, Homo sapiens
  misc_RNA (1)...(19): siRNA sense strand
aaacacugauggaauuuca

SEQ ID NO: 786324 - RNA, 19 nt, Homo sapiens
  misc_RNA (1)...(19): siRNA sense strand
ggauggagaguacucauug

SEQ ID NO: 786325 - RNA, 19 nt, Homo sapiens
  misc_RNA (1)...(19): siRNA sense strand
uacauuggcuggaccuuga

SEQ ID NO: 786326 - RNA, 19 nt, Homo sapiens
  misc_RNA (1)...(19): siRNA sense strand
gaaaaucuuccaccgcuua

SEQ ID NO: 786327 - RNA, 19 nt, Homo sapiens
  misc_RNA (1)...(19): siRNA sense strand
gucuggagcuugacuguga

SEQ ID NO: 786328 - RNA, 19 nt, Homo sapiens
  misc_RNA (1)...(19): siRNA sense strand
guauuaauuuggccgcauu

SEQ ID NO: 786329 - RNA, 19 nt, Homo sapiens
  misc_RNA (1)...(19): siRNA sense strand
guauuggagcccagauuua

SEQ ID NO: 786330 - RNA, 19 nt, Homo sapiens
  misc_RNA (1)...(19): siRNA sense strand
aaauacaucugcauugucu

SEQ ID NO: 786331 - RNA, 19 nt, Homo sapiens
  misc_RNA (1)...(19): siRNA sense strand
ucuuaguccugaugaauaa

SEQ ID NO: 786332 - RNA, 19 nt, Homo sapiens
  misc_RNA (1)...(19): siRNA sense strand
gaauagccuuacuaaacug

SEQ ID NO: 786333 - RNA, 19 nt, Homo sapiens
  misc_RNA (1)...(19): siRNA sense strand
gaaggagcugucacaauug

SEQ ID NO: 786334 - RNA, 19 nt, Homo sapiens
  misc_RNA (1)...(19): siRNA sense strand
ugguauaacuacagacaaa

SEQ ID NO: 786335 - RNA, 19 nt, Homo sapiens
  misc_RNA (1)...(19): siRNA sense strand
ggucugagaacaagcugua

SEQ ID NO: 786336 - RNA, 19 nt, Homo sapiens
  misc_RNA (1)...(19): siRNA sense strand
guauuugucuggguuguau

SEQ ID NO: 786337 - RNA, 19 nt, Homo sapiens
  misc_RNA (1)...(19): siRNA sense strand
gcuguaaaccaaacacuga

SEQ ID NO: 786338 - RNA, 19 nt, Homo sapiens
  misc_RNA (1)...(19): siRNA sense strand
ccaauuugauuaucuuguc

SEQ ID NO: 786339 - RNA, 19 nt, Homo sapiens
  misc_RNA (1)...(19): siRNA sense strand
aaaccucucugucaacaca

SEQ ID NO: 786340 - RNA, 19 nt, Homo sapiens
  misc_RNA (1)...(19): siRNA sense strand
ggaagcauguuuuauagug

SEQ ID NO: 786341 - RNA, 19 nt, Homo sapiens
  misc_RNA (1)...(19): siRNA sense strand
aaacuacuauggcaccaau

SEQ ID NO: 786342 - RNA, 19 nt, Homo sapiens
  misc_RNA (1)...(19): siRNA sense strand
gaggacaacuguggagaca

SEQ ID NO: 786343 - RNA, 19 nt, Homo sapiens
  misc_RNA (1)...(19): siRNA sense strand
gaucuucacagacuagaau

SEQ ID NO: 786344 - RNA, 19 nt, Homo sapiens
  misc_RNA (1)...(19): siRNA sense strand
gaugccaccugaguuaaug

SEQ ID NO: 786345 - RNA, 19 nt, Homo sapiens
  misc_RNA (1)...(19): siRNA sense strand
gaacccaauucucuauacu

SEQ ID NO: 786346 - RNA, 19 nt, Homo sapiens
  misc_RNA (1)...(19): siRNA sense strand
ccacagaaguaucaguuuu

SEQ ID NO: 786347 - RNA, 19 nt, Homo sapiens
  misc_RNA (1)...(19): siRNA sense strand
accaaacacugauggaauu

SEQ ID NO: 786348 - RNA, 19 nt, Homo sapiens
  misc_RNA (1)...(19): siRNA sense strand
cagaagcuguaccugcaaa

SEQ ID NO: 786349 - RNA, 19 nt, Homo sapiens
  misc_RNA (1)...(19): siRNA sense strand
ugaaauacggaaucaaguu

SEQ ID NO: 786350 - RNA, 19 nt, Homo sapiens
  misc_RNA (1)...(19): siRNA sense strand
caagcuguaugccauguca

SEQ ID NO: 786351 - RNA, 19 nt, Homo sapiens
  misc_RNA (1)...(19): siRNA sense strand
augaaucucucucacauau

SEQ ID NO: 786352 - RNA, 19 nt, Homo sapiens
  misc_RNA (1)...(19): siRNA sense strand
ggccgcauuuaucaucaua

SEQ ID NO: 786353 - RNA, 19 nt, Homo sapiens
  misc_RNA (1)...(19): siRNA sense strand
gugggaacaucacaaagug

SEQ ID NO: 786354 - RNA, 19 nt, Homo sapiens
  misc_RNA (1)...(19): siRNA sense strand
caaagugccauaacagcaa

SEQ ID NO: 786355 - RNA, 19 nt, Homo sapiens
  misc_RNA (1)...(19): siRNA sense strand
ucucagucauaacagaaua

SEQ ID NO: 786356 - RNA, 19 nt, Homo sapiens
  misc_RNA (1)...(19): siRNA sense strand
gaccacaagaccauuuaaa

SEQ ID NO: 786357 - RNA, 19 nt, Homo sapiens
  misc_RNA (1)...(19): siRNA sense strand
uauaguggcuuucauucca

SEQ ID NO: 786358 - RNA, 19 nt, Homo sapiens
  misc_RNA (1)...(19): siRNA sense strand
cugauucucauuuggauua

SEQ ID NO: 786359 - RNA, 19 nt, Homo sapiens
  misc_RNA (1)...(19): siRNA sense strand
guuaacauuucugacauug

SEQ ID NO: 786360 - RNA, 19 nt, Homo sapiens
  misc_RNA (1)...(19): siRNA sense strand
uaugccaugucaaucauuu

SEQ ID NO: 786361 - RNA, 19 nt, Homo sapiens
  misc_RNA (1)...(19): siRNA sense strand
aaggagcugucacaauuga

SEQ ID NO: 786362 - RNA, 19 nt, Homo sapiens
  misc_RNA (1)...(19): siRNA sense strand
caacacaugccaagacuac

SEQ ID NO: 786363 - RNA, 19 nt, Homo sapiens
  misc_RNA (1)...(19): siRNA sense strand
ugacugugaugaaaccaau

SEQ ID NO: 786364 - RNA, 19 nt, Homo sapiens
  misc_RNA (1)...(19): siRNA sense strand
caauuacaguucugauucu

SEQ ID NO: 786365 - RNA, 19 nt, Homo sapiens
  misc_RNA (1)...(19): siRNA sense strand
gauggagaguacucauugu

SEQ ID NO: 786366 - RNA, 19 nt, Homo sapiens
  misc_RNA (1)...(19): siRNA sense strand
uuagaccucuuaugaaucu

SEQ ID NO: 786367 - RNA, 19 nt, Homo sapiens
  misc_RNA (1)...(19): siRNA sense strand
cuagaauggcugauaauug

SEQ ID NO: 786368 - RNA, 19 nt, Homo sapiens
  misc_RNA (1)...(19): siRNA sense strand
cuucaaaugugacugcaau

SEQ ID NO: 786369 - RNA, 19 nt, Homo sapiens
  misc_RNA (1)...(19): siRNA sense strand
cauaaccucuuggguagug

SEQ ID NO: 786370 - RNA, 19 nt, Homo sapiens
  misc_RNA (1)...(19): siRNA sense strand
uguaggaucuuuggccauu

SEQ ID NO: 786371 - RNA, 19 nt, Homo sapiens
  misc_RNA (1)...(19): siRNA sense strand
uaaaguuucguggagaaua

SEQ ID NO: 786372 - RNA, 19 nt, Homo sapiens
  misc_RNA (1)...(19): siRNA sense strand
ccuaaaguuucguggagaa

SEQ ID NO: 786373 - RNA, 19 nt, Homo sapiens
  misc_RNA (1)...(19): siRNA sense strand
uuaagaaauuccaguacug

SEQ ID NO: 786374 - RNA, 19 nt, Homo sapiens
  misc_RNA (1)...(19): siRNA sense strand
cugaauagccuuacuaaac

SEQ ID NO: 786375 - RNA, 19 nt, Homo sapiens
  misc_RNA (1)...(19): siRNA sense strand
uuccaucgguuucuucaaa

SEQ ID NO: 786376 - RNA, 19 nt, Homo sapiens
  misc_RNA (1)...(19): siRNA sense strand
cuagaagggauugaaauuu

SEQ ID NO: 786377 - RNA, 19 nt, Homo sapiens
  misc_RNA (1)...(19): siRNA sense strand
ucaagucucucagccuaga

SEQ ID NO: 786378 - RNA, 19 nt, Homo sapiens
  misc_RNA (1)...(19): siRNA sense strand
caacagaguucauugauua

SEQ ID NO: 786379 - RNA, 19 nt, Homo sapiens
  misc_RNA (1)...(19): siRNA sense strand
gcaacagaguucauugauu

SEQ ID NO: 786380 - RNA, 19 nt, Homo sapiens
  misc_RNA (1)...(19): siRNA sense strand
gaaagguuccucaaugaaa

SEQ ID NO: 786381 - RNA, 19 nt, Homo sapiens
  misc_RNA (1)...(19): siRNA sense strand
caugaaagguuccucaaug

SEQ ID NO: 786382 - RNA, 19 nt, Homo sapiens
  misc_RNA (1)...(19): siRNA sense strand
aaacugugcucuuaccauu

SEQ ID NO: 786383 - RNA, 19 nt, Homo sapiens
  misc_RNA (1)...(19): siRNA sense strand
uaaggaaccagaaauauga

SEQ ID NO: 786384 - RNA, 19 nt, Homo sapiens
  misc_RNA (1)...(19): siRNA sense strand
cacauugacuuugcaguua

SEQ ID NO: 786385 - RNA, 19 nt, Homo sapiens
  misc_RNA (1)...(19): siRNA sense strand
ggaaugcugucuucucuac

SEQ ID NO: 786386 - RNA, 19 nt, Homo sapiens
  misc_RNA (1)...(19): siRNA sense strand
gcuacaagguauuucgaaa

SEQ ID NO: 786387 - RNA, 19 nt, Homo sapiens
  misc_RNA (1)...(19): siRNA sense strand
uccagaaacugugcucuua

SEQ ID NO: 786388 - RNA, 19 nt, Homo sapiens
  misc_RNA (1)...(19): siRNA sense strand
cagacacacuugaccauga

SEQ ID NO: 786389 - RNA, 19 nt, Homo sapiens
  misc_RNA (1)...(19): siRNA sense strand
gaagccauauuauucacau

SEQ ID NO: 786390 - RNA, 19 nt, Homo sapiens
  misc_RNA (1)...(19): siRNA sense strand
ggucuggaaugcugucuuc

SEQ ID NO: 786391 - RNA, 19 nt, Homo sapiens
  misc_RNA (1)...(19): siRNA sense strand
cagaguucauugauuauuc

SEQ ID NO: 786392 - RNA, 19 nt, Homo sapiens
  misc_RNA (1)...(19): siRNA sense strand
aaagguuccucaaugaaau

SEQ ID NO: 786393 - RNA, 19 nt, Homo sapiens
  misc_RNA (1)...(19): siRNA sense strand
gccauauuauucacauuga

SEQ ID NO: 786394 - RNA, 19 nt, Homo sapiens
  misc_RNA (1)...(19): siRNA sense strand
aaauugaggcacagauuaa

SEQ ID NO: 786395 - RNA, 19 nt, Homo sapiens
  misc_RNA (1)...(19): siRNA sense strand
agacacacuugaccaugaa

SEQ ID NO: 786396 - RNA, 19 nt, Homo sapiens
  misc_RNA (1)...(19): siRNA sense strand
augaaagguuccucaauga

SEQ ID NO: 786397 - RNA, 19 nt, Homo sapiens
  misc_RNA (1)...(19): siRNA sense strand
acauugacuuugcaguuaa

SEQ ID NO: 786398 - RNA, 19 nt, Homo sapiens
  misc_RNA (1)...(19): siRNA sense strand
ucacauugacuuugcaguu

SEQ ID NO: 786399 - RNA, 19 nt, Homo sapiens
  misc_RNA (1)...(19): siRNA sense strand
gaacagucacaccaugcaa

SEQ ID NO: 786400 - RNA, 19 nt, Homo sapiens
  misc_RNA (1)...(19): siRNA sense strand
ucagaagccauauuauuca

SEQ ID NO: 786401 - RNA, 19 nt, Homo sapiens
  misc_RNA (1)...(19): siRNA sense strand
gaaaauugaggcacagauu

SEQ ID NO: 786402 - RNA, 19 nt, Homo sapiens
  misc_RNA (1)...(19): siRNA sense strand
uuaaggaaccagaaauaug

SEQ ID NO: 786403 - RNA, 19 nt, Homo sapiens
  misc_RNA (1)...(19): siRNA sense strand
guuccucaaugaaauguuc

SEQ ID NO: 786404 - RNA, 19 nt, Homo sapiens
  misc_RNA (1)...(19): siRNA sense strand
gaaccagaaauaugaggau

SEQ ID NO: 786405 - RNA, 19 nt, Homo sapiens
  misc_RNA (1)...(19): siRNA sense strand
aaccagaaauaugaggaua

SEQ ID NO: 786406 - RNA, 19 nt, Homo sapiens
  misc_RNA (1)...(19): siRNA sense strand
gaaacugugcucuuaccau

SEQ ID NO: 786407 - RNA, 19 nt, Homo sapiens
  misc_RNA (1)...(19): siRNA sense strand
ugaaagguuccucaaugaa

SEQ ID NO: 786408 - RNA, 19 nt, Homo sapiens
  misc_RNA (1)...(19): siRNA sense strand
aggcacagauuaaguaacu

SEQ ID NO: 786409 - RNA, 19 nt, Homo sapiens
  misc_RNA (1)...(19): siRNA sense strand
ucuuaaggaaccagaaaua

SEQ ID NO: 786410 - RNA, 19 nt, Homo sapiens
  misc_RNA (1)...(19): siRNA sense strand
ugacuuugcaguuaacuca

SEQ ID NO: 786411 - RNA, 19 nt, Homo sapiens
  misc_RNA (1)...(19): siRNA sense strand
aaugcugucuucucuacuu

SEQ ID NO: 786412 - RNA, 19 nt, Homo sapiens
  misc_RNA (1)...(19): siRNA sense strand
gcugucuucucuacuuauc

SEQ ID NO: 786413 - RNA, 19 nt, Homo sapiens
  misc_RNA (1)...(19): siRNA sense strand
uaugaggauaugcacaaua

SEQ ID NO: 786414 - RNA, 19 nt, Homo sapiens
  misc_RNA (1)...(19): siRNA sense strand
ucacacccuugcagacaca

SEQ ID NO: 786415 - RNA, 19 nt, Homo sapiens
  misc_RNA (1)...(19): siRNA sense strand
uacauccacagaucauaua

SEQ ID NO: 786416 - RNA, 19 nt, Homo sapiens
  misc_RNA (1)...(19): siRNA sense strand
aaaauugaggcacagauua

SEQ ID NO: 786417 - RNA, 19 nt, Homo sapiens
  misc_RNA (1)...(19): siRNA sense strand
ccauucugcuacaagguau

SEQ ID NO: 786418 - RNA, 19 nt, Homo sapiens
  misc_RNA (1)...(19): siRNA sense strand
uucagaagccauauuauuc

SEQ ID NO: 786419 - RNA, 19 nt, Homo sapiens
  misc_RNA (1)...(19): siRNA sense strand
uugaggcacagauuaagua

SEQ ID NO: 786420 - RNA, 19 nt, Homo sapiens
  misc_RNA (1)...(19): siRNA sense strand
ggcaacagaguucauugau

SEQ ID NO: 786421 - RNA, 19 nt, Homo sapiens
  misc_RNA (1)...(19): siRNA sense strand
acagucacaccaugcaauu

SEQ ID NO: 786422 - RNA, 19 nt, Homo sapiens
  misc_RNA (1)...(19): siRNA sense strand
aaaggcaacagaguucauu

SEQ ID NO: 786423 - RNA, 19 nt, Homo sapiens
  misc_RNA (1)...(19): siRNA sense strand
ugaggcacagauuaaguaa

SEQ ID NO: 786424 - RNA, 19 nt, Homo sapiens
  misc_RNA (1)...(19): siRNA sense strand
cuggaaugcugucuucucu

SEQ ID NO: 786425 - RNA, 19 nt, Homo sapiens
  misc_RNA (1)...(19): siRNA sense strand
auacauccacagaucauau

SEQ ID NO: 786426 - RNA, 19 nt, Homo sapiens
  misc_RNA (1)...(19): siRNA sense strand
augcugucuucucuacuua

SEQ ID NO: 786427 - RNA, 19 nt, Homo sapiens
  misc_RNA (1)...(19): siRNA sense strand
aacuauacauccacagauc

SEQ ID NO: 786428 - RNA, 19 nt, Homo sapiens
  misc_RNA (1)...(19): siRNA sense strand
cagaaacugugcucuuacc

SEQ ID NO: 786429 - RNA, 19 nt, Homo sapiens
  misc_RNA (1)...(19): siRNA sense strand
aaacuauacauccacagau

SEQ ID NO: 786430 - RNA, 19 nt, Homo sapiens
  misc_RNA (1)...(19): siRNA sense strand
cuuaaggaaccagaaauau

SEQ ID NO: 786431 - RNA, 19 nt, Homo sapiens
  misc_RNA (1)...(19): siRNA sense strand
guuccucauuaucuucaga

SEQ ID NO: 786432 - RNA, 19 nt, Homo sapiens
  misc_RNA (1)...(19): siRNA sense strand
ccaugaaagguuccucaau

SEQ ID NO: 786433 - RNA, 19 nt, Homo sapiens
  misc_RNA (1)...(19): siRNA sense strand
uaacugaccuggcauauaa

SEQ ID NO: 786434 - RNA, 19 nt, Homo sapiens
  misc_RNA (1)...(19): siRNA sense strand
gcagggauaucacuaaaga

SEQ ID NO: 786435 - RNA, 19 nt, Homo sapiens
  misc_RNA (1)...(19): siRNA sense strand
gcaagaggaucaucaaaca

SEQ ID NO: 786436 - RNA, 19 nt, Homo sapiens
  misc_RNA (1)...(19): siRNA sense strand
gcaauuggguacucauuug

SEQ ID NO: 786437 - RNA, 19 nt, Homo sapiens
  misc_RNA (1)...(19): siRNA sense strand
ggauaucacuaaagaagaa

SEQ ID NO: 786438 - RNA, 19 nt, Homo sapiens
  misc_RNA (1)...(19): siRNA sense strand
gaagauaucauggaacuga

SEQ ID NO: 786439 - RNA, 19 nt, Homo sapiens
  misc_RNA (1)...(19): siRNA sense strand
gcuauuugaugcaugaauu

SEQ ID NO: 786440 - RNA, 19 nt, Homo sapiens
  misc_RNA (1)...(19): siRNA sense strand
cccagaagcuccaacauug

SEQ ID NO: 786441 - RNA, 19 nt, Homo sapiens
  misc_RNA (1)...(19): siRNA sense strand
guagagaggccuaugauuc

SEQ ID NO: 786442 - RNA, 19 nt, Homo sapiens
  misc_RNA (1)...(19): siRNA sense strand
gaaguuauggaaauucuug

SEQ ID NO: 786443 - RNA, 19 nt, Homo sapiens
  misc_RNA (1)...(19): siRNA sense strand
aaacaucacugagggauuc

SEQ ID NO: 786444 - RNA, 19 nt, Homo sapiens
  misc_RNA (1)...(19): siRNA sense strand
ccaaggugaugauccuaaa

SEQ ID NO: 786445 - RNA, 19 nt, Homo sapiens
  misc_RNA (1)...(19): siRNA sense strand
caacaugaagaaaugcuuu

SEQ ID NO: 786446 - RNA, 19 nt, Homo sapiens
  misc_RNA (1)...(19): siRNA sense strand
guacucauuugcaauugug

SEQ ID NO: 786447 - RNA, 19 nt, Homo sapiens
  misc_RNA (1)...(19): siRNA sense strand
ucuaagcaguggugugaaa

SEQ ID NO: 786448 - RNA, 19 nt, Homo sapiens
  misc_RNA (1)...(19): siRNA sense strand
uagaagauaucauggaacu

SEQ ID NO: 786449 - RNA, 19 nt, Homo sapiens
  misc_RNA (1)...(19): siRNA sense strand
gcaguggugugaaauuggu

SEQ ID NO: 786450 - RNA, 19 nt, Homo sapiens
  misc_RNA (1)...(19): siRNA sense strand
caacauugucucacuuuca

SEQ ID NO: 786451 - RNA, 19 nt, Homo sapiens
  misc_RNA (1)...(19): siRNA sense strand
gaaccuuauugcagaugug

SEQ ID NO: 786452 - RNA, 19 nt, Homo sapiens
  misc_RNA (1)...(19): siRNA sense strand
aaacagacuuucgaggaau

SEQ ID NO: 786453 - RNA, 19 nt, Homo sapiens
  misc_RNA (1)...(19): siRNA sense strand
caaauucagcaaagcagaa

SEQ ID NO: 786454 - RNA, 19 nt, Homo sapiens
  misc_RNA (1)...(19): siRNA sense strand
ggccuaugauucugauaau

SEQ ID NO: 786455 - RNA, 19 nt, Homo sapiens
  misc_RNA (1)...(19): siRNA sense strand
gaaacaucacugagggauu

SEQ ID NO: 786456 - RNA, 19 nt, Homo sapiens
  misc_RNA (1)...(19): siRNA sense strand
aagcaguggugugaaauug

SEQ ID NO: 786457 - RNA, 19 nt, Homo sapiens
  misc_RNA (1)...(19): siRNA sense strand
ugaccuggcauauaaucua

SEQ ID NO: 786458 - RNA, 19 nt, Homo sapiens
  misc_RNA (1)...(19): siRNA sense strand
ggaaccuuauugcagaugu

SEQ ID NO: 786459 - RNA, 19 nt, Homo sapiens
  misc_RNA (1)...(19): siRNA sense strand
gaagaaaugcuuuugaagu

SEQ ID NO: 786460 - RNA, 19 nt, Homo sapiens
  misc_RNA (1)...(19): siRNA sense strand
guaagcuguugcagacuuc

SEQ ID NO: 786461 - RNA, 19 nt, Homo sapiens
  misc_RNA (1)...(19): siRNA sense strand
gagaagaaaaggauggaua

SEQ ID NO: 786462 - RNA, 19 nt, Homo sapiens
  misc_RNA (1)...(19): siRNA sense strand
guacaggaaccuuauugca

SEQ ID NO: 786463 - RNA, 19 nt, Homo sapiens
  misc_RNA (1)...(19): siRNA sense strand
gaagguuuaaucaacaugu

SEQ ID NO: 786464 - RNA, 19 nt, Homo sapiens
  misc_RNA (1)...(19): siRNA sense strand
ggcaauuggguacucauuu

SEQ ID NO: 786465 - RNA, 19 nt, Homo sapiens
  misc_RNA (1)...(19): siRNA sense strand
gguccugucugacucucuu

SEQ ID NO: 786466 - RNA, 19 nt, Homo sapiens
  misc_RNA (1)...(19): siRNA sense strand
gaaaugcagggauaucacu

SEQ ID NO: 786467 - RNA, 19 nt, Homo sapiens
  misc_RNA (1)...(19): siRNA sense strand
agggagaaauuccgcaaga

SEQ ID NO: 786468 - RNA, 19 nt, Homo sapiens
  misc_RNA (1)...(19): siRNA sense strand
gguacucauuugcaauugu

SEQ ID NO: 786469 - RNA, 19 nt, Homo sapiens
  misc_RNA (1)...(19): siRNA sense strand
gaccuggcauauaaucuac

SEQ ID NO: 786470 - RNA, 19 nt, Homo sapiens
  misc_RNA (1)...(19): siRNA sense strand
gcuccaacauugucucacu

SEQ ID NO: 786471 - RNA, 19 nt, Homo sapiens
  misc_RNA (1)...(19): siRNA sense strand
gagaggccuaugauucuga

SEQ ID NO: 786472 - RNA, 19 nt, Homo sapiens
  misc_RNA (1)...(19): siRNA sense strand
caucacugagggauucuaa

SEQ ID NO: 786473 - RNA, 19 nt, Homo sapiens
  misc_RNA (1)...(19): siRNA sense strand
auaagcaaauucagcaaag

SEQ ID NO: 786474 - RNA, 19 nt, Homo sapiens
  misc_RNA (1)...(19): siRNA sense strand
uagagaggccuaugauucu

SEQ ID NO: 786475 - RNA, 19 nt, Homo sapiens
  misc_RNA (1)...(19): siRNA sense strand
ccaacauugucucacuuuc

SEQ ID NO: 786476 - RNA, 19 nt, Homo sapiens
  misc_RNA (1)...(19): siRNA sense strand
aaggauggauaaggcaauu

SEQ ID NO: 786477 - RNA, 19 nt, Homo sapiens
  misc_RNA (1)...(19): siRNA sense strand
uaagcaguggugugaaauu

SEQ ID NO: 786478 - RNA, 19 nt, Homo sapiens
  misc_RNA (1)...(19): siRNA sense strand
aguaagcuguugcagacuu

SEQ ID NO: 786479 - RNA, 19 nt, Homo sapiens
  misc_RNA (1)...(19): siRNA sense strand
ucggaagguuuaaucaaca

SEQ ID NO: 786480 - RNA, 19 nt, Homo sapiens
  misc_RNA (1)...(19): siRNA sense strand
gggauaucacuaaagaaga

SEQ ID NO: 786481 - RNA, 19 nt, Homo sapiens
  misc_RNA (1)...(19): siRNA sense strand
aaaacagacuuucgaggaa

SEQ ID NO: 786482 - RNA, 19 nt, Homo sapiens
  misc_RNA (1)...(19): siRNA sense strand
uucugggacuguacaauuu

SEQ ID NO: 786483 - RNA, 19 nt, Homo sapiens
  misc_RNA (1)...(19): siRNA sense strand
ucugcuauuugaugcauga

SEQ ID NO: 786484 - RNA, 19 nt, Homo sapiens
  misc_RNA (1)...(19): siRNA sense strand
uaaggcaauuggguacuca

SEQ ID NO: 786485 - RNA, 19 nt, Homo sapiens
  misc_RNA (1)...(19): siRNA sense strand
gcaaagcagaaugggagaa

SEQ ID NO: 786486 - RNA, 19 nt, Homo sapiens
  misc_RNA (1)...(19): siRNA sense strand
ggguacaggaaccuuauug

SEQ ID NO: 786487 - RNA, 19 nt, Homo sapiens
  misc_RNA (1)...(19): siRNA sense strand
gggagaaauuccgcaagag

SEQ ID NO: 786488 - RNA, 19 nt, Homo sapiens
  misc_RNA (1)...(19): siRNA sense strand
augcagggauaucacuaaa

SEQ ID NO: 786489 - RNA, 19 nt, Homo sapiens
  misc_RNA (1)...(19): siRNA sense strand
ggacuucugggacuguaca

SEQ ID NO: 786490 - RNA, 19 nt, Homo sapiens
  misc_RNA (1)...(19): siRNA sense strand
cuucugggacuguacaauu

SEQ ID NO: 786491 - RNA, 19 nt, Homo sapiens
  misc_RNA (1)...(19): siRNA sense strand
aagcagaaugggagaagaa

SEQ ID NO: 786492 - RNA, 19 nt, Homo sapiens
  misc_RNA (1)...(19): siRNA sense strand
ggauggauaaggcaauugg

SEQ ID NO: 786493 - RNA, 19 nt, Homo sapiens
  misc_RNA (1)...(19): siRNA sense strand
agacuucugugaguguuca

SEQ ID NO: 786494 - RNA, 19 nt, Homo sapiens
  misc_RNA (1)...(19): siRNA sense strand
aagauaucauggaacugaa

SEQ ID NO: 786495 - RNA, 19 nt, Homo sapiens
  misc_RNA (1)...(19): siRNA sense strand
ccagaagcuccaacauugu

SEQ ID NO: 786496 - RNA, 19 nt, Homo sapiens
  misc_RNA (1)...(19): siRNA sense strand
cagcugggaaucucucuuc

SEQ ID NO: 786497 - RNA, 19 nt, Homo sapiens
  misc_RNA (1)...(19): siRNA sense strand
guuggguacaggaaccuua

SEQ ID NO: 786498 - RNA, 19 nt, Homo sapiens
  misc_RNA (1)...(19): siRNA sense strand
ggguacucauuugcaauug

SEQ ID NO: 786499 - RNA, 19 nt, Homo sapiens
  misc_RNA (1)...(19): siRNA sense strand
aaagcagaaugggagaaga

SEQ ID NO: 786500 - RNA, 19 nt, Homo sapiens
  misc_RNA (1)...(19): siRNA sense strand
uaaauccacagcugggaau

SEQ ID NO: 786501 - RNA, 19 nt, Homo sapiens
  misc_RNA (1)...(19): siRNA sense strand
ugacucucuucauccgaaa

SEQ ID NO: 786502 - RNA, 19 nt, Homo sapiens
  misc_RNA (1)...(19): siRNA sense strand
cggaagguuuaaucaacau

SEQ ID NO: 786503 - RNA, 19 nt, Homo sapiens
  misc_RNA (1)...(19): siRNA sense strand
cagaagcuccaacauuguc

SEQ ID NO: 786504 - RNA, 19 nt, Homo sapiens
  misc_RNA (1)...(19): siRNA sense strand
ggucagcggagcucuaaaa

SEQ ID NO: 786505 - RNA, 19 nt, Homo sapiens
  misc_RNA (1)...(19): siRNA sense strand
auaacugaccuggcauaua

SEQ ID NO: 786506 - RNA, 19 nt, Homo sapiens
  misc_RNA (1)...(19): siRNA sense strand
gugaugauccuaaaacaga

SEQ ID NO: 786507 - RNA, 19 nt, Homo sapiens
  misc_RNA (1)...(19): siRNA sense strand
gcguagagaggccuaugau

SEQ ID NO: 786508 - RNA, 19 nt, Homo sapiens
  misc_RNA (1)...(19): siRNA sense strand
caaagcagaaugggagaag

SEQ ID NO: 786509 - RNA, 19 nt, Homo sapiens
  misc_RNA (1)...(19): siRNA sense strand
ucacugagggauucuaaaa

SEQ ID NO: 786510 - RNA, 19 nt, Homo sapiens
  misc_RNA (1)...(19): siRNA sense strand
cuauagaagauaucaugga

SEQ ID NO: 786511 - RNA, 19 nt, Homo sapiens
  misc_RNA (1)...(19): siRNA sense strand
caggaaccuuauugcagau

SEQ ID NO: 786512 - RNA, 19 nt, Homo sapiens
  misc_RNA (1)...(19): siRNA sense strand
gcacaaagcuggcaacaga

SEQ ID NO: 786513 - RNA, 19 nt, Homo sapiens
  misc_RNA (1)...(19): siRNA sense strand
gcaaagaccucaaacaaga

SEQ ID NO: 786514 - RNA, 19 nt, Homo sapiens
  misc_RNA (1)...(19): siRNA sense strand
caacagcacucaaaucaga

SEQ ID NO: 786515 - RNA, 19 nt, Homo sapiens
  misc_RNA (1)...(19): siRNA sense strand
ggagcucgaucaccacuua

SEQ ID NO: 786516 - RNA, 19 nt, Homo sapiens
  misc_RNA (1)...(19): siRNA sense strand
gaggauagcuucaccaucu

SEQ ID NO: 786517 - RNA, 19 nt, Homo sapiens
  misc_RNA (1)...(19): siRNA sense strand
caaaucagacuucaaauug

SEQ ID NO: 786518 - RNA, 19 nt, Homo sapiens
  misc_RNA (1)...(19): siRNA sense strand
gcgaauggcaguaguauuu

SEQ ID NO: 786519 - RNA, 19 nt, Homo sapiens
  misc_RNA (1)...(19): siRNA sense strand
ccaaauagcccaaugaugu

SEQ ID NO: 786520 - RNA, 19 nt, Homo sapiens
  misc_RNA (1)...(19): siRNA sense strand
gcagugaccuggaggauag

SEQ ID NO: 786521 - RNA, 19 nt, Homo sapiens
  misc_RNA (1)...(19): siRNA sense strand
gagcaaagaccucaaacaa

SEQ ID NO: 786522 - RNA, 19 nt, Homo sapiens
  misc_RNA (1)...(19): siRNA sense strand
gcacaggcaugacccaaau

SEQ ID NO: 786523 - RNA, 19 nt, Homo sapiens
  misc_RNA (1)...(19): siRNA sense strand
gcaaacaaccugcagaaga

SEQ ID NO: 786524 - RNA, 19 nt, Homo sapiens
  misc_RNA (1)...(19): siRNA sense strand
ggauauagcagccguaaga

SEQ ID NO: 786525 - RNA, 19 nt, Homo sapiens
  misc_RNA (1)...(19): siRNA sense strand
gcaugagcaucacacauaa

SEQ ID NO: 786526 - RNA, 19 nt, Homo sapiens
  misc_RNA (1)...(19): siRNA sense strand
ugacaugucuccagcagaa

SEQ ID NO: 786527 - RNA, 19 nt, Homo sapiens
  misc_RNA (1)...(19): siRNA sense strand
ggagcuugaugaauuguuu

SEQ ID NO: 786528 - RNA, 19 nt, Homo sapiens
  misc_RNA (1)...(19): siRNA sense strand
gguacaaacuccuuaaaca

SEQ ID NO: 786529 - RNA, 19 nt, Homo sapiens
  misc_RNA (1)...(19): siRNA sense strand
ccaggaauguacaauauga

SEQ ID NO: 786530 - RNA, 19 nt, Homo sapiens
  misc_RNA (1)...(19): siRNA sense strand
gaagaaggagccagaauuc

SEQ ID NO: 786531 - RNA, 19 nt, Homo sapiens
  misc_RNA (1)...(19): siRNA sense strand
gcaggagcuugaugaauug

SEQ ID NO: 786532 - RNA, 19 nt, Homo sapiens
  misc_RNA (1)...(19): siRNA sense strand
caaauaacuuggguacaaa

SEQ ID NO: 786533 - RNA, 19 nt, Homo sapiens
  misc_RNA (1)...(19): siRNA sense strand
ucaaucagcagccaaauaa

SEQ ID NO: 786534 - RNA, 19 nt, Homo sapiens
  misc_RNA (1)...(19): siRNA sense strand
cagaacagcucaaacagau

SEQ ID NO: 786535 - RNA, 19 nt, Homo sapiens
  misc_RNA (1)...(19): siRNA sense strand
gaauaauacucccaauagu

SEQ ID NO: 786536 - RNA, 19 nt, Homo sapiens
  misc_RNA (1)...(19): siRNA sense strand
gaucaggaguggcaagaau

SEQ ID NO: 786537 - RNA, 19 nt, Homo sapiens
  misc_RNA (1)...(19): siRNA sense strand
uggaagccaucaacaauuu

SEQ ID NO: 786538 - RNA, 19 nt, Homo sapiens
  misc_RNA (1)...(19): siRNA sense strand
ggaguggcaagaauuaaua

SEQ ID NO: 786539 - RNA, 19 nt, Homo sapiens
  misc_RNA (1)...(19): siRNA sense strand
caacaaagggccaaacuca

SEQ ID NO: 786540 - RNA, 19 nt, Homo sapiens
  misc_RNA (1)...(19): siRNA sense strand
caaauagcccaaugaugua

SEQ ID NO: 786541 - RNA, 19 nt, Homo sapiens
  misc_RNA (1)...(19): siRNA sense strand
ggcaugagcaucacacaua

SEQ ID NO: 786542 - RNA, 19 nt, Homo sapiens
  misc_RNA (1)...(19): siRNA sense strand
cagaagacaacaaugaaua

SEQ ID NO: 786543 - RNA, 19 nt, Homo sapiens
  misc_RNA (1)...(19): siRNA sense strand
gcacagaacgcaggcauga

SEQ ID NO: 786544 - RNA, 19 nt, Homo sapiens
  misc_RNA (1)...(19): siRNA sense strand
ucaacaauuugcccaguaa

SEQ ID NO: 786545 - RNA, 19 nt, Homo sapiens
  misc_RNA (1)...(19): siRNA sense strand
ugcaggagcuugaugaauu

SEQ ID NO: 786546 - RNA, 19 nt, Homo sapiens
  misc_RNA (1)...(19): siRNA sense strand
cagaaucacaugaauauga

SEQ ID NO: 786547 - RNA, 19 nt, Homo sapiens
  misc_RNA (1)...(19): siRNA sense strand
gaagaucuaaguaagaaug

SEQ ID NO: 786548 - RNA, 19 nt, Homo sapiens
  misc_RNA (1)...(19): siRNA sense strand
gcaaacgaauucgaaagga

SEQ ID NO: 786549 - RNA, 19 nt, Homo sapiens
  misc_RNA (1)...(19): siRNA sense strand
gaauaggacccucccagaa

SEQ ID NO: 786550 - RNA, 19 nt, Homo sapiens
  misc_RNA (1)...(19): siRNA sense strand
guacaaacuccuuaaacaa

SEQ ID NO: 786551 - RNA, 19 nt, Homo sapiens
  misc_RNA (1)...(19): siRNA sense strand
ggcaagaauuaauagauga

SEQ ID NO: 786552 - RNA, 19 nt, Homo sapiens
  misc_RNA (1)...(19): siRNA sense strand
caaacaaccugcagaagac

SEQ ID NO: 786553 - RNA, 19 nt, Homo sapiens
  misc_RNA (1)...(19): siRNA sense strand
caaccaggaauguacaaua

SEQ ID NO: 786554 - RNA, 19 nt, Homo sapiens
  misc_RNA (1)...(19): siRNA sense strand
gagauuaaacuuccuguca

SEQ ID NO: 786555 - RNA, 19 nt, Homo sapiens
  misc_RNA (1)...(19): siRNA sense strand
caacgaagacuuugaagag

SEQ ID NO: 786556 - RNA, 19 nt, Homo sapiens
  misc_RNA (1)...(19): siRNA sense strand
caaaguggcaugagcauca

SEQ ID NO: 786557 - RNA, 19 nt, Homo sapiens
  misc_RNA (1)...(19): siRNA sense strand
gagcagagggccaagaaau

SEQ ID NO: 786558 - RNA, 19 nt, Homo sapiens
  misc_RNA (1)...(19): siRNA sense strand
gaucuaaguaagaauggua

SEQ ID NO: 786559 - RNA, 19 nt, Homo sapiens
  misc_RNA (1)...(19): siRNA sense strand
gcagaacagcucaaacaga

SEQ ID NO: 786560 - RNA, 19 nt, Homo sapiens
  misc_RNA (1)...(19): siRNA sense strand
caacuugaccugaaaccuu

SEQ ID NO: 786561 - RNA, 19 nt, Homo sapiens
  misc_RNA (1)...(19): siRNA sense strand
gaggacuaguggagaauug

SEQ ID NO: 786562 - RNA, 19 nt, Homo sapiens
  misc_RNA (1)...(19): siRNA sense strand
ugacuuauggcaacacuaa

SEQ ID NO: 786563 - RNA, 19 nt, Homo sapiens
  misc_RNA (1)...(19): siRNA sense strand
ugaauaauacucccaauag

SEQ ID NO: 786564 - RNA, 19 nt, Homo sapiens
  misc_RNA (1)...(19): siRNA sense strand
gcacucaaaucagacuuca

SEQ ID NO: 786565 - RNA, 19 nt, Homo sapiens
  misc_RNA (1)...(19): siRNA sense strand
gguaggcucccugagauua

SEQ ID NO: 786566 - RNA, 19 nt, Homo sapiens
  misc_RNA (1)...(19): siRNA sense strand
gcagaauggugcuugugau

SEQ ID NO: 786567 - RNA, 19 nt, Homo sapiens
  misc_RNA (1)...(19): siRNA sense strand
ucaccaacuugaccugaaa

SEQ ID NO: 786568 - RNA, 19 nt, Homo sapiens
  misc_RNA (1)...(19): siRNA sense strand
cuggugaacucagccauua

SEQ ID NO: 786569 - RNA, 19 nt, Homo sapiens
  misc_RNA (1)...(19): siRNA sense strand
gggcacaccugagcgaaga

SEQ ID NO: 786570 - RNA, 19 nt, Homo sapiens
  misc_RNA (1)...(19): siRNA sense strand
cgaugacccuacuugcaua

SEQ ID NO: 786571 - RNA, 19 nt, Homo sapiens
  misc_RNA (1)...(19): siRNA sense strand
gcagagcaaagaccucaaa

SEQ ID NO: 786572 - RNA, 19 nt, Homo sapiens
  misc_RNA (1)...(19): siRNA sense strand
aaacagcacaauauucuga

SEQ ID NO: 786573 - RNA, 19 nt, Homo sapiens
  misc_RNA (1)...(19): siRNA sense strand
gagcaucacacauaaccaa

SEQ ID NO: 786574 - RNA, 19 nt, Homo sapiens
  misc_RNA (1)...(19): siRNA sense strand
gugaauaauacucccaaua

SEQ ID NO: 786575 - RNA, 19 nt, Homo sapiens
  misc_RNA (1)...(19): siRNA sense strand
aaccaggaauguacaauau

SEQ ID NO: 786576 - RNA, 19 nt, Homo sapiens
  misc_RNA (1)...(19): siRNA sense strand
gcacaauauucugacuuau

SEQ ID NO: 786577 - RNA, 19 nt, Homo sapiens
  misc_RNA (1)...(19): siRNA sense strand
aagcuguucucagacauua

SEQ ID NO: 786578 - RNA, 19 nt, Homo sapiens
  misc_RNA (1)...(19): siRNA sense strand
gcaguaguauuugcaucaa

SEQ ID NO: 786579 - RNA, 19 nt, Homo sapiens
  misc_RNA (1)...(19): siRNA sense strand
acaauauucugacuuaugg

SEQ ID NO: 786580 - RNA, 19 nt, Homo sapiens
  misc_RNA (1)...(19): siRNA sense strand
agcacaauauucugacuua

SEQ ID NO: 786581 - RNA, 19 nt, Homo sapiens
  misc_RNA (1)...(19): siRNA sense strand
aaauuggucucccuuagga

SEQ ID NO: 786582 - RNA, 19 nt, Homo sapiens
  misc_RNA (1)...(19): siRNA sense strand
gcagaaacagcaacagcaa

SEQ ID NO: 786583 - RNA, 19 nt, Homo sapiens
  misc_RNA (1)...(19): siRNA sense strand
uggcaagaauuaauagaug

SEQ ID NO: 786584 - RNA, 19 nt, Homo sapiens
  misc_RNA (1)...(19): siRNA sense strand
ucaggaguggcaagaauua

SEQ ID NO: 786585 - RNA, 19 nt, Homo sapiens
  misc_RNA (1)...(19): siRNA sense strand
cuugaugaauuguuuggua

SEQ ID NO: 786586 - RNA, 19 nt, Homo sapiens
  misc_RNA (1)...(19): siRNA sense strand
gcagaaaggagugaugaau

SEQ ID NO: 786587 - RNA, 19 nt, Homo sapiens
  misc_RNA (1)...(19): siRNA sense strand
auaacuaccucccucagaa

SEQ ID NO: 786588 - RNA, 19 nt, Homo sapiens
  misc_RNA (1)...(19): siRNA sense strand
ucaaauuggucucccuuag

SEQ ID NO: 786589 - RNA, 19 nt, Homo sapiens
  misc_RNA (1)...(19): siRNA sense strand
gcagaagacaacaaugaau

SEQ ID NO: 786590 - RNA, 19 nt, Homo sapiens
  misc_RNA (1)...(19): siRNA sense strand
ggacgugucauacaauuac

SEQ ID NO: 786591 - RNA, 19 nt, Homo sapiens
  misc_RNA (1)...(19): siRNA sense strand
gugaguggcuuuggucaga

SEQ ID NO: 786592 - RNA, 19 nt, Homo sapiens
  misc_RNA (1)...(19): siRNA sense strand
gucaaucaguuucaagguu

SEQ ID NO: 786593 - RNA, 19 nt, Homo sapiens
  misc_RNA (1)...(19): siRNA sense strand
guauuugcaucaacaguag

SEQ ID NO: 786594 - RNA, 19 nt, Homo sapiens
  misc_RNA (1)...(19): siRNA sense strand
caggacgugucauacaauu

SEQ ID NO: 786595 - RNA, 19 nt, Homo sapiens
  misc_RNA (1)...(19): siRNA sense strand
gauacccaguggcagcuuu

SEQ ID NO: 786596 - RNA, 19 nt, Homo sapiens
  misc_RNA (1)...(19): siRNA sense strand
gcaggucaaucaguuucaa

SEQ ID NO: 786597 - RNA, 19 nt, Homo sapiens
  misc_RNA (1)...(19): siRNA sense strand
cagcagaacagcucaaaca

SEQ ID NO: 786598 - RNA, 19 nt, Homo sapiens
  misc_RNA (1)...(19): siRNA sense strand
aacaagaaccucucgauga

SEQ ID NO: 786599 - RNA, 19 nt, Homo sapiens
  misc_RNA (1)...(19): siRNA sense strand
gcccagcucugacaugucu

SEQ ID NO: 786600 - RNA, 19 nt, Homo sapiens
  misc_RNA (1)...(19): siRNA sense strand
agaagaaggagccagaauu

SEQ ID NO: 786601 - RNA, 19 nt, Homo sapiens
  misc_RNA (1)...(19): siRNA sense strand
ccaaacucaugcagcagaa

SEQ ID NO: 786602 - RNA, 19 nt, Homo sapiens
  misc_RNA (1)...(19): siRNA sense strand
agauuaaacuuccugucaa

SEQ ID NO: 786603 - RNA, 19 nt, Homo sapiens
  misc_RNA (1)...(19): siRNA sense strand
caaacuccuuaaacaaaca

SEQ ID NO: 786604 - RNA, 19 nt, Homo sapiens
  misc_RNA (1)...(19): siRNA sense strand
gggaucggugugaauaaua

SEQ ID NO: 786605 - RNA, 19 nt, Homo sapiens
  misc_RNA (1)...(19): siRNA sense strand
acucaaaucagacuucaaa

SEQ ID NO: 786606 - RNA, 19 nt, Homo sapiens
  misc_RNA (1)...(19): siRNA sense strand
acaaagggccaaacucaug

SEQ ID NO: 786607 - RNA, 19 nt, Homo sapiens
  misc_RNA (1)...(19): siRNA sense strand
gaaaugguuaucuccugaa

SEQ ID NO: 786608 - RNA, 19 nt, Homo sapiens
  misc_RNA (1)...(19): siRNA sense strand
ggaucggugugaauaauac

SEQ ID NO: 786609 - RNA, 19 nt, Homo sapiens
  misc_RNA (1)...(19): siRNA sense strand
gauuaaacuuccugucaac

SEQ ID NO: 786610 - RNA, 19 nt, Homo sapiens
  misc_RNA (1)...(19): siRNA sense strand
ccucagaaucacaugaaua

SEQ ID NO: 786611 - RNA, 19 nt, Homo sapiens
  misc_RNA (1)...(19): siRNA sense strand
acgaagacuuugaagagaa

SEQ ID NO: 786612 - RNA, 19 nt, Homo sapiens
  misc_RNA (1)...(19): siRNA sense strand
caagauggcucguuaauug

SEQ ID NO: 786613 - RNA, 19 nt, Homo sapiens
  misc_RNA (1)...(19): siRNA sense strand
ggaaagacguuguagauga

SEQ ID NO: 786614 - RNA, 19 nt, Homo sapiens
  misc_RNA (1)...(19): siRNA sense strand
ucaaggaccucuagacuaa

SEQ ID NO: 786615 - RNA, 19 nt, Homo sapiens
  misc_RNA (1)...(19): siRNA sense strand
gaaagacguuguagaugaa

SEQ ID NO: 786616 - RNA, 19 nt, Homo sapiens
  misc_RNA (1)...(19): siRNA sense strand
ggagaaggcugccaaaugg

SEQ ID NO: 786617 - RNA, 19 nt, Homo sapiens
  misc_RNA (1)...(19): siRNA sense strand
gaacggaauccucccuuua

SEQ ID NO: 786618 - RNA, 19 nt, Homo sapiens
  misc_RNA (1)...(19): siRNA sense strand
guacaaagcacuauaucaa

SEQ ID NO: 786619 - RNA, 19 nt, Homo sapiens
  misc_RNA (1)...(19): siRNA sense strand
guuacaagauggcucguua

SEQ ID NO: 786620 - RNA, 19 nt, Homo sapiens
  misc_RNA (1)...(19): siRNA sense strand
gcaauggguucacagaaga

SEQ ID NO: 786621 - RNA, 19 nt, Homo sapiens
  misc_RNA (1)...(19): siRNA sense strand
guacauggcuaucauaacu

SEQ ID NO: 786622 - RNA, 19 nt, Homo sapiens
  misc_RNA (1)...(19): siRNA sense strand
gauuuaugcugcaggauuu

SEQ ID NO: 786623 - RNA, 19 nt, Homo sapiens
  misc_RNA (1)...(19): siRNA sense strand
gggcauguguguucagaaa

SEQ ID NO: 786624 - RNA, 19 nt, Homo sapiens
  misc_RNA (1)...(19): siRNA sense strand
gaucgugaauguccuaugu

SEQ ID NO: 786625 - RNA, 19 nt, Homo sapiens
  misc_RNA (1)...(19): siRNA sense strand
guauuuagccuacgugaaa

SEQ ID NO: 786626 - RNA, 19 nt, Homo sapiens
  misc_RNA (1)...(19): siRNA sense strand
gaagaggaaagacguugua

SEQ ID NO: 786627 - RNA, 19 nt, Homo sapiens
  misc_RNA (1)...(19): siRNA sense strand
acaaagcacuauaucaaga

SEQ ID NO: 786628 - RNA, 19 nt, Homo sapiens
  misc_RNA (1)...(19): siRNA sense strand
gaagucaaaguaauucuga

SEQ ID NO: 786629 - RNA, 19 nt, Homo sapiens
  misc_RNA (1)...(19): siRNA sense strand
ucaguuggcuggugaacaa

SEQ ID NO: 786630 - RNA, 19 nt, Homo sapiens
  misc_RNA (1)...(19): siRNA sense strand
agacuguggugguugaaua

SEQ ID NO: 786631 - RNA, 19 nt, Homo sapiens
  misc_RNA (1)...(19): siRNA sense strand
gaggaaagacguuguagau

SEQ ID NO: 786632 - RNA, 19 nt, Homo sapiens
  misc_RNA (1)...(19): siRNA sense strand
gcauuuagaagcuuuaaga

SEQ ID NO: 786633 - RNA, 19 nt, Homo sapiens
  misc_RNA (1)...(19): siRNA sense strand
aaagacaacugccuauugg

SEQ ID NO: 786634 - RNA, 19 nt, Homo sapiens
  misc_RNA (1)...(19): siRNA sense strand
gggagaaggcugccaaaug

SEQ ID NO: 786635 - RNA, 19 nt, Homo sapiens
  misc_RNA (1)...(19): siRNA sense strand
guucaacacacuagcauuu

SEQ ID NO: 786636 - RNA, 19 nt, Homo sapiens
  misc_RNA (1)...(19): siRNA sense strand
caaagaagaacgugaugga

SEQ ID NO: 786637 - RNA, 19 nt, Homo sapiens
  misc_RNA (1)...(19): siRNA sense strand
caaagaccagcauagcaua

SEQ ID NO: 786638 - RNA, 19 nt, Homo sapiens
  misc_RNA (1)...(19): siRNA sense strand
gauacacagucaguacaaa

SEQ ID NO: 786639 - RNA, 19 nt, Homo sapiens
  misc_RNA (1)...(19): siRNA sense strand
ccuggaauauggagagaaa

SEQ ID NO: 786640 - RNA, 19 nt, Homo sapiens
  misc_RNA (1)...(19): siRNA sense strand
aaucauaugugaacggaau

SEQ ID NO: 786641 - RNA, 19 nt, Homo sapiens
  misc_RNA (1)...(19): siRNA sense strand
ccaaauggaagacaucaga

SEQ ID NO: 786642 - RNA, 19 nt, Homo sapiens
  misc_RNA (1)...(19): siRNA sense strand
ccaaauggcgauagaggaa

SEQ ID NO: 786643 - RNA, 19 nt, Homo sapiens
  misc_RNA (1)...(19): siRNA sense strand
ggauuuaugcugcaggauu

SEQ ID NO: 786644 - RNA, 19 nt, Homo sapiens
  misc_RNA (1)...(19): siRNA sense strand
gcaaaggcaauaagcaaca

SEQ ID NO: 786645 - RNA, 19 nt, Homo sapiens
  misc_RNA (1)...(19): siRNA sense strand
ugaacggaauccucccuuu

SEQ ID NO: 786646 - RNA, 19 nt, Homo sapiens
  misc_RNA (1)...(19): siRNA sense strand
caaaggcaauaagcaacaa

SEQ ID NO: 786647 - RNA, 19 nt, Homo sapiens
  misc_RNA (1)...(19): siRNA sense strand
uggaauauggagagaaaua

SEQ ID NO: 786648 - RNA, 19 nt, Homo sapiens
  misc_RNA (1)...(19): siRNA sense strand
caaggcuacaucagacuua

SEQ ID NO: 786649 - RNA, 19 nt, Homo sapiens
  misc_RNA (1)...(19): siRNA sense strand
caaccauggguauaucuaa

SEQ ID NO: 786650 - RNA, 19 nt, Homo sapiens
  misc_RNA (1)...(19): siRNA sense strand
aaaccaaucaguuacaaga

SEQ ID NO: 786651 - RNA, 19 nt, Homo sapiens
  misc_RNA (1)...(19): siRNA sense strand
gaaauaucgguguguggaa

SEQ ID NO: 786652 - RNA, 19 nt, Homo sapiens
  misc_RNA (1)...(19): siRNA sense strand
guagguuugcuuuguuuaa

SEQ ID NO: 786653 - RNA, 19 nt, Homo sapiens
  misc_RNA (1)...(19): siRNA sense strand
ugaacaaggcuacaucaga

SEQ ID NO: 786654 - RNA, 19 nt, Homo sapiens
  misc_RNA (1)...(19): siRNA sense strand
aaacaaccauggguauauc

SEQ ID NO: 786655 - RNA, 19 nt, Homo sapiens
  misc_RNA (1)...(19): siRNA sense strand
aaauaucgguguguggaaa

SEQ ID NO: 786656 - RNA, 19 nt, Homo sapiens
  misc_RNA (1)...(19): siRNA sense strand
ugaaaccaaucaguuacaa

SEQ ID NO: 786657 - RNA, 19 nt, Homo sapiens
  misc_RNA (1)...(19): siRNA sense strand
gugaauguccuauguguag

SEQ ID NO: 786658 - RNA, 19 nt, Homo sapiens
  misc_RNA (1)...(19): siRNA sense strand
aagaagaacgugauggaaa

SEQ ID NO: 786659 - RNA, 19 nt, Homo sapiens
  misc_RNA (1)...(19): siRNA sense strand
aaacaaagaagaacgugau

SEQ ID NO: 786660 - RNA, 19 nt, Homo sapiens
  misc_RNA (1)...(19): siRNA sense strand
ggcuacaucagacuuauuu

SEQ ID NO: 786661 - RNA, 19 nt, Homo sapiens
  misc_RNA (1)...(19): siRNA sense strand
gcaacaaagaccagcauag

SEQ ID NO: 786662 - RNA, 19 nt, Homo sapiens
  misc_RNA (1)...(19): siRNA sense strand
ccucuguggugcaacauug

SEQ ID NO: 786663 - RNA, 19 nt, Homo sapiens
  misc_RNA (1)...(19): siRNA sense strand
aaccauggguauaucuaaa

SEQ ID NO: 786664 - RNA, 19 nt, Homo sapiens
  misc_RNA (1)...(19): siRNA sense strand
auggauggcuugaccacua

SEQ ID NO: 786665 - RNA, 19 nt, Homo sapiens
  misc_RNA (1)...(19): siRNA sense strand
uaaaagaccuaaggcaaau

SEQ ID NO: 786666 - RNA, 19 nt, Homo sapiens
  misc_RNA (1)...(19): siRNA sense strand
cuaaagcaccaguaaaaua

SEQ ID NO: 786667 - RNA, 19 nt, Homo sapiens
  misc_RNA (1)...(19): siRNA sense strand
uggaaaagaucgugaaugu

SEQ ID NO: 786668 - RNA, 19 nt, Homo sapiens
  misc_RNA (1)...(19): siRNA sense strand
cagaucggcucagcagaga

SEQ ID NO: 786669 - RNA, 19 nt, Homo sapiens
  misc_RNA (1)...(19): siRNA sense strand
caaaguaauucugauacac

SEQ ID NO: 786670 - RNA, 19 nt, Homo sapiens
  misc_RNA (1)...(19): siRNA sense strand
ucaugcagccugucccuuu

SEQ ID NO: 786671 - RNA, 19 nt, Homo sapiens
  misc_RNA (1)...(19): siRNA sense strand
aaguagguuugcuuuguuu

SEQ ID NO: 786672 - RNA, 19 nt, Homo sapiens
  misc_RNA (1)...(19): siRNA sense strand
agaagaacgugauggaaaa

SEQ ID NO: 786673 - RNA, 19 nt, Homo sapiens
  misc_RNA (1)...(19): siRNA sense strand
uggauggcuugaccacuaa

SEQ ID NO: 786674 - RNA, 19 nt, Homo sapiens
  misc_RNA (1)...(19): siRNA sense strand
ggacagauggauggcuuga

SEQ ID NO: 786675 - RNA, 19 nt, Homo sapiens
  misc_RNA (1)...(19): siRNA sense strand
ggaagucaaaguaauucug

SEQ ID NO: 786676 - RNA, 19 nt, Homo sapiens
  misc_RNA (1)...(19): siRNA sense strand
caacaaagaccagcauagc

SEQ ID NO: 786677 - RNA, 19 nt, Homo sapiens
  misc_RNA (1)...(19): siRNA sense strand
cgaccucagugcccuguag

SEQ ID NO: 786678 - RNA, 19 nt, Homo sapiens
  misc_RNA (1)...(19): siRNA sense strand
cuaaugguguucuugugau

SEQ ID NO: 786679 - RNA, 19 nt, Homo sapiens
  misc_RNA (1)...(19): siRNA sense strand
gaaaaucauccaucuaaag

SEQ ID NO: 786680 - RNA, 19 nt, Homo sapiens
  misc_RNA (1)...(19): siRNA sense strand
uaaugguguucuugugaug

SEQ ID NO: 786681 - RNA, 19 nt, Homo sapiens
  misc_RNA (1)...(19): siRNA sense strand
caucuaaagcaccaguaaa

SEQ ID NO: 786682 - RNA, 19 nt, Homo sapiens
  misc_RNA (1)...(19): siRNA sense strand
guuauggcguacugcagaa

SEQ ID NO: 786683 - RNA, 19 nt, Homo sapiens
  misc_RNA (1)...(19): siRNA sense strand
caaagcacuauaucaagau

SEQ ID NO: 786684 - RNA, 19 nt, Homo sapiens
  misc_RNA (1)...(19): siRNA sense strand
cgcaauggguucacagaag

SEQ ID NO: 786685 - RNA, 19 nt, Homo sapiens
  misc_RNA (1)...(19): siRNA sense strand
ccacuaaugguguucuugu

SEQ ID NO: 786686 - RNA, 19 nt, Homo sapiens
  misc_RNA (1)...(19): siRNA sense strand
agaccagcauagcauauca

SEQ ID NO: 786687 - RNA, 19 nt, Homo sapiens
  misc_RNA (1)...(19): siRNA sense strand
guacuccucaggcugcaaa

SEQ ID NO: 786688 - RNA, 19 nt, Homo sapiens
  misc_RNA (1)...(19): siRNA sense strand
ccugcagaaucauauguga

SEQ ID NO: 786689 - RNA, 19 nt, Homo sapiens
  misc_RNA (1)...(19): siRNA sense strand
ucaguacaaagcacuauau

SEQ ID NO: 786690 - RNA, 19 nt, Homo sapiens
  misc_RNA (1)...(19): siRNA sense strand
acaaagaccagcauagcau

SEQ ID NO: 786691 - RNA, 19 nt, Homo sapiens
  misc_RNA (1)...(19): siRNA sense strand
gaaaagacaacugccuauu

SEQ ID NO: 786692 - RNA, 19 nt, Homo sapiens
  misc_RNA (1)...(19): siRNA sense strand
aaacugcggccauguacau

SEQ ID NO: 786693 - RNA, 19 nt, Homo sapiens
  misc_RNA (1)...(19): siRNA sense strand
ucuaaacugcggccaugua

SEQ ID NO: 786694 - RNA, 19 nt, Homo sapiens
  misc_RNA (1)...(19): siRNA sense strand
cuccuaccgugaagcauuu

SEQ ID NO: 786695 - RNA, 19 nt, Homo sapiens
  misc_RNA (1)...(19): siRNA sense strand
agcacuauaucaagauuug

SEQ ID NO: 786696 - RNA, 19 nt, Homo sapiens
  misc_RNA (1)...(19): siRNA sense strand
cucauugucuuaggcuaua

SEQ ID NO: 786697 - RNA, 19 nt, Homo sapiens
  misc_RNA (1)...(19): siRNA sense strand
gugguugaauauacucaug

SEQ ID NO: 786698 - RNA, 19 nt, Homo sapiens
  misc_RNA (1)...(19): siRNA sense strand
ccuggaagucaaaguaauu

SEQ ID NO: 786699 - RNA, 19 nt, Homo sapiens
  misc_RNA (1)...(19): siRNA sense strand
gaugugaagcuggauuuua

SEQ ID NO: 786700 - RNA, 19 nt, Homo sapiens
  misc_RNA (1)...(19): siRNA sense strand
accaaucaguuacaagaug

SEQ ID NO: 786701 - RNA, 19 nt, Homo sapiens
  misc_RNA (1)...(19): siRNA sense strand
ccaucuaaagcaccaguaa

SEQ ID NO: 786702 - RNA, 19 nt, Homo sapiens
  misc_RNA (1)...(19): siRNA sense strand
uaucauaacuggggaaaca

SEQ ID NO: 786703 - RNA, 19 nt, Homo sapiens
  misc_RNA (1)...(19): siRNA sense strand
gaagcuuuaagacaggaaa

SEQ ID NO: 786704 - RNA, 19 nt, Homo sapiens
  misc_RNA (1)...(19): siRNA sense strand
ugaccucuguggugcaaca

SEQ ID NO: 786705 - RNA, 19 nt, Homo sapiens
  misc_RNA (1)...(19): siRNA sense strand
ugaaagccccauugauuuu

SEQ ID NO: 786706 - RNA, 19 nt, Homo sapiens
  misc_RNA (1)...(19): siRNA sense strand
ccacacuccuaccgugaag

SEQ ID NO: 786707 - RNA, 19 nt, Homo sapiens
  misc_RNA (1)...(19): siRNA sense strand
gaaaccaaucaguuacaag

SEQ ID NO: 786708 - RNA, 19 nt, Homo sapiens
  misc_RNA (1)...(19): siRNA sense strand
ccccauugauuuuguagua

SEQ ID NO: 786709 - RNA, 19 nt, Homo sapiens
  misc_RNA (1)...(19): siRNA sense strand
ucaagaaaaucauccaucu

SEQ ID NO: 786710 - RNA, 19 nt, Homo sapiens
  misc_RNA (1)...(19): siRNA sense strand
aaagaagaacgugauggaa

SEQ ID NO: 786711 - RNA, 19 nt, Homo sapiens
  misc_RNA (1)...(19): siRNA sense strand
ggugaacaaggcuacauca

SEQ ID NO: 786712 - RNA, 19 nt, Homo sapiens
  misc_RNA (1)...(19): siRNA sense strand
ggaacuggaucuagacaaa

SEQ ID NO: 786713 - RNA, 19 nt, Homo sapiens
  misc_RNA (1)...(19): siRNA sense strand
gaaaaccucuucaugcuuu

SEQ ID NO: 786714 - RNA, 19 nt, Homo sapiens
  misc_RNA (1)...(19): siRNA sense strand
cuagaacaaugaacccuua

SEQ ID NO: 786715 - RNA, 19 nt, Homo sapiens
  misc_RNA (1)...(19): siRNA sense strand
gcaagaucaucauucugua

SEQ ID NO: 786716 - RNA, 19 nt, Homo sapiens
  misc_RNA (1)...(19): siRNA sense strand
gaacaaugaacccuuauuc

SEQ ID NO: 786717 - RNA, 19 nt, Homo sapiens
  misc_RNA (1)...(19): siRNA sense strand
gcaacucugucuagaacaa

SEQ ID NO: 786718 - RNA, 19 nt, Homo sapiens
  misc_RNA (1)...(19): siRNA sense strand
gcaagggccugcagaucau

SEQ ID NO: 786719 - RNA, 19 nt, Homo sapiens
  misc_RNA (1)...(19): siRNA sense strand
gagaagcucgaagagauua

SEQ ID NO: 786720 - RNA, 19 nt, Homo sapiens
  misc_RNA (1)...(19): siRNA sense strand
agucuuagcucagaaauuc

SEQ ID NO: 786721 - RNA, 19 nt, Homo sapiens
  misc_RNA (1)...(19): siRNA sense strand
gcccugagcaguucauaaa

SEQ ID NO: 786722 - RNA, 19 nt, Homo sapiens
  misc_RNA (1)...(19): siRNA sense strand
ccaaguugcuucccucucu

SEQ ID NO: 786723 - RNA, 19 nt, Homo sapiens
  misc_RNA (1)...(19): siRNA sense strand
gcuuacaguuacccaauug

SEQ ID NO: 786724 - RNA, 19 nt, Homo sapiens
  misc_RNA (1)...(19): siRNA sense strand
acaaagggccagugaagaa

SEQ ID NO: 786725 - RNA, 19 nt, Homo sapiens
  misc_RNA (1)...(19): siRNA sense strand
gcucgaagagauuaagaaa

SEQ ID NO: 786726 - RNA, 19 nt, Homo sapiens
  misc_RNA (1)...(19): siRNA sense strand
cugagaagcucgaagagau

SEQ ID NO: 786727 - RNA, 19 nt, Homo sapiens
  misc_RNA (1)...(19): siRNA sense strand
cagcugaucauccaaguug

SEQ ID NO: 786728 - RNA, 19 nt, Homo sapiens
  misc_RNA (1)...(19): siRNA sense strand
gaaggacugauuacugguu

SEQ ID NO: 786729 - RNA, 19 nt, Homo sapiens
  misc_RNA (1)...(19): siRNA sense strand
ggaccaaugggaaaggaaa

SEQ ID NO: 786730 - RNA, 19 nt, Homo sapiens
  misc_RNA (1)...(19): siRNA sense strand
gaacccuuauucaaaugau

SEQ ID NO: 786731 - RNA, 19 nt, Homo sapiens
  misc_RNA (1)...(19): siRNA sense strand
gguaacaguaugacuaaau

SEQ ID NO: 786732 - RNA, 19 nt, Homo sapiens
  misc_RNA (1)...(19): siRNA sense strand
guaugacgaugaugaaagg

SEQ ID NO: 786733 - RNA, 19 nt, Homo sapiens
  misc_RNA (1)...(19): siRNA sense strand
ggcaagaucaucauucugu

SEQ ID NO: 786734 - RNA, 19 nt, Homo sapiens
  misc_RNA (1)...(19): siRNA sense strand
ccuaccagcugagaauaaa

SEQ ID NO: 786735 - RNA, 19 nt, Homo sapiens
  misc_RNA (1)...(19): siRNA sense strand
uaccagcagugccacauug

SEQ ID NO: 786736 - RNA, 19 nt, Homo sapiens
  misc_RNA (1)...(19): siRNA sense strand
gacuaaauauacugagaag

SEQ ID NO: 786737 - RNA, 19 nt, Homo sapiens
  misc_RNA (1)...(19): siRNA sense strand
caaagggccagugaagaaa

SEQ ID NO: 786738 - RNA, 19 nt, Homo sapiens
  misc_RNA (1)...(19): siRNA sense strand
caaugauucugcagcuuca

SEQ ID NO: 786739 - RNA, 19 nt, Homo sapiens
  misc_RNA (1)...(19): siRNA sense strand
ccugagcaguucauaaaca

SEQ ID NO: 786740 - RNA, 19 nt, Homo sapiens
  misc_RNA (1)...(19): siRNA sense strand
gugcgagcguggauuugaa

SEQ ID NO: 786741 - RNA, 19 nt, Homo sapiens
  misc_RNA (1)...(19): siRNA sense strand
uaccacagaacccaagaua

SEQ ID NO: 786742 - RNA, 19 nt, Homo sapiens
  misc_RNA (1)...(19): siRNA sense strand
augaaaggcuggccaguca

SEQ ID NO: 786743 - RNA, 19 nt, Homo sapiens
  misc_RNA (1)...(19): siRNA sense strand
caagaucaucauucuguau

SEQ ID NO: 786744 - RNA, 19 nt, Homo sapiens
  misc_RNA (1)...(19): siRNA sense strand
agugacagcugaggagauu

SEQ ID NO: 786745 - RNA, 19 nt, Homo sapiens
  misc_RNA (1)...(19): siRNA sense strand
gaucauccuagccgacuga

SEQ ID NO: 786746 - RNA, 19 nt, Homo sapiens
  misc_RNA (1)...(19): siRNA sense strand
gagcuuacaguuacccaau

SEQ ID NO: 786747 - RNA, 19 nt, Homo sapiens
  misc_RNA (1)...(19): siRNA sense strand
cagcagugccacauuguug

SEQ ID NO: 786748 - RNA, 19 nt, Homo sapiens
  misc_RNA (1)...(19): siRNA sense strand
aacccaagauaccagcaua

SEQ ID NO: 786749 - RNA, 19 nt, Homo sapiens
  misc_RNA (1)...(19): siRNA sense strand
uucaaaggcuggaagacaa

SEQ ID NO: 786750 - RNA, 19 nt, Homo sapiens
  misc_RNA (1)...(19): siRNA sense strand
aggcaaacccuggaaguaa

SEQ ID NO: 786751 - RNA, 19 nt, Homo sapiens
  misc_RNA (1)...(19): siRNA sense strand
ccacauuguuggagcuuac

SEQ ID NO: 786752 - RNA, 19 nt, Homo sapiens
  misc_RNA (1)...(19): siRNA sense strand
cuaaauauacugagaagcu

SEQ ID NO: 786753 - RNA, 19 nt, Homo sapiens
  misc_RNA (1)...(19): siRNA sense strand
cugagcaguucauaaacaa

SEQ ID NO: 786754 - RNA, 19 nt, Homo sapiens
  misc_RNA (1)...(19): siRNA sense strand
ugaaaaggauaccacagaa

SEQ ID NO: 786755 - RNA, 19 nt, Homo sapiens
  misc_RNA (1)...(19): siRNA sense strand
gacaaagggccagugaaga

SEQ ID NO: 786756 - RNA, 19 nt, Homo sapiens
  misc_RNA (1)...(19): siRNA sense strand
gacaaugauucugcagcuu

SEQ ID NO: 786757 - RNA, 19 nt, Homo sapiens
  misc_RNA (1)...(19): siRNA sense strand
uaccaaagacaaaccuuau

SEQ ID NO: 786758 - RNA, 19 nt, Homo sapiens
  misc_RNA (1)...(19): siRNA sense strand
caagacuggacacugguaa

SEQ ID NO: 786759 - RNA, 19 nt, Homo sapiens
  misc_RNA (1)...(19): siRNA sense strand
auaccaaagacaaaccuua

SEQ ID NO: 786760 - RNA, 19 nt, Homo sapiens
  misc_RNA (1)...(19): siRNA sense strand
ugagaagcucgaagagauu

SEQ ID NO: 786761 - RNA, 19 nt, Homo sapiens
  misc_RNA (1)...(19): siRNA sense strand
gcccgaagcgcucagaauc

SEQ ID NO: 786762 - RNA, 19 nt, Homo sapiens
  misc_RNA (1)...(19): siRNA sense strand
caugugcgagcguggauuu

SEQ ID NO: 786763 - RNA, 19 nt, Homo sapiens
  misc_RNA (1)...(19): siRNA sense strand
ccacagaacccaagauacc

SEQ ID NO: 786764 - RNA, 19 nt, Homo sapiens
  misc_RNA (1)...(19): siRNA sense strand
agacaaagggccagugaag

SEQ ID NO: 786765 - RNA, 19 nt, Homo sapiens
  misc_RNA (1)...(19): siRNA sense strand
gaacuggaucuagacaaag

SEQ ID NO: 786766 - RNA, 19 nt, Homo sapiens
  misc_RNA (1)...(19): siRNA sense strand
uugcuucccucucugauca

SEQ ID NO: 786767 - RNA, 19 nt, Homo sapiens
  misc_RNA (1)...(19): siRNA sense strand
aagaugagcuuuucaagag

SEQ ID NO: 786768 - RNA, 19 nt, Homo sapiens
  misc_RNA (1)...(19): siRNA sense strand
gagcaagggccugcagauc

SEQ ID NO: 786769 - RNA, 19 nt, Homo sapiens
  misc_RNA (1)...(19): siRNA sense strand
gaaacgauccagccccaaa

SEQ ID NO: 786770 - RNA, 19 nt, Homo sapiens
  misc_RNA (1)...(19): siRNA sense strand
gaacccugaguaucugaug

SEQ ID NO: 786771 - RNA, 19 nt, Homo sapiens
  misc_RNA (1)...(19): siRNA sense strand
gcccauggcaagaucauca

SEQ ID NO: 786772 - RNA, 19 nt, Homo sapiens
  misc_RNA (1)...(19): siRNA sense strand
uguuggagcuuacaguuac

SEQ ID NO: 786773 - RNA, 19 nt, Homo sapiens
  misc_RNA (1)...(19): siRNA sense strand
ccaauugcaacucugucua

SEQ ID NO: 786774 - RNA, 19 nt, Homo sapiens
  misc_RNA (1)...(19): siRNA sense strand
ugacagcugaggagauuca

SEQ ID NO: 786775 - RNA, 19 nt, Homo sapiens
  misc_RNA (1)...(19): siRNA sense strand
auacugagaagcucgaaga

SEQ ID NO: 786776 - RNA, 19 nt, Homo sapiens
  misc_RNA (1)...(19): siRNA sense strand
caauugcaacucugucuag

SEQ ID NO: 786777 - RNA, 19 nt, Homo sapiens
  misc_RNA (1)...(19): siRNA sense strand
cagcugaggagauucaaag

SEQ ID NO: 786778 - RNA, 19 nt, Homo sapiens
  misc_RNA (1)...(19): siRNA sense strand
cagcauaucaaaucaagac

SEQ ID NO: 786779 - RNA, 19 nt, Homo sapiens
  misc_RNA (1)...(19): siRNA sense strand
ggagcaagggccugcagau

SEQ ID NO: 786780 - RNA, 19 nt, Homo sapiens
  misc_RNA (1)...(19): siRNA sense strand
auaccagcauaucaaauca

SEQ ID NO: 786781 - RNA, 19 nt, Homo sapiens
  misc_RNA (1)...(19): siRNA sense strand
gcuggaagacaaugauucu

SEQ ID NO: 786782 - RNA, 19 nt, Homo sapiens
  misc_RNA (1)...(19): siRNA sense strand
uugcaacucugucuagaac

SEQ ID NO: 786783 - RNA, 19 nt, Homo sapiens
  misc_RNA (1)...(19): siRNA sense strand
gccacauuguuggagcuua

SEQ ID NO: 786784 - RNA, 19 nt, Homo sapiens
  misc_RNA (1)...(19): siRNA sense strand
gcagugccacauuguugga

SEQ ID NO: 786785 - RNA, 19 nt, Homo sapiens
  misc_RNA (1)...(19): siRNA sense strand
gaugugcgugauagagauu

SEQ ID NO: 786786 - RNA, 19 nt, Homo sapiens
  misc_RNA (1)...(19): siRNA sense strand
uccagccgcucaacucuuc

SEQ ID NO: 786787 - RNA, 19 nt, Homo sapiens
  misc_RNA (1)...(19): siRNA sense strand
gaacccaagauaccagcau

SEQ ID NO: 786788 - RNA, 19 nt, Homo sapiens
  misc_RNA (1)...(19): siRNA sense strand
caaggcaaacccuggaagu

SEQ ID NO: 786789 - RNA, 19 nt, Homo sapiens
  misc_RNA (1)...(19): siRNA sense strand
uagaugugcgugauagaga

SEQ ID NO: 786790 - RNA, 19 nt, Homo sapiens
  misc_RNA (1)...(19): siRNA sense strand
gacaaaccuuauccugacu

SEQ ID NO: 786791 - RNA, 19 nt, Homo sapiens
  misc_RNA (1)...(19): siRNA sense strand
cuagacaaagggccaguga

SEQ ID NO: 786792 - RNA, 19 nt, Homo sapiens
  misc_RNA (1)...(19): siRNA sense strand
ucaagacuggacacuggua

SEQ ID NO: 786793 - RNA, 19 nt, Homo sapiens
  misc_RNA (1)...(19): siRNA sense strand
cugguaacaguaugacuaa

SEQ ID NO: 786794 - RNA, 19 nt, Homo sapiens
  misc_RNA (1)...(19): siRNA sense strand
uaccagcugagaauaaaug

SEQ ID NO: 786795 - RNA, 19 nt, Homo sapiens
  misc_RNA (1)...(19): siRNA sense strand
cgacugaaccaagcuaacu

SEQ ID NO: 786796 - RNA, 19 nt, Homo sapiens
  misc_RNA (1)...(19): siRNA sense strand
ucaaaggcuggaagacaau

SEQ ID NO: 786797 - RNA, 19 nt, Homo sapiens
  misc_RNA (1)...(19): siRNA sense strand
aaggcaaacccuggaagua

SEQ ID NO: 786798 - RNA, 19 nt, Homo sapiens
  misc_RNA (1)...(19): siRNA sense strand
gcuaacuccuccggaagag

SEQ ID NO: 786799 - RNA, 19 nt, Homo sapiens
  misc_RNA (1)...(19): siRNA sense strand
gaagcucgaagagauuaag

SEQ ID NO: 786800 - RNA, 19 nt, Homo sapiens
  misc_RNA (1)...(19): siRNA sense strand
cugaguaucugaugaaaag

SEQ ID NO: 786801 - RNA, 19 nt, Homo sapiens
  misc_RNA (1)...(19): siRNA sense strand
gcugcuagaugugcgugau

SEQ ID NO: 786802 - RNA, 19 nt, Homo sapiens
  misc_RNA (1)...(19): siRNA sense strand
ccaaagacaaaccuuaucc

SEQ ID NO: 786803 - RNA, 19 nt, Homo sapiens
  misc_RNA (1)...(19): siRNA sense strand
caggaccaaugggaaagga

SEQ ID NO: 786804 - RNA, 19 nt, Homo sapiens
  misc_RNA (1)...(19): siRNA sense strand
gaaagucccucugcaauug

SEQ ID NO: 786805 - RNA, 19 nt, Homo sapiens
  misc_RNA (1)...(19): siRNA sense strand
ggaaacagcugagcaugaa

SEQ ID NO: 786806 - RNA, 19 nt, Homo sapiens
  misc_RNA (1)...(19): siRNA sense strand
gcagucuuccuuauuauua

SEQ ID NO: 786807 - RNA, 19 nt, Homo sapiens
  misc_RNA (1)...(19): siRNA sense strand
ggaauggccugcucaugga

SEQ ID NO: 786808 - RNA, 19 nt, Homo sapiens
  misc_RNA (1)...(19): siRNA sense strand
ggaauccuguuucucauca

SEQ ID NO: 786809 - RNA, 19 nt, Homo sapiens
  misc_RNA (1)...(19): siRNA sense strand
ugacugggcugcuggaaug

SEQ ID NO: 786810 - RNA, 19 nt, Homo sapiens
  misc_RNA (1)...(19): siRNA sense strand
acagggagcuacagucaaa

SEQ ID NO: 786811 - RNA, 19 nt, Homo sapiens
  misc_RNA (1)...(19): siRNA sense strand
ggaaugccguacuuggaaa

SEQ ID NO: 786812 - RNA, 19 nt, Homo sapiens
  misc_RNA (1)...(19): siRNA sense strand
caacaccguucgaccauca

SEQ ID NO: 786813 - RNA, 19 nt, Homo sapiens
  misc_RNA (1)...(19): siRNA sense strand
gaaggaagcaagaaagaca

SEQ ID NO: 786814 - RNA, 19 nt, Homo sapiens
  misc_RNA (1)...(19): siRNA sense strand
ucggcagucuuccuuauua

SEQ ID NO: 786815 - RNA, 19 nt, Homo sapiens
  misc_RNA (1)...(19): siRNA sense strand
gcagauugggaaccuauuu

SEQ ID NO: 786816 - RNA, 19 nt, Homo sapiens
  misc_RNA (1)...(19): siRNA sense strand
caucaucacucuguacaau

SEQ ID NO: 786817 - RNA, 19 nt, Homo sapiens
  misc_RNA (1)...(19): siRNA sense strand
ggaauggcaccacaaagga

SEQ ID NO: 786818 - RNA, 19 nt, Homo sapiens
  misc_RNA (1)...(19): siRNA sense strand
caucuucacccucaucaaa

SEQ ID NO: 786819 - RNA, 19 nt, Homo sapiens
  misc_RNA (1)...(19): siRNA sense strand
gaaggaaacagcugagcau

SEQ ID NO: 786820 - RNA, 19 nt, Homo sapiens
  misc_RNA (1)...(19): siRNA sense strand
gaaccuauuuggccaacac

SEQ ID NO: 786821 - RNA, 19 nt, Homo sapiens
  misc_RNA (1)...(19): siRNA sense strand
ccacaaaggaagagaagga

SEQ ID NO: 786822 - RNA, 19 nt, Homo sapiens
  misc_RNA (1)...(19): siRNA sense strand
gcauguagcacgcacuuuc

SEQ ID NO: 786823 - RNA, 19 nt, Homo sapiens
  misc_RNA (1)...(19): siRNA sense strand
gaagcaagaaagacagguu

SEQ ID NO: 786824 - RNA, 19 nt, Homo sapiens
  misc_RNA (1)...(19): siRNA sense strand
gaauggcaccacaaaggaa

SEQ ID NO: 786825 - RNA, 19 nt, Homo sapiens
  misc_RNA (1)...(19): siRNA sense strand
gggaaugccguacuuggaa

SEQ ID NO: 786826 - RNA, 19 nt, Homo sapiens
  misc_RNA (1)...(19): siRNA sense strand
gaacaacuucaugacauuc

SEQ ID NO: 786827 - RNA, 19 nt, Homo sapiens
  misc_RNA (1)...(19): siRNA sense strand
ggcacuaccucuucauugg

SEQ ID NO: 786828 - RNA, 19 nt, Homo sapiens
  misc_RNA (1)...(19): siRNA sense strand
aaacagggagcuacaguca

SEQ ID NO: 786829 - RNA, 19 nt, Homo sapiens
  misc_RNA (1)...(19): siRNA sense strand
agaaagucccucugcaauu

SEQ ID NO: 786830 - RNA, 19 nt, Homo sapiens
  misc_RNA (1)...(19): siRNA sense strand
ggccuucacuaguguuugu

SEQ ID NO: 786831 - RNA, 19 nt, Homo sapiens
  misc_RNA (1)...(19): siRNA sense strand
gcucauggaccggcuuaaa

SEQ ID NO: 786832 - RNA, 19 nt, Homo sapiens
  misc_RNA (1)...(19): siRNA sense strand
gucagcaccuacacaaaug

SEQ ID NO: 786833 - RNA, 19 nt, Homo sapiens
  misc_RNA (1)...(19): siRNA sense strand
aaagaaagucccucugcaa

SEQ ID NO: 786834 - RNA, 19 nt, Homo sapiens
  misc_RNA (1)...(19): siRNA sense strand
cgaccaucaucacucugua

SEQ ID NO: 786835 - RNA, 19 nt, Homo sapiens
  misc_RNA (1)...(19): siRNA sense strand
uaucgggaaugccguacuu

SEQ ID NO: 786836 - RNA, 19 nt, Homo sapiens
  misc_RNA (1)...(19): siRNA sense strand
gcacuuuggcaagcucuuu

SEQ ID NO: 786837 - RNA, 19 nt, Homo sapiens
  misc_RNA (1)...(19): siRNA sense strand
gggaauggcaccacaaagg

SEQ ID NO: 786838 - RNA, 19 nt, Homo sapiens
  misc_RNA (1)...(19): siRNA sense strand
cagaaggaagcaagaaaga

SEQ ID NO: 786839 - RNA, 19 nt, Homo sapiens
  misc_RNA (1)...(19): siRNA sense strand
uuaaacagaaguaccagaa

SEQ ID NO: 786840 - RNA, 19 nt, Homo sapiens
  misc_RNA (1)...(19): siRNA sense strand
gagguucucacucaucuuc

SEQ ID NO: 786841 - RNA, 19 nt, Homo sapiens
  misc_RNA (1)...(19): siRNA sense strand
guucaugcuugccauucuu

SEQ ID NO: 786842 - RNA, 19 nt, Homo sapiens
  misc_RNA (1)...(19): siRNA sense strand
agacagguuccuccacuuu

SEQ ID NO: 786843 - RNA, 19 nt, Homo sapiens
  misc_RNA (1)...(19): siRNA sense strand
uggcuggccuucacuagug

SEQ ID NO: 786844 - RNA, 19 nt, Homo sapiens
  misc_RNA (1)...(19): siRNA sense strand
ugcaguaccuggcauguag

SEQ ID NO: 786845 - RNA, 19 nt, Homo sapiens
  misc_RNA (1)...(19): siRNA sense strand
gcaccacaaaggaagagaa

SEQ ID NO: 786846 - RNA, 19 nt, Homo sapiens
  misc_RNA (1)...(19): siRNA sense strand
gguccuucaugaacaacuu

SEQ ID NO: 786847 - RNA, 19 nt, Homo sapiens
  misc_RNA (1)...(19): siRNA sense strand
ucacuaguguuugucuuca

SEQ ID NO: 786848 - RNA, 19 nt, Homo sapiens
  misc_RNA (1)...(19): siRNA sense strand
gcacgagucagcaccuaca

SEQ ID NO: 786849 - RNA, 19 nt, Homo sapiens
  misc_RNA (1)...(19): siRNA sense strand
gaaacagcugagcaugaaa

SEQ ID NO: 786850 - RNA, 19 nt, Homo sapiens
  misc_RNA (1)...(19): siRNA sense strand
ucaucacucuguacaaugg

SEQ ID NO: 786851 - RNA, 19 nt, Homo sapiens
  misc_RNA (1)...(19): siRNA sense strand
ugccguacuuggaaagaaa

SEQ ID NO: 786852 - RNA, 19 nt, Homo sapiens
  misc_RNA (1)...(19): siRNA sense strand
uggaccggcuuaaacagaa

SEQ ID NO: 786853 - RNA, 19 nt, Homo sapiens
  misc_RNA (1)...(19): siRNA sense strand
ugauacaguuguggcacua

SEQ ID NO: 786854 - RNA, 19 nt, Homo sapiens
  misc_RNA (1)...(19): siRNA sense strand
caaaggaagagaaggaaac

SEQ ID NO: 786855 - RNA, 19 nt, Homo sapiens
  misc_RNA (1)...(19): siRNA sense strand
ccucggcagucuuccuuau

SEQ ID NO: 786856 - RNA, 19 nt, Homo sapiens
  misc_RNA (1)...(19): siRNA sense strand
cauccucccucuccaguac

SEQ ID NO: 786857 - RNA, 19 nt, Homo sapiens
  misc_RNA (1)...(19): siRNA sense strand
cgagucagcaccuacacaa

SEQ ID NO: 786858 - RNA, 19 nt, Homo sapiens
  misc_RNA (1)...(19): siRNA sense strand
ccucagggccuccuucauc

SEQ ID NO: 786859 - RNA, 19 nt, Homo sapiens
  misc_RNA (1)...(19): siRNA sense strand
gcacgccucauagccauau

SEQ ID NO: 786860 - RNA, 19 nt, Homo sapiens
  misc_RNA (1)...(19): siRNA sense strand
uuacgugaaugugauguuc

SEQ ID NO: 786861 - RNA, 19 nt, Homo sapiens
  misc_RNA (1)...(19): siRNA sense strand
cggcagucuuccuuauuau

SEQ ID NO: 786862 - RNA, 19 nt, Homo sapiens
  misc_RNA (1)...(19): siRNA sense strand
guucgaccaucaucacucu

SEQ ID NO: 786863 - RNA, 19 nt, Homo sapiens
  misc_RNA (1)...(19): siRNA sense strand
ggaccggcuuaaacagaag

SEQ ID NO: 786864 - RNA, 19 nt, Homo sapiens
  misc_RNA (1)...(19): siRNA sense strand
gacagguuccuccacuuug

SEQ ID NO: 786865 - RNA, 19 nt, Homo sapiens
  misc_RNA (1)...(19): siRNA sense strand
ccagaaggaagcaagaaag

SEQ ID NO: 786866 - RNA, 19 nt, Homo sapiens
  misc_RNA (1)...(19): siRNA sense strand
cagauugggaaccuauuug

SEQ ID NO: 786867 - RNA, 19 nt, Homo sapiens
  misc_RNA (1)...(19): siRNA sense strand
aagaaagucccucugcaau

SEQ ID NO: 786868 - RNA, 19 nt, Homo sapiens
  misc_RNA (1)...(19): siRNA sense strand
ccacuggcuacaucuuuga

SEQ ID NO: 786869 - RNA, 19 nt, Homo sapiens
  misc_RNA (1)...(19): siRNA sense strand
ggcagucuuccuuauuauu

SEQ ID NO: 786870 - RNA, 19 nt, Homo sapiens
  misc_RNA (1)...(19): siRNA sense strand
cccacuggcuacaucuuug

SEQ ID NO: 786871 - RNA, 19 nt, Homo sapiens
  misc_RNA (1)...(19): siRNA sense strand
ccauucuucugacauucuu

SEQ ID NO: 786872 - RNA, 19 nt, Homo sapiens
  misc_RNA (1)...(19): siRNA sense strand
cagccgcuccuuccucuau

SEQ ID NO: 786873 - RNA, 19 nt, Homo sapiens
  misc_RNA (1)...(19): siRNA sense strand
ucaacuccuugcugaccaa

SEQ ID NO: 786874 - RNA, 19 nt, Homo sapiens
  misc_RNA (1)...(19): siRNA sense strand
gaaugugauguucaugcuu

SEQ ID NO: 786875 - RNA, 19 nt, Homo sapiens
  misc_RNA (1)...(19): siRNA sense strand
uccaguaccucaccuucau

SEQ ID NO: 786876 - RNA, 19 nt, Homo sapiens
  misc_RNA (1)...(19): siRNA sense strand
guaccagaaggaagcaaga

SEQ ID NO: 786877 - RNA, 19 nt, Homo sapiens
  misc_RNA (1)...(19): siRNA sense strand
agucagcaccuacacaaau

SEQ ID NO: 786878 - RNA, 19 nt, Homo sapiens
  misc_RNA (1)...(19): siRNA sense strand
gcuggaaugccugggcuuu

SEQ ID NO: 786879 - RNA, 19 nt, Homo sapiens
  misc_RNA (1)...(19): siRNA sense strand
cacccuugcuuucccuuca

SEQ ID NO: 786880 - RNA, 19 nt, Homo sapiens
  misc_RNA (1)...(19): siRNA sense strand
ucauggaccggcuuaaaca

SEQ ID NO: 786881 - RNA, 19 nt, Homo sapiens
  misc_RNA (1)...(19): siRNA sense strand
gccuuugccuucacucagu

SEQ ID NO: 786882 - RNA, 19 nt, Homo sapiens
  misc_RNA (1)...(19): siRNA sense strand
caccgccacacucaucaua

SEQ ID NO: 786883 - RNA, 19 nt, Homo sapiens
  misc_RNA (1)...(19): siRNA sense strand
gguguggcugucugugaua

SEQ ID NO: 786884 - RNA, 19 nt, Homo sapiens
  misc_RNA (1)...(19): siRNA sense strand
aggaaacagcugagcauga

SEQ ID NO: 786885 - RNA, 19 nt, Homo sapiens
  misc_RNA (1)...(19): siRNA sense strand
acaaaggaagagaaggaaa

SEQ ID NO: 786886 - RNA, 19 nt, Homo sapiens
  misc_RNA (1)...(19): siRNA sense strand
uugccauucuucugacauu

SEQ ID NO: 786887 - RNA, 19 nt, Homo sapiens
  misc_RNA (1)...(19): siRNA sense strand
uggugucucugcuccaguu

SEQ ID NO: 786888 - RNA, 19 nt, Homo sapiens
  misc_RNA (1)...(19): siRNA sense strand
acagguuccuccacuuugg

SEQ ID NO: 786889 - RNA, 19 nt, Homo sapiens
  misc_RNA (1)...(19): siRNA sense strand
gagucagcaccuacacaaa

SEQ ID NO: 786890 - RNA, 19 nt, Homo sapiens
  misc_RNA (1)...(19): siRNA sense strand
gauguucaugcuugccauu

SEQ ID NO: 786891 - RNA, 19 nt, Homo sapiens
  misc_RNA (1)...(19): siRNA sense strand
caacuugcuuguucugaua

SEQ ID NO: 786892 - RNA, 19 nt, Homo sapiens
  misc_RNA (1)...(19): siRNA sense strand
ucugauagcuuucuuaauc

SEQ ID NO: 786893 - RNA, 19 nt, Homo sapiens
  misc_RNA (1)...(19): siRNA sense strand
gaccaugagugcucuguau

SEQ ID NO: 786894 - RNA, 19 nt, Homo sapiens
  misc_RNA (1)...(19): siRNA sense strand
cuacauagccugccucaug

SEQ ID NO: 786895 - RNA, 19 nt, Homo sapiens
  misc_RNA (1)...(19): siRNA sense strand
acaagaaccuggacugcaa

SEQ ID NO: 786896 - RNA, 19 nt, Homo sapiens
  misc_RNA (1)...(19): siRNA sense strand
ucuauagucugaggaauaa

SEQ ID NO: 786897 - RNA, 19 nt, Homo sapiens
  misc_RNA (1)...(19): siRNA sense strand
ccucucaguugucuccuua

SEQ ID NO: 786898 - RNA, 19 nt, Homo sapiens
  misc_RNA (1)...(19): siRNA sense strand
ccauguaccuggucacugu

SEQ ID NO: 786899 - RNA, 19 nt, Homo sapiens
  misc_RNA (1)...(19): siRNA sense strand
agaacaaagucaucaccua

SEQ ID NO: 786900 - RNA, 19 nt, Homo sapiens
  misc_RNA (1)...(19): siRNA sense strand
gcaacagccucagugaugu

SEQ ID NO: 786901 - RNA, 19 nt, Homo sapiens
  misc_RNA (1)...(19): siRNA sense strand
ggaauaaagacauaaagag

SEQ ID NO: 786902 - RNA, 19 nt, Homo sapiens
  misc_RNA (1)...(19): siRNA sense strand
caaagucaucaccuacaua

SEQ ID NO: 786903 - RNA, 19 nt, Homo sapiens
  misc_RNA (1)...(19): siRNA sense strand
ugagugcucuguauuccuu

SEQ ID NO: 786904 - RNA, 19 nt, Homo sapiens
  misc_RNA (1)...(19): siRNA sense strand
gauggccuaugaccgguuu

SEQ ID NO: 786905 - RNA, 19 nt, Homo sapiens
  misc_RNA (1)...(19): siRNA sense strand
ucugaggaauaaagacaua

SEQ ID NO: 786906 - RNA, 19 nt, Homo sapiens
  misc_RNA (1)...(19): siRNA sense strand
caucucaccucucaguugu

SEQ ID NO: 786907 - RNA, 19 nt, Homo sapiens
  misc_RNA (1)...(19): siRNA sense strand
uaugaacccucaccucugu

SEQ ID NO: 786908 - RNA, 19 nt, Homo sapiens
  misc_RNA (1)...(19): siRNA sense strand
cauacucuuugcuggauuu

SEQ ID NO: 786909 - RNA, 19 nt, Homo sapiens
  misc_RNA (1)...(19): siRNA sense strand
gcuacaaaucuuaauggua

SEQ ID NO: 786910 - RNA, 19 nt, Homo sapiens
  misc_RNA (1)...(19): siRNA sense strand
cugggauccuuuacucuua

SEQ ID NO: 786911 - RNA, 19 nt, Homo sapiens
  misc_RNA (1)...(19): siRNA sense strand
ugacugggauccuuuacuc

SEQ ID NO: 786912 - RNA, 19 nt, Homo sapiens
  misc_RNA (1)...(19): siRNA sense strand
gaacaaugaaagggcaauu

SEQ ID NO: 786913 - RNA, 19 nt, Homo sapiens
  misc_RNA (1)...(19): siRNA sense strand
caacagccucagugaugua

SEQ ID NO: 786914 - RNA, 19 nt, Homo sapiens
  misc_RNA (1)...(19): siRNA sense strand
cugcaacccuuccucuuug

SEQ ID NO: 786915 - RNA, 19 nt, Homo sapiens
  misc_RNA (1)...(19): siRNA sense strand
ucaguugucuccuuauuuu

SEQ ID NO: 786916 - RNA, 19 nt, Homo sapiens
  misc_RNA (1)...(19): siRNA sense strand
guucugauagcuuucuuaa

SEQ ID NO: 786917 - RNA, 19 nt, Homo sapiens
  misc_RNA (1)...(19): siRNA sense strand
ccaacuugcuuguucugau

SEQ ID NO: 786918 - RNA, 19 nt, Homo sapiens
  misc_RNA (1)...(19): siRNA sense strand
guccuuugcugacauuugu

SEQ ID NO: 786919 - RNA, 19 nt, Homo sapiens
  misc_RNA (1)...(19): siRNA sense strand
gcaucucaccucucaguug

SEQ ID NO: 786920 - RNA, 19 nt, Homo sapiens
  misc_RNA (1)...(19): siRNA sense strand
acucuuugcuggauuugaa

SEQ ID NO: 786921 - RNA, 19 nt, Homo sapiens
  misc_RNA (1)...(19): siRNA sense strand
ucucaguugucuccuuauu

SEQ ID NO: 786922 - RNA, 19 nt, Homo sapiens
  misc_RNA (1)...(19): siRNA sense strand
gcacuacauggucauuaug

SEQ ID NO: 786923 - RNA, 19 nt, Homo sapiens
  misc_RNA (1)...(19): siRNA sense strand
gcugacauuuguguuacuu

SEQ ID NO: 786924 - RNA, 19 nt, Homo sapiens
  misc_RNA (1)...(19): siRNA sense strand
cccuuuaucuauagucuga

SEQ ID NO: 786925 - RNA, 19 nt, Homo sapiens
  misc_RNA (1)...(19): siRNA sense strand
ucauccaacuugcuuguuc

SEQ ID NO: 786926 - RNA, 19 nt, Homo sapiens
  misc_RNA (1)...(19): siRNA sense strand
cugcacagccuuagaaauc

SEQ ID NO: 786927 - RNA, 19 nt, Homo sapiens
  misc_RNA (1)...(19): siRNA sense strand
acaaagucaucaccuacau

SEQ ID NO: 786928 - RNA, 19 nt, Homo sapiens
  misc_RNA (1)...(19): siRNA sense strand
aaucaggucauccaacuug

SEQ ID NO: 786929 - RNA, 19 nt, Homo sapiens
  misc_RNA (1)...(19): siRNA sense strand
uuaaucaggucauccaacu

SEQ ID NO: 786930 - RNA, 19 nt, Homo sapiens
  misc_RNA (1)...(19): siRNA sense strand
gaacauccagacacagaac

SEQ ID NO: 786931 - RNA, 19 nt, Homo sapiens
  misc_RNA (1)...(19): siRNA sense strand
gcucugggaauacauuugu

SEQ ID NO: 786932 - RNA, 19 nt, Homo sapiens
  misc_RNA (1)...(19): siRNA sense strand
caggaaaugauacacaaau

SEQ ID NO: 786933 - RNA, 19 nt, Homo sapiens
  misc_RNA (1)...(19): siRNA sense strand
uuccauacaugcaaucuca

SEQ ID NO: 786934 - RNA, 19 nt, Homo sapiens
  misc_RNA (1)...(19): siRNA sense strand
ggaccaugagugcucugua

SEQ ID NO: 786935 - RNA, 19 nt, Homo sapiens
  misc_RNA (1)...(19): siRNA sense strand
cuagcauccuggaccauga

SEQ ID NO: 786936 - RNA, 19 nt, Homo sapiens
  misc_RNA (1)...(19): siRNA sense strand
ggcuguuccuguccaugua

SEQ ID NO: 786937 - RNA, 19 nt, Homo sapiens
  misc_RNA (1)...(19): siRNA sense strand
aaagucaucaccuacauag

SEQ ID NO: 786938 - RNA, 19 nt, Homo sapiens
  misc_RNA (1)...(19): siRNA sense strand
ugcacuacauggucauuau

SEQ ID NO: 786939 - RNA, 19 nt, Homo sapiens
  misc_RNA (1)...(19): siRNA sense strand
uguccgugauggccuauga

SEQ ID NO: 786940 - RNA, 19 nt, Homo sapiens
  misc_RNA (1)...(19): siRNA sense strand
ugcaacagccucagugaug

SEQ ID NO: 786941 - RNA, 19 nt, Homo sapiens
  misc_RNA (1)...(19): siRNA sense strand
ggaaccaggaaaugauaca

SEQ ID NO: 786942 - RNA, 19 nt, Homo sapiens
  misc_RNA (1)...(19): siRNA sense strand
gaggaauaaagacauaaag

SEQ ID NO: 786943 - RNA, 19 nt, Homo sapiens
  misc_RNA (1)...(19): siRNA sense strand
acacagaacaaagucauca

SEQ ID NO: 786944 - RNA, 19 nt, Homo sapiens
  misc_RNA (1)...(19): siRNA sense strand
ggaaguacaaggcauuuuc

SEQ ID NO: 786945 - RNA, 19 nt, Homo sapiens
  misc_RNA (1)...(19): siRNA sense strand
ccaggaaaugauacacaaa

SEQ ID NO: 786946 - RNA, 19 nt, Homo sapiens
  misc_RNA (1)...(19): siRNA sense strand
ccaugagugcucuguauuc

SEQ ID NO: 786947 - RNA, 19 nt, Homo sapiens
  misc_RNA (1)...(19): siRNA sense strand
accaggaaaugauacacaa

SEQ ID NO: 786948 - RNA, 19 nt, Homo sapiens
  misc_RNA (1)...(19): siRNA sense strand
gggcuguuccuguccaugu

SEQ ID NO: 786949 - RNA, 19 nt, Homo sapiens
  misc_RNA (1)...(19): siRNA sense strand
cauccuggccacaaucuca

SEQ ID NO: 786950 - RNA, 19 nt, Homo sapiens
  misc_RNA (1)...(19): siRNA sense strand
ucgggaaccugcucaucau

SEQ ID NO: 786951 - RNA, 19 nt, Homo sapiens
  misc_RNA (1)...(19): siRNA sense strand
ggaaccugcucaucauccu

SEQ ID NO: 786952 - RNA, 19 nt, Homo sapiens
  misc_RNA (1)...(19): siRNA sense strand
ggucauccaacuugcuugu

SEQ ID NO: 786953 - RNA, 19 nt, Homo sapiens
  misc_RNA (1)...(19): siRNA sense strand
ucuccaaccuguccuuugc

SEQ ID NO: 786954 - RNA, 19 nt, Homo sapiens
  misc_RNA (1)...(19): siRNA sense strand
cugaaccccuuuaucuaua

SEQ ID NO: 786955 - RNA, 19 nt, Homo sapiens
  misc_RNA (1)...(19): siRNA sense strand
acugcaacccuuccucuuu

SEQ ID NO: 786956 - RNA, 19 nt, Homo sapiens
  misc_RNA (1)...(19): siRNA sense strand
uaguacggcuguccuucug

SEQ ID NO: 786957 - RNA, 19 nt, Homo sapiens
  misc_RNA (1)...(19): siRNA sense strand
cauccaacuugcuuguucu

SEQ ID NO: 786958 - RNA, 19 nt, Homo sapiens
  misc_RNA (1)...(19): siRNA sense strand
gcugaaccccuuuaucuau

SEQ ID NO: 786959 - RNA, 19 nt, Homo sapiens
  misc_RNA (1)...(19): siRNA sense strand
guaguacggcuguccuucu

SEQ ID NO: 786960 - RNA, 19 nt, Homo sapiens
  misc_RNA (1)...(19): siRNA sense strand
gugcaucucaccucucagu

SEQ ID NO: 786961 - RNA, 19 nt, Homo sapiens
  misc_RNA (1)...(19): siRNA sense strand
agaaagggcugaaugauua

SEQ ID NO: 786962 - RNA, 19 nt, Homo sapiens
  misc_RNA (1)...(19): siRNA sense strand
gcaaguggauuauauuuga

SEQ ID NO: 786963 - RNA, 19 nt, Homo sapiens
  misc_RNA (1)...(19): siRNA sense strand
ggacugagcucucucugaa

SEQ ID NO: 786964 - RNA, 19 nt, Homo sapiens
  misc_RNA (1)...(19): siRNA sense strand
gaaguucucucaaggauug

SEQ ID NO: 786965 - RNA, 19 nt, Homo sapiens
  misc_RNA (1)...(19): siRNA sense strand
gaagucacauuacgucuuu

SEQ ID NO: 786966 - RNA, 19 nt, Homo sapiens
  misc_RNA (1)...(19): siRNA sense strand
gaaagauagucgaugauaa

SEQ ID NO: 786967 - RNA, 19 nt, Homo sapiens
  misc_RNA (1)...(19): siRNA sense strand
ugaaagugcugaaugauaa

SEQ ID NO: 786968 - RNA, 19 nt, Homo sapiens
  misc_RNA (1)...(19): siRNA sense strand
gaaaauaccuuacuggauu

SEQ ID NO: 786969 - RNA, 19 nt, Homo sapiens
  misc_RNA (1)...(19): siRNA sense strand
gcagcucgaugucauguua

SEQ ID NO: 786970 - RNA, 19 nt, Homo sapiens
  misc_RNA (1)...(19): siRNA sense strand
gauagucgaugauaacauu

SEQ ID NO: 786971 - RNA, 19 nt, Homo sapiens
  misc_RNA (1)...(19): siRNA sense strand
aaacagugauggagaauaa

SEQ ID NO: 786972 - RNA, 19 nt, Homo sapiens
  misc_RNA (1)...(19): siRNA sense strand
gagaaugacuauuacugua

SEQ ID NO: 786973 - RNA, 19 nt, Homo sapiens
  misc_RNA (1)...(19): siRNA sense strand
gaagaaagcagugguguuu

SEQ ID NO: 786974 - RNA, 19 nt, Homo sapiens
  misc_RNA (1)...(19): siRNA sense strand
gaacaucaccgugccuuua

SEQ ID NO: 786975 - RNA, 19 nt, Homo sapiens
  misc_RNA (1)...(19): siRNA sense strand
gaucaacaaugccaucaaa

SEQ ID NO: 786976 - RNA, 19 nt, Homo sapiens
  misc_RNA (1)...(19): siRNA sense strand
gaaaguugcuuccaugaca

SEQ ID NO: 786977 - RNA, 19 nt, Homo sapiens
  misc_RNA (1)...(19): siRNA sense strand
gaagaucaaugccauaaag

SEQ ID NO: 786978 - RNA, 19 nt, Homo sapiens
  misc_RNA (1)...(19): siRNA sense strand
gagagaagcugauggaaag

SEQ ID NO: 786979 - RNA, 19 nt, Homo sapiens
  misc_RNA (1)...(19): siRNA sense strand
gaaaugaaauugcauccau

SEQ ID NO: 786980 - RNA, 19 nt, Homo sapiens
  misc_RNA (1)...(19): siRNA sense strand
gaaaacggcucuuuauuga

SEQ ID NO: 786981 - RNA, 19 nt, Homo sapiens
  misc_RNA (1)...(19): siRNA sense strand
ucaaagggcucuucuuaga

SEQ ID NO: 786982 - RNA, 19 nt, Homo sapiens
  misc_RNA (1)...(19): siRNA sense strand
gagagcaucugcaucauga

SEQ ID NO: 786983 - RNA, 19 nt, Homo sapiens
  misc_RNA (1)...(19): siRNA sense strand
gaggaagcaucuaugauuu

SEQ ID NO: 786984 - RNA, 19 nt, Homo sapiens
  misc_RNA (1)...(19): siRNA sense strand
uggcagagcugaaaggaua

SEQ ID NO: 786985 - RNA, 19 nt, Homo sapiens
  misc_RNA (1)...(19): siRNA sense strand
cagaugaacuccaagauga

SEQ ID NO: 786986 - RNA, 19 nt, Homo sapiens
  misc_RNA (1)...(19): siRNA sense strand
gaaauugcauccaugaaca

SEQ ID NO: 786987 - RNA, 19 nt, Homo sapiens
  misc_RNA (1)...(19): siRNA sense strand
gaaguuugcugaugaucuu

SEQ ID NO: 786988 - RNA, 19 nt, Homo sapiens
  misc_RNA (1)...(19): siRNA sense strand
gccaauaaauggauuaaga

SEQ ID NO: 786989 - RNA, 19 nt, Homo sapiens
  misc_RNA (1)...(19): siRNA sense strand
caagaccucugcuuauaaa

SEQ ID NO: 786990 - RNA, 19 nt, Homo sapiens
  misc_RNA (1)...(19): siRNA sense strand
uuagggagcuggucauuaa

SEQ ID NO: 786991 - RNA, 19 nt, Homo sapiens
  misc_RNA (1)...(19): siRNA sense strand
ggcaggagcucaucagauu

SEQ ID NO: 786992 - RNA, 19 nt, Homo sapiens
  misc_RNA (1)...(19): siRNA sense strand
gaucgcaaguggauuauau

SEQ ID NO: 786993 - RNA, 19 nt, Homo sapiens
  misc_RNA (1)...(19): siRNA sense strand
gcaaaggucucagaacuca

SEQ ID NO: 786994 - RNA, 19 nt, Homo sapiens
  misc_RNA (1)...(19): siRNA sense strand
aauggaagcugaucuauga

SEQ ID NO: 786995 - RNA, 19 nt, Homo sapiens
  misc_RNA (1)...(19): siRNA sense strand
gaagcuggcugcacagaug

SEQ ID NO: 786996 - RNA, 19 nt, Homo sapiens
  misc_RNA (1)...(19): siRNA sense strand
ggagagauacuauuacuau

SEQ ID NO: 786997 - RNA, 19 nt, Homo sapiens
  misc_RNA (1)...(19): siRNA sense strand
ggcaagaccucugcuuaua

SEQ ID NO: 786998 - RNA, 19 nt, Homo sapiens
  misc_RNA (1)...(19): siRNA sense strand
agacauggcuauaugauug

SEQ ID NO: 786999 - RNA, 19 nt, Homo sapiens
  misc_RNA (1)...(19): siRNA sense strand
gaagugcuuugaaggaauu

SEQ ID NO: 787000 - RNA, 19 nt, Homo sapiens
  misc_RNA (1)...(19): siRNA sense strand
gaaacgaccugccucucaa

SEQ ID NO: 787001 - RNA, 19 nt, Homo sapiens
  misc_RNA (1)...(19): siRNA sense strand
gaauuugaguugagacuug

SEQ ID NO: 787002 - RNA, 19 nt, Homo sapiens
  misc_RNA (1)...(19): siRNA sense strand
gauucaaacuuucaaggua

SEQ ID NO: 787003 - RNA, 19 nt, Homo sapiens
  misc_RNA (1)...(19): siRNA sense strand
agaaggagaaugacuauua

SEQ ID NO: 787004 - RNA, 19 nt, Homo sapiens
  misc_RNA (1)...(19): siRNA sense strand
caucaaagggcucuucuua

SEQ ID NO: 787005 - RNA, 19 nt, Homo sapiens
  misc_RNA (1)...(19): siRNA sense strand
gaaaggguuugaugugaug

SEQ ID NO: 787006 - RNA, 19 nt, Homo sapiens
  misc_RNA (1)...(19): siRNA sense strand
gaaaugaagcacaauguug

SEQ ID NO: 787007 - RNA, 19 nt, Homo sapiens
  misc_RNA (1)...(19): siRNA sense strand
gaaccuaaaucgggcguuu

SEQ ID NO: 787008 - RNA, 19 nt, Homo sapiens
  misc_RNA (1)...(19): siRNA sense strand
gggaaagguuuaucaauca

SEQ ID NO: 787009 - RNA, 19 nt, Homo sapiens
  misc_RNA (1)...(19): siRNA sense strand
ucaagacgcuccugaauag

SEQ ID NO: 787010 - RNA, 19 nt, Homo sapiens
  misc_RNA (1)...(19): siRNA sense strand
ugaaagaucugcugaaggu

SEQ ID NO: 787011 - RNA, 19 nt, Homo sapiens
  misc_RNA (1)...(19): siRNA sense strand
gaacagaaccugggugaau

SEQ ID NO: 787012 - RNA, 19 nt, Homo sapiens
  misc_RNA (1)...(19): siRNA sense strand
ggaccuagcugaggcaaug

SEQ ID NO: 787013 - RNA, 19 nt, Homo sapiens
  misc_RNA (1)...(19): siRNA sense strand
ggaaagauagucgaugaua

SEQ ID NO: 787014 - RNA, 19 nt, Homo sapiens
  misc_RNA (1)...(19): siRNA sense strand
aaucggaccuggagagaua

SEQ ID NO: 787015 - RNA, 19 nt, Homo sapiens
  misc_RNA (1)...(19): siRNA sense strand
gaagugaugguucggauuu

SEQ ID NO: 787016 - RNA, 19 nt, Homo sapiens
  misc_RNA (1)...(19): siRNA sense strand
ugagaucacugaccugaaa

SEQ ID NO: 787017 - RNA, 19 nt, Homo sapiens
  misc_RNA (1)...(19): siRNA sense strand
gaugaucgcaaguggauua

SEQ ID NO: 787018 - RNA, 19 nt, Homo sapiens
  misc_RNA (1)...(19): siRNA sense strand
aaacggcucuuuauugaga

SEQ ID NO: 787019 - RNA, 19 nt, Homo sapiens
  misc_RNA (1)...(19): siRNA sense strand
ccauugagcuuccaacaga

SEQ ID NO: 787020 - RNA, 19 nt, Homo sapiens
  misc_RNA (1)...(19): siRNA sense strand
guucauaaaucucuacaug

SEQ ID NO: 787021 - RNA, 19 nt, Homo sapiens
  misc_RNA (1)...(19): siRNA sense strand
guugguggcuaacaaauuu

SEQ ID NO: 787022 - RNA, 19 nt, Homo sapiens
  misc_RNA (1)...(19): siRNA sense strand
gccaguaccuugguuuaua

SEQ ID NO: 787023 - RNA, 19 nt, Homo sapiens
  misc_RNA (1)...(19): siRNA sense strand
ggugaaagauaacaggauu

SEQ ID NO: 787024 - RNA, 19 nt, Homo sapiens
  misc_RNA (1)...(19): siRNA sense strand
caagaagcaucucaaggaa

SEQ ID NO: 787025 - RNA, 19 nt, Homo sapiens
  misc_RNA (1)...(19): siRNA sense strand
gagcacaucucuaggaucu

SEQ ID NO: 787026 - RNA, 19 nt, Homo sapiens
  misc_RNA (1)...(19): siRNA sense strand
gaggaaauuuggcauuguu

SEQ ID NO: 787027 - RNA, 19 nt, Homo sapiens
  misc_RNA (1)...(19): siRNA sense strand
uggaagaggucaugaaguu

SEQ ID NO: 787028 - RNA, 19 nt, Homo sapiens
  misc_RNA (1)...(19): siRNA sense strand
cagagugacugaugacaaa

SEQ ID NO: 787029 - RNA, 19 nt, Homo sapiens
  misc_RNA (1)...(19): siRNA sense strand
gcaaggaguugaguacaug

SEQ ID NO: 787030 - RNA, 19 nt, Homo sapiens
  misc_RNA (1)...(19): siRNA sense strand
ccaaggagcacaaagaauu

SEQ ID NO: 787031 - RNA, 19 nt, Homo sapiens
  misc_RNA (1)...(19): siRNA sense strand
ggaaauggaaaguaaagaa

SEQ ID NO: 787032 - RNA, 19 nt, Homo sapiens
  misc_RNA (1)...(19): siRNA sense strand
ccaaagugcuaucugaaga

SEQ ID NO: 787033 - RNA, 19 nt, Homo sapiens
  misc_RNA (1)...(19): siRNA sense strand
cgaggaaacugccaagaug

SEQ ID NO: 787034 - RNA, 19 nt, Homo sapiens
  misc_RNA (1)...(19): siRNA sense strand
ucacuccucuuucuaugua

SEQ ID NO: 787035 - RNA, 19 nt, Homo sapiens
  misc_RNA (1)...(19): siRNA sense strand
ccacauucaugaacgcaua

SEQ ID NO: 787036 - RNA, 19 nt, Homo sapiens
  misc_RNA (1)...(19): siRNA sense strand
gcaagaccucugcuuauaa

SEQ ID NO: 787037 - RNA, 19 nt, Homo sapiens
  misc_RNA (1)...(19): siRNA sense strand
aaagagcaaugaucagauu

SEQ ID NO: 787038 - RNA, 19 nt, Homo sapiens
  misc_RNA (1)...(19): siRNA sense strand
cgaccugccucucaaauau

SEQ ID NO: 787039 - RNA, 19 nt, Homo sapiens
  misc_RNA (1)...(19): siRNA sense strand
gaaggagaaugacuauuac

SEQ ID NO: 787040 - RNA, 19 nt, Homo sapiens
  misc_RNA (1)...(19): siRNA sense strand
gucgaaacauugaggaaua

SEQ ID NO: 787041 - RNA, 19 nt, Homo sapiens
  misc_RNA (1)...(19): siRNA sense strand
gcgagaagaucuuaagaag

SEQ ID NO: 787042 - RNA, 19 nt, Homo sapiens
  misc_RNA (1)...(19): siRNA sense strand
ggaaaggguuugaugugau

SEQ ID NO: 787043 - RNA, 19 nt, Homo sapiens
  misc_RNA (1)...(19): siRNA sense strand
ccaaucagauggaggaguu

SEQ ID NO: 787044 - RNA, 19 nt, Homo sapiens
  misc_RNA (1)...(19): siRNA sense strand
gggaauauguggaggacaa

SEQ ID NO: 787045 - RNA, 19 nt, Homo sapiens
  misc_RNA (1)...(19): siRNA sense strand
gagcugguaucccucauug

SEQ ID NO: 787046 - RNA, 19 nt, Homo sapiens
  misc_RNA (1)...(19): siRNA sense strand
gaucaaugccauaaagaaa

SEQ ID NO: 787047 - RNA, 19 nt, Homo sapiens
  misc_RNA (1)...(19): siRNA sense strand
guacaucauugaccauuuc

SEQ ID NO: 787048 - RNA, 19 nt, Homo sapiens
  misc_RNA (1)...(19): siRNA sense strand
gggaaaggguuugauguga

SEQ ID NO: 787049 - RNA, 19 nt, Homo sapiens
  misc_RNA (1)...(19): siRNA sense strand
gaagaagugcuuugaagga

SEQ ID NO: 787050 - RNA, 19 nt, Homo sapiens
  misc_RNA (1)...(19): siRNA sense strand
ucucaaauaugcucgaauu

SEQ ID NO: 787051 - RNA, 19 nt, Homo sapiens
  misc_RNA (1)...(19): siRNA sense strand
cagaagaaaugaagcacaa

SEQ ID NO: 787052 - RNA, 19 nt, Homo sapiens
  misc_RNA (1)...(19): siRNA sense strand
caucagagcccaugaggaa

SEQ ID NO: 787053 - RNA, 19 nt, Homo sapiens
  misc_RNA (1)...(19): siRNA sense strand
aaauugaggaggacuauua

SEQ ID NO: 787054 - RNA, 19 nt, Homo sapiens
  misc_RNA (1)...(19): siRNA sense strand
ggaacuugcuccuucacaa

SEQ ID NO: 787055 - RNA, 19 nt, Homo sapiens
  misc_RNA (1)...(19): siRNA sense strand
gagcaacuaugacucaagu

SEQ ID NO: 787056 - RNA, 19 nt, Homo sapiens
  misc_RNA (1)...(19): siRNA sense strand
gcagacagcagaaagaaau

SEQ ID NO: 787057 - RNA, 19 nt, Homo sapiens
  misc_RNA (1)...(19): siRNA sense strand
ggugagacauggcuauaug

SEQ ID NO: 787058 - RNA, 19 nt, Homo sapiens
  misc_RNA (1)...(19): siRNA sense strand
ccagaagucucgcccagaa

SEQ ID NO: 787059 - RNA, 19 nt, Homo sapiens
  misc_RNA (1)...(19): siRNA sense strand
ggaaccgucuggacucuau

SEQ ID NO: 787060 - RNA, 19 nt, Homo sapiens
  misc_RNA (1)...(19): siRNA sense strand
ggaguuggcacaagacauu

SEQ ID NO: 787061 - RNA, 19 nt, Homo sapiens
  misc_RNA (1)...(19): siRNA sense strand
gaagaaauauccucaauga

SEQ ID NO: 787062 - RNA, 19 nt, Homo sapiens
  misc_RNA (1)...(19): siRNA sense strand
gaacacagauccacgguuu

SEQ ID NO: 787063 - RNA, 19 nt, Homo sapiens
  misc_RNA (1)...(19): siRNA sense strand
gaaguaaaccgaaugcuua

SEQ ID NO: 787064 - RNA, 19 nt, Homo sapiens
  misc_RNA (1)...(19): siRNA sense strand
ggacgagacugaugaguuu

SEQ ID NO: 787065 - RNA, 19 nt, Homo sapiens
  misc_RNA (1)...(19): siRNA sense strand
gaagacuuaucguguguua

SEQ ID NO: 787066 - RNA, 19 nt, Homo sapiens
  misc_RNA (1)...(19): siRNA sense strand
gaaaucaccguguacuuua

SEQ ID NO: 787067 - RNA, 19 nt, Homo sapiens
  misc_RNA (1)...(19): siRNA sense strand
gaacuacacucccugugaa

SEQ ID NO: 787068 - RNA, 19 nt, Homo sapiens
  misc_RNA (1)...(19): siRNA sense strand
ggaccuaccuuccauuuua

SEQ ID NO: 787069 - RNA, 19 nt, Homo sapiens
  misc_RNA (1)...(19): siRNA sense strand
gcaagcuguucuucaauaa

SEQ ID NO: 787070 - RNA, 19 nt, Homo sapiens
  misc_RNA (1)...(19): siRNA sense strand
ccacuuguccugucaaaua

SEQ ID NO: 787071 - RNA, 19 nt, Homo sapiens
  misc_RNA (1)...(19): siRNA sense strand
gaagaaaguucgccuuacu

SEQ ID NO: 787072 - RNA, 19 nt, Homo sapiens
  misc_RNA (1)...(19): siRNA sense strand
ccaacacugugcagaaaua

SEQ ID NO: 787073 - RNA, 19 nt, Homo sapiens
  misc_RNA (1)...(19): siRNA sense strand
gugcauuacugauccuuua

SEQ ID NO: 787074 - RNA, 19 nt, Homo sapiens
  misc_RNA (1)...(19): siRNA sense strand
guaauaucauugcccauuu

SEQ ID NO: 787075 - RNA, 19 nt, Homo sapiens
  misc_RNA (1)...(19): siRNA sense strand
gaaauauccucaaugaaac

SEQ ID NO: 787076 - RNA, 19 nt, Homo sapiens
  misc_RNA (1)...(19): siRNA sense strand
gaucacaguggaagacuua

SEQ ID NO: 787077 - RNA, 19 nt, Homo sapiens
  misc_RNA (1)...(19): siRNA sense strand
gggaauaucuacguccuaa

SEQ ID NO: 787078 - RNA, 19 nt, Homo sapiens
  misc_RNA (1)...(19): siRNA sense strand
ccacuauuguuucagauaa

SEQ ID NO: 787079 - RNA, 19 nt, Homo sapiens
  misc_RNA (1)...(19): siRNA sense strand
caaaggugguuacagaaga

SEQ ID NO: 787080 - RNA, 19 nt, Homo sapiens
  misc_RNA (1)...(19): siRNA sense strand
gaaguacccguaugagaaa

SEQ ID NO: 787081 - RNA, 19 nt, Homo sapiens
  misc_RNA (1)...(19): siRNA sense strand
gaugcucucuucaacauga

SEQ ID NO: 787082 - RNA, 19 nt, Homo sapiens
  misc_RNA (1)...(19): siRNA sense strand
cagaggagaacaaggauua

SEQ ID NO: 787083 - RNA, 19 nt, Homo sapiens
  misc_RNA (1)...(19): siRNA sense strand
gcaagaagaggacagagaa

SEQ ID NO: 787084 - RNA, 19 nt, Homo sapiens
  misc_RNA (1)...(19): siRNA sense strand
guccaaaggugguuacaga

SEQ ID NO: 787085 - RNA, 19 nt, Homo sapiens
  misc_RNA (1)...(19): siRNA sense strand
cagcugaaaucaccgugua

SEQ ID NO: 787086 - RNA, 19 nt, Homo sapiens
  misc_RNA (1)...(19): siRNA sense strand
ggugaaaguuguggaagaa

SEQ ID NO: 787087 - RNA, 19 nt, Homo sapiens
  misc_RNA (1)...(19): siRNA sense strand
ccaggcaauugaugugaua

SEQ ID NO: 787088 - RNA, 19 nt, Homo sapiens
  misc_RNA (1)...(19): siRNA sense strand
aaacaacacaucagaaguu

SEQ ID NO: 787089 - RNA, 19 nt, Homo sapiens
  misc_RNA (1)...(19): siRNA sense strand
caaagauauuggccacaaa

SEQ ID NO: 787090 - RNA, 19 nt, Homo sapiens
  misc_RNA (1)...(19): siRNA sense strand
gaccuacgauucacuucaa

SEQ ID NO: 787091 - RNA, 19 nt, Homo sapiens
  misc_RNA (1)...(19): siRNA sense strand
ggaaacaacacaucagaag

SEQ ID NO: 787092 - RNA, 19 nt, Homo sapiens
  misc_RNA (1)...(19): siRNA sense strand
ugaaguacccguaugagaa

SEQ ID NO: 787093 - RNA, 19 nt, Homo sapiens
  misc_RNA (1)...(19): siRNA sense strand
gaagagugcauuacugauc

SEQ ID NO: 787094 - RNA, 19 nt, Homo sapiens
  misc_RNA (1)...(19): siRNA sense strand
gccaaucagcgaacuauaa

SEQ ID NO: 787095 - RNA, 19 nt, Homo sapiens
  misc_RNA (1)...(19): siRNA sense strand
gccauagacaugaauauaa

SEQ ID NO: 787096 - RNA, 19 nt, Homo sapiens
  misc_RNA (1)...(19): siRNA sense strand
ucaucgaacucuuagauau

SEQ ID NO: 787097 - RNA, 19 nt, Homo sapiens
  misc_RNA (1)...(19): siRNA sense strand
gagaaggcccaguuaucua

SEQ ID NO: 787098 - RNA, 19 nt, Homo sapiens
  misc_RNA (1)...(19): siRNA sense strand
aagaugaccucccaggauu

SEQ ID NO: 787099 - RNA, 19 nt, Homo sapiens
  misc_RNA (1)...(19): siRNA sense strand
ugaaaucaccguguacuuu

SEQ ID NO: 787100 - RNA, 19 nt, Homo sapiens
  misc_RNA (1)...(19): siRNA sense strand
ccauagacaugaauauaag

SEQ ID NO: 787101 - RNA, 19 nt, Homo sapiens
  misc_RNA (1)...(19): siRNA sense strand
cuacauaucucuggccaau

SEQ ID NO: 787102 - RNA, 19 nt, Homo sapiens
  misc_RNA (1)...(19): siRNA sense strand
gugcuggcgcucuuaauua

SEQ ID NO: 787103 - RNA, 19 nt, Homo sapiens
  misc_RNA (1)...(19): siRNA sense strand
gccaagcucuaucaacaga

SEQ ID NO: 787104 - RNA, 19 nt, Homo sapiens
  misc_RNA (1)...(19): siRNA sense strand
gaucaucgaacucuuagau

SEQ ID NO: 787105 - RNA, 19 nt, Homo sapiens
  misc_RNA (1)...(19): siRNA sense strand
guuuacaucucaaucuuug

SEQ ID NO: 787106 - RNA, 19 nt, Homo sapiens
  misc_RNA (1)...(19): siRNA sense strand
gugaggaggugccuacugu

SEQ ID NO: 787107 - RNA, 19 nt, Homo sapiens
  misc_RNA (1)...(19): siRNA sense strand
caacaaaggcagcaucgau

SEQ ID NO: 787108 - RNA, 19 nt, Homo sapiens
  misc_RNA (1)...(19): siRNA sense strand
acauaucucuggccaauca

SEQ ID NO: 787109 - RNA, 19 nt, Homo sapiens
  misc_RNA (1)...(19): siRNA sense strand
gaggaacaaugacaaaauu

SEQ ID NO: 787110 - RNA, 19 nt, Homo sapiens
  misc_RNA (1)...(19): siRNA sense strand
ucaaaggauuucaaagcaa

SEQ ID NO: 787111 - RNA, 19 nt, Homo sapiens
  misc_RNA (1)...(19): siRNA sense strand
gcucuaccauccugggaaa

SEQ ID NO: 787112 - RNA, 19 nt, Homo sapiens
  misc_RNA (1)...(19): siRNA sense strand
gaacuauaaccauucacaa

SEQ ID NO: 787113 - RNA, 19 nt, Homo sapiens
  misc_RNA (1)...(19): siRNA sense strand
gagcugccauagacaugaa

SEQ ID NO: 787114 - RNA, 19 nt, Homo sapiens
  misc_RNA (1)...(19): siRNA sense strand
guaaucagccccaaagaua

SEQ ID NO: 787115 - RNA, 19 nt, Homo sapiens
  misc_RNA (1)...(19): siRNA sense strand
ggaagaaaguucgccuuac

SEQ ID NO: 787116 - RNA, 19 nt, Homo sapiens
  misc_RNA (1)...(19): siRNA sense strand
ggaagaaauauccucaaug

SEQ ID NO: 787117 - RNA, 19 nt, Homo sapiens
  misc_RNA (1)...(19): siRNA sense strand
gaucugcacauuguuauga

SEQ ID NO: 787118 - RNA, 19 nt, Homo sapiens
  misc_RNA (1)...(19): siRNA sense strand
cuaugaaguuccacugauu

SEQ ID NO: 787119 - RNA, 19 nt, Homo sapiens
  misc_RNA (1)...(19): siRNA sense strand
ggagaaggcccaguuaucu

SEQ ID NO: 787120 - RNA, 19 nt, Homo sapiens
  misc_RNA (1)...(19): siRNA sense strand
auacagagguggacuuugg

SEQ ID NO: 787121 - RNA, 19 nt, Homo sapiens
  misc_RNA (1)...(19): siRNA sense strand
caccaucucuccugacugu

SEQ ID NO: 787122 - RNA, 19 nt, Homo sapiens
  misc_RNA (1)...(19): siRNA sense strand
gaccacagaucaucgaacu

SEQ ID NO: 787123 - RNA, 19 nt, Homo sapiens
  misc_RNA (1)...(19): siRNA sense strand
caaggaaggcaucauugaa

SEQ ID NO: 787124 - RNA, 19 nt, Homo sapiens
  misc_RNA (1)...(19): siRNA sense strand
guuaugaggcgauacugua

SEQ ID NO: 787125 - RNA, 19 nt, Homo sapiens
  misc_RNA (1)...(19): siRNA sense strand
caacucaucagcugaaauc

SEQ ID NO: 787126 - RNA, 19 nt, Homo sapiens
  misc_RNA (1)...(19): siRNA sense strand
gucaauauguucaaaggau

SEQ ID NO: 787127 - RNA, 19 nt, Homo sapiens
  misc_RNA (1)...(19): siRNA sense strand
ucagcgaacuauaaccauu

SEQ ID NO: 787128 - RNA, 19 nt, Homo sapiens
  misc_RNA (1)...(19): siRNA sense strand
ccugugaaacugaccauua

SEQ ID NO: 787129 - RNA, 19 nt, Homo sapiens
  misc_RNA (1)...(19): siRNA sense strand
aagccaagcucuaucaaca

SEQ ID NO: 787130 - RNA, 19 nt, Homo sapiens
  misc_RNA (1)...(19): siRNA sense strand
gguuacagaagaagaagua

SEQ ID NO: 787131 - RNA, 19 nt, Homo sapiens
  misc_RNA (1)...(19): siRNA sense strand
uauguucccucaauaauac

SEQ ID NO: 787132 - RNA, 19 nt, Homo sapiens
  misc_RNA (1)...(19): siRNA sense strand
gcucugcacuuuggugaug

SEQ ID NO: 787133 - RNA, 19 nt, Homo sapiens
  misc_RNA (1)...(19): siRNA sense strand
cacaaucgcaguaauauca

SEQ ID NO: 787134 - RNA, 19 nt, Homo sapiens
  misc_RNA (1)...(19): siRNA sense strand
caagguuggugaaaguugu

SEQ ID NO: 787135 - RNA, 19 nt, Homo sapiens
  misc_RNA (1)...(19): siRNA sense strand
gccuggauacccacuauua

SEQ ID NO: 787136 - RNA, 19 nt, Homo sapiens
  misc_RNA (1)...(19): siRNA sense strand
ccaaggaaggcaucauuga

SEQ ID NO: 787137 - RNA, 19 nt, Homo sapiens
  misc_RNA (1)...(19): siRNA sense strand
gaaacaacacaucagaagu

SEQ ID NO: 787138 - RNA, 19 nt, Homo sapiens
  misc_RNA (1)...(19): siRNA sense strand
ucuaucaacagaccauuua

SEQ ID NO: 787139 - RNA, 19 nt, Homo sapiens
  misc_RNA (1)...(19): siRNA sense strand
agcaagcuguucuucaaua

SEQ ID NO: 787140 - RNA, 19 nt, Homo sapiens
  misc_RNA (1)...(19): siRNA sense strand
uaauaucauugcccauuuc

SEQ ID NO: 787141 - RNA, 19 nt, Homo sapiens
  misc_RNA (1)...(19): siRNA sense strand
aaaggugguuacagaagaa

SEQ ID NO: 787142 - RNA, 19 nt, Homo sapiens
  misc_RNA (1)...(19): siRNA sense strand
gcuauuggaacucuuaaug

SEQ ID NO: 787143 - RNA, 19 nt, Homo sapiens
  misc_RNA (1)...(19): siRNA sense strand
guuuguaucucucuaugga

SEQ ID NO: 787144 - RNA, 19 nt, Homo sapiens
  misc_RNA (1)...(19): siRNA sense strand
gauauguucccucaauaau

SEQ ID NO: 787145 - RNA, 19 nt, Homo sapiens
  misc_RNA (1)...(19): siRNA sense strand
cauuagaggcugugucauu

SEQ ID NO: 787146 - RNA, 19 nt, Homo sapiens
  misc_RNA (1)...(19): siRNA sense strand
gaagaguuccuggucaaug

SEQ ID NO: 787147 - RNA, 19 nt, Homo sapiens
  misc_RNA (1)...(19): siRNA sense strand
gggaaacuuugaagaagag

SEQ ID NO: 787148 - RNA, 19 nt, Homo sapiens
  misc_RNA (1)...(19): siRNA sense strand
aaaucaccguguacuuuaa

SEQ ID NO: 787149 - RNA, 19 nt, Homo sapiens
  misc_RNA (1)...(19): siRNA sense strand
acagaucaucgaacucuua

SEQ ID NO: 787150 - RNA, 19 nt, Homo sapiens
  misc_RNA (1)...(19): siRNA sense strand
ucaaauacagcacccagaa

SEQ ID NO: 787151 - RNA, 19 nt, Homo sapiens
  misc_RNA (1)...(19): siRNA sense strand
uauuggaacucuuaaugug

SEQ ID NO: 787152 - RNA, 19 nt, Homo sapiens
  misc_RNA (1)...(19): siRNA sense strand
uggaagaaaguucgccuua

SEQ ID NO: 787153 - RNA, 19 nt, Homo sapiens
  misc_RNA (1)...(19): siRNA sense strand
uucaaggacuguguuauuu

SEQ ID NO: 787154 - RNA, 19 nt, Homo sapiens
  misc_RNA (1)...(19): siRNA sense strand
caagaugaccucccaggau

SEQ ID NO: 787155 - RNA, 19 nt, Homo sapiens
  misc_RNA (1)...(19): siRNA sense strand
gaaaguuguggaagaaagu

SEQ ID NO: 787156 - RNA, 19 nt, Homo sapiens
  misc_RNA (1)...(19): siRNA sense strand
gaauaucuacguccuaaaa

SEQ ID NO: 787157 - RNA, 19 nt, Homo sapiens
  misc_RNA (1)...(19): siRNA sense strand
gcacuuuggugauguuucc

SEQ ID NO: 787158 - RNA, 19 nt, Homo sapiens
  misc_RNA (1)...(19): siRNA sense strand
acgauucacuucaacuuug

SEQ ID NO: 787159 - RNA, 19 nt, Homo sapiens
  misc_RNA (1)...(19): siRNA sense strand
guacuuuaacccacuagaa

SEQ ID NO: 787160 - RNA, 19 nt, Homo sapiens
  misc_RNA (1)...(19): siRNA sense strand
agacuuaucguguguuaug

SEQ ID NO: 787161 - RNA, 19 nt, Homo sapiens
  misc_RNA (1)...(19): siRNA sense strand
gcaacaagcuuuagaacua

SEQ ID NO: 787162 - RNA, 19 nt, Homo sapiens
  misc_RNA (1)...(19): siRNA sense strand
ggacuuaacuucaucaaug

SEQ ID NO: 787163 - RNA, 19 nt, Homo sapiens
  misc_RNA (1)...(19): siRNA sense strand
gaagaaaugugaacuuguu

SEQ ID NO: 787164 - RNA, 19 nt, Homo sapiens
  misc_RNA (1)...(19): siRNA sense strand
gagaguugcuugaauauuu

SEQ ID NO: 787165 - RNA, 19 nt, Homo sapiens
  misc_RNA (1)...(19): siRNA sense strand
caaacagacugcucuauaa

SEQ ID NO: 787166 - RNA, 19 nt, Homo sapiens
  misc_RNA (1)...(19): siRNA sense strand
gagguuacuugauuucuua

SEQ ID NO: 787167 - RNA, 19 nt, Homo sapiens
  misc_RNA (1)...(19): siRNA sense strand
aaacaaagcugaccaucuu

SEQ ID NO: 787168 - RNA, 19 nt, Homo sapiens
  misc_RNA (1)...(19): siRNA sense strand
gaaauaugcuaaaguggaa

SEQ ID NO: 787169 - RNA, 19 nt, Homo sapiens
  misc_RNA (1)...(19): siRNA sense strand
ggagaaauaugcuaaagug

SEQ ID NO: 787170 - RNA, 19 nt, Homo sapiens
  misc_RNA (1)...(19): siRNA sense strand
gcaaacagacugcucuaua

SEQ ID NO: 787171 - RNA, 19 nt, Homo sapiens
  misc_RNA (1)...(19): siRNA sense strand
cagcagcucucccaguuua

SEQ ID NO: 787172 - RNA, 19 nt, Homo sapiens
  misc_RNA (1)...(19): siRNA sense strand
gcagaagaauuaccuccua

SEQ ID NO: 787173 - RNA, 19 nt, Homo sapiens
  misc_RNA (1)...(19): siRNA sense strand
gaagaauuaccuccuauuu

SEQ ID NO: 787174 - RNA, 19 nt, Homo sapiens
  misc_RNA (1)...(19): siRNA sense strand
cagcugagguuacuugauu

SEQ ID NO: 787175 - RNA, 19 nt, Homo sapiens
  misc_RNA (1)...(19): siRNA sense strand
ucaagcagguguuccauuu

SEQ ID NO: 787176 - RNA, 19 nt, Homo sapiens
  misc_RNA (1)...(19): siRNA sense strand
gaaccacucugucuugauc

SEQ ID NO: 787177 - RNA, 19 nt, Homo sapiens
  misc_RNA (1)...(19): siRNA sense strand
gcaggaaauuguguagaua

SEQ ID NO: 787178 - RNA, 19 nt, Homo sapiens
  misc_RNA (1)...(19): siRNA sense strand
gaaauuguguagauaugug

SEQ ID NO: 787179 - RNA, 19 nt, Homo sapiens
  misc_RNA (1)...(19): siRNA sense strand
uaaagcagaugaagaaagu

SEQ ID NO: 787180 - RNA, 19 nt, Homo sapiens
  misc_RNA (1)...(19): siRNA sense strand
caagagacuuugucauguu

SEQ ID NO: 787181 - RNA, 19 nt, Homo sapiens
  misc_RNA (1)...(19): siRNA sense strand
ccaggugguucacuuauuu

SEQ ID NO: 787182 - RNA, 19 nt, Homo sapiens
  misc_RNA (1)...(19): siRNA sense strand
gaaggagaguugcuugaau

SEQ ID NO: 787183 - RNA, 19 nt, Homo sapiens
  misc_RNA (1)...(19): siRNA sense strand
gaugaacacucgcccaaug

SEQ ID NO: 787184 - RNA, 19 nt, Homo sapiens
  misc_RNA (1)...(19): siRNA sense strand
gcaagagacuuugucaugu

SEQ ID NO: 787185 - RNA, 19 nt, Homo sapiens
  misc_RNA (1)...(19): siRNA sense strand
gaaagaaacagaucaaacu

SEQ ID NO: 787186 - RNA, 19 nt, Homo sapiens
  misc_RNA (1)...(19): siRNA sense strand
ugaaguagauguggagaaa

SEQ ID NO: 787187 - RNA, 19 nt, Homo sapiens
  misc_RNA (1)...(19): siRNA sense strand
aaggagaguugcuugaaua

SEQ ID NO: 787188 - RNA, 19 nt, Homo sapiens
  misc_RNA (1)...(19): siRNA sense strand
aaguagauguggagaaaua

SEQ ID NO: 787189 - RNA, 19 nt, Homo sapiens
  misc_RNA (1)...(19): siRNA sense strand
gaaauaguuccucagguaa

SEQ ID NO: 787190 - RNA, 19 nt, Homo sapiens
  misc_RNA (1)...(19): siRNA sense strand
caaauugguucauuauugg

SEQ ID NO: 787191 - RNA, 19 nt, Homo sapiens
  misc_RNA (1)...(19): siRNA sense strand
agaaacagaucaaacugaa

SEQ ID NO: 787192 - RNA, 19 nt, Homo sapiens
  misc_RNA (1)...(19): siRNA sense strand
ggaaacggagucccuguaa

SEQ ID NO: 787193 - RNA, 19 nt, Homo sapiens
  misc_RNA (1)...(19): siRNA sense strand
gagauccacuuuacuaugg

SEQ ID NO: 787194 - RNA, 19 nt, Homo sapiens
  misc_RNA (1)...(19): siRNA sense strand
cagaugaucauucaaauug

SEQ ID NO: 787195 - RNA, 19 nt, Homo sapiens
  misc_RNA (1)...(19): siRNA sense strand
uagagaagcuuguuaugca

SEQ ID NO: 787196 - RNA, 19 nt, Homo sapiens
  misc_RNA (1)...(19): siRNA sense strand
gaaagugacagccagaugu

SEQ ID NO: 787197 - RNA, 19 nt, Homo sapiens
  misc_RNA (1)...(19): siRNA sense strand
ccacagaugaucauucaaa

SEQ ID NO: 787198 - RNA, 19 nt, Homo sapiens
  misc_RNA (1)...(19): siRNA sense strand
gaaacggagucccuguaau

SEQ ID NO: 787199 - RNA, 19 nt, Homo sapiens
  misc_RNA (1)...(19): siRNA sense strand
gaaaucaucuguggaucuc

SEQ ID NO: 787200 - RNA, 19 nt, Homo sapiens
  misc_RNA (1)...(19): siRNA sense strand
gaaaugugaacuuguuaga

SEQ ID NO: 787201 - RNA, 19 nt, Homo sapiens
  misc_RNA (1)...(19): siRNA sense strand
aaacggagucccuguaauu

SEQ ID NO: 787202 - RNA, 19 nt, Homo sapiens
  misc_RNA (1)...(19): siRNA sense strand
gaaaagcaggucagcauua

SEQ ID NO: 787203 - RNA, 19 nt, Homo sapiens
  misc_RNA (1)...(19): siRNA sense strand
aaugugaacuuguuagaga

SEQ ID NO: 787204 - RNA, 19 nt, Homo sapiens
  misc_RNA (1)...(19): siRNA sense strand
caaucaguaccaagaauua

SEQ ID NO: 787205 - RNA, 19 nt, Homo sapiens
  misc_RNA (1)...(19): siRNA sense strand
caacaaugcagacuuuaau

SEQ ID NO: 787206 - RNA, 19 nt, Homo sapiens
  misc_RNA (1)...(19): siRNA sense strand
guccaacaaugcagacuuu

SEQ ID NO: 787207 - RNA, 19 nt, Homo sapiens
  misc_RNA (1)...(19): siRNA sense strand
gaaaugagggauauucucu

SEQ ID NO: 787208 - RNA, 19 nt, Homo sapiens
  misc_RNA (1)...(19): siRNA sense strand
caggaggucugcuaccaaa

SEQ ID NO: 787209 - RNA, 19 nt, Homo sapiens
  misc_RNA (1)...(19): siRNA sense strand
ugagggauauucucugaug

SEQ ID NO: 787210 - RNA, 19 nt, Homo sapiens
  misc_RNA (1)...(19): siRNA sense strand
aagaagaaaugugaacuug

SEQ ID NO: 787211 - RNA, 19 nt, Homo sapiens
  misc_RNA (1)...(19): siRNA sense strand
ggaaaagucuaucaaaucu

SEQ ID NO: 787212 - RNA, 19 nt, Homo sapiens
  misc_RNA (1)...(19): siRNA sense strand
gaacacucgcccaaugaaa

SEQ ID NO: 787213 - RNA, 19 nt, Homo sapiens
  misc_RNA (1)...(19): siRNA sense strand
caugaaaucuccugguuac

SEQ ID NO: 787214 - RNA, 19 nt, Homo sapiens
  misc_RNA (1)...(19): siRNA sense strand
gcaguccaguaacaugaaa

SEQ ID NO: 787215 - RNA, 19 nt, Homo sapiens
  misc_RNA (1)...(19): siRNA sense strand
ggcaggaaauuguguagau

SEQ ID NO: 787216 - RNA, 19 nt, Homo sapiens
  misc_RNA (1)...(19): siRNA sense strand
cagaguaugucauugaaag

SEQ ID NO: 787217 - RNA, 19 nt, Homo sapiens
  misc_RNA (1)...(19): siRNA sense strand
caacaagcuuuagaacuag

SEQ ID NO: 787218 - RNA, 19 nt, Homo sapiens
  misc_RNA (1)...(19): siRNA sense strand
ggcaaacucugcuggacuu

SEQ ID NO: 787219 - RNA, 19 nt, Homo sapiens
  misc_RNA (1)...(19): siRNA sense strand
ccaaauguccggucaagau

SEQ ID NO: 787220 - RNA, 19 nt, Homo sapiens
  misc_RNA (1)...(19): siRNA sense strand
aagaauuaguccagaauga

SEQ ID NO: 787221 - RNA, 19 nt, Homo sapiens
  misc_RNA (1)...(19): siRNA sense strand
caaugcagacuuuaauuug

SEQ ID NO: 787222 - RNA, 19 nt, Homo sapiens
  misc_RNA (1)...(19): siRNA sense strand
ucuaagccaucaaguauuc

SEQ ID NO: 787223 - RNA, 19 nt, Homo sapiens
  misc_RNA (1)...(19): siRNA sense strand
ccauucgacugcccuauga

SEQ ID NO: 787224 - RNA, 19 nt, Homo sapiens
  misc_RNA (1)...(19): siRNA sense strand
ggagcaggguucugagcaa

SEQ ID NO: 787225 - RNA, 19 nt, Homo sapiens
  misc_RNA (1)...(19): siRNA sense strand
gguguuccauuugguuuaa

SEQ ID NO: 787226 - RNA, 19 nt, Homo sapiens
  misc_RNA (1)...(19): siRNA sense strand
ccacccaggucauggcaaa

SEQ ID NO: 787227 - RNA, 19 nt, Homo sapiens
  misc_RNA (1)...(19): siRNA sense strand
caaucaaacuucccucaag

SEQ ID NO: 787228 - RNA, 19 nt, Homo sapiens
  misc_RNA (1)...(19): siRNA sense strand
guccacagaugaucauuca

SEQ ID NO: 787229 - RNA, 19 nt, Homo sapiens
  misc_RNA (1)...(19): siRNA sense strand
caagugauaaccacaaaug

SEQ ID NO: 787230 - RNA, 19 nt, Homo sapiens
  misc_RNA (1)...(19): siRNA sense strand
agaauuaccuccuauuuug

SEQ ID NO: 787231 - RNA, 19 nt, Homo sapiens
  misc_RNA (1)...(19): siRNA sense strand
ggaaagaaacagaucaaac

SEQ ID NO: 787232 - RNA, 19 nt, Homo sapiens
  misc_RNA (1)...(19): siRNA sense strand
gauccacuuuacuauggua

SEQ ID NO: 787233 - RNA, 19 nt, Homo sapiens
  misc_RNA (1)...(19): siRNA sense strand
guuuaguggucaaucuaua

SEQ ID NO: 787234 - RNA, 19 nt, Homo sapiens
  misc_RNA (1)...(19): siRNA sense strand
guagugggcucuguuugug

SEQ ID NO: 787235 - RNA, 19 nt, Homo sapiens
  misc_RNA (1)...(19): siRNA sense strand
ggagauccacuuuacuaug

SEQ ID NO: 787236 - RNA, 19 nt, Homo sapiens
  misc_RNA (1)...(19): siRNA sense strand
cagaagaauuaccuccuau

SEQ ID NO: 787237 - RNA, 19 nt, Homo sapiens
  misc_RNA (1)...(19): siRNA sense strand
acagacugcucuauaacaa

SEQ ID NO: 787238 - RNA, 19 nt, Homo sapiens
  misc_RNA (1)...(19): siRNA sense strand
ggaggucugcuaccaaaug

SEQ ID NO: 787239 - RNA, 19 nt, Homo sapiens
  misc_RNA (1)...(19): siRNA sense strand
cgacagagaccuccuaaaa

SEQ ID NO: 787240 - RNA, 19 nt, Homo sapiens
  misc_RNA (1)...(19): siRNA sense strand
gaaacagaucaaacugaaa

SEQ ID NO: 787241 - RNA, 19 nt, Homo sapiens
  misc_RNA (1)...(19): siRNA sense strand
aagagacuuugucauguuu

SEQ ID NO: 787242 - RNA, 19 nt, Homo sapiens
  misc_RNA (1)...(19): siRNA sense strand
gacuuaacuucaucaaugu

SEQ ID NO: 787243 - RNA, 19 nt, Homo sapiens
  misc_RNA (1)...(19): siRNA sense strand
ccaacaaugcagacuuuaa

SEQ ID NO: 787244 - RNA, 19 nt, Homo sapiens
  misc_RNA (1)...(19): siRNA sense strand
aaugagggauauucucuga

SEQ ID NO: 787245 - RNA, 19 nt, Homo sapiens
  misc_RNA (1)...(19): siRNA sense strand
guggaucucaaucaaguua

SEQ ID NO: 787246 - RNA, 19 nt, Homo sapiens
  misc_RNA (1)...(19): siRNA sense strand
cacauucucuuacguccaa

SEQ ID NO: 787247 - RNA, 19 nt, Homo sapiens
  misc_RNA (1)...(19): siRNA sense strand
ccugccagcucaucacaaa

SEQ ID NO: 787248 - RNA, 19 nt, Homo sapiens
  misc_RNA (1)...(19): siRNA sense strand
ugaaagugcccgacagaga

SEQ ID NO: 787249 - RNA, 19 nt, Homo sapiens
  misc_RNA (1)...(19): siRNA sense strand
gaugaucauucaaauuggu

SEQ ID NO: 787250 - RNA, 19 nt, Homo sapiens
  misc_RNA (1)...(19): siRNA sense strand
ucucuuacguccaacaaug

SEQ ID NO: 787251 - RNA, 19 nt, Homo sapiens
  misc_RNA (1)...(19): siRNA sense strand
uagcagaaauacgugacua

SEQ ID NO: 787252 - RNA, 19 nt, Homo sapiens
  misc_RNA (1)...(19): siRNA sense strand
caacuccuccuccuucuuc

SEQ ID NO: 787253 - RNA, 19 nt, Homo sapiens
  misc_RNA (1)...(19): siRNA sense strand
acaaauggacccaggaaga

SEQ ID NO: 787254 - RNA, 19 nt, Homo sapiens
  misc_RNA (1)...(19): siRNA sense strand
uaacacuggugccauaacu

SEQ ID NO: 787255 - RNA, 19 nt, Homo sapiens
  misc_RNA (1)...(19): siRNA sense strand
ggaaaucaucuguggaucu

SEQ ID NO: 787256 - RNA, 19 nt, Homo sapiens
  misc_RNA (1)...(19): siRNA sense strand
gugcagaguaugucauuga

SEQ ID NO: 787257 - RNA, 19 nt, Homo sapiens
  misc_RNA (1)...(19): siRNA sense strand
aagcaggucagcauuauga

SEQ ID NO: 787258 - RNA, 19 nt, Homo sapiens
  misc_RNA (1)...(19): siRNA sense strand
gagacuuugucauguuuag

SEQ ID NO: 787259 - RNA, 19 nt, Homo sapiens
  misc_RNA (1)...(19): siRNA sense strand
ucaguucagucuucgguau

SEQ ID NO: 787260 - RNA, 19 nt, Homo sapiens
  misc_RNA (1)...(19): siRNA sense strand
aaauaccuaucaaguggaa

SEQ ID NO: 787261 - RNA, 19 nt, Homo sapiens
  misc_RNA (1)...(19): siRNA sense strand
ggauaaggcucgagucuug

SEQ ID NO: 787262 - RNA, 19 nt, Homo sapiens
  misc_RNA (1)...(19): siRNA sense strand
gaagaagacccucaacuug

SEQ ID NO: 787263 - RNA, 19 nt, Homo sapiens
  misc_RNA (1)...(19): siRNA sense strand
gaacaaagugagagaugaa

SEQ ID NO: 787264 - RNA, 19 nt, Homo sapiens
  misc_RNA (1)...(19): siRNA sense strand
aaagauggguuugcacuaa

SEQ ID NO: 787265 - RNA, 19 nt, Homo sapiens
  misc_RNA (1)...(19): siRNA sense strand
gcaaauuuaucaagcaucu

SEQ ID NO: 787266 - RNA, 19 nt, Homo sapiens
  misc_RNA (1)...(19): siRNA sense strand
uaaaugccuugcuggauug

SEQ ID NO: 787267 - RNA, 19 nt, Homo sapiens
  misc_RNA (1)...(19): siRNA sense strand
auaaaugccuugcuggauu

SEQ ID NO: 787268 - RNA, 19 nt, Homo sapiens
  misc_RNA (1)...(19): siRNA sense strand
gaccaacucuugcguaaaa

SEQ ID NO: 787269 - RNA, 19 nt, Homo sapiens
  misc_RNA (1)...(19): siRNA sense strand
gaagacaugaacaaaguga

SEQ ID NO: 787270 - RNA, 19 nt, Homo sapiens
  misc_RNA (1)...(19): siRNA sense strand
cuugcuggauugccuauua

SEQ ID NO: 787271 - RNA, 19 nt, Homo sapiens
  misc_RNA (1)...(19): siRNA sense strand
ugaagaagacccucaacuu

SEQ ID NO: 787272 - RNA, 19 nt, Homo sapiens
  misc_RNA (1)...(19): siRNA sense strand
ucaagcaucucugugaaga

SEQ ID NO: 787273 - RNA, 19 nt, Homo sapiens
  misc_RNA (1)...(19): siRNA sense strand
ugaacaaagugagagauga

SEQ ID NO: 787274 - RNA, 19 nt, Homo sapiens
  misc_RNA (1)...(19): siRNA sense strand
uaucaagcaucucugugaa

SEQ ID NO: 787275 - RNA, 19 nt, Homo sapiens
  misc_RNA (1)...(19): siRNA sense strand
aggaagacaugaacaaagu

SEQ ID NO: 787276 - RNA, 19 nt, Homo sapiens
  misc_RNA (1)...(19): siRNA sense strand
ccuauuagaggaugaaguu

SEQ ID NO: 787277 - RNA, 19 nt, Homo sapiens
  misc_RNA (1)...(19): siRNA sense strand
cugaccaacucuugcguaa

SEQ ID NO: 787278 - RNA, 19 nt, Homo sapiens
  misc_RNA (1)...(19): siRNA sense strand
ccaggaagacaugaacaaa

SEQ ID NO: 787279 - RNA, 19 nt, Homo sapiens
  misc_RNA (1)...(19): siRNA sense strand
gcugcaaauuuaucaagca

SEQ ID NO: 787280 - RNA, 19 nt, Homo sapiens
  misc_RNA (1)...(19): siRNA sense strand
acccucaacuugccucaaa

SEQ ID NO: 787281 - RNA, 19 nt, Homo sapiens
  misc_RNA (1)...(19): siRNA sense strand
aagcaucucugugaagaag

SEQ ID NO: 787282 - RNA, 19 nt, Homo sapiens
  misc_RNA (1)...(19): siRNA sense strand
ucaacuugccucaaagaug

SEQ ID NO: 787283 - RNA, 19 nt, Homo sapiens
  misc_RNA (1)...(19): siRNA sense strand
agacaugaacaaagugaga

SEQ ID NO: 787284 - RNA, 19 nt, Homo sapiens
  misc_RNA (1)...(19): siRNA sense strand
ggaagacaugaacaaagug

SEQ ID NO: 787285 - RNA, 19 nt, Homo sapiens
  misc_RNA (1)...(19): siRNA sense strand
gauaaggcucgagucuuga

SEQ ID NO: 787286 - RNA, 19 nt, Homo sapiens
  misc_RNA (1)...(19): siRNA sense strand
uuaucaagcaucucuguga

SEQ ID NO: 787287 - RNA, 19 nt, Homo sapiens
  misc_RNA (1)...(19): siRNA sense strand
gcaucucugugaagaagac

SEQ ID NO: 787288 - RNA, 19 nt, Homo sapiens
  misc_RNA (1)...(19): siRNA sense strand
gccaggaagacaugaacaa

SEQ ID NO: 787289 - RNA, 19 nt, Homo sapiens
  misc_RNA (1)...(19): siRNA sense strand
ggaaaaggacccaagucuu

SEQ ID NO: 787290 - RNA, 19 nt, Homo sapiens
  misc_RNA (1)...(19): siRNA sense strand
ugaaguuauuagccaggaa

SEQ ID NO: 787291 - RNA, 19 nt, Homo sapiens
  misc_RNA (1)...(19): siRNA sense strand
guuauuagccaggaagaca

SEQ ID NO: 787292 - RNA, 19 nt, Homo sapiens
  misc_RNA (1)...(19): siRNA sense strand
gagucuugauugaccuugu

SEQ ID NO: 787293 - RNA, 19 nt, Homo sapiens
  misc_RNA (1)...(19): siRNA sense strand
caggaagacaugaacaaag

SEQ ID NO: 787294 - RNA, 19 nt, Homo sapiens
  misc_RNA (1)...(19): siRNA sense strand
aggcucgagucuugauuga

SEQ ID NO: 787295 - RNA, 19 nt, Homo sapiens
  misc_RNA (1)...(19): siRNA sense strand
agucuugauugaccuuguu

SEQ ID NO: 787296 - RNA, 19 nt, Homo sapiens
  misc_RNA (1)...(19): siRNA sense strand
gagaagcugugggagagua

SEQ ID NO: 787297 - RNA, 19 nt, Homo sapiens
  misc_RNA (1)...(19): siRNA sense strand
gcgccuggcucaucuguug

SEQ ID NO: 787298 - RNA, 19 nt, Homo sapiens
  misc_RNA (1)...(19): siRNA sense strand
ggaaggaggaggagugcau

SEQ ID NO: 787299 - RNA, 19 nt, Homo sapiens
  misc_RNA (1)...(19): siRNA sense strand
agggagaggugaaggugaa

SEQ ID NO: 787300 - RNA, 19 nt, Homo sapiens
  misc_RNA (1)...(19): siRNA sense strand
gagcaggcacggcuaugug

SEQ ID NO: 787301 - RNA, 19 nt, Homo sapiens
  misc_RNA (1)...(19): siRNA sense strand
ggacaagggagaggugaag

SEQ ID NO: 787302 - RNA, 19 nt, Homo sapiens
  misc_RNA (1)...(19): siRNA sense strand
guggacgacugcaacaagu

SEQ ID NO: 787303 - RNA, 19 nt, Homo sapiens
  misc_RNA (1)...(19): siRNA sense strand
ggagcaggcacggcuaugu

SEQ ID NO: 787304 - RNA, 19 nt, Homo sapiens
  misc_RNA (1)...(19): siRNA sense strand
ggagaguacaucgcacugu

SEQ ID NO: 787305 - RNA, 19 nt, Homo sapiens
  misc_RNA (1)...(19): siRNA sense strand
gaggagcaggcacggcuau

SEQ ID NO: 787306 - RNA, 19 nt, Homo sapiens
  misc_RNA (1)...(19): siRNA sense strand
uaugugggcagcugaagga

SEQ ID NO: 787307 - RNA, 19 nt, Homo sapiens
  misc_RNA (1)...(19): siRNA sense strand
ccaccuacauuaacaggaa

SEQ ID NO: 787308 - RNA, 19 nt, Homo sapiens
  misc_RNA (1)...(19): siRNA sense strand
cggaauauccacuauaauu

SEQ ID NO: 787309 - RNA, 19 nt, Homo sapiens
  misc_RNA (1)...(19): siRNA sense strand
caacacauuccaugggaua

SEQ ID NO: 787310 - RNA, 19 nt, Homo sapiens
  misc_RNA (1)...(19): siRNA sense strand
caacaggaauaccuagaca

SEQ ID NO: 787311 - RNA, 19 nt, Homo sapiens
  misc_RNA (1)...(19): siRNA sense strand
gacuuuaccaccuacauua

SEQ ID NO: 787312 - RNA, 19 nt, Homo sapiens
  misc_RNA (1)...(19): siRNA sense strand
ggacaugcaugagguugug

SEQ ID NO: 787313 - RNA, 19 nt, Homo sapiens
  misc_RNA (1)...(19): siRNA sense strand
uggacuaucugaugaagaa

SEQ ID NO: 787314 - RNA, 19 nt, Homo sapiens
  misc_RNA (1)...(19): siRNA sense strand
gaugaagaaugccauaaaa

SEQ ID NO: 787315 - RNA, 19 nt, Homo sapiens
  misc_RNA (1)...(19): siRNA sense strand
gaugaagaaugccgacuac

SEQ ID NO: 787316 - RNA, 19 nt, Homo sapiens
  misc_RNA (1)...(19): siRNA sense strand
cagaggacuuuaccaccua

SEQ ID NO: 787317 - RNA, 19 nt, Homo sapiens
  misc_RNA (1)...(19): siRNA sense strand
gaaagcauugcauggacua

SEQ ID NO: 787318 - RNA, 19 nt, Homo sapiens
  misc_RNA (1)...(19): siRNA sense strand
ggacuuuaccaccuacauu

SEQ ID NO: 787319 - RNA, 19 nt, Homo sapiens
  misc_RNA (1)...(19): siRNA sense strand
gcaggagcauugguuugaa

SEQ ID NO: 787320 - RNA, 19 nt, Homo sapiens
  misc_RNA (1)...(19): siRNA sense strand
caggagcauugguuugaaa

SEQ ID NO: 787321 - RNA, 19 nt, Homo sapiens
  misc_RNA (1)...(19): siRNA sense strand
gaugcuagaagacaagaaa

SEQ ID NO: 787322 - RNA, 19 nt, Homo sapiens
  misc_RNA (1)...(19): siRNA sense strand
gcaaccacauugagaugca

SEQ ID NO: 787323 - RNA, 19 nt, Homo sapiens
  misc_RNA (1)...(19): siRNA sense strand
ggauggcgccugucucuuc

SEQ ID NO: 787324 - RNA, 19 nt, Homo sapiens
  misc_RNA (1)...(19): siRNA sense strand
caacagugaggacgaguau

SEQ ID NO: 787325 - RNA, 19 nt, Homo sapiens
  misc_RNA (1)...(19): siRNA sense strand
aauccuaccugcagugguu

SEQ ID NO: 787326 - RNA, 19 nt, Homo sapiens
  misc_RNA (1)...(19): siRNA sense strand
ugagcugcaugcugaauug

SEQ ID NO: 787327 - RNA, 19 nt, Homo sapiens
  misc_RNA (1)...(19): siRNA sense strand
ggaaagccagcgccacaug

SEQ ID NO: 787328 - RNA, 19 nt, Homo sapiens
  misc_RNA (1)...(19): siRNA sense strand
ugaagaaugccgacuacuu

SEQ ID NO: 787329 - RNA, 19 nt, Homo sapiens
  misc_RNA (1)...(19): siRNA sense strand
ugcaugagguugugcgaaa

SEQ ID NO: 787330 - RNA, 19 nt, Homo sapiens
  misc_RNA (1)...(19): siRNA sense strand
ugacugggaugaugaugag

SEQ ID NO: 787331 - RNA, 19 nt, Homo sapiens
  misc_RNA (1)...(19): siRNA sense strand
aaacgaggacgaacccauu

SEQ ID NO: 787332 - RNA, 19 nt, Homo sapiens
  misc_RNA (1)...(19): siRNA sense strand
acagugaggacgaguauga

SEQ ID NO: 787333 - RNA, 19 nt, Homo sapiens
  misc_RNA (1)...(19): siRNA sense strand
aaacaucggaggagucaug

SEQ ID NO: 787334 - RNA, 19 nt, Homo sapiens
  misc_RNA (1)...(19): siRNA sense strand
gcagcaggagcauugguuu

SEQ ID NO: 787335 - RNA, 19 nt, Homo sapiens
  misc_RNA (1)...(19): siRNA sense strand
ccgacuacuucuccaacua

SEQ ID NO: 787336 - RNA, 19 nt, Homo sapiens
  misc_RNA (1)...(19): siRNA sense strand
gaaaaggcccuacgagaca

SEQ ID NO: 787337 - RNA, 19 nt, Homo sapiens
  misc_RNA (1)...(19): siRNA sense strand
uggaacccaucaacacauu

SEQ ID NO: 787338 - RNA, 19 nt, Homo sapiens
  misc_RNA (1)...(19): siRNA sense strand
gagaccaggacaugcauga

SEQ ID NO: 787339 - RNA, 19 nt, Homo sapiens
  misc_RNA (1)...(19): siRNA sense strand
ugaugaagaaugccauaaa

SEQ ID NO: 787340 - RNA, 19 nt, Homo sapiens
  misc_RNA (1)...(19): siRNA sense strand
cuguggagguguaccagua

SEQ ID NO: 787341 - RNA, 19 nt, Homo sapiens
  misc_RNA (1)...(19): siRNA sense strand
agcagucucugaugaagaa

SEQ ID NO: 787342 - RNA, 19 nt, Homo sapiens
  misc_RNA (1)...(19): siRNA sense strand
cagcacgcaucgaggcuau

SEQ ID NO: 787343 - RNA, 19 nt, Homo sapiens
  misc_RNA (1)...(19): siRNA sense strand
acaagaaacgggccacaga

SEQ ID NO: 787344 - RNA, 19 nt, Homo sapiens
  misc_RNA (1)...(19): siRNA sense strand
ucggaggagucauggauug

SEQ ID NO: 787345 - RNA, 19 nt, Homo sapiens
  misc_RNA (1)...(19): siRNA sense strand
aucggaauauccacuauaa

SEQ ID NO: 787346 - RNA, 19 nt, Homo sapiens
  misc_RNA (1)...(19): siRNA sense strand
caucggaauauccacuaua

SEQ ID NO: 787347 - RNA, 19 nt, Homo sapiens
  misc_RNA (1)...(19): siRNA sense strand
gagguugugcgaaagcauu

SEQ ID NO: 787348 - RNA, 19 nt, Homo sapiens
  misc_RNA (1)...(19): siRNA sense strand
ugaaugacugggaugauga

SEQ ID NO: 787349 - RNA, 19 nt, Homo sapiens
  misc_RNA (1)...(19): siRNA sense strand
cgacuacuucuccaacuau

SEQ ID NO: 787350 - RNA, 19 nt, Homo sapiens
  misc_RNA (1)...(19): siRNA sense strand
gaggauggcgccugucucu

SEQ ID NO: 787351 - RNA, 19 nt, Homo sapiens
  misc_RNA (1)...(19): siRNA sense strand
ggcugggccugccaucauu

SEQ ID NO: 787352 - RNA, 19 nt, Homo sapiens
  misc_RNA (1)...(19): siRNA sense strand
gcaguggaacccaucaaca

SEQ ID NO: 787353 - RNA, 19 nt, Homo sapiens
  misc_RNA (1)...(19): siRNA sense strand
ugcauggacuaucugauga

SEQ ID NO: 787354 - RNA, 19 nt, Homo sapiens
  misc_RNA (1)...(19): siRNA sense strand
ggaggagucauggauugaa

SEQ ID NO: 787355 - RNA, 19 nt, Homo sapiens
  misc_RNA (1)...(19): siRNA sense strand
cugaaugacugggaugaug

SEQ ID NO: 787356 - RNA, 19 nt, Homo sapiens
  misc_RNA (1)...(19): siRNA sense strand
gaggagucauggauugaac

SEQ ID NO: 787357 - RNA, 19 nt, Homo sapiens
  misc_RNA (1)...(19): siRNA sense strand
gggccugccaucauucaaa

SEQ ID NO: 787358 - RNA, 19 nt, Homo sapiens
  misc_RNA (1)...(19): siRNA sense strand
ggcagugucccaacaggaa

SEQ ID NO: 787359 - RNA, 19 nt, Homo sapiens
  misc_RNA (1)...(19): siRNA sense strand
gagcagucucugaugaaga

SEQ ID NO: 787360 - RNA, 19 nt, Homo sapiens
  misc_RNA (1)...(19): siRNA sense strand
gcauggacuaucugaugaa

SEQ ID NO: 787361 - RNA, 19 nt, Homo sapiens
  misc_RNA (1)...(19): siRNA sense strand
gaugaugagauccuagcuu

SEQ ID NO: 787362 - RNA, 19 nt, Homo sapiens
  misc_RNA (1)...(19): siRNA sense strand
ugaugaagaaugccgacua

SEQ ID NO: 787363 - RNA, 19 nt, Homo sapiens
  misc_RNA (1)...(19): siRNA sense strand
acugggaggccacaaauga

SEQ ID NO: 787364 - RNA, 19 nt, Homo sapiens
  misc_RNA (1)...(19): siRNA sense strand
aaaacaaagugcacagaga

SEQ ID NO: 787365 - RNA, 19 nt, Homo sapiens
  misc_RNA (1)...(19): siRNA sense strand
ccuagacaguaugaagaaa

SEQ ID NO: 787366 - RNA, 19 nt, Homo sapiens
  misc_RNA (1)...(19): siRNA sense strand
gcaugagguugugcgaaag

SEQ ID NO: 787367 - RNA, 19 nt, Homo sapiens
  misc_RNA (1)...(19): siRNA sense strand
caggaauaccuagacagua

SEQ ID NO: 787368 - RNA, 19 nt, Homo sapiens
  misc_RNA (1)...(19): siRNA sense strand
gaaugacugggaugaugau

SEQ ID NO: 787369 - RNA, 19 nt, Homo sapiens
  misc_RNA (1)...(19): siRNA sense strand
gguacaagcagucaguucu

SEQ ID NO: 787370 - RNA, 19 nt, Homo sapiens
  misc_RNA (1)...(19): siRNA sense strand
gacuacuucuccaacuaug

SEQ ID NO: 787371 - RNA, 19 nt, Homo sapiens
  misc_RNA (1)...(19): siRNA sense strand
uagcugaccagguguaugg

SEQ ID NO: 787372 - RNA, 19 nt, Homo sapiens
  misc_RNA (1)...(19): siRNA sense strand
gcgcaggcuacaacaguga

SEQ ID NO: 787373 - RNA, 19 nt, Homo sapiens
  misc_RNA (1)...(19): siRNA sense strand
guauggagaccaggacaug

SEQ ID NO: 787374 - RNA, 19 nt, Homo sapiens
  misc_RNA (1)...(19): siRNA sense strand
ccaucggaauauccacuau

SEQ ID NO: 787375 - RNA, 19 nt, Homo sapiens
  misc_RNA (1)...(19): siRNA sense strand
ucgagcagcaggagcauug

SEQ ID NO: 787376 - RNA, 19 nt, Homo sapiens
  misc_RNA (1)...(19): siRNA sense strand
gcagaugcuagaagacaag

SEQ ID NO: 787377 - RNA, 19 nt, Homo sapiens
  misc_RNA (1)...(19): siRNA sense strand
caucggaggagucauggau

SEQ ID NO: 787378 - RNA, 19 nt, Homo sapiens
  misc_RNA (1)...(19): siRNA sense strand
ccuaacaaggccaccauug

SEQ ID NO: 787379 - RNA, 19 nt, Homo sapiens
  misc_RNA (1)...(19): siRNA sense strand
guugcgggaucaggagaaa

SEQ ID NO: 787380 - RNA, 19 nt, Homo sapiens
  misc_RNA (1)...(19): siRNA sense strand
ccacaaaugaagccaucga

SEQ ID NO: 787381 - RNA, 19 nt, Homo sapiens
  misc_RNA (1)...(19): siRNA sense strand
ggccugccaucauucaaac

SEQ ID NO: 787382 - RNA, 19 nt, Homo sapiens
  misc_RNA (1)...(19): siRNA sense strand
cagcaggagcauugguuug

SEQ ID NO: 787383 - RNA, 19 nt, Homo sapiens
  misc_RNA (1)...(19): siRNA sense strand
cuaacaaggccaccauugg

SEQ ID NO: 787384 - RNA, 19 nt, Homo sapiens
  misc_RNA (1)...(19): siRNA sense strand
guuagcuaccaucggaaua

SEQ ID NO: 787385 - RNA, 19 nt, Homo sapiens
  misc_RNA (1)...(19): siRNA sense strand
uugcauggacuaucugaug

SEQ ID NO: 787386 - RNA, 19 nt, Homo sapiens
  misc_RNA (1)...(19): siRNA sense strand
cauggcaaccacauugaga

SEQ ID NO: 787387 - RNA, 19 nt, Homo sapiens
  misc_RNA (1)...(19): siRNA sense strand
cuauggacccugccacugu

SEQ ID NO: 787388 - RNA, 19 nt, Homo sapiens
  misc_RNA (1)...(19): siRNA sense strand
gcagugucccaacaggaau

SEQ ID NO: 787389 - RNA, 19 nt, Homo sapiens
  misc_RNA (1)...(19): siRNA sense strand
guacaagcagucaguucuc

SEQ ID NO: 787390 - RNA, 19 nt, Homo sapiens
  misc_RNA (1)...(19): siRNA sense strand
uguuuuagcucuugccaaa

SEQ ID NO: 787391 - RNA, 19 nt, Homo sapiens
  misc_RNA (1)...(19): siRNA sense strand
uagcuaccaucggaauauc

SEQ ID NO: 787392 - RNA, 19 nt, Homo sapiens
  misc_RNA (1)...(19): siRNA sense strand
gaaagaggcucaaauuaaa

SEQ ID NO: 787393 - RNA, 19 nt, Homo sapiens
  misc_RNA (1)...(19): siRNA sense strand
gcauugagguccagaauua

SEQ ID NO: 787394 - RNA, 19 nt, Homo sapiens
  misc_RNA (1)...(19): siRNA sense strand
gaaaugaggagauuaguaa

SEQ ID NO: 787395 - RNA, 19 nt, Homo sapiens
  misc_RNA (1)...(19): siRNA sense strand
ggacagagcuagucagcaa

SEQ ID NO: 787396 - RNA, 19 nt, Homo sapiens
  misc_RNA (1)...(19): siRNA sense strand
gaaagagaaggcagaauua

SEQ ID NO: 787397 - RNA, 19 nt, Homo sapiens
  misc_RNA (1)...(19): siRNA sense strand
gggaagauauugccaguaa

SEQ ID NO: 787398 - RNA, 19 nt, Homo sapiens
  misc_RNA (1)...(19): siRNA sense strand
gaaagaagaacaagagaaa

SEQ ID NO: 787399 - RNA, 19 nt, Homo sapiens
  misc_RNA (1)...(19): siRNA sense strand
ccaaauagaugcugacaau

SEQ ID NO: 787400 - RNA, 19 nt, Homo sapiens
  misc_RNA (1)...(19): siRNA sense strand
ggaagaaagucaagaagug

SEQ ID NO: 787401 - RNA, 19 nt, Homo sapiens
  misc_RNA (1)...(19): siRNA sense strand
gaccacagcuugccaaaga

SEQ ID NO: 787402 - RNA, 19 nt, Homo sapiens
  misc_RNA (1)...(19): siRNA sense strand
ggaagaaggugagacauug

SEQ ID NO: 787403 - RNA, 19 nt, Homo sapiens
  misc_RNA (1)...(19): siRNA sense strand
gagcagaucuacauucaau

SEQ ID NO: 787404 - RNA, 19 nt, Homo sapiens
  misc_RNA (1)...(19): siRNA sense strand
gguagaaucuuacucagaa

SEQ ID NO: 787405 - RNA, 19 nt, Homo sapiens
  misc_RNA (1)...(19): siRNA sense strand
gaagaacuggguauuauuu

SEQ ID NO: 787406 - RNA, 19 nt, Homo sapiens
  misc_RNA (1)...(19): siRNA sense strand
uuacacagcuuguuaguga

SEQ ID NO: 787407 - RNA, 19 nt, Homo sapiens
  misc_RNA (1)...(19): siRNA sense strand
gcagucaucucuaucagaa

SEQ ID NO: 787408 - RNA, 19 nt, Homo sapiens
  misc_RNA (1)...(19): siRNA sense strand
guacacagauccuccagaa

SEQ ID NO: 787409 - RNA, 19 nt, Homo sapiens
  misc_RNA (1)...(19): siRNA sense strand
gaaagugacuccucucucu

SEQ ID NO: 787410 - RNA, 19 nt, Homo sapiens
  misc_RNA (1)...(19): siRNA sense strand
gcggguggcugucagaaua

SEQ ID NO: 787411 - RNA, 19 nt, Homo sapiens
  misc_RNA (1)...(19): siRNA sense strand
cagcacagaugaaugaauu

SEQ ID NO: 787412 - RNA, 19 nt, Homo sapiens
  misc_RNA (1)...(19): siRNA sense strand
ggaggaagaugacauugau

SEQ ID NO: 787413 - RNA, 19 nt, Homo sapiens
  misc_RNA (1)...(19): siRNA sense strand
gaagauauugccaguaauu

SEQ ID NO: 787414 - RNA, 19 nt, Homo sapiens
  misc_RNA (1)...(19): siRNA sense strand
ggauaagucugaugaaagu

SEQ ID NO: 787415 - RNA, 19 nt, Homo sapiens
  misc_RNA (1)...(19): siRNA sense strand
gagaaaggcauaugagaaa

SEQ ID NO: 787416 - RNA, 19 nt, Homo sapiens
  misc_RNA (1)...(19): siRNA sense strand
gguaauagccaaacaauca

SEQ ID NO: 787417 - RNA, 19 nt, Homo sapiens
  misc_RNA (1)...(19): siRNA sense strand
agaaagaggcucaaauuaa

SEQ ID NO: 787418 - RNA, 19 nt, Homo sapiens
  misc_RNA (1)...(19): siRNA sense strand
uaaaguggcugggaaaguu

SEQ ID NO: 787419 - RNA, 19 nt, Homo sapiens
  misc_RNA (1)...(19): siRNA sense strand
caagacagcucgcaugaag

SEQ ID NO: 787420 - RNA, 19 nt, Homo sapiens
  misc_RNA (1)...(19): siRNA sense strand
gaaggucgacucaaacaaa

SEQ ID NO: 787421 - RNA, 19 nt, Homo sapiens
  misc_RNA (1)...(19): siRNA sense strand
uaaugaugcugcaacauaa

SEQ ID NO: 787422 - RNA, 19 nt, Homo sapiens
  misc_RNA (1)...(19): siRNA sense strand
guccuugacuuauuugaua

SEQ ID NO: 787423 - RNA, 19 nt, Homo sapiens
  misc_RNA (1)...(19): siRNA sense strand
guaaagaggauaauacaga

SEQ ID NO: 787424 - RNA, 19 nt, Homo sapiens
  misc_RNA (1)...(19): siRNA sense strand
gacagagacuuuauggaaa

SEQ ID NO: 787425 - RNA, 19 nt, Homo sapiens
  misc_RNA (1)...(19): siRNA sense strand
gaacaaagaacugcagaga

SEQ ID NO: 787426 - RNA, 19 nt, Homo sapiens
  misc_RNA (1)...(19): siRNA sense strand
uaagacccaugucagauaa

SEQ ID NO: 787427 - RNA, 19 nt, Homo sapiens
  misc_RNA (1)...(19): siRNA sense strand
agauggagcucauggagua

SEQ ID NO: 787428 - RNA, 19 nt, Homo sapiens
  misc_RNA (1)...(19): siRNA sense strand
ccaccuggcuuaccuucua

SEQ ID NO: 787429 - RNA, 19 nt, Homo sapiens
  misc_RNA (1)...(19): siRNA sense strand
ugagcuagaugcuuuacua

SEQ ID NO: 787430 - RNA, 19 nt, Homo sapiens
  misc_RNA (1)...(19): siRNA sense strand
agaauuaaauccugagcua

SEQ ID NO: 787431 - RNA, 19 nt, Homo sapiens
  misc_RNA (1)...(19): siRNA sense strand
gaaggaugccauauuugua

SEQ ID NO: 787432 - RNA, 19 nt, Homo sapiens
  misc_RNA (1)...(19): siRNA sense strand
aauaauaaccugcguguaa

SEQ ID NO: 787433 - RNA, 19 nt, Homo sapiens
  misc_RNA (1)...(19): siRNA sense strand
gcacuuggcaauguaauaa

SEQ ID NO: 787434 - RNA, 19 nt, Homo sapiens
  misc_RNA (1)...(19): siRNA sense strand
ggagaaaggcauaugagaa

SEQ ID NO: 787435 - RNA, 19 nt, Homo sapiens
  misc_RNA (1)...(19): siRNA sense strand
acagagagauugcucaguu

SEQ ID NO: 787436 - RNA, 19 nt, Homo sapiens
  misc_RNA (1)...(19): siRNA sense strand
ggaaaugaggagauuagua

SEQ ID NO: 787437 - RNA, 19 nt, Homo sapiens
  misc_RNA (1)...(19): siRNA sense strand
cuauagagauuccaagcua

SEQ ID NO: 787438 - RNA, 19 nt, Homo sapiens
  misc_RNA (1)...(19): siRNA sense strand
gaacauggauacuuuuaug

SEQ ID NO: 787439 - RNA, 19 nt, Homo sapiens
  misc_RNA (1)...(19): siRNA sense strand
caagagauuggaaugaaua

SEQ ID NO: 787440 - RNA, 19 nt, Homo sapiens
  misc_RNA (1)...(19): siRNA sense strand
gcaagagauuggaaugaau

SEQ ID NO: 787441 - RNA, 19 nt, Homo sapiens
  misc_RNA (1)...(19): siRNA sense strand
gaaaucacacgacuucaga

SEQ ID NO: 787442 - RNA, 19 nt, Homo sapiens
  misc_RNA (1)...(19): siRNA sense strand
aagcaucaaugacauguuu

SEQ ID NO: 787443 - RNA, 19 nt, Homo sapiens
  misc_RNA (1)...(19): siRNA sense strand
gaacuagcuucagacacua

SEQ ID NO: 787444 - RNA, 19 nt, Homo sapiens
  misc_RNA (1)...(19): siRNA sense strand
cagaaagaggcucaaauua

SEQ ID NO: 787445 - RNA, 19 nt, Homo sapiens
  misc_RNA (1)...(19): siRNA sense strand
ccagaaagaggcucaaauu

SEQ ID NO: 787446 - RNA, 19 nt, Homo sapiens
  misc_RNA (1)...(19): siRNA sense strand
gggagaagauagucaagga

SEQ ID NO: 787447 - RNA, 19 nt, Homo sapiens
  misc_RNA (1)...(19): siRNA sense strand
guaagacccaugucagaua

SEQ ID NO: 787448 - RNA, 19 nt, Homo sapiens
  misc_RNA (1)...(19): siRNA sense strand
gcugauugaugaacuagaa

SEQ ID NO: 787449 - RNA, 19 nt, Homo sapiens
  misc_RNA (1)...(19): siRNA sense strand
uggcaaacauuacuuguga

SEQ ID NO: 787450 - RNA, 19 nt, Homo sapiens
  misc_RNA (1)...(19): siRNA sense strand
gaauggagagggagauaaa

SEQ ID NO: 787451 - RNA, 19 nt, Homo sapiens
  misc_RNA (1)...(19): siRNA sense strand
gaaaugggacuuaacucaa

SEQ ID NO: 787452 - RNA, 19 nt, Homo sapiens
  misc_RNA (1)...(19): siRNA sense strand
gagagaaccagaucaauca

SEQ ID NO: 787453 - RNA, 19 nt, Homo sapiens
  misc_RNA (1)...(19): siRNA sense strand
uaucagagauucagcaaag

SEQ ID NO: 787454 - RNA, 19 nt, Homo sapiens
  misc_RNA (1)...(19): siRNA sense strand
gaggaagaacuggguauua

SEQ ID NO: 787455 - RNA, 19 nt, Homo sapiens
  misc_RNA (1)...(19): siRNA sense strand
ggauguuacugcagucauu

SEQ ID NO: 787456 - RNA, 19 nt, Homo sapiens
  misc_RNA (1)...(19): siRNA sense strand
gaaguugggugcuuuaucc

SEQ ID NO: 787457 - RNA, 19 nt, Homo sapiens
  misc_RNA (1)...(19): siRNA sense strand
gaagaaagucaagaaguga

SEQ ID NO: 787458 - RNA, 19 nt, Homo sapiens
  misc_RNA (1)...(19): siRNA sense strand
gaucgaacugugagaauuu

SEQ ID NO: 787459 - RNA, 19 nt, Homo sapiens
  misc_RNA (1)...(19): siRNA sense strand
caaaugcacauaaggauug

SEQ ID NO: 787460 - RNA, 19 nt, Homo sapiens
  misc_RNA (1)...(19): siRNA sense strand
aaaugggacuuaacucaaa

SEQ ID NO: 787461 - RNA, 19 nt, Homo sapiens
  misc_RNA (1)...(19): siRNA sense strand
caaggaucauuacaucaaa

SEQ ID NO: 787462 - RNA, 19 nt, Homo sapiens
  misc_RNA (1)...(19): siRNA sense strand
ggacaccuaggcccuguua

SEQ ID NO: 787463 - RNA, 19 nt, Homo sapiens
  misc_RNA (1)...(19): siRNA sense strand
gaauugcuguaugcagaua

SEQ ID NO: 787464 - RNA, 19 nt, Homo sapiens
  misc_RNA (1)...(19): siRNA sense strand
gaagugaaaccuaagaaca

SEQ ID NO: 787465 - RNA, 19 nt, Homo sapiens
  misc_RNA (1)...(19): siRNA sense strand
ugaaagagaaggcagaauu

SEQ ID NO: 787466 - RNA, 19 nt, Homo sapiens
  misc_RNA (1)...(19): siRNA sense strand
gaagagauggagucacuga

SEQ ID NO: 787467 - RNA, 19 nt, Homo sapiens
  misc_RNA (1)...(19): siRNA sense strand
cagagaugaugcaguguuu

SEQ ID NO: 787468 - RNA, 19 nt, Homo sapiens
  misc_RNA (1)...(19): siRNA sense strand
ggucuucacuguaucaaca

SEQ ID NO: 787469 - RNA, 19 nt, Homo sapiens
  misc_RNA (1)...(19): siRNA sense strand
caaaagaucguacuuguaa

SEQ ID NO: 787470 - RNA, 19 nt, Homo sapiens
  misc_RNA (1)...(19): siRNA sense strand
ggcaagagauuggaaugaa

SEQ ID NO: 787471 - RNA, 19 nt, Homo sapiens
  misc_RNA (1)...(19): siRNA sense strand
aaccagcucuuauuccaua

SEQ ID NO: 787472 - RNA, 19 nt, Homo sapiens
  misc_RNA (1)...(19): siRNA sense strand
ggaagaagcaaaggaagaa

SEQ ID NO: 787473 - RNA, 19 nt, Homo sapiens
  misc_RNA (1)...(19): siRNA sense strand
aaacaaagguucgccuaau

SEQ ID NO: 787474 - RNA, 19 nt, Homo sapiens
  misc_RNA (1)...(19): siRNA sense strand
auacucagcuugaaagaga

SEQ ID NO: 787475 - RNA, 19 nt, Homo sapiens
  misc_RNA (1)...(19): siRNA sense strand
cuaaugaugcugcaacaua

SEQ ID NO: 787476 - RNA, 19 nt, Homo sapiens
  misc_RNA (1)...(19): siRNA sense strand
gaauuaaagccaugcaaga

SEQ ID NO: 787477 - RNA, 19 nt, Homo sapiens
  misc_RNA (1)...(19): siRNA sense strand
uaaccugcguguaagaauu

SEQ ID NO: 787478 - RNA, 19 nt, Homo sapiens
  misc_RNA (1)...(19): siRNA sense strand
gccaaucgagcuagaaaua

SEQ ID NO: 787479 - RNA, 19 nt, Homo sapiens
  misc_RNA (1)...(19): siRNA sense strand
agacagagacuuuauggaa

SEQ ID NO: 787480 - RNA, 19 nt, Homo sapiens
  misc_RNA (1)...(19): siRNA sense strand
gaaaugcugucaggaugug

SEQ ID NO: 787481 - RNA, 19 nt, Homo sapiens
  misc_RNA (1)...(19): siRNA sense strand
ccagagccuucuccuguaa

SEQ ID NO: 787482 - RNA, 19 nt, Homo sapiens
  misc_RNA (1)...(19): siRNA sense strand
gaagguugcuuugaaggau

SEQ ID NO: 787483 - RNA, 19 nt, Homo sapiens
  misc_RNA (1)...(19): siRNA sense strand
gcaaacauuacuugugaaa

SEQ ID NO: 787484 - RNA, 19 nt, Homo sapiens
  misc_RNA (1)...(19): siRNA sense strand
gacaagagccacagcaaga

SEQ ID NO: 787485 - RNA, 19 nt, Homo sapiens
  misc_RNA (1)...(19): siRNA sense strand
gcaaaucaaugcacuucgu

SEQ ID NO: 787486 - RNA, 19 nt, Homo sapiens
  misc_RNA (1)...(19): siRNA sense strand
ugaagagguccuugacuua

SEQ ID NO: 787487 - RNA, 19 nt, Homo sapiens
  misc_RNA (1)...(19): siRNA sense strand
ugaaggaaaugaggagauu

SEQ ID NO: 787488 - RNA, 19 nt, Homo sapiens
  misc_RNA (1)...(19): siRNA sense strand
agaauuacacagcuuguua

SEQ ID NO: 787489 - RNA, 19 nt, Homo sapiens
  misc_RNA (1)...(19): siRNA sense strand
ggagaugcuuguucugcaa

SEQ ID NO: 787490 - RNA, 19 nt, Homo sapiens
  misc_RNA (1)...(19): siRNA sense strand
ggacaagaucuaaucauca

SEQ ID NO: 787491 - RNA, 19 nt, Homo sapiens
  misc_RNA (1)...(19): siRNA sense strand
ggagagaaccagaucaauc

SEQ ID NO: 787492 - RNA, 19 nt, Homo sapiens
  misc_RNA (1)...(19): siRNA sense strand
ggagaaagcugaacauaag

SEQ ID NO: 787493 - RNA, 19 nt, Homo sapiens
  misc_RNA (1)...(19): siRNA sense strand
agaaagagccaaagacuua

SEQ ID NO: 787494 - RNA, 19 nt, Homo sapiens
  misc_RNA (1)...(19): siRNA sense strand
ggagagauaucaaguucaa

SEQ ID NO: 787495 - RNA, 19 nt, Homo sapiens
  misc_RNA (1)...(19): siRNA sense strand
gcagaacucuuuauggaau

SEQ ID NO: 787496 - RNA, 19 nt, Homo sapiens
  misc_RNA (1)...(19): siRNA sense strand
ccauaaaccuggugaaaug

SEQ ID NO: 787497 - RNA, 19 nt, Homo sapiens
  misc_RNA (1)...(19): siRNA sense strand
gaaaguugaucauguuagu

SEQ ID NO: 787498 - RNA, 19 nt, Homo sapiens
  misc_RNA (1)...(19): siRNA sense strand
cuaaagaacuagaaggauu

SEQ ID NO: 787499 - RNA, 19 nt, Homo sapiens
  misc_RNA (1)...(19): siRNA sense strand
gaagauguuccucagauaa

SEQ ID NO: 787500 - RNA, 19 nt, Homo sapiens
  misc_RNA (1)...(19): siRNA sense strand
guccagacaugauaacuaa

SEQ ID NO: 787501 - RNA, 19 nt, Homo sapiens
  misc_RNA (1)...(19): siRNA sense strand
ucacaaagcucuguuacug

SEQ ID NO: 787502 - RNA, 19 nt, Homo sapiens
  misc_RNA (1)...(19): siRNA sense strand
aaacaucacuuggaacuug

SEQ ID NO: 787503 - RNA, 19 nt, Homo sapiens
  misc_RNA (1)...(19): siRNA sense strand
caaguuggaucggauaauu

SEQ ID NO: 787504 - RNA, 19 nt, Homo sapiens
  misc_RNA (1)...(19): siRNA sense strand
acaaagaauucacaaguug

SEQ ID NO: 787505 - RNA, 19 nt, Homo sapiens
  misc_RNA (1)...(19): siRNA sense strand
caacugcagugccacauug

SEQ ID NO: 787506 - RNA, 19 nt, Homo sapiens
  misc_RNA (1)...(19): siRNA sense strand
gggaguaauuguuaaauca

SEQ ID NO: 787507 - RNA, 19 nt, Homo sapiens
  misc_RNA (1)...(19): siRNA sense strand
gcagagacccaccaucaaa

SEQ ID NO: 787508 - RNA, 19 nt, Homo sapiens
  misc_RNA (1)...(19): siRNA sense strand
ccuaagagcuuguccaaag

SEQ ID NO: 787509 - RNA, 19 nt, Homo sapiens
  misc_RNA (1)...(19): siRNA sense strand
gcaacuacauccacugcaa

SEQ ID NO: 787510 - RNA, 19 nt, Homo sapiens
  misc_RNA (1)...(19): siRNA sense strand
caugaaacaucacuuggaa

SEQ ID NO: 787511 - RNA, 19 nt, Homo sapiens
  misc_RNA (1)...(19): siRNA sense strand
ggugaaaugccauauguuu

SEQ ID NO: 787512 - RNA, 19 nt, Homo sapiens
  misc_RNA (1)...(19): siRNA sense strand
ggaugaggaugacgaugaa

SEQ ID NO: 787513 - RNA, 19 nt, Homo sapiens
  misc_RNA (1)...(19): siRNA sense strand
acacuuaagucaacguaaa

SEQ ID NO: 787514 - RNA, 19 nt, Homo sapiens
  misc_RNA (1)...(19): siRNA sense strand
gaaacagagcauauucuuu

SEQ ID NO: 787515 - RNA, 19 nt, Homo sapiens
  misc_RNA (1)...(19): siRNA sense strand
aaacauccuucuacuucua

SEQ ID NO: 787516 - RNA, 19 nt, Homo sapiens
  misc_RNA (1)...(19): siRNA sense strand
acaaagcucuguuacuguu

SEQ ID NO: 787517 - RNA, 19 nt, Homo sapiens
  misc_RNA (1)...(19): siRNA sense strand
gcuaaacacuuaagucaac

SEQ ID NO: 787518 - RNA, 19 nt, Homo sapiens
  misc_RNA (1)...(19): siRNA sense strand
ucguauggcuaaacacuua

SEQ ID NO: 787519 - RNA, 19 nt, Homo sapiens
  misc_RNA (1)...(19): siRNA sense strand
gaacuugcuauguccauuu

SEQ ID NO: 787520 - RNA, 19 nt, Homo sapiens
  misc_RNA (1)...(19): siRNA sense strand
caggaaaguugaucauguu

SEQ ID NO: 787521 - RNA, 19 nt, Homo sapiens
  misc_RNA (1)...(19): siRNA sense strand
acaaauaccucaucuccau

SEQ ID NO: 787522 - RNA, 19 nt, Homo sapiens
  misc_RNA (1)...(19): siRNA sense strand
ugaagauguuccucagaua

SEQ ID NO: 787523 - RNA, 19 nt, Homo sapiens
  misc_RNA (1)...(19): siRNA sense strand
gccaguagaucuaagacaa

SEQ ID NO: 787524 - RNA, 19 nt, Homo sapiens
  misc_RNA (1)...(19): siRNA sense strand
gaagaaaguagaagaaacu

SEQ ID NO: 787525 - RNA, 19 nt, Homo sapiens
  misc_RNA (1)...(19): siRNA sense strand
uauggaaugugaagaagaa

SEQ ID NO: 787526 - RNA, 19 nt, Homo sapiens
  misc_RNA (1)...(19): siRNA sense strand
gcaagccacuuuucuauau

SEQ ID NO: 787527 - RNA, 19 nt, Homo sapiens
  misc_RNA (1)...(19): siRNA sense strand
uggcagaacucuuuaugga

SEQ ID NO: 787528 - RNA, 19 nt, Homo sapiens
  misc_RNA (1)...(19): siRNA sense strand
gcagaagaaaguagaagaa

SEQ ID NO: 787529 - RNA, 19 nt, Homo sapiens
  misc_RNA (1)...(19): siRNA sense strand
gagaauguuuccaaaagua

SEQ ID NO: 787530 - RNA, 19 nt, Homo sapiens
  misc_RNA (1)...(19): siRNA sense strand
gcgcagcaucguacauuua

SEQ ID NO: 787531 - RNA, 19 nt, Homo sapiens
  misc_RNA (1)...(19): siRNA sense strand
caagacauaccagcaauuu

SEQ ID NO: 787532 - RNA, 19 nt, Homo sapiens
  misc_RNA (1)...(19): siRNA sense strand
ggaugacgaugaacugauc

SEQ ID NO: 787533 - RNA, 19 nt, Homo sapiens
  misc_RNA (1)...(19): siRNA sense strand
guagaucuaagacaaguaa

SEQ ID NO: 787534 - RNA, 19 nt, Homo sapiens
  misc_RNA (1)...(19): siRNA sense strand
cagcaucguacauuuauaa

SEQ ID NO: 787535 - RNA, 19 nt, Homo sapiens
  misc_RNA (1)...(19): siRNA sense strand
gaacguccaugugaugaag

SEQ ID NO: 787536 - RNA, 19 nt, Homo sapiens
  misc_RNA (1)...(19): siRNA sense strand
gugacauccucccaaguua

SEQ ID NO: 787537 - RNA, 19 nt, Homo sapiens
  misc_RNA (1)...(19): siRNA sense strand
gaaacauccuucuacuucu

SEQ ID NO: 787538 - RNA, 19 nt, Homo sapiens
  misc_RNA (1)...(19): siRNA sense strand
ugaaacauccuucuacuuc

SEQ ID NO: 787539 - RNA, 19 nt, Homo sapiens
  misc_RNA (1)...(19): siRNA sense strand
gugaagauguuccucagau

SEQ ID NO: 787540 - RNA, 19 nt, Homo sapiens
  misc_RNA (1)...(19): siRNA sense strand
gcagcaucguacauuuaua

SEQ ID NO: 787541 - RNA, 19 nt, Homo sapiens
  misc_RNA (1)...(19): siRNA sense strand
uagaagaaacucaggauga

SEQ ID NO: 787542 - RNA, 19 nt, Homo sapiens
  misc_RNA (1)...(19): siRNA sense strand
cuacauccacugcaaguaa

SEQ ID NO: 787543 - RNA, 19 nt, Homo sapiens
  misc_RNA (1)...(19): siRNA sense strand
gaaauauucaggacugcaa

SEQ ID NO: 787544 - RNA, 19 nt, Homo sapiens
  misc_RNA (1)...(19): siRNA sense strand
uagcaaccauccagguaaa

SEQ ID NO: 787545 - RNA, 19 nt, Homo sapiens
  misc_RNA (1)...(19): siRNA sense strand
aaaugagccuugcuuugaa

SEQ ID NO: 787546 - RNA, 19 nt, Homo sapiens
  misc_RNA (1)...(19): siRNA sense strand
uggagcagauuaccuaaga

SEQ ID NO: 787547 - RNA, 19 nt, Homo sapiens
  misc_RNA (1)...(19): siRNA sense strand
caaaaggaauaaagaguga

SEQ ID NO: 787548 - RNA, 19 nt, Homo sapiens
  misc_RNA (1)...(19): siRNA sense strand
aaagugcaauguucaguuc

SEQ ID NO: 787549 - RNA, 19 nt, Homo sapiens
  misc_RNA (1)...(19): siRNA sense strand
acgaugaacugaucuuugu

SEQ ID NO: 787550 - RNA, 19 nt, Homo sapiens
  misc_RNA (1)...(19): siRNA sense strand
caagaagcauucaggaacu

SEQ ID NO: 787551 - RNA, 19 nt, Homo sapiens
  misc_RNA (1)...(19): siRNA sense strand
caucguacauuuauaaagc

SEQ ID NO: 787552 - RNA, 19 nt, Homo sapiens
  misc_RNA (1)...(19): siRNA sense strand
acaggaaaguugaucaugu

SEQ ID NO: 787553 - RNA, 19 nt, Homo sapiens
  misc_RNA (1)...(19): siRNA sense strand
ugaaauaccacaugaagca

SEQ ID NO: 787554 - RNA, 19 nt, Homo sapiens
  misc_RNA (1)...(19): siRNA sense strand
ccacuucauugccuuuaau

SEQ ID NO: 787555 - RNA, 19 nt, Homo sapiens
  misc_RNA (1)...(19): siRNA sense strand
gaucggauaauucuucaau

SEQ ID NO: 787556 - RNA, 19 nt, Homo sapiens
  misc_RNA (1)...(19): siRNA sense strand
gcagauuaccuaagagcuu

SEQ ID NO: 787557 - RNA, 19 nt, Homo sapiens
  misc_RNA (1)...(19): siRNA sense strand
ccauauguuugccagguuu

SEQ ID NO: 787558 - RNA, 19 nt, Homo sapiens
  misc_RNA (1)...(19): siRNA sense strand
ccaccugccagcacuguua

SEQ ID NO: 787559 - RNA, 19 nt, Homo sapiens
  misc_RNA (1)...(19): siRNA sense strand
aaagaccagugaagauguu

SEQ ID NO: 787560 - RNA, 19 nt, Homo sapiens
  misc_RNA (1)...(19): siRNA sense strand
uagugugccuuaaauguga

SEQ ID NO: 787561 - RNA, 19 nt, Homo sapiens
  misc_RNA (1)...(19): siRNA sense strand
gaugaacugaucuuuguug

SEQ ID NO: 787562 - RNA, 19 nt, Homo sapiens
  misc_RNA (1)...(19): siRNA sense strand
uaaagaacuagaaggauug

SEQ ID NO: 787563 - RNA, 19 nt, Homo sapiens
  misc_RNA (1)...(19): siRNA sense strand
acuaagaacuugcuauguc

SEQ ID NO: 787564 - RNA, 19 nt, Homo sapiens
  misc_RNA (1)...(19): siRNA sense strand
ccacaugaaacaucacuug

SEQ ID NO: 787565 - RNA, 19 nt, Homo sapiens
  misc_RNA (1)...(19): siRNA sense strand
agacuuacacaaccuuuaa

SEQ ID NO: 787566 - RNA, 19 nt, Homo sapiens
  misc_RNA (1)...(19): siRNA sense strand
gagaaagagccaaagacuu

SEQ ID NO: 787567 - RNA, 19 nt, Homo sapiens
  misc_RNA (1)...(19): siRNA sense strand
gaugaagacaagacugauu

SEQ ID NO: 787568 - RNA, 19 nt, Homo sapiens
  misc_RNA (1)...(19): siRNA sense strand
aaucagaacguccauguga

SEQ ID NO: 787569 - RNA, 19 nt, Homo sapiens
  misc_RNA (1)...(19): siRNA sense strand
caguuuagaucaucaacau

SEQ ID NO: 787570 - RNA, 19 nt, Homo sapiens
  misc_RNA (1)...(19): siRNA sense strand
gauaaaucccuccacuuca

SEQ ID NO: 787571 - RNA, 19 nt, Homo sapiens
  misc_RNA (1)...(19): siRNA sense strand
gcaaggagaaagcugaaca

SEQ ID NO: 787572 - RNA, 19 nt, Homo sapiens
  misc_RNA (1)...(19): siRNA sense strand
gagaagcagaacaaugaaa

SEQ ID NO: 787573 - RNA, 19 nt, Homo sapiens
  misc_RNA (1)...(19): siRNA sense strand
ugaaccacaugaaacauca

SEQ ID NO: 787574 - RNA, 19 nt, Homo sapiens
  misc_RNA (1)...(19): siRNA sense strand
acacaaccuuuaaaugcuu

SEQ ID NO: 787575 - RNA, 19 nt, Homo sapiens
  misc_RNA (1)...(19): siRNA sense strand
ccaaagaccagugaagaug

SEQ ID NO: 787576 - RNA, 19 nt, Homo sapiens
  misc_RNA (1)...(19): siRNA sense strand
cuagagccauggcagaaga

SEQ ID NO: 787577 - RNA, 19 nt, Homo sapiens
  misc_RNA (1)...(19): siRNA sense strand
cgacaaaccuuuucaacca

SEQ ID NO: 787578 - RNA, 19 nt, Homo sapiens
  misc_RNA (1)...(19): siRNA sense strand
caaauaccucaucuccaua

SEQ ID NO: 787579 - RNA, 19 nt, Homo sapiens
  misc_RNA (1)...(19): siRNA sense strand
caaagugcaauguucaguu

SEQ ID NO: 787580 - RNA, 19 nt, Homo sapiens
  misc_RNA (1)...(19): siRNA sense strand
acuacuggcugcucauuga

SEQ ID NO: 787581 - RNA, 19 nt, Homo sapiens
  misc_RNA (1)...(19): siRNA sense strand
ccacugcaaguaaaguuaa

SEQ ID NO: 787582 - RNA, 19 nt, Homo sapiens
  misc_RNA (1)...(19): siRNA sense strand
uugagaagcagaacaauga

SEQ ID NO: 787583 - RNA, 19 nt, Homo sapiens
  misc_RNA (1)...(19): siRNA sense strand
gcaauguucaguucaaucu

SEQ ID NO: 787584 - RNA, 19 nt, Homo sapiens
  misc_RNA (1)...(19): siRNA sense strand
uaaaucagaacguccaugu

SEQ ID NO: 787585 - RNA, 19 nt, Homo sapiens
  misc_RNA (1)...(19): siRNA sense strand
cauguuagucaaugaguuu

SEQ ID NO: 787586 - RNA, 19 nt, Homo sapiens
  misc_RNA (1)...(19): siRNA sense strand
aaagcucuguuacuguuga

SEQ ID NO: 787587 - RNA, 19 nt, Homo sapiens
  misc_RNA (1)...(19): siRNA sense strand
ggucacaccuccgacaucu

SEQ ID NO: 787588 - RNA, 19 nt, Homo sapiens
  misc_RNA (1)...(19): siRNA sense strand
uguagaagcucauuuuaga

SEQ ID NO: 787589 - RNA, 19 nt, Homo sapiens
  misc_RNA (1)...(19): siRNA sense strand
ugaaacagagcauauucuu

SEQ ID NO: 787590 - RNA, 19 nt, Homo sapiens
  misc_RNA (1)...(19): siRNA sense strand
ugaaggagucacugagaaa

SEQ ID NO: 787591 - RNA, 19 nt, Homo sapiens
  misc_RNA (1)...(19): siRNA sense strand
gccaaguuauaauagagaa

SEQ ID NO: 787592 - RNA, 19 nt, Homo sapiens
  misc_RNA (1)...(19): siRNA sense strand
gaacgucauuucugccuua

SEQ ID NO: 787593 - RNA, 19 nt, Homo sapiens
  misc_RNA (1)...(19): siRNA sense strand
guacuggaaucaucuuaua

SEQ ID NO: 787594 - RNA, 19 nt, Homo sapiens
  misc_RNA (1)...(19): siRNA sense strand
gcacagaugucgugaaguc

SEQ ID NO: 787595 - RNA, 19 nt, Homo sapiens
  misc_RNA (1)...(19): siRNA sense strand
gaaccugucugcagucaug

SEQ ID NO: 787596 - RNA, 19 nt, Homo sapiens
  misc_RNA (1)...(19): siRNA sense strand
caacaagccuaccauuaau

SEQ ID NO: 787597 - RNA, 19 nt, Homo sapiens
  misc_RNA (1)...(19): siRNA sense strand
aaaggaaacucauagaaga

SEQ ID NO: 787598 - RNA, 19 nt, Homo sapiens
  misc_RNA (1)...(19): siRNA sense strand
gggaagaaccaauauguuu

SEQ ID NO: 787599 - RNA, 19 nt, Homo sapiens
  misc_RNA (1)...(19): siRNA sense strand
gaauuauggugacguagaa

SEQ ID NO: 787600 - RNA, 19 nt, Homo sapiens
  misc_RNA (1)...(19): siRNA sense strand
ugaaauagccagacugaaa

SEQ ID NO: 787601 - RNA, 19 nt, Homo sapiens
  misc_RNA (1)...(19): siRNA sense strand
gcaaagaagaagcaaguuu

SEQ ID NO: 787602 - RNA, 19 nt, Homo sapiens
  misc_RNA (1)...(19): siRNA sense strand
ggaggaaacucuaaaacua

SEQ ID NO: 787603 - RNA, 19 nt, Homo sapiens
  misc_RNA (1)...(19): siRNA sense strand
gcccuuauguugaggauuu

SEQ ID NO: 787604 - RNA, 19 nt, Homo sapiens
  misc_RNA (1)...(19): siRNA sense strand
ucaacaagccuaccauuaa

SEQ ID NO: 787605 - RNA, 19 nt, Homo sapiens
  misc_RNA (1)...(19): siRNA sense strand
ggacaaauaaguggaauga

SEQ ID NO: 787606 - RNA, 19 nt, Homo sapiens
  misc_RNA (1)...(19): siRNA sense strand
gaaagaagggauuggaguu

SEQ ID NO: 787607 - RNA, 19 nt, Homo sapiens
  misc_RNA (1)...(19): siRNA sense strand
cagauuacguuucacaaga

SEQ ID NO: 787608 - RNA, 19 nt, Homo sapiens
  misc_RNA (1)...(19): siRNA sense strand
uaaaggaaggucagacaua

SEQ ID NO: 787609 - RNA, 19 nt, Homo sapiens
  misc_RNA (1)...(19): siRNA sense strand
ggaccaagaccuucaccua

SEQ ID NO: 787610 - RNA, 19 nt, Homo sapiens
  misc_RNA (1)...(19): siRNA sense strand
gagcauugcaucuuugaaa

SEQ ID NO: 787611 - RNA, 19 nt, Homo sapiens
  misc_RNA (1)...(19): siRNA sense strand
ugaacugccucauuugauu

SEQ ID NO: 787612 - RNA, 19 nt, Homo sapiens
  misc_RNA (1)...(19): siRNA sense strand
ccaagaccuucaccuauga

SEQ ID NO: 787613 - RNA, 19 nt, Homo sapiens
  misc_RNA (1)...(19): siRNA sense strand
gggauucuguguugacuug

SEQ ID NO: 787614 - RNA, 19 nt, Homo sapiens
  misc_RNA (1)...(19): siRNA sense strand
gcaacagcgugaagaacuu

SEQ ID NO: 787615 - RNA, 19 nt, Homo sapiens
  misc_RNA (1)...(19): siRNA sense strand
aaacgacaaucacaaacuu

SEQ ID NO: 787616 - RNA, 19 nt, Homo sapiens
  misc_RNA (1)...(19): siRNA sense strand
accaauauguuucgcuuua

SEQ ID NO: 787617 - RNA, 19 nt, Homo sapiens
  misc_RNA (1)...(19): siRNA sense strand
gagugagcauugcaucuuu

SEQ ID NO: 787618 - RNA, 19 nt, Homo sapiens
  misc_RNA (1)...(19): siRNA sense strand
ggagaaacccuaaguacuc

SEQ ID NO: 787619 - RNA, 19 nt, Homo sapiens
  misc_RNA (1)...(19): siRNA sense strand
gaccuucaccuaugacuuu

SEQ ID NO: 787620 - RNA, 19 nt, Homo sapiens
  misc_RNA (1)...(19): siRNA sense strand
ggucagacauacguuggua

SEQ ID NO: 787621 - RNA, 19 nt, Homo sapiens
  misc_RNA (1)...(19): siRNA sense strand
caaguucacucaggcuaaa

SEQ ID NO: 787622 - RNA, 19 nt, Homo sapiens
  misc_RNA (1)...(19): siRNA sense strand
ccaaggaauggacaaauaa

SEQ ID NO: 787623 - RNA, 19 nt, Homo sapiens
  misc_RNA (1)...(19): siRNA sense strand
aagcaagaguucaagaauu

SEQ ID NO: 787624 - RNA, 19 nt, Homo sapiens
  misc_RNA (1)...(19): siRNA sense strand
ccaaacauuuaguacagaa

SEQ ID NO: 787625 - RNA, 19 nt, Homo sapiens
  misc_RNA (1)...(19): siRNA sense strand
gaagcaagaguucaagaau

SEQ ID NO: 787626 - RNA, 19 nt, Homo sapiens
  misc_RNA (1)...(19): siRNA sense strand
uaaaugaaaccaccagaug

SEQ ID NO: 787627 - RNA, 19 nt, Homo sapiens
  misc_RNA (1)...(19): siRNA sense strand
auucugaacugccucauuu

SEQ ID NO: 787628 - RNA, 19 nt, Homo sapiens
  misc_RNA (1)...(19): siRNA sense strand
gaugccaacgucaaacuua

SEQ ID NO: 787629 - RNA, 19 nt, Homo sapiens
  misc_RNA (1)...(19): siRNA sense strand
gaagagaacggaccaagac

SEQ ID NO: 787630 - RNA, 19 nt, Homo sapiens
  misc_RNA (1)...(19): siRNA sense strand
ggaagaaccaauauguuuc

SEQ ID NO: 787631 - RNA, 19 nt, Homo sapiens
  misc_RNA (1)...(19): siRNA sense strand
cgugaagucugcauuugaa

SEQ ID NO: 787632 - RNA, 19 nt, Homo sapiens
  misc_RNA (1)...(19): siRNA sense strand
ggaaacucauagaagaaau

SEQ ID NO: 787633 - RNA, 19 nt, Homo sapiens
  misc_RNA (1)...(19): siRNA sense strand
ccaauauguuucgcuuuaa

SEQ ID NO: 787634 - RNA, 19 nt, Homo sapiens
  misc_RNA (1)...(19): siRNA sense strand
accaaggaauggacaaaua

SEQ ID NO: 787635 - RNA, 19 nt, Homo sapiens
  misc_RNA (1)...(19): siRNA sense strand
agcaagaguucaagaauug

SEQ ID NO: 787636 - RNA, 19 nt, Homo sapiens
  misc_RNA (1)...(19): siRNA sense strand
aaagauagccuuggaggaa

SEQ ID NO: 787637 - RNA, 19 nt, Homo sapiens
  misc_RNA (1)...(19): siRNA sense strand
gaggccaaguucauuauuc

SEQ ID NO: 787638 - RNA, 19 nt, Homo sapiens
  misc_RNA (1)...(19): siRNA sense strand
ucacucaggcuaaauuuga

SEQ ID NO: 787639 - RNA, 19 nt, Homo sapiens
  misc_RNA (1)...(19): siRNA sense strand
gaacggaccaagaccuuca

SEQ ID NO: 787640 - RNA, 19 nt, Homo sapiens
  misc_RNA (1)...(19): siRNA sense strand
agacauacguugguagaga

SEQ ID NO: 787641 - RNA, 19 nt, Homo sapiens
  misc_RNA (1)...(19): siRNA sense strand
gaacugccucauuugauug

SEQ ID NO: 787642 - RNA, 19 nt, Homo sapiens
  misc_RNA (1)...(19): siRNA sense strand
ugccuuagcugauuuaucu

SEQ ID NO: 787643 - RNA, 19 nt, Homo sapiens
  misc_RNA (1)...(19): siRNA sense strand
ggaagagaacggaccaaga

SEQ ID NO: 787644 - RNA, 19 nt, Homo sapiens
  misc_RNA (1)...(19): siRNA sense strand
ggaaugaaacccaaaauau

SEQ ID NO: 787645 - RNA, 19 nt, Homo sapiens
  misc_RNA (1)...(19): siRNA sense strand
acucuucgcuaugcaaaua

SEQ ID NO: 787646 - RNA, 19 nt, Homo sapiens
  misc_RNA (1)...(19): siRNA sense strand
uguguugacuugguuguua

SEQ ID NO: 787647 - RNA, 19 nt, Homo sapiens
  misc_RNA (1)...(19): siRNA sense strand
cugcagucauguuguauaa

SEQ ID NO: 787648 - RNA, 19 nt, Homo sapiens
  misc_RNA (1)...(19): siRNA sense strand
gaccaagaccuucaccuau

SEQ ID NO: 787649 - RNA, 19 nt, Homo sapiens
  misc_RNA (1)...(19): siRNA sense strand
acagaauuauggugacgua

SEQ ID NO: 787650 - RNA, 19 nt, Homo sapiens
  misc_RNA (1)...(19): siRNA sense strand
caaacuggaucuggaaagu

SEQ ID NO: 787651 - RNA, 19 nt, Homo sapiens
  misc_RNA (1)...(19): siRNA sense strand
gagaaacccuaaguacucu

SEQ ID NO: 787652 - RNA, 19 nt, Homo sapiens
  misc_RNA (1)...(19): siRNA sense strand
gaaacucauagaagaaaug

SEQ ID NO: 787653 - RNA, 19 nt, Homo sapiens
  misc_RNA (1)...(19): siRNA sense strand
ugaccgaccucucgaaguc

SEQ ID NO: 787654 - RNA, 19 nt, Homo sapiens
  misc_RNA (1)...(19): siRNA sense strand
ggccacacaucuaaaucaa

SEQ ID NO: 787655 - RNA, 19 nt, Homo sapiens
  misc_RNA (1)...(19): siRNA sense strand
gaagggauuggaguuguuu

SEQ ID NO: 787656 - RNA, 19 nt, Homo sapiens
  misc_RNA (1)...(19): siRNA sense strand
uaacgaacgugugagagau

SEQ ID NO: 787657 - RNA, 19 nt, Homo sapiens
  misc_RNA (1)...(19): siRNA sense strand
caaguucauuauucagaug

SEQ ID NO: 787658 - RNA, 19 nt, Homo sapiens
  misc_RNA (1)...(19): siRNA sense strand
ucaguaagauccacuuggu

SEQ ID NO: 787659 - RNA, 19 nt, Homo sapiens
  misc_RNA (1)...(19): siRNA sense strand
caugugaaaccgucaguaa

SEQ ID NO: 787660 - RNA, 19 nt, Homo sapiens
  misc_RNA (1)...(19): siRNA sense strand
ugacguagaagaacuuaug

SEQ ID NO: 787661 - RNA, 19 nt, Homo sapiens
  misc_RNA (1)...(19): siRNA sense strand
gaaauagccagacugaaaa

SEQ ID NO: 787662 - RNA, 19 nt, Homo sapiens
  misc_RNA (1)...(19): siRNA sense strand
ccuaaguacucuucgcuau

SEQ ID NO: 787663 - RNA, 19 nt, Homo sapiens
  misc_RNA (1)...(19): siRNA sense strand
uaucaugauugccaccauu

SEQ ID NO: 787664 - RNA, 19 nt, Homo sapiens
  misc_RNA (1)...(19): siRNA sense strand
ugucugcagucauguugua

SEQ ID NO: 787665 - RNA, 19 nt, Homo sapiens
  misc_RNA (1)...(19): siRNA sense strand
ccacggagcaagauauugu

SEQ ID NO: 787666 - RNA, 19 nt, Homo sapiens
  misc_RNA (1)...(19): siRNA sense strand
gcugaaauagccagacuga

SEQ ID NO: 787667 - RNA, 19 nt, Homo sapiens
  misc_RNA (1)...(19): siRNA sense strand
ucuggaaagucauacacua

SEQ ID NO: 787668 - RNA, 19 nt, Homo sapiens
  misc_RNA (1)...(19): siRNA sense strand
uagaagaaauggaggaaaa

SEQ ID NO: 787669 - RNA, 19 nt, Homo sapiens
  misc_RNA (1)...(19): siRNA sense strand
ccaaguucauuauucagau

SEQ ID NO: 787670 - RNA, 19 nt, Homo sapiens
  misc_RNA (1)...(19): siRNA sense strand
gcagaaugaagcaagaguu

SEQ ID NO: 787671 - RNA, 19 nt, Homo sapiens
  misc_RNA (1)...(19): siRNA sense strand
aggcuaaauuugauucuga

SEQ ID NO: 787672 - RNA, 19 nt, Homo sapiens
  misc_RNA (1)...(19): siRNA sense strand
ggaugaagcuucuuuucga

SEQ ID NO: 787673 - RNA, 19 nt, Homo sapiens
  misc_RNA (1)...(19): siRNA sense strand
cuuaauaccucggaucugu

SEQ ID NO: 787674 - RNA, 19 nt, Homo sapiens
  misc_RNA (1)...(19): siRNA sense strand
gagcugaaauagccagacu

SEQ ID NO: 787675 - RNA, 19 nt, Homo sapiens
  misc_RNA (1)...(19): siRNA sense strand
gcaaaacgacaaucacaaa

SEQ ID NO: 787676 - RNA, 19 nt, Homo sapiens
  misc_RNA (1)...(19): siRNA sense strand
gaugggaugaagcuucuuu

SEQ ID NO: 787677 - RNA, 19 nt, Homo sapiens
  misc_RNA (1)...(19): siRNA sense strand
gagaaccugucugcaguca

SEQ ID NO: 787678 - RNA, 19 nt, Homo sapiens
  misc_RNA (1)...(19): siRNA sense strand
aaaggaaggucagacauac

SEQ ID NO: 787679 - RNA, 19 nt, Homo sapiens
  misc_RNA (1)...(19): siRNA sense strand
agauuacguuucacaagaa

SEQ ID NO: 787680 - RNA, 19 nt, Homo sapiens
  misc_RNA (1)...(19): siRNA sense strand
ugaugucaauuauggagaa

SEQ ID NO: 787681 - RNA, 19 nt, Homo sapiens
  misc_RNA (1)...(19): siRNA sense strand
caccugcugaugucaauua

SEQ ID NO: 787682 - RNA, 19 nt, Homo sapiens
  misc_RNA (1)...(19): siRNA sense strand
agucugcauuugaagguua

SEQ ID NO: 787683 - RNA, 19 nt, Homo sapiens
  misc_RNA (1)...(19): siRNA sense strand
gcagucauguuguauaacc

SEQ ID NO: 787684 - RNA, 19 nt, Homo sapiens
  misc_RNA (1)...(19): siRNA sense strand
gaugaugaccuuuugagua

SEQ ID NO: 787685 - RNA, 19 nt, Homo sapiens
  misc_RNA (1)...(19): siRNA sense strand
caaagaagaagcaaguuuu

SEQ ID NO: 787686 - RNA, 19 nt, Homo sapiens
  misc_RNA (1)...(19): siRNA sense strand
gagaacggaccaagaccuu

SEQ ID NO: 787687 - RNA, 19 nt, Homo sapiens
  misc_RNA (1)...(19): siRNA sense strand
gaaaguaaaaggaaacuca

SEQ ID NO: 787688 - RNA, 19 nt, Homo sapiens
  misc_RNA (1)...(19): siRNA sense strand
caaauaaguggaaugaaac

SEQ ID NO: 787689 - RNA, 19 nt, Homo sapiens
  misc_RNA (1)...(19): siRNA sense strand
uaaguacucuucgcuaugc

SEQ ID NO: 787690 - RNA, 19 nt, Homo sapiens
  misc_RNA (1)...(19): siRNA sense strand
cggcacagaugucgugaag

SEQ ID NO: 787691 - RNA, 19 nt, Homo sapiens
  misc_RNA (1)...(19): siRNA sense strand
gaagaaccaauauguuucg

SEQ ID NO: 787692 - RNA, 19 nt, Homo sapiens
  misc_RNA (1)...(19): siRNA sense strand
gaacgucauuucugccuua

SEQ ID NO: 787693 - RNA, 19 nt, Homo sapiens
  misc_RNA (1)...(19): siRNA sense strand
ucaaagaacucaacaacaa

SEQ ID NO: 787694 - RNA, 19 nt, Homo sapiens
  misc_RNA (1)...(19): siRNA sense strand
guacuggaaucaucuuaua

SEQ ID NO: 787695 - RNA, 19 nt, Homo sapiens
  misc_RNA (1)...(19): siRNA sense strand
ggaagugccucaagauuuc

SEQ ID NO: 787696 - RNA, 19 nt, Homo sapiens
  misc_RNA (1)...(19): siRNA sense strand
gcacagaugucgugaaguc

SEQ ID NO: 787697 - RNA, 19 nt, Homo sapiens
  misc_RNA (1)...(19): siRNA sense strand
gaaccugucugcagucaug

SEQ ID NO: 787698 - RNA, 19 nt, Homo sapiens
  misc_RNA (1)...(19): siRNA sense strand
gaugagacauggacuguau

SEQ ID NO: 787699 - RNA, 19 nt, Homo sapiens
  misc_RNA (1)...(19): siRNA sense strand
gaugaaggauaaugagaaa

SEQ ID NO: 787700 - RNA, 19 nt, Homo sapiens
  misc_RNA (1)...(19): siRNA sense strand
agaacaagcuaaaggauuu

SEQ ID NO: 787701 - RNA, 19 nt, Homo sapiens
  misc_RNA (1)...(19): siRNA sense strand
aagaacagcuugcacagua

SEQ ID NO: 787702 - RNA, 19 nt, Homo sapiens
  misc_RNA (1)...(19): siRNA sense strand
cgagaaggcugagaaguuu

SEQ ID NO: 787703 - RNA, 19 nt, Homo sapiens
  misc_RNA (1)...(19): siRNA sense strand
caacaagccuaccauuaau

SEQ ID NO: 787704 - RNA, 19 nt, Homo sapiens
  misc_RNA (1)...(19): siRNA sense strand
aaaggaaacucauagaaga

SEQ ID NO: 787705 - RNA, 19 nt, Homo sapiens
  misc_RNA (1)...(19): siRNA sense strand
gggaagaaccaauauguuu

SEQ ID NO: 787706 - RNA, 19 nt, Homo sapiens
  misc_RNA (1)...(19): siRNA sense strand
ugaauucacugccaacauu

SEQ ID NO: 787707 - RNA, 19 nt, Homo sapiens
  misc_RNA (1)...(19): siRNA sense strand
gaauuauggugacguagaa

SEQ ID NO: 787708 - RNA, 19 nt, Homo sapiens
  misc_RNA (1)...(19): siRNA sense strand
gcagaaagacauccugaaa

SEQ ID NO: 787709 - RNA, 19 nt, Homo sapiens
  misc_RNA (1)...(19): siRNA sense strand
ugaaauagccagacugaaa

SEQ ID NO: 787710 - RNA, 19 nt, Homo sapiens
  misc_RNA (1)...(19): siRNA sense strand
gcaaagaagaagcaaguuu

SEQ ID NO: 787711 - RNA, 19 nt, Homo sapiens
  misc_RNA (1)...(19): siRNA sense strand
ggaggaaacucuaaaacua

SEQ ID NO: 787712 - RNA, 19 nt, Homo sapiens
  misc_RNA (1)...(19): siRNA sense strand
gcccuuauguugaggauuu

SEQ ID NO: 787713 - RNA, 19 nt, Homo sapiens
  misc_RNA (1)...(19): siRNA sense strand
ucaacaagccuaccauuaa

SEQ ID NO: 787714 - RNA, 19 nt, Homo sapiens
  misc_RNA (1)...(19): siRNA sense strand
aaagacgccuucaggauuu

SEQ ID NO: 787715 - RNA, 19 nt, Homo sapiens
  misc_RNA (1)...(19): siRNA sense strand
ggacaaauaaguggaauga

SEQ ID NO: 787716 - RNA, 19 nt, Homo sapiens
  misc_RNA (1)...(19): siRNA sense strand
caacacucuuuaucaagua

SEQ ID NO: 787717 - RNA, 19 nt, Homo sapiens
  misc_RNA (1)...(19): siRNA sense strand
caaagacgccuucaggauu

SEQ ID NO: 787718 - RNA, 19 nt, Homo sapiens
  misc_RNA (1)...(19): siRNA sense strand
caagauuacuguccuagau

SEQ ID NO: 787719 - RNA, 19 nt, Homo sapiens
  misc_RNA (1)...(19): siRNA sense strand
gaaagaagggauuggaguu

SEQ ID NO: 787720 - RNA, 19 nt, Homo sapiens
  misc_RNA (1)...(19): siRNA sense strand
agacaacacucuuuaucaa

SEQ ID NO: 787721 - RNA, 19 nt, Homo sapiens
  misc_RNA (1)...(19): siRNA sense strand
gaagaagagacaagaagaa

SEQ ID NO: 787722 - RNA, 19 nt, Homo sapiens
  misc_RNA (1)...(19): siRNA sense strand
cagauuacguuucacaaga

SEQ ID NO: 787723 - RNA, 19 nt, Homo sapiens
  misc_RNA (1)...(19): siRNA sense strand
gagcagaggcagaaacuug

SEQ ID NO: 787724 - RNA, 19 nt, Homo sapiens
  misc_RNA (1)...(19): siRNA sense strand
aaaucgagcugcagaagaa

SEQ ID NO: 787725 - RNA, 19 nt, Homo sapiens
  misc_RNA (1)...(19): siRNA sense strand
uaaaggaaggucagacaua

SEQ ID NO: 787726 - RNA, 19 nt, Homo sapiens
  misc_RNA (1)...(19): siRNA sense strand
ggaccaagaccuucaccua

SEQ ID NO: 787727 - RNA, 19 nt, Homo sapiens
  misc_RNA (1)...(19): siRNA sense strand
cagacacgaugaaggauaa

SEQ ID NO: 787728 - RNA, 19 nt, Homo sapiens
  misc_RNA (1)...(19): siRNA sense strand
ggauuugcaucgugugauu

SEQ ID NO: 787729 - RNA, 19 nt, Homo sapiens
  misc_RNA (1)...(19): siRNA sense strand
gagcauugcaucuuugaaa

SEQ ID NO: 787730 - RNA, 19 nt, Homo sapiens
  misc_RNA (1)...(19): siRNA sense strand
ugaacugccucauuugauu

SEQ ID NO: 787731 - RNA, 19 nt, Homo sapiens
  misc_RNA (1)...(19): siRNA sense strand
ccaagaccuucaccuauga

SEQ ID NO: 787732 - RNA, 19 nt, Homo sapiens
  misc_RNA (1)...(19): siRNA sense strand
gagagaagcagcagagaga

SEQ ID NO: 787733 - RNA, 19 nt, Homo sapiens
  misc_RNA (1)...(19): siRNA sense strand
aguacaggcugcaauauaa

SEQ ID NO: 787734 - RNA, 19 nt, Homo sapiens
  misc_RNA (1)...(19): siRNA sense strand
gggauucuguguugacuug

SEQ ID NO: 787735 - RNA, 19 nt, Homo sapiens
  misc_RNA (1)...(19): siRNA sense strand
gaguacaggcugcaauaua

SEQ ID NO: 787736 - RNA, 19 nt, Homo sapiens
  misc_RNA (1)...(19): siRNA sense strand
gaagaacuccaacgacuca

SEQ ID NO: 787737 - RNA, 19 nt, Homo sapiens
  misc_RNA (1)...(19): siRNA sense strand
gcaacagcgugaagaacuu

SEQ ID NO: 787738 - RNA, 19 nt, Homo sapiens
  misc_RNA (1)...(19): siRNA sense strand
aaacgacaaucacaaacuu

SEQ ID NO: 787739 - RNA, 19 nt, Homo sapiens
  misc_RNA (1)...(19): siRNA sense strand
cgaaacauaccauuuguga

SEQ ID NO: 787740 - RNA, 19 nt, Homo sapiens
  misc_RNA (1)...(19): siRNA sense strand
aaauaaagccaguggagua

SEQ ID NO: 787741 - RNA, 19 nt, Homo sapiens
  misc_RNA (1)...(19): siRNA sense strand
accaauauguuucgcuuua

SEQ ID NO: 787742 - RNA, 19 nt, Homo sapiens
  misc_RNA (1)...(19): siRNA sense strand
gagugagcauugcaucuuu

SEQ ID NO: 787743 - RNA, 19 nt, Homo sapiens
  misc_RNA (1)...(19): siRNA sense strand
ggagaaacccuaaguacuc

SEQ ID NO: 787744 - RNA, 19 nt, Homo sapiens
  misc_RNA (1)...(19): siRNA sense strand
gaccuucaccuaugacuuu

SEQ ID NO: 787745 - RNA, 19 nt, Homo sapiens
  misc_RNA (1)...(19): siRNA sense strand
ggucagacauacguuggua

SEQ ID NO: 787746 - RNA, 19 nt, Homo sapiens
  misc_RNA (1)...(19): siRNA sense strand
gaacaugacaaagaaucua

SEQ ID NO: 787747 - RNA, 19 nt, Homo sapiens
  misc_RNA (1)...(19): siRNA sense strand
caacugcguuucuucgaau

SEQ ID NO: 787748 - RNA, 19 nt, Homo sapiens
  misc_RNA (1)...(19): siRNA sense strand
ucacggaagugccucaaga

SEQ ID NO: 787749 - RNA, 19 nt, Homo sapiens
  misc_RNA (1)...(19): siRNA sense strand
ucacagaugucacggaagu

SEQ ID NO: 787750 - RNA, 19 nt, Homo sapiens
  misc_RNA (1)...(19): siRNA sense strand
caaguucacucaggcuaaa

SEQ ID NO: 787751 - RNA, 19 nt, Homo sapiens
  misc_RNA (1)...(19): siRNA sense strand
ccaaggaauggacaaauaa

SEQ ID NO: 787752 - RNA, 19 nt, Homo sapiens
  misc_RNA (1)...(19): siRNA sense strand
aagcaagaguucaagaauu

SEQ ID NO: 787753 - RNA, 19 nt, Homo sapiens
  misc_RNA (1)...(19): siRNA sense strand
ccaaacauuuaguacagaa

SEQ ID NO: 787754 - RNA, 19 nt, Homo sapiens
  misc_RNA (1)...(19): siRNA sense strand
gaagcaagaguucaagaau

SEQ ID NO: 787755 - RNA, 19 nt, Homo sapiens
  misc_RNA (1)...(19): siRNA sense strand
uaaaugaaaccaccagaug

SEQ ID NO: 787756 - RNA, 19 nt, Homo sapiens
  misc_RNA (1)...(19): siRNA sense strand
agaaauaccucagggacuu

SEQ ID NO: 787757 - RNA, 19 nt, Homo sapiens
  misc_RNA (1)...(19): siRNA sense strand
ggacuguauucaggcguua

SEQ ID NO: 787758 - RNA, 19 nt, Homo sapiens
  misc_RNA (1)...(19): siRNA sense strand
gaccugaaggacccaauua

SEQ ID NO: 787759 - RNA, 19 nt, Homo sapiens
  misc_RNA (1)...(19): siRNA sense strand
gcagacacgaugaaggaua

SEQ ID NO: 787760 - RNA, 19 nt, Homo sapiens
  misc_RNA (1)...(19): siRNA sense strand
gaagagacaagaagaagag

SEQ ID NO: 787761 - RNA, 19 nt, Homo sapiens
  misc_RNA (1)...(19): siRNA sense strand
auucugaacugccucauuu

SEQ ID NO: 787762 - RNA, 19 nt, Homo sapiens
  misc_RNA (1)...(19): siRNA sense strand
gaugccaacgucaaacuua

SEQ ID NO: 787763 - RNA, 19 nt, Homo sapiens
  misc_RNA (1)...(19): siRNA sense strand
ggaagaaccaauauguuuc

SEQ ID NO: 787764 - RNA, 19 nt, Homo sapiens
  misc_RNA (1)...(19): siRNA sense strand
gaaggauaaugagaaacuu

SEQ ID NO: 787765 - RNA, 19 nt, Homo sapiens
  misc_RNA (1)...(19): siRNA sense strand
ugaagaagaaguccaaaga

SEQ ID NO: 787766 - RNA, 19 nt, Homo sapiens
  misc_RNA (1)...(19): siRNA sense strand
gaagagaacggaccaagac

SEQ ID NO: 787767 - RNA, 19 nt, Homo sapiens
  misc_RNA (1)...(19): siRNA sense strand
cgugaagucugcauuugaa

SEQ ID NO: 787768 - RNA, 19 nt, Homo sapiens
  misc_RNA (1)...(19): siRNA sense strand
gggacugacucucucgaaa

SEQ ID NO: 787769 - RNA, 19 nt, Homo sapiens
  misc_RNA (1)...(19): siRNA sense strand
gaugguuucucgcucuuug

SEQ ID NO: 787770 - RNA, 19 nt, Homo sapiens
  misc_RNA (1)...(19): siRNA sense strand
gagagaagcaggagaugau

SEQ ID NO: 787771 - RNA, 19 nt, Homo sapiens
  misc_RNA (1)...(19): siRNA sense strand
ucagauauuucaagaacug

SEQ ID NO: 787772 - RNA, 19 nt, Homo sapiens
  misc_RNA (1)...(19): siRNA sense strand
gaggccaaguucauuauuc

SEQ ID NO: 787773 - RNA, 19 nt, Homo sapiens
  misc_RNA (1)...(19): siRNA sense strand
ggaaacucauagaagaaau

SEQ ID NO: 787774 - RNA, 19 nt, Homo sapiens
  misc_RNA (1)...(19): siRNA sense strand
ccaauauguuucgcuuuaa

SEQ ID NO: 787775 - RNA, 19 nt, Homo sapiens
  misc_RNA (1)...(19): siRNA sense strand
accaaggaauggacaaaua

SEQ ID NO: 787776 - RNA, 19 nt, Homo sapiens
  misc_RNA (1)...(19): siRNA sense strand
agcaagaguucaagaauug

SEQ ID NO: 787777 - RNA, 19 nt, Homo sapiens
  misc_RNA (1)...(19): siRNA sense strand
aaagauagccuuggaggaa

SEQ ID NO: 787778 - RNA, 19 nt, Homo sapiens
  misc_RNA (1)...(19): siRNA sense strand
ucacucaggcuaaauuuga

SEQ ID NO: 787779 - RNA, 19 nt, Homo sapiens
  misc_RNA (1)...(19): siRNA sense strand
ugccuuagcugauuuaucu

SEQ ID NO: 787780 - RNA, 19 nt, Homo sapiens
  misc_RNA (1)...(19): siRNA sense strand
aaacauaccauuugugagu

SEQ ID NO: 787781 - RNA, 19 nt, Homo sapiens
  misc_RNA (1)...(19): siRNA sense strand
cagaaucacuugccaacuc

SEQ ID NO: 787782 - RNA, 19 nt, Homo sapiens
  misc_RNA (1)...(19): siRNA sense strand
uacaguaccuccugcagaa

SEQ ID NO: 787783 - RNA, 19 nt, Homo sapiens
  misc_RNA (1)...(19): siRNA sense strand
ggaccugguucagcagaaa

SEQ ID NO: 787784 - RNA, 19 nt, Homo sapiens
  misc_RNA (1)...(19): siRNA sense strand
gaaaucgagcugcagaaga

SEQ ID NO: 787785 - RNA, 19 nt, Homo sapiens
  misc_RNA (1)...(19): siRNA sense strand
agacauacguugguagaga

SEQ ID NO: 787786 - RNA, 19 nt, Homo sapiens
  misc_RNA (1)...(19): siRNA sense strand
gaacugccucauuugauug

SEQ ID NO: 787787 - RNA, 19 nt, Homo sapiens
  misc_RNA (1)...(19): siRNA sense strand
gaacggaccaagaccuuca

SEQ ID NO: 787788 - RNA, 19 nt, Homo sapiens
  misc_RNA (1)...(19): siRNA sense strand
uguguugacuugguuguua

SEQ ID NO: 787789 - RNA, 19 nt, Homo sapiens
  misc_RNA (1)...(19): siRNA sense strand
ggaagagaacggaccaaga

SEQ ID NO: 787790 - RNA, 19 nt, Homo sapiens
  misc_RNA (1)...(19): siRNA sense strand
ggaaugaaacccaaaauau

SEQ ID NO: 787791 - RNA, 19 nt, Homo sapiens
  misc_RNA (1)...(19): siRNA sense strand
acucuucgcuaugcaaaua

SEQ ID NO: 787792 - RNA, 19 nt, Homo sapiens
  misc_RNA (1)...(19): siRNA sense strand
gcuguaaccuguucaucua

SEQ ID NO: 787793 - RNA, 19 nt, Homo sapiens
  misc_RNA (1)...(19): siRNA sense strand
ccaucaagcuguucauugg

SEQ ID NO: 787794 - RNA, 19 nt, Homo sapiens
  misc_RNA (1)...(19): siRNA sense strand
auauaaagauggccacguu

SEQ ID NO: 787795 - RNA, 19 nt, Homo sapiens
  misc_RNA (1)...(19): siRNA sense strand
ucacaggcaugcacaaagg

SEQ ID NO: 787796 - RNA, 19 nt, Homo sapiens
  misc_RNA (1)...(19): siRNA sense strand
gaagcuguguucgccaaug

SEQ ID NO: 787797 - RNA, 19 nt, Homo sapiens
  misc_RNA (1)...(19): siRNA sense strand
gcacaugaacggauuaagc

SEQ ID NO: 787798 - RNA, 19 nt, Homo sapiens
  misc_RNA (1)...(19): siRNA sense strand
gggaacccgucgaccauuc

SEQ ID NO: 787799 - RNA, 19 nt, Homo sapiens
  misc_RNA (1)...(19): siRNA sense strand
acgcugagcugaugcagau

SEQ ID NO: 787800 - RNA, 19 nt, Homo sapiens
  misc_RNA (1)...(19): siRNA sense strand
ggugcgccuuugugaagua

SEQ ID NO: 787801 - RNA, 19 nt, Homo sapiens
  misc_RNA (1)...(19): siRNA sense strand
ggcaaaaucuacgagcuua

SEQ ID NO: 787802 - RNA, 19 nt, Homo sapiens
  misc_RNA (1)...(19): siRNA sense strand
cgucgaccauucccaugaa

SEQ ID NO: 787803 - RNA, 19 nt, Homo sapiens
  misc_RNA (1)...(19): siRNA sense strand
uauaaagauggccacguua

SEQ ID NO: 787804 - RNA, 19 nt, Homo sapiens
  misc_RNA (1)...(19): siRNA sense strand
ucagauaagccaggccuuu

SEQ ID NO: 787805 - RNA, 19 nt, Homo sapiens
  misc_RNA (1)...(19): siRNA sense strand
gcagauguuccucccuuuc

SEQ ID NO: 787806 - RNA, 19 nt, Homo sapiens
  misc_RNA (1)...(19): siRNA sense strand
ucuacgagcuuacgguucu

SEQ ID NO: 787807 - RNA, 19 nt, Homo sapiens
  misc_RNA (1)...(19): siRNA sense strand
gcaugaagaggcucaaggu

SEQ ID NO: 787808 - RNA, 19 nt, Homo sapiens
  misc_RNA (1)...(19): siRNA sense strand
cgagggcuguaaccuguuc

SEQ ID NO: 787809 - RNA, 19 nt, Homo sapiens
  misc_RNA (1)...(19): siRNA sense strand
ccucagccgccuccaauga

SEQ ID NO: 787810 - RNA, 19 nt, Homo sapiens
  misc_RNA (1)...(19): siRNA sense strand
gccaucaagcuguucauug

SEQ ID NO: 787811 - RNA, 19 nt, Homo sapiens
  misc_RNA (1)...(19): siRNA sense strand
gagagccgaggagguagua

SEQ ID NO: 787812 - RNA, 19 nt, Homo sapiens
  misc_RNA (1)...(19): siRNA sense strand
gacaacgcaagccucagua

SEQ ID NO: 787813 - RNA, 19 nt, Homo sapiens
  misc_RNA (1)...(19): siRNA sense strand
caaacggacaggcugacaa

SEQ ID NO: 787814 - RNA, 19 nt, Homo sapiens
  misc_RNA (1)...(19): siRNA sense strand
ugacaacgcaagccucagu

SEQ ID NO: 787815 - RNA, 19 nt, Homo sapiens
  misc_RNA (1)...(19): siRNA sense strand
caugaacggcuuccagauc

SEQ ID NO: 787816 - RNA, 19 nt, Homo sapiens
  misc_RNA (1)...(19): siRNA sense strand
gcgccuuccucaccuacug

SEQ ID NO: 787817 - RNA, 19 nt, Homo sapiens
  misc_RNA (1)...(19): siRNA sense strand
cccgcaaccuggaugagaa

SEQ ID NO: 787818 - RNA, 19 nt, Homo sapiens
  misc_RNA (1)...(19): siRNA sense strand
cgaccauucccaugaagga

SEQ ID NO: 787819 - RNA, 19 nt, Homo sapiens
  misc_RNA (1)...(19): siRNA sense strand
ccgggcacaugaacggauu

SEQ ID NO: 787820 - RNA, 19 nt, Homo sapiens
  misc_RNA (1)...(19): siRNA sense strand
guucacaggcaugcacaaa

SEQ ID NO: 787821 - RNA, 19 nt, Homo sapiens
  misc_RNA (1)...(19): siRNA sense strand
cagauaagccaggccuuuc

SEQ ID NO: 787822 - RNA, 19 nt, Homo sapiens
  misc_RNA (1)...(19): siRNA sense strand
ugccuacccugcugccuau

SEQ ID NO: 787823 - RNA, 19 nt, Homo sapiens
  misc_RNA (1)...(19): siRNA sense strand
gggcacaugaacggauuaa

SEQ ID NO: 787824 - RNA, 19 nt, Homo sapiens
  misc_RNA (1)...(19): siRNA sense strand
ggcucaaggugcagcugaa

SEQ ID NO: 787825 - RNA, 19 nt, Homo sapiens
  misc_RNA (1)...(19): siRNA sense strand
gcugcgccuuccucaccua

SEQ ID NO: 787826 - RNA, 19 nt, Homo sapiens
  misc_RNA (1)...(19): siRNA sense strand
acgcaagccucaguaccaa

SEQ ID NO: 787827 - RNA, 19 nt, Homo sapiens
  misc_RNA (1)...(19): siRNA sense strand
caccagcugugccuagcau

SEQ ID NO: 787828 - RNA, 19 nt, Homo sapiens
  misc_RNA (1)...(19): siRNA sense strand
gcaaacggacaggcugaca

SEQ ID NO: 787829 - RNA, 19 nt, Homo sapiens
  misc_RNA (1)...(19): siRNA sense strand
aaagauggccacguuagca

SEQ ID NO: 787830 - RNA, 19 nt, Homo sapiens
  misc_RNA (1)...(19): siRNA sense strand
ggccagaugggcauguuca

SEQ ID NO: 787831 - RNA, 19 nt, Homo sapiens
  misc_RNA (1)...(19): siRNA sense strand
cuacugcgagcgugaguca

SEQ ID NO: 787832 - RNA, 19 nt, Homo sapiens
  misc_RNA (1)...(19): siRNA sense strand
ggagaacuuugcacuuaua

SEQ ID NO: 787833 - RNA, 19 nt, Homo sapiens
  misc_RNA (1)...(19): siRNA sense strand
uaacugcgcugguuuguug

SEQ ID NO: 787834 - RNA, 19 nt, Homo sapiens
  misc_RNA (1)...(19): siRNA sense strand
gaaccacccucaauaaaca

SEQ ID NO: 787835 - RNA, 19 nt, Homo sapiens
  misc_RNA (1)...(19): siRNA sense strand
caaagaaccacccucaaua

SEQ ID NO: 787836 - RNA, 19 nt, Homo sapiens
  misc_RNA (1)...(19): siRNA sense strand
gcagaaaggccuuauguau

SEQ ID NO: 787837 - RNA, 19 nt, Homo sapiens
  misc_RNA (1)...(19): siRNA sense strand
gaggaggccuuucauguug

SEQ ID NO: 787838 - RNA, 19 nt, Homo sapiens
  misc_RNA (1)...(19): siRNA sense strand
caaagagccacccucauua

SEQ ID NO: 787839 - RNA, 19 nt, Homo sapiens
  misc_RNA (1)...(19): siRNA sense strand
agaaaggccuuauguaugu

SEQ ID NO: 787840 - RNA, 19 nt, Homo sapiens
  misc_RNA (1)...(19): siRNA sense strand
ggagaaaggccuuaugugu

SEQ ID NO: 787841 - RNA, 19 nt, Homo sapiens
  misc_RNA (1)...(19): siRNA sense strand
ccaaagagccacccucauu

SEQ ID NO: 787842 - RNA, 19 nt, Homo sapiens
  misc_RNA (1)...(19): siRNA sense strand
gggaaauccuuuauccaaa

SEQ ID NO: 787843 - RNA, 19 nt, Homo sapiens
  misc_RNA (1)...(19): siRNA sense strand
gagaaacccuuggaaagug

SEQ ID NO: 787844 - RNA, 19 nt, Homo sapiens
  misc_RNA (1)...(19): siRNA sense strand
gaacauugcagaauucaca

SEQ ID NO: 787845 - RNA, 19 nt, Homo sapiens
  misc_RNA (1)...(19): siRNA sense strand
gggaaauuauucagacaaa

SEQ ID NO: 787846 - RNA, 19 nt, Homo sapiens
  misc_RNA (1)...(19): siRNA sense strand
ccaaaccucucaucugaau

SEQ ID NO: 787847 - RNA, 19 nt, Homo sapiens
  misc_RNA (1)...(19): siRNA sense strand
gcagagaaacccuuggaaa

SEQ ID NO: 787848 - RNA, 19 nt, Homo sapiens
  misc_RNA (1)...(19): siRNA sense strand
gcagugagguugggaagga

SEQ ID NO: 787849 - RNA, 19 nt, Homo sapiens
  misc_RNA (1)...(19): siRNA sense strand
agaaaggccuuaugugugu

SEQ ID NO: 787850 - RNA, 19 nt, Homo sapiens
  misc_RNA (1)...(19): siRNA sense strand
agaaaggccuuaugagugu

SEQ ID NO: 787851 - RNA, 19 nt, Homo sapiens
  misc_RNA (1)...(19): siRNA sense strand
cuggagaacuuugcacuua

SEQ ID NO: 787852 - RNA, 19 nt, Homo sapiens
  misc_RNA (1)...(19): siRNA sense strand
ggagaaaggccauaugagu

SEQ ID NO: 787853 - RNA, 19 nt, Homo sapiens
  misc_RNA (1)...(19): siRNA sense strand
ggagaaaggccuuaugagu

SEQ ID NO: 787854 - RNA, 19 nt, Homo sapiens
  misc_RNA (1)...(19): siRNA sense strand
ggagaaaggccuuaugagu

SEQ ID NO: 787855 - RNA, 19 nt, Homo sapiens
  misc_RNA (1)...(19): siRNA sense strand
gaauaagucauuacaagug

SEQ ID NO: 787856 - RNA, 19 nt, Homo sapiens
  misc_RNA (1)...(19): siRNA sense strand
gagccacccucauuaaaca

SEQ ID NO: 787857 - RNA, 19 nt, Homo sapiens
  misc_RNA (1)...(19): siRNA sense strand
caauaaacaccacaaaguu

SEQ ID NO: 787858 - RNA, 19 nt, Homo sapiens
  misc_RNA (1)...(19): siRNA sense strand
ggacguggccauuuacuuc

SEQ ID NO: 787859 - RNA, 19 nt, Homo sapiens
  misc_RNA (1)...(19): siRNA sense strand
agaaaggccuuacgagugu

SEQ ID NO: 787860 - RNA, 19 nt, Homo sapiens
  misc_RNA (1)...(19): siRNA sense strand
aaagaaccacccucaauaa

SEQ ID NO: 787861 - RNA, 19 nt, Homo sapiens
  misc_RNA (1)...(19): siRNA sense strand
gaagagacaccugagcaaa

SEQ ID NO: 787862 - RNA, 19 nt, Homo sapiens
  misc_RNA (1)...(19): siRNA sense strand
ggaaguccuuuacacaaca

SEQ ID NO: 787863 - RNA, 19 nt, Homo sapiens
  misc_RNA (1)...(19): siRNA sense strand
gcuauacccucguugaaca

SEQ ID NO: 787864 - RNA, 19 nt, Homo sapiens
  misc_RNA (1)...(19): siRNA sense strand
ggaaauccuuuauccaaaa

SEQ ID NO: 787865 - RNA, 19 nt, Homo sapiens
  misc_RNA (1)...(19): siRNA sense strand
gaacuuugcacuuauaacu

SEQ ID NO: 787866 - RNA, 19 nt, Homo sapiens
  misc_RNA (1)...(19): siRNA sense strand
ggaaaauccuuuagccaaa

SEQ ID NO: 787867 - RNA, 19 nt, Homo sapiens
  misc_RNA (1)...(19): siRNA sense strand
caaauccacucuuguucga

SEQ ID NO: 787868 - RNA, 19 nt, Homo sapiens
  misc_RNA (1)...(19): siRNA sense strand
cauuaaacaucacagaguu

SEQ ID NO: 787869 - RNA, 19 nt, Homo sapiens
  misc_RNA (1)...(19): siRNA sense strand
ggcaugggauggaggauga

SEQ ID NO: 787870 - RNA, 19 nt, Homo sapiens
  misc_RNA (1)...(19): siRNA sense strand
agccaaaguuccaaccuua

SEQ ID NO: 787871 - RNA, 19 nt, Homo sapiens
  misc_RNA (1)...(19): siRNA sense strand
gauggaggaugaagagaca

SEQ ID NO: 787872 - RNA, 19 nt, Homo sapiens
  misc_RNA (1)...(19): siRNA sense strand
uugaggacguggccauuua

SEQ ID NO: 787873 - RNA, 19 nt, Homo sapiens
  misc_RNA (1)...(19): siRNA sense strand
gagcaaaguguuucuguag

SEQ ID NO: 787874 - RNA, 19 nt, Homo sapiens
  misc_RNA (1)...(19): siRNA sense strand
ccaaagaaccacccucaau

SEQ ID NO: 787875 - RNA, 19 nt, Homo sapiens
  misc_RNA (1)...(19): siRNA sense strand
ccuaaaguguggccucauu

SEQ ID NO: 787876 - RNA, 19 nt, Homo sapiens
  misc_RNA (1)...(19): siRNA sense strand
agccaaaccucucaucuga

SEQ ID NO: 787877 - RNA, 19 nt, Homo sapiens
  misc_RNA (1)...(19): siRNA sense strand
ugagcaaaguguuucugua

SEQ ID NO: 787878 - RNA, 19 nt, Homo sapiens
  misc_RNA (1)...(19): siRNA sense strand
cagaaaggccuuauguaug

SEQ ID NO: 787879 - RNA, 19 nt, Homo sapiens
  misc_RNA (1)...(19): siRNA sense strand
ggaauaagucauuacaagu

SEQ ID NO: 787880 - RNA, 19 nt, Homo sapiens
  misc_RNA (1)...(19): siRNA sense strand
ggccuuucauguuggaaua

SEQ ID NO: 787881 - RNA, 19 nt, Homo sapiens
  misc_RNA (1)...(19): siRNA sense strand
acaacacucuggccucauu

SEQ ID NO: 787882 - RNA, 19 nt, Homo sapiens
  misc_RNA (1)...(19): siRNA sense strand
cagugaaugugggaaauuu

SEQ ID NO: 787883 - RNA, 19 nt, Homo sapiens
  misc_RNA (1)...(19): siRNA sense strand
gaaaauucacacuggauua

SEQ ID NO: 787884 - RNA, 19 nt, Homo sapiens
  misc_RNA (1)...(19): siRNA sense strand
uggaauaagucauuacaag

SEQ ID NO: 787885 - RNA, 19 nt, Homo sapiens
  misc_RNA (1)...(19): siRNA sense strand
aaagagccacccucauuaa

SEQ ID NO: 787886 - RNA, 19 nt, Homo sapiens
  misc_RNA (1)...(19): siRNA sense strand
gcgaugugaugcuggagaa

SEQ ID NO: 787887 - RNA, 19 nt, Homo sapiens
  misc_RNA (1)...(19): siRNA sense strand
gagagaguccagccacaaa

SEQ ID NO: 787888 - RNA, 19 nt, Homo sapiens
  misc_RNA (1)...(19): siRNA sense strand
ucaauaaacaccacaaagu

SEQ ID NO: 787889 - RNA, 19 nt, Homo sapiens
  misc_RNA (1)...(19): siRNA sense strand
ccuagagucugcacuggaa

SEQ ID NO: 787890 - RNA, 19 nt, Homo sapiens
  misc_RNA (1)...(19): siRNA sense strand
ugcagaagcuaaacuuaug

SEQ ID NO: 787891 - RNA, 19 nt, Homo sapiens
  misc_RNA (1)...(19): siRNA sense strand
ccaaaguuccaaccuuauu

SEQ ID NO: 787892 - RNA, 19 nt, Homo sapiens
  misc_RNA (1)...(19): siRNA sense strand
gcaaaugugggaaguccuu

SEQ ID NO: 787893 - RNA, 19 nt, Homo sapiens
  misc_RNA (1)...(19): siRNA sense strand
ccagagaauucacacuaca

SEQ ID NO: 787894 - RNA, 19 nt, Homo sapiens
  misc_RNA (1)...(19): siRNA sense strand
uggugaaugugggaaauua

SEQ ID NO: 787895 - RNA, 19 nt, Homo sapiens
  misc_RNA (1)...(19): siRNA sense strand
uuacgaguguggugaaugu

SEQ ID NO: 787896 - RNA, 19 nt, Homo sapiens
  misc_RNA (1)...(19): siRNA sense strand
ccaaaagucuagccucauu

SEQ ID NO: 787897 - RNA, 19 nt, Homo sapiens
  misc_RNA (1)...(19): siRNA sense strand
acaaagcuauacccucguu

SEQ ID NO: 787898 - RNA, 19 nt, Homo sapiens
  misc_RNA (1)...(19): siRNA sense strand
caaaguuccaaccuuauug

SEQ ID NO: 787899 - RNA, 19 nt, Homo sapiens
  misc_RNA (1)...(19): siRNA sense strand
gggcaggaacuauacuuga

SEQ ID NO: 787900 - RNA, 19 nt, Homo sapiens
  misc_RNA (1)...(19): siRNA sense strand
gggaaguccuuuacacaac

SEQ ID NO: 787901 - RNA, 19 nt, Homo sapiens
  misc_RNA (1)...(19): siRNA sense strand
caggagaaaggccauauga

SEQ ID NO: 787902 - RNA, 19 nt, Homo sapiens
  misc_RNA (1)...(19): siRNA sense strand
gaaauuauucagacaaagc

SEQ ID NO: 787903 - RNA, 19 nt, Homo sapiens
  misc_RNA (1)...(19): siRNA sense strand
ggaaauuauucagacaaag

SEQ ID NO: 787904 - RNA, 19 nt, Homo sapiens
  misc_RNA (1)...(19): siRNA sense strand
agaaacccuuggaaaguga

SEQ ID NO: 787905 - RNA, 19 nt, Homo sapiens
  misc_RNA (1)...(19): siRNA sense strand
gugaaugugggaaaucuuu

SEQ ID NO: 787906 - RNA, 19 nt, Homo sapiens
  misc_RNA (1)...(19): siRNA sense strand
ggaaagcuuuuauguucaa

SEQ ID NO: 787907 - RNA, 19 nt, Homo sapiens
  misc_RNA (1)...(19): siRNA sense strand
gaaaggccuuauguaugug

SEQ ID NO: 787908 - RNA, 19 nt, Homo sapiens
  misc_RNA (1)...(19): siRNA sense strand
caccagagaauucacacua

SEQ ID NO: 787909 - RNA, 19 nt, Homo sapiens
  misc_RNA (1)...(19): siRNA sense strand
gugaaugugggaaaucuuu

SEQ ID NO: 787910 - RNA, 19 nt, Homo sapiens
  misc_RNA (1)...(19): siRNA sense strand
gcaucauagugcagagaaa

SEQ ID NO: 787911 - RNA, 19 nt, Homo sapiens
  misc_RNA (1)...(19): siRNA sense strand
gggaaugugggaaagcuuu

SEQ ID NO: 787912 - RNA, 19 nt, Homo sapiens
  misc_RNA (1)...(19): siRNA sense strand
ugaggaggccuuucauguu

SEQ ID NO: 787913 - RNA, 19 nt, Homo sapiens
  misc_RNA (1)...(19): siRNA sense strand
gaccagaagcaucauagug

SEQ ID NO: 787914 - RNA, 19 nt, Homo sapiens
  misc_RNA (1)...(19): siRNA sense strand
gagaacuuugcacuuauaa

SEQ ID NO: 787915 - RNA, 19 nt, Homo sapiens
  misc_RNA (1)...(19): siRNA sense strand
cuacagcaaggccuuauga

SEQ ID NO: 787916 - RNA, 19 nt, Homo sapiens
  misc_RNA (1)...(19): siRNA sense strand
ucaauccugugacaugugu

SEQ ID NO: 787917 - RNA, 19 nt, Homo sapiens
  misc_RNA (1)...(19): siRNA sense strand
cagcaccaguuaauucaca

SEQ ID NO: 787918 - RNA, 19 nt, Homo sapiens
  misc_RNA (1)...(19): siRNA sense strand
cagagaaacccuuggaaag

SEQ ID NO: 787919 - RNA, 19 nt, Homo sapiens
  misc_RNA (1)...(19): siRNA sense strand
gcagugaaugugggaaauu

SEQ ID NO: 787920 - RNA, 19 nt, Homo sapiens
  misc_RNA (1)...(19): siRNA sense strand
cauuacaaguggagucaau

SEQ ID NO: 787921 - RNA, 19 nt, Homo sapiens
  misc_RNA (1)...(19): siRNA sense strand
ccaaccuuauugaacauug

SEQ ID NO: 787922 - RNA, 19 nt, Homo sapiens
  misc_RNA (1)...(19): siRNA sense strand
cgggaaauccuuuauccaa

SEQ ID NO: 787923 - RNA, 19 nt, Homo sapiens
  misc_RNA (1)...(19): siRNA sense strand
ugggaaagcuuuuauguuc

SEQ ID NO: 787924 - RNA, 19 nt, Homo sapiens
  misc_RNA (1)...(19): siRNA sense strand
ggagcuaggcccuuugagu

SEQ ID NO: 787925 - RNA, 19 nt, Homo sapiens
  misc_RNA (1)...(19): siRNA sense strand
gugaaugugggaaauuauu

SEQ ID NO: 787926 - RNA, 19 nt, Homo sapiens
  misc_RNA (1)...(19): siRNA sense strand
gugaggaggccuuucaugu

SEQ ID NO: 787927 - RNA, 19 nt, Homo sapiens
  misc_RNA (1)...(19): siRNA sense strand
gaacucacacuggagaaag

SEQ ID NO: 787928 - RNA, 19 nt, Homo sapiens
  misc_RNA (1)...(19): siRNA sense strand
agagacaccugagcaaagu

SEQ ID NO: 787929 - RNA, 19 nt, Homo sapiens
  misc_RNA (1)...(19): siRNA sense strand
ugugagugcucccuuguuc

SEQ ID NO: 787930 - RNA, 19 nt, Homo sapiens
  misc_RNA (1)...(19): siRNA sense strand
ggagagaguccagccacaa

SEQ ID NO: 787931 - RNA, 19 nt, Homo sapiens
  misc_RNA (1)...(19): siRNA sense strand
aagaaccacccucaauaaa

SEQ ID NO: 787932 - RNA, 19 nt, Homo sapiens
  misc_RNA (1)...(19): siRNA sense strand
gaaagggccugaagucuug

SEQ ID NO: 787933 - RNA, 19 nt, Homo sapiens
  misc_RNA (1)...(19): siRNA sense strand
ggaagaagaucaacgaaga

SEQ ID NO: 787934 - RNA, 19 nt, Homo sapiens
  misc_RNA (1)...(19): siRNA sense strand
gacaauagguuucuuacuu

SEQ ID NO: 787935 - RNA, 19 nt, Homo sapiens
  misc_RNA (1)...(19): siRNA sense strand
gaagugcuguuuacucauu

SEQ ID NO: 787936 - RNA, 19 nt, Homo sapiens
  misc_RNA (1)...(19): siRNA sense strand
ggaggaugcuguacacauu

SEQ ID NO: 787937 - RNA, 19 nt, Homo sapiens
  misc_RNA (1)...(19): siRNA sense strand
ugacauggaugaaauugaa

SEQ ID NO: 787938 - RNA, 19 nt, Homo sapiens
  misc_RNA (1)...(19): siRNA sense strand
cugcauggcuguugacaua

SEQ ID NO: 787939 - RNA, 19 nt, Homo sapiens
  misc_RNA (1)...(19): siRNA sense strand
ugacaacgaugacgaugaa

SEQ ID NO: 787940 - RNA, 19 nt, Homo sapiens
  misc_RNA (1)...(19): siRNA sense strand
cggcacauuucacucauua

SEQ ID NO: 787941 - RNA, 19 nt, Homo sapiens
  misc_RNA (1)...(19): siRNA sense strand
cagaagugcuguuuacuca

SEQ ID NO: 787942 - RNA, 19 nt, Homo sapiens
  misc_RNA (1)...(19): siRNA sense strand
gccaucacuuguucaaaua

SEQ ID NO: 787943 - RNA, 19 nt, Homo sapiens
  misc_RNA (1)...(19): siRNA sense strand
ugaaagugaugaugaggaa

SEQ ID NO: 787944 - RNA, 19 nt, Homo sapiens
  misc_RNA (1)...(19): siRNA sense strand
ggauagauguuauucaacu

SEQ ID NO: 787945 - RNA, 19 nt, Homo sapiens
  misc_RNA (1)...(19): siRNA sense strand
ggauagauguuauucaacu

SEQ ID NO: 787946 - RNA, 19 nt, Homo sapiens
  misc_RNA (1)...(19): siRNA sense strand
gaggagcucaggcaauaua

SEQ ID NO: 787947 - RNA, 19 nt, Homo sapiens
  misc_RNA (1)...(19): siRNA sense strand
ggacaucggugggaucaag

SEQ ID NO: 787948 - RNA, 19 nt, Homo sapiens
  misc_RNA (1)...(19): siRNA sense strand
ggaaugagcgacaguucaa

SEQ ID NO: 787949 - RNA, 19 nt, Homo sapiens
  misc_RNA (1)...(19): siRNA sense strand
gcacauuucacucauuaga

SEQ ID NO: 787950 - RNA, 19 nt, Homo sapiens
  misc_RNA (1)...(19): siRNA sense strand
gcacagcaccuuguccaaa

SEQ ID NO: 787951 - RNA, 19 nt, Homo sapiens
  misc_RNA (1)...(19): siRNA sense strand
gaagaagaucaacgaagaa

SEQ ID NO: 787952 - RNA, 19 nt, Homo sapiens
  misc_RNA (1)...(19): siRNA sense strand
caauagguuucuuacuuug

SEQ ID NO: 787953 - RNA, 19 nt, Homo sapiens
  misc_RNA (1)...(19): siRNA sense strand
gaggaugcuguacacauua

SEQ ID NO: 787954 - RNA, 19 nt, Homo sapiens
  misc_RNA (1)...(19): siRNA sense strand
ggaggaaugugccaucacu

SEQ ID NO: 787955 - RNA, 19 nt, Homo sapiens
  misc_RNA (1)...(19): siRNA sense strand
caaauagccauggcccuua

SEQ ID NO: 787956 - RNA, 19 nt, Homo sapiens
  misc_RNA (1)...(19): siRNA sense strand
ggcaggaccuccaagaaca

SEQ ID NO: 787957 - RNA, 19 nt, Homo sapiens
  misc_RNA (1)...(19): siRNA sense strand
uugcaggacucacuggaua

SEQ ID NO: 787958 - RNA, 19 nt, Homo sapiens
  misc_RNA (1)...(19): siRNA sense strand
aacgagagcugacccaguu

SEQ ID NO: 787959 - RNA, 19 nt, Homo sapiens
  misc_RNA (1)...(19): siRNA sense strand
cgaugacgaugaagauguu

SEQ ID NO: 787960 - RNA, 19 nt, Homo sapiens
  misc_RNA (1)...(19): siRNA sense strand
cuggauagauguuauucaa

SEQ ID NO: 787961 - RNA, 19 nt, Homo sapiens
  misc_RNA (1)...(19): siRNA sense strand
cuggauagauguuauucaa

SEQ ID NO: 787962 - RNA, 19 nt, Homo sapiens
  misc_RNA (1)...(19): siRNA sense strand
gaaugugccaucacuuguu

SEQ ID NO: 787963 - RNA, 19 nt, Homo sapiens
  misc_RNA (1)...(19): siRNA sense strand
ggaaucugcaggagucuga

SEQ ID NO: 787964 - RNA, 19 nt, Homo sapiens
  misc_RNA (1)...(19): siRNA sense strand
aaagucgacucaacucuca

SEQ ID NO: 787965 - RNA, 19 nt, Homo sapiens
  misc_RNA (1)...(19): siRNA sense strand
uggcugggcucuugacaug

SEQ ID NO: 787966 - RNA, 19 nt, Homo sapiens
  misc_RNA (1)...(19): siRNA sense strand
ggaccaagaagaggaagaa

SEQ ID NO: 787967 - RNA, 19 nt, Homo sapiens
  misc_RNA (1)...(19): siRNA sense strand
aauauaaaguccugguuca

SEQ ID NO: 787968 - RNA, 19 nt, Homo sapiens
  misc_RNA (1)...(19): siRNA sense strand
gaaguguguuuuacucauu

SEQ ID NO: 787969 - RNA, 19 nt, Homo sapiens
  misc_RNA (1)...(19): siRNA sense strand
gaaaagaaggggaagaaga

SEQ ID NO: 787970 - RNA, 19 nt, Homo sapiens
  misc_RNA (1)...(19): siRNA sense strand
gaaaagaaggggaagaaga

SEQ ID NO: 787971 - RNA, 19 nt, Homo sapiens
  misc_RNA (1)...(19): siRNA sense strand
gcugggcucuugacaugga

SEQ ID NO: 787972 - RNA, 19 nt, Homo sapiens
  misc_RNA (1)...(19): siRNA sense strand
ugagguggcugagaaagug

SEQ ID NO: 787973 - RNA, 19 nt, Homo sapiens
  misc_RNA (1)...(19): siRNA sense strand
ggccagcccuacagaagug

SEQ ID NO: 787974 - RNA, 19 nt, Homo sapiens
  misc_RNA (1)...(19): siRNA sense strand
ccagaugggagucauauuc

SEQ ID NO: 787975 - RNA, 19 nt, Homo sapiens
  misc_RNA (1)...(19): siRNA sense strand
aguagagccugaagucuug

SEQ ID NO: 787976 - RNA, 19 nt, Homo sapiens
  misc_RNA (1)...(19): siRNA sense strand
ugccaucacuuguucaaau

SEQ ID NO: 787977 - RNA, 19 nt, Homo sapiens
  misc_RNA (1)...(19): siRNA sense strand
ggaagacaaagucgacuca

SEQ ID NO: 787978 - RNA, 19 nt, Homo sapiens
  misc_RNA (1)...(19): siRNA sense strand
caacgaugacgaugaagau

SEQ ID NO: 787979 - RNA, 19 nt, Homo sapiens
  misc_RNA (1)...(19): siRNA sense strand
gaaguuccuuuuaugcauu

SEQ ID NO: 787980 - RNA, 19 nt, Homo sapiens
  misc_RNA (1)...(19): siRNA sense strand
gaagguuauucgacucucu

SEQ ID NO: 787981 - RNA, 19 nt, Homo sapiens
  misc_RNA (1)...(19): siRNA sense strand
ggaaugugccaucacuugu

SEQ ID NO: 787982 - RNA, 19 nt, Homo sapiens
  misc_RNA (1)...(19): siRNA sense strand
gagcucaggcaauauaaag

SEQ ID NO: 787983 - RNA, 19 nt, Homo sapiens
  misc_RNA (1)...(19): siRNA sense strand
aaauagccauggcccuuau

SEQ ID NO: 787984 - RNA, 19 nt, Homo sapiens
  misc_RNA (1)...(19): siRNA sense strand
cugagaaagugcagaaauc

SEQ ID NO: 787985 - RNA, 19 nt, Homo sapiens
  misc_RNA (1)...(19): siRNA sense strand
ugacguggacaauagguuu

SEQ ID NO: 787986 - RNA, 19 nt, Homo sapiens
  misc_RNA (1)...(19): siRNA sense strand
uaccuuggcuuggcucuug

SEQ ID NO: 787987 - RNA, 19 nt, Homo sapiens
  misc_RNA (1)...(19): siRNA sense strand
cuggauagauguuauucga

SEQ ID NO: 787988 - RNA, 19 nt, Homo sapiens
  misc_RNA (1)...(19): siRNA sense strand
ucggugggaucaagugaaa

SEQ ID NO: 787989 - RNA, 19 nt, Homo sapiens
  misc_RNA (1)...(19): siRNA sense strand
caaccagccacauaggaaa

SEQ ID NO: 787990 - RNA, 19 nt, Homo sapiens
  misc_RNA (1)...(19): siRNA sense strand
cauguuggcuuuucucuug

SEQ ID NO: 787991 - RNA, 19 nt, Homo sapiens
  misc_RNA (1)...(19): siRNA sense strand
auucaacuccuucagguua

SEQ ID NO: 787992 - RNA, 19 nt, Homo sapiens
  misc_RNA (1)...(19): siRNA sense strand
agaaagggccugaagucuu

SEQ ID NO: 787993 - RNA, 19 nt, Homo sapiens
  misc_RNA (1)...(19): siRNA sense strand
gccagugucucccaggaau

SEQ ID NO: 787994 - RNA, 19 nt, Homo sapiens
  misc_RNA (1)...(19): siRNA sense strand
guccugggaugaagguuau

SEQ ID NO: 787995 - RNA, 19 nt, Homo sapiens
  misc_RNA (1)...(19): siRNA sense strand
accaagaaguggaagaaga

SEQ ID NO: 787996 - RNA, 19 nt, Homo sapiens
  misc_RNA (1)...(19): siRNA sense strand
guaccaagaaguggaagaa

SEQ ID NO: 787997 - RNA, 19 nt, Homo sapiens
  misc_RNA (1)...(19): siRNA sense strand
gcaauauaaaguccugguu

SEQ ID NO: 787998 - RNA, 19 nt, Homo sapiens
  misc_RNA (1)...(19): siRNA sense strand
uuauucgacucucucaauu

SEQ ID NO: 787999 - RNA, 19 nt, Homo sapiens
  misc_RNA (1)...(19): siRNA sense strand
gaugccuccugcucauuga

SEQ ID NO: 788000 - RNA, 19 nt, Homo sapiens
  misc_RNA (1)...(19): siRNA sense strand
aaguugagguggcugagaa

SEQ ID NO: 788001 - RNA, 19 nt, Homo sapiens
  misc_RNA (1)...(19): siRNA sense strand
guggacaauagguuucuua

SEQ ID NO: 788002 - RNA, 19 nt, Homo sapiens
  misc_RNA (1)...(19): siRNA sense strand
ggagcucaggcaauauaaa

SEQ ID NO: 788003 - RNA, 19 nt, Homo sapiens
  misc_RNA (1)...(19): siRNA sense strand
aaaugaaagugaugaugag

SEQ ID NO: 788004 - RNA, 19 nt, Homo sapiens
  misc_RNA (1)...(19): siRNA sense strand
ugaaugggaggaugcugua

SEQ ID NO: 788005 - RNA, 19 nt, Homo sapiens
  misc_RNA (1)...(19): siRNA sense strand
ccaaccagccacauaggaa

SEQ ID NO: 788006 - RNA, 19 nt, Homo sapiens
  misc_RNA (1)...(19): siRNA sense strand
gcugagaaagugcagaaau

SEQ ID NO: 788007 - RNA, 19 nt, Homo sapiens
  misc_RNA (1)...(19): siRNA sense strand
gcucauccucucauguuga

SEQ ID NO: 788008 - RNA, 19 nt, Homo sapiens
  misc_RNA (1)...(19): siRNA sense strand
gauagauguuauucaacuc

SEQ ID NO: 788009 - RNA, 19 nt, Homo sapiens
  misc_RNA (1)...(19): siRNA sense strand
ugagaaagagccugaaguc

SEQ ID NO: 788010 - RNA, 19 nt, Homo sapiens
  misc_RNA (1)...(19): siRNA sense strand
gauagauguuauucaacuc

SEQ ID NO: 788011 - RNA, 19 nt, Homo sapiens
  misc_RNA (1)...(19): siRNA sense strand
cugaaauguuggccucgua

SEQ ID NO: 788012 - RNA, 19 nt, Homo sapiens
  misc_RNA (1)...(19): siRNA sense strand
guuauucgacucucucaau

SEQ ID NO: 788013 - RNA, 19 nt, Homo sapiens
  misc_RNA (1)...(19): siRNA sense strand
cucaauuccuccugaaaug

SEQ ID NO: 788014 - RNA, 19 nt, Homo sapiens
  misc_RNA (1)...(19): siRNA sense strand
caguagagccugaagucuu

SEQ ID NO: 788015 - RNA, 19 nt, Homo sapiens
  misc_RNA (1)...(19): siRNA sense strand
gcauggcuguugacauagg

SEQ ID NO: 788016 - RNA, 19 nt, Homo sapiens
  misc_RNA (1)...(19): siRNA sense strand
caauuccuccugaaauguu

SEQ ID NO: 788017 - RNA, 19 nt, Homo sapiens
  misc_RNA (1)...(19): siRNA sense strand
cgagagcugacccaguuaa

SEQ ID NO: 788018 - RNA, 19 nt, Homo sapiens
  misc_RNA (1)...(19): siRNA sense strand
gaagaucaacgaagaaaag

SEQ ID NO: 788019 - RNA, 19 nt, Homo sapiens
  misc_RNA (1)...(19): siRNA sense strand
ggacucacuggauagaugu

SEQ ID NO: 788020 - RNA, 19 nt, Homo sapiens
  misc_RNA (1)...(19): siRNA sense strand
gcucuugacauggaugaaa

SEQ ID NO: 788021 - RNA, 19 nt, Homo sapiens
  misc_RNA (1)...(19): siRNA sense strand
gcggcacauuucacucauu

SEQ ID NO: 788022 - RNA, 19 nt, Homo sapiens
  misc_RNA (1)...(19): siRNA sense strand
aaagugaugaugaggaaga

SEQ ID NO: 788023 - RNA, 19 nt, Homo sapiens
  misc_RNA (1)...(19): siRNA sense strand
caaaagcucagcccagaaa

SEQ ID NO: 788024 - RNA, 19 nt, Homo sapiens
  misc_RNA (1)...(19): siRNA sense strand
gaugagaaagggccugaag

SEQ ID NO: 788025 - RNA, 19 nt, Homo sapiens
  misc_RNA (1)...(19): siRNA sense strand
ccaagaagaggaagaagac

SEQ ID NO: 788026 - RNA, 19 nt, Homo sapiens
  misc_RNA (1)...(19): siRNA sense strand
ugagaaagggccugaaguc

SEQ ID NO: 788027 - RNA, 19 nt, Homo sapiens
  misc_RNA (1)...(19): siRNA sense strand
gagaaagggccugaagucu

SEQ ID NO: 788028 - RNA, 19 nt, Homo sapiens
  misc_RNA (1)...(19): siRNA sense strand
gcucaggcaauauaaaguc

SEQ ID NO: 788029 - RNA, 19 nt, Homo sapiens
  misc_RNA (1)...(19): siRNA sense strand
gcaggacucacuggauaga

SEQ ID NO: 788030 - RNA, 19 nt, Homo sapiens
  misc_RNA (1)...(19): siRNA sense strand
gaagacaaagucgacucaa

SEQ ID NO: 788031 - RNA, 19 nt, Homo sapiens
  misc_RNA (1)...(19): siRNA sense strand
gaggaaugagcgacaguuc

SEQ ID NO: 788032 - RNA, 19 nt, Homo sapiens
  misc_RNA (1)...(19): siRNA sense strand
ggaaagaauugucugauaa

SEQ ID NO: 788033 - RNA, 19 nt, Homo sapiens
  misc_RNA (1)...(19): siRNA sense strand
gaugagcccuuaaaucuua

SEQ ID NO: 788034 - RNA, 19 nt, Homo sapiens
  misc_RNA (1)...(19): siRNA sense strand
ggaagaagcugggaaagaa

SEQ ID NO: 788035 - RNA, 19 nt, Homo sapiens
  misc_RNA (1)...(19): siRNA sense strand
gaaugaagcugcugaggaa

SEQ ID NO: 788036 - RNA, 19 nt, Homo sapiens
  misc_RNA (1)...(19): siRNA sense strand
gaagaagaauuuacagguu

SEQ ID NO: 788037 - RNA, 19 nt, Homo sapiens
  misc_RNA (1)...(19): siRNA sense strand
ggacauggcagggaaauua

SEQ ID NO: 788038 - RNA, 19 nt, Homo sapiens
  misc_RNA (1)...(19): siRNA sense strand
gggaaagaauugucugaua

SEQ ID NO: 788039 - RNA, 19 nt, Homo sapiens
  misc_RNA (1)...(19): siRNA sense strand
ggacagugaugaagaugaa

SEQ ID NO: 788040 - RNA, 19 nt, Homo sapiens
  misc_RNA (1)...(19): siRNA sense strand
gcagggaaauuaaucaaug

SEQ ID NO: 788041 - RNA, 19 nt, Homo sapiens
  misc_RNA (1)...(19): siRNA sense strand
gcagugauguaucucuaua

SEQ ID NO: 788042 - RNA, 19 nt, Homo sapiens
  misc_RNA (1)...(19): siRNA sense strand
auacagaaaugcagaauga

SEQ ID NO: 788043 - RNA, 19 nt, Homo sapiens
  misc_RNA (1)...(19): siRNA sense strand
gcagagagaucuagaacag

SEQ ID NO: 788044 - RNA, 19 nt, Homo sapiens
  misc_RNA (1)...(19): siRNA sense strand
gggaggagcugcugaagau

SEQ ID NO: 788045 - RNA, 19 nt, Homo sapiens
  misc_RNA (1)...(19): siRNA sense strand
ccaagaagaucuggaagaa

SEQ ID NO: 788046 - RNA, 19 nt, Homo sapiens
  misc_RNA (1)...(19): siRNA sense strand
ugagaaaguucacagauau

SEQ ID NO: 788047 - RNA, 19 nt, Homo sapiens
  misc_RNA (1)...(19): siRNA sense strand
aagaagaucuggaagaaga

SEQ ID NO: 788048 - RNA, 19 nt, Homo sapiens
  misc_RNA (1)...(19): siRNA sense strand
gcaaagaagagucguguug

SEQ ID NO: 788049 - RNA, 19 nt, Homo sapiens
  misc_RNA (1)...(19): siRNA sense strand
gagcagugauguaucucua

SEQ ID NO: 788050 - RNA, 19 nt, Homo sapiens
  misc_RNA (1)...(19): siRNA sense strand
gaaugaaacuagugaucga

SEQ ID NO: 788051 - RNA, 19 nt, Homo sapiens
  misc_RNA (1)...(19): siRNA sense strand
gagaaagcaucagcaaaga

SEQ ID NO: 788052 - RNA, 19 nt, Homo sapiens
  misc_RNA (1)...(19): siRNA sense strand
gaagagaccaggaaauuac

SEQ ID NO: 788053 - RNA, 19 nt, Homo sapiens
  misc_RNA (1)...(19): siRNA sense strand
ugagaacgaugagcccuua

SEQ ID NO: 788054 - RNA, 19 nt, Homo sapiens
  misc_RNA (1)...(19): siRNA sense strand
caaauggaauguggaaaug

SEQ ID NO: 788055 - RNA, 19 nt, Homo sapiens
  misc_RNA (1)...(19): siRNA sense strand
ggucuuaccucaaacuaca

SEQ ID NO: 788056 - RNA, 19 nt, Homo sapiens
  misc_RNA (1)...(19): siRNA sense strand
ggaagcaucccgccaguga

SEQ ID NO: 788057 - RNA, 19 nt, Homo sapiens
  misc_RNA (1)...(19): siRNA sense strand
gaagcaggaccuuaaagaa

SEQ ID NO: 788058 - RNA, 19 nt, Homo sapiens
  misc_RNA (1)...(19): siRNA sense strand
ggacagcgacucugaaucu

SEQ ID NO: 788059 - RNA, 19 nt, Homo sapiens
  misc_RNA (1)...(19): siRNA sense strand
gaagaggaagaagaauuua

SEQ ID NO: 788060 - RNA, 19 nt, Homo sapiens
  misc_RNA (1)...(19): siRNA sense strand
gaagagaaagcaucagcaa

SEQ ID NO: 788061 - RNA, 19 nt, Homo sapiens
  misc_RNA (1)...(19): siRNA sense strand
guucacagauauaaggaaa

SEQ ID NO: 788062 - RNA, 19 nt, Homo sapiens
  misc_RNA (1)...(19): siRNA sense strand
gaauggcucucaccucuac

SEQ ID NO: 788063 - RNA, 19 nt, Homo sapiens
  misc_RNA (1)...(19): siRNA sense strand
gcagacauauuuggagaau

SEQ ID NO: 788064 - RNA, 19 nt, Homo sapiens
  misc_RNA (1)...(19): siRNA sense strand
gggagaggauacagaaaug

SEQ ID NO: 788065 - RNA, 19 nt, Homo sapiens
  misc_RNA (1)...(19): siRNA sense strand
acaaaggaaugacaagaga

SEQ ID NO: 788066 - RNA, 19 nt, Homo sapiens
  misc_RNA (1)...(19): siRNA sense strand
ugaagaggaagaagaauuu

SEQ ID NO: 788067 - RNA, 19 nt, Homo sapiens
  misc_RNA (1)...(19): siRNA sense strand
ggucagugauucagaaagu

SEQ ID NO: 788068 - RNA, 19 nt, Homo sapiens
  misc_RNA (1)...(19): siRNA sense strand
uagugaagaugaagagaaa

SEQ ID NO: 788069 - RNA, 19 nt, Homo sapiens
  misc_RNA (1)...(19): siRNA sense strand
gagaaaguucacagauaua

SEQ ID NO: 788070 - RNA, 19 nt, Homo sapiens
  misc_RNA (1)...(19): siRNA sense strand
gaaagcaucagcaaagaag

SEQ ID NO: 788071 - RNA, 19 nt, Homo sapiens
  misc_RNA (1)...(19): siRNA sense strand
uggagaaucuggugaugaa

SEQ ID NO: 788072 - RNA, 19 nt, Homo sapiens
  misc_RNA (1)...(19): siRNA sense strand
agacauauuuggagaaucu

SEQ ID NO: 788073 - RNA, 19 nt, Homo sapiens
  misc_RNA (1)...(19): siRNA sense strand
gaagagaaggaucuguuug

SEQ ID NO: 788074 - RNA, 19 nt, Homo sapiens
  misc_RNA (1)...(19): siRNA sense strand
gaacgaugagcccuuaaau

SEQ ID NO: 788075 - RNA, 19 nt, Homo sapiens
  misc_RNA (1)...(19): siRNA sense strand
acagacaguugaacaauca

SEQ ID NO: 788076 - RNA, 19 nt, Homo sapiens
  misc_RNA (1)...(19): siRNA sense strand
gaagacagacaguugaaca

SEQ ID NO: 788077 - RNA, 19 nt, Homo sapiens
  misc_RNA (1)...(19): siRNA sense strand
gcaugcaagugacucagaa

SEQ ID NO: 788078 - RNA, 19 nt, Homo sapiens
  misc_RNA (1)...(19): siRNA sense strand
ugaagagaccaggaaauua

SEQ ID NO: 788079 - RNA, 19 nt, Homo sapiens
  misc_RNA (1)...(19): siRNA sense strand
ugcaagagcugccuagugu

SEQ ID NO: 788080 - RNA, 19 nt, Homo sapiens
  misc_RNA (1)...(19): siRNA sense strand
gaaaaugaggaacuucuua

SEQ ID NO: 788081 - RNA, 19 nt, Homo sapiens
  misc_RNA (1)...(19): siRNA sense strand
gagaauaagggagaggaua

SEQ ID NO: 788082 - RNA, 19 nt, Homo sapiens
  misc_RNA (1)...(19): siRNA sense strand
ggaaugacaagagaagaaa

SEQ ID NO: 788083 - RNA, 19 nt, Homo sapiens
  misc_RNA (1)...(19): siRNA sense strand
cagggaaauuaaucaauga

SEQ ID NO: 788084 - RNA, 19 nt, Homo sapiens
  misc_RNA (1)...(19): siRNA sense strand
gugaagagaccaggaaauu

SEQ ID NO: 788085 - RNA, 19 nt, Homo sapiens
  misc_RNA (1)...(19): siRNA sense strand
gcucucaccucuaccagau

SEQ ID NO: 788086 - RNA, 19 nt, Homo sapiens
  misc_RNA (1)...(19): siRNA sense strand
gaaagaauugucugauaag

SEQ ID NO: 788087 - RNA, 19 nt, Homo sapiens
  misc_RNA (1)...(19): siRNA sense strand
gaccauagcaucugacagu

SEQ ID NO: 788088 - RNA, 19 nt, Homo sapiens
  misc_RNA (1)...(19): siRNA sense strand
caaggaaccaggccaguga

SEQ ID NO: 788089 - RNA, 19 nt, Homo sapiens
  misc_RNA (1)...(19): siRNA sense strand
gcuagugacucugaaagug

SEQ ID NO: 788090 - RNA, 19 nt, Homo sapiens
  misc_RNA (1)...(19): siRNA sense strand
augagaaaguucacagaua

SEQ ID NO: 788091 - RNA, 19 nt, Homo sapiens
  misc_RNA (1)...(19): siRNA sense strand
ccucaacgacgaagaauga

SEQ ID NO: 788092 - RNA, 19 nt, Homo sapiens
  misc_RNA (1)...(19): siRNA sense strand
caagagcugccuaguguga

SEQ ID NO: 788093 - RNA, 19 nt, Homo sapiens
  misc_RNA (1)...(19): siRNA sense strand
aaacagaagaugcucuaaa

SEQ ID NO: 788094 - RNA, 19 nt, Homo sapiens
  misc_RNA (1)...(19): siRNA sense strand
gagcuucccagaccucgua

SEQ ID NO: 788095 - RNA, 19 nt, Homo sapiens
  misc_RNA (1)...(19): siRNA sense strand
gaggaugcguccagacaca

SEQ ID NO: 788096 - RNA, 19 nt, Homo sapiens
  misc_RNA (1)...(19): siRNA sense strand
ccaaauggaauguggaaau

SEQ ID NO: 788097 - RNA, 19 nt, Homo sapiens
  misc_RNA (1)...(19): siRNA sense strand
gacagacaguugaacaauc

SEQ ID NO: 788098 - RNA, 19 nt, Homo sapiens
  misc_RNA (1)...(19): siRNA sense strand
ggucagacggugaggauga

SEQ ID NO: 788099 - RNA, 19 nt, Homo sapiens
  misc_RNA (1)...(19): siRNA sense strand
gauaaacagaugagaaagu

SEQ ID NO: 788100 - RNA, 19 nt, Homo sapiens
  misc_RNA (1)...(19): siRNA sense strand
aagcaggaccuuaaagaaa

SEQ ID NO: 788101 - RNA, 19 nt, Homo sapiens
  misc_RNA (1)...(19): siRNA sense strand
guaguuaugcaccuuaaga

SEQ ID NO: 788102 - RNA, 19 nt, Homo sapiens
  misc_RNA (1)...(19): siRNA sense strand
gagaaucuggugaugaaga

SEQ ID NO: 788103 - RNA, 19 nt, Homo sapiens
  misc_RNA (1)...(19): siRNA sense strand
gagaaaguagcgaagagaa

SEQ ID NO: 788104 - RNA, 19 nt, Homo sapiens
  misc_RNA (1)...(19): siRNA sense strand
ucaggucagugauucagaa

SEQ ID NO: 788105 - RNA, 19 nt, Homo sapiens
  misc_RNA (1)...(19): siRNA sense strand
gacgagcagugauguaucu

SEQ ID NO: 788106 - RNA, 19 nt, Homo sapiens
  misc_RNA (1)...(19): siRNA sense strand
gcaggaccuuaaagaaaca

SEQ ID NO: 788107 - RNA, 19 nt, Homo sapiens
  misc_RNA (1)...(19): siRNA sense strand
gaggaagacagacaguuga

SEQ ID NO: 788108 - RNA, 19 nt, Homo sapiens
  misc_RNA (1)...(19): siRNA sense strand
gccaugaucgucaagauga

SEQ ID NO: 788109 - RNA, 19 nt, Homo sapiens
  misc_RNA (1)...(19): siRNA sense strand
uaaccaagaagaucuggaa

SEQ ID NO: 788110 - RNA, 19 nt, Homo sapiens
  misc_RNA (1)...(19): siRNA sense strand
uaagggagaggauacagaa

SEQ ID NO: 788111 - RNA, 19 nt, Homo sapiens
  misc_RNA (1)...(19): siRNA sense strand
agaagaccauagcaucuga

SEQ ID NO: 788112 - RNA, 19 nt, Homo sapiens
  misc_RNA (1)...(19): siRNA sense strand
ggucuaggccuauauuugg

SEQ ID NO: 788113 - RNA, 19 nt, Homo sapiens
  misc_RNA (1)...(19): siRNA sense strand
gugaggaugauguaaauga

SEQ ID NO: 788114 - RNA, 19 nt, Homo sapiens
  misc_RNA (1)...(19): siRNA sense strand
agaagaguccugcuaguga

SEQ ID NO: 788115 - RNA, 19 nt, Homo sapiens
  misc_RNA (1)...(19): siRNA sense strand
ggaaguguagaacgucauu

SEQ ID NO: 788116 - RNA, 19 nt, Homo sapiens
  misc_RNA (1)...(19): siRNA sense strand
cgacgugagugccaugauc

SEQ ID NO: 788117 - RNA, 19 nt, Homo sapiens
  misc_RNA (1)...(19): siRNA sense strand
gcaccaggccagugacuca

SEQ ID NO: 788118 - RNA, 19 nt, Homo sapiens
  misc_RNA (1)...(19): siRNA sense strand
aaacagaugagaaaguuca

SEQ ID NO: 788119 - RNA, 19 nt, Homo sapiens
  misc_RNA (1)...(19): siRNA sense strand
gucaggcaaugaagaagaa

SEQ ID NO: 788120 - RNA, 19 nt, Homo sapiens
  misc_RNA (1)...(19): siRNA sense strand
gaagaagcugggaaagaau

SEQ ID NO: 788121 - RNA, 19 nt, Homo sapiens
  misc_RNA (1)...(19): siRNA sense strand
ugaaacuagugaucgagaa

SEQ ID NO: 788122 - RNA, 19 nt, Homo sapiens
  misc_RNA (1)...(19): siRNA sense strand
uuaaugggcaugcaaguga

SEQ ID NO: 788123 - RNA, 19 nt, Homo sapiens
  misc_RNA (1)...(19): siRNA sense strand
aggccuauauuuggucuua

SEQ ID NO: 788124 - RNA, 19 nt, Homo sapiens
  misc_RNA (1)...(19): siRNA sense strand
gauaacauaaagagaggaa

SEQ ID NO: 788125 - RNA, 19 nt, Homo sapiens
  misc_RNA (1)...(19): siRNA sense strand
gaagaucuggaagaagaaa

SEQ ID NO: 788126 - RNA, 19 nt, Homo sapiens
  misc_RNA (1)...(19): siRNA sense strand
ugaagagaaggaucuguuu

SEQ ID NO: 788127 - RNA, 19 nt, Homo sapiens
  misc_RNA (1)...(19): siRNA sense strand
gaaaguagcgaagagaaaa

SEQ ID NO: 788128 - RNA, 19 nt, Homo sapiens
  misc_RNA (1)...(19): siRNA sense strand
ugaaacagaagaugcucua

SEQ ID NO: 788129 - RNA, 19 nt, Homo sapiens
  misc_RNA (1)...(19): siRNA sense strand
caacgacgaagaaugaaca

SEQ ID NO: 788130 - RNA, 19 nt, Homo sapiens
  misc_RNA (1)...(19): siRNA sense strand
gaugagaaaguucacagau

SEQ ID NO: 788131 - RNA, 19 nt, Homo sapiens
  misc_RNA (1)...(19): siRNA sense strand
uggauaaacagaugagaaa

SEQ ID NO: 788132 - RNA, 19 nt, Homo sapiens
  misc_RNA (1)...(19): siRNA sense strand
ggaaagaucuccacgaaga

SEQ ID NO: 788133 - RNA, 19 nt, Homo sapiens
  misc_RNA (1)...(19): siRNA sense strand
ggaaacagauuauuacuuc

SEQ ID NO: 788134 - RNA, 19 nt, Homo sapiens
  misc_RNA (1)...(19): siRNA sense strand
gagcaucuccuaccauuua

SEQ ID NO: 788135 - RNA, 19 nt, Homo sapiens
  misc_RNA (1)...(19): siRNA sense strand
ccaaguaggugacagagua

SEQ ID NO: 788136 - RNA, 19 nt, Homo sapiens
  misc_RNA (1)...(19): siRNA sense strand
gaaguagaguccuuagaaa

SEQ ID NO: 788137 - RNA, 19 nt, Homo sapiens
  misc_RNA (1)...(19): siRNA sense strand
guauauaccuagugacuuu

SEQ ID NO: 788138 - RNA, 19 nt, Homo sapiens
  misc_RNA (1)...(19): siRNA sense strand
ggucuaaacuugauccaaa

SEQ ID NO: 788139 - RNA, 19 nt, Homo sapiens
  misc_RNA (1)...(19): siRNA sense strand
gauguauucuuucagcuua

SEQ ID NO: 788140 - RNA, 19 nt, Homo sapiens
  misc_RNA (1)...(19): siRNA sense strand
guacaauggugcaauggua

SEQ ID NO: 788141 - RNA, 19 nt, Homo sapiens
  misc_RNA (1)...(19): siRNA sense strand
gaacauucauuugagguuu

SEQ ID NO: 788142 - RNA, 19 nt, Homo sapiens
  misc_RNA (1)...(19): siRNA sense strand
caaggaggcugauggagaa

SEQ ID NO: 788143 - RNA, 19 nt, Homo sapiens
  misc_RNA (1)...(19): siRNA sense strand
caaagacaaugaagguaaa

SEQ ID NO: 788144 - RNA, 19 nt, Homo sapiens
  misc_RNA (1)...(19): siRNA sense strand
gcuaggaaacagauuauua

SEQ ID NO: 788145 - RNA, 19 nt, Homo sapiens
  misc_RNA (1)...(19): siRNA sense strand
agacguagaucgagagaaa

SEQ ID NO: 788146 - RNA, 19 nt, Homo sapiens
  misc_RNA (1)...(19): siRNA sense strand
gaagauaacaaucaagaug

SEQ ID NO: 788147 - RNA, 19 nt, Homo sapiens
  misc_RNA (1)...(19): siRNA sense strand
gagcugagguagaacagaa

SEQ ID NO: 788148 - RNA, 19 nt, Homo sapiens
  misc_RNA (1)...(19): siRNA sense strand
gaagacuccuccugcugua

SEQ ID NO: 788149 - RNA, 19 nt, Homo sapiens
  misc_RNA (1)...(19): siRNA sense strand
ggagaauggugccagugua

SEQ ID NO: 788150 - RNA, 19 nt, Homo sapiens
  misc_RNA (1)...(19): siRNA sense strand
caagaaggauaauguaaag

SEQ ID NO: 788151 - RNA, 19 nt, Homo sapiens
  misc_RNA (1)...(19): siRNA sense strand
agagaaagaucaccucaga

SEQ ID NO: 788152 - RNA, 19 nt, Homo sapiens
  misc_RNA (1)...(19): siRNA sense strand
agaaagagaugaugaaacu

SEQ ID NO: 788153 - RNA, 19 nt, Homo sapiens
  misc_RNA (1)...(19): siRNA sense strand
uuacauggguggaugcuuu

SEQ ID NO: 788154 - RNA, 19 nt, Homo sapiens
  misc_RNA (1)...(19): siRNA sense strand
gaaaugaccaaacgagaug

SEQ ID NO: 788155 - RNA, 19 nt, Homo sapiens
  misc_RNA (1)...(19): siRNA sense strand
caaaacagcuuaaaguaga

SEQ ID NO: 788156 - RNA, 19 nt, Homo sapiens
  misc_RNA (1)...(19): siRNA sense strand
uaaauggaaugcacagaga

SEQ ID NO: 788157 - RNA, 19 nt, Homo sapiens
  misc_RNA (1)...(19): siRNA sense strand
guaggaagccucuugcaaa

SEQ ID NO: 788158 - RNA, 19 nt, Homo sapiens
  misc_RNA (1)...(19): siRNA sense strand
gccaugggcuacucaguuu

SEQ ID NO: 788159 - RNA, 19 nt, Homo sapiens
  misc_RNA (1)...(19): siRNA sense strand
aaacuuaucuacgguaaug

SEQ ID NO: 788160 - RNA, 19 nt, Homo sapiens
  misc_RNA (1)...(19): siRNA sense strand
gaaaggaagaaagaagaua

SEQ ID NO: 788161 - RNA, 19 nt, Homo sapiens
  misc_RNA (1)...(19): siRNA sense strand
gaagaaagagaugaugaaa

SEQ ID NO: 788162 - RNA, 19 nt, Homo sapiens
  misc_RNA (1)...(19): siRNA sense strand
agaagaagcugaggaugaa

SEQ ID NO: 788163 - RNA, 19 nt, Homo sapiens
  misc_RNA (1)...(19): siRNA sense strand
ggaaaucugaagacgauaa

SEQ ID NO: 788164 - RNA, 19 nt, Homo sapiens
  misc_RNA (1)...(19): siRNA sense strand
gaacagaagcugcaguuac

SEQ ID NO: 788165 - RNA, 19 nt, Homo sapiens
  misc_RNA (1)...(19): siRNA sense strand
caaaagagauaucaacaga

SEQ ID NO: 788166 - RNA, 19 nt, Homo sapiens
  misc_RNA (1)...(19): siRNA sense strand
ccaaagacaaugaagguaa

SEQ ID NO: 788167 - RNA, 19 nt, Homo sapiens
  misc_RNA (1)...(19): siRNA sense strand
gaagauaugcuaggaaaca

SEQ ID NO: 788168 - RNA, 19 nt, Homo sapiens
  misc_RNA (1)...(19): siRNA sense strand
gcacagauuucagcagcuu

SEQ ID NO: 788169 - RNA, 19 nt, Homo sapiens
  misc_RNA (1)...(19): siRNA sense strand
aguaagagcugagguagaa

SEQ ID NO: 788170 - RNA, 19 nt, Homo sapiens
  misc_RNA (1)...(19): siRNA sense strand
gcaggaagauaugcuagga

SEQ ID NO: 788171 - RNA, 19 nt, Homo sapiens
  misc_RNA (1)...(19): siRNA sense strand
gaaggucgagcucuuaguu

SEQ ID NO: 788172 - RNA, 19 nt, Homo sapiens
  misc_RNA (1)...(19): siRNA sense strand
ggaugaagcuauggccauu

SEQ ID NO: 788173 - RNA, 19 nt, Homo sapiens
  misc_RNA (1)...(19): siRNA sense strand
gcccuaguauggaagauuu

SEQ ID NO: 788174 - RNA, 19 nt, Homo sapiens
  misc_RNA (1)...(19): siRNA sense strand
ccuauuggacuacagauua

SEQ ID NO: 788175 - RNA, 19 nt, Homo sapiens
  misc_RNA (1)...(19): siRNA sense strand
acagagaauucaaacacua

SEQ ID NO: 788176 - RNA, 19 nt, Homo sapiens
  misc_RNA (1)...(19): siRNA sense strand
caaaggauguggaagaaaa

SEQ ID NO: 788177 - RNA, 19 nt, Homo sapiens
  misc_RNA (1)...(19): siRNA sense strand
ugaugaaacugaagaagau

SEQ ID NO: 788178 - RNA, 19 nt, Homo sapiens
  misc_RNA (1)...(19): siRNA sense strand
gagaugaaaggaagaaaga

SEQ ID NO: 788179 - RNA, 19 nt, Homo sapiens
  misc_RNA (1)...(19): siRNA sense strand
gcucuuaguuccaaaggau

SEQ ID NO: 788180 - RNA, 19 nt, Homo sapiens
  misc_RNA (1)...(19): siRNA sense strand
gaugaaauccacacuguuc

SEQ ID NO: 788181 - RNA, 19 nt, Homo sapiens
  misc_RNA (1)...(19): siRNA sense strand
ugaagagucugagucauug

SEQ ID NO: 788182 - RNA, 19 nt, Homo sapiens
  misc_RNA (1)...(19): siRNA sense strand
gaucaaagucauugugguu

SEQ ID NO: 788183 - RNA, 19 nt, Homo sapiens
  misc_RNA (1)...(19): siRNA sense strand
caaacgagaugacaaaaga

SEQ ID NO: 788184 - RNA, 19 nt, Homo sapiens
  misc_RNA (1)...(19): siRNA sense strand
gaaaugcuucaaagagauu

SEQ ID NO: 788185 - RNA, 19 nt, Homo sapiens
  misc_RNA (1)...(19): siRNA sense strand
uaggaaaucugaagacgau

SEQ ID NO: 788186 - RNA, 19 nt, Homo sapiens
  misc_RNA (1)...(19): siRNA sense strand
guuaauagcccgauugaca

SEQ ID NO: 788187 - RNA, 19 nt, Homo sapiens
  misc_RNA (1)...(19): siRNA sense strand
cgggaaagaucuccacgaa

SEQ ID NO: 788188 - RNA, 19 nt, Homo sapiens
  misc_RNA (1)...(19): siRNA sense strand
cauuugagguuucauuguu

SEQ ID NO: 788189 - RNA, 19 nt, Homo sapiens
  misc_RNA (1)...(19): siRNA sense strand
ugaagacgauaaagaggaa

SEQ ID NO: 788190 - RNA, 19 nt, Homo sapiens
  misc_RNA (1)...(19): siRNA sense strand
gaucaagugccuaacagaa

SEQ ID NO: 788191 - RNA, 19 nt, Homo sapiens
  misc_RNA (1)...(19): siRNA sense strand
gaauggugccaguguauga

SEQ ID NO: 788192 - RNA, 19 nt, Homo sapiens
  misc_RNA (1)...(19): siRNA sense strand
gaagauagagaugaaagga

SEQ ID NO: 788193 - RNA, 19 nt, Homo sapiens
  misc_RNA (1)...(19): siRNA sense strand
uggugaagcuaaagaaauu

SEQ ID NO: 788194 - RNA, 19 nt, Homo sapiens
  misc_RNA (1)...(19): siRNA sense strand
gagaacaggaugaagaaga

SEQ ID NO: 788195 - RNA, 19 nt, Homo sapiens
  misc_RNA (1)...(19): siRNA sense strand
ggaugauggugaagcuaaa

SEQ ID NO: 788196 - RNA, 19 nt, Homo sapiens
  misc_RNA (1)...(19): siRNA sense strand
gaaugaagacaaagaucaa

SEQ ID NO: 788197 - RNA, 19 nt, Homo sapiens
  misc_RNA (1)...(19): siRNA sense strand
cagaagaagcugaggauga

SEQ ID NO: 788198 - RNA, 19 nt, Homo sapiens
  misc_RNA (1)...(19): siRNA sense strand
gacuacagauuagaggaua

SEQ ID NO: 788199 - RNA, 19 nt, Homo sapiens
  misc_RNA (1)...(19): siRNA sense strand
gaagaaaggaaacgucaag

SEQ ID NO: 788200 - RNA, 19 nt, Homo sapiens
  misc_RNA (1)...(19): siRNA sense strand
gaaaucugaagacgauaaa

SEQ ID NO: 788201 - RNA, 19 nt, Homo sapiens
  misc_RNA (1)...(19): siRNA sense strand
aaagaucccucuguguuga

SEQ ID NO: 788202 - RNA, 19 nt, Homo sapiens
  misc_RNA (1)...(19): siRNA sense strand
uaucuacgguaauggauga

SEQ ID NO: 788203 - RNA, 19 nt, Homo sapiens
  misc_RNA (1)...(19): siRNA sense strand
uaacacaaacugcugcauu

SEQ ID NO: 788204 - RNA, 19 nt, Homo sapiens
  misc_RNA (1)...(19): siRNA sense strand
caacagcaauauucacaac

SEQ ID NO: 788205 - RNA, 19 nt, Homo sapiens
  misc_RNA (1)...(19): siRNA sense strand
caguaaagcaggaaucaaa

SEQ ID NO: 788206 - RNA, 19 nt, Homo sapiens
  misc_RNA (1)...(19): siRNA sense strand
cagcaggccuuaccacaca

SEQ ID NO: 788207 - RNA, 19 nt, Homo sapiens
  misc_RNA (1)...(19): siRNA sense strand
gaccaaacgagaugacaaa

SEQ ID NO: 788208 - RNA, 19 nt, Homo sapiens
  misc_RNA (1)...(19): siRNA sense strand
cgaaaugcuucaaagagau

SEQ ID NO: 788209 - RNA, 19 nt, Homo sapiens
  misc_RNA (1)...(19): siRNA sense strand
caacgaaaugcuucaaaga

SEQ ID NO: 788210 - RNA, 19 nt, Homo sapiens
  misc_RNA (1)...(19): siRNA sense strand
cgauaaagaggaagaagaa

SEQ ID NO: 788211 - RNA, 19 nt, Homo sapiens
  misc_RNA (1)...(19): siRNA sense strand
gguggaugcuuucccuuug

SEQ ID NO: 788212 - RNA, 19 nt, Homo sapiens
  misc_RNA (1)...(19): siRNA sense strand
aggaagauaugcuaggaaa

SEQ ID NO: 788213 - RNA, 19 nt, Homo sapiens
  misc_RNA (1)...(19): siRNA sense strand
gaagagaaccaugaagagu

SEQ ID NO: 788214 - RNA, 19 nt, Homo sapiens
  misc_RNA (1)...(19): siRNA sense strand
gaaaaggauuuggaagaaa

SEQ ID NO: 788215 - RNA, 19 nt, Homo sapiens
  misc_RNA (1)...(19): siRNA sense strand
aaagagaugaugaaacuga

SEQ ID NO: 788216 - RNA, 19 nt, Homo sapiens
  misc_RNA (1)...(19): siRNA sense strand
gcacacaaugguaccguuu

SEQ ID NO: 788217 - RNA, 19 nt, Homo sapiens
  misc_RNA (1)...(19): siRNA sense strand
gcacugccuacaagccuua

SEQ ID NO: 788218 - RNA, 19 nt, Homo sapiens
  misc_RNA (1)...(19): siRNA sense strand
gaucacaauuaacagagau

SEQ ID NO: 788219 - RNA, 19 nt, Homo sapiens
  misc_RNA (1)...(19): siRNA sense strand
gaaggaugauggugaagcu

SEQ ID NO: 788220 - RNA, 19 nt, Homo sapiens
  misc_RNA (1)...(19): siRNA sense strand
agagaaggaugauggugaa

SEQ ID NO: 788221 - RNA, 19 nt, Homo sapiens
  misc_RNA (1)...(19): siRNA sense strand
gcagccuccuguucguaua

SEQ ID NO: 788222 - RNA, 19 nt, Homo sapiens
  misc_RNA (1)...(19): siRNA sense strand
gcacagagaauucaaacac

SEQ ID NO: 788223 - RNA, 19 nt, Homo sapiens
  misc_RNA (1)...(19): siRNA sense strand
gcugggaaauuacugcaau

SEQ ID NO: 788224 - RNA, 19 nt, Homo sapiens
  misc_RNA (1)...(19): siRNA sense strand
ggaaucaaaggauguggaa

SEQ ID NO: 788225 - RNA, 19 nt, Homo sapiens
  misc_RNA (1)...(19): siRNA sense strand
agacucaaaugaucacaau

SEQ ID NO: 788226 - RNA, 19 nt, Homo sapiens
  misc_RNA (1)...(19): siRNA sense strand
acgaaaugcuucaaagaga

SEQ ID NO: 788227 - RNA, 19 nt, Homo sapiens
  misc_RNA (1)...(19): siRNA sense strand
agaaguagaguccuuagaa

SEQ ID NO: 788228 - RNA, 19 nt, Homo sapiens
  misc_RNA (1)...(19): siRNA sense strand
accagaugcugaccacuua

SEQ ID NO: 788229 - RNA, 19 nt, Homo sapiens
  misc_RNA (1)...(19): siRNA sense strand
gagaugaugaaacugauga

SEQ ID NO: 788230 - RNA, 19 nt, Homo sapiens
  misc_RNA (1)...(19): siRNA sense strand
aaggaaacgucaagaggaa

SEQ ID NO: 788231 - RNA, 19 nt, Homo sapiens
  misc_RNA (1)...(19): siRNA sense strand
uaaaugaccuccgaaaaga

SEQ ID NO: 788232 - RNA, 19 nt, Homo sapiens
  misc_RNA (1)...(19): siRNA sense strand
ccaguacacccaugaauuu

SEQ ID NO: 788233 - RNA, 19 nt, Homo sapiens
  misc_RNA (1)...(19): siRNA sense strand
gaaauauggcugugggaaa

SEQ ID NO: 788234 - RNA, 19 nt, Homo sapiens
  misc_RNA (1)...(19): siRNA sense strand
aaacacaccuuggaauuca

SEQ ID NO: 788235 - RNA, 19 nt, Homo sapiens
  misc_RNA (1)...(19): siRNA sense strand
guacacccaugaauuugau

SEQ ID NO: 788236 - RNA, 19 nt, Homo sapiens
  misc_RNA (1)...(19): siRNA sense strand
cagagugcacugagaaaua

SEQ ID NO: 788237 - RNA, 19 nt, Homo sapiens
  misc_RNA (1)...(19): siRNA sense strand
gaaaacacaccuuggaauu

SEQ ID NO: 788238 - RNA, 19 nt, Homo sapiens
  misc_RNA (1)...(19): siRNA sense strand
cauuguggcugaccauguu

SEQ ID NO: 788239 - RNA, 19 nt, Homo sapiens
  misc_RNA (1)...(19): siRNA sense strand
agagugcacugagaaauau

SEQ ID NO: 788240 - RNA, 19 nt, Homo sapiens
  misc_RNA (1)...(19): siRNA sense strand
ggugggcacugucuucauc

SEQ ID NO: 788241 - RNA, 19 nt, Homo sapiens
  misc_RNA (1)...(19): siRNA sense strand
gccuauguuuagcaaauuu

SEQ ID NO: 788242 - RNA, 19 nt, Homo sapiens
  misc_RNA (1)...(19): siRNA sense strand
ccaacacccucaucugucu

SEQ ID NO: 788243 - RNA, 19 nt, Homo sapiens
  misc_RNA (1)...(19): siRNA sense strand
gccaguacacccaugaauu

SEQ ID NO: 788244 - RNA, 19 nt, Homo sapiens
  misc_RNA (1)...(19): siRNA sense strand
ucaccuggcugagcaaugg

SEQ ID NO: 788245 - RNA, 19 nt, Homo sapiens
  misc_RNA (1)...(19): siRNA sense strand
gcccaacacccucaucugu

SEQ ID NO: 788246 - RNA, 19 nt, Homo sapiens
  misc_RNA (1)...(19): siRNA sense strand
gagugaucauuccuucuuc

SEQ ID NO: 788247 - RNA, 19 nt, Homo sapiens
  misc_RNA (1)...(19): siRNA sense strand
cuguggaggugaagacauu

SEQ ID NO: 788248 - RNA, 19 nt, Homo sapiens
  misc_RNA (1)...(19): siRNA sense strand
gcagagugcacugagaaau

SEQ ID NO: 788249 - RNA, 19 nt, Homo sapiens
  misc_RNA (1)...(19): siRNA sense strand
gaugagacaguccaacucu

SEQ ID NO: 788250 - RNA, 19 nt, Homo sapiens
  misc_RNA (1)...(19): siRNA sense strand
aaauauggcugugggaaaa

SEQ ID NO: 788251 - RNA, 19 nt, Homo sapiens
  misc_RNA (1)...(19): siRNA sense strand
gcacucagucacagaaggu

SEQ ID NO: 788252 - RNA, 19 nt, Homo sapiens
  misc_RNA (1)...(19): siRNA sense strand
ucaguuaccucaccuuccu

SEQ ID NO: 788253 - RNA, 19 nt, Homo sapiens
  misc_RNA (1)...(19): siRNA sense strand
acacugggagccugagauu

SEQ ID NO: 788254 - RNA, 19 nt, Homo sapiens
  misc_RNA (1)...(19): siRNA sense strand
caaggccugcguucaguug

SEQ ID NO: 788255 - RNA, 19 nt, Homo sapiens
  misc_RNA (1)...(19): siRNA sense strand
gcacugucuucaucaucca

SEQ ID NO: 788256 - RNA, 19 nt, Homo sapiens
  misc_RNA (1)...(19): siRNA sense strand
gcauuguggugggcacugu

SEQ ID NO: 788257 - RNA, 19 nt, Homo sapiens
  misc_RNA (1)...(19): siRNA sense strand
gcaguugccuauguuuagc

SEQ ID NO: 788258 - RNA, 19 nt, Homo sapiens
  misc_RNA (1)...(19): siRNA sense strand
agagugaucauuccuucuu

SEQ ID NO: 788259 - RNA, 19 nt, Homo sapiens
  misc_RNA (1)...(19): siRNA sense strand
ggaaaacacaccuuggaau

SEQ ID NO: 788260 - RNA, 19 nt, Homo sapiens
  misc_RNA (1)...(19): siRNA sense strand
ccgcagagugcacugagaa

SEQ ID NO: 788261 - RNA, 19 nt, Homo sapiens
  misc_RNA (1)...(19): siRNA sense strand
ccaagagugaucauuccuu

SEQ ID NO: 788262 - RNA, 19 nt, Homo sapiens
  misc_RNA (1)...(19): siRNA sense strand
cuaccgcugccaccaauga

SEQ ID NO: 788263 - RNA, 19 nt, Homo sapiens
  misc_RNA (1)...(19): siRNA sense strand
acguggaccuggagacgaa

SEQ ID NO: 788264 - RNA, 19 nt, Homo sapiens
  misc_RNA (1)...(19): siRNA sense strand
uuccugaggucacaguguu

SEQ ID NO: 788265 - RNA, 19 nt, Homo sapiens
  misc_RNA (1)...(19): siRNA sense strand
gaccuggagacgaaagaga

SEQ ID NO: 788266 - RNA, 19 nt, Homo sapiens
  misc_RNA (1)...(19): siRNA sense strand
caccuuggaauucaugaug

SEQ ID NO: 788267 - RNA, 19 nt, Homo sapiens
  misc_RNA (1)...(19): siRNA sense strand
ugagacaguccaacucuac

SEQ ID NO: 788268 - RNA, 19 nt, Homo sapiens
  misc_RNA (1)...(19): siRNA sense strand
aaacggaggucucaucugu

SEQ ID NO: 788269 - RNA, 19 nt, Homo sapiens
  misc_RNA (1)...(19): siRNA sense strand
ggugcagucuuacaugauu

SEQ ID NO: 788270 - RNA, 19 nt, Homo sapiens
  misc_RNA (1)...(19): siRNA sense strand
gcauccgucuucacaaaug

SEQ ID NO: 788271 - RNA, 19 nt, Homo sapiens
  misc_RNA (1)...(19): siRNA sense strand
uggcaaagcagcagaaaga

SEQ ID NO: 788272 - RNA, 19 nt, Homo sapiens
  misc_RNA (1)...(19): siRNA sense strand
cugcauccgucuucacaaa

SEQ ID NO: 788273 - RNA, 19 nt, Homo sapiens
  misc_RNA (1)...(19): siRNA sense strand
gacgauggcucugaacucu

SEQ ID NO: 788274 - RNA, 19 nt, Homo sapiens
  misc_RNA (1)...(19): siRNA sense strand
ugaacuggauccuggugaa

SEQ ID NO: 788275 - RNA, 19 nt, Homo sapiens
  misc_RNA (1)...(19): siRNA sense strand
gcaaagcagcagaaagagu

SEQ ID NO: 788276 - RNA, 19 nt, Homo sapiens
  misc_RNA (1)...(19): siRNA sense strand
cccguuaucuaugucuuua

SEQ ID NO: 788277 - RNA, 19 nt, Homo sapiens
  misc_RNA (1)...(19): siRNA sense strand
ucacaggucucuggucucu

SEQ ID NO: 788278 - RNA, 19 nt, Homo sapiens
  misc_RNA (1)...(19): siRNA sense strand
gcaagcccuuuggcaaugu

SEQ ID NO: 788279 - RNA, 19 nt, Homo sapiens
  misc_RNA (1)...(19): siRNA sense strand
gcauggugguggugaugau

SEQ ID NO: 788280 - RNA, 19 nt, Homo sapiens
  misc_RNA (1)...(19): siRNA sense strand
cguuaucuaugucuuuaug

SEQ ID NO: 788281 - RNA, 19 nt, Homo sapiens
  misc_RNA (1)...(19): siRNA sense strand
gguugacgauggcucugaa

SEQ ID NO: 788282 - RNA, 19 nt, Homo sapiens
  misc_RNA (1)...(19): siRNA sense strand
cgccagcacuaucagcauu

SEQ ID NO: 788283 - RNA, 19 nt, Homo sapiens
  misc_RNA (1)...(19): siRNA sense strand
ccagaaggcagagaaggaa

SEQ ID NO: 788284 - RNA, 19 nt, Homo sapiens
  misc_RNA (1)...(19): siRNA sense strand
gcauugccuucuccuggau

SEQ ID NO: 788285 - RNA, 19 nt, Homo sapiens
  misc_RNA (1)...(19): siRNA sense strand
acggaggucucaucugugu

SEQ ID NO: 788286 - RNA, 19 nt, Homo sapiens
  misc_RNA (1)...(19): siRNA sense strand
gcacuaucagcauugugaa

SEQ ID NO: 788287 - RNA, 19 nt, Homo sapiens
  misc_RNA (1)...(19): siRNA sense strand
gugcagucuuacaugauug

SEQ ID NO: 788288 - RNA, 19 nt, Homo sapiens
  misc_RNA (1)...(19): siRNA sense strand
gugcaagcccuuuggcaau

SEQ ID NO: 788289 - RNA, 19 nt, Homo sapiens
  misc_RNA (1)...(19): siRNA sense strand
gcucugcuaccuccaagug

SEQ ID NO: 788290 - RNA, 19 nt, Homo sapiens
  misc_RNA (1)...(19): siRNA sense strand
gugcugggccacccuaugu

SEQ ID NO: 788291 - RNA, 19 nt, Homo sapiens
  misc_RNA (1)...(19): siRNA sense strand
guuacgccuuccacccuuu

SEQ ID NO: 788292 - RNA, 19 nt, Homo sapiens
  misc_RNA (1)...(19): siRNA sense strand
ggcaaugugagauuugaug

SEQ ID NO: 788293 - RNA, 19 nt, Homo sapiens
  misc_RNA (1)...(19): siRNA sense strand
gugaugaucuuugcguacu

SEQ ID NO: 788294 - RNA, 19 nt, Homo sapiens
  misc_RNA (1)...(19): siRNA sense strand
gaaggcagagaaggaagug

SEQ ID NO: 788295 - RNA, 19 nt, Homo sapiens
  misc_RNA (1)...(19): siRNA sense strand
uguaccaccucaccagugu

SEQ ID NO: 788296 - RNA, 19 nt, Homo sapiens
  misc_RNA (1)...(19): siRNA sense strand
ggucacugcauccgucuuc

SEQ ID NO: 788297 - RNA, 19 nt, Homo sapiens
  misc_RNA (1)...(19): siRNA sense strand
gccacccgcugaacuggau

SEQ ID NO: 788298 - RNA, 19 nt, Homo sapiens
  misc_RNA (1)...(19): siRNA sense strand
ucaccuacaccaacagcaa

SEQ ID NO: 788299 - RNA, 19 nt, Homo sapiens
  misc_RNA (1)...(19): siRNA sense strand
ugcaagcccuuuggcaaug

SEQ ID NO: 788300 - RNA, 19 nt, Homo sapiens
  misc_RNA (1)...(19): siRNA sense strand
gaugaucuuuguggucacu

SEQ ID NO: 788301 - RNA, 19 nt, Homo sapiens
  misc_RNA (1)...(19): siRNA sense strand
gugucuggaugaucuuugu

SEQ ID NO: 788302 - RNA, 19 nt, Homo sapiens
  misc_RNA (1)...(19): siRNA sense strand
ugaaccggcaguuucgaaa

SEQ ID NO: 788303 - RNA, 19 nt, Homo sapiens
  misc_RNA (1)...(19): siRNA sense strand
ccacccagaaggcagagaa

SEQ ID NO: 788304 - RNA, 19 nt, Homo sapiens
  misc_RNA (1)...(19): siRNA sense strand
cuacaaccccguuaucuau

SEQ ID NO: 788305 - RNA, 19 nt, Homo sapiens
  misc_RNA (1)...(19): siRNA sense strand
ccagcacuaucagcauugu

SEQ ID NO: 788306 - RNA, 19 nt, Homo sapiens
  misc_RNA (1)...(19): siRNA sense strand
gccauccgcaggacagcua

SEQ ID NO: 788307 - RNA, 19 nt, Homo sapiens
  misc_RNA (1)...(19): siRNA sense strand
ggggugcagucuuacauga

SEQ ID NO: 788308 - RNA, 19 nt, Homo sapiens
  misc_RNA (1)...(19): siRNA sense strand
ggacuuggaugaguuauua

SEQ ID NO: 788309 - RNA, 19 nt, Homo sapiens
  misc_RNA (1)...(19): siRNA sense strand
gaagagauauggaagucua

SEQ ID NO: 788310 - RNA, 19 nt, Homo sapiens
  misc_RNA (1)...(19): siRNA sense strand
gaagugacccgcaaacaaa

SEQ ID NO: 788311 - RNA, 19 nt, Homo sapiens
  misc_RNA (1)...(19): siRNA sense strand
ugaagacaaucgucacuua

SEQ ID NO: 788312 - RNA, 19 nt, Homo sapiens
  misc_RNA (1)...(19): siRNA sense strand
caaaagaacuuccucauug

SEQ ID NO: 788313 - RNA, 19 nt, Homo sapiens
  misc_RNA (1)...(19): siRNA sense strand
ggagaaaguuacagcuauu

SEQ ID NO: 788314 - RNA, 19 nt, Homo sapiens
  misc_RNA (1)...(19): siRNA sense strand
guacaagcgucacaguauu

SEQ ID NO: 788315 - RNA, 19 nt, Homo sapiens
  misc_RNA (1)...(19): siRNA sense strand
ggaagucuaugacauuauc

SEQ ID NO: 788316 - RNA, 19 nt, Homo sapiens
  misc_RNA (1)...(19): siRNA sense strand
gcagggaguuguuauucuu

SEQ ID NO: 788317 - RNA, 19 nt, Homo sapiens
  misc_RNA (1)...(19): siRNA sense strand
gaaaccauauccaaagaag

SEQ ID NO: 788318 - RNA, 19 nt, Homo sapiens
  misc_RNA (1)...(19): siRNA sense strand
gaaauccuauccugaaguc

SEQ ID NO: 788319 - RNA, 19 nt, Homo sapiens
  misc_RNA (1)...(19): siRNA sense strand
caagagaacaucccaguga

SEQ ID NO: 788320 - RNA, 19 nt, Homo sapiens
  misc_RNA (1)...(19): siRNA sense strand
cgaaguucaucauccauaa

SEQ ID NO: 788321 - RNA, 19 nt, Homo sapiens
  misc_RNA (1)...(19): siRNA sense strand
guacuggguuuguuacaga

SEQ ID NO: 788322 - RNA, 19 nt, Homo sapiens
  misc_RNA (1)...(19): siRNA sense strand
gaaaguggcaguugaagca

SEQ ID NO: 788323 - RNA, 19 nt, Homo sapiens
  misc_RNA (1)...(19): siRNA sense strand
uuacagcuauugaugauga

SEQ ID NO: 788324 - RNA, 19 nt, Homo sapiens
  misc_RNA (1)...(19): siRNA sense strand
cagaggaauuugaauauca

SEQ ID NO: 788325 - RNA, 19 nt, Homo sapiens
  misc_RNA (1)...(19): siRNA sense strand
caacuguucugauuugaag

SEQ ID NO: 788326 - RNA, 19 nt, Homo sapiens
  misc_RNA (1)...(19): siRNA sense strand
ugaagaaucacguuauuga

SEQ ID NO: 788327 - RNA, 19 nt, Homo sapiens
  misc_RNA (1)...(19): siRNA sense strand
ugucagcuaugaaguguuu

SEQ ID NO: 788328 - RNA, 19 nt, Homo sapiens
  misc_RNA (1)...(19): siRNA sense strand
gaagaaucacguuauugaa

SEQ ID NO: 788329 - RNA, 19 nt, Homo sapiens
  misc_RNA (1)...(19): siRNA sense strand
gauggacaauuaccaggaa

SEQ ID NO: 788330 - RNA, 19 nt, Homo sapiens
  misc_RNA (1)...(19): siRNA sense strand
gcccaacuguucugauuug

SEQ ID NO: 788331 - RNA, 19 nt, Homo sapiens
  misc_RNA (1)...(19): siRNA sense strand
uaacguuucugauggacaa

SEQ ID NO: 788332 - RNA, 19 nt, Homo sapiens
  misc_RNA (1)...(19): siRNA sense strand
gaagcagccuauguacuug

SEQ ID NO: 788333 - RNA, 19 nt, Homo sapiens
  misc_RNA (1)...(19): siRNA sense strand
ggagaaaguggcaguugaa

SEQ ID NO: 788334 - RNA, 19 nt, Homo sapiens
  misc_RNA (1)...(19): siRNA sense strand
cuacgaagaguccagauaa

SEQ ID NO: 788335 - RNA, 19 nt, Homo sapiens
  misc_RNA (1)...(19): siRNA sense strand
agaaucacguuauugaaga

SEQ ID NO: 788336 - RNA, 19 nt, Homo sapiens
  misc_RNA (1)...(19): siRNA sense strand
gaagacaaucgucacuuau

SEQ ID NO: 788337 - RNA, 19 nt, Homo sapiens
  misc_RNA (1)...(19): siRNA sense strand
cuaccaggcuguggaauga

SEQ ID NO: 788338 - RNA, 19 nt, Homo sapiens
  misc_RNA (1)...(19): siRNA sense strand
caagaacgauuuccuacac

SEQ ID NO: 788339 - RNA, 19 nt, Homo sapiens
  misc_RNA (1)...(19): siRNA sense strand
gccaaacucuccaacaaag

SEQ ID NO: 788340 - RNA, 19 nt, Homo sapiens
  misc_RNA (1)...(19): siRNA sense strand
cauaacagaugccaaacuc

SEQ ID NO: 788341 - RNA, 19 nt, Homo sapiens
  misc_RNA (1)...(19): siRNA sense strand
ucaaauuaguccagaggaa

SEQ ID NO: 788342 - RNA, 19 nt, Homo sapiens
  misc_RNA (1)...(19): siRNA sense strand
gaagaguccagauaaaaua

SEQ ID NO: 788343 - RNA, 19 nt, Homo sapiens
  misc_RNA (1)...(19): siRNA sense strand
ugaagcagccuauguacuu

SEQ ID NO: 788344 - RNA, 19 nt, Homo sapiens
  misc_RNA (1)...(19): siRNA sense strand
ugacagaggccaauguaga

SEQ ID NO: 788345 - RNA, 19 nt, Homo sapiens
  misc_RNA (1)...(19): siRNA sense strand
uuacuauggucacuugaaa

SEQ ID NO: 788346 - RNA, 19 nt, Homo sapiens
  misc_RNA (1)...(19): siRNA sense strand
ccugaagaaucacguuauu

SEQ ID NO: 788347 - RNA, 19 nt, Homo sapiens
  misc_RNA (1)...(19): siRNA sense strand
ugaagucuaucaagaacga

SEQ ID NO: 788348 - RNA, 19 nt, Homo sapiens
  misc_RNA (1)...(19): siRNA sense strand
caagagcuaugagcauugu

SEQ ID NO: 788349 - RNA, 19 nt, Homo sapiens
  misc_RNA (1)...(19): siRNA sense strand
gacagaggccaauguagaa

SEQ ID NO: 788350 - RNA, 19 nt, Homo sapiens
  misc_RNA (1)...(19): siRNA sense strand
gguacaagcgucacaguau

SEQ ID NO: 788351 - RNA, 19 nt, Homo sapiens
  misc_RNA (1)...(19): siRNA sense strand
gaguuguuauucuugauga

SEQ ID NO: 788352 - RNA, 19 nt, Homo sapiens
  misc_RNA (1)...(19): siRNA sense strand
gaaaguuacagcuauugau

SEQ ID NO: 788353 - RNA, 19 nt, Homo sapiens
  misc_RNA (1)...(19): siRNA sense strand
gaggaagucauaacagaug

SEQ ID NO: 788354 - RNA, 19 nt, Homo sapiens
  misc_RNA (1)...(19): siRNA sense strand
ggccaguugugaugaauuc

SEQ ID NO: 788355 - RNA, 19 nt, Homo sapiens
  misc_RNA (1)...(19): siRNA sense strand
uggaggaagucauaacaga

SEQ ID NO: 788356 - RNA, 19 nt, Homo sapiens
  misc_RNA (1)...(19): siRNA sense strand
cccaggagcugauauggau

SEQ ID NO: 788357 - RNA, 19 nt, Homo sapiens
  misc_RNA (1)...(19): siRNA sense strand
ucaaacuugucaauucgaa

SEQ ID NO: 788358 - RNA, 19 nt, Homo sapiens
  misc_RNA (1)...(19): siRNA sense strand
ugauuacuauggucacuug

SEQ ID NO: 788359 - RNA, 19 nt, Homo sapiens
  misc_RNA (1)...(19): siRNA sense strand
guccagaggaauuugaaua

SEQ ID NO: 788360 - RNA, 19 nt, Homo sapiens
  misc_RNA (1)...(19): siRNA sense strand
aaucgucacuuauacagau

SEQ ID NO: 788361 - RNA, 19 nt, Homo sapiens
  misc_RNA (1)...(19): siRNA sense strand
gcguguggcucaucuacga

SEQ ID NO: 788362 - RNA, 19 nt, Homo sapiens
  misc_RNA (1)...(19): siRNA sense strand
cguuucugauggacaauua

SEQ ID NO: 788363 - RNA, 19 nt, Homo sapiens
  misc_RNA (1)...(19): siRNA sense strand
aagacaaucgucacuuaua

SEQ ID NO: 788364 - RNA, 19 nt, Homo sapiens
  misc_RNA (1)...(19): siRNA sense strand
gcugacagaggccaaugua

SEQ ID NO: 788365 - RNA, 19 nt, Homo sapiens
  misc_RNA (1)...(19): siRNA sense strand
agacaaucgucacuuauac

SEQ ID NO: 788366 - RNA, 19 nt, Homo sapiens
  misc_RNA (1)...(19): siRNA sense strand
uaucaagaacgauuuccua

SEQ ID NO: 788367 - RNA, 19 nt, Homo sapiens
  misc_RNA (1)...(19): siRNA sense strand
ugaagugacccgcaaacaa

SEQ ID NO: 788368 - RNA, 19 nt, Homo sapiens
  misc_RNA (1)...(19): siRNA sense strand
cacuuuaucugcuccauca

SEQ ID NO: 788369 - RNA, 19 nt, Homo sapiens
  misc_RNA (1)...(19): siRNA sense strand
uacgaagaguccagauaaa

SEQ ID NO: 788370 - RNA, 19 nt, Homo sapiens
  misc_RNA (1)...(19): siRNA sense strand
caaacgguccagcugcuaa

SEQ ID NO: 788371 - RNA, 19 nt, Homo sapiens
  misc_RNA (1)...(19): siRNA sense strand
guucaucauccauaaugua

SEQ ID NO: 788372 - RNA, 19 nt, Homo sapiens
  misc_RNA (1)...(19): siRNA sense strand
uagaagagauauggaaguc

SEQ ID NO: 788373 - RNA, 19 nt, Homo sapiens
  misc_RNA (1)...(19): siRNA sense strand
gaaaauggggugaggaaga

SEQ ID NO: 788374 - RNA, 19 nt, Homo sapiens
  misc_RNA (1)...(19): siRNA sense strand
ccagaggaauuugaauauc

SEQ ID NO: 788375 - RNA, 19 nt, Homo sapiens
  misc_RNA (1)...(19): siRNA sense strand
uuuaucugcuccaucauuu

SEQ ID NO: 788376 - RNA, 19 nt, Homo sapiens
  misc_RNA (1)...(19): siRNA sense strand
ggccgaagcuguggauugg

SEQ ID NO: 788377 - RNA, 19 nt, Homo sapiens
  misc_RNA (1)...(19): siRNA sense strand
gaaaauaggagaaaguuac

SEQ ID NO: 788378 - RNA, 19 nt, Homo sapiens
  misc_RNA (1)...(19): siRNA sense strand
gagauauggaagucuauga

SEQ ID NO: 788379 - RNA, 19 nt, Homo sapiens
  misc_RNA (1)...(19): siRNA sense strand
cagauuuccuccuucuuca

SEQ ID NO: 788380 - RNA, 19 nt, Homo sapiens
  misc_RNA (1)...(19): siRNA sense strand
uuauacagauuuccuccuu

SEQ ID NO: 788381 - RNA, 19 nt, Homo sapiens
  misc_RNA (1)...(19): siRNA sense strand
gcaagcagggaguuguuau

SEQ ID NO: 788382 - RNA, 19 nt, Homo sapiens
  misc_RNA (1)...(19): siRNA sense strand
caguugugaugaauucuga

SEQ ID NO: 788383 - RNA, 19 nt, Homo sapiens
  misc_RNA (1)...(19): siRNA sense strand
cugaaaccauauccaaaga

SEQ ID NO: 788384 - RNA, 19 nt, Homo sapiens
  misc_RNA (1)...(19): siRNA sense strand
aggagaaaguuacagcuau

SEQ ID NO: 788385 - RNA, 19 nt, Homo sapiens
  misc_RNA (1)...(19): siRNA sense strand
uggcccaacuguucugauu

SEQ ID NO: 788386 - RNA, 19 nt, Homo sapiens
  misc_RNA (1)...(19): siRNA sense strand
ugaauucugagauguggua

SEQ ID NO: 788387 - RNA, 19 nt, Homo sapiens
  misc_RNA (1)...(19): siRNA sense strand
ccaggcacuucacaagaga

SEQ ID NO: 788388 - RNA, 19 nt, Homo sapiens
  misc_RNA (1)...(19): siRNA sense strand
cugcuaaugugggcacuaa

SEQ ID NO: 788389 - RNA, 19 nt, Homo sapiens
  misc_RNA (1)...(19): siRNA sense strand
ggaggaagucauaacagau

SEQ ID NO: 788390 - RNA, 19 nt, Homo sapiens
  misc_RNA (1)...(19): siRNA sense strand
caaauuaguccagaggaau

SEQ ID NO: 788391 - RNA, 19 nt, Homo sapiens
  misc_RNA (1)...(19): siRNA sense strand
gagaaaguuacagcuauug

SEQ ID NO: 788392 - RNA, 19 nt, Homo sapiens
  misc_RNA (1)...(19): siRNA sense strand
gaaguucaucauccauaau

SEQ ID NO: 788393 - RNA, 19 nt, Homo sapiens
  misc_RNA (1)...(19): siRNA sense strand
uggccuggauuccuuagaa

SEQ ID NO: 788394 - RNA, 19 nt, Homo sapiens
  misc_RNA (1)...(19): siRNA sense strand
uauggaagucuaugacauu

SEQ ID NO: 788395 - RNA, 19 nt, Homo sapiens
  misc_RNA (1)...(19): siRNA sense strand
ugugaugaauucugagaug

SEQ ID NO: 788396 - RNA, 19 nt, Homo sapiens
  misc_RNA (1)...(19): siRNA sense strand
gcacuucacaagagaacau

SEQ ID NO: 788397 - RNA, 19 nt, Homo sapiens
  misc_RNA (1)...(19): siRNA sense strand
cagaaauccuauccugaag

SEQ ID NO: 788398 - RNA, 19 nt, Homo sapiens
  misc_RNA (1)...(19): siRNA sense strand
aggagaaaguggcaguuga

SEQ ID NO: 788399 - RNA, 19 nt, Homo sapiens
  misc_RNA (1)...(19): siRNA sense strand
gacauuaucauacuuacag

SEQ ID NO: 788400 - RNA, 19 nt, Homo sapiens
  misc_RNA (1)...(19): siRNA sense strand
ucacaguauugcaauugga

SEQ ID NO: 788401 - RNA, 19 nt, Homo sapiens
  misc_RNA (1)...(19): siRNA sense strand
ccagugaggccaguuguga

SEQ ID NO: 788402 - RNA, 19 nt, Homo sapiens
  misc_RNA (1)...(19): siRNA sense strand
caagcagggaguuguuauu

SEQ ID NO: 788403 - RNA, 19 nt, Homo sapiens
  misc_RNA (1)...(19): siRNA sense strand
aaaguuacagcuauugaug

SEQ ID NO: 788404 - RNA, 19 nt, Homo sapiens
  misc_RNA (1)...(19): siRNA sense strand
auggaagucuaugacauua

SEQ ID NO: 788405 - RNA, 19 nt, Homo sapiens
  misc_RNA (1)...(19): siRNA sense strand
uuccaaccauuucaaagaa

SEQ ID NO: 788406 - RNA, 19 nt, Homo sapiens
  misc_RNA (1)...(19): siRNA sense strand
gaaaccacagcugcuaaug

SEQ ID NO: 788407 - RNA, 19 nt, Homo sapiens
  misc_RNA (1)...(19): siRNA sense strand
gagccucuacuuacauuuc

SEQ ID NO: 788408 - RNA, 19 nt, Homo sapiens
  misc_RNA (1)...(19): siRNA sense strand
gaagaacuguuguaucuga

SEQ ID NO: 788409 - RNA, 19 nt, Homo sapiens
  misc_RNA (1)...(19): siRNA sense strand
ucacauggcuguucacuau

SEQ ID NO: 788410 - RNA, 19 nt, Homo sapiens
  misc_RNA (1)...(19): siRNA sense strand
gggaugagauuaaggauga

SEQ ID NO: 788411 - RNA, 19 nt, Homo sapiens
  misc_RNA (1)...(19): siRNA sense strand
gcaaugcgagccaauuaua

SEQ ID NO: 788412 - RNA, 19 nt, Homo sapiens
  misc_RNA (1)...(19): siRNA sense strand
caacaugggaugagauuaa

SEQ ID NO: 788413 - RNA, 19 nt, Homo sapiens
  misc_RNA (1)...(19): siRNA sense strand
ccaguaaagucaucacaaa

SEQ ID NO: 788414 - RNA, 19 nt, Homo sapiens
  misc_RNA (1)...(19): siRNA sense strand
gcaggaacgucaacaauac

SEQ ID NO: 788415 - RNA, 19 nt, Homo sapiens
  misc_RNA (1)...(19): siRNA sense strand
cuacauaaauccaguaaag

SEQ ID NO: 788416 - RNA, 19 nt, Homo sapiens
  misc_RNA (1)...(19): siRNA sense strand
cuaauugugugacauauga

SEQ ID NO: 788417 - RNA, 19 nt, Homo sapiens
  misc_RNA (1)...(19): siRNA sense strand
caugacagauucagaaaug

SEQ ID NO: 788418 - RNA, 19 nt, Homo sapiens
  misc_RNA (1)...(19): siRNA sense strand
gaaagugaaguaacaauuc

SEQ ID NO: 788419 - RNA, 19 nt, Homo sapiens
  misc_RNA (1)...(19): siRNA sense strand
aagaagaacuguuguaucu

SEQ ID NO: 788420 - RNA, 19 nt, Homo sapiens
  misc_RNA (1)...(19): siRNA sense strand
ggacugcccuuuggauguu

SEQ ID NO: 788421 - RNA, 19 nt, Homo sapiens
  misc_RNA (1)...(19): siRNA sense strand
gguccaccgugccuauuua

SEQ ID NO: 788422 - RNA, 19 nt, Homo sapiens
  misc_RNA (1)...(19): siRNA sense strand
ggauaaacauucugaacuc

SEQ ID NO: 788423 - RNA, 19 nt, Homo sapiens
  misc_RNA (1)...(19): siRNA sense strand
caaauggcccugagaagaa

SEQ ID NO: 788424 - RNA, 19 nt, Homo sapiens
  misc_RNA (1)...(19): siRNA sense strand
cagacugaauuaagcuuua

SEQ ID NO: 788425 - RNA, 19 nt, Homo sapiens
  misc_RNA (1)...(19): siRNA sense strand
uaacagaucgggaaacuuc

SEQ ID NO: 788426 - RNA, 19 nt, Homo sapiens
  misc_RNA (1)...(19): siRNA sense strand
agaagcacauucccaaauu

SEQ ID NO: 788427 - RNA, 19 nt, Homo sapiens
  misc_RNA (1)...(19): siRNA sense strand
gacauaugaugccaaagaa

SEQ ID NO: 788428 - RNA, 19 nt, Homo sapiens
  misc_RNA (1)...(19): siRNA sense strand
gaagcacauucccaaauuc

SEQ ID NO: 788429 - RNA, 19 nt, Homo sapiens
  misc_RNA (1)...(19): siRNA sense strand
ucagagagacuacaccuaa

SEQ ID NO: 788430 - RNA, 19 nt, Homo sapiens
  misc_RNA (1)...(19): siRNA sense strand
aaucuacucugaugaagaa

SEQ ID NO: 788431 - RNA, 19 nt, Homo sapiens
  misc_RNA (1)...(19): siRNA sense strand
guaaagucaucacaaaugg

SEQ ID NO: 788432 - RNA, 19 nt, Homo sapiens
  misc_RNA (1)...(19): siRNA sense strand
acaccuaagucuacauaaa

SEQ ID NO: 788433 - RNA, 19 nt, Homo sapiens
  misc_RNA (1)...(19): siRNA sense strand
aauugaggaugacauguua

SEQ ID NO: 788434 - RNA, 19 nt, Homo sapiens
  misc_RNA (1)...(19): siRNA sense strand
gaacgucaacaauaccaaa

SEQ ID NO: 788435 - RNA, 19 nt, Homo sapiens
  misc_RNA (1)...(19): siRNA sense strand
uaaagcaggcaucuaauug

SEQ ID NO: 788436 - RNA, 19 nt, Homo sapiens
  misc_RNA (1)...(19): siRNA sense strand
gauauucccuucaccaacu

SEQ ID NO: 788437 - RNA, 19 nt, Homo sapiens
  misc_RNA (1)...(19): siRNA sense strand
acauaaagcaggcaucuaa

SEQ ID NO: 788438 - RNA, 19 nt, Homo sapiens
  misc_RNA (1)...(19): siRNA sense strand
ggugaaugaugaaacaaau

SEQ ID NO: 788439 - RNA, 19 nt, Homo sapiens
  misc_RNA (1)...(19): siRNA sense strand
gcaaaaugauguugauaug

SEQ ID NO: 788440 - RNA, 19 nt, Homo sapiens
  misc_RNA (1)...(19): siRNA sense strand
caagggcaaugugucagua

SEQ ID NO: 788441 - RNA, 19 nt, Homo sapiens
  misc_RNA (1)...(19): siRNA sense strand
ggaauucagaaccaaauga

SEQ ID NO: 788442 - RNA, 19 nt, Homo sapiens
  misc_RNA (1)...(19): siRNA sense strand
gaagauguaacagaugaaa

SEQ ID NO: 788443 - RNA, 19 nt, Homo sapiens
  misc_RNA (1)...(19): siRNA sense strand
gcaaauugaggaugacaug

SEQ ID NO: 788444 - RNA, 19 nt, Homo sapiens
  misc_RNA (1)...(19): siRNA sense strand
gaagaagaacuguuguauc

SEQ ID NO: 788445 - RNA, 19 nt, Homo sapiens
  misc_RNA (1)...(19): siRNA sense strand
gauuaaggaugaugcucuu

SEQ ID NO: 788446 - RNA, 19 nt, Homo sapiens
  misc_RNA (1)...(19): siRNA sense strand
ugacauaugaugccaaaga

SEQ ID NO: 788447 - RNA, 19 nt, Homo sapiens
  misc_RNA (1)...(19): siRNA sense strand
aaacaugacagauucagaa

SEQ ID NO: 788448 - RNA, 19 nt, Homo sapiens
  misc_RNA (1)...(19): siRNA sense strand
acauggcuguucacuauaa

SEQ ID NO: 788449 - RNA, 19 nt, Homo sapiens
  misc_RNA (1)...(19): siRNA sense strand
ugacuccucuucucucaga

SEQ ID NO: 788450 - RNA, 19 nt, Homo sapiens
  misc_RNA (1)...(19): siRNA sense strand
aaauagcuccuuuaccuuu

SEQ ID NO: 788451 - RNA, 19 nt, Homo sapiens
  misc_RNA (1)...(19): siRNA sense strand
ccaaguauuucagacaguu

SEQ ID NO: 788452 - RNA, 19 nt, Homo sapiens
  misc_RNA (1)...(19): siRNA sense strand
aaacuucaacuuuggauga

SEQ ID NO: 788453 - RNA, 19 nt, Homo sapiens
  misc_RNA (1)...(19): siRNA sense strand
caacgaagagagaaacuca

SEQ ID NO: 788454 - RNA, 19 nt, Homo sapiens
  misc_RNA (1)...(19): siRNA sense strand
guucaguucuccaguguca

SEQ ID NO: 788455 - RNA, 19 nt, Homo sapiens
  misc_RNA (1)...(19): siRNA sense strand
ucagacaguuuaacagauc

SEQ ID NO: 788456 - RNA, 19 nt, Homo sapiens
  misc_RNA (1)...(19): siRNA sense strand
aauagcuccuuuaccuuua

SEQ ID NO: 788457 - RNA, 19 nt, Homo sapiens
  misc_RNA (1)...(19): siRNA sense strand
gaacauaaagcaggcaucu

SEQ ID NO: 788458 - RNA, 19 nt, Homo sapiens
  misc_RNA (1)...(19): siRNA sense strand
ugaaacccagacugaauua

SEQ ID NO: 788459 - RNA, 19 nt, Homo sapiens
  misc_RNA (1)...(19): siRNA sense strand
cauugaagauguaacagau

SEQ ID NO: 788460 - RNA, 19 nt, Homo sapiens
  misc_RNA (1)...(19): siRNA sense strand
caucuaauugugugacaua

SEQ ID NO: 788461 - RNA, 19 nt, Homo sapiens
  misc_RNA (1)...(19): siRNA sense strand
cuacucugaugaagaagaa

SEQ ID NO: 788462 - RNA, 19 nt, Homo sapiens
  misc_RNA (1)...(19): siRNA sense strand
uugaagauguaacagauga

SEQ ID NO: 788463 - RNA, 19 nt, Homo sapiens
  misc_RNA (1)...(19): siRNA sense strand
caaugcgagccaauuauaa

SEQ ID NO: 788464 - RNA, 19 nt, Homo sapiens
  misc_RNA (1)...(19): siRNA sense strand
ggaaacuucugugaauguc

SEQ ID NO: 788465 - RNA, 19 nt, Homo sapiens
  misc_RNA (1)...(19): siRNA sense strand
ucgggaaacuucugugaau

SEQ ID NO: 788466 - RNA, 19 nt, Homo sapiens
  misc_RNA (1)...(19): siRNA sense strand
gauaaacauucugaacucu

SEQ ID NO: 788467 - RNA, 19 nt, Homo sapiens
  misc_RNA (1)...(19): siRNA sense strand
guggggaucuuuuggauaa

SEQ ID NO: 788468 - RNA, 19 nt, Homo sapiens
  misc_RNA (1)...(19): siRNA sense strand
ucacaguaucgcuauuaua

SEQ ID NO: 788469 - RNA, 19 nt, Homo sapiens
  misc_RNA (1)...(19): siRNA sense strand
uaacaaacaauugccauuc

SEQ ID NO: 788470 - RNA, 19 nt, Homo sapiens
  misc_RNA (1)...(19): siRNA sense strand
gaccaacaacgaagagaga

SEQ ID NO: 788471 - RNA, 19 nt, Homo sapiens
  misc_RNA (1)...(19): siRNA sense strand
gaucgggaaacuucuguga

SEQ ID NO: 788472 - RNA, 19 nt, Homo sapiens
  misc_RNA (1)...(19): siRNA sense strand
gcugaaacccagacugaau

SEQ ID NO: 788473 - RNA, 19 nt, Homo sapiens
  misc_RNA (1)...(19): siRNA sense strand
ucacaaauggcccugagaa

SEQ ID NO: 788474 - RNA, 19 nt, Homo sapiens
  misc_RNA (1)...(19): siRNA sense strand
ucaaaggcgacaauaauca

SEQ ID NO: 788475 - RNA, 19 nt, Homo sapiens
  misc_RNA (1)...(19): siRNA sense strand
uaaauccaguaaagucauc

SEQ ID NO: 788476 - RNA, 19 nt, Homo sapiens
  misc_RNA (1)...(19): siRNA sense strand
gggaaacuucugugaaugu

SEQ ID NO: 788477 - RNA, 19 nt, Homo sapiens
  misc_RNA (1)...(19): siRNA sense strand
acaggugaaugaugaaaca

SEQ ID NO: 788478 - RNA, 19 nt, Homo sapiens
  misc_RNA (1)...(19): siRNA sense strand
caaaggaugagaacgagau

SEQ ID NO: 788479 - RNA, 19 nt, Homo sapiens
  misc_RNA (1)...(19): siRNA sense strand
acaaauggcccugagaaga

SEQ ID NO: 788480 - RNA, 19 nt, Homo sapiens
  misc_RNA (1)...(19): siRNA sense strand
cuacaccuaagucuacaua

SEQ ID NO: 788481 - RNA, 19 nt, Homo sapiens
  misc_RNA (1)...(19): siRNA sense strand
gagauauucccuucaccaa

SEQ ID NO: 788482 - RNA, 19 nt, Homo sapiens
  misc_RNA (1)...(19): siRNA sense strand
agaaucacauggcuguuca

SEQ ID NO: 788483 - RNA, 19 nt, Homo sapiens
  misc_RNA (1)...(19): siRNA sense strand
ugaagaagaacuguuguau

SEQ ID NO: 788484 - RNA, 19 nt, Homo sapiens
  misc_RNA (1)...(19): siRNA sense strand
ugugacauaugaugccaaa

SEQ ID NO: 788485 - RNA, 19 nt, Homo sapiens
  misc_RNA (1)...(19): siRNA sense strand
gcacugacuccucuucucu

SEQ ID NO: 788486 - RNA, 19 nt, Homo sapiens
  misc_RNA (1)...(19): siRNA sense strand
aacaaacaauugccauuca

SEQ ID NO: 788487 - RNA, 19 nt, Homo sapiens
  misc_RNA (1)...(19): siRNA sense strand
caccuaagucuacauaaau

SEQ ID NO: 788488 - RNA, 19 nt, Homo sapiens
  misc_RNA (1)...(19): siRNA sense strand
aagcaggcaucuaauugug

SEQ ID NO: 788489 - RNA, 19 nt, Homo sapiens
  misc_RNA (1)...(19): siRNA sense strand
cagaagggguuauaauuca

SEQ ID NO: 788490 - RNA, 19 nt, Homo sapiens
  misc_RNA (1)...(19): siRNA sense strand
gaacgagauauucccuuca

SEQ ID NO: 788491 - RNA, 19 nt, Homo sapiens
  misc_RNA (1)...(19): siRNA sense strand
ugaguaccagcauaaagua

SEQ ID NO: 788492 - RNA, 19 nt, Homo sapiens
  misc_RNA (1)...(19): siRNA sense strand
cugcaaugcgagccaauua

SEQ ID NO: 788493 - RNA, 19 nt, Homo sapiens
  misc_RNA (1)...(19): siRNA sense strand
aaacuucugugaaugucau

SEQ ID NO: 788494 - RNA, 19 nt, Homo sapiens
  misc_RNA (1)...(19): siRNA sense strand
gaaacccagacugaauuaa

SEQ ID NO: 788495 - RNA, 19 nt, Homo sapiens
  misc_RNA (1)...(19): siRNA sense strand
cagaagcacauucccaaau

SEQ ID NO: 788496 - RNA, 19 nt, Homo sapiens
  misc_RNA (1)...(19): siRNA sense strand
uaaaauccuuucagccaaa

SEQ ID NO: 788497 - RNA, 19 nt, Homo sapiens
  misc_RNA (1)...(19): siRNA sense strand
uaaaguaugcagaccaaca

SEQ ID NO: 788498 - RNA, 19 nt, Homo sapiens
  misc_RNA (1)...(19): siRNA sense strand
agaagggcaugacucaaca

SEQ ID NO: 788499 - RNA, 19 nt, Homo sapiens
  misc_RNA (1)...(19): siRNA sense strand
ugaugaagaagaacuguug

SEQ ID NO: 788500 - RNA, 19 nt, Homo sapiens
  misc_RNA (1)...(19): siRNA sense strand
caggcgaaccgcaaauuga

SEQ ID NO: 788501 - RNA, 19 nt, Homo sapiens
  misc_RNA (1)...(19): siRNA sense strand
gcauugaggacugcccuuu

SEQ ID NO: 788502 - RNA, 19 nt, Homo sapiens
  misc_RNA (1)...(19): siRNA sense strand
auaaagcaggcaucuaauu

SEQ ID NO: 788503 - RNA, 19 nt, Homo sapiens
  misc_RNA (1)...(19): siRNA sense strand
guuagucacuucgaaagca

SEQ ID NO: 788504 - RNA, 19 nt, Homo sapiens
  misc_RNA (1)...(19): siRNA sense strand
aaccgcaaauugaggauga

SEQ ID NO: 788505 - RNA, 19 nt, Homo sapiens
  misc_RNA (1)...(19): siRNA sense strand
ggugauagugacccugaaa

SEQ ID NO: 788506 - RNA, 19 nt, Homo sapiens
  misc_RNA (1)...(19): siRNA sense strand
ucaguucuccagugucaaa

SEQ ID NO: 788507 - RNA, 19 nt, Homo sapiens
  misc_RNA (1)...(19): siRNA sense strand
acacaucacccucccaauc

SEQ ID NO: 788508 - RNA, 19 nt, Homo sapiens
  misc_RNA (1)...(19): siRNA sense strand
gaagugcgcuggagaaauc

SEQ ID NO: 788509 - RNA, 19 nt, Homo sapiens
  misc_RNA (1)...(19): siRNA sense strand
gauagucucucuggaauaa

SEQ ID NO: 788510 - RNA, 19 nt, Homo sapiens
  misc_RNA (1)...(19): siRNA sense strand
acacaaagaucaagaguug

SEQ ID NO: 788511 - RNA, 19 nt, Homo sapiens
  misc_RNA (1)...(19): siRNA sense strand
gaacacaaccucaccuuga

SEQ ID NO: 788512 - RNA, 19 nt, Homo sapiens
  misc_RNA (1)...(19): siRNA sense strand
caacacuucugaacuauau

SEQ ID NO: 788513 - RNA, 19 nt, Homo sapiens
  misc_RNA (1)...(19): siRNA sense strand
agacaacacuucugaacua

SEQ ID NO: 788514 - RNA, 19 nt, Homo sapiens
  misc_RNA (1)...(19): siRNA sense strand
ccaagaagaucaaguuugu

SEQ ID NO: 788515 - RNA, 19 nt, Homo sapiens
  misc_RNA (1)...(19): siRNA sense strand
guggagagcucuaugaaga

SEQ ID NO: 788516 - RNA, 19 nt, Homo sapiens
  misc_RNA (1)...(19): siRNA sense strand
gaguugaucucucuaaugu

SEQ ID NO: 788517 - RNA, 19 nt, Homo sapiens
  misc_RNA (1)...(19): siRNA sense strand
gcagaaauuuagauaagga

SEQ ID NO: 788518 - RNA, 19 nt, Homo sapiens
  misc_RNA (1)...(19): siRNA sense strand
ugacagagcaacauaguaa

SEQ ID NO: 788519 - RNA, 19 nt, Homo sapiens
  misc_RNA (1)...(19): siRNA sense strand
gacaacacguuuccaagaa

SEQ ID NO: 788520 - RNA, 19 nt, Homo sapiens
  misc_RNA (1)...(19): siRNA sense strand
ggacaaaucuuagaaacac

SEQ ID NO: 788521 - RNA, 19 nt, Homo sapiens
  misc_RNA (1)...(19): siRNA sense strand
gaagaguggcuggaacuua

SEQ ID NO: 788522 - RNA, 19 nt, Homo sapiens
  misc_RNA (1)...(19): siRNA sense strand
ggaauaaguuugcagaaaa

SEQ ID NO: 788523 - RNA, 19 nt, Homo sapiens
  misc_RNA (1)...(19): siRNA sense strand
guugaucucucuaauguau

SEQ ID NO: 788524 - RNA, 19 nt, Homo sapiens
  misc_RNA (1)...(19): siRNA sense strand
ggacaacacguuuccaaga

SEQ ID NO: 788525 - RNA, 19 nt, Homo sapiens
  misc_RNA (1)...(19): siRNA sense strand
ucauaaggcugaagggauu

SEQ ID NO: 788526 - RNA, 19 nt, Homo sapiens
  misc_RNA (1)...(19): siRNA sense strand
ugcaguggcuucuauguuu

SEQ ID NO: 788527 - RNA, 19 nt, Homo sapiens
  misc_RNA (1)...(19): siRNA sense strand
caacacguuuccaagaaga

SEQ ID NO: 788528 - RNA, 19 nt, Homo sapiens
  misc_RNA (1)...(19): siRNA sense strand
caagaucccagucacaauu

SEQ ID NO: 788529 - RNA, 19 nt, Homo sapiens
  misc_RNA (1)...(19): siRNA sense strand
gaauuagggagugauauuu

SEQ ID NO: 788530 - RNA, 19 nt, Homo sapiens
  misc_RNA (1)...(19): siRNA sense strand
gagaaauccuuagcuguca

SEQ ID NO: 788531 - RNA, 19 nt, Homo sapiens
  misc_RNA (1)...(19): siRNA sense strand
ggauuguccugaauugguu

SEQ ID NO: 788532 - RNA, 19 nt, Homo sapiens
  misc_RNA (1)...(19): siRNA sense strand
gaacgacaauuagauccau

SEQ ID NO: 788533 - RNA, 19 nt, Homo sapiens
  misc_RNA (1)...(19): siRNA sense strand
cagaagaagauguaaagaa

SEQ ID NO: 788534 - RNA, 19 nt, Homo sapiens
  misc_RNA (1)...(19): siRNA sense strand
uggaauaaguuugcagaaa

SEQ ID NO: 788535 - RNA, 19 nt, Homo sapiens
  misc_RNA (1)...(19): siRNA sense strand
ccuuagagcuauugagaau

SEQ ID NO: 788536 - RNA, 19 nt, Homo sapiens
  misc_RNA (1)...(19): siRNA sense strand
gaagaucaaguuuguacau

SEQ ID NO: 788537 - RNA, 19 nt, Homo sapiens
  misc_RNA (1)...(19): siRNA sense strand
guuuauagcuacugugaca

SEQ ID NO: 788538 - RNA, 19 nt, Homo sapiens
  misc_RNA (1)...(19): siRNA sense strand
agacaaaucacaacaagug

SEQ ID NO: 788539 - RNA, 19 nt, Homo sapiens
  misc_RNA (1)...(19): siRNA sense strand
aaagacaaaucacaacaag

SEQ ID NO: 788540 - RNA, 19 nt, Homo sapiens
  misc_RNA (1)...(19): siRNA sense strand
ggggaaauuugauuacaua

SEQ ID NO: 788541 - RNA, 19 nt, Homo sapiens
  misc_RNA (1)...(19): siRNA sense strand
uaaauggacuaggacaaau

SEQ ID NO: 788542 - RNA, 19 nt, Homo sapiens
  misc_RNA (1)...(19): siRNA sense strand
gaaaugcaaaggaagaaca

SEQ ID NO: 788543 - RNA, 19 nt, Homo sapiens
  misc_RNA (1)...(19): siRNA sense strand
gaaaccugauggccuuauc

SEQ ID NO: 788544 - RNA, 19 nt, Homo sapiens
  misc_RNA (1)...(19): siRNA sense strand
gaucuucaugccuuugaua

SEQ ID NO: 788545 - RNA, 19 nt, Homo sapiens
  misc_RNA (1)...(19): siRNA sense strand
uggcagaaauuuagauaag

SEQ ID NO: 788546 - RNA, 19 nt, Homo sapiens
  misc_RNA (1)...(19): siRNA sense strand
gacaacacuucugaacuau

SEQ ID NO: 788547 - RNA, 19 nt, Homo sapiens
  misc_RNA (1)...(19): siRNA sense strand
ugagagaacaaaucgauug

SEQ ID NO: 788548 - RNA, 19 nt, Homo sapiens
  misc_RNA (1)...(19): siRNA sense strand
caaagacaaaucacaacaa

SEQ ID NO: 788549 - RNA, 19 nt, Homo sapiens
  misc_RNA (1)...(19): siRNA sense strand
ugaauuagggagugauauu

SEQ ID NO: 788550 - RNA, 19 nt, Homo sapiens
  misc_RNA (1)...(19): siRNA sense strand
uuggguugaugcugaauua

SEQ ID NO: 788551 - RNA, 19 nt, Homo sapiens
  misc_RNA (1)...(19): siRNA sense strand
ggacuaggacaaaucuuag

SEQ ID NO: 788552 - RNA, 19 nt, Homo sapiens
  misc_RNA (1)...(19): siRNA sense strand
aagaguggcuggaacuuag

SEQ ID NO: 788553 - RNA, 19 nt, Homo sapiens
  misc_RNA (1)...(19): siRNA sense strand
gcaaagcgaggaggaggaa

SEQ ID NO: 788554 - RNA, 19 nt, Homo sapiens
  misc_RNA (1)...(19): siRNA sense strand
ggaugacacugagagaaca

SEQ ID NO: 788555 - RNA, 19 nt, Homo sapiens
  misc_RNA (1)...(19): siRNA sense strand
ugagaaacaaggacaauca

SEQ ID NO: 788556 - RNA, 19 nt, Homo sapiens
  misc_RNA (1)...(19): siRNA sense strand
uggacuaggacaaaucuua

SEQ ID NO: 788557 - RNA, 19 nt, Homo sapiens
  misc_RNA (1)...(19): siRNA sense strand
gauuacauacuguuagaga

SEQ ID NO: 788558 - RNA, 19 nt, Homo sapiens
  misc_RNA (1)...(19): siRNA sense strand
gaguagcggucauuuuaaa

SEQ ID NO: 788559 - RNA, 19 nt, Homo sapiens
  misc_RNA (1)...(19): siRNA sense strand
gaagcuacuaggcaaguug

SEQ ID NO: 788560 - RNA, 19 nt, Homo sapiens
  misc_RNA (1)...(19): siRNA sense strand
gcuggaaggaugacacuga

SEQ ID NO: 788561 - RNA, 19 nt, Homo sapiens
  misc_RNA (1)...(19): siRNA sense strand
gaaguaccaggaaaugcaa

SEQ ID NO: 788562 - RNA, 19 nt, Homo sapiens
  misc_RNA (1)...(19): siRNA sense strand
gaaggaugacacugagaga

SEQ ID NO: 788563 - RNA, 19 nt, Homo sapiens
  misc_RNA (1)...(19): siRNA sense strand
uaagaacgacaauuagauc

SEQ ID NO: 788564 - RNA, 19 nt, Homo sapiens
  misc_RNA (1)...(19): siRNA sense strand
gaaaagaaugugagaaaca

SEQ ID NO: 788565 - RNA, 19 nt, Homo sapiens
  misc_RNA (1)...(19): siRNA sense strand
gaaacacaaagaucaagag

SEQ ID NO: 788566 - RNA, 19 nt, Homo sapiens
  misc_RNA (1)...(19): siRNA sense strand
ggccuuagagcuauugaga

SEQ ID NO: 788567 - RNA, 19 nt, Homo sapiens
  misc_RNA (1)...(19): siRNA sense strand
aagaguagcggucauuuua

SEQ ID NO: 788568 - RNA, 19 nt, Homo sapiens
  misc_RNA (1)...(19): siRNA sense strand
gggaaaagaaugugagaaa

SEQ ID NO: 788569 - RNA, 19 nt, Homo sapiens
  misc_RNA (1)...(19): siRNA sense strand
cauuugaaguaccaggaaa

SEQ ID NO: 788570 - RNA, 19 nt, Homo sapiens
  misc_RNA (1)...(19): siRNA sense strand
gcugaauuagggagugaua

SEQ ID NO: 788571 - RNA, 19 nt, Homo sapiens
  misc_RNA (1)...(19): siRNA sense strand
gcaaaagaaggggaaauuu

SEQ ID NO: 788572 - RNA, 19 nt, Homo sapiens
  misc_RNA (1)...(19): siRNA sense strand
gaaaagcaguggacaacac

SEQ ID NO: 788573 - RNA, 19 nt, Homo sapiens
  misc_RNA (1)...(19): siRNA sense strand
caaccucaccuugaucaga

SEQ ID NO: 788574 - RNA, 19 nt, Homo sapiens
  misc_RNA (1)...(19): siRNA sense strand
gcaguggcuucuauguuuu

SEQ ID NO: 788575 - RNA, 19 nt, Homo sapiens
  misc_RNA (1)...(19): siRNA sense strand
aauuaucaccggguauuua

SEQ ID NO: 788576 - RNA, 19 nt, Homo sapiens
  misc_RNA (1)...(19): siRNA sense strand
auaaauggacuaggacaaa

SEQ ID NO: 788577 - RNA, 19 nt, Homo sapiens
  misc_RNA (1)...(19): siRNA sense strand
aagaucccagucacaauua

SEQ ID NO: 788578 - RNA, 19 nt, Homo sapiens
  misc_RNA (1)...(19): siRNA sense strand
cuugaucagaguauuguua

SEQ ID NO: 788579 - RNA, 19 nt, Homo sapiens
  misc_RNA (1)...(19): siRNA sense strand
ggaagugcgcuggagaaau

SEQ ID NO: 788580 - RNA, 19 nt, Homo sapiens
  misc_RNA (1)...(19): siRNA sense strand
caagaagaucaaguuugua

SEQ ID NO: 788581 - RNA, 19 nt, Homo sapiens
  misc_RNA (1)...(19): siRNA sense strand
caggaaaugcaaaggaaga

SEQ ID NO: 788582 - RNA, 19 nt, Homo sapiens
  misc_RNA (1)...(19): siRNA sense strand
uaggacaaaucuuagaaac

SEQ ID NO: 788583 - RNA, 19 nt, Homo sapiens
  misc_RNA (1)...(19): siRNA sense strand
guuagagaccacuggauug

SEQ ID NO: 788584 - RNA, 19 nt, Homo sapiens
  misc_RNA (1)...(19): siRNA sense strand
gccaagaucccagucacaa

SEQ ID NO: 788585 - RNA, 19 nt, Homo sapiens
  misc_RNA (1)...(19): siRNA sense strand
ucaaagacaaaucacaaca

SEQ ID NO: 788586 - RNA, 19 nt, Homo sapiens
  misc_RNA (1)...(19): siRNA sense strand
ugaaguaccaggaaaugca

SEQ ID NO: 788587 - RNA, 19 nt, Homo sapiens
  misc_RNA (1)...(19): siRNA sense strand
cgacaauuagauccauaaa

SEQ ID NO: 788588 - RNA, 19 nt, Homo sapiens
  misc_RNA (1)...(19): siRNA sense strand
aaaagaaggggaaauuuga

SEQ ID NO: 788589 - RNA, 19 nt, Homo sapiens
  misc_RNA (1)...(19): siRNA sense strand
gcaacauaguaaaagagua

SEQ ID NO: 788590 - RNA, 19 nt, Homo sapiens
  misc_RNA (1)...(19): siRNA sense strand
accaggaaaugcaaaggaa

SEQ ID NO: 788591 - RNA, 19 nt, Homo sapiens
  misc_RNA (1)...(19): siRNA sense strand
gacagagcaacauaguaaa

SEQ ID NO: 788592 - RNA, 19 nt, Homo sapiens
  misc_RNA (1)...(19): siRNA sense strand
gacaaaucuuagaaacaca

SEQ ID NO: 788593 - RNA, 19 nt, Homo sapiens
  misc_RNA (1)...(19): siRNA sense strand
cuuagaaacacaaagauca

SEQ ID NO: 788594 - RNA, 19 nt, Homo sapiens
  misc_RNA (1)...(19): siRNA sense strand
acaaucacauuugaaguac

SEQ ID NO: 788595 - RNA, 19 nt, Homo sapiens
  misc_RNA (1)...(19): siRNA sense strand
cuucaugccuuugauaguc

SEQ ID NO: 788596 - RNA, 19 nt, Homo sapiens
  misc_RNA (1)...(19): siRNA sense strand
gugcaguggcuucuauguu

SEQ ID NO: 788597 - RNA, 19 nt, Homo sapiens
  misc_RNA (1)...(19): siRNA sense strand
acaauuaucaccggguauu

SEQ ID NO: 788598 - RNA, 19 nt, Homo sapiens
  misc_RNA (1)...(19): siRNA sense strand
ucaccuugaucagaguauu

SEQ ID NO: 788599 - RNA, 19 nt, Homo sapiens
  misc_RNA (1)...(19): siRNA sense strand
uugauagucucucuggaau

SEQ ID NO: 788600 - RNA, 19 nt, Homo sapiens
  misc_RNA (1)...(19): siRNA sense strand
guuaccggcuguuggaucu

SEQ ID NO: 788601 - RNA, 19 nt, Homo sapiens
  misc_RNA (1)...(19): siRNA sense strand
gagaaaccugauggccuua

SEQ ID NO: 788602 - RNA, 19 nt, Homo sapiens
  misc_RNA (1)...(19): siRNA sense strand
gucaaucaaagacaaauca

SEQ ID NO: 788603 - RNA, 19 nt, Homo sapiens
  misc_RNA (1)...(19): siRNA sense strand
acaacacguuuccaagaag

SEQ ID NO: 788604 - RNA, 19 nt, Homo sapiens
  misc_RNA (1)...(19): siRNA sense strand
gcaguggacaacacguuuc

SEQ ID NO: 788605 - RNA, 19 nt, Homo sapiens
  misc_RNA (1)...(19): siRNA sense strand
ggcagaaauuuagauaagg

SEQ ID NO: 788606 - RNA, 19 nt, Homo sapiens
  misc_RNA (1)...(19): siRNA sense strand
gagagaacaaaucgauugg

SEQ ID NO: 788607 - RNA, 19 nt, Homo sapiens
  misc_RNA (1)...(19): siRNA sense strand
caauuaucaccggguauuu

SEQ ID NO: 788608 - RNA, 19 nt, Homo sapiens
  misc_RNA (1)...(19): siRNA sense strand
gaaugcaucuguugaauua

SEQ ID NO: 788609 - RNA, 19 nt, Homo sapiens
  misc_RNA (1)...(19): siRNA sense strand
gaacaggauuccauacaaa

SEQ ID NO: 788610 - RNA, 19 nt, Homo sapiens
  misc_RNA (1)...(19): siRNA sense strand
ggugaaggcugauggauuu

SEQ ID NO: 788611 - RNA, 19 nt, Homo sapiens
  misc_RNA (1)...(19): siRNA sense strand
gaacaaguugcacaaauaa

SEQ ID NO: 788612 - RNA, 19 nt, Homo sapiens
  misc_RNA (1)...(19): siRNA sense strand
agaacaaguugcacaaaua

SEQ ID NO: 788613 - RNA, 19 nt, Homo sapiens
  misc_RNA (1)...(19): siRNA sense strand
cuacagagauaucuaguau

SEQ ID NO: 788614 - RNA, 19 nt, Homo sapiens
  misc_RNA (1)...(19): siRNA sense strand
ggaaauucuuacacagaua

SEQ ID NO: 788615 - RNA, 19 nt, Homo sapiens
  misc_RNA (1)...(19): siRNA sense strand
caggagagcucaacaaaca

SEQ ID NO: 788616 - RNA, 19 nt, Homo sapiens
  misc_RNA (1)...(19): siRNA sense strand
ggacagagauuugcucaag

SEQ ID NO: 788617 - RNA, 19 nt, Homo sapiens
  misc_RNA (1)...(19): siRNA sense strand
uaaaggauuugcucagaaa

SEQ ID NO: 788618 - RNA, 19 nt, Homo sapiens
  misc_RNA (1)...(19): siRNA sense strand
uggaagagguggucacuaa

SEQ ID NO: 788619 - RNA, 19 nt, Homo sapiens
  misc_RNA (1)...(19): siRNA sense strand
ggaaaggcauuuacccaau

SEQ ID NO: 788620 - RNA, 19 nt, Homo sapiens
  misc_RNA (1)...(19): siRNA sense strand
gauaaaggauuugcucaga

SEQ ID NO: 788621 - RNA, 19 nt, Homo sapiens
  misc_RNA (1)...(19): siRNA sense strand
ggagaaagaccauuuaucu

SEQ ID NO: 788622 - RNA, 19 nt, Homo sapiens
  misc_RNA (1)...(19): siRNA sense strand
aaagaacacucuaugucua

SEQ ID NO: 788623 - RNA, 19 nt, Homo sapiens
  misc_RNA (1)...(19): siRNA sense strand
gauaugacuuuaccauuag

SEQ ID NO: 788624 - RNA, 19 nt, Homo sapiens
  misc_RNA (1)...(19): siRNA sense strand
ggaaugugcuggccuccuu

SEQ ID NO: 788625 - RNA, 19 nt, Homo sapiens
  misc_RNA (1)...(19): siRNA sense strand
gcccacaccuguaguagaa

SEQ ID NO: 788626 - RNA, 19 nt, Homo sapiens
  misc_RNA (1)...(19): siRNA sense strand
aaagucaucucaaacgaaa

SEQ ID NO: 788627 - RNA, 19 nt, Homo sapiens
  misc_RNA (1)...(19): siRNA sense strand
gaaagaacacucuaugucu

SEQ ID NO: 788628 - RNA, 19 nt, Homo sapiens
  misc_RNA (1)...(19): siRNA sense strand
ccagugacaucuuagagaa

SEQ ID NO: 788629 - RNA, 19 nt, Homo sapiens
  misc_RNA (1)...(19): siRNA sense strand
gauauugugcacacuguua

SEQ ID NO: 788630 - RNA, 19 nt, Homo sapiens
  misc_RNA (1)...(19): siRNA sense strand
guuuaaagcucauaggaau

SEQ ID NO: 788631 - RNA, 19 nt, Homo sapiens
  misc_RNA (1)...(19): siRNA sense strand
cgagagaaaucagaaguau

SEQ ID NO: 788632 - RNA, 19 nt, Homo sapiens
  misc_RNA (1)...(19): siRNA sense strand
gaacacucuaugucuaaua

SEQ ID NO: 788633 - RNA, 19 nt, Homo sapiens
  misc_RNA (1)...(19): siRNA sense strand
ugaauugugugauaaagga

SEQ ID NO: 788634 - RNA, 19 nt, Homo sapiens
  misc_RNA (1)...(19): siRNA sense strand
gaucauacuuugagugaac

SEQ ID NO: 788635 - RNA, 19 nt, Homo sapiens
  misc_RNA (1)...(19): siRNA sense strand
cacaggaacuuuaaaucuu

SEQ ID NO: 788636 - RNA, 19 nt, Homo sapiens
  misc_RNA (1)...(19): siRNA sense strand
aaacugugcucugaaagaa

SEQ ID NO: 788637 - RNA, 19 nt, Homo sapiens
  misc_RNA (1)...(19): siRNA sense strand
gccaaacugugcucugaaa

SEQ ID NO: 788638 - RNA, 19 nt, Homo sapiens
  misc_RNA (1)...(19): siRNA sense strand
cuugacaguuggaauguua

SEQ ID NO: 788639 - RNA, 19 nt, Homo sapiens
  misc_RNA (1)...(19): siRNA sense strand
gugcagaggaucauacuuu

SEQ ID NO: 788640 - RNA, 19 nt, Homo sapiens
  misc_RNA (1)...(19): siRNA sense strand
gagaaugcaucuguugaau

SEQ ID NO: 788641 - RNA, 19 nt, Homo sapiens
  misc_RNA (1)...(19): siRNA sense strand
gauggaagauuuugcuuuu

SEQ ID NO: 788642 - RNA, 19 nt, Homo sapiens
  misc_RNA (1)...(19): siRNA sense strand
gaagagguggucacuaaau

SEQ ID NO: 788643 - RNA, 19 nt, Homo sapiens
  misc_RNA (1)...(19): siRNA sense strand
gcacaugagaauacauaaa

SEQ ID NO: 788644 - RNA, 19 nt, Homo sapiens
  misc_RNA (1)...(19): siRNA sense strand
ccauuuaucugcgaauuau

SEQ ID NO: 788645 - RNA, 19 nt, Homo sapiens
  misc_RNA (1)...(19): siRNA sense strand
gagaagccauacaaaugug

SEQ ID NO: 788646 - RNA, 19 nt, Homo sapiens
  misc_RNA (1)...(19): siRNA sense strand
gaacaaugucuuucuugau

SEQ ID NO: 788647 - RNA, 19 nt, Homo sapiens
  misc_RNA (1)...(19): siRNA sense strand
cagaaacuauggaugugaa

SEQ ID NO: 788648 - RNA, 19 nt, Homo sapiens
  misc_RNA (1)...(19): siRNA sense strand
ugaacaggauuccauacaa

SEQ ID NO: 788649 - RNA, 19 nt, Homo sapiens
  misc_RNA (1)...(19): siRNA sense strand
gaagccagcaguuugagaa

SEQ ID NO: 788650 - RNA, 19 nt, Homo sapiens
  misc_RNA (1)...(19): siRNA sense strand
uaacacaugugggaaagug

SEQ ID NO: 788651 - RNA, 19 nt, Homo sapiens
  misc_RNA (1)...(19): siRNA sense strand
uagagagacugaacaaaca

SEQ ID NO: 788652 - RNA, 19 nt, Homo sapiens
  misc_RNA (1)...(19): siRNA sense strand
gaaaucagaaguaucuaca

SEQ ID NO: 788653 - RNA, 19 nt, Homo sapiens
  misc_RNA (1)...(19): siRNA sense strand
cuuuaaaucuugacaguug

SEQ ID NO: 788654 - RNA, 19 nt, Homo sapiens
  misc_RNA (1)...(19): siRNA sense strand
gaguuuauauacacaggaa

SEQ ID NO: 788655 - RNA, 19 nt, Homo sapiens
  misc_RNA (1)...(19): siRNA sense strand
cuaguucucuuaucacuca

SEQ ID NO: 788656 - RNA, 19 nt, Homo sapiens
  misc_RNA (1)...(19): siRNA sense strand
uaucauguccguaggcaua

SEQ ID NO: 788657 - RNA, 19 nt, Homo sapiens
  misc_RNA (1)...(19): siRNA sense strand
acaggaacuuuaaaucuug

SEQ ID NO: 788658 - RNA, 19 nt, Homo sapiens
  misc_RNA (1)...(19): siRNA sense strand
gugagaagccauacaaaug

SEQ ID NO: 788659 - RNA, 19 nt, Homo sapiens
  misc_RNA (1)...(19): siRNA sense strand
uagaacaaguugcacaaau

SEQ ID NO: 788660 - RNA, 19 nt, Homo sapiens
  misc_RNA (1)...(19): siRNA sense strand
aaucagaaguaucuacaga

SEQ ID NO: 788661 - RNA, 19 nt, Homo sapiens
  misc_RNA (1)...(19): siRNA sense strand
ccagcacacugaccuauca

SEQ ID NO: 788662 - RNA, 19 nt, Homo sapiens
  misc_RNA (1)...(19): siRNA sense strand
gaaggcacaugagaauaca

SEQ ID NO: 788663 - RNA, 19 nt, Homo sapiens
  misc_RNA (1)...(19): siRNA sense strand
gguggucacuaaaugcaaa

SEQ ID NO: 788664 - RNA, 19 nt, Homo sapiens
  misc_RNA (1)...(19): siRNA sense strand
gaaggcauuugcugucucu

SEQ ID NO: 788665 - RNA, 19 nt, Homo sapiens
  misc_RNA (1)...(19): siRNA sense strand
ggagagaagccauaugucu

SEQ ID NO: 788666 - RNA, 19 nt, Homo sapiens
  misc_RNA (1)...(19): siRNA sense strand
cagcuagucuuccauaguc

SEQ ID NO: 788667 - RNA, 19 nt, Homo sapiens
  misc_RNA (1)...(19): siRNA sense strand
gagaaaagccuuauguaug

SEQ ID NO: 788668 - RNA, 19 nt, Homo sapiens
  misc_RNA (1)...(19): siRNA sense strand
cagccaaacugugcucuga

SEQ ID NO: 788669 - RNA, 19 nt, Homo sapiens
  misc_RNA (1)...(19): siRNA sense strand
gugcuggccuccuuuagug

SEQ ID NO: 788670 - RNA, 19 nt, Homo sapiens
  misc_RNA (1)...(19): siRNA sense strand
gaagccauaugucugugau

SEQ ID NO: 788671 - RNA, 19 nt, Homo sapiens
  misc_RNA (1)...(19): siRNA sense strand
ggaagcagguuuucucugu

SEQ ID NO: 788672 - RNA, 19 nt, Homo sapiens
  misc_RNA (1)...(19): siRNA sense strand
ucaggcaaauccuaaacaa

SEQ ID NO: 788673 - RNA, 19 nt, Homo sapiens
  misc_RNA (1)...(19): siRNA sense strand
cuggaaacauugaauugaa

SEQ ID NO: 788674 - RNA, 19 nt, Homo sapiens
  misc_RNA (1)...(19): siRNA sense strand
gcucaagccagcacacuga

SEQ ID NO: 788675 - RNA, 19 nt, Homo sapiens
  misc_RNA (1)...(19): siRNA sense strand
gagaaggcacaugagaaua

SEQ ID NO: 788676 - RNA, 19 nt, Homo sapiens
  misc_RNA (1)...(19): siRNA sense strand
gaacaaacagcgggaagca

SEQ ID NO: 788677 - RNA, 19 nt, Homo sapiens
  misc_RNA (1)...(19): siRNA sense strand
gaccauuuaucugcgaauu

SEQ ID NO: 788678 - RNA, 19 nt, Homo sapiens
  misc_RNA (1)...(19): siRNA sense strand
caaacugugcucugaaaga

SEQ ID NO: 788679 - RNA, 19 nt, Homo sapiens
  misc_RNA (1)...(19): siRNA sense strand
aacaaugucuuucuugauc

SEQ ID NO: 788680 - RNA, 19 nt, Homo sapiens
  misc_RNA (1)...(19): siRNA sense strand
uacaucagauacauuguug

SEQ ID NO: 788681 - RNA, 19 nt, Homo sapiens
  misc_RNA (1)...(19): siRNA sense strand
uaucagaaacuauggaugu

SEQ ID NO: 788682 - RNA, 19 nt, Homo sapiens
  misc_RNA (1)...(19): siRNA sense strand
agaaaagccuuauguaugu

SEQ ID NO: 788683 - RNA, 19 nt, Homo sapiens
  misc_RNA (1)...(19): siRNA sense strand
gcacacugaccuaucaugu

SEQ ID NO: 788684 - RNA, 19 nt, Homo sapiens
  misc_RNA (1)...(19): siRNA sense strand
cuauaaaugugauguaugc

SEQ ID NO: 788685 - RNA, 19 nt, Homo sapiens
  misc_RNA (1)...(19): siRNA sense strand
ggaagagguggucacuaaa

SEQ ID NO: 788686 - RNA, 19 nt, Homo sapiens
  misc_RNA (1)...(19): siRNA sense strand
caguuggaauguuaaagaa

SEQ ID NO: 788687 - RNA, 19 nt, Homo sapiens
  misc_RNA (1)...(19): siRNA sense strand
ggugagaagccauacaaau

SEQ ID NO: 788688 - RNA, 19 nt, Homo sapiens
  misc_RNA (1)...(19): siRNA sense strand
gauacucagucuccuacau

SEQ ID NO: 788689 - RNA, 19 nt, Homo sapiens
  misc_RNA (1)...(19): siRNA sense strand
gcagaggaucauacuuuga

SEQ ID NO: 788690 - RNA, 19 nt, Homo sapiens
  misc_RNA (1)...(19): siRNA sense strand
gagaaagaccauuuaucug

SEQ ID NO: 788691 - RNA, 19 nt, Homo sapiens
  misc_RNA (1)...(19): siRNA sense strand
gaaaugucagcuagucuuc

SEQ ID NO: 788692 - RNA, 19 nt, Homo sapiens
  misc_RNA (1)...(19): siRNA sense strand
caaguugcacaaauaaaug

SEQ ID NO: 788693 - RNA, 19 nt, Homo sapiens
  misc_RNA (1)...(19): siRNA sense strand
ggacugaggaccaucacau

SEQ ID NO: 788694 - RNA, 19 nt, Homo sapiens
  misc_RNA (1)...(19): siRNA sense strand
ugaaagaacacucuauguc

SEQ ID NO: 788695 - RNA, 19 nt, Homo sapiens
  misc_RNA (1)...(19): siRNA sense strand
uaauauagccagcgucaag

SEQ ID NO: 788696 - RNA, 19 nt, Homo sapiens
  misc_RNA (1)...(19): siRNA sense strand
accauuagcucuuccacuu

SEQ ID NO: 788697 - RNA, 19 nt, Homo sapiens
  misc_RNA (1)...(19): siRNA sense strand
ggagaaaagccuuauguau

SEQ ID NO: 788698 - RNA, 19 nt, Homo sapiens
  misc_RNA (1)...(19): siRNA sense strand
ucagaaaugucagcuaguc

SEQ ID NO: 788699 - RNA, 19 nt, Homo sapiens
  misc_RNA (1)...(19): siRNA sense strand
auaaaggauuugcucagaa

SEQ ID NO: 788700 - RNA, 19 nt, Homo sapiens
  misc_RNA (1)...(19): siRNA sense strand
ugagaagccauacaaaugu

SEQ ID NO: 788701 - RNA, 19 nt, Homo sapiens
  misc_RNA (1)...(19): siRNA sense strand
ugacaucaguuguggaaaa

SEQ ID NO: 788702 - RNA, 19 nt, Homo sapiens
  misc_RNA (1)...(19): siRNA sense strand
gagugaacaggauuccaua

SEQ ID NO: 788703 - RNA, 19 nt, Homo sapiens
  misc_RNA (1)...(19): siRNA sense strand
ugauagguguggacagaga

SEQ ID NO: 788704 - RNA, 19 nt, Homo sapiens
  misc_RNA (1)...(19): siRNA sense strand
ugagaaggcacaugagaau

SEQ ID NO: 788705 - RNA, 19 nt, Homo sapiens
  misc_RNA (1)...(19): siRNA sense strand
ucagaagccagcaguuuga

SEQ ID NO: 788706 - RNA, 19 nt, Homo sapiens
  misc_RNA (1)...(19): siRNA sense strand
ucagaaccacaguugauuu

SEQ ID NO: 788707 - RNA, 19 nt, Homo sapiens
  misc_RNA (1)...(19): siRNA sense strand
gaagcauaguggagagaag

SEQ ID NO: 788708 - RNA, 19 nt, Homo sapiens
  misc_RNA (1)...(19): siRNA sense strand
ggccagagccugaccaaga

SEQ ID NO: 788709 - RNA, 19 nt, Homo sapiens
  misc_RNA (1)...(19): siRNA sense strand
gccagagccugaccaagau

SEQ ID NO: 788710 - RNA, 19 nt, Homo sapiens
  misc_RNA (1)...(19): siRNA sense strand
gcgccuggcuauccgcuau

SEQ ID NO: 788711 - RNA, 19 nt, Homo sapiens
  misc_RNA (1)...(19): siRNA sense strand
gcgacgugcuggcucuguu

SEQ ID NO: 788712 - RNA, 19 nt, Homo sapiens
  misc_RNA (1)...(19): siRNA sense strand
ccagugagcgggagaaacu

SEQ ID NO: 788713 - RNA, 19 nt, Homo sapiens
  misc_RNA (1)...(19): siRNA sense strand
ccgagaauuugaggucuua

SEQ ID NO: 788714 - RNA, 19 nt, Homo sapiens
  misc_RNA (1)...(19): siRNA sense strand
gaacagccugggucucuau

SEQ ID NO: 788715 - RNA, 19 nt, Homo sapiens
  misc_RNA (1)...(19): siRNA sense strand
ggaacagccugggucucua

SEQ ID NO: 788716 - RNA, 19 nt, Homo sapiens
  misc_RNA (1)...(19): siRNA sense strand
gguccucgccugucaugua

SEQ ID NO: 788717 - RNA, 19 nt, Homo sapiens
  misc_RNA (1)...(19): siRNA sense strand
uugaggcuguuauaccuua

SEQ ID NO: 788718 - RNA, 19 nt, Homo sapiens
  misc_RNA (1)...(19): siRNA sense strand
gagaauuugaggucuuaaa

SEQ ID NO: 788719 - RNA, 19 nt, Homo sapiens
  misc_RNA (1)...(19): siRNA sense strand
ugaaguugaggcuguuaua

SEQ ID NO: 788720 - RNA, 19 nt, Homo sapiens
  misc_RNA (1)...(19): siRNA sense strand
aagcagagccacauccuau

SEQ ID NO: 788721 - RNA, 19 nt, Homo sapiens
  misc_RNA (1)...(19): siRNA sense strand
ccuggcggcugcugaaguu

SEQ ID NO: 788722 - RNA, 19 nt, Homo sapiens
  misc_RNA (1)...(19): siRNA sense strand
uaaaggcucacgcugacaa

SEQ ID NO: 788723 - RNA, 19 nt, Homo sapiens
  misc_RNA (1)...(19): siRNA sense strand
ggaugcagcccaggaacuu

SEQ ID NO: 788724 - RNA, 19 nt, Homo sapiens
  misc_RNA (1)...(19): siRNA sense strand
gcagagccacauccuaugg

SEQ ID NO: 788725 - RNA, 19 nt, Homo sapiens
  misc_RNA (1)...(19): siRNA sense strand
gcacucgcacggcaagguu

SEQ ID NO: 788726 - RNA, 19 nt, Homo sapiens
  misc_RNA (1)...(19): siRNA sense strand
gaauuugaggucuuaaagg

SEQ ID NO: 788727 - RNA, 19 nt, Homo sapiens
  misc_RNA (1)...(19): siRNA sense strand
gaaguugaggcuguuauac

SEQ ID NO: 788728 - RNA, 19 nt, Homo sapiens
  misc_RNA (1)...(19): siRNA sense strand
uaccuuagacccucaguca

SEQ ID NO: 788729 - RNA, 19 nt, Homo sapiens
  misc_RNA (1)...(19): siRNA sense strand
caagcagagccacauccua

SEQ ID NO: 788730 - RNA, 19 nt, Homo sapiens
  misc_RNA (1)...(19): siRNA sense strand
ccuuagacccucagucaug

SEQ ID NO: 788731 - RNA, 19 nt, Homo sapiens
  misc_RNA (1)...(19): siRNA sense strand
ucucuauggccgcacaaua

SEQ ID NO: 788732 - RNA, 19 nt, Homo sapiens
  misc_RNA (1)...(19): siRNA sense strand
ucagauggaggaggauauu

SEQ ID NO: 788733 - RNA, 19 nt, Homo sapiens
  misc_RNA (1)...(19): siRNA sense strand
gagggacggcugacaaagg

SEQ ID NO: 788734 - RNA, 19 nt, Homo sapiens
  misc_RNA (1)...(19): siRNA sense strand
ugacaaaggccaggaacag

SEQ ID NO: 788735 - RNA, 19 nt, Homo sapiens
  misc_RNA (1)...(19): siRNA sense strand
gauggaggaggauauucug

SEQ ID NO: 788736 - RNA, 19 nt, Homo sapiens
  misc_RNA (1)...(19): siRNA sense strand
ggcccugccuaccgagaau

SEQ ID NO: 788737 - RNA, 19 nt, Homo sapiens
  misc_RNA (1)...(19): siRNA sense strand
cggagggacggcugacaaa

SEQ ID NO: 788738 - RNA, 19 nt, Homo sapiens
  misc_RNA (1)...(19): siRNA sense strand
caagccuguuggagacuca

SEQ ID NO: 788739 - RNA, 19 nt, Homo sapiens
  misc_RNA (1)...(19): siRNA sense strand
uaaagaagauagugaagga

SEQ ID NO: 788740 - RNA, 19 nt, Homo sapiens
  misc_RNA (1)...(19): siRNA sense strand
acacagagauacuuucauu

SEQ ID NO: 788741 - RNA, 19 nt, Homo sapiens
  misc_RNA (1)...(19): siRNA sense strand
agaagaagcucucuaguca

SEQ ID NO: 788742 - RNA, 19 nt, Homo sapiens
  misc_RNA (1)...(19): siRNA sense strand
gcacaaacccacucucuau

SEQ ID NO: 788743 - RNA, 19 nt, Homo sapiens
  misc_RNA (1)...(19): siRNA sense strand
gagaagagccgggugagua

SEQ ID NO: 788744 - RNA, 19 nt, Homo sapiens
  misc_RNA (1)...(19): siRNA sense strand
gaacuccugacacuauuua

SEQ ID NO: 788745 - RNA, 19 nt, Homo sapiens
  misc_RNA (1)...(19): siRNA sense strand
gagagaggcugacucaaca

SEQ ID NO: 788746 - RNA, 19 nt, Homo sapiens
  misc_RNA (1)...(19): siRNA sense strand
ugaguaaacuggaagaaga

SEQ ID NO: 788747 - RNA, 19 nt, Homo sapiens
  misc_RNA (1)...(19): siRNA sense strand
ccaagcagcuggcccgaaa

SEQ ID NO: 788748 - RNA, 19 nt, Homo sapiens
  misc_RNA (1)...(19): siRNA sense strand
ccaauacuguuguagcaaa

SEQ ID NO: 788749 - RNA, 19 nt, Homo sapiens
  misc_RNA (1)...(19): siRNA sense strand
gcaagaaagccaccaacaa

SEQ ID NO: 788750 - RNA, 19 nt, Homo sapiens
  misc_RNA (1)...(19): siRNA sense strand
gagaagcaguuaucagagu

SEQ ID NO: 788751 - RNA, 19 nt, Homo sapiens
  misc_RNA (1)...(19): siRNA sense strand
ugguaaggauguugaguua

SEQ ID NO: 788752 - RNA, 19 nt, Homo sapiens
  misc_RNA (1)...(19): siRNA sense strand
gaacagaagaagcucucua

SEQ ID NO: 788753 - RNA, 19 nt, Homo sapiens
  misc_RNA (1)...(19): siRNA sense strand
ccaugcagcucgccacaaa

SEQ ID NO: 788754 - RNA, 19 nt, Homo sapiens
  misc_RNA (1)...(19): siRNA sense strand
gggaacaacugagagcaaa

SEQ ID NO: 788755 - RNA, 19 nt, Homo sapiens
  misc_RNA (1)...(19): siRNA sense strand
gagcugagccugaaauugg

SEQ ID NO: 788756 - RNA, 19 nt, Homo sapiens
  misc_RNA (1)...(19): siRNA sense strand
caacaaggcagccgaggaa

SEQ ID NO: 788757 - RNA, 19 nt, Homo sapiens
  misc_RNA (1)...(19): siRNA sense strand
ggauacggcugaaggagau

SEQ ID NO: 788758 - RNA, 19 nt, Homo sapiens
  misc_RNA (1)...(19): siRNA sense strand
gaagagaaccggaccaaaa

SEQ ID NO: 788759 - RNA, 19 nt, Homo sapiens
  misc_RNA (1)...(19): siRNA sense strand
caagaaagccaccaacaag

SEQ ID NO: 788760 - RNA, 19 nt, Homo sapiens
  misc_RNA (1)...(19): siRNA sense strand
aacccacucucuauucuua

SEQ ID NO: 788761 - RNA, 19 nt, Homo sapiens
  misc_RNA (1)...(19): siRNA sense strand
caacauagccaagaugaca

SEQ ID NO: 788762 - RNA, 19 nt, Homo sapiens
  misc_RNA (1)...(19): siRNA sense strand
gaagaacgcuauggaaaau

SEQ ID NO: 788763 - RNA, 19 nt, Homo sapiens
  misc_RNA (1)...(19): siRNA sense strand
cuaaugagcaauugaagaa

SEQ ID NO: 788764 - RNA, 19 nt, Homo sapiens
  misc_RNA (1)...(19): siRNA sense strand
ucaccuacaugcuagagaa

SEQ ID NO: 788765 - RNA, 19 nt, Homo sapiens
  misc_RNA (1)...(19): siRNA sense strand
gaaagaagaaauggaaagu

SEQ ID NO: 788766 - RNA, 19 nt, Homo sapiens
  misc_RNA (1)...(19): siRNA sense strand
gcaauugaagaaaccagua

SEQ ID NO: 788767 - RNA, 19 nt, Homo sapiens
  misc_RNA (1)...(19): siRNA sense strand
uaucagaguuugacaucga

SEQ ID NO: 788768 - RNA, 19 nt, Homo sapiens
  misc_RNA (1)...(19): siRNA sense strand
cccaacagcucucccuuug

SEQ ID NO: 788769 - RNA, 19 nt, Homo sapiens
  misc_RNA (1)...(19): siRNA sense strand
cagauucacuagccaacaa

SEQ ID NO: 788770 - RNA, 19 nt, Homo sapiens
  misc_RNA (1)...(19): siRNA sense strand
acagagauacuuucauuga

SEQ ID NO: 788771 - RNA, 19 nt, Homo sapiens
  misc_RNA (1)...(19): siRNA sense strand
gguacucacuaagcguuua

SEQ ID NO: 788772 - RNA, 19 nt, Homo sapiens
  misc_RNA (1)...(19): siRNA sense strand
ccaaaacccugaaagaaga

SEQ ID NO: 788773 - RNA, 19 nt, Homo sapiens
  misc_RNA (1)...(19): siRNA sense strand
ccagucaucguaccaagua

SEQ ID NO: 788774 - RNA, 19 nt, Homo sapiens
  misc_RNA (1)...(19): siRNA sense strand
ggagcaacauagccaagau

SEQ ID NO: 788775 - RNA, 19 nt, Homo sapiens
  misc_RNA (1)...(19): siRNA sense strand
uagagaagcaguuaucaga

SEQ ID NO: 788776 - RNA, 19 nt, Homo sapiens
  misc_RNA (1)...(19): siRNA sense strand
caacacagagauacuuuca

SEQ ID NO: 788777 - RNA, 19 nt, Homo sapiens
  misc_RNA (1)...(19): siRNA sense strand
uugaaacacugaaggagaa

SEQ ID NO: 788778 - RNA, 19 nt, Homo sapiens
  misc_RNA (1)...(19): siRNA sense strand
gacacaagccauucaccua

SEQ ID NO: 788779 - RNA, 19 nt, Homo sapiens
  misc_RNA (1)...(19): siRNA sense strand
cgaaagggaacaacugaga

SEQ ID NO: 788780 - RNA, 19 nt, Homo sapiens
  misc_RNA (1)...(19): siRNA sense strand
acaagcagcucucauccau

SEQ ID NO: 788781 - RNA, 19 nt, Homo sapiens
  misc_RNA (1)...(19): siRNA sense strand
caaacccacucucuauucu

SEQ ID NO: 788782 - RNA, 19 nt, Homo sapiens
  misc_RNA (1)...(19): siRNA sense strand
cacagacuaucgaaaucua

SEQ ID NO: 788783 - RNA, 19 nt, Homo sapiens
  misc_RNA (1)...(19): siRNA sense strand
gaagauagugaaggaccua

SEQ ID NO: 788784 - RNA, 19 nt, Homo sapiens
  misc_RNA (1)...(19): siRNA sense strand
ccacuccugcuuacucaua

SEQ ID NO: 788785 - RNA, 19 nt, Homo sapiens
  misc_RNA (1)...(19): siRNA sense strand
caggugcucuccagauuca

SEQ ID NO: 788786 - RNA, 19 nt, Homo sapiens
  misc_RNA (1)...(19): siRNA sense strand
gaagcaguuaucagaguuu

SEQ ID NO: 788787 - RNA, 19 nt, Homo sapiens
  misc_RNA (1)...(19): siRNA sense strand
caaaugguaaggauguuga

SEQ ID NO: 788788 - RNA, 19 nt, Homo sapiens
  misc_RNA (1)...(19): siRNA sense strand
aaacugaaccgagaagaga

SEQ ID NO: 788789 - RNA, 19 nt, Homo sapiens
  misc_RNA (1)...(19): siRNA sense strand
aaagagagaggcugacuca

SEQ ID NO: 788790 - RNA, 19 nt, Homo sapiens
  misc_RNA (1)...(19): siRNA sense strand
caacacugccaauccaaga

SEQ ID NO: 788791 - RNA, 19 nt, Homo sapiens
  misc_RNA (1)...(19): siRNA sense strand
ccaagcagaucaggaccaa

SEQ ID NO: 788792 - RNA, 19 nt, Homo sapiens
  misc_RNA (1)...(19): siRNA sense strand
caauugaagaaaccaguaa

SEQ ID NO: 788793 - RNA, 19 nt, Homo sapiens
  misc_RNA (1)...(19): siRNA sense strand
ccagguagagaagcaguua

SEQ ID NO: 788794 - RNA, 19 nt, Homo sapiens
  misc_RNA (1)...(19): siRNA sense strand
gcagcucgccacaaauuuc

SEQ ID NO: 788795 - RNA, 19 nt, Homo sapiens
  misc_RNA (1)...(19): siRNA sense strand
ccaaaggcacagcaacuga

SEQ ID NO: 788796 - RNA, 19 nt, Homo sapiens
  misc_RNA (1)...(19): siRNA sense strand
agagaggcuugcagacuga

SEQ ID NO: 788797 - RNA, 19 nt, Homo sapiens
  misc_RNA (1)...(19): siRNA sense strand
acagagagauuuugaaaca

SEQ ID NO: 788798 - RNA, 19 nt, Homo sapiens
  misc_RNA (1)...(19): siRNA sense strand
agaagcaguuaucagaguu

SEQ ID NO: 788799 - RNA, 19 nt, Homo sapiens
  misc_RNA (1)...(19): siRNA sense strand
cagaagaagcucucuaguc

SEQ ID NO: 788800 - RNA, 19 nt, Homo sapiens
  misc_RNA (1)...(19): siRNA sense strand
agaaaccaguggagaaugg

SEQ ID NO: 788801 - RNA, 19 nt, Homo sapiens
  misc_RNA (1)...(19): siRNA sense strand
agaagagccgggugaguaa

SEQ ID NO: 788802 - RNA, 19 nt, Homo sapiens
  misc_RNA (1)...(19): siRNA sense strand
gcagcucucauccaugcua

SEQ ID NO: 788803 - RNA, 19 nt, Homo sapiens
  misc_RNA (1)...(19): siRNA sense strand
gcaaaugguaaggauguug

SEQ ID NO: 788804 - RNA, 19 nt, Homo sapiens
  misc_RNA (1)...(19): siRNA sense strand
caauacuguuguagcaaau

SEQ ID NO: 788805 - RNA, 19 nt, Homo sapiens
  misc_RNA (1)...(19): siRNA sense strand
cagcugcucuuccaauacu

SEQ ID NO: 788806 - RNA, 19 nt, Homo sapiens
  misc_RNA (1)...(19): siRNA sense strand
gcagcuggcccgaaacaca

SEQ ID NO: 788807 - RNA, 19 nt, Homo sapiens
  misc_RNA (1)...(19): siRNA sense strand
ucucuaacauccucuccuu

SEQ ID NO: 788808 - RNA, 19 nt, Homo sapiens
  misc_RNA (1)...(19): siRNA sense strand
gagccucucaugcuaaugu

SEQ ID NO: 788809 - RNA, 19 nt, Homo sapiens
  misc_RNA (1)...(19): siRNA sense strand
gagaagagaaccggaccaa

SEQ ID NO: 788810 - RNA, 19 nt, Homo sapiens
  misc_RNA (1)...(19): siRNA sense strand
caacugagagcaaaacuga

SEQ ID NO: 788811 - RNA, 19 nt, Homo sapiens
  misc_RNA (1)...(19): siRNA sense strand
cuuaaaggcccaacacaga

SEQ ID NO: 788812 - RNA, 19 nt, Homo sapiens
  misc_RNA (1)...(19): siRNA sense strand
ggagagcugagccugaaau

SEQ ID NO: 788813 - RNA, 19 nt, Homo sapiens
  misc_RNA (1)...(19): siRNA sense strand
cuacagagcccuccaucca

SEQ ID NO: 788814 - RNA, 19 nt, Homo sapiens
  misc_RNA (1)...(19): siRNA sense strand
ccugaaagaagaaauggaa

SEQ ID NO: 788815 - RNA, 19 nt, Homo sapiens
  misc_RNA (1)...(19): siRNA sense strand
cauccaugcuagugcuuga

SEQ ID NO: 788816 - RNA, 19 nt, Homo sapiens
  misc_RNA (1)...(19): siRNA sense strand
gcacagacuaucgaaaucu

SEQ ID NO: 788817 - RNA, 19 nt, Homo sapiens
  misc_RNA (1)...(19): siRNA sense strand
gaagagccgggugaguaaa

SEQ ID NO: 788818 - RNA, 19 nt, Homo sapiens
  misc_RNA (1)...(19): siRNA sense strand
caaggcagccgaggaagga

SEQ ID NO: 788819 - RNA, 19 nt, Homo sapiens
  misc_RNA (1)...(19): siRNA sense strand
gcagcggcaugcacaggau

SEQ ID NO: 788820 - RNA, 19 nt, Homo sapiens
  misc_RNA (1)...(19): siRNA sense strand
gagagcugagccugaaauu

SEQ ID NO: 788821 - RNA, 19 nt, Homo sapiens
  misc_RNA (1)...(19): siRNA sense strand
uagcaaaugguaaggaugu

SEQ ID NO: 788822 - RNA, 19 nt, Homo sapiens
  misc_RNA (1)...(19): siRNA sense strand
ccugaacuccugacacuau

SEQ ID NO: 788823 - RNA, 19 nt, Homo sapiens
  misc_RNA (1)...(19): siRNA sense strand
ggcacagacuaucgaaauc

SEQ ID NO: 788824 - RNA, 19 nt, Homo sapiens
  misc_RNA (1)...(19): siRNA sense strand
ccauugugacccagagaua

SEQ ID NO: 788825 - RNA, 19 nt, Homo sapiens
  misc_RNA (1)...(19): siRNA sense strand
gcagacugaggcccaggua

SEQ ID NO: 788826 - RNA, 19 nt, Homo sapiens
  misc_RNA (1)...(19): siRNA sense strand
ugaaauuggagaaggagaa

SEQ ID NO: 788827 - RNA, 19 nt, Homo sapiens
  misc_RNA (1)...(19): siRNA sense strand
gagcaacauagccaagaug

SEQ ID NO: 788828 - RNA, 19 nt, Homo sapiens
  misc_RNA (1)...(19): siRNA sense strand
ccaaguagggaucaaccaa

SEQ ID NO: 788829 - RNA, 19 nt, Homo sapiens
  misc_RNA (1)...(19): siRNA sense strand
gcaggcaacaauguagaaa

SEQ ID NO: 788830 - RNA, 19 nt, Homo sapiens
  misc_RNA (1)...(19): siRNA sense strand
uaaaggcccaacacagaga

SEQ ID NO: 788831 - RNA, 19 nt, Homo sapiens
  misc_RNA (1)...(19): siRNA sense strand
uaaggauguugaguuacuu

SEQ ID NO: 788832 - RNA, 19 nt, Homo sapiens
  misc_RNA (1)...(19): siRNA sense strand
acaaacccacucucuauuc

SEQ ID NO: 788833 - RNA, 19 nt, Homo sapiens
  misc_RNA (1)...(19): siRNA sense strand
caguagcccuaaugagcaa

SEQ ID NO: 788834 - RNA, 19 nt, Homo sapiens
  misc_RNA (1)...(19): siRNA sense strand
agacugaggcccagguaga

SEQ ID NO: 788835 - RNA, 19 nt, Homo sapiens
  misc_RNA (1)...(19): siRNA sense strand
gaaauuggagaaggagaag

SEQ ID NO: 788836 - RNA, 19 nt, Homo sapiens
  misc_RNA (1)...(19): siRNA sense strand
ccacccaucccacccaaga

SEQ ID NO: 788837 - RNA, 19 nt, Homo sapiens
  misc_RNA (1)...(19): siRNA sense strand
cacaaacccacucucuauu

SEQ ID NO: 788838 - RNA, 19 nt, Homo sapiens
  misc_RNA (1)...(19): siRNA sense strand
ucucuauucuuaagguugu

SEQ ID NO: 788839 - RNA, 19 nt, Homo sapiens
  misc_RNA (1)...(19): siRNA sense strand
ucaagaaacugccagaaua

SEQ ID NO: 788840 - RNA, 19 nt, Homo sapiens
  misc_RNA (1)...(19): siRNA sense strand
gacgaaagauggacagauu

SEQ ID NO: 788841 - RNA, 19 nt, Homo sapiens
  misc_RNA (1)...(19): siRNA sense strand
gcacacagccuccucauca

SEQ ID NO: 788842 - RNA, 19 nt, Homo sapiens
  misc_RNA (1)...(19): siRNA sense strand
gaaaagaagugccuaaaca

SEQ ID NO: 788843 - RNA, 19 nt, Homo sapiens
  misc_RNA (1)...(19): siRNA sense strand
ugaaguggguggucuguuu

SEQ ID NO: 788844 - RNA, 19 nt, Homo sapiens
  misc_RNA (1)...(19): siRNA sense strand
guacgacugugaacuaguu

SEQ ID NO: 788845 - RNA, 19 nt, Homo sapiens
  misc_RNA (1)...(19): siRNA sense strand
gggaagagcagcaucauug

SEQ ID NO: 788846 - RNA, 19 nt, Homo sapiens
  misc_RNA (1)...(19): siRNA sense strand
gauaauggacugcaaagga

SEQ ID NO: 788847 - RNA, 19 nt, Homo sapiens
  misc_RNA (1)...(19): siRNA sense strand
gcaaaggaaaccucuauuc

SEQ ID NO: 788848 - RNA, 19 nt, Homo sapiens
  misc_RNA (1)...(19): siRNA sense strand
gggcacagcggauagagua

SEQ ID NO: 788849 - RNA, 19 nt, Homo sapiens
  misc_RNA (1)...(19): siRNA sense strand
agaaagagaagaucaagaa

SEQ ID NO: 788850 - RNA, 19 nt, Homo sapiens
  misc_RNA (1)...(19): siRNA sense strand
gaaagagaagaucaagaaa

SEQ ID NO: 788851 - RNA, 19 nt, Homo sapiens
  misc_RNA (1)...(19): siRNA sense strand
gcaaccaacugggacuuga

SEQ ID NO: 788852 - RNA, 19 nt, Homo sapiens
  misc_RNA (1)...(19): siRNA sense strand
aaagugagacugagaaaga

SEQ ID NO: 788853 - RNA, 19 nt, Homo sapiens
  misc_RNA (1)...(19): siRNA sense strand
gagaugaaagugagacuga

SEQ ID NO: 788854 - RNA, 19 nt, Homo sapiens
  misc_RNA (1)...(19): siRNA sense strand
gauugugucugcagcaugu

SEQ ID NO: 788855 - RNA, 19 nt, Homo sapiens
  misc_RNA (1)...(19): siRNA sense strand
gguuacaccugcuccuuug

SEQ ID NO: 788856 - RNA, 19 nt, Homo sapiens
  misc_RNA (1)...(19): siRNA sense strand
ggauagaguacgacuguga

SEQ ID NO: 788857 - RNA, 19 nt, Homo sapiens
  misc_RNA (1)...(19): siRNA sense strand
auaauggacugcaaaggaa

SEQ ID NO: 788858 - RNA, 19 nt, Homo sapiens
  misc_RNA (1)...(19): siRNA sense strand
gaguggccaucuucauuga

SEQ ID NO: 788859 - RNA, 19 nt, Homo sapiens
  misc_RNA (1)...(19): siRNA sense strand
uacaacggccagccaauua

SEQ ID NO: 788860 - RNA, 19 nt, Homo sapiens
  misc_RNA (1)...(19): siRNA sense strand
aagagaagaucaagaaacu

SEQ ID NO: 788861 - RNA, 19 nt, Homo sapiens
  misc_RNA (1)...(19): siRNA sense strand
ggugauagcaagagaugaa

SEQ ID NO: 788862 - RNA, 19 nt, Homo sapiens
  misc_RNA (1)...(19): siRNA sense strand
guacaacggccagccaauu

SEQ ID NO: 788863 - RNA, 19 nt, Homo sapiens
  misc_RNA (1)...(19): siRNA sense strand
gcgaguggccaucuucauu

SEQ ID NO: 788864 - RNA, 19 nt, Homo sapiens
  misc_RNA (1)...(19): siRNA sense strand
ggucuuagccacgaaguga

SEQ ID NO: 788865 - RNA, 19 nt, Homo sapiens
  misc_RNA (1)...(19): siRNA sense strand
caacaccucccgugaaucu

SEQ ID NO: 788866 - RNA, 19 nt, Homo sapiens
  misc_RNA (1)...(19): siRNA sense strand
gcaaucucggucagaauuu

SEQ ID NO: 788867 - RNA, 19 nt, Homo sapiens
  misc_RNA (1)...(19): siRNA sense strand
gaagagcagcaucauugug

SEQ ID NO: 788868 - RNA, 19 nt, Homo sapiens
  misc_RNA (1)...(19): siRNA sense strand
ggacuugauuggucgaaaa

SEQ ID NO: 788869 - RNA, 19 nt, Homo sapiens
  misc_RNA (1)...(19): siRNA sense strand
agaagugccuaaacagcaa

SEQ ID NO: 788870 - RNA, 19 nt, Homo sapiens
  misc_RNA (1)...(19): siRNA sense strand
caaucucggucagaauuug

SEQ ID NO: 788871 - RNA, 19 nt, Homo sapiens
  misc_RNA (1)...(19): siRNA sense strand
ggaagagcagcaucauugu

SEQ ID NO: 788872 - RNA, 19 nt, Homo sapiens
  misc_RNA (1)...(19): siRNA sense strand
aaucuaccauguacccaaa

SEQ ID NO: 788873 - RNA, 19 nt, Homo sapiens
  misc_RNA (1)...(19): siRNA sense strand
acgcagagcagaaggauga

SEQ ID NO: 788874 - RNA, 19 nt, Homo sapiens
  misc_RNA (1)...(19): siRNA sense strand
ccaaggagcgcgucaaacu

SEQ ID NO: 788875 - RNA, 19 nt, Homo sapiens
  misc_RNA (1)...(19): siRNA sense strand
gaauucaguaugauaaugg

SEQ ID NO: 788876 - RNA, 19 nt, Homo sapiens
  misc_RNA (1)...(19): siRNA sense strand
uggugaagcuguuugacuu

SEQ ID NO: 788877 - RNA, 19 nt, Homo sapiens
  misc_RNA (1)...(19): siRNA sense strand
gauagaguacgacugugaa

SEQ ID NO: 788878 - RNA, 19 nt, Homo sapiens
  misc_RNA (1)...(19): siRNA sense strand
gcggauagaguacgacugu

SEQ ID NO: 788879 - RNA, 19 nt, Homo sapiens
  misc_RNA (1)...(19): siRNA sense strand
agaguacgacugugaacua

SEQ ID NO: 788880 - RNA, 19 nt, Homo sapiens
  misc_RNA (1)...(19): siRNA sense strand
gaaacugccagaauacaac

SEQ ID NO: 788881 - RNA, 19 nt, Homo sapiens
  misc_RNA (1)...(19): siRNA sense strand
gagaaagagaagaucaaga

SEQ ID NO: 788882 - RNA, 19 nt, Homo sapiens
  misc_RNA (1)...(19): siRNA sense strand
gaugaaagugagacugaga

SEQ ID NO: 788883 - RNA, 19 nt, Homo sapiens
  misc_RNA (1)...(19): siRNA sense strand
ccgcgcagauaauguacaa

SEQ ID NO: 788884 - RNA, 19 nt, Homo sapiens
  misc_RNA (1)...(19): siRNA sense strand
caagaaacugccagaauac

SEQ ID NO: 788885 - RNA, 19 nt, Homo sapiens
  misc_RNA (1)...(19): siRNA sense strand
guggccaucuucauugaga

SEQ ID NO: 788886 - RNA, 19 nt, Homo sapiens
  misc_RNA (1)...(19): siRNA sense strand
gaguacgacugugaacuag

SEQ ID NO: 788887 - RNA, 19 nt, Homo sapiens
  misc_RNA (1)...(19): siRNA sense strand
gauagcaagagaugaaagu

SEQ ID NO: 788888 - RNA, 19 nt, Homo sapiens
  misc_RNA (1)...(19): siRNA sense strand
ucauugagaagacgaaaga

SEQ ID NO: 788889 - RNA, 19 nt, Homo sapiens
  misc_RNA (1)...(19): siRNA sense strand
cgaguggccaucuucauug

SEQ ID NO: 788890 - RNA, 19 nt, Homo sapiens
  misc_RNA (1)...(19): siRNA sense strand
caaggagcgcgucaaacuu

SEQ ID NO: 788891 - RNA, 19 nt, Homo sapiens
  misc_RNA (1)...(19): siRNA sense strand
aagggcagcuuuugauuuu

SEQ ID NO: 788892 - RNA, 19 nt, Homo sapiens
  misc_RNA (1)...(19): siRNA sense strand
uagcaagagaugaaaguga

SEQ ID NO: 788893 - RNA, 19 nt, Homo sapiens
  misc_RNA (1)...(19): siRNA sense strand
gaucaagaaacugccagaa

SEQ ID NO: 788894 - RNA, 19 nt, Homo sapiens
  misc_RNA (1)...(19): siRNA sense strand
guaugauaauggacugcaa

SEQ ID NO: 788895 - RNA, 19 nt, Homo sapiens
  misc_RNA (1)...(19): siRNA sense strand
gaaagugagacugagaaag

SEQ ID NO: 788896 - RNA, 19 nt, Homo sapiens
  misc_RNA (1)...(19): siRNA sense strand
ugaaagugagacugagaaa

SEQ ID NO: 788897 - RNA, 19 nt, Homo sapiens
  misc_RNA (1)...(19): siRNA sense strand
aaggagcgcgucaaacuug

SEQ ID NO: 788898 - RNA, 19 nt, Homo sapiens
  misc_RNA (1)...(19): siRNA sense strand
gcaagagaugaaagugaga

SEQ ID NO: 788899 - RNA, 19 nt, Homo sapiens
  misc_RNA (1)...(19): siRNA sense strand
gccaugggcuacucacacu

SEQ ID NO: 788900 - RNA, 19 nt, Homo sapiens
  misc_RNA (1)...(19): siRNA sense strand
cgaaagauggacagauucu

SEQ ID NO: 788901 - RNA, 19 nt, Homo sapiens
  misc_RNA (1)...(19): siRNA sense strand
gggacuugauuggucgaaa

SEQ ID NO: 788902 - RNA, 19 nt, Homo sapiens
  misc_RNA (1)...(19): siRNA sense strand
accaacaccucccgugaau

SEQ ID NO: 788903 - RNA, 19 nt, Homo sapiens
  misc_RNA (1)...(19): siRNA sense strand
caccaaggagcgcgucaaa

SEQ ID NO: 788904 - RNA, 19 nt, Homo sapiens
  misc_RNA (1)...(19): siRNA sense strand
gauucugccuguaccaaac

SEQ ID NO: 788905 - RNA, 19 nt, Homo sapiens
  misc_RNA (1)...(19): siRNA sense strand
aaccacaccuuggccuuga

SEQ ID NO: 788906 - RNA, 19 nt, Homo sapiens
  misc_RNA (1)...(19): siRNA sense strand
agaaacugccagaauacaa

SEQ ID NO: 788907 - RNA, 19 nt, Homo sapiens
  misc_RNA (1)...(19): siRNA sense strand
agacugagaaagagaagau

SEQ ID NO: 788908 - RNA, 19 nt, Homo sapiens
  misc_RNA (1)...(19): siRNA sense strand
ggagguaaagacucuggau

SEQ ID NO: 788909 - RNA, 19 nt, Homo sapiens
  misc_RNA (1)...(19): siRNA sense strand
cgcaaucucggucagaauu

SEQ ID NO: 788910 - RNA, 19 nt, Homo sapiens
  misc_RNA (1)...(19): siRNA sense strand
aaagagaagaucaagaaac

SEQ ID NO: 788911 - RNA, 19 nt, Homo sapiens
  misc_RNA (1)...(19): siRNA sense strand
caccaacaccucccgugaa

SEQ ID NO: 788912 - RNA, 19 nt, Homo sapiens
  misc_RNA (1)...(19): siRNA sense strand
uaugauaauggacugcaaa

SEQ ID NO: 788913 - RNA, 19 nt, Homo sapiens
  misc_RNA (1)...(19): siRNA sense strand
gaccacaagcccaagucuu

SEQ ID NO: 788914 - RNA, 19 nt, Homo sapiens
  misc_RNA (1)...(19): siRNA sense strand
caacugggacuugauuggu

SEQ ID NO: 788915 - RNA, 19 nt, Homo sapiens
  misc_RNA (1)...(19): siRNA sense strand
cugcaaaggaaaccucuau

SEQ ID NO: 788916 - RNA, 19 nt, Homo sapiens
  misc_RNA (1)...(19): siRNA sense strand
cccaggagguaaagacucu

SEQ ID NO: 788917 - RNA, 19 nt, Homo sapiens
  misc_RNA (1)...(19): siRNA sense strand
ccgugaaucuaccauguac

SEQ ID NO: 788918 - RNA, 19 nt, Homo sapiens
  misc_RNA (1)...(19): siRNA sense strand
uaauggacugcaaaggaaa

SEQ ID NO: 788919 - RNA, 19 nt, Homo sapiens
  misc_RNA (1)...(19): siRNA sense strand
ugacaccaagagaguagaa

SEQ ID NO: 788920 - RNA, 19 nt, Homo sapiens
  misc_RNA (1)...(19): siRNA sense strand
gaaguggguggucuguuuu

SEQ ID NO: 788921 - RNA, 19 nt, Homo sapiens
  misc_RNA (1)...(19): siRNA sense strand
gggcuucccagaucuaugc

SEQ ID NO: 788922 - RNA, 19 nt, Homo sapiens
  misc_RNA (1)...(19): siRNA sense strand
ugagaagacgaaagaugga

SEQ ID NO: 788923 - RNA, 19 nt, Homo sapiens
  misc_RNA (1)...(19): siRNA sense strand
gaaagaagcuccuccaauu

SEQ ID NO: 788924 - RNA, 19 nt, Homo sapiens
  misc_RNA (1)...(19): siRNA sense strand
gcaacaagaugcugacuua

SEQ ID NO: 788925 - RNA, 19 nt, Homo sapiens
  misc_RNA (1)...(19): siRNA sense strand
gaucagaacugccagauaa

SEQ ID NO: 788926 - RNA, 19 nt, Homo sapiens
  misc_RNA (1)...(19): siRNA sense strand
gaucaaagguggaagauuu

SEQ ID NO: 788927 - RNA, 19 nt, Homo sapiens
  misc_RNA (1)...(19): siRNA sense strand
ucacugaccugguuuauua

SEQ ID NO: 788928 - RNA, 19 nt, Homo sapiens
  misc_RNA (1)...(19): siRNA sense strand
gauaagacauggagagaua

SEQ ID NO: 788929 - RNA, 19 nt, Homo sapiens
  misc_RNA (1)...(19): siRNA sense strand
gaaagagucuguagaaguu

SEQ ID NO: 788930 - RNA, 19 nt, Homo sapiens
  misc_RNA (1)...(19): siRNA sense strand
gcaaagagguugaugaaau

SEQ ID NO: 788931 - RNA, 19 nt, Homo sapiens
  misc_RNA (1)...(19): siRNA sense strand
gaacagagauuaguggauu

SEQ ID NO: 788932 - RNA, 19 nt, Homo sapiens
  misc_RNA (1)...(19): siRNA sense strand
ggagguaacugauaugauu

SEQ ID NO: 788933 - RNA, 19 nt, Homo sapiens
  misc_RNA (1)...(19): siRNA sense strand
gaaaugaucgagaaacuua

SEQ ID NO: 788934 - RNA, 19 nt, Homo sapiens
  misc_RNA (1)...(19): siRNA sense strand
gaaguacucuuguuaaugu

SEQ ID NO: 788935 - RNA, 19 nt, Homo sapiens
  misc_RNA (1)...(19): siRNA sense strand
gaaaggagaugauaagaag

SEQ ID NO: 788936 - RNA, 19 nt, Homo sapiens
  misc_RNA (1)...(19): siRNA sense strand
gaaauuagccagcaaagaa

SEQ ID NO: 788937 - RNA, 19 nt, Homo sapiens
  misc_RNA (1)...(19): siRNA sense strand
gaaaguaagucuaaaccaa

SEQ ID NO: 788938 - RNA, 19 nt, Homo sapiens
  misc_RNA (1)...(19): siRNA sense strand
gaaagucugugaggaguua

SEQ ID NO: 788939 - RNA, 19 nt, Homo sapiens
  misc_RNA (1)...(19): siRNA sense strand
gcaagaagguggccucuga

SEQ ID NO: 788940 - RNA, 19 nt, Homo sapiens
  misc_RNA (1)...(19): siRNA sense strand
gaaagcugaugaaacaaua

SEQ ID NO: 788941 - RNA, 19 nt, Homo sapiens
  misc_RNA (1)...(19): siRNA sense strand
gggcaaaucuccacauaaa

SEQ ID NO: 788942 - RNA, 19 nt, Homo sapiens
  misc_RNA (1)...(19): siRNA sense strand
gaagcuggcucaucaacua

SEQ ID NO: 788943 - RNA, 19 nt, Homo sapiens
  misc_RNA (1)...(19): siRNA sense strand
gaaacuacauguaugaaga

SEQ ID NO: 788944 - RNA, 19 nt, Homo sapiens
  misc_RNA (1)...(19): siRNA sense strand
gcacuguuaugucaacuua

SEQ ID NO: 788945 - RNA, 19 nt, Homo sapiens
  misc_RNA (1)...(19): siRNA sense strand
guacauggcuuccucagaa

SEQ ID NO: 788946 - RNA, 19 nt, Homo sapiens
  misc_RNA (1)...(19): siRNA sense strand
gcaauggauucauaugaua

SEQ ID NO: 788947 - RNA, 19 nt, Homo sapiens
  misc_RNA (1)...(19): siRNA sense strand
ccagaaccauuuaguguua

SEQ ID NO: 788948 - RNA, 19 nt, Homo sapiens
  misc_RNA (1)...(19): siRNA sense strand
gcaaaugaguuucaaagga

SEQ ID NO: 788949 - RNA, 19 nt, Homo sapiens
  misc_RNA (1)...(19): siRNA sense strand
cauuagagcugucaaguuu

SEQ ID NO: 788950 - RNA, 19 nt, Homo sapiens
  misc_RNA (1)...(19): siRNA sense strand
ccacauggcugauuauuca

SEQ ID NO: 788951 - RNA, 19 nt, Homo sapiens
  misc_RNA (1)...(19): siRNA sense strand
gagaaugguugucuuugua

SEQ ID NO: 788952 - RNA, 19 nt, Homo sapiens
  misc_RNA (1)...(19): siRNA sense strand
ggagagaaaugaucgagaa

SEQ ID NO: 788953 - RNA, 19 nt, Homo sapiens
  misc_RNA (1)...(19): siRNA sense strand
ucaagaaggucugaaguua

SEQ ID NO: 788954 - RNA, 19 nt, Homo sapiens
  misc_RNA (1)...(19): siRNA sense strand
aaacucagcugcuauuuga

SEQ ID NO: 788955 - RNA, 19 nt, Homo sapiens
  misc_RNA (1)...(19): siRNA sense strand
guaaggaaauccauaguug

SEQ ID NO: 788956 - RNA, 19 nt, Homo sapiens
  misc_RNA (1)...(19): siRNA sense strand
gcacaaugacucuguauaa

SEQ ID NO: 788957 - RNA, 19 nt, Homo sapiens
  misc_RNA (1)...(19): siRNA sense strand
gacaugaggcuaaauaaua

SEQ ID NO: 788958 - RNA, 19 nt, Homo sapiens
  misc_RNA (1)...(19): siRNA sense strand
gaauuuagcagcaacuaua

SEQ ID NO: 788959 - RNA, 19 nt, Homo sapiens
  misc_RNA (1)...(19): siRNA sense strand
gaugauagauccucaaagu

SEQ ID NO: 788960 - RNA, 19 nt, Homo sapiens
  misc_RNA (1)...(19): siRNA sense strand
gaaaagaagugaaguaaug

SEQ ID NO: 788961 - RNA, 19 nt, Homo sapiens
  misc_RNA (1)...(19): siRNA sense strand
ugaauggcaugaagauuua

SEQ ID NO: 788962 - RNA, 19 nt, Homo sapiens
  misc_RNA (1)...(19): siRNA sense strand
gcuaauaaauggaucaaga

SEQ ID NO: 788963 - RNA, 19 nt, Homo sapiens
  misc_RNA (1)...(19): siRNA sense strand
gcaaaugggucauagcaau

SEQ ID NO: 788964 - RNA, 19 nt, Homo sapiens
  misc_RNA (1)...(19): siRNA sense strand
ugaaacugcugucgaauuu

SEQ ID NO: 788965 - RNA, 19 nt, Homo sapiens
  misc_RNA (1)...(19): siRNA sense strand
gcaggugccuugccaauau

SEQ ID NO: 788966 - RNA, 19 nt, Homo sapiens
  misc_RNA (1)...(19): siRNA sense strand
gaauuaaucuccaccuuca

SEQ ID NO: 788967 - RNA, 19 nt, Homo sapiens
  misc_RNA (1)...(19): siRNA sense strand
ggaagaaauugaaauguca

SEQ ID NO: 788968 - RNA, 19 nt, Homo sapiens
  misc_RNA (1)...(19): siRNA sense strand
caagaaaccaguaagauuu

SEQ ID NO: 788969 - RNA, 19 nt, Homo sapiens
  misc_RNA (1)...(19): siRNA sense strand
ggagguacccaacaacuua

SEQ ID NO: 788970 - RNA, 19 nt, Homo sapiens
  misc_RNA (1)...(19): siRNA sense strand
gacuuccgcuucuauauua

SEQ ID NO: 788971 - RNA, 19 nt, Homo sapiens
  misc_RNA (1)...(19): siRNA sense strand
gaaacugggacauuuauuu

SEQ ID NO: 788972 - RNA, 19 nt, Homo sapiens
  misc_RNA (1)...(19): siRNA sense strand
gaagcuauaugcaucuuga

SEQ ID NO: 788973 - RNA, 19 nt, Homo sapiens
  misc_RNA (1)...(19): siRNA sense strand
cuacaaaccucugcuaauu

SEQ ID NO: 788974 - RNA, 19 nt, Homo sapiens
  misc_RNA (1)...(19): siRNA sense strand
gcaggcagcuccaucauuc

SEQ ID NO: 788975 - RNA, 19 nt, Homo sapiens
  misc_RNA (1)...(19): siRNA sense strand
gaauauuccuuaugaguuc

SEQ ID NO: 788976 - RNA, 19 nt, Homo sapiens
  misc_RNA (1)...(19): siRNA sense strand
ggaagaaaguauaugauag

SEQ ID NO: 788977 - RNA, 19 nt, Homo sapiens
  misc_RNA (1)...(19): siRNA sense strand
ggaaggcaauauauuagaa

SEQ ID NO: 788978 - RNA, 19 nt, Homo sapiens
  misc_RNA (1)...(19): siRNA sense strand
gacagaagcuggcucauca

SEQ ID NO: 788979 - RNA, 19 nt, Homo sapiens
  misc_RNA (1)...(19): siRNA sense strand
gaagaaauuuugcugcuua

SEQ ID NO: 788980 - RNA, 19 nt, Homo sapiens
  misc_RNA (1)...(19): siRNA sense strand
uaauggaaaugaaggcuua

SEQ ID NO: 788981 - RNA, 19 nt, Homo sapiens
  misc_RNA (1)...(19): siRNA sense strand
ugaaugaggucgcuaguga

SEQ ID NO: 788982 - RNA, 19 nt, Homo sapiens
  misc_RNA (1)...(19): siRNA sense strand
caagaaagacggaaauuug

SEQ ID NO: 788983 - RNA, 19 nt, Homo sapiens
  misc_RNA (1)...(19): siRNA sense strand
gaugaaauaugucgauuag

SEQ ID NO: 788984 - RNA, 19 nt, Homo sapiens
  misc_RNA (1)...(19): siRNA sense strand
gaagaugaaacugcuauua

SEQ ID NO: 788985 - RNA, 19 nt, Homo sapiens
  misc_RNA (1)...(19): siRNA sense strand
caaagagguugaugaaaug

SEQ ID NO: 788986 - RNA, 19 nt, Homo sapiens
  misc_RNA (1)...(19): siRNA sense strand
ggcacuacauccucaauua

SEQ ID NO: 788987 - RNA, 19 nt, Homo sapiens
  misc_RNA (1)...(19): siRNA sense strand
caagagauaugugauaaga

SEQ ID NO: 788988 - RNA, 19 nt, Homo sapiens
  misc_RNA (1)...(19): siRNA sense strand
gaagugucaugcaggauaa

SEQ ID NO: 788989 - RNA, 19 nt, Homo sapiens
  misc_RNA (1)...(19): siRNA sense strand
gaggaaggcagacgauuua

SEQ ID NO: 788990 - RNA, 19 nt, Homo sapiens
  misc_RNA (1)...(19): siRNA sense strand
ggauuuagcugcagauaag

SEQ ID NO: 788991 - RNA, 19 nt, Homo sapiens
  misc_RNA (1)...(19): siRNA sense strand
ucaaggaucacuuuacuua

SEQ ID NO: 788992 - RNA, 19 nt, Homo sapiens
  misc_RNA (1)...(19): siRNA sense strand
gggagaagcugugacaauu

SEQ ID NO: 788993 - RNA, 19 nt, Homo sapiens
  misc_RNA (1)...(19): siRNA sense strand
gcaaaucuccacauaaaga

SEQ ID NO: 788994 - RNA, 19 nt, Homo sapiens
  misc_RNA (1)...(19): siRNA sense strand
ccagaaaucuuugggauga

SEQ ID NO: 788995 - RNA, 19 nt, Homo sapiens
  misc_RNA (1)...(19): siRNA sense strand
gagcacaucagcagaauuu

SEQ ID NO: 788996 - RNA, 19 nt, Homo sapiens
  misc_RNA (1)...(19): siRNA sense strand
acaaaccucugcuaauuaa

SEQ ID NO: 788997 - RNA, 19 nt, Homo sapiens
  misc_RNA (1)...(19): siRNA sense strand
gcacauuccucucauucaa

SEQ ID NO: 788998 - RNA, 19 nt, Homo sapiens
  misc_RNA (1)...(19): siRNA sense strand
gaagcgagcagauauuauu

SEQ ID NO: 788999 - RNA, 19 nt, Homo sapiens
  misc_RNA (1)...(19): siRNA sense strand
guucagagaucaucaggaa

SEQ ID NO: 789000 - RNA, 19 nt, Homo sapiens
  misc_RNA (1)...(19): siRNA sense strand
caaaugaguuucaaaggau

SEQ ID NO: 789001 - RNA, 19 nt, Homo sapiens
  misc_RNA (1)...(19): siRNA sense strand
gaguggagauuucugcuaa

SEQ ID NO: 789002 - RNA, 19 nt, Homo sapiens
  misc_RNA (1)...(19): siRNA sense strand
gaaacuggauucugcuuca

SEQ ID NO: 789003 - RNA, 19 nt, Homo sapiens
  misc_RNA (1)...(19): siRNA sense strand
cagauuagcugcccacaug

SEQ ID NO: 789004 - RNA, 19 nt, Homo sapiens
  misc_RNA (1)...(19): siRNA sense strand
caaugacucuguauaaaga

SEQ ID NO: 789005 - RNA, 19 nt, Homo sapiens
  misc_RNA (1)...(19): siRNA sense strand
gcugaaauauccaaaugaa

SEQ ID NO: 789006 - RNA, 19 nt, Homo sapiens
  misc_RNA (1)...(19): siRNA sense strand
caaguuauguugcuccauu

SEQ ID NO: 789007 - RNA, 19 nt, Homo sapiens
  misc_RNA (1)...(19): siRNA sense strand
gcgaagaacuagauccuau

SEQ ID NO: 789008 - RNA, 19 nt, Homo sapiens
  misc_RNA (1)...(19): siRNA sense strand
aaagaaggcugaccuggaa

SEQ ID NO: 789009 - RNA, 19 nt, Homo sapiens
  misc_RNA (1)...(19): siRNA sense strand
gccaauggauuuagaaguu

SEQ ID NO: 789010 - RNA, 19 nt, Homo sapiens
  misc_RNA (1)...(19): siRNA sense strand
gcauuugccucuucaguga

SEQ ID NO: 789011 - RNA, 19 nt, Homo sapiens
  misc_RNA (1)...(19): siRNA sense strand
cagauaagauugagcaguu

SEQ ID NO: 789012 - RNA, 19 nt, Homo sapiens
  misc_RNA (1)...(19): siRNA sense strand
ggaaguagccgaagagaca

SEQ ID NO: 789013 - RNA, 19 nt, Homo sapiens
  misc_RNA (1)...(19): siRNA sense strand
gguggaagcagaugacuua

SEQ ID NO: 789014 - RNA, 19 nt, Homo sapiens
  misc_RNA (1)...(19): siRNA sense strand
ccagaugaauuucuagauu

SEQ ID NO: 789015 - RNA, 19 nt, Homo sapiens
  misc_RNA (1)...(19): siRNA sense strand
gaacugguaugaucuaaaa

SEQ ID NO: 789016 - RNA, 19 nt, Homo sapiens
  misc_RNA (1)...(19): siRNA sense strand
gaagugguugguugaauua

SEQ ID NO: 789017 - RNA, 19 nt, Homo sapiens
  misc_RNA (1)...(19): siRNA sense strand
ggaaauuacuggagaggau

SEQ ID NO: 789018 - RNA, 19 nt, Homo sapiens
  misc_RNA (1)...(19): siRNA sense strand
agaacgagcugaacaguug

SEQ ID NO: 789019 - RNA, 19 nt, Homo sapiens
  misc_RNA (1)...(19): siRNA sense strand
caaaggaugcuuauuauuc

SEQ ID NO: 789020 - RNA, 19 nt, Homo sapiens
  misc_RNA (1)...(19): siRNA sense strand
ggccagaccuugaagaaga

SEQ ID NO: 789021 - RNA, 19 nt, Homo sapiens
  misc_RNA (1)...(19): siRNA sense strand
gaagaacuagauccuauuu

SEQ ID NO: 789022 - RNA, 19 nt, Homo sapiens
  misc_RNA (1)...(19): siRNA sense strand
ucagaugauugcucucuua

SEQ ID NO: 789023 - RNA, 19 nt, Homo sapiens
  misc_RNA (1)...(19): siRNA sense strand
gaucuuaccuguuguuuga

SEQ ID NO: 789024 - RNA, 19 nt, Homo sapiens
  misc_RNA (1)...(19): siRNA sense strand
gaaauaagauuacguuugc

SEQ ID NO: 789025 - RNA, 19 nt, Homo sapiens
  misc_RNA (1)...(19): siRNA sense strand
ggguacagcuugucucuua

SEQ ID NO: 789026 - RNA, 19 nt, Homo sapiens
  misc_RNA (1)...(19): siRNA sense strand
gcaggaaacucuacaacaa

SEQ ID NO: 789027 - RNA, 19 nt, Homo sapiens
  misc_RNA (1)...(19): siRNA sense strand
ugacugcacugaaaucuaa

SEQ ID NO: 789028 - RNA, 19 nt, Homo sapiens
  misc_RNA (1)...(19): siRNA sense strand
ggauaaauguacauacuga

SEQ ID NO: 789029 - RNA, 19 nt, Homo sapiens
  misc_RNA (1)...(19): siRNA sense strand
gaugguaacuuaucaacau

SEQ ID NO: 789030 - RNA, 19 nt, Homo sapiens
  misc_RNA (1)...(19): siRNA sense strand
gcagauauuugcacaaugg

SEQ ID NO: 789031 - RNA, 19 nt, Homo sapiens
  misc_RNA (1)...(19): siRNA sense strand
ggaggaagaugacgaugau

SEQ ID NO: 789032 - RNA, 19 nt, Homo sapiens
  misc_RNA (1)...(19): siRNA sense strand
gccagaagauguaggguuu

SEQ ID NO: 789033 - RNA, 19 nt, Homo sapiens
  misc_RNA (1)...(19): siRNA sense strand
gaaagaaucugugguucag

SEQ ID NO: 789034 - RNA, 19 nt, Homo sapiens
  misc_RNA (1)...(19): siRNA sense strand
ggaguuaauggucuaauuu

SEQ ID NO: 789035 - RNA, 19 nt, Homo sapiens
  misc_RNA (1)...(19): siRNA sense strand
aaugugggaugguaacuua

SEQ ID NO: 789036 - RNA, 19 nt, Homo sapiens
  misc_RNA (1)...(19): siRNA sense strand
cagauaaccuggaacuaau

SEQ ID NO: 789037 - RNA, 19 nt, Homo sapiens
  misc_RNA (1)...(19): siRNA sense strand
cagguugccuuugaaauaa

SEQ ID NO: 789038 - RNA, 19 nt, Homo sapiens
  misc_RNA (1)...(19): siRNA sense strand
cuacaaccacgaucaauaa

SEQ ID NO: 789039 - RNA, 19 nt, Homo sapiens
  misc_RNA (1)...(19): siRNA sense strand
gaagaggagaauaguguuu

SEQ ID NO: 789040 - RNA, 19 nt, Homo sapiens
  misc_RNA (1)...(19): siRNA sense strand
gauggaaugugggauggua

SEQ ID NO: 789041 - RNA, 19 nt, Homo sapiens
  misc_RNA (1)...(19): siRNA sense strand
gaaauuugaugcugaucca

SEQ ID NO: 789042 - RNA, 19 nt, Homo sapiens
  misc_RNA (1)...(19): siRNA sense strand
agugagaguugacuauaua

SEQ ID NO: 789043 - RNA, 19 nt, Homo sapiens
  misc_RNA (1)...(19): siRNA sense strand
cagaagauguaggguuuaa

SEQ ID NO: 789044 - RNA, 19 nt, Homo sapiens
  misc_RNA (1)...(19): siRNA sense strand
gaaggaaauugaaggaacu

SEQ ID NO: 789045 - RNA, 19 nt, Homo sapiens
  misc_RNA (1)...(19): siRNA sense strand
ucagguugccuuugaaaua

SEQ ID NO: 789046 - RNA, 19 nt, Homo sapiens
  misc_RNA (1)...(19): siRNA sense strand
ggauacaguugugacauga

SEQ ID NO: 789047 - RNA, 19 nt, Homo sapiens
  misc_RNA (1)...(19): siRNA sense strand
aaauggaucugccagcaaa

SEQ ID NO: 789048 - RNA, 19 nt, Homo sapiens
  misc_RNA (1)...(19): siRNA sense strand
gaauuugacguacaccuuu

SEQ ID NO: 789049 - RNA, 19 nt, Homo sapiens
  misc_RNA (1)...(19): siRNA sense strand
cuaagggacuagucauauu

SEQ ID NO: 789050 - RNA, 19 nt, Homo sapiens
  misc_RNA (1)...(19): siRNA sense strand
gggugaagcugacacuaga

SEQ ID NO: 789051 - RNA, 19 nt, Homo sapiens
  misc_RNA (1)...(19): siRNA sense strand
ucagaaacccauccuauau

SEQ ID NO: 789052 - RNA, 19 nt, Homo sapiens
  misc_RNA (1)...(19): siRNA sense strand
gaagauguaggguuuaaca

SEQ ID NO: 789053 - RNA, 19 nt, Homo sapiens
  misc_RNA (1)...(19): siRNA sense strand
ggaaagaaucugugguuca

SEQ ID NO: 789054 - RNA, 19 nt, Homo sapiens
  misc_RNA (1)...(19): siRNA sense strand
uaggguaucucccacugua

SEQ ID NO: 789055 - RNA, 19 nt, Homo sapiens
  misc_RNA (1)...(19): siRNA sense strand
uagaaggccuggaggaaga

SEQ ID NO: 789056 - RNA, 19 nt, Homo sapiens
  misc_RNA (1)...(19): siRNA sense strand
gugaaagcaugcuauggaa

SEQ ID NO: 789057 - RNA, 19 nt, Homo sapiens
  misc_RNA (1)...(19): siRNA sense strand
gaaaacagaaggaaauuga

SEQ ID NO: 789058 - RNA, 19 nt, Homo sapiens
  misc_RNA (1)...(19): siRNA sense strand
uguuaaagcucacucaugu

SEQ ID NO: 789059 - RNA, 19 nt, Homo sapiens
  misc_RNA (1)...(19): siRNA sense strand
ggaaagagugcuggaauuc

SEQ ID NO: 789060 - RNA, 19 nt, Homo sapiens
  misc_RNA (1)...(19): siRNA sense strand
gaaagcaugcuauggaaag

SEQ ID NO: 789061 - RNA, 19 nt, Homo sapiens
  misc_RNA (1)...(19): siRNA sense strand
agaaacccauccuauauuc

SEQ ID NO: 789062 - RNA, 19 nt, Homo sapiens
  misc_RNA (1)...(19): siRNA sense strand
uaagaaaugcugcuaguca

SEQ ID NO: 789063 - RNA, 19 nt, Homo sapiens
  misc_RNA (1)...(19): siRNA sense strand
cagcuugucucuuaucauc

SEQ ID NO: 789064 - RNA, 19 nt, Homo sapiens
  misc_RNA (1)...(19): siRNA sense strand
ucaugugacugcacugaaa

SEQ ID NO: 789065 - RNA, 19 nt, Homo sapiens
  misc_RNA (1)...(19): siRNA sense strand
gaaauugaaggaacuugga

SEQ ID NO: 789066 - RNA, 19 nt, Homo sapiens
  misc_RNA (1)...(19): siRNA sense strand
ggcaaaagcagaacaaaua

SEQ ID NO: 789067 - RNA, 19 nt, Homo sapiens
  misc_RNA (1)...(19): siRNA sense strand
ccacaaugguguugaaacu

SEQ ID NO: 789068 - RNA, 19 nt, Homo sapiens
  misc_RNA (1)...(19): siRNA sense strand
gaccucagaucucggacaa

SEQ ID NO: 789069 - RNA, 19 nt, Homo sapiens
  misc_RNA (1)...(19): siRNA sense strand
gaaagcaaccauuguacuc

SEQ ID NO: 789070 - RNA, 19 nt, Homo sapiens
  misc_RNA (1)...(19): siRNA sense strand
gauaggauauaugauugga

SEQ ID NO: 789071 - RNA, 19 nt, Homo sapiens
  misc_RNA (1)...(19): siRNA sense strand
gugcagccuuuguagaauu

SEQ ID NO: 789072 - RNA, 19 nt, Homo sapiens
  misc_RNA (1)...(19): siRNA sense strand
guugugacaugaaaucuuc

SEQ ID NO: 789073 - RNA, 19 nt, Homo sapiens
  misc_RNA (1)...(19): siRNA sense strand
uaaccuggaacuaaucuuu

SEQ ID NO: 789074 - RNA, 19 nt, Homo sapiens
  misc_RNA (1)...(19): siRNA sense strand
ggugguccaugucaaguga

SEQ ID NO: 789075 - RNA, 19 nt, Homo sapiens
  misc_RNA (1)...(19): siRNA sense strand
ggugaaagcaugcuaugga

SEQ ID NO: 789076 - RNA, 19 nt, Homo sapiens
  misc_RNA (1)...(19): siRNA sense strand
gcucagaaacccauccuau

SEQ ID NO: 789077 - RNA, 19 nt, Homo sapiens
  misc_RNA (1)...(19): siRNA sense strand
gggaagaggagaauagugu

SEQ ID NO: 789078 - RNA, 19 nt, Homo sapiens
  misc_RNA (1)...(19): siRNA sense strand
caacugcccagcuggcuaa

SEQ ID NO: 789079 - RNA, 19 nt, Homo sapiens
  misc_RNA (1)...(19): siRNA sense strand
uggaaagagugcuggaauu

SEQ ID NO: 789080 - RNA, 19 nt, Homo sapiens
  misc_RNA (1)...(19): siRNA sense strand
cagaaacccauccuauauu

SEQ ID NO: 789081 - RNA, 19 nt, Homo sapiens
  misc_RNA (1)...(19): siRNA sense strand
gauuuauccugaacucaug

SEQ ID NO: 789082 - RNA, 19 nt, Homo sapiens
  misc_RNA (1)...(19): siRNA sense strand
gagaaugacacaggugaaa

SEQ ID NO: 789083 - RNA, 19 nt, Homo sapiens
  misc_RNA (1)...(19): siRNA sense strand
gauuacguuugcauuauuc

SEQ ID NO: 789084 - RNA, 19 nt, Homo sapiens
  misc_RNA (1)...(19): siRNA sense strand
gcacguaguucagggugau

SEQ ID NO: 789085 - RNA, 19 nt, Homo sapiens
  misc_RNA (1)...(19): siRNA sense strand
gcaaagugagaguugacua

SEQ ID NO: 789086 - RNA, 19 nt, Homo sapiens
  misc_RNA (1)...(19): siRNA sense strand
guagaggaguaucaguuca

SEQ ID NO: 789087 - RNA, 19 nt, Homo sapiens
  misc_RNA (1)...(19): siRNA sense strand
caaagugagaguugacuau

SEQ ID NO: 789088 - RNA, 19 nt, Homo sapiens
  misc_RNA (1)...(19): siRNA sense strand
gcuuggagauauccuuaau

SEQ ID NO: 789089 - RNA, 19 nt, Homo sapiens
  misc_RNA (1)...(19): siRNA sense strand
gugggagacucaucuacaa

SEQ ID NO: 789090 - RNA, 19 nt, Homo sapiens
  misc_RNA (1)...(19): siRNA sense strand
gacuaucggugguccaugu

SEQ ID NO: 789091 - RNA, 19 nt, Homo sapiens
  misc_RNA (1)...(19): siRNA sense strand
gaaaaucuacuggggauaa

SEQ ID NO: 789092 - RNA, 19 nt, Homo sapiens
  misc_RNA (1)...(19): siRNA sense strand
auacaguugugacaugaaa

SEQ ID NO: 789093 - RNA, 19 nt, Homo sapiens
  misc_RNA (1)...(19): siRNA sense strand
cuucucagguugccuuuga

SEQ ID NO: 789094 - RNA, 19 nt, Homo sapiens
  misc_RNA (1)...(19): siRNA sense strand
gcuaagggacuagucauau

SEQ ID NO: 789095 - RNA, 19 nt, Homo sapiens
  misc_RNA (1)...(19): siRNA sense strand
aaugagcuuugcacaguuu

SEQ ID NO: 789096 - RNA, 19 nt, Homo sapiens
  misc_RNA (1)...(19): siRNA sense strand
gaguucaagugcaggcauu

SEQ ID NO: 789097 - RNA, 19 nt, Homo sapiens
  misc_RNA (1)...(19): siRNA sense strand
gaguaucaguucaguaucg

SEQ ID NO: 789098 - RNA, 19 nt, Homo sapiens
  misc_RNA (1)...(19): siRNA sense strand
ccauuuccuucucuuaaga

SEQ ID NO: 789099 - RNA, 19 nt, Homo sapiens
  misc_RNA (1)...(19): siRNA sense strand
agaauaccauuggauguug

SEQ ID NO: 789100 - RNA, 19 nt, Homo sapiens
  misc_RNA (1)...(19): siRNA sense strand
ggacauguggguacagcuu

SEQ ID NO: 789101 - RNA, 19 nt, Homo sapiens
  misc_RNA (1)...(19): siRNA sense strand
ccagcuggcuaaaguucaa

SEQ ID NO: 789102 - RNA, 19 nt, Homo sapiens
  misc_RNA (1)...(19): siRNA sense strand
aaagugagaguugacuaua

SEQ ID NO: 789103 - RNA, 19 nt, Homo sapiens
  misc_RNA (1)...(19): siRNA sense strand
ggucuaauuuaugauagga

SEQ ID NO: 789104 - RNA, 19 nt, Homo sapiens
  misc_RNA (1)...(19): siRNA sense strand
uggaguuaauggucuaauu

SEQ ID NO: 789105 - RNA, 19 nt, Homo sapiens
  misc_RNA (1)...(19): siRNA sense strand
caaugagcuuugcacaguu

SEQ ID NO: 789106 - RNA, 19 nt, Homo sapiens
  misc_RNA (1)...(19): siRNA sense strand
ggaagaggagaauaguguu

SEQ ID NO: 789107 - RNA, 19 nt, Homo sapiens
  misc_RNA (1)...(19): siRNA sense strand
gcauugauaacguggagaa

SEQ ID NO: 789108 - RNA, 19 nt, Homo sapiens
  misc_RNA (1)...(19): siRNA sense strand
gcaauuggaacgccugaag

SEQ ID NO: 789109 - RNA, 19 nt, Homo sapiens
  misc_RNA (1)...(19): siRNA sense strand
gcacaaugguucggcaaaa

SEQ ID NO: 789110 - RNA, 19 nt, Homo sapiens
  misc_RNA (1)...(19): siRNA sense strand
ggacagaguacagcauaca

SEQ ID NO: 789111 - RNA, 19 nt, Homo sapiens
  misc_RNA (1)...(19): siRNA sense strand
ggaaacuggaauccucaaa

SEQ ID NO: 789112 - RNA, 19 nt, Homo sapiens
  misc_RNA (1)...(19): siRNA sense strand
aucaugaucuuaccuguug

SEQ ID NO: 789113 - RNA, 19 nt, Homo sapiens
  misc_RNA (1)...(19): siRNA sense strand
cgugguauaucaugaucuu

SEQ ID NO: 789114 - RNA, 19 nt, Homo sapiens
  misc_RNA (1)...(19): siRNA sense strand
ucuacaaccacgaucaaua

SEQ ID NO: 789115 - RNA, 19 nt, Homo sapiens
  misc_RNA (1)...(19): siRNA sense strand
ccugaacaaccaaauauau

SEQ ID NO: 789116 - RNA, 19 nt, Homo sapiens
  misc_RNA (1)...(19): siRNA sense strand
gaaaucuaaggaucggaaa

SEQ ID NO: 789117 - RNA, 19 nt, Homo sapiens
  misc_RNA (1)...(19): siRNA sense strand
ggacuuugugcccguggua

SEQ ID NO: 789118 - RNA, 19 nt, Homo sapiens
  misc_RNA (1)...(19): siRNA sense strand
gcugugaugcuuugggaaa

SEQ ID NO: 789119 - RNA, 19 nt, Homo sapiens
  misc_RNA (1)...(19): siRNA sense strand
caagaauaccauuggaugu

SEQ ID NO: 789120 - RNA, 19 nt, Homo sapiens
  misc_RNA (1)...(19): siRNA sense strand
ggaaagcaaccauuguacu

SEQ ID NO: 789121 - RNA, 19 nt, Homo sapiens
  misc_RNA (1)...(19): siRNA sense strand
acaaugguguugaaacucu

SEQ ID NO: 789122 - RNA, 19 nt, Homo sapiens
  misc_RNA (1)...(19): siRNA sense strand
ucaauaaccccuuuagaaa

SEQ ID NO: 789123 - RNA, 19 nt, Homo sapiens
  misc_RNA (1)...(19): siRNA sense strand
gcaacaggaugcagaaaua

SEQ ID NO: 789124 - RNA, 19 nt, Homo sapiens
  misc_RNA (1)...(19): siRNA sense strand
gaacagcaaugcagacaga

SEQ ID NO: 789125 - RNA, 19 nt, Homo sapiens
  misc_RNA (1)...(19): siRNA sense strand
ggagaaaccucauugaaca

SEQ ID NO: 789126 - RNA, 19 nt, Homo sapiens
  misc_RNA (1)...(19): siRNA sense strand
ggaccaaguuuguuucguu

SEQ ID NO: 789127 - RNA, 19 nt, Homo sapiens
  misc_RNA (1)...(19): siRNA sense strand
gaaauuccaucuucaaucg

SEQ ID NO: 789128 - RNA, 19 nt, Homo sapiens
  misc_RNA (1)...(19): siRNA sense strand
gaacagaugaucagcauuc

SEQ ID NO: 789129 - RNA, 19 nt, Homo sapiens
  misc_RNA (1)...(19): siRNA sense strand
uaaaucgacucuccaagaa

SEQ ID NO: 789130 - RNA, 19 nt, Homo sapiens
  misc_RNA (1)...(19): siRNA sense strand
aaauagggcuccuguauca

SEQ ID NO: 789131 - RNA, 19 nt, Homo sapiens
  misc_RNA (1)...(19): siRNA sense strand
ggagugcacugcuuuggau

SEQ ID NO: 789132 - RNA, 19 nt, Homo sapiens
  misc_RNA (1)...(19): siRNA sense strand
agaagaagauggaguucaa

SEQ ID NO: 789133 - RNA, 19 nt, Homo sapiens
  misc_RNA (1)...(19): siRNA sense strand
caucuucaaucgcuccaua

SEQ ID NO: 789134 - RNA, 19 nt, Homo sapiens
  misc_RNA (1)...(19): siRNA sense strand
gagaugaagcguuggauga

SEQ ID NO: 789135 - RNA, 19 nt, Homo sapiens
  misc_RNA (1)...(19): siRNA sense strand
ccacgaaauuuaccucuuc

SEQ ID NO: 789136 - RNA, 19 nt, Homo sapiens
  misc_RNA (1)...(19): siRNA sense strand
ccacuucucugucuacauc

SEQ ID NO: 789137 - RNA, 19 nt, Homo sapiens
  misc_RNA (1)...(19): siRNA sense strand
gaagauggaguucaagauc

SEQ ID NO: 789138 - RNA, 19 nt, Homo sapiens
  misc_RNA (1)...(19): siRNA sense strand
gcagaaauagaagacaaua

SEQ ID NO: 789139 - RNA, 19 nt, Homo sapiens
  misc_RNA (1)...(19): siRNA sense strand
aaauuuaccucuuccuguu

SEQ ID NO: 789140 - RNA, 19 nt, Homo sapiens
  misc_RNA (1)...(19): siRNA sense strand
acaaggagcuggaaauggu

SEQ ID NO: 789141 - RNA, 19 nt, Homo sapiens
  misc_RNA (1)...(19): siRNA sense strand
gaacacugauaaugaacca

SEQ ID NO: 789142 - RNA, 19 nt, Homo sapiens
  misc_RNA (1)...(19): siRNA sense strand
gaaaagacccggaggaaau

SEQ ID NO: 789143 - RNA, 19 nt, Homo sapiens
  misc_RNA (1)...(19): siRNA sense strand
gaaaccucauugaacaaau

SEQ ID NO: 789144 - RNA, 19 nt, Homo sapiens
  misc_RNA (1)...(19): siRNA sense strand
cuaaaggcguccucucaga

SEQ ID NO: 789145 - RNA, 19 nt, Homo sapiens
  misc_RNA (1)...(19): siRNA sense strand
acaaauagggcuccuguau

SEQ ID NO: 789146 - RNA, 19 nt, Homo sapiens
  misc_RNA (1)...(19): siRNA sense strand
gaggccaccuacaugcuaa

SEQ ID NO: 789147 - RNA, 19 nt, Homo sapiens
  misc_RNA (1)...(19): siRNA sense strand
caacgagggcgucaggaaa

SEQ ID NO: 789148 - RNA, 19 nt, Homo sapiens
  misc_RNA (1)...(19): siRNA sense strand
ucacacgccucaagcuguu

SEQ ID NO: 789149 - RNA, 19 nt, Homo sapiens
  misc_RNA (1)...(19): siRNA sense strand
caacaggaggaccaaguuu

SEQ ID NO: 789150 - RNA, 19 nt, Homo sapiens
  misc_RNA (1)...(19): siRNA sense strand
gcaaagccaaggccagaga

SEQ ID NO: 789151 - RNA, 19 nt, Homo sapiens
  misc_RNA (1)...(19): siRNA sense strand
cccagaaccucaaggaaug

SEQ ID NO: 789152 - RNA, 19 nt, Homo sapiens
  misc_RNA (1)...(19): siRNA sense strand
aaucgacucuccaagaaau

SEQ ID NO: 789153 - RNA, 19 nt, Homo sapiens
  misc_RNA (1)...(19): siRNA sense strand
gagcgggagugcacugcuu

SEQ ID NO: 789154 - RNA, 19 nt, Homo sapiens
  misc_RNA (1)...(19): siRNA sense strand
gcaacgagggcgucaggaa

SEQ ID NO: 789155 - RNA, 19 nt, Homo sapiens
  misc_RNA (1)...(19): siRNA sense strand
gagaaauuccaucuucaau

SEQ ID NO: 789156 - RNA, 19 nt, Homo sapiens
  misc_RNA (1)...(19): siRNA sense strand
gacgacggguggaucuuug

SEQ ID NO: 789157 - RNA, 19 nt, Homo sapiens
  misc_RNA (1)...(19): siRNA sense strand
ucaggaauaccgagauaaa

SEQ ID NO: 789158 - RNA, 19 nt, Homo sapiens
  misc_RNA (1)...(19): siRNA sense strand
cagaugaucagcauucaga

SEQ ID NO: 789159 - RNA, 19 nt, Homo sapiens
  misc_RNA (1)...(19): siRNA sense strand
ugacugaggagaucuugaa

SEQ ID NO: 789160 - RNA, 19 nt, Homo sapiens
  misc_RNA (1)...(19): siRNA sense strand
ggaggccaccuacaugcua

SEQ ID NO: 789161 - RNA, 19 nt, Homo sapiens
  misc_RNA (1)...(19): siRNA sense strand
ggaggaaaucagcaaguga

SEQ ID NO: 789162 - RNA, 19 nt, Homo sapiens
  misc_RNA (1)...(19): siRNA sense strand
ccacaucccaauuaagaga

SEQ ID NO: 789163 - RNA, 19 nt, Homo sapiens
  misc_RNA (1)...(19): siRNA sense strand
caaauagggcuccuguauc

SEQ ID NO: 789164 - RNA, 19 nt, Homo sapiens
  misc_RNA (1)...(19): siRNA sense strand
ucaacgaccugcuggugau

SEQ ID NO: 789165 - RNA, 19 nt, Homo sapiens
  misc_RNA (1)...(19): siRNA sense strand
ucaccuacgucagcaauca

SEQ ID NO: 789166 - RNA, 19 nt, Homo sapiens
  misc_RNA (1)...(19): siRNA sense strand
agaucugccugcucaguaa

SEQ ID NO: 789167 - RNA, 19 nt, Homo sapiens
  misc_RNA (1)...(19): siRNA sense strand
gcucgugucccacuucaug

SEQ ID NO: 789168 - RNA, 19 nt, Homo sapiens
  misc_RNA (1)...(19): siRNA sense strand
aauggaacacugauaauga

SEQ ID NO: 789169 - RNA, 19 nt, Homo sapiens
  misc_RNA (1)...(19): siRNA sense strand
gaucagcauucagaagaag

SEQ ID NO: 789170 - RNA, 19 nt, Homo sapiens
  misc_RNA (1)...(19): siRNA sense strand
gcugaccacuucucugucu

SEQ ID NO: 789171 - RNA, 19 nt, Homo sapiens
  misc_RNA (1)...(19): siRNA sense strand
gagaacgagcggauaagga

SEQ ID NO: 789172 - RNA, 19 nt, Homo sapiens
  misc_RNA (1)...(19): siRNA sense strand
gaaccucaaggaauguuuc

SEQ ID NO: 789173 - RNA, 19 nt, Homo sapiens
  misc_RNA (1)...(19): siRNA sense strand
aagauggaguucaagauca

SEQ ID NO: 789174 - RNA, 19 nt, Homo sapiens
  misc_RNA (1)...(19): siRNA sense strand
cggaacagaugaucagcau

SEQ ID NO: 789175 - RNA, 19 nt, Homo sapiens
  misc_RNA (1)...(19): siRNA sense strand
gugacaucguguaccguua

SEQ ID NO: 789176 - RNA, 19 nt, Homo sapiens
  misc_RNA (1)...(19): siRNA sense strand
gagaaaccucauugaacaa

SEQ ID NO: 789177 - RNA, 19 nt, Homo sapiens
  misc_RNA (1)...(19): siRNA sense strand
caauggaacacugauaaug

SEQ ID NO: 789178 - RNA, 19 nt, Homo sapiens
  misc_RNA (1)...(19): siRNA sense strand
ucaagucggugcccaucau

SEQ ID NO: 789179 - RNA, 19 nt, Homo sapiens
  misc_RNA (1)...(19): siRNA sense strand
gcacggaacagaugaucag

SEQ ID NO: 789180 - RNA, 19 nt, Homo sapiens
  misc_RNA (1)...(19): siRNA sense strand
agaacgagcggauaaggaa

SEQ ID NO: 789181 - RNA, 19 nt, Homo sapiens
  misc_RNA (1)...(19): siRNA sense strand
auaaaucgacucuccaaga

SEQ ID NO: 789182 - RNA, 19 nt, Homo sapiens
  misc_RNA (1)...(19): siRNA sense strand
gaaauagaagacaauacca

SEQ ID NO: 789183 - RNA, 19 nt, Homo sapiens
  misc_RNA (1)...(19): siRNA sense strand
caagacaaagagccucauu

SEQ ID NO: 789184 - RNA, 19 nt, Homo sapiens
  misc_RNA (1)...(19): siRNA sense strand
accaggagcggaccuauaa

SEQ ID NO: 789185 - RNA, 19 nt, Homo sapiens
  misc_RNA (1)...(19): siRNA sense strand
ggaauaccgagauaaaucg

SEQ ID NO: 789186 - RNA, 19 nt, Homo sapiens
  misc_RNA (1)...(19): siRNA sense strand
agauggaguucaagaucaa

SEQ ID NO: 789187 - RNA, 19 nt, Homo sapiens
  misc_RNA (1)...(19): siRNA sense strand
ugaucagcauucagaagaa

SEQ ID NO: 789188 - RNA, 19 nt, Homo sapiens
  misc_RNA (1)...(19): siRNA sense strand
auggaacacugauaaugaa

SEQ ID NO: 789189 - RNA, 19 nt, Homo sapiens
  misc_RNA (1)...(19): siRNA sense strand
guccagaacauccugaaga

SEQ ID NO: 789190 - RNA, 19 nt, Homo sapiens
  misc_RNA (1)...(19): siRNA sense strand
cagaucugccugcucagua

SEQ ID NO: 789191 - RNA, 19 nt, Homo sapiens
  misc_RNA (1)...(19): siRNA sense strand
uagaagacaauaccaaugg

SEQ ID NO: 789192 - RNA, 19 nt, Homo sapiens
  misc_RNA (1)...(19): siRNA sense strand
agaacaucgucaucucuga

SEQ ID NO: 789193 - RNA, 19 nt, Homo sapiens
  misc_RNA (1)...(19): siRNA sense strand
uaaaugagccccugaccuu

SEQ ID NO: 789194 - RNA, 19 nt, Homo sapiens
  misc_RNA (1)...(19): siRNA sense strand
ccaacaggaggaccaaguu

SEQ ID NO: 789195 - RNA, 19 nt, Homo sapiens
  misc_RNA (1)...(19): siRNA sense strand
ugccacaucccaauuaaga

SEQ ID NO: 789196 - RNA, 19 nt, Homo sapiens
  misc_RNA (1)...(19): siRNA sense strand
gcauucagaagaagaugga

SEQ ID NO: 789197 - RNA, 19 nt, Homo sapiens
  misc_RNA (1)...(19): siRNA sense strand
cggaggaaaucagcaagug

SEQ ID NO: 789198 - RNA, 19 nt, Homo sapiens
  misc_RNA (1)...(19): siRNA sense strand
ucacaaggagcuggaaaug

SEQ ID NO: 789199 - RNA, 19 nt, Homo sapiens
  misc_RNA (1)...(19): siRNA sense strand
ggaggaggaagaagaagag

SEQ ID NO: 789200 - RNA, 19 nt, Homo sapiens
  misc_RNA (1)...(19): siRNA sense strand
uguucgagcuggucacuuc

SEQ ID NO: 789201 - RNA, 19 nt, Homo sapiens
  misc_RNA (1)...(19): siRNA sense strand
cagcaagugaucaauggaa

SEQ ID NO: 789202 - RNA, 19 nt, Homo sapiens
  misc_RNA (1)...(19): siRNA sense strand
gacaucguguaccguuaug

SEQ ID NO: 789203 - RNA, 19 nt, Homo sapiens
  misc_RNA (1)...(19): siRNA sense strand
gaggcguccuacuacaaga

SEQ ID NO: 789204 - RNA, 19 nt, Homo sapiens
  misc_RNA (1)...(19): siRNA sense strand
ugacaucguguaccguuau

SEQ ID NO: 789205 - RNA, 19 nt, Homo sapiens
  misc_RNA (1)...(19): siRNA sense strand
gcagauuccaggagacaag

SEQ ID NO: 789206 - RNA, 19 nt, Homo sapiens
  misc_RNA (1)...(19): siRNA sense strand
ggcaacaggaugcagaaau

SEQ ID NO: 789207 - RNA, 19 nt, Homo sapiens
  misc_RNA (1)...(19): siRNA sense strand
caaguuuguuucguucaca

SEQ ID NO: 789208 - RNA, 19 nt, Homo sapiens
  misc_RNA (1)...(19): siRNA sense strand
ggaggaccaaguuuguuuc

SEQ ID NO: 789209 - RNA, 19 nt, Homo sapiens
  misc_RNA (1)...(19): siRNA sense strand
ucaagcuguugguccagaa

SEQ ID NO: 789210 - RNA, 19 nt, Homo sapiens
  misc_RNA (1)...(19): siRNA sense strand
gaggagaacaucgucaucu

SEQ ID NO: 789211 - RNA, 19 nt, Homo sapiens
  misc_RNA (1)...(19): siRNA sense strand
ccuacagccugaggagauu

SEQ ID NO: 789212 - RNA, 19 nt, Homo sapiens
  misc_RNA (1)...(19): siRNA sense strand
gcaagugaucaauggaaca

SEQ ID NO: 789213 - RNA, 19 nt, Homo sapiens
  misc_RNA (1)...(19): siRNA sense strand
acaggaugcagaaauagaa

SEQ ID NO: 789214 - RNA, 19 nt, Homo sapiens
  misc_RNA (1)...(19): siRNA sense strand
caacaggaugcagaaauag

SEQ ID NO: 789215 - RNA, 19 nt, Homo sapiens
  misc_RNA (1)...(19): siRNA sense strand
gagcccaggaaaugaguga

SEQ ID NO: 789216 - RNA, 19 nt, Homo sapiens
  misc_RNA (1)...(19): siRNA sense strand
cugaggagaucuugaaucc

SEQ ID NO: 789217 - RNA, 19 nt, Homo sapiens
  misc_RNA (1)...(19): siRNA sense strand
ugacgacggguggaucuuu

SEQ ID NO: 789218 - RNA, 19 nt, Homo sapiens
  misc_RNA (1)...(19): siRNA sense strand
uuaugcggcugaccacuuc

SEQ ID NO: 789219 - RNA, 19 nt, Homo sapiens
  misc_RNA (1)...(19): siRNA sense strand
agagaaauuccaucuucaa

SEQ ID NO: 789220 - RNA, 19 nt, Homo sapiens
  misc_RNA (1)...(19): siRNA sense strand
ggauauccaagacaaagag

SEQ ID NO: 789221 - RNA, 19 nt, Homo sapiens
  misc_RNA (1)...(19): siRNA sense strand
gcucuuccacgaaauuuac

SEQ ID NO: 789222 - RNA, 19 nt, Homo sapiens
  misc_RNA (1)...(19): siRNA sense strand
agacaaagagccucauugc

SEQ ID NO: 789223 - RNA, 19 nt, Homo sapiens
  misc_RNA (1)...(19): siRNA sense strand
gugcauuccuucucccaua

SEQ ID NO: 789224 - RNA, 19 nt, Homo sapiens
  misc_RNA (1)...(19): siRNA sense strand
gaaagugaugucccucuga

SEQ ID NO: 789225 - RNA, 19 nt, Homo sapiens
  misc_RNA (1)...(19): siRNA sense strand
aaagugaugucccucugaa

SEQ ID NO: 789226 - RNA, 19 nt, Homo sapiens
  misc_RNA (1)...(19): siRNA sense strand
aaugagcaauggcagauga

SEQ ID NO: 789227 - RNA, 19 nt, Homo sapiens
  misc_RNA (1)...(19): siRNA sense strand
gcgaagaccaccagcacuu

SEQ ID NO: 789228 - RNA, 19 nt, Homo sapiens
  misc_RNA (1)...(19): siRNA sense strand
gccauggccuacucuaaag

SEQ ID NO: 789229 - RNA, 19 nt, Homo sapiens
  misc_RNA (1)...(19): siRNA sense strand
ucuaaagccgcauuugaaa

SEQ ID NO: 789230 - RNA, 19 nt, Homo sapiens
  misc_RNA (1)...(19): siRNA sense strand
ucugaaaacugaggaauuu

SEQ ID NO: 789231 - RNA, 19 nt, Homo sapiens
  misc_RNA (1)...(19): siRNA sense strand
cgccauggccuacucuaaa

SEQ ID NO: 789232 - RNA, 19 nt, Homo sapiens
  misc_RNA (1)...(19): siRNA sense strand
uaaagccgcauuugaaagg

SEQ ID NO: 789233 - RNA, 19 nt, Homo sapiens
  misc_RNA (1)...(19): siRNA sense strand
aaacugaggaauuugaagu

SEQ ID NO: 789234 - RNA, 19 nt, Homo sapiens
  misc_RNA (1)...(19): siRNA sense strand
ugcauuccuucucccauaa

SEQ ID NO: 789235 - RNA, 19 nt, Homo sapiens
  misc_RNA (1)...(19): siRNA sense strand
acucuaaagccgcauuuga

SEQ ID NO: 789236 - RNA, 19 nt, Homo sapiens
  misc_RNA (1)...(19): siRNA sense strand
gaaaacugaggaauuugaa

SEQ ID NO: 789237 - RNA, 19 nt, Homo sapiens
  misc_RNA (1)...(19): siRNA sense strand
cauuugaaagggaaaguga

SEQ ID NO: 789238 - RNA, 19 nt, Homo sapiens
  misc_RNA (1)...(19): siRNA sense strand
acugaggaauuugaaguga

SEQ ID NO: 789239 - RNA, 19 nt, Homo sapiens
  misc_RNA (1)...(19): siRNA sense strand
ccaaugagcaauggcagau

SEQ ID NO: 789240 - RNA, 19 nt, Homo sapiens
  misc_RNA (1)...(19): siRNA sense strand
gggaaguccuaucuguacu

SEQ ID NO: 789241 - RNA, 19 nt, Homo sapiens
  misc_RNA (1)...(19): siRNA sense strand
gagggaccaaugagcaaug

SEQ ID NO: 789242 - RNA, 19 nt, Homo sapiens
  misc_RNA (1)...(19): siRNA sense strand
guacuucacacaguucaag

SEQ ID NO: 789243 - RNA, 19 nt, Homo sapiens
  misc_RNA (1)...(19): siRNA sense strand
cucuaaagccgcauuugaa

SEQ ID NO: 789244 - RNA, 19 nt, Homo sapiens
  misc_RNA (1)...(19): siRNA sense strand
ggggacaaauauacgugua

SEQ ID NO: 789245 - RNA, 19 nt, Homo sapiens
  misc_RNA (1)...(19): siRNA sense strand
gugcauuccuucucccaua

SEQ ID NO: 789246 - RNA, 19 nt, Homo sapiens
  misc_RNA (1)...(19): siRNA sense strand
gaaagugaugucccucuga

SEQ ID NO: 789247 - RNA, 19 nt, Homo sapiens
  misc_RNA (1)...(19): siRNA sense strand
aaagugaugucccucugaa

SEQ ID NO: 789248 - RNA, 19 nt, Homo sapiens
  misc_RNA (1)...(19): siRNA sense strand
aaugagcaauggcagauga

SEQ ID NO: 789249 - RNA, 19 nt, Homo sapiens
  misc_RNA (1)...(19): siRNA sense strand
gcgaagaccaccagcacuu

SEQ ID NO: 789250 - RNA, 19 nt, Homo sapiens
  misc_RNA (1)...(19): siRNA sense strand
gccauggccuacucuaaag

SEQ ID NO: 789251 - RNA, 19 nt, Homo sapiens
  misc_RNA (1)...(19): siRNA sense strand
ucuaaagccgcauuugaaa

SEQ ID NO: 789252 - RNA, 19 nt, Homo sapiens
  misc_RNA (1)...(19): siRNA sense strand
ucugaaaacugaggaauuu

SEQ ID NO: 789253 - RNA, 19 nt, Homo sapiens
  misc_RNA (1)...(19): siRNA sense strand
cgccauggccuacucuaaa

SEQ ID NO: 789254 - RNA, 19 nt, Homo sapiens
  misc_RNA (1)...(19): siRNA sense strand
uaaagccgcauuugaaagg

SEQ ID NO: 789255 - RNA, 19 nt, Homo sapiens
  misc_RNA (1)...(19): siRNA sense strand
aaacugaggaauuugaagu

SEQ ID NO: 789256 - RNA, 19 nt, Homo sapiens
  misc_RNA (1)...(19): siRNA sense strand
ugcauuccuucucccauaa

SEQ ID NO: 789257 - RNA, 19 nt, Homo sapiens
  misc_RNA (1)...(19): siRNA sense strand
acucuaaagccgcauuuga

SEQ ID NO: 789258 - RNA, 19 nt, Homo sapiens
  misc_RNA (1)...(19): siRNA sense strand
gaaaacugaggaauuugaa

SEQ ID NO: 789259 - RNA, 19 nt, Homo sapiens
  misc_RNA (1)...(19): siRNA sense strand
cauuugaaagggaaaguga

SEQ ID NO: 789260 - RNA, 19 nt, Homo sapiens
  misc_RNA (1)...(19): siRNA sense strand
acugaggaauuugaaguga

SEQ ID NO: 789261 - RNA, 19 nt, Homo sapiens
  misc_RNA (1)...(19): siRNA sense strand
ccaaugagcaauggcagau

SEQ ID NO: 789262 - RNA, 19 nt, Homo sapiens
  misc_RNA (1)...(19): siRNA sense strand
gggaaguccuaucuguacu

SEQ ID NO: 789263 - RNA, 19 nt, Homo sapiens
  misc_RNA (1)...(19): siRNA sense strand
gagggaccaaugagcaaug

SEQ ID NO: 789264 - RNA, 19 nt, Homo sapiens
  misc_RNA (1)...(19): siRNA sense strand
guacuucacacaguucaag

SEQ ID NO: 789265 - RNA, 19 nt, Homo sapiens
  misc_RNA (1)...(19): siRNA sense strand
cucuaaagccgcauuugaa

SEQ ID NO: 789266 - RNA, 19 nt, Homo sapiens
  misc_RNA (1)...(19): siRNA sense strand
ggggacaaauauacgugua

SEQ ID NO: 789267 - RNA, 19 nt, Homo sapiens
  misc_RNA (1)...(19): siRNA sense strand
gcucagaaauggaagaauu

SEQ ID NO: 789268 - RNA, 19 nt, Homo sapiens
  misc_RNA (1)...(19): siRNA sense strand
cagcggaggugcaguguuu

SEQ ID NO: 789269 - RNA, 19 nt, Homo sapiens
  misc_RNA (1)...(19): siRNA sense strand
gcauauuucucccuccuaa

SEQ ID NO: 789270 - RNA, 19 nt, Homo sapiens
  misc_RNA (1)...(19): siRNA sense strand
gcgcggugaugauuguuua

SEQ ID NO: 789271 - RNA, 19 nt, Homo sapiens
  misc_RNA (1)...(19): siRNA sense strand
ggaagccggugucuguguu

SEQ ID NO: 789272 - RNA, 19 nt, Homo sapiens
  misc_RNA (1)...(19): siRNA sense strand
gaaauugaaggaugaaugg

SEQ ID NO: 789273 - RNA, 19 nt, Homo sapiens
  misc_RNA (1)...(19): siRNA sense strand
gauauuggacgaaggaaug

SEQ ID NO: 789274 - RNA, 19 nt, Homo sapiens
  misc_RNA (1)...(19): siRNA sense strand
agccgaacauggcauauuu

SEQ ID NO: 789275 - RNA, 19 nt, Homo sapiens
  misc_RNA (1)...(19): siRNA sense strand
ugcaaggacugaccgauga

SEQ ID NO: 789276 - RNA, 19 nt, Homo sapiens
  misc_RNA (1)...(19): siRNA sense strand
gaagccggugucuguguua

SEQ ID NO: 789277 - RNA, 19 nt, Homo sapiens
  misc_RNA (1)...(19): siRNA sense strand
gaugauauuggacgaagga

SEQ ID NO: 789278 - RNA, 19 nt, Homo sapiens
  misc_RNA (1)...(19): siRNA sense strand
gaccgaugaucagauugaa

SEQ ID NO: 789279 - RNA, 19 nt, Homo sapiens
  misc_RNA (1)...(19): siRNA sense strand
ggaagaauuagccgaacau

SEQ ID NO: 789280 - RNA, 19 nt, Homo sapiens
  misc_RNA (1)...(19): siRNA sense strand
ccgaugaucagauugaaga

SEQ ID NO: 789281 - RNA, 19 nt, Homo sapiens
  misc_RNA (1)...(19): siRNA sense strand
ugaaauugaaggaugaaug

SEQ ID NO: 789282 - RNA, 19 nt, Homo sapiens
  misc_RNA (1)...(19): siRNA sense strand
gaucagauugaagaauuga

SEQ ID NO: 789283 - RNA, 19 nt, Homo sapiens
  misc_RNA (1)...(19): siRNA sense strand
ugaucagauugaagaauug

SEQ ID NO: 789284 - RNA, 19 nt, Homo sapiens
  misc_RNA (1)...(19): siRNA sense strand
gcggaggugcaguguuuaa

SEQ ID NO: 789285 - RNA, 19 nt, Homo sapiens
  misc_RNA (1)...(19): siRNA sense strand
ugaccgaugaucagauuga

SEQ ID NO: 789286 - RNA, 19 nt, Homo sapiens
  misc_RNA (1)...(19): siRNA sense strand
cucagaaauggaagaauua

SEQ ID NO: 789287 - RNA, 19 nt, Homo sapiens
  misc_RNA (1)...(19): siRNA sense strand
gaagaauuagccgaacaug

SEQ ID NO: 789288 - RNA, 19 nt, Homo sapiens
  misc_RNA (1)...(19): siRNA sense strand
uggaagaauuagccgaaca

SEQ ID NO: 789289 - RNA, 19 nt, Homo sapiens
  misc_RNA (1)...(19): siRNA sense strand
ccuaauaugcaaggacuga

SEQ ID NO: 789290 - RNA, 19 nt, Homo sapiens
  misc_RNA (1)...(19): siRNA sense strand
gaugaucagauugaagaau

SEQ ID NO: 789291 - RNA, 19 nt, Homo sapiens
  misc_RNA (1)...(19): siRNA sense strand
ggaggugcaguguuuaaaa

SEQ ID NO: 789292 - RNA, 19 nt, Homo sapiens
  misc_RNA (1)...(19): siRNA sense strand
gcaaggacugaccgaugau

SEQ ID NO: 789293 - RNA, 19 nt, Homo sapiens
  misc_RNA (1)...(19): siRNA sense strand
cgaagaagcuuucagacua

SEQ ID NO: 789294 - RNA, 19 nt, Homo sapiens
  misc_RNA (1)...(19): siRNA sense strand
ggauaacacugcuuugaaa

SEQ ID NO: 789295 - RNA, 19 nt, Homo sapiens
  misc_RNA (1)...(19): siRNA sense strand
gcucagaaauggaagaauu

SEQ ID NO: 789296 - RNA, 19 nt, Homo sapiens
  misc_RNA (1)...(19): siRNA sense strand
gaacgaagaagcuuucaga

SEQ ID NO: 789297 - RNA, 19 nt, Homo sapiens
  misc_RNA (1)...(19): siRNA sense strand
cagcggaggugcaguguuu

SEQ ID NO: 789298 - RNA, 19 nt, Homo sapiens
  misc_RNA (1)...(19): siRNA sense strand
aagaggagcucaagagauu

SEQ ID NO: 789299 - RNA, 19 nt, Homo sapiens
  misc_RNA (1)...(19): siRNA sense strand
gcauauuucucccuccuaa

SEQ ID NO: 789300 - RNA, 19 nt, Homo sapiens
  misc_RNA (1)...(19): siRNA sense strand
gcgcggugaugauuguuua

SEQ ID NO: 789301 - RNA, 19 nt, Homo sapiens
  misc_RNA (1)...(19): siRNA sense strand
gaagaagcuuucagacuac

SEQ ID NO: 789302 - RNA, 19 nt, Homo sapiens
  misc_RNA (1)...(19): siRNA sense strand
gcauggaguuugaaaauaa

SEQ ID NO: 789303 - RNA, 19 nt, Homo sapiens
  misc_RNA (1)...(19): siRNA sense strand
ugaugaugaugccuauuua

SEQ ID NO: 789304 - RNA, 19 nt, Homo sapiens
  misc_RNA (1)...(19): siRNA sense strand
gaugaugccuauuuaaacu

SEQ ID NO: 789305 - RNA, 19 nt, Homo sapiens
  misc_RNA (1)...(19): siRNA sense strand
gacauaaaguggagaccaa

SEQ ID NO: 789306 - RNA, 19 nt, Homo sapiens
  misc_RNA (1)...(19): siRNA sense strand
ggaagccggugucuguguu

SEQ ID NO: 789307 - RNA, 19 nt, Homo sapiens
  misc_RNA (1)...(19): siRNA sense strand
gaagaacgaagaagcuuuc

SEQ ID NO: 789308 - RNA, 19 nt, Homo sapiens
  misc_RNA (1)...(19): siRNA sense strand
gaaauugaaggaugaaugg

SEQ ID NO: 789309 - RNA, 19 nt, Homo sapiens
  misc_RNA (1)...(19): siRNA sense strand
gauauuggacgaaggaaug

SEQ ID NO: 789310 - RNA, 19 nt, Homo sapiens
  misc_RNA (1)...(19): siRNA sense strand
gcccgagagccuauuauua

SEQ ID NO: 789311 - RNA, 19 nt, Homo sapiens
  misc_RNA (1)...(19): siRNA sense strand
gagcugagaagaacgaaga

SEQ ID NO: 789312 - RNA, 19 nt, Homo sapiens
  misc_RNA (1)...(19): siRNA sense strand
ccaaggagcugagaagaac

SEQ ID NO: 789313 - RNA, 19 nt, Homo sapiens
  misc_RNA (1)...(19): siRNA sense strand
ggaagaaaaugaugaugau

SEQ ID NO: 789314 - RNA, 19 nt, Homo sapiens
  misc_RNA (1)...(19): siRNA sense strand
agccgaacauggcauauuu

SEQ ID NO: 789315 - RNA, 19 nt, Homo sapiens
  misc_RNA (1)...(19): siRNA sense strand
gaugaugaugccuauuuaa

SEQ ID NO: 789316 - RNA, 19 nt, Homo sapiens
  misc_RNA (1)...(19): siRNA sense strand
ugcaaggacugaccgauga

SEQ ID NO: 789317 - RNA, 19 nt, Homo sapiens
  misc_RNA (1)...(19): siRNA sense strand
gaagccggugucuguguua

SEQ ID NO: 789318 - RNA, 19 nt, Homo sapiens
  misc_RNA (1)...(19): siRNA sense strand
gcagggcucaacgucauua

SEQ ID NO: 789319 - RNA, 19 nt, Homo sapiens
  misc_RNA (1)...(19): siRNA sense strand
cucaagagauuggaagaaa

SEQ ID NO: 789320 - RNA, 19 nt, Homo sapiens
  misc_RNA (1)...(19): siRNA sense strand
gcagugaggagcagaagca

SEQ ID NO: 789321 - RNA, 19 nt, Homo sapiens
  misc_RNA (1)...(19): siRNA sense strand
gaugauauuggacgaagga

SEQ ID NO: 789322 - RNA, 19 nt, Homo sapiens
  misc_RNA (1)...(19): siRNA sense strand
gcggauaacacugcuuuga

SEQ ID NO: 789323 - RNA, 19 nt, Homo sapiens
  misc_RNA (1)...(19): siRNA sense strand
gggcggauaacacugcuuu

SEQ ID NO: 789324 - RNA, 19 nt, Homo sapiens
  misc_RNA (1)...(19): siRNA sense strand
gaagacaagaggagcucaa

SEQ ID NO: 789325 - RNA, 19 nt, Homo sapiens
  misc_RNA (1)...(19): siRNA sense strand
ggagugaaagacauaaagu

SEQ ID NO: 789326 - RNA, 19 nt, Homo sapiens
  misc_RNA (1)...(19): siRNA sense strand
gacaagaggagcucaagag

SEQ ID NO: 789327 - RNA, 19 nt, Homo sapiens
  misc_RNA (1)...(19): siRNA sense strand
gaccgaugaucagauugaa

SEQ ID NO: 789328 - RNA, 19 nt, Homo sapiens
  misc_RNA (1)...(19): siRNA sense strand
ggaagaauuagccgaacau

SEQ ID NO: 789329 - RNA, 19 nt, Homo sapiens
  misc_RNA (1)...(19): siRNA sense strand
aaaugaugaugaugccuau

SEQ ID NO: 789330 - RNA, 19 nt, Homo sapiens
  misc_RNA (1)...(19): siRNA sense strand
gccaaggagcugagaagaa

SEQ ID NO: 789331 - RNA, 19 nt, Homo sapiens
  misc_RNA (1)...(19): siRNA sense strand
gaucagauugaagaauuga

SEQ ID NO: 789332 - RNA, 19 nt, Homo sapiens
  misc_RNA (1)...(19): siRNA sense strand
ccgaugaucagauugaaga

SEQ ID NO: 789333 - RNA, 19 nt, Homo sapiens
  misc_RNA (1)...(19): siRNA sense strand
ugaaauugaaggaugaaug

SEQ ID NO: 789334 - RNA, 19 nt, Homo sapiens
  misc_RNA (1)...(19): siRNA sense strand
caagaggagcucaagagau

SEQ ID NO: 789335 - RNA, 19 nt, Homo sapiens
  misc_RNA (1)...(19): siRNA sense strand
cccgagagccuauuauuag

SEQ ID NO: 789336 - RNA, 19 nt, Homo sapiens
  misc_RNA (1)...(19): siRNA sense strand
gagaagaacgaagaagcuu

SEQ ID NO: 789337 - RNA, 19 nt, Homo sapiens
  misc_RNA (1)...(19): siRNA sense strand
ggcucaacgucauuaaaga

SEQ ID NO: 789338 - RNA, 19 nt, Homo sapiens
  misc_RNA (1)...(19): siRNA sense strand
gcggaggugcaguguuuaa

SEQ ID NO: 789339 - RNA, 19 nt, Homo sapiens
  misc_RNA (1)...(19): siRNA sense strand
ugaucagauugaagaauug

SEQ ID NO: 789340 - RNA, 19 nt, Homo sapiens
  misc_RNA (1)...(19): siRNA sense strand
gaacacaggcagggcucaa

SEQ ID NO: 789341 - RNA, 19 nt, Homo sapiens
  misc_RNA (1)...(19): siRNA sense strand
gggcucaacgucauuaaag

SEQ ID NO: 789342 - RNA, 19 nt, Homo sapiens
  misc_RNA (1)...(19): siRNA sense strand
cggauaacacugcuuugaa

SEQ ID NO: 789343 - RNA, 19 nt, Homo sapiens
  misc_RNA (1)...(19): siRNA sense strand
uaaaguggagaccaagaug

SEQ ID NO: 789344 - RNA, 19 nt, Homo sapiens
  misc_RNA (1)...(19): siRNA sense strand
ugaccgaugaucagauuga

SEQ ID NO: 789345 - RNA, 19 nt, Homo sapiens
  misc_RNA (1)...(19): siRNA sense strand
gagugaaagacauaaagug

SEQ ID NO: 789346 - RNA, 19 nt, Homo sapiens
  misc_RNA (1)...(19): siRNA sense strand
cucagaaauggaagaauua

SEQ ID NO: 789347 - RNA, 19 nt, Homo sapiens
  misc_RNA (1)...(19): siRNA sense strand
ucgccaagauucagcaaag

SEQ ID NO: 789348 - RNA, 19 nt, Homo sapiens
  misc_RNA (1)...(19): siRNA sense strand
gcucaagagauuggaagaa

SEQ ID NO: 789349 - RNA, 19 nt, Homo sapiens
  misc_RNA (1)...(19): siRNA sense strand
ugaugccuauuuaaacuca

SEQ ID NO: 789350 - RNA, 19 nt, Homo sapiens
  misc_RNA (1)...(19): siRNA sense strand
gaagaauuagccgaacaug

SEQ ID NO: 789351 - RNA, 19 nt, Homo sapiens
  misc_RNA (1)...(19): siRNA sense strand
agaagaacgaagaagcuuu

SEQ ID NO: 789352 - RNA, 19 nt, Homo sapiens
  misc_RNA (1)...(19): siRNA sense strand
ucauggagugaaagacaua

SEQ ID NO: 789353 - RNA, 19 nt, Homo sapiens
  misc_RNA (1)...(19): siRNA sense strand
acaagaggagcucaagaga

SEQ ID NO: 789354 - RNA, 19 nt, Homo sapiens
  misc_RNA (1)...(19): siRNA sense strand
aaaguggagaccaagauga

SEQ ID NO: 789355 - RNA, 19 nt, Homo sapiens
  misc_RNA (1)...(19): siRNA sense strand
ucaagagauuggaagaaaa

SEQ ID NO: 789356 - RNA, 19 nt, Homo sapiens
  misc_RNA (1)...(19): siRNA sense strand
gcucaacgucauuaaagag

SEQ ID NO: 789357 - RNA, 19 nt, Homo sapiens
  misc_RNA (1)...(19): siRNA sense strand
uggaagaauuagccgaaca

SEQ ID NO: 789358 - RNA, 19 nt, Homo sapiens
  misc_RNA (1)...(19): siRNA sense strand
ccaaaauuaucgccaagau

SEQ ID NO: 789359 - RNA, 19 nt, Homo sapiens
  misc_RNA (1)...(19): siRNA sense strand
augaugaugaugccuauuu

SEQ ID NO: 789360 - RNA, 19 nt, Homo sapiens
  misc_RNA (1)...(19): siRNA sense strand
gaugaucagauugaagaau

SEQ ID NO: 789361 - RNA, 19 nt, Homo sapiens
  misc_RNA (1)...(19): siRNA sense strand
ccuaauaugcaaggacuga

SEQ ID NO: 789362 - RNA, 19 nt, Homo sapiens
  misc_RNA (1)...(19): siRNA sense strand
ccagcccgagagccuauua

SEQ ID NO: 789363 - RNA, 19 nt, Homo sapiens
  misc_RNA (1)...(19): siRNA sense strand
aaaauuaucgccaagauuc

SEQ ID NO: 789364 - RNA, 19 nt, Homo sapiens
  misc_RNA (1)...(19): siRNA sense strand
aggcagggcucaacgucau

SEQ ID NO: 789365 - RNA, 19 nt, Homo sapiens
  misc_RNA (1)...(19): siRNA sense strand
ggaggugcaguguuuaaaa

SEQ ID NO: 789366 - RNA, 19 nt, Homo sapiens
  misc_RNA (1)...(19): siRNA sense strand
gcaaggacugaccgaugau

SEQ ID NO: 789367 - RNA, 19 nt, Homo sapiens
  misc_RNA (1)...(19): siRNA sense strand
cauaaaguggagaccaaga

SEQ ID NO: 789368 - RNA, 19 nt, Homo sapiens
  misc_RNA (1)...(19): siRNA sense strand
gaggagcucaagagauugg

SEQ ID NO: 789369 - RNA, 19 nt, Homo sapiens
  misc_RNA (1)...(19): siRNA sense strand
gaggaaagcugguggaaag

SEQ ID NO: 789370 - RNA, 19 nt, Homo sapiens
  misc_RNA (1)...(19): siRNA sense strand
gaaagcugguggaaaguga

SEQ ID NO: 789371 - RNA, 19 nt, Homo sapiens
  misc_RNA (1)...(19): siRNA sense strand
caaggcaaauggugucaaa

SEQ ID NO: 789372 - RNA, 19 nt, Homo sapiens
  misc_RNA (1)...(19): siRNA sense strand
uggaugggcucacuacuaa

SEQ ID NO: 789373 - RNA, 19 nt, Homo sapiens
  misc_RNA (1)...(19): siRNA sense strand
guacacacaugauaaggau

SEQ ID NO: 789374 - RNA, 19 nt, Homo sapiens
  misc_RNA (1)...(19): siRNA sense strand
auaaggagccagugaaaua

SEQ ID NO: 789375 - RNA, 19 nt, Homo sapiens
  misc_RNA (1)...(19): siRNA sense strand
gagcaaaacugcaucaaau

SEQ ID NO: 789376 - RNA, 19 nt, Homo sapiens
  misc_RNA (1)...(19): siRNA sense strand
gcaaaacugcaucaaauua

SEQ ID NO: 789377 - RNA, 19 nt, Homo sapiens
  misc_RNA (1)...(19): siRNA sense strand
gcaaaggucaacacaguau

SEQ ID NO: 789378 - RNA, 19 nt, Homo sapiens
  misc_RNA (1)...(19): siRNA sense strand
ggacgaagcccagaucaca

SEQ ID NO: 789379 - RNA, 19 nt, Homo sapiens
  misc_RNA (1)...(19): siRNA sense strand
caggacggcucccucauug

SEQ ID NO: 789380 - RNA, 19 nt, Homo sapiens
  misc_RNA (1)...(19): siRNA sense strand
agaaagcccuaucgacuuc

SEQ ID NO: 789381 - RNA, 19 nt, Homo sapiens
  misc_RNA (1)...(19): siRNA sense strand
gcaaaauacuggucucaga

SEQ ID NO: 789382 - RNA, 19 nt, Homo sapiens
  misc_RNA (1)...(19): siRNA sense strand
ggagaagucugcaaaauac

SEQ ID NO: 789383 - RNA, 19 nt, Homo sapiens
  misc_RNA (1)...(19): siRNA sense strand
gugggcagaucaacagaaa

SEQ ID NO: 789384 - RNA, 19 nt, Homo sapiens
  misc_RNA (1)...(19): siRNA sense strand
gcaggacggcucccucauu

SEQ ID NO: 789385 - RNA, 19 nt, Homo sapiens
  misc_RNA (1)...(19): siRNA sense strand
guguacaccuugcgagaaa

SEQ ID NO: 789386 - RNA, 19 nt, Homo sapiens
  misc_RNA (1)...(19): siRNA sense strand
agacuguggugguggagua

SEQ ID NO: 789387 - RNA, 19 nt, Homo sapiens
  misc_RNA (1)...(19): siRNA sense strand
caacucagaagcacauaga

SEQ ID NO: 789388 - RNA, 19 nt, Homo sapiens
  misc_RNA (1)...(19): siRNA sense strand
cgacaggaaugaaccuuac

SEQ ID NO: 789389 - RNA, 19 nt, Homo sapiens
  misc_RNA (1)...(19): siRNA sense strand
caauggugcuuuacccaau

SEQ ID NO: 789390 - RNA, 19 nt, Homo sapiens
  misc_RNA (1)...(19): siRNA sense strand
cggguacaauggugcuuua

SEQ ID NO: 789391 - RNA, 19 nt, Homo sapiens
  misc_RNA (1)...(19): siRNA sense strand
caauaaggagccagugaaa

SEQ ID NO: 789392 - RNA, 19 nt, Homo sapiens
  misc_RNA (1)...(19): siRNA sense strand
cacaguauauccuacacuu

SEQ ID NO: 789393 - RNA, 19 nt, Homo sapiens
  misc_RNA (1)...(19): siRNA sense strand
guggagauguguacaccuu

SEQ ID NO: 789394 - RNA, 19 nt, Homo sapiens
  misc_RNA (1)...(19): siRNA sense strand
cugcaaaggucaacacagu

SEQ ID NO: 789395 - RNA, 19 nt, Homo sapiens
  misc_RNA (1)...(19): siRNA sense strand
caguauauccuacacuuug

SEQ ID NO: 789396 - RNA, 19 nt, Homo sapiens
  misc_RNA (1)...(19): siRNA sense strand
uaaggauacggauauguuu

SEQ ID NO: 789397 - RNA, 19 nt, Homo sapiens
  misc_RNA (1)...(19): siRNA sense strand
gaucacacagagcaccaua

SEQ ID NO: 789398 - RNA, 19 nt, Homo sapiens
  misc_RNA (1)...(19): siRNA sense strand
caacagaaagcccuaucga

SEQ ID NO: 789399 - RNA, 19 nt, Homo sapiens
  misc_RNA (1)...(19): siRNA sense strand
gcucggagaagucugcaaa

SEQ ID NO: 789400 - RNA, 19 nt, Homo sapiens
  misc_RNA (1)...(19): siRNA sense strand
gaugggcucacuacuaaug

SEQ ID NO: 789401 - RNA, 19 nt, Homo sapiens
  misc_RNA (1)...(19): siRNA sense strand
gcgacaggaaugaaccuua

SEQ ID NO: 789402 - RNA, 19 nt, Homo sapiens
  misc_RNA (1)...(19): siRNA sense strand
ccaauaaggagccagugaa

SEQ ID NO: 789403 - RNA, 19 nt, Homo sapiens
  misc_RNA (1)...(19): siRNA sense strand
caaaggucaacacaguaua

SEQ ID NO: 789404 - RNA, 19 nt, Homo sapiens
  misc_RNA (1)...(19): siRNA sense strand
cagcaccguccaugugaua

SEQ ID NO: 789405 - RNA, 19 nt, Homo sapiens
  misc_RNA (1)...(19): siRNA sense strand
cagaaagcccuaucgacuu

SEQ ID NO: 789406 - RNA, 19 nt, Homo sapiens
  misc_RNA (1)...(19): siRNA sense strand
ggaguacacacaugauaag

SEQ ID NO: 789407 - RNA, 19 nt, Homo sapiens
  misc_RNA (1)...(19): siRNA sense strand
caugauaaggauacggaua

SEQ ID NO: 789408 - RNA, 19 nt, Homo sapiens
  misc_RNA (1)...(19): siRNA sense strand
caacacaguauauccuaca

SEQ ID NO: 789409 - RNA, 19 nt, Homo sapiens
  misc_RNA (1)...(19): siRNA sense strand
gcaggaccgccaacucaug

SEQ ID NO: 789410 - RNA, 19 nt, Homo sapiens
  misc_RNA (1)...(19): siRNA sense strand
ggaaagcugguggaaagug

SEQ ID NO: 789411 - RNA, 19 nt, Homo sapiens
  misc_RNA (1)...(19): siRNA sense strand
ccacauggaugggcucacu

SEQ ID NO: 789412 - RNA, 19 nt, Homo sapiens
  misc_RNA (1)...(19): siRNA sense strand
ucacgcugcuugcccuuuc

SEQ ID NO: 789413 - RNA, 19 nt, Homo sapiens
  misc_RNA (1)...(19): siRNA sense strand
ccaaggcuaucagcugcaa

SEQ ID NO: 789414 - RNA, 19 nt, Homo sapiens
  misc_RNA (1)...(19): siRNA sense strand
uuacacagcacggauauuc

SEQ ID NO: 789415 - RNA, 19 nt, Homo sapiens
  misc_RNA (1)...(19): siRNA sense strand
guggaguacacacaugaua

SEQ ID NO: 789416 - RNA, 19 nt, Homo sapiens
  misc_RNA (1)...(19): siRNA sense strand
aaaggucaacacaguauau

SEQ ID NO: 789417 - RNA, 19 nt, Homo sapiens
  misc_RNA (1)...(19): siRNA sense strand
uggaguacacacaugauaa

SEQ ID NO: 789418 - RNA, 19 nt, Homo sapiens
  misc_RNA (1)...(19): siRNA sense strand
auaaggauacggauauguu

SEQ ID NO: 789419 - RNA, 19 nt, Homo sapiens
  misc_RNA (1)...(19): siRNA sense strand
acacagagcaccauaucca

SEQ ID NO: 789420 - RNA, 19 nt, Homo sapiens
  misc_RNA (1)...(19): siRNA sense strand
ucacacagagcaccauauc

SEQ ID NO: 789421 - RNA, 19 nt, Homo sapiens
  misc_RNA (1)...(19): siRNA sense strand
ggacggcucccucauugac

SEQ ID NO: 789422 - RNA, 19 nt, Homo sapiens
  misc_RNA (1)...(19): siRNA sense strand
cagaucccguugccucaug

SEQ ID NO: 789423 - RNA, 19 nt, Homo sapiens
  misc_RNA (1)...(19): siRNA sense strand
ugauaaggauacggauaug

SEQ ID NO: 789424 - RNA, 19 nt, Homo sapiens
  misc_RNA (1)...(19): siRNA sense strand
gagaaaaggcagcaaagug

SEQ ID NO: 789425 - RNA, 19 nt, Homo sapiens
  misc_RNA (1)...(19): siRNA sense strand
gaucgugugcgacaggaau

SEQ ID NO: 789426 - RNA, 19 nt, Homo sapiens
  misc_RNA (1)...(19): siRNA sense strand
gauagaggacggaggaaaa

SEQ ID NO: 789427 - RNA, 19 nt, Homo sapiens
  misc_RNA (1)...(19): siRNA sense strand
aagaggugguggaggagaa

SEQ ID NO: 789428 - RNA, 19 nt, Homo sapiens
  misc_RNA (1)...(19): siRNA sense strand
gauaaggauacggauaugu

SEQ ID NO: 789429 - RNA, 19 nt, Homo sapiens
  misc_RNA (1)...(19): siRNA sense strand
gaccgccaacucaugcuuu

SEQ ID NO: 789430 - RNA, 19 nt, Homo sapiens
  misc_RNA (1)...(19): siRNA sense strand
cuaauggcguccuggugau

SEQ ID NO: 789431 - RNA, 19 nt, Homo sapiens
  misc_RNA (1)...(19): siRNA sense strand
ccaagguccaauugacuga

SEQ ID NO: 789432 - RNA, 19 nt, Homo sapiens
  misc_RNA (1)...(19): siRNA sense strand
cggagaagucugcaaaaua

SEQ ID NO: 789433 - RNA, 19 nt, Homo sapiens
  misc_RNA (1)...(19): siRNA sense strand
gggcagaucaacagaaagc

SEQ ID NO: 789434 - RNA, 19 nt, Homo sapiens
  misc_RNA (1)...(19): siRNA sense strand
ggagcaaaacugcaucaaa

SEQ ID NO: 789435 - RNA, 19 nt, Homo sapiens
  misc_RNA (1)...(19): siRNA sense strand
ccuaucgacuucguuguca

SEQ ID NO: 789436 - RNA, 19 nt, Homo sapiens
  misc_RNA (1)...(19): siRNA sense strand
gucaacacaguauauccua

SEQ ID NO: 789437 - RNA, 19 nt, Homo sapiens
  misc_RNA (1)...(19): siRNA sense strand
cgaggaaagcugguggaaa

SEQ ID NO: 789438 - RNA, 19 nt, Homo sapiens
  misc_RNA (1)...(19): siRNA sense strand
ccuacacuuugucaaggaa

SEQ ID NO: 789439 - RNA, 19 nt, Homo sapiens
  misc_RNA (1)...(19): siRNA sense strand
gaggcaggauuuuauguag

SEQ ID NO: 789440 - RNA, 19 nt, Homo sapiens
  misc_RNA (1)...(19): siRNA sense strand
gugguggaguacacacaug

SEQ ID NO: 789441 - RNA, 19 nt, Homo sapiens
  misc_RNA (1)...(19): siRNA sense strand
gaacagcagaugggcuuuu

SEQ ID NO: 789442 - RNA, 19 nt, Homo sapiens
  misc_RNA (1)...(19): siRNA sense strand
gaagcccagaucacacaga

SEQ ID NO: 789443 - RNA, 19 nt, Homo sapiens
  misc_RNA (1)...(19): siRNA sense strand
gcaccguccaugugauauc

SEQ ID NO: 789444 - RNA, 19 nt, Homo sapiens
  misc_RNA (1)...(19): siRNA sense strand
ugucaaggaaucagacugu

SEQ ID NO: 789445 - RNA, 19 nt, Homo sapiens
  misc_RNA (1)...(19): siRNA sense strand
ggaccgccaacucaugcuu

SEQ ID NO: 789446 - RNA, 19 nt, Homo sapiens
  misc_RNA (1)...(19): siRNA sense strand
gaacuuuccugcuuuauug

SEQ ID NO: 789447 - RNA, 19 nt, Homo sapiens
  misc_RNA (1)...(19): siRNA sense strand
gaagaacuuuccugcuuua

SEQ ID NO: 789448 - RNA, 19 nt, Homo sapiens
  misc_RNA (1)...(19): siRNA sense strand
cacaggaucucaucaauua

SEQ ID NO: 789449 - RNA, 19 nt, Homo sapiens
  misc_RNA (1)...(19): siRNA sense strand
gcuaacaccuacaaucuua

SEQ ID NO: 789450 - RNA, 19 nt, Homo sapiens
  misc_RNA (1)...(19): siRNA sense strand
ggauuaugcugcaaaguua

SEQ ID NO: 789451 - RNA, 19 nt, Homo sapiens
  misc_RNA (1)...(19): siRNA sense strand
gaugaaaucuucccuguuc

SEQ ID NO: 789452 - RNA, 19 nt, Homo sapiens
  misc_RNA (1)...(19): siRNA sense strand
gaacaagguuggucugaag

SEQ ID NO: 789453 - RNA, 19 nt, Homo sapiens
  misc_RNA (1)...(19): siRNA sense strand
gaauaaucguuguauggua

SEQ ID NO: 789454 - RNA, 19 nt, Homo sapiens
  misc_RNA (1)...(19): siRNA sense strand
gacaguagauuucaugaga

SEQ ID NO: 789455 - RNA, 19 nt, Homo sapiens
  misc_RNA (1)...(19): siRNA sense strand
gaacaagugauuaugauga

SEQ ID NO: 789456 - RNA, 19 nt, Homo sapiens
  misc_RNA (1)...(19): siRNA sense strand
gacaauaccugcgugaauu

SEQ ID NO: 789457 - RNA, 19 nt, Homo sapiens
  misc_RNA (1)...(19): siRNA sense strand
gaacugccauucgaucuga

SEQ ID NO: 789458 - RNA, 19 nt, Homo sapiens
  misc_RNA (1)...(19): siRNA sense strand
gagauaagcucuaugucau

SEQ ID NO: 789459 - RNA, 19 nt, Homo sapiens
  misc_RNA (1)...(19): siRNA sense strand
gaaagaacaagauuugaug

SEQ ID NO: 789460 - RNA, 19 nt, Homo sapiens
  misc_RNA (1)...(19): siRNA sense strand
ccagaaauaugacccagaa

SEQ ID NO: 789461 - RNA, 19 nt, Homo sapiens
  misc_RNA (1)...(19): siRNA sense strand
uauggaggcuuaauguaua

SEQ ID NO: 789462 - RNA, 19 nt, Homo sapiens
  misc_RNA (1)...(19): siRNA sense strand
gauaagcucuaugucauug

SEQ ID NO: 789463 - RNA, 19 nt, Homo sapiens
  misc_RNA (1)...(19): siRNA sense strand
gaaauuguccagaaauaug

SEQ ID NO: 789464 - RNA, 19 nt, Homo sapiens
  misc_RNA (1)...(19): siRNA sense strand
gguagaaauuguccagaaa

SEQ ID NO: 789465 - RNA, 19 nt, Homo sapiens
  misc_RNA (1)...(19): siRNA sense strand
ucaggagucucuuuggaua

SEQ ID NO: 789466 - RNA, 19 nt, Homo sapiens
  misc_RNA (1)...(19): siRNA sense strand
ggauaacuguguugagguu

SEQ ID NO: 789467 - RNA, 19 nt, Homo sapiens
  misc_RNA (1)...(19): siRNA sense strand
ggagauaagcucuauguca

SEQ ID NO: 789468 - RNA, 19 nt, Homo sapiens
  misc_RNA (1)...(19): siRNA sense strand
gguugucaguaaagaauua

SEQ ID NO: 789469 - RNA, 19 nt, Homo sapiens
  misc_RNA (1)...(19): siRNA sense strand
ugaagaacuuuccugcuuu

SEQ ID NO: 789470 - RNA, 19 nt, Homo sapiens
  misc_RNA (1)...(19): siRNA sense strand
ggcaaucacuucagaggaa

SEQ ID NO: 789471 - RNA, 19 nt, Homo sapiens
  misc_RNA (1)...(19): siRNA sense strand
acagauaaauggaugcaaa

SEQ ID NO: 789472 - RNA, 19 nt, Homo sapiens
  misc_RNA (1)...(19): siRNA sense strand
gaauuacccaugacacuuu

SEQ ID NO: 789473 - RNA, 19 nt, Homo sapiens
  misc_RNA (1)...(19): siRNA sense strand
gauccucgguauaauaaau

SEQ ID NO: 789474 - RNA, 19 nt, Homo sapiens
  misc_RNA (1)...(19): siRNA sense strand
guaccgaacuugaacucuu

SEQ ID NO: 789475 - RNA, 19 nt, Homo sapiens
  misc_RNA (1)...(19): siRNA sense strand
gaagcuagcaauuaccaaa

SEQ ID NO: 789476 - RNA, 19 nt, Homo sapiens
  misc_RNA (1)...(19): siRNA sense strand
ggaaugaaagaacaagauu

SEQ ID NO: 789477 - RNA, 19 nt, Homo sapiens
  misc_RNA (1)...(19): siRNA sense strand
ggucagaguaauuaugaua

SEQ ID NO: 789478 - RNA, 19 nt, Homo sapiens
  misc_RNA (1)...(19): siRNA sense strand
aauauucgauuuccacuga

SEQ ID NO: 789479 - RNA, 19 nt, Homo sapiens
  misc_RNA (1)...(19): siRNA sense strand
caagauuugaugugcauua

SEQ ID NO: 789480 - RNA, 19 nt, Homo sapiens
  misc_RNA (1)...(19): siRNA sense strand
aacaguauauggaggcuua

SEQ ID NO: 789481 - RNA, 19 nt, Homo sapiens
  misc_RNA (1)...(19): siRNA sense strand
gauuugauccucgguauaa

SEQ ID NO: 789482 - RNA, 19 nt, Homo sapiens
  misc_RNA (1)...(19): siRNA sense strand
cauuugugcuuuccaguaa

SEQ ID NO: 789483 - RNA, 19 nt, Homo sapiens
  misc_RNA (1)...(19): siRNA sense strand
ccacucacuugguuacauu

SEQ ID NO: 789484 - RNA, 19 nt, Homo sapiens
  misc_RNA (1)...(19): siRNA sense strand
gaacuugaacucuuuaagg

SEQ ID NO: 789485 - RNA, 19 nt, Homo sapiens
  misc_RNA (1)...(19): siRNA sense strand
gcaaggcuuugaucagcuu

SEQ ID NO: 789486 - RNA, 19 nt, Homo sapiens
  misc_RNA (1)...(19): siRNA sense strand
gcuagcaauuaccaaauga

SEQ ID NO: 789487 - RNA, 19 nt, Homo sapiens
  misc_RNA (1)...(19): siRNA sense strand
ggaguugccgucuuugaaa

SEQ ID NO: 789488 - RNA, 19 nt, Homo sapiens
  misc_RNA (1)...(19): siRNA sense strand
gaggaacaagugauuauga

SEQ ID NO: 789489 - RNA, 19 nt, Homo sapiens
  misc_RNA (1)...(19): siRNA sense strand
caggaggaauuacccauga

SEQ ID NO: 789490 - RNA, 19 nt, Homo sapiens
  misc_RNA (1)...(19): siRNA sense strand
gcagcugguugucaguaaa

SEQ ID NO: 789491 - RNA, 19 nt, Homo sapiens
  misc_RNA (1)...(19): siRNA sense strand
aaagaugaguggcauaaag

SEQ ID NO: 789492 - RNA, 19 nt, Homo sapiens
  misc_RNA (1)...(19): siRNA sense strand
ggacauuuguaugcaguug

SEQ ID NO: 789493 - RNA, 19 nt, Homo sapiens
  misc_RNA (1)...(19): siRNA sense strand
uagaaggauugcuuuguga

SEQ ID NO: 789494 - RNA, 19 nt, Homo sapiens
  misc_RNA (1)...(19): siRNA sense strand
gaugaaagggcacaagaau

SEQ ID NO: 789495 - RNA, 19 nt, Homo sapiens
  misc_RNA (1)...(19): siRNA sense strand
ucaauuacgugcagacagu

SEQ ID NO: 789496 - RNA, 19 nt, Homo sapiens
  misc_RNA (1)...(19): siRNA sense strand
gcugcaaaguuaaugaaga

SEQ ID NO: 789497 - RNA, 19 nt, Homo sapiens
  misc_RNA (1)...(19): siRNA sense strand
ggaagacccucggauggau

SEQ ID NO: 789498 - RNA, 19 nt, Homo sapiens
  misc_RNA (1)...(19): siRNA sense strand
cgacuugcauuugugcuuu

SEQ ID NO: 789499 - RNA, 19 nt, Homo sapiens
  misc_RNA (1)...(19): siRNA sense strand
cugaagaacuuuccugcuu

SEQ ID NO: 789500 - RNA, 19 nt, Homo sapiens
  misc_RNA (1)...(19): siRNA sense strand
caccuacaaucuuauagaa

SEQ ID NO: 789501 - RNA, 19 nt, Homo sapiens
  misc_RNA (1)...(19): siRNA sense strand
gcacuguaccgaacuugaa

SEQ ID NO: 789502 - RNA, 19 nt, Homo sapiens
  misc_RNA (1)...(19): siRNA sense strand
ucuaagcugugaauacuau

SEQ ID NO: 789503 - RNA, 19 nt, Homo sapiens
  misc_RNA (1)...(19): siRNA sense strand
gcagguugcaucauuaaau

SEQ ID NO: 789504 - RNA, 19 nt, Homo sapiens
  misc_RNA (1)...(19): siRNA sense strand
caaaugaugccauauaugc

SEQ ID NO: 789505 - RNA, 19 nt, Homo sapiens
  misc_RNA (1)...(19): siRNA sense strand
cugcaaaguuaaugaagaa

SEQ ID NO: 789506 - RNA, 19 nt, Homo sapiens
  misc_RNA (1)...(19): siRNA sense strand
ugacuccacucacuugguu

SEQ ID NO: 789507 - RNA, 19 nt, Homo sapiens
  misc_RNA (1)...(19): siRNA sense strand
gcaaaaggcuccaaugacu

SEQ ID NO: 789508 - RNA, 19 nt, Homo sapiens
  misc_RNA (1)...(19): siRNA sense strand
ugacccagauacagauaaa

SEQ ID NO: 789509 - RNA, 19 nt, Homo sapiens
  misc_RNA (1)...(19): siRNA sense strand
caagguuggucugaagaaa

SEQ ID NO: 789510 - RNA, 19 nt, Homo sapiens
  misc_RNA (1)...(19): siRNA sense strand
guauugcugucauuggaaa

SEQ ID NO: 789511 - RNA, 19 nt, Homo sapiens
  misc_RNA (1)...(19): siRNA sense strand
uaccgaacuugaacucuuu

SEQ ID NO: 789512 - RNA, 19 nt, Homo sapiens
  misc_RNA (1)...(19): siRNA sense strand
ccuacaaucuuauagaagu

SEQ ID NO: 789513 - RNA, 19 nt, Homo sapiens
  misc_RNA (1)...(19): siRNA sense strand
gaugaguggcauaaaguuu

SEQ ID NO: 789514 - RNA, 19 nt, Homo sapiens
  misc_RNA (1)...(19): siRNA sense strand
gaauuacggauguaugaug

SEQ ID NO: 789515 - RNA, 19 nt, Homo sapiens
  misc_RNA (1)...(19): siRNA sense strand
gcauuugugcuuuccagua

SEQ ID NO: 789516 - RNA, 19 nt, Homo sapiens
  misc_RNA (1)...(19): siRNA sense strand
gaauagaaggauugcuuug

SEQ ID NO: 789517 - RNA, 19 nt, Homo sapiens
  misc_RNA (1)...(19): siRNA sense strand
gagguuggacgaauugcua

SEQ ID NO: 789518 - RNA, 19 nt, Homo sapiens
  misc_RNA (1)...(19): siRNA sense strand
ccaauugccgccauguuaa

SEQ ID NO: 789519 - RNA, 19 nt, Homo sapiens
  misc_RNA (1)...(19): siRNA sense strand
gaaagugucccuugguaac

SEQ ID NO: 789520 - RNA, 19 nt, Homo sapiens
  misc_RNA (1)...(19): siRNA sense strand
gcagacaguagauuucaug

SEQ ID NO: 789521 - RNA, 19 nt, Homo sapiens
  misc_RNA (1)...(19): siRNA sense strand
cccaauugccgccauguua

SEQ ID NO: 789522 - RNA, 19 nt, Homo sapiens
  misc_RNA (1)...(19): siRNA sense strand
ugaaagggcacaagaaugg

SEQ ID NO: 789523 - RNA, 19 nt, Homo sapiens
  misc_RNA (1)...(19): siRNA sense strand
ucacuugguuacauuagga

SEQ ID NO: 789524 - RNA, 19 nt, Homo sapiens
  misc_RNA (1)...(19): siRNA sense strand
ccagugaugcagucagaua

SEQ ID NO: 789525 - RNA, 19 nt, Homo sapiens
  misc_RNA (1)...(19): siRNA sense strand
gaagaauauucgauuucca

SEQ ID NO: 789526 - RNA, 19 nt, Homo sapiens
  misc_RNA (1)...(19): siRNA sense strand
ggaauuacccaugacacuu

SEQ ID NO: 789527 - RNA, 19 nt, Homo sapiens
  misc_RNA (1)...(19): siRNA sense strand
ccacaggaucucaucaauu

SEQ ID NO: 789528 - RNA, 19 nt, Homo sapiens
  misc_RNA (1)...(19): siRNA sense strand
uaucaggagucucuuugga

SEQ ID NO: 789529 - RNA, 19 nt, Homo sapiens
  misc_RNA (1)...(19): siRNA sense strand
guucuaagcugugaauacu

SEQ ID NO: 789530 - RNA, 19 nt, Homo sapiens
  misc_RNA (1)...(19): siRNA sense strand
gcacauucuuucacuugag

SEQ ID NO: 789531 - RNA, 19 nt, Homo sapiens
  misc_RNA (1)...(19): siRNA sense strand
agauagaacugccauucga

SEQ ID NO: 789532 - RNA, 19 nt, Homo sapiens
  misc_RNA (1)...(19): siRNA sense strand
uaccaaaugaugccauaua

SEQ ID NO: 789533 - RNA, 19 nt, Homo sapiens
  misc_RNA (1)...(19): siRNA sense strand
gaaggauugcuuugugaug

SEQ ID NO: 789534 - RNA, 19 nt, Homo sapiens
  misc_RNA (1)...(19): siRNA sense strand
gaguggagcuauguugcaa

SEQ ID NO: 789535 - RNA, 19 nt, Homo sapiens
  misc_RNA (1)...(19): siRNA sense strand
cagauuugauccucgguau

SEQ ID NO: 789536 - RNA, 19 nt, Homo sapiens
  misc_RNA (1)...(19): siRNA sense strand
gauuugaugugcauuaagc

SEQ ID NO: 789537 - RNA, 19 nt, Homo sapiens
  misc_RNA (1)...(19): siRNA sense strand
cugcaaaacuuucucuuaa

SEQ ID NO: 789538 - RNA, 19 nt, Homo sapiens
  misc_RNA (1)...(19): siRNA sense strand
ugaacaagguuggucugaa

SEQ ID NO: 789539 - RNA, 19 nt, Homo sapiens
  misc_RNA (1)...(19): siRNA sense strand
ggauugcuuugugauguga

SEQ ID NO: 789540 - RNA, 19 nt, Homo sapiens
  misc_RNA (1)...(19): siRNA sense strand
ggaggcuuaauguauauuu

SEQ ID NO: 789541 - RNA, 19 nt, Homo sapiens
  misc_RNA (1)...(19): siRNA sense strand
guauauggaggcuuaaugu

SEQ ID NO: 789542 - RNA, 19 nt, Homo sapiens
  misc_RNA (1)...(19): siRNA sense strand
gcaugguauugcugucauu

SEQ ID NO: 789543 - RNA, 19 nt, Homo sapiens
  misc_RNA (1)...(19): siRNA sense strand
ggaacaagugauuaugaug

SEQ ID NO: 789544 - RNA, 19 nt, Homo sapiens
  misc_RNA (1)...(19): siRNA sense strand
ggaauaaucguuguauggu

SEQ ID NO: 789545 - RNA, 19 nt, Homo sapiens
  misc_RNA (1)...(19): siRNA sense strand
auagaaggauugcuuugug

SEQ ID NO: 789546 - RNA, 19 nt, Homo sapiens
  misc_RNA (1)...(19): siRNA sense strand
ggaaauccaugccauauga

SEQ ID NO: 789547 - RNA, 19 nt, Homo sapiens
  misc_RNA (1)...(19): siRNA sense strand
ggaagggccugcaagagaa

SEQ ID NO: 789548 - RNA, 19 nt, Homo sapiens
  misc_RNA (1)...(19): siRNA sense strand
ggacaacacguacaucgua

SEQ ID NO: 789549 - RNA, 19 nt, Homo sapiens
  misc_RNA (1)...(19): siRNA sense strand
ucacagaccucaucaccaa

SEQ ID NO: 789550 - RNA, 19 nt, Homo sapiens
  misc_RNA (1)...(19): siRNA sense strand
gcacaucgaccacgagauu

SEQ ID NO: 789551 - RNA, 19 nt, Homo sapiens
  misc_RNA (1)...(19): siRNA sense strand
ggaccaagaugacaaggau

SEQ ID NO: 789552 - RNA, 19 nt, Homo sapiens
  misc_RNA (1)...(19): siRNA sense strand
gcaacuggcuuccuagagu

SEQ ID NO: 789553 - RNA, 19 nt, Homo sapiens
  misc_RNA (1)...(19): siRNA sense strand
caacuggcuuccuagagua

SEQ ID NO: 789554 - RNA, 19 nt, Homo sapiens
  misc_RNA (1)...(19): siRNA sense strand
gaggcaagcugcuacacaa

SEQ ID NO: 789555 - RNA, 19 nt, Homo sapiens
  misc_RNA (1)...(19): siRNA sense strand
gcaaguacguccacaacca

SEQ ID NO: 789556 - RNA, 19 nt, Homo sapiens
  misc_RNA (1)...(19): siRNA sense strand
ggaaauccauccucaagcu

SEQ ID NO: 789557 - RNA, 19 nt, Homo sapiens
  misc_RNA (1)...(19): siRNA sense strand
gcaccagcgccaacaauaa

SEQ ID NO: 789558 - RNA, 19 nt, Homo sapiens
  misc_RNA (1)...(19): siRNA sense strand
ggaggaagcuaugagcaau

SEQ ID NO: 789559 - RNA, 19 nt, Homo sapiens
  misc_RNA (1)...(19): siRNA sense strand
gaagccggcugucugaauc

SEQ ID NO: 789560 - RNA, 19 nt, Homo sapiens
  misc_RNA (1)...(19): siRNA sense strand
gagcagaagcgcaagaaga

SEQ ID NO: 789561 - RNA, 19 nt, Homo sapiens
  misc_RNA (1)...(19): siRNA sense strand
gcuccagucugcauccuuu

SEQ ID NO: 789562 - RNA, 19 nt, Homo sapiens
  misc_RNA (1)...(19): siRNA sense strand
gcaugaggaccaucaauga

SEQ ID NO: 789563 - RNA, 19 nt, Homo sapiens
  misc_RNA (1)...(19): siRNA sense strand
ggacaaacacuggaucaug

SEQ ID NO: 789564 - RNA, 19 nt, Homo sapiens
  misc_RNA (1)...(19): siRNA sense strand
acaauuuccucuucuguga

SEQ ID NO: 789565 - RNA, 19 nt, Homo sapiens
  misc_RNA (1)...(19): siRNA sense strand
ggagacgauuuacaacaug

SEQ ID NO: 789566 - RNA, 19 nt, Homo sapiens
  misc_RNA (1)...(19): siRNA sense strand
gcacguccaagaagaugua

SEQ ID NO: 789567 - RNA, 19 nt, Homo sapiens
  misc_RNA (1)...(19): siRNA sense strand
gcacaggccaguccucaug

SEQ ID NO: 789568 - RNA, 19 nt, Homo sapiens
  misc_RNA (1)...(19): siRNA sense strand
ccacaucguccucaacauu

SEQ ID NO: 789569 - RNA, 19 nt, Homo sapiens
  misc_RNA (1)...(19): siRNA sense strand
gcacgagagccgcaccuuu

SEQ ID NO: 789570 - RNA, 19 nt, Homo sapiens
  misc_RNA (1)...(19): siRNA sense strand
gacaacacguacaucguau

SEQ ID NO: 789571 - RNA, 19 nt, Homo sapiens
  misc_RNA (1)...(19): siRNA sense strand
ggaaggcugggaagguuaa

SEQ ID NO: 789572 - RNA, 19 nt, Homo sapiens
  misc_RNA (1)...(19): siRNA sense strand
ccaugcaggugaugaacaa

SEQ ID NO: 789573 - RNA, 19 nt, Homo sapiens
  misc_RNA (1)...(19): siRNA sense strand
ucaagcgccugcagaacaa

SEQ ID NO: 789574 - RNA, 19 nt, Homo sapiens
  misc_RNA (1)...(19): siRNA sense strand
caagagagacaaugacaag

SEQ ID NO: 789575 - RNA, 19 nt, Homo sapiens
  misc_RNA (1)...(19): siRNA sense strand
gcaagcugcuacacaagag

SEQ ID NO: 789576 - RNA, 19 nt, Homo sapiens
  misc_RNA (1)...(19): siRNA sense strand
ggugcuacauccuagagaa

SEQ ID NO: 789577 - RNA, 19 nt, Homo sapiens
  misc_RNA (1)...(19): siRNA sense strand
ggagagaggcaagcugcua

SEQ ID NO: 789578 - RNA, 19 nt, Homo sapiens
  misc_RNA (1)...(19): siRNA sense strand
cgggaaguaucuuaaugaa

SEQ ID NO: 789579 - RNA, 19 nt, Homo sapiens
  misc_RNA (1)...(19): siRNA sense strand
gaggaagcuaugagcaaua

SEQ ID NO: 789580 - RNA, 19 nt, Homo sapiens
  misc_RNA (1)...(19): siRNA sense strand
gugagcagcugggacagaa

SEQ ID NO: 789581 - RNA, 19 nt, Homo sapiens
  misc_RNA (1)...(19): siRNA sense strand
ccacggcccugaggauuca

SEQ ID NO: 789582 - RNA, 19 nt, Homo sapiens
  misc_RNA (1)...(19): siRNA sense strand
uugaaacccugcagaacaa

SEQ ID NO: 789583 - RNA, 19 nt, Homo sapiens
  misc_RNA (1)...(19): siRNA sense strand
guacaaggccagcuauguc

SEQ ID NO: 789584 - RNA, 19 nt, Homo sapiens
  misc_RNA (1)...(19): siRNA sense strand
cgaccacgguuaccacauc

SEQ ID NO: 789585 - RNA, 19 nt, Homo sapiens
  misc_RNA (1)...(19): siRNA sense strand
acaccuacaccaacaauga

SEQ ID NO: 789586 - RNA, 19 nt, Homo sapiens
  misc_RNA (1)...(19): siRNA sense strand
gaccugggacuuaaagaug

SEQ ID NO: 789587 - RNA, 19 nt, Homo sapiens
  misc_RNA (1)...(19): siRNA sense strand
gaaguacaaggccagcuau

SEQ ID NO: 789588 - RNA, 19 nt, Homo sapiens
  misc_RNA (1)...(19): siRNA sense strand
ggaagccggcugucugaau

SEQ ID NO: 789589 - RNA, 19 nt, Homo sapiens
  misc_RNA (1)...(19): siRNA sense strand
ccauggagacgauuuacaa

SEQ ID NO: 789590 - RNA, 19 nt, Homo sapiens
  misc_RNA (1)...(19): siRNA sense strand
aaacgcaucucagcacauc

SEQ ID NO: 789591 - RNA, 19 nt, Homo sapiens
  misc_RNA (1)...(19): siRNA sense strand
agugugaccuggaccugua

SEQ ID NO: 789592 - RNA, 19 nt, Homo sapiens
  misc_RNA (1)...(19): siRNA sense strand
acauggaccugggacuuaa

SEQ ID NO: 789593 - RNA, 19 nt, Homo sapiens
  misc_RNA (1)...(19): siRNA sense strand
ggacaagguguggcuguug

SEQ ID NO: 789594 - RNA, 19 nt, Homo sapiens
  misc_RNA (1)...(19): siRNA sense strand
cacgagagccgcaccuuug

SEQ ID NO: 789595 - RNA, 19 nt, Homo sapiens
  misc_RNA (1)...(19): siRNA sense strand
ggaccugggacuuaaagau

SEQ ID NO: 789596 - RNA, 19 nt, Homo sapiens
  misc_RNA (1)...(19): siRNA sense strand
uuaagaaccugagggaagu

SEQ ID NO: 789597 - RNA, 19 nt, Homo sapiens
  misc_RNA (1)...(19): siRNA sense strand
cauaugaguuugacaucag

SEQ ID NO: 789598 - RNA, 19 nt, Homo sapiens
  misc_RNA (1)...(19): siRNA sense strand
ggaacggggugaaagagaa

SEQ ID NO: 789599 - RNA, 19 nt, Homo sapiens
  misc_RNA (1)...(19): siRNA sense strand
ccauaugaguuugacauca

SEQ ID NO: 789600 - RNA, 19 nt, Homo sapiens
  misc_RNA (1)...(19): siRNA sense strand
gggaaggcugggaagguua

SEQ ID NO: 789601 - RNA, 19 nt, Homo sapiens
  misc_RNA (1)...(19): siRNA sense strand
cacaacaccuacaccaaca

SEQ ID NO: 789602 - RNA, 19 nt, Homo sapiens
  misc_RNA (1)...(19): siRNA sense strand
gcgccaacaauaacacgua

SEQ ID NO: 789603 - RNA, 19 nt, Homo sapiens
  misc_RNA (1)...(19): siRNA sense strand
gcugaugaaugcagugaac

SEQ ID NO: 789604 - RNA, 19 nt, Homo sapiens
  misc_RNA (1)...(19): siRNA sense strand
uggagacgauuuacaacau

SEQ ID NO: 789605 - RNA, 19 nt, Homo sapiens
  misc_RNA (1)...(19): siRNA sense strand
ccuaccagcugaugaaugc

SEQ ID NO: 789606 - RNA, 19 nt, Homo sapiens
  misc_RNA (1)...(19): siRNA sense strand
cuagaguacuuugaucuca

SEQ ID NO: 789607 - RNA, 19 nt, Homo sapiens
  misc_RNA (1)...(19): siRNA sense strand
gcagaagcgcaagaagaaa

SEQ ID NO: 789608 - RNA, 19 nt, Homo sapiens
  misc_RNA (1)...(19): siRNA sense strand
ccaaccucgugcccaagua

SEQ ID NO: 789609 - RNA, 19 nt, Homo sapiens
  misc_RNA (1)...(19): siRNA sense strand
cauccucacuggcaaguac

SEQ ID NO: 789610 - RNA, 19 nt, Homo sapiens
  misc_RNA (1)...(19): siRNA sense strand
ggacuuaaagauggaggaa

SEQ ID NO: 789611 - RNA, 19 nt, Homo sapiens
  misc_RNA (1)...(19): siRNA sense strand
ucaaccagcuacacguaca

SEQ ID NO: 789612 - RNA, 19 nt, Homo sapiens
  misc_RNA (1)...(19): siRNA sense strand
ccgacuacuccaaggauua

SEQ ID NO: 789613 - RNA, 19 nt, Homo sapiens
  misc_RNA (1)...(19): siRNA sense strand
ggauucagccccacaauau

SEQ ID NO: 789614 - RNA, 19 nt, Homo sapiens
  misc_RNA (1)...(19): siRNA sense strand
cuggaggccuucccgacua

SEQ ID NO: 789615 - RNA, 19 nt, Homo sapiens
  misc_RNA (1)...(19): siRNA sense strand
gaagcacggcuccgacuac

SEQ ID NO: 789616 - RNA, 19 nt, Homo sapiens
  misc_RNA (1)...(19): siRNA sense strand
caacaccuacaccaacaau

SEQ ID NO: 789617 - RNA, 19 nt, Homo sapiens
  misc_RNA (1)...(19): siRNA sense strand
acacguacaucguauacac

SEQ ID NO: 789618 - RNA, 19 nt, Homo sapiens
  misc_RNA (1)...(19): siRNA sense strand
caacacguacaucguauac

SEQ ID NO: 789619 - RNA, 19 nt, Homo sapiens
  misc_RNA (1)...(19): siRNA sense strand
cacauggaauucaccaaca

SEQ ID NO: 789620 - RNA, 19 nt, Homo sapiens
  misc_RNA (1)...(19): siRNA sense strand
ugggaaggcugggaagguu

SEQ ID NO: 789621 - RNA, 19 nt, Homo sapiens
  misc_RNA (1)...(19): siRNA sense strand
agaagaaacuccgcaagcu

SEQ ID NO: 789622 - RNA, 19 nt, Homo sapiens
  misc_RNA (1)...(19): siRNA sense strand
gccagaagaaugugacugu

SEQ ID NO: 789623 - RNA, 19 nt, Homo sapiens
  misc_RNA (1)...(19): siRNA sense strand
gggaaauccaugccauaug

SEQ ID NO: 789624 - RNA, 19 nt, Homo sapiens
  misc_RNA (1)...(19): siRNA sense strand
ccaaggauuaccucacaga

SEQ ID NO: 789625 - RNA, 19 nt, Homo sapiens
  misc_RNA (1)...(19): siRNA sense strand
gaccuggaccuguacaagu

SEQ ID NO: 789626 - RNA, 19 nt, Homo sapiens
  misc_RNA (1)...(19): siRNA sense strand
ggcaagcugcuacacaaga

SEQ ID NO: 789627 - RNA, 19 nt, Homo sapiens
  misc_RNA (1)...(19): siRNA sense strand
ccaaugacagcgugagcuu

SEQ ID NO: 789628 - RNA, 19 nt, Homo sapiens
  misc_RNA (1)...(19): siRNA sense strand
gaagcuaugagcaauacag

SEQ ID NO: 789629 - RNA, 19 nt, Homo sapiens
  misc_RNA (1)...(19): siRNA sense strand
aaagauggaggaagcuaug

SEQ ID NO: 789630 - RNA, 19 nt, Homo sapiens
  misc_RNA (1)...(19): siRNA sense strand
uaaagauggaggaagcuau

SEQ ID NO: 789631 - RNA, 19 nt, Homo sapiens
  misc_RNA (1)...(19): siRNA sense strand
aggaagggccugcaagaga

SEQ ID NO: 789632 - RNA, 19 nt, Homo sapiens
  misc_RNA (1)...(19): siRNA sense strand
agaaguacaaggccagcua

SEQ ID NO: 789633 - RNA, 19 nt, Homo sapiens
  misc_RNA (1)...(19): siRNA sense strand
ccaugaagcccauccacau

SEQ ID NO: 789634 - RNA, 19 nt, Homo sapiens
  misc_RNA (1)...(19): siRNA sense strand
ucacgccgagcuacaacua

SEQ ID NO: 789635 - RNA, 19 nt, Homo sapiens
  misc_RNA (1)...(19): siRNA sense strand
aaacauggaccugggacuu

SEQ ID NO: 789636 - RNA, 19 nt, Homo sapiens
  misc_RNA (1)...(19): siRNA sense strand
gacagaaguggcagugugu

SEQ ID NO: 789637 - RNA, 19 nt, Homo sapiens
  misc_RNA (1)...(19): siRNA sense strand
acagggauguccucaacca

SEQ ID NO: 789638 - RNA, 19 nt, Homo sapiens
  misc_RNA (1)...(19): siRNA sense strand
ccucaaccagcuacacgua

SEQ ID NO: 789639 - RNA, 19 nt, Homo sapiens
  misc_RNA (1)...(19): siRNA sense strand
cuccaaggauuaccucaca

SEQ ID NO: 789640 - RNA, 19 nt, Homo sapiens
  misc_RNA (1)...(19): siRNA sense strand
ccucuucugugaauuugca

SEQ ID NO: 789641 - RNA, 19 nt, Homo sapiens
  misc_RNA (1)...(19): siRNA sense strand
gacucacaauuuccucuuc

SEQ ID NO: 789642 - RNA, 19 nt, Homo sapiens
  misc_RNA (1)...(19): siRNA sense strand
gcuacauccuagagaacga

SEQ ID NO: 789643 - RNA, 19 nt, Homo sapiens
  misc_RNA (1)...(19): siRNA sense strand
gagcagcugggacagaagu

SEQ ID NO: 789644 - RNA, 19 nt, Homo sapiens
  misc_RNA (1)...(19): siRNA sense strand
ccaaguaccagcgugugaa

SEQ ID NO: 789645 - RNA, 19 nt, Homo sapiens
  misc_RNA (1)...(19): siRNA sense strand
gggaaguaucuuaaugaau

SEQ ID NO: 789646 - RNA, 19 nt, Homo sapiens
  misc_RNA (1)...(19): siRNA sense strand
ggaaauccaugccauauga

SEQ ID NO: 789647 - RNA, 19 nt, Homo sapiens
  misc_RNA (1)...(19): siRNA sense strand
ggaagggccugcaagagaa

SEQ ID NO: 789648 - RNA, 19 nt, Homo sapiens
  misc_RNA (1)...(19): siRNA sense strand
ggacaacacguacaucgua

SEQ ID NO: 789649 - RNA, 19 nt, Homo sapiens
  misc_RNA (1)...(19): siRNA sense strand
ucacagaccucaucaccaa

SEQ ID NO: 789650 - RNA, 19 nt, Homo sapiens
  misc_RNA (1)...(19): siRNA sense strand
gcacaucgaccacgagauu

SEQ ID NO: 789651 - RNA, 19 nt, Homo sapiens
  misc_RNA (1)...(19): siRNA sense strand
ggaccaagaugacaaggau

SEQ ID NO: 789652 - RNA, 19 nt, Homo sapiens
  misc_RNA (1)...(19): siRNA sense strand
gcaacuggcuuccuagagu

SEQ ID NO: 789653 - RNA, 19 nt, Homo sapiens
  misc_RNA (1)...(19): siRNA sense strand
caacuggcuuccuagagua

SEQ ID NO: 789654 - RNA, 19 nt, Homo sapiens
  misc_RNA (1)...(19): siRNA sense strand
gaggcaagcugcuacacaa

SEQ ID NO: 789655 - RNA, 19 nt, Homo sapiens
  misc_RNA (1)...(19): siRNA sense strand
gcaaguacguccacaacca

SEQ ID NO: 789656 - RNA, 19 nt, Homo sapiens
  misc_RNA (1)...(19): siRNA sense strand
ggaaauccauccucaagcu

SEQ ID NO: 789657 - RNA, 19 nt, Homo sapiens
  misc_RNA (1)...(19): siRNA sense strand
gcaccagcgccaacaauaa

SEQ ID NO: 789658 - RNA, 19 nt, Homo sapiens
  misc_RNA (1)...(19): siRNA sense strand
ggaggaagcuaugagcaau

SEQ ID NO: 789659 - RNA, 19 nt, Homo sapiens
  misc_RNA (1)...(19): siRNA sense strand
gaagccggcugucugaauc

SEQ ID NO: 789660 - RNA, 19 nt, Homo sapiens
  misc_RNA (1)...(19): siRNA sense strand
gagcagaagcgcaagaaga

SEQ ID NO: 789661 - RNA, 19 nt, Homo sapiens
  misc_RNA (1)...(19): siRNA sense strand
gcuccagucugcauccuuu

SEQ ID NO: 789662 - RNA, 19 nt, Homo sapiens
  misc_RNA (1)...(19): siRNA sense strand
gcaugaggaccaucaauga

SEQ ID NO: 789663 - RNA, 19 nt, Homo sapiens
  misc_RNA (1)...(19): siRNA sense strand
ggacaaacacuggaucaug

SEQ ID NO: 789664 - RNA, 19 nt, Homo sapiens
  misc_RNA (1)...(19): siRNA sense strand
acaauuuccucuucuguga

SEQ ID NO: 789665 - RNA, 19 nt, Homo sapiens
  misc_RNA (1)...(19): siRNA sense strand
ggagacgauuuacaacaug

SEQ ID NO: 789666 - RNA, 19 nt, Homo sapiens
  misc_RNA (1)...(19): siRNA sense strand
gcacguccaagaagaugua

SEQ ID NO: 789667 - RNA, 19 nt, Homo sapiens
  misc_RNA (1)...(19): siRNA sense strand
gcacaggccaguccucaug

SEQ ID NO: 789668 - RNA, 19 nt, Homo sapiens
  misc_RNA (1)...(19): siRNA sense strand
ccacaucguccucaacauu

SEQ ID NO: 789669 - RNA, 19 nt, Homo sapiens
  misc_RNA (1)...(19): siRNA sense strand
gcacgagagccgcaccuuu

SEQ ID NO: 789670 - RNA, 19 nt, Homo sapiens
  misc_RNA (1)...(19): siRNA sense strand
gacaacacguacaucguau

SEQ ID NO: 789671 - RNA, 19 nt, Homo sapiens
  misc_RNA (1)...(19): siRNA sense strand
ggaaggcugggaagguuaa

SEQ ID NO: 789672 - RNA, 19 nt, Homo sapiens
  misc_RNA (1)...(19): siRNA sense strand
ccaugcaggugaugaacaa

SEQ ID NO: 789673 - RNA, 19 nt, Homo sapiens
  misc_RNA (1)...(19): siRNA sense strand
ucaagcgccugcagaacaa

SEQ ID NO: 789674 - RNA, 19 nt, Homo sapiens
  misc_RNA (1)...(19): siRNA sense strand
caagagagacaaugacaag

SEQ ID NO: 789675 - RNA, 19 nt, Homo sapiens
  misc_RNA (1)...(19): siRNA sense strand
gcaagcugcuacacaagag

SEQ ID NO: 789676 - RNA, 19 nt, Homo sapiens
  misc_RNA (1)...(19): siRNA sense strand
ggugcuacauccuagagaa

SEQ ID NO: 789677 - RNA, 19 nt, Homo sapiens
  misc_RNA (1)...(19): siRNA sense strand
ggagagaggcaagcugcua

SEQ ID NO: 789678 - RNA, 19 nt, Homo sapiens
  misc_RNA (1)...(19): siRNA sense strand
cgggaaguaucuuaaugaa

SEQ ID NO: 789679 - RNA, 19 nt, Homo sapiens
  misc_RNA (1)...(19): siRNA sense strand
gaggaagcuaugagcaaua

SEQ ID NO: 789680 - RNA, 19 nt, Homo sapiens
  misc_RNA (1)...(19): siRNA sense strand
gugagcagcugggacagaa

SEQ ID NO: 789681 - RNA, 19 nt, Homo sapiens
  misc_RNA (1)...(19): siRNA sense strand
ccacggcccugaggauuca

SEQ ID NO: 789682 - RNA, 19 nt, Homo sapiens
  misc_RNA (1)...(19): siRNA sense strand
uugaaacccugcagaacaa

SEQ ID NO: 789683 - RNA, 19 nt, Homo sapiens
  misc_RNA (1)...(19): siRNA sense strand
guacaaggccagcuauguc

SEQ ID NO: 789684 - RNA, 19 nt, Homo sapiens
  misc_RNA (1)...(19): siRNA sense strand
cgaccacgguuaccacauc

SEQ ID NO: 789685 - RNA, 19 nt, Homo sapiens
  misc_RNA (1)...(19): siRNA sense strand
acaccuacaccaacaauga

SEQ ID NO: 789686 - RNA, 19 nt, Homo sapiens
  misc_RNA (1)...(19): siRNA sense strand
gaccugggacuuaaagaug

SEQ ID NO: 789687 - RNA, 19 nt, Homo sapiens
  misc_RNA (1)...(19): siRNA sense strand
gaaguacaaggccagcuau

SEQ ID NO: 789688 - RNA, 19 nt, Homo sapiens
  misc_RNA (1)...(19): siRNA sense strand
ggaagccggcugucugaau

SEQ ID NO: 789689 - RNA, 19 nt, Homo sapiens
  misc_RNA (1)...(19): siRNA sense strand
ccauggagacgauuuacaa

SEQ ID NO: 789690 - RNA, 19 nt, Homo sapiens
  misc_RNA (1)...(19): siRNA sense strand
aaacgcaucucagcacauc

SEQ ID NO: 789691 - RNA, 19 nt, Homo sapiens
  misc_RNA (1)...(19): siRNA sense strand
agugugaccuggaccugua

SEQ ID NO: 789692 - RNA, 19 nt, Homo sapiens
  misc_RNA (1)...(19): siRNA sense strand
acauggaccugggacuuaa

SEQ ID NO: 789693 - RNA, 19 nt, Homo sapiens
  misc_RNA (1)...(19): siRNA sense strand
ggacaagguguggcuguug

SEQ ID NO: 789694 - RNA, 19 nt, Homo sapiens
  misc_RNA (1)...(19): siRNA sense strand
cacgagagccgcaccuuug

SEQ ID NO: 789695 - RNA, 19 nt, Homo sapiens
  misc_RNA (1)...(19): siRNA sense strand
ggaccugggacuuaaagau

SEQ ID NO: 789696 - RNA, 19 nt, Homo sapiens
  misc_RNA (1)...(19): siRNA sense strand
uuaagaaccugagggaagu

SEQ ID NO: 789697 - RNA, 19 nt, Homo sapiens
  misc_RNA (1)...(19): siRNA sense strand
cauaugaguuugacaucag

SEQ ID NO: 789698 - RNA, 19 nt, Homo sapiens
  misc_RNA (1)...(19): siRNA sense strand
ggaacggggugaaagagaa

SEQ ID NO: 789699 - RNA, 19 nt, Homo sapiens
  misc_RNA (1)...(19): siRNA sense strand
ccauaugaguuugacauca

SEQ ID NO: 789700 - RNA, 19 nt, Homo sapiens
  misc_RNA (1)...(19): siRNA sense strand
gggaaggcugggaagguua

SEQ ID NO: 789701 - RNA, 19 nt, Homo sapiens
  misc_RNA (1)...(19): siRNA sense strand
cacaacaccuacaccaaca

SEQ ID NO: 789702 - RNA, 19 nt, Homo sapiens
  misc_RNA (1)...(19): siRNA sense strand
gcgccaacaauaacacgua

SEQ ID NO: 789703 - RNA, 19 nt, Homo sapiens
  misc_RNA (1)...(19): siRNA sense strand
gcugaugaaugcagugaac

SEQ ID NO: 789704 - RNA, 19 nt, Homo sapiens
  misc_RNA (1)...(19): siRNA sense strand
uggagacgauuuacaacau

SEQ ID NO: 789705 - RNA, 19 nt, Homo sapiens
  misc_RNA (1)...(19): siRNA sense strand
ccuaccagcugaugaaugc

SEQ ID NO: 789706 - RNA, 19 nt, Homo sapiens
  misc_RNA (1)...(19): siRNA sense strand
cuagaguacuuugaucuca

SEQ ID NO: 789707 - RNA, 19 nt, Homo sapiens
  misc_RNA (1)...(19): siRNA sense strand
gcagaagcgcaagaagaaa

SEQ ID NO: 789708 - RNA, 19 nt, Homo sapiens
  misc_RNA (1)...(19): siRNA sense strand
ccaaccucgugcccaagua

SEQ ID NO: 789709 - RNA, 19 nt, Homo sapiens
  misc_RNA (1)...(19): siRNA sense strand
cauccucacuggcaaguac

SEQ ID NO: 789710 - RNA, 19 nt, Homo sapiens
  misc_RNA (1)...(19): siRNA sense strand
ggacuuaaagauggaggaa

SEQ ID NO: 789711 - RNA, 19 nt, Homo sapiens
  misc_RNA (1)...(19): siRNA sense strand
ucaaccagcuacacguaca

SEQ ID NO: 789712 - RNA, 19 nt, Homo sapiens
  misc_RNA (1)...(19): siRNA sense strand
ccgacuacuccaaggauua

SEQ ID NO: 789713 - RNA, 19 nt, Homo sapiens
  misc_RNA (1)...(19): siRNA sense strand
ggauucagccccacaauau

SEQ ID NO: 789714 - RNA, 19 nt, Homo sapiens
  misc_RNA (1)...(19): siRNA sense strand
cuggaggccuucccgacua

SEQ ID NO: 789715 - RNA, 19 nt, Homo sapiens
  misc_RNA (1)...(19): siRNA sense strand
gaagcacggcuccgacuac

SEQ ID NO: 789716 - RNA, 19 nt, Homo sapiens
  misc_RNA (1)...(19): siRNA sense strand
caacaccuacaccaacaau

SEQ ID NO: 789717 - RNA, 19 nt, Homo sapiens
  misc_RNA (1)...(19): siRNA sense strand
acacguacaucguauacac

SEQ ID NO: 789718 - RNA, 19 nt, Homo sapiens
  misc_RNA (1)...(19): siRNA sense strand
caacacguacaucguauac

SEQ ID NO: 789719 - RNA, 19 nt, Homo sapiens
  misc_RNA (1)...(19): siRNA sense strand
cacauggaauucaccaaca

SEQ ID NO: 789720 - RNA, 19 nt, Homo sapiens
  misc_RNA (1)...(19): siRNA sense strand
ugggaaggcugggaagguu

SEQ ID NO: 789721 - RNA, 19 nt, Homo sapiens
  misc_RNA (1)...(19): siRNA sense strand
agaagaaacuccgcaagcu

SEQ ID NO: 789722 - RNA, 19 nt, Homo sapiens
  misc_RNA (1)...(19): siRNA sense strand
gccagaagaaugugacugu

SEQ ID NO: 789723 - RNA, 19 nt, Homo sapiens
  misc_RNA (1)...(19): siRNA sense strand
gggaaauccaugccauaug

SEQ ID NO: 789724 - RNA, 19 nt, Homo sapiens
  misc_RNA (1)...(19): siRNA sense strand
ccaaggauuaccucacaga

SEQ ID NO: 789725 - RNA, 19 nt, Homo sapiens
  misc_RNA (1)...(19): siRNA sense strand
gaccuggaccuguacaagu

SEQ ID NO: 789726 - RNA, 19 nt, Homo sapiens
  misc_RNA (1)...(19): siRNA sense strand
ggcaagcugcuacacaaga

SEQ ID NO: 789727 - RNA, 19 nt, Homo sapiens
  misc_RNA (1)...(19): siRNA sense strand
ccaaugacagcgugagcuu

SEQ ID NO: 789728 - RNA, 19 nt, Homo sapiens
  misc_RNA (1)...(19): siRNA sense strand
gaagcuaugagcaauacag

SEQ ID NO: 789729 - RNA, 19 nt, Homo sapiens
  misc_RNA (1)...(19): siRNA sense strand
aaagauggaggaagcuaug

SEQ ID NO: 789730 - RNA, 19 nt, Homo sapiens
  misc_RNA (1)...(19): siRNA sense strand
uaaagauggaggaagcuau

SEQ ID NO: 789731 - RNA, 19 nt, Homo sapiens
  misc_RNA (1)...(19): siRNA sense strand
aggaagggccugcaagaga

SEQ ID NO: 789732 - RNA, 19 nt, Homo sapiens
  misc_RNA (1)...(19): siRNA sense strand
agaaguacaaggccagcua

SEQ ID NO: 789733 - RNA, 19 nt, Homo sapiens
  misc_RNA (1)...(19): siRNA sense strand
ccaugaagcccauccacau

SEQ ID NO: 789734 - RNA, 19 nt, Homo sapiens
  misc_RNA (1)...(19): siRNA sense strand
ucacgccgagcuacaacua

SEQ ID NO: 789735 - RNA, 19 nt, Homo sapiens
  misc_RNA (1)...(19): siRNA sense strand
aaacauggaccugggacuu

SEQ ID NO: 789736 - RNA, 19 nt, Homo sapiens
  misc_RNA (1)...(19): siRNA sense strand
gacagaaguggcagugugu

SEQ ID NO: 789737 - RNA, 19 nt, Homo sapiens
  misc_RNA (1)...(19): siRNA sense strand
acagggauguccucaacca

SEQ ID NO: 789738 - RNA, 19 nt, Homo sapiens
  misc_RNA (1)...(19): siRNA sense strand
ccucaaccagcuacacgua

SEQ ID NO: 789739 - RNA, 19 nt, Homo sapiens
  misc_RNA (1)...(19): siRNA sense strand
cuccaaggauuaccucaca

SEQ ID NO: 789740 - RNA, 19 nt, Homo sapiens
  misc_RNA (1)...(19): siRNA sense strand
ccucuucugugaauuugca

SEQ ID NO: 789741 - RNA, 19 nt, Homo sapiens
  misc_RNA (1)...(19): siRNA sense strand
gacucacaauuuccucuuc

SEQ ID NO: 789742 - RNA, 19 nt, Homo sapiens
  misc_RNA (1)...(19): siRNA sense strand
gcuacauccuagagaacga

SEQ ID NO: 789743 - RNA, 19 nt, Homo sapiens
  misc_RNA (1)...(19): siRNA sense strand
gagcagcugggacagaagu

SEQ ID NO: 789744 - RNA, 19 nt, Homo sapiens
  misc_RNA (1)...(19): siRNA sense strand
ccaaguaccagcgugugaa

SEQ ID NO: 789745 - RNA, 19 nt, Homo sapiens
  misc_RNA (1)...(19): siRNA sense strand
gggaaguaucuuaaugaau

SEQ ID NO: 789746 - RNA, 19 nt, Homo sapiens
  misc_RNA (1)...(19): siRNA sense strand
ucaagacaguccugaaaua

SEQ ID NO: 789747 - RNA, 19 nt, Homo sapiens
  misc_RNA (1)...(19): siRNA sense strand
gaacgauuguggacccuau

SEQ ID NO: 789748 - RNA, 19 nt, Homo sapiens
  misc_RNA (1)...(19): siRNA sense strand
caagaacgaucgggaggaa

SEQ ID NO: 789749 - RNA, 19 nt, Homo sapiens
  misc_RNA (1)...(19): siRNA sense strand
gcucaagacaguccugaaa

SEQ ID NO: 789750 - RNA, 19 nt, Homo sapiens
  misc_RNA (1)...(19): siRNA sense strand
cccagaagaucgaguugaa

SEQ ID NO: 789751 - RNA, 19 nt, Homo sapiens
  misc_RNA (1)...(19): siRNA sense strand
agacagagaugcggaacga

SEQ ID NO: 789752 - RNA, 19 nt, Homo sapiens
  misc_RNA (1)...(19): siRNA sense strand
cgcagaggcuguccuucua

SEQ ID NO: 789753 - RNA, 19 nt, Homo sapiens
  misc_RNA (1)...(19): siRNA sense strand
ggucgagauuuccaucaug

SEQ ID NO: 789754 - RNA, 19 nt, Homo sapiens
  misc_RNA (1)...(19): siRNA sense strand
gaaauuccccugccacuau

SEQ ID NO: 789755 - RNA, 19 nt, Homo sapiens
  misc_RNA (1)...(19): siRNA sense strand
ggagaucaccgugcacuuc

SEQ ID NO: 789756 - RNA, 19 nt, Homo sapiens
  misc_RNA (1)...(19): siRNA sense strand
guaguggccugcgugaaug

SEQ ID NO: 789757 - RNA, 19 nt, Homo sapiens
  misc_RNA (1)...(19): siRNA sense strand
ugagaaugcugaggacugu

SEQ ID NO: 789758 - RNA, 19 nt, Homo sapiens
  misc_RNA (1)...(19): siRNA sense strand
gcucagcaaccucauguuc

SEQ ID NO: 789759 - RNA, 19 nt, Homo sapiens
  misc_RNA (1)...(19): siRNA sense strand
gcuacgacacgcugcagua

SEQ ID NO: 789760 - RNA, 19 nt, Homo sapiens
  misc_RNA (1)...(19): siRNA sense strand
gaagcaaugccuccgucaa

SEQ ID NO: 789761 - RNA, 19 nt, Homo sapiens
  misc_RNA (1)...(19): siRNA sense strand
agacaguccugaaauacgu

SEQ ID NO: 789762 - RNA, 19 nt, Homo sapiens
  misc_RNA (1)...(19): siRNA sense strand
uuccuuggcuucaauacuu

SEQ ID NO: 789763 - RNA, 19 nt, Homo sapiens
  misc_RNA (1)...(19): siRNA sense strand
ugacuagcgacaacuacua

SEQ ID NO: 789764 - RNA, 19 nt, Homo sapiens
  misc_RNA (1)...(19): siRNA sense strand
uggcacggcucaagacagu

SEQ ID NO: 789765 - RNA, 19 nt, Homo sapiens
  misc_RNA (1)...(19): siRNA sense strand
acuaucagaucugcaagaa

SEQ ID NO: 789766 - RNA, 19 nt, Homo sapiens
  misc_RNA (1)...(19): siRNA sense strand
ccuucugccucacaaacua

SEQ ID NO: 789767 - RNA, 19 nt, Homo sapiens
  misc_RNA (1)...(19): siRNA sense strand
ccugaaauacgugcuguuu

SEQ ID NO: 789768 - RNA, 19 nt, Homo sapiens
  misc_RNA (1)...(19): siRNA sense strand
caagacaguccugaaauac

SEQ ID NO: 789769 - RNA, 19 nt, Homo sapiens
  misc_RNA (1)...(19): siRNA sense strand
caugaugacuagcgacaac

SEQ ID NO: 789770 - RNA, 19 nt, Homo sapiens
  misc_RNA (1)...(19): siRNA sense strand
acaccuccaugaugacuag

SEQ ID NO: 789771 - RNA, 19 nt, Homo sapiens
  misc_RNA (1)...(19): siRNA sense strand
ucacgcggguggucgagau

SEQ ID NO: 789772 - RNA, 19 nt, Homo sapiens
  misc_RNA (1)...(19): siRNA sense strand
cagagacagacaacuggua

SEQ ID NO: 789773 - RNA, 19 nt, Homo sapiens
  misc_RNA (1)...(19): siRNA sense strand
cguaguggccugcgugaau

SEQ ID NO: 789774 - RNA, 19 nt, Homo sapiens
  misc_RNA (1)...(19): siRNA sense strand
gaccgguggcugcaaguga

SEQ ID NO: 789775 - RNA, 19 nt, Homo sapiens
  misc_RNA (1)...(19): siRNA sense strand
cagaggcuguccuucuaca

SEQ ID NO: 789776 - RNA, 19 nt, Homo sapiens
  misc_RNA (1)...(19): siRNA sense strand
gcccuuccuuggcuucaau

SEQ ID NO: 789777 - RNA, 19 nt, Homo sapiens
  misc_RNA (1)...(19): siRNA sense strand
caaugccuccgucaacguu

SEQ ID NO: 789778 - RNA, 19 nt, Homo sapiens
  misc_RNA (1)...(19): siRNA sense strand
gcaccgcaccgagaagcaa

SEQ ID NO: 789779 - RNA, 19 nt, Homo sapiens
  misc_RNA (1)...(19): siRNA sense strand
agaaugcugaggacuguga

SEQ ID NO: 789780 - RNA, 19 nt, Homo sapiens
  misc_RNA (1)...(19): siRNA sense strand
cccagaugcugugcuucua

SEQ ID NO: 789781 - RNA, 19 nt, Homo sapiens
  misc_RNA (1)...(19): siRNA sense strand
cuagcgacaacuacuacua

SEQ ID NO: 789782 - RNA, 19 nt, Homo sapiens
  misc_RNA (1)...(19): siRNA sense strand
acgacacgcugcaguacug

SEQ ID NO: 789783 - RNA, 19 nt, Homo sapiens
  misc_RNA (1)...(19): siRNA sense strand
cacccugccuagcaacuuc

SEQ ID NO: 789784 - RNA, 19 nt, Homo sapiens
  misc_RNA (1)...(19): siRNA sense strand
gcaaugccuccgucaacgu

SEQ ID NO: 789785 - RNA, 19 nt, Homo sapiens
  misc_RNA (1)...(19): siRNA sense strand
gccacuaucagaucugcaa

SEQ ID NO: 789786 - RNA, 19 nt, Homo sapiens
  misc_RNA (1)...(19): siRNA sense strand
gaaaagagcugcagaucua

SEQ ID NO: 789787 - RNA, 19 nt, Homo sapiens
  misc_RNA (1)...(19): siRNA sense strand
gaggugacauuaucuuaua

SEQ ID NO: 789788 - RNA, 19 nt, Homo sapiens
  misc_RNA (1)...(19): siRNA sense strand
gaagcgagccgcagacauu

SEQ ID NO: 789789 - RNA, 19 nt, Homo sapiens
  misc_RNA (1)...(19): siRNA sense strand
gagauuagcuaaggagaug

SEQ ID NO: 789790 - RNA, 19 nt, Homo sapiens
  misc_RNA (1)...(19): siRNA sense strand
ggaaucaugucauuaaguc

SEQ ID NO: 789791 - RNA, 19 nt, Homo sapiens
  misc_RNA (1)...(19): siRNA sense strand
cuaaggagaugcuguugaa

SEQ ID NO: 789792 - RNA, 19 nt, Homo sapiens
  misc_RNA (1)...(19): siRNA sense strand
uaaaugaacccaccauaga

SEQ ID NO: 789793 - RNA, 19 nt, Homo sapiens
  misc_RNA (1)...(19): siRNA sense strand
gcacaucccaggcguggua

SEQ ID NO: 789794 - RNA, 19 nt, Homo sapiens
  misc_RNA (1)...(19): siRNA sense strand
caauggaaauggauucaga

SEQ ID NO: 789795 - RNA, 19 nt, Homo sapiens
  misc_RNA (1)...(19): siRNA sense strand
ccaggaagguucauuuaca

SEQ ID NO: 789796 - RNA, 19 nt, Homo sapiens
  misc_RNA (1)...(19): siRNA sense strand
guauggagcgagcuaauaa

SEQ ID NO: 789797 - RNA, 19 nt, Homo sapiens
  misc_RNA (1)...(19): siRNA sense strand
caacacaaggaaauaauca

SEQ ID NO: 789798 - RNA, 19 nt, Homo sapiens
  misc_RNA (1)...(19): siRNA sense strand
caagugguguuugggacua

SEQ ID NO: 789799 - RNA, 19 nt, Homo sapiens
  misc_RNA (1)...(19): siRNA sense strand
gaaauaaucaaggguacau

SEQ ID NO: 789800 - RNA, 19 nt, Homo sapiens
  misc_RNA (1)...(19): siRNA sense strand
cgccucaacagucuaauua

SEQ ID NO: 789801 - RNA, 19 nt, Homo sapiens
  misc_RNA (1)...(19): siRNA sense strand
uggagauccugagagauua

SEQ ID NO: 789802 - RNA, 19 nt, Homo sapiens
  misc_RNA (1)...(19): siRNA sense strand
ccucaacagucuaauuaca

SEQ ID NO: 789803 - RNA, 19 nt, Homo sapiens
  misc_RNA (1)...(19): siRNA sense strand
guucauuuacacagcauua

SEQ ID NO: 789804 - RNA, 19 nt, Homo sapiens
  misc_RNA (1)...(19): siRNA sense strand
cuuauggaaucaugucauu

SEQ ID NO: 789805 - RNA, 19 nt, Homo sapiens
  misc_RNA (1)...(19): siRNA sense strand
uacaguaccuccagcaaca

SEQ ID NO: 789806 - RNA, 19 nt, Homo sapiens
  misc_RNA (1)...(19): siRNA sense strand
uagaggugacauuaucuua

SEQ ID NO: 789807 - RNA, 19 nt, Homo sapiens
  misc_RNA (1)...(19): siRNA sense strand
caauaaccaggacaucauu

SEQ ID NO: 789808 - RNA, 19 nt, Homo sapiens
  misc_RNA (1)...(19): siRNA sense strand
ucaacagucuaauuacagu

SEQ ID NO: 789809 - RNA, 19 nt, Homo sapiens
  misc_RNA (1)...(19): siRNA sense strand
gccaugaccggacuuguug

SEQ ID NO: 789810 - RNA, 19 nt, Homo sapiens
  misc_RNA (1)...(19): siRNA sense strand
gcacaccacacaauaacca

SEQ ID NO: 789811 - RNA, 19 nt, Homo sapiens
  misc_RNA (1)...(19): siRNA sense strand
cagcggcaauggaaaugga

SEQ ID NO: 789812 - RNA, 19 nt, Homo sapiens
  misc_RNA (1)...(19): siRNA sense strand
ggacaacuucuuugauggu

SEQ ID NO: 789813 - RNA, 19 nt, Homo sapiens
  misc_RNA (1)...(19): siRNA sense strand
ugguagaggugacauuauc

SEQ ID NO: 789814 - RNA, 19 nt, Homo sapiens
  misc_RNA (1)...(19): siRNA sense strand
caccggcucuccuuaugga

SEQ ID NO: 789815 - RNA, 19 nt, Homo sapiens
  misc_RNA (1)...(19): siRNA sense strand
augaauggcuacagcaaug

SEQ ID NO: 789816 - RNA, 19 nt, Homo sapiens
  misc_RNA (1)...(19): siRNA sense strand
cuggagauccugagagauu

SEQ ID NO: 789817 - RNA, 19 nt, Homo sapiens
  misc_RNA (1)...(19): siRNA sense strand
ucuaaacaguucugcaaag

SEQ ID NO: 789818 - RNA, 19 nt, Homo sapiens
  misc_RNA (1)...(19): siRNA sense strand
gcuaaggagaugcuguuga

SEQ ID NO: 789819 - RNA, 19 nt, Homo sapiens
  misc_RNA (1)...(19): siRNA sense strand
ggggacaacuucuuugaug

SEQ ID NO: 789820 - RNA, 19 nt, Homo sapiens
  misc_RNA (1)...(19): siRNA sense strand
ccugagagauuagcuaagg

SEQ ID NO: 789821 - RNA, 19 nt, Homo sapiens
  misc_RNA (1)...(19): siRNA sense strand
cauccuccauccucccauu

SEQ ID NO: 789822 - RNA, 19 nt, Homo sapiens
  misc_RNA (1)...(19): siRNA sense strand
caacagucuaauuacagua

SEQ ID NO: 789823 - RNA, 19 nt, Homo sapiens
  misc_RNA (1)...(19): siRNA sense strand
cgugguagaggugacauua

SEQ ID NO: 789824 - RNA, 19 nt, Homo sapiens
  misc_RNA (1)...(19): siRNA sense strand
uauggcacaccacacaaua

SEQ ID NO: 789825 - RNA, 19 nt, Homo sapiens
  misc_RNA (1)...(19): siRNA sense strand
cuaaacaguucugcaaagg

SEQ ID NO: 789826 - RNA, 19 nt, Homo sapiens
  misc_RNA (1)...(19): siRNA sense strand
caacacaagcagcaucucu

SEQ ID NO: 789827 - RNA, 19 nt, Homo sapiens
  misc_RNA (1)...(19): siRNA sense strand
guagaggugacauuaucuu

SEQ ID NO: 789828 - RNA, 19 nt, Homo sapiens
  misc_RNA (1)...(19): siRNA sense strand
aaacagaagagugccuuug

SEQ ID NO: 789829 - RNA, 19 nt, Homo sapiens
  misc_RNA (1)...(19): siRNA sense strand
ccacgccucaacagucuaa

SEQ ID NO: 789830 - RNA, 19 nt, Homo sapiens
  misc_RNA (1)...(19): siRNA sense strand
gauccugagagauuagcua

SEQ ID NO: 789831 - RNA, 19 nt, Homo sapiens
  misc_RNA (1)...(19): siRNA sense strand
uuaaaugaacccaccauag

SEQ ID NO: 789832 - RNA, 19 nt, Homo sapiens
  misc_RNA (1)...(19): siRNA sense strand
aaucuaaacaguucugcaa

SEQ ID NO: 789833 - RNA, 19 nt, Homo sapiens
  misc_RNA (1)...(19): siRNA sense strand
gagucaacacaaggaaaua

SEQ ID NO: 789834 - RNA, 19 nt, Homo sapiens
  misc_RNA (1)...(19): siRNA sense strand
ggucagcaucucagaguca

SEQ ID NO: 789835 - RNA, 19 nt, Homo sapiens
  misc_RNA (1)...(19): siRNA sense strand
ggaaauaaucaaggguaca

SEQ ID NO: 789836 - RNA, 19 nt, Homo sapiens
  misc_RNA (1)...(19): siRNA sense strand
caaacagaagagugccuuu

SEQ ID NO: 789837 - RNA, 19 nt, Homo sapiens
  misc_RNA (1)...(19): siRNA sense strand
caugaccggacuuguugua

SEQ ID NO: 789838 - RNA, 19 nt, Homo sapiens
  misc_RNA (1)...(19): siRNA sense strand
uaaacaguucugcaaagga

SEQ ID NO: 789839 - RNA, 19 nt, Homo sapiens
  misc_RNA (1)...(19): siRNA sense strand
ccauuuuccucuucaguuu

SEQ ID NO: 789840 - RNA, 19 nt, Homo sapiens
  misc_RNA (1)...(19): siRNA sense strand
guaccuccagcaacaguau

SEQ ID NO: 789841 - RNA, 19 nt, Homo sapiens
  misc_RNA (1)...(19): siRNA sense strand
ggguacauccgcaacacaa

SEQ ID NO: 789842 - RNA, 19 nt, Homo sapiens
  misc_RNA (1)...(19): siRNA sense strand
gaucuaguggaagcucuuu

SEQ ID NO: 789843 - RNA, 19 nt, Homo sapiens
  misc_RNA (1)...(19): siRNA sense strand
uagcuaaggagaugcuguu

SEQ ID NO: 789844 - RNA, 19 nt, Homo sapiens
  misc_RNA (1)...(19): siRNA sense strand
caggaagguucauuuacac

SEQ ID NO: 789845 - RNA, 19 nt, Homo sapiens
  misc_RNA (1)...(19): siRNA sense strand
caucucagagucaacacaa

SEQ ID NO: 789846 - RNA, 19 nt, Homo sapiens
  misc_RNA (1)...(19): siRNA sense strand
gaugggaaucaacuccuau

SEQ ID NO: 789847 - RNA, 19 nt, Homo sapiens
  misc_RNA (1)...(19): siRNA sense strand
acaguggcaugaugggaau

SEQ ID NO: 789848 - RNA, 19 nt, Homo sapiens
  misc_RNA (1)...(19): siRNA sense strand
gagaugcuguugaaaagag

SEQ ID NO: 789849 - RNA, 19 nt, Homo sapiens
  misc_RNA (1)...(19): siRNA sense strand
uguauggagcgagcuaaua

SEQ ID NO: 789850 - RNA, 19 nt, Homo sapiens
  misc_RNA (1)...(19): siRNA sense strand
acaauaaccaggacaucau

SEQ ID NO: 789851 - RNA, 19 nt, Homo sapiens
  misc_RNA (1)...(19): siRNA sense strand
cacaauaaccaggacauca

SEQ ID NO: 789852 - RNA, 19 nt, Homo sapiens
  misc_RNA (1)...(19): siRNA sense strand
guuugggacuaugcuugua

SEQ ID NO: 789853 - RNA, 19 nt, Homo sapiens
  misc_RNA (1)...(19): siRNA sense strand
agaggugacauuaucuuau

SEQ ID NO: 789854 - RNA, 19 nt, Homo sapiens
  misc_RNA (1)...(19): siRNA sense strand
agacuauggcuuccagaga

SEQ ID NO: 789855 - RNA, 19 nt, Homo sapiens
  misc_RNA (1)...(19): siRNA sense strand
guaugaauggcuacagcaa

SEQ ID NO: 789856 - RNA, 19 nt, Homo sapiens
  misc_RNA (1)...(19): siRNA sense strand
cuucuuugauggucuccaa

SEQ ID NO: 789857 - RNA, 19 nt, Homo sapiens
  misc_RNA (1)...(19): siRNA sense strand
acacaaggaaauaaucaag

SEQ ID NO: 789858 - RNA, 19 nt, Homo sapiens
  misc_RNA (1)...(19): siRNA sense strand
agucaacacaaggaaauaa

SEQ ID NO: 789859 - RNA, 19 nt, Homo sapiens
  misc_RNA (1)...(19): siRNA sense strand
cagagucaacacaaggaaa

SEQ ID NO: 789860 - RNA, 19 nt, Homo sapiens
  misc_RNA (1)...(19): siRNA sense strand
ggagauccugagagauuag

SEQ ID NO: 789861 - RNA, 19 nt, Homo sapiens
  misc_RNA (1)...(19): siRNA sense strand
uccuggagauccugagaga

SEQ ID NO: 789862 - RNA, 19 nt, Homo sapiens
  misc_RNA (1)...(19): siRNA sense strand
ucaacacaaggaaauaauc

SEQ ID NO: 789863 - RNA, 19 nt, Homo sapiens
  misc_RNA (1)...(19): siRNA sense strand
agagucaacacaaggaaau

SEQ ID NO: 789864 - RNA, 19 nt, Homo sapiens
  misc_RNA (1)...(19): siRNA sense strand
ucuaguggaagcucuuuau

SEQ ID NO: 789865 - RNA, 19 nt, Homo sapiens
  misc_RNA (1)...(19): siRNA sense strand
gaacugcucuucaaauuua

SEQ ID NO: 789866 - RNA, 19 nt, Homo sapiens
  misc_RNA (1)...(19): siRNA sense strand
gcagccagcuucugaauua

SEQ ID NO: 789867 - RNA, 19 nt, Homo sapiens
  misc_RNA (1)...(19): siRNA sense strand
uugcaaagcucauguauua

SEQ ID NO: 789868 - RNA, 19 nt, Homo sapiens
  misc_RNA (1)...(19): siRNA sense strand
gagaagauguggacuauga

SEQ ID NO: 789869 - RNA, 19 nt, Homo sapiens
  misc_RNA (1)...(19): siRNA sense strand
gcauuuaacuguuugcaua

SEQ ID NO: 789870 - RNA, 19 nt, Homo sapiens
  misc_RNA (1)...(19): siRNA sense strand
ggacaagugugcacaauug

SEQ ID NO: 789871 - RNA, 19 nt, Homo sapiens
  misc_RNA (1)...(19): siRNA sense strand
ggacagaaacgauuacuaa

SEQ ID NO: 789872 - RNA, 19 nt, Homo sapiens
  misc_RNA (1)...(19): siRNA sense strand
gcucauagauuuaagcaaa

SEQ ID NO: 789873 - RNA, 19 nt, Homo sapiens
  misc_RNA (1)...(19): siRNA sense strand
gugcaaagguucaacauuu

SEQ ID NO: 789874 - RNA, 19 nt, Homo sapiens
  misc_RNA (1)...(19): siRNA sense strand
ugaaauaacuccacuuguu

SEQ ID NO: 789875 - RNA, 19 nt, Homo sapiens
  misc_RNA (1)...(19): siRNA sense strand
ggacauaggcgcuuucaaa

SEQ ID NO: 789876 - RNA, 19 nt, Homo sapiens
  misc_RNA (1)...(19): siRNA sense strand
gaaggaauuuguucacuug

SEQ ID NO: 789877 - RNA, 19 nt, Homo sapiens
  misc_RNA (1)...(19): siRNA sense strand
gaaggaaacuuacccaaag

SEQ ID NO: 789878 - RNA, 19 nt, Homo sapiens
  misc_RNA (1)...(19): siRNA sense strand
gaaauaacuccacuuguuu

SEQ ID NO: 789879 - RNA, 19 nt, Homo sapiens
  misc_RNA (1)...(19): siRNA sense strand
ucacauuccugcucucuua

SEQ ID NO: 789880 - RNA, 19 nt, Homo sapiens
  misc_RNA (1)...(19): siRNA sense strand
ccaaagagacauaguauuu

SEQ ID NO: 789881 - RNA, 19 nt, Homo sapiens
  misc_RNA (1)...(19): siRNA sense strand
gaagaaaggacaacgauga

SEQ ID NO: 789882 - RNA, 19 nt, Homo sapiens
  misc_RNA (1)...(19): siRNA sense strand
gaaagaagcagacuuguag

SEQ ID NO: 789883 - RNA, 19 nt, Homo sapiens
  misc_RNA (1)...(19): siRNA sense strand
uaacuccacuuguuuguaa

SEQ ID NO: 789884 - RNA, 19 nt, Homo sapiens
  misc_RNA (1)...(19): siRNA sense strand
gaaacaaucucagcauuca

SEQ ID NO: 789885 - RNA, 19 nt, Homo sapiens
  misc_RNA (1)...(19): siRNA sense strand
gaauuucucuugcuuagga

SEQ ID NO: 789886 - RNA, 19 nt, Homo sapiens
  misc_RNA (1)...(19): siRNA sense strand
ggaggaagguacucuuuga

SEQ ID NO: 789887 - RNA, 19 nt, Homo sapiens
  misc_RNA (1)...(19): siRNA sense strand
gaacuaugguuuucacuua

SEQ ID NO: 789888 - RNA, 19 nt, Homo sapiens
  misc_RNA (1)...(19): siRNA sense strand
gcucagaggauuugaauuu

SEQ ID NO: 789889 - RNA, 19 nt, Homo sapiens
  misc_RNA (1)...(19): siRNA sense strand
ggacgagguuguucuguug

SEQ ID NO: 789890 - RNA, 19 nt, Homo sapiens
  misc_RNA (1)...(19): siRNA sense strand
gggaacugcucauagauuu

SEQ ID NO: 789891 - RNA, 19 nt, Homo sapiens
  misc_RNA (1)...(19): siRNA sense strand
gagauuggcuccuuugcuu

SEQ ID NO: 789892 - RNA, 19 nt, Homo sapiens
  misc_RNA (1)...(19): siRNA sense strand
aaggaaagcuggcaguuaa

SEQ ID NO: 789893 - RNA, 19 nt, Homo sapiens
  misc_RNA (1)...(19): siRNA sense strand
gaagcugucugucucuuga

SEQ ID NO: 789894 - RNA, 19 nt, Homo sapiens
  misc_RNA (1)...(19): siRNA sense strand
ggccuuauguagaucauua

SEQ ID NO: 789895 - RNA, 19 nt, Homo sapiens
  misc_RNA (1)...(19): siRNA sense strand
guggaaaccuggugcuaua

SEQ ID NO: 789896 - RNA, 19 nt, Homo sapiens
  misc_RNA (1)...(19): siRNA sense strand
ggaagagaauguuguuuua

SEQ ID NO: 789897 - RNA, 19 nt, Homo sapiens
  misc_RNA (1)...(19): siRNA sense strand
gaaggaaagcuggcaguua

SEQ ID NO: 789898 - RNA, 19 nt, Homo sapiens
  misc_RNA (1)...(19): siRNA sense strand
caaagaaggagauaccaua

SEQ ID NO: 789899 - RNA, 19 nt, Homo sapiens
  misc_RNA (1)...(19): siRNA sense strand
gcauuggccuuguauauca

SEQ ID NO: 789900 - RNA, 19 nt, Homo sapiens
  misc_RNA (1)...(19): siRNA sense strand
ggaauuuguucacuuguug

SEQ ID NO: 789901 - RNA, 19 nt, Homo sapiens
  misc_RNA (1)...(19): siRNA sense strand
gaaaggaguaagugaaauu

SEQ ID NO: 789902 - RNA, 19 nt, Homo sapiens
  misc_RNA (1)...(19): siRNA sense strand
gaggucaugucauuaauau

SEQ ID NO: 789903 - RNA, 19 nt, Homo sapiens
  misc_RNA (1)...(19): siRNA sense strand
ccaaugggauggcaaaguu

SEQ ID NO: 789904 - RNA, 19 nt, Homo sapiens
  misc_RNA (1)...(19): siRNA sense strand
gaaaggacaacgaugauug

SEQ ID NO: 789905 - RNA, 19 nt, Homo sapiens
  misc_RNA (1)...(19): siRNA sense strand
uuacauagcuucauuacca

SEQ ID NO: 789906 - RNA, 19 nt, Homo sapiens
  misc_RNA (1)...(19): siRNA sense strand
gaagggagcacaagcuuug

SEQ ID NO: 789907 - RNA, 19 nt, Homo sapiens
  misc_RNA (1)...(19): siRNA sense strand
gcagauaaaguugguguua

SEQ ID NO: 789908 - RNA, 19 nt, Homo sapiens
  misc_RNA (1)...(19): siRNA sense strand
gaacugcucauagauuuaa

SEQ ID NO: 789909 - RNA, 19 nt, Homo sapiens
  misc_RNA (1)...(19): siRNA sense strand
ccaaguggcugcagugguu

SEQ ID NO: 789910 - RNA, 19 nt, Homo sapiens
  misc_RNA (1)...(19): siRNA sense strand
caacagagccauugccuau

SEQ ID NO: 789911 - RNA, 19 nt, Homo sapiens
  misc_RNA (1)...(19): siRNA sense strand
ucuaauggcuccuuucuug

SEQ ID NO: 789912 - RNA, 19 nt, Homo sapiens
  misc_RNA (1)...(19): siRNA sense strand
gaugaugacugggaauauu

SEQ ID NO: 789913 - RNA, 19 nt, Homo sapiens
  misc_RNA (1)...(19): siRNA sense strand
ucagagauccuguccauaa

SEQ ID NO: 789914 - RNA, 19 nt, Homo sapiens
  misc_RNA (1)...(19): siRNA sense strand
cauaaucagucuccaaaga

SEQ ID NO: 789915 - RNA, 19 nt, Homo sapiens
  misc_RNA (1)...(19): siRNA sense strand
caaaggaacacaacacuug

SEQ ID NO: 789916 - RNA, 19 nt, Homo sapiens
  misc_RNA (1)...(19): siRNA sense strand
caauauccaugacuacuug

SEQ ID NO: 789917 - RNA, 19 nt, Homo sapiens
  misc_RNA (1)...(19): siRNA sense strand
ggaauuuauuugugacuug

SEQ ID NO: 789918 - RNA, 19 nt, Homo sapiens
  misc_RNA (1)...(19): siRNA sense strand
caagggauuugcaggaauu

SEQ ID NO: 789919 - RNA, 19 nt, Homo sapiens
  misc_RNA (1)...(19): siRNA sense strand
gaacacaacaguagaccuu

SEQ ID NO: 789920 - RNA, 19 nt, Homo sapiens
  misc_RNA (1)...(19): siRNA sense strand
gcaaguagaacaagaggaa

SEQ ID NO: 789921 - RNA, 19 nt, Homo sapiens
  misc_RNA (1)...(19): siRNA sense strand
gaugaauccucacaguauu

SEQ ID NO: 789922 - RNA, 19 nt, Homo sapiens
  misc_RNA (1)...(19): siRNA sense strand
gaacaugggucagaaacag

SEQ ID NO: 789923 - RNA, 19 nt, Homo sapiens
  misc_RNA (1)...(19): siRNA sense strand
gcagcuuugucgcuucuua

SEQ ID NO: 789924 - RNA, 19 nt, Homo sapiens
  misc_RNA (1)...(19): siRNA sense strand
gcauagaaggaaaggauua

SEQ ID NO: 789925 - RNA, 19 nt, Homo sapiens
  misc_RNA (1)...(19): siRNA sense strand
gaauuauggucuucugaug

SEQ ID NO: 789926 - RNA, 19 nt, Homo sapiens
  misc_RNA (1)...(19): siRNA sense strand
gagcuugguuucugaugaa

SEQ ID NO: 789927 - RNA, 19 nt, Homo sapiens
  misc_RNA (1)...(19): siRNA sense strand
gaaugccaccuuauccuua

SEQ ID NO: 789928 - RNA, 19 nt, Homo sapiens
  misc_RNA (1)...(19): siRNA sense strand
gagcuuaaguugaauacuc

SEQ ID NO: 789929 - RNA, 19 nt, Homo sapiens
  misc_RNA (1)...(19): siRNA sense strand
uaaaguugguguuagaguu

SEQ ID NO: 789930 - RNA, 19 nt, Homo sapiens
  misc_RNA (1)...(19): siRNA sense strand
agaaggagauaccauaaau

SEQ ID NO: 789931 - RNA, 19 nt, Homo sapiens
  misc_RNA (1)...(19): siRNA sense strand
gaagaugacggcaugaaug

SEQ ID NO: 789932 - RNA, 19 nt, Homo sapiens
  misc_RNA (1)...(19): siRNA sense strand
gaugagagcuugguuucug

SEQ ID NO: 789933 - RNA, 19 nt, Homo sapiens
  misc_RNA (1)...(19): siRNA sense strand
gcaauguuccucaaauuau

SEQ ID NO: 789934 - RNA, 19 nt, Homo sapiens
  misc_RNA (1)...(19): siRNA sense strand
gaaaacggguggugaaaug

SEQ ID NO: 789935 - RNA, 19 nt, Homo sapiens
  misc_RNA (1)...(19): siRNA sense strand
gcaccuaaugcuucuguua

SEQ ID NO: 789936 - RNA, 19 nt, Homo sapiens
  misc_RNA (1)...(19): siRNA sense strand
gaguggaauuuauuuguga

SEQ ID NO: 789937 - RNA, 19 nt, Homo sapiens
  misc_RNA (1)...(19): siRNA sense strand
gaacaaaccaaagaagaau

SEQ ID NO: 789938 - RNA, 19 nt, Homo sapiens
  misc_RNA (1)...(19): siRNA sense strand
gcccugcuaugcccucuua

SEQ ID NO: 789939 - RNA, 19 nt, Homo sapiens
  misc_RNA (1)...(19): siRNA sense strand
ucacagacauacugcagaa

SEQ ID NO: 789940 - RNA, 19 nt, Homo sapiens
  misc_RNA (1)...(19): siRNA sense strand
cgacucagcuuggauuguu

SEQ ID NO: 789941 - RNA, 19 nt, Homo sapiens
  misc_RNA (1)...(19): siRNA sense strand
ggaagucugugcucucauc

SEQ ID NO: 789942 - RNA, 19 nt, Homo sapiens
  misc_RNA (1)...(19): siRNA sense strand
caacauggcagcucuaagu

SEQ ID NO: 789943 - RNA, 19 nt, Homo sapiens
  misc_RNA (1)...(19): siRNA sense strand
cagaaacaaucucagcauu

SEQ ID NO: 789944 - RNA, 19 nt, Homo sapiens
  misc_RNA (1)...(19): siRNA sense strand
cagcaauguuccucaaauu

SEQ ID NO: 789945 - RNA, 19 nt, Homo sapiens
  misc_RNA (1)...(19): siRNA sense strand
gacauaguauuucucauuc

SEQ ID NO: 789946 - RNA, 19 nt, Homo sapiens
  misc_RNA (1)...(19): siRNA sense strand
ggaaaggauuacauagcuu

SEQ ID NO: 789947 - RNA, 19 nt, Homo sapiens
  misc_RNA (1)...(19): siRNA sense strand
ggucagcucuccuacaaag

SEQ ID NO: 789948 - RNA, 19 nt, Homo sapiens
  misc_RNA (1)...(19): siRNA sense strand
gcaccacccuaaugcuuug

SEQ ID NO: 789949 - RNA, 19 nt, Homo sapiens
  misc_RNA (1)...(19): siRNA sense strand
ggauucacuuuaagagauu

SEQ ID NO: 789950 - RNA, 19 nt, Homo sapiens
  misc_RNA (1)...(19): siRNA sense strand
agaaauagcaguucagaug

SEQ ID NO: 789951 - RNA, 19 nt, Homo sapiens
  misc_RNA (1)...(19): siRNA sense strand
gaucacuauuccugaaauu

SEQ ID NO: 789952 - RNA, 19 nt, Homo sapiens
  misc_RNA (1)...(19): siRNA sense strand
aaauauggauugcuguuug

SEQ ID NO: 789953 - RNA, 19 nt, Homo sapiens
  misc_RNA (1)...(19): siRNA sense strand
caacauaccagcaaaggau

SEQ ID NO: 789954 - RNA, 19 nt, Homo sapiens
  misc_RNA (1)...(19): siRNA sense strand
aaacaggauuuaugcauca

SEQ ID NO: 789955 - RNA, 19 nt, Homo sapiens
  misc_RNA (1)...(19): siRNA sense strand
ggaaaggaguaagugaaau

SEQ ID NO: 789956 - RNA, 19 nt, Homo sapiens
  misc_RNA (1)...(19): siRNA sense strand
ggaucaggcuauaagaaga

SEQ ID NO: 789957 - RNA, 19 nt, Homo sapiens
  misc_RNA (1)...(19): siRNA sense strand
ucacuuagcccaccacaug

SEQ ID NO: 789958 - RNA, 19 nt, Homo sapiens
  misc_RNA (1)...(19): siRNA sense strand
gcagcaauuugauagguau

SEQ ID NO: 789959 - RNA, 19 nt, Homo sapiens
  misc_RNA (1)...(19): siRNA sense strand
gggcauggcagcaauuuga

SEQ ID NO: 789960 - RNA, 19 nt, Homo sapiens
  misc_RNA (1)...(19): siRNA sense strand
aaacuaggcaccauggaua

SEQ ID NO: 789961 - RNA, 19 nt, Homo sapiens
  misc_RNA (1)...(19): siRNA sense strand
gaacugagggauucuucaa

SEQ ID NO: 789962 - RNA, 19 nt, Homo sapiens
  misc_RNA (1)...(19): siRNA sense strand
gaccauuuguggacagaaa

SEQ ID NO: 789963 - RNA, 19 nt, Homo sapiens
  misc_RNA (1)...(19): siRNA sense strand
caaugaguaugcuggcuuu

SEQ ID NO: 789964 - RNA, 19 nt, Homo sapiens
  misc_RNA (1)...(19): siRNA sense strand
ccaaguggguugacagcaa

SEQ ID NO: 789965 - RNA, 19 nt, Homo sapiens
  misc_RNA (1)...(19): siRNA sense strand
ggaacaacuuuauccagaa

SEQ ID NO: 789966 - RNA, 19 nt, Homo sapiens
  misc_RNA (1)...(19): siRNA sense strand
gaacaacuuuauccagaac

SEQ ID NO: 789967 - RNA, 19 nt, Homo sapiens
  misc_RNA (1)...(19): siRNA sense strand
ggaaggaguaaaucuaaga

SEQ ID NO: 789968 - RNA, 19 nt, Homo sapiens
  misc_RNA (1)...(19): siRNA sense strand
gggaaggaguaaaucuaag

SEQ ID NO: 789969 - RNA, 19 nt, Homo sapiens
  misc_RNA (1)...(19): siRNA sense strand
ugacuucuuucccaaccuu

SEQ ID NO: 789970 - RNA, 19 nt, Homo sapiens
  misc_RNA (1)...(19): siRNA sense strand
caacuuuauccagaacuuu

SEQ ID NO: 789971 - RNA, 19 nt, Homo sapiens
  misc_RNA (1)...(19): siRNA sense strand
acaacuuuauccagaacuu

SEQ ID NO: 789972 - RNA, 19 nt, Homo sapiens
  misc_RNA (1)...(19): siRNA sense strand
guugguguucuaauaguuu

SEQ ID NO: 789973 - RNA, 19 nt, Homo sapiens
  misc_RNA (1)...(19): siRNA sense strand
cucuguugguguucuaaua

SEQ ID NO: 789974 - RNA, 19 nt, Homo sapiens
  misc_RNA (1)...(19): siRNA sense strand
gcaaggggaaggaguaaau

SEQ ID NO: 789975 - RNA, 19 nt, Homo sapiens
  misc_RNA (1)...(19): siRNA sense strand
ggggaaggaguaaaucuaa

SEQ ID NO: 789976 - RNA, 19 nt, Homo sapiens
  misc_RNA (1)...(19): siRNA sense strand
gaaaggauagcuaaagaaa

SEQ ID NO: 789977 - RNA, 19 nt, Homo sapiens
  misc_RNA (1)...(19): siRNA sense strand
guacauagauuuccuuuug

SEQ ID NO: 789978 - RNA, 19 nt, Homo sapiens
  misc_RNA (1)...(19): siRNA sense strand
ggagcuggcauuauuguua

SEQ ID NO: 789979 - RNA, 19 nt, Homo sapiens
  misc_RNA (1)...(19): siRNA sense strand
caacuaacuuuguacauag

SEQ ID NO: 789980 - RNA, 19 nt, Homo sapiens
  misc_RNA (1)...(19): siRNA sense strand
cagaaaggauagcuaaaga

SEQ ID NO: 789981 - RNA, 19 nt, Homo sapiens
  misc_RNA (1)...(19): siRNA sense strand
aagacaagcuggagaggua

SEQ ID NO: 789982 - RNA, 19 nt, Homo sapiens
  misc_RNA (1)...(19): siRNA sense strand
gauagaauuuggaguugug

SEQ ID NO: 789983 - RNA, 19 nt, Homo sapiens
  misc_RNA (1)...(19): siRNA sense strand
gaguugggcucuuccagaa

SEQ ID NO: 789984 - RNA, 19 nt, Homo sapiens
  misc_RNA (1)...(19): siRNA sense strand
gcuaaagaaauucagguua

SEQ ID NO: 789985 - RNA, 19 nt, Homo sapiens
  misc_RNA (1)...(19): siRNA sense strand
gguaguuugugaagcuaua

SEQ ID NO: 789986 - RNA, 19 nt, Homo sapiens
  misc_RNA (1)...(19): siRNA sense strand
ugcaggagcuggcauuauu

SEQ ID NO: 789987 - RNA, 19 nt, Homo sapiens
  misc_RNA (1)...(19): siRNA sense strand
gcggagcagaugcauauua

SEQ ID NO: 789988 - RNA, 19 nt, Homo sapiens
  misc_RNA (1)...(19): siRNA sense strand
uggcuuugcuguaaauaaa

SEQ ID NO: 789989 - RNA, 19 nt, Homo sapiens
  misc_RNA (1)...(19): siRNA sense strand
gcaacgagacgacgaagau

SEQ ID NO: 789990 - RNA, 19 nt, Homo sapiens
  misc_RNA (1)...(19): siRNA sense strand
cggagcagaugcauauuau

SEQ ID NO: 789991 - RNA, 19 nt, Homo sapiens
  misc_RNA (1)...(19): siRNA sense strand
gaaaaguucuccaguugau

SEQ ID NO: 789992 - RNA, 19 nt, Homo sapiens
  misc_RNA (1)...(19): siRNA sense strand
aaaguucuccaguugauuu

SEQ ID NO: 789993 - RNA, 19 nt, Homo sapiens
  misc_RNA (1)...(19): siRNA sense strand
gguuauaccuuugcaacga

SEQ ID NO: 789994 - RNA, 19 nt, Homo sapiens
  misc_RNA (1)...(19): siRNA sense strand
gcagaaaggauagcuaaag

SEQ ID NO: 789995 - RNA, 19 nt, Homo sapiens
  misc_RNA (1)...(19): siRNA sense strand
gagcuggcauuauuguuac

SEQ ID NO: 789996 - RNA, 19 nt, Homo sapiens
  misc_RNA (1)...(19): siRNA sense strand
ugcaguaacucuagcaaga

SEQ ID NO: 789997 - RNA, 19 nt, Homo sapiens
  misc_RNA (1)...(19): siRNA sense strand
gauuugaugucacgaagag

SEQ ID NO: 789998 - RNA, 19 nt, Homo sapiens
  misc_RNA (1)...(19): siRNA sense strand
uguuacagguggaccauuu

SEQ ID NO: 789999 - RNA, 19 nt, Homo sapiens
  misc_RNA (1)...(19): siRNA sense strand
ggaguuguguacaguugug

SEQ ID NO: 790000 - RNA, 19 nt, Homo sapiens
  misc_RNA (1)...(19): siRNA sense strand
cuggagagguaguuuguga

SEQ ID NO: 790001 - RNA, 19 nt, Homo sapiens
  misc_RNA (1)...(19): siRNA sense strand
gauguacacugccagaaaa

SEQ ID NO: 790002 - RNA, 19 nt, Homo sapiens
  misc_RNA (1)...(19): siRNA sense strand
ugacugaguugggcucuuc

SEQ ID NO: 790003 - RNA, 19 nt, Homo sapiens
  misc_RNA (1)...(19): siRNA sense strand
gauggaacaacuaacuuug

SEQ ID NO: 790004 - RNA, 19 nt, Homo sapiens
  misc_RNA (1)...(19): siRNA sense strand
gguggaccauuugauuuga

SEQ ID NO: 790005 - RNA, 19 nt, Homo sapiens
  misc_RNA (1)...(19): siRNA sense strand
caugggauccggaguguug

SEQ ID NO: 790006 - RNA, 19 nt, Homo sapiens
  misc_RNA (1)...(19): siRNA sense strand
gauauuaccaaaucucucu

SEQ ID NO: 790007 - RNA, 19 nt, Homo sapiens
  misc_RNA (1)...(19): siRNA sense strand
ggcaggaaugcauggauua

SEQ ID NO: 790008 - RNA, 19 nt, Homo sapiens
  misc_RNA (1)...(19): siRNA sense strand
cuacaaguuucacaacaag

SEQ ID NO: 790009 - RNA, 19 nt, Homo sapiens
  misc_RNA (1)...(19): siRNA sense strand
caccagagacugugagaau

SEQ ID NO: 790010 - RNA, 19 nt, Homo sapiens
  misc_RNA (1)...(19): siRNA sense strand
guauccaucucacaguuuc

SEQ ID NO: 790011 - RNA, 19 nt, Homo sapiens
  misc_RNA (1)...(19): siRNA sense strand
uggcaggaaugcauggauu

SEQ ID NO: 790012 - RNA, 19 nt, Homo sapiens
  misc_RNA (1)...(19): siRNA sense strand
gagguaguuugugaagcua

SEQ ID NO: 790013 - RNA, 19 nt, Homo sapiens
  misc_RNA (1)...(19): siRNA sense strand
gcaggagcuggcauuauug

SEQ ID NO: 790014 - RNA, 19 nt, Homo sapiens
  misc_RNA (1)...(19): siRNA sense strand
ugauggaacaacuaacuuu

SEQ ID NO: 790015 - RNA, 19 nt, Homo sapiens
  misc_RNA (1)...(19): siRNA sense strand
cagguggaccauuugauuu

SEQ ID NO: 790016 - RNA, 19 nt, Homo sapiens
  misc_RNA (1)...(19): siRNA sense strand
ggauuaugcaguaacucua

SEQ ID NO: 790017 - RNA, 19 nt, Homo sapiens
  misc_RNA (1)...(19): siRNA sense strand
gcugaaaaguucuccaguu

SEQ ID NO: 790018 - RNA, 19 nt, Homo sapiens
  misc_RNA (1)...(19): siRNA sense strand
aagauagaauuuggaguug

SEQ ID NO: 790019 - RNA, 19 nt, Homo sapiens
  misc_RNA (1)...(19): siRNA sense strand
gcaggaaugcauggauuau

SEQ ID NO: 790020 - RNA, 19 nt, Homo sapiens
  misc_RNA (1)...(19): siRNA sense strand
acuacaaguuucacaacaa

SEQ ID NO: 790021 - RNA, 19 nt, Homo sapiens
  misc_RNA (1)...(19): siRNA sense strand
acagguggaccauuugauu

SEQ ID NO: 790022 - RNA, 19 nt, Homo sapiens
  misc_RNA (1)...(19): siRNA sense strand
ugaagcugguggcgugcua

SEQ ID NO: 790023 - RNA, 19 nt, Homo sapiens
  misc_RNA (1)...(19): siRNA sense strand
ggagagguaguuugugaag

SEQ ID NO: 790024 - RNA, 19 nt, Homo sapiens
  misc_RNA (1)...(19): siRNA sense strand
guugggcucuuccagaaca

SEQ ID NO: 790025 - RNA, 19 nt, Homo sapiens
  misc_RNA (1)...(19): siRNA sense strand
uggcggagcagaugcauau

SEQ ID NO: 790026 - RNA, 19 nt, Homo sapiens
  misc_RNA (1)...(19): siRNA sense strand
gaugucacgaagaguaauu

SEQ ID NO: 790027 - RNA, 19 nt, Homo sapiens
  misc_RNA (1)...(19): siRNA sense strand
ccagaacaccagagacugu

SEQ ID NO: 790028 - RNA, 19 nt, Homo sapiens
  misc_RNA (1)...(19): siRNA sense strand
aacgagacgacgaagauua

SEQ ID NO: 790029 - RNA, 19 nt, Homo sapiens
  misc_RNA (1)...(19): siRNA sense strand
caguaacucuagcaagaca

SEQ ID NO: 790030 - RNA, 19 nt, Homo sapiens
  misc_RNA (1)...(19): siRNA sense strand
gcaacuggcggagcagaug

SEQ ID NO: 790031 - RNA, 19 nt, Homo sapiens
  misc_RNA (1)...(19): siRNA sense strand
acgagacgacgaagauuaa

SEQ ID NO: 790032 - RNA, 19 nt, Homo sapiens
  misc_RNA (1)...(19): siRNA sense strand
acaaguuucacaacaagaa

SEQ ID NO: 790033 - RNA, 19 nt, Homo sapiens
  misc_RNA (1)...(19): siRNA sense strand
caacgagacgacgaagauu

SEQ ID NO: 790034 - RNA, 19 nt, Homo sapiens
  misc_RNA (1)...(19): siRNA sense strand
ggauagcuaaagaaauuca

SEQ ID NO: 790035 - RNA, 19 nt, Homo sapiens
  misc_RNA (1)...(19): siRNA sense strand
agaaaggauagcuaaagaa

SEQ ID NO: 790036 - RNA, 19 nt, Homo sapiens
  misc_RNA (1)...(19): siRNA sense strand
aaguauccaucucacaguu

SEQ ID NO: 790037 - RNA, 19 nt, Homo sapiens
  misc_RNA (1)...(19): siRNA sense strand
agagguaguuugugaagcu

SEQ ID NO: 790038 - RNA, 19 nt, Homo sapiens
  misc_RNA (1)...(19): siRNA sense strand
caacaagaagauauuacca

SEQ ID NO: 790039 - RNA, 19 nt, Homo sapiens
  misc_RNA (1)...(19): siRNA sense strand
uguguacaguuguguggaa

SEQ ID NO: 790040 - RNA, 19 nt, Homo sapiens
  misc_RNA (1)...(19): siRNA sense strand
gaauauuagcagaaaggau

SEQ ID NO: 790041 - RNA, 19 nt, Homo sapiens
  misc_RNA (1)...(19): siRNA sense strand
gauuaugcaguaacucuag

SEQ ID NO: 790042 - RNA, 19 nt, Homo sapiens
  misc_RNA (1)...(19): siRNA sense strand
cauggaucauugacccuau

SEQ ID NO: 790043 - RNA, 19 nt, Homo sapiens
  misc_RNA (1)...(19): siRNA sense strand
gguaacugcuacggaccaa

SEQ ID NO: 790044 - RNA, 19 nt, Homo sapiens
  misc_RNA (1)...(19): siRNA sense strand
gcugguggcgugcuaaugg

SEQ ID NO: 790045 - RNA, 19 nt, Homo sapiens
  misc_RNA (1)...(19): siRNA sense strand
agauguacacugccagaaa

SEQ ID NO: 790046 - RNA, 19 nt, Homo sapiens
  misc_RNA (1)...(19): siRNA sense strand
cauugacccuauugaugga

SEQ ID NO: 790047 - RNA, 19 nt, Homo sapiens
  misc_RNA (1)...(19): siRNA sense strand
cugaaaaguucuccaguug

SEQ ID NO: 790048 - RNA, 19 nt, Homo sapiens
  misc_RNA (1)...(19): siRNA sense strand
ccagagacugugagaaugg

SEQ ID NO: 790049 - RNA, 19 nt, Homo sapiens
  misc_RNA (1)...(19): siRNA sense strand
gguucuuucuaauauggaa

SEQ ID NO: 790050 - RNA, 19 nt, Homo sapiens
  misc_RNA (1)...(19): siRNA sense strand
cuauugauggaacaacuaa

SEQ ID NO: 790051 - RNA, 19 nt, Homo sapiens
  misc_RNA (1)...(19): siRNA sense strand
gaagcugguggcgugcuaa

SEQ ID NO: 790052 - RNA, 19 nt, Homo sapiens
  misc_RNA (1)...(19): siRNA sense strand
ccaucucacaguuucauug

SEQ ID NO: 790053 - RNA, 19 nt, Homo sapiens
  misc_RNA (1)...(19): siRNA sense strand
uggcauuauuguuacugaa

SEQ ID NO: 790054 - RNA, 19 nt, Homo sapiens
  misc_RNA (1)...(19): siRNA sense strand
gaauuuggaguuguguaca

SEQ ID NO: 790055 - RNA, 19 nt, Homo sapiens
  misc_RNA (1)...(19): siRNA sense strand
uuugaugucacgaagagua

SEQ ID NO: 790056 - RNA, 19 nt, Homo sapiens
  misc_RNA (1)...(19): siRNA sense strand
caacagaaucgcaaacuua

SEQ ID NO: 790057 - RNA, 19 nt, Homo sapiens
  misc_RNA (1)...(19): siRNA sense strand
gaacaaaugcucuggaaug

SEQ ID NO: 790058 - RNA, 19 nt, Homo sapiens
  misc_RNA (1)...(19): siRNA sense strand
cgaaggagcuccaggaaga

SEQ ID NO: 790059 - RNA, 19 nt, Homo sapiens
  misc_RNA (1)...(19): siRNA sense strand
cagcaaggcuuccauugaa

SEQ ID NO: 790060 - RNA, 19 nt, Homo sapiens
  misc_RNA (1)...(19): siRNA sense strand
gcugcuacauguacuauuu

SEQ ID NO: 790061 - RNA, 19 nt, Homo sapiens
  misc_RNA (1)...(19): siRNA sense strand
agucaaagaucuauuccua

SEQ ID NO: 790062 - RNA, 19 nt, Homo sapiens
  misc_RNA (1)...(19): siRNA sense strand
gcaacagaaucgcaaacuu

SEQ ID NO: 790063 - RNA, 19 nt, Homo sapiens
  misc_RNA (1)...(19): siRNA sense strand
ucaaagaucuauuccuaca

SEQ ID NO: 790064 - RNA, 19 nt, Homo sapiens
  misc_RNA (1)...(19): siRNA sense strand
aaagaucuauuccuacaug

SEQ ID NO: 790065 - RNA, 19 nt, Homo sapiens
  misc_RNA (1)...(19): siRNA sense strand
gcagcaaggcuuccauuga

SEQ ID NO: 790066 - RNA, 19 nt, Homo sapiens
  misc_RNA (1)...(19): siRNA sense strand
aagccgagcugcagucuga

SEQ ID NO: 790067 - RNA, 19 nt, Homo sapiens
  misc_RNA (1)...(19): siRNA sense strand
gaaggaagaaggaaugaag

SEQ ID NO: 790068 - RNA, 19 nt, Homo sapiens
  misc_RNA (1)...(19): siRNA sense strand
gagcugcagucugaagaaa

SEQ ID NO: 790069 - RNA, 19 nt, Homo sapiens
  misc_RNA (1)...(19): siRNA sense strand
gaucaccgacgccaagaaa

SEQ ID NO: 790070 - RNA, 19 nt, Homo sapiens
  misc_RNA (1)...(19): siRNA sense strand
aaaccaaacugcacgacau

SEQ ID NO: 790071 - RNA, 19 nt, Homo sapiens
  misc_RNA (1)...(19): siRNA sense strand
ccgaacaaaugcucuggaa

SEQ ID NO: 790072 - RNA, 19 nt, Homo sapiens
  misc_RNA (1)...(19): siRNA sense strand
gcaaacuuacggauuucua

SEQ ID NO: 790073 - RNA, 19 nt, Homo sapiens
  misc_RNA (1)...(19): siRNA sense strand
guacggagcgccaugaagu

SEQ ID NO: 790074 - RNA, 19 nt, Homo sapiens
  misc_RNA (1)...(19): siRNA sense strand
ggaugcaacuagagagaca

SEQ ID NO: 790075 - RNA, 19 nt, Homo sapiens
  misc_RNA (1)...(19): siRNA sense strand
gcaacuagagagacaaauc

SEQ ID NO: 790076 - RNA, 19 nt, Homo sapiens
  misc_RNA (1)...(19): siRNA sense strand
agagacaaaucgccuagga

SEQ ID NO: 790077 - RNA, 19 nt, Homo sapiens
  misc_RNA (1)...(19): siRNA sense strand
gauugaaagugggaaggaa

SEQ ID NO: 790078 - RNA, 19 nt, Homo sapiens
  misc_RNA (1)...(19): siRNA sense strand
cggcguaccucaccucauc

SEQ ID NO: 790079 - RNA, 19 nt, Homo sapiens
  misc_RNA (1)...(19): siRNA sense strand
gaagaaaggaaaagaauag

SEQ ID NO: 790080 - RNA, 19 nt, Homo sapiens
  misc_RNA (1)...(19): siRNA sense strand
aaacuccacccucaucuug

SEQ ID NO: 790081 - RNA, 19 nt, Homo sapiens
  misc_RNA (1)...(19): siRNA sense strand
gaaaggaaaagaauagaug

SEQ ID NO: 790082 - RNA, 19 nt, Homo sapiens
  misc_RNA (1)...(19): siRNA sense strand
uacaugagcccgaacaaau

SEQ ID NO: 790083 - RNA, 19 nt, Homo sapiens
  misc_RNA (1)...(19): siRNA sense strand
caggaaacgagaagagaaa

SEQ ID NO: 790084 - RNA, 19 nt, Homo sapiens
  misc_RNA (1)...(19): siRNA sense strand
gugccuuugugguggaaua

SEQ ID NO: 790085 - RNA, 19 nt, Homo sapiens
  misc_RNA (1)...(19): siRNA sense strand
gagacaaaucgccuaggaa

SEQ ID NO: 790086 - RNA, 19 nt, Homo sapiens
  misc_RNA (1)...(19): siRNA sense strand
gaacugccaaaccaaacug

SEQ ID NO: 790087 - RNA, 19 nt, Homo sapiens
  misc_RNA (1)...(19): siRNA sense strand
gcugcagucugaagaaagg

SEQ ID NO: 790088 - RNA, 19 nt, Homo sapiens
  misc_RNA (1)...(19): siRNA sense strand
cuaggaagacugaucaauc

SEQ ID NO: 790089 - RNA, 19 nt, Homo sapiens
  misc_RNA (1)...(19): siRNA sense strand
ggaaggaagaaggaaugaa

SEQ ID NO: 790090 - RNA, 19 nt, Homo sapiens
  misc_RNA (1)...(19): siRNA sense strand
gaaguccgaggaacagaag

SEQ ID NO: 790091 - RNA, 19 nt, Homo sapiens
  misc_RNA (1)...(19): siRNA sense strand
ccacccucaucuugugauu

SEQ ID NO: 790092 - RNA, 19 nt, Homo sapiens
  misc_RNA (1)...(19): siRNA sense strand
gaaacgagaagagaaaaga

SEQ ID NO: 790093 - RNA, 19 nt, Homo sapiens
  misc_RNA (1)...(19): siRNA sense strand
gacaaaucgccuaggaaga

SEQ ID NO: 790094 - RNA, 19 nt, Homo sapiens
  misc_RNA (1)...(19): siRNA sense strand
gcaguacggagcgccauga

SEQ ID NO: 790095 - RNA, 19 nt, Homo sapiens
  misc_RNA (1)...(19): siRNA sense strand
aggaacagaagaucaaaga

SEQ ID NO: 790096 - RNA, 19 nt, Homo sapiens
  misc_RNA (1)...(19): siRNA sense strand
caacuagagagacaaaucg

SEQ ID NO: 790097 - RNA, 19 nt, Homo sapiens
  misc_RNA (1)...(19): siRNA sense strand
cugcguggaugcaacuaga

SEQ ID NO: 790098 - RNA, 19 nt, Homo sapiens
  misc_RNA (1)...(19): siRNA sense strand
cuacaugagcccgaacaaa

SEQ ID NO: 790099 - RNA, 19 nt, Homo sapiens
  misc_RNA (1)...(19): siRNA sense strand
aucgcaaacuuacggauuu

SEQ ID NO: 790100 - RNA, 19 nt, Homo sapiens
  misc_RNA (1)...(19): siRNA sense strand
gaaagugggaaggaagaag

SEQ ID NO: 790101 - RNA, 19 nt, Homo sapiens
  misc_RNA (1)...(19): siRNA sense strand
gcagucugaagaaaggaaa

SEQ ID NO: 790102 - RNA, 19 nt, Homo sapiens
  misc_RNA (1)...(19): siRNA sense strand
ccgaggaacagaagaucaa

SEQ ID NO: 790103 - RNA, 19 nt, Homo sapiens
  misc_RNA (1)...(19): siRNA sense strand
ggcagucaaagaucuauuc

SEQ ID NO: 790104 - RNA, 19 nt, Homo sapiens
  misc_RNA (1)...(19): siRNA sense strand
ccacgggcugcuacaugua

SEQ ID NO: 790105 - RNA, 19 nt, Homo sapiens
  misc_RNA (1)...(19): siRNA sense strand
gggaaggaagaaggaauga

SEQ ID NO: 790106 - RNA, 19 nt, Homo sapiens
  misc_RNA (1)...(19): siRNA sense strand
acaggaaacgagaagagaa

SEQ ID NO: 790107 - RNA, 19 nt, Homo sapiens
  misc_RNA (1)...(19): siRNA sense strand
agaaacgggaggcucugua

SEQ ID NO: 790108 - RNA, 19 nt, Homo sapiens
  misc_RNA (1)...(19): siRNA sense strand
guauuuaccgggcagucaa

SEQ ID NO: 790109 - RNA, 19 nt, Homo sapiens
  misc_RNA (1)...(19): siRNA sense strand
acaugagcccgaacaaaug

SEQ ID NO: 790110 - RNA, 19 nt, Homo sapiens
  misc_RNA (1)...(19): siRNA sense strand
ugaaguccgaggaacagaa

SEQ ID NO: 790111 - RNA, 19 nt, Homo sapiens
  misc_RNA (1)...(19): siRNA sense strand
caaaucgccuaggaagacu

SEQ ID NO: 790112 - RNA, 19 nt, Homo sapiens
  misc_RNA (1)...(19): siRNA sense strand
uuacacaucacgaagucaa

SEQ ID NO: 790113 - RNA, 19 nt, Homo sapiens
  misc_RNA (1)...(19): siRNA sense strand
uccacgggcugcuacaugu

SEQ ID NO: 790114 - RNA, 19 nt, Homo sapiens
  misc_RNA (1)...(19): siRNA sense strand
caaacuuacggauuucuac

SEQ ID NO: 790115 - RNA, 19 nt, Homo sapiens
  misc_RNA (1)...(19): siRNA sense strand
acaaaucgccuaggaagac

SEQ ID NO: 790116 - RNA, 19 nt, Homo sapiens
  misc_RNA (1)...(19): siRNA sense strand
ggaacugccaaaccaaacu

SEQ ID NO: 790117 - RNA, 19 nt, Homo sapiens
  misc_RNA (1)...(19): siRNA sense strand
ggugguaucuugucuguuu

SEQ ID NO: 790118 - RNA, 19 nt, Homo sapiens
  misc_RNA (1)...(19): siRNA sense strand
gauaucaguuccauguaua

SEQ ID NO: 790119 - RNA, 19 nt, Homo sapiens
  misc_RNA (1)...(19): siRNA sense strand
ggauuuguuucguuuguua

SEQ ID NO: 790120 - RNA, 19 nt, Homo sapiens
  misc_RNA (1)...(19): siRNA sense strand
gauaucaguugccuguaua

SEQ ID NO: 790121 - RNA, 19 nt, Homo sapiens
  misc_RNA (1)...(19): siRNA sense strand
gauaucaguucccuguaua

SEQ ID NO: 790122 - RNA, 19 nt, Homo sapiens
  misc_RNA (1)...(19): siRNA sense strand
gauaucaguugccuguaua

SEQ ID NO: 790123 - RNA, 19 nt, Homo sapiens
  misc_RNA (1)...(19): siRNA sense strand
gauaucaguucccuguaua

SEQ ID NO: 790124 - RNA, 19 nt, Homo sapiens
  misc_RNA (1)...(19): siRNA sense strand
gauaucaguugccuguaua

SEQ ID NO: 790125 - RNA, 19 nt, Homo sapiens
  misc_RNA (1)...(19): siRNA sense strand
gauaucaguugccuguaua

SEQ ID NO: 790126 - RNA, 19 nt, Homo sapiens
  misc_RNA (1)...(19): siRNA sense strand
gauaguaggaucacagaua

SEQ ID NO: 790127 - RNA, 19 nt, Homo sapiens
  misc_RNA (1)...(19): siRNA sense strand
ggauaucaguuccauguau

SEQ ID NO: 790128 - RNA, 19 nt, Homo sapiens
  misc_RNA (1)...(19): siRNA sense strand
gaugucaguugcuuguaua

SEQ ID NO: 790129 - RNA, 19 nt, Homo sapiens
  misc_RNA (1)...(19): siRNA sense strand
gucaguugcuuguauauaa

SEQ ID NO: 790130 - RNA, 19 nt, Homo sapiens
  misc_RNA (1)...(19): siRNA sense strand
ggauaucaguugccuguau

SEQ ID NO: 790131 - RNA, 19 nt, Homo sapiens
  misc_RNA (1)...(19): siRNA sense strand
ggauaucaguugccuguau

SEQ ID NO: 790132 - RNA, 19 nt, Homo sapiens
  misc_RNA (1)...(19): siRNA sense strand
ggauaucaguucccuguau

SEQ ID NO: 790133 - RNA, 19 nt, Homo sapiens
  misc_RNA (1)...(19): siRNA sense strand
ggauaucaguugccuguau

SEQ ID NO: 790134 - RNA, 19 nt, Homo sapiens
  misc_RNA (1)...(19): siRNA sense strand
ggauaucaguucccuguau

SEQ ID NO: 790135 - RNA, 19 nt, Homo sapiens
  misc_RNA (1)...(19): siRNA sense strand
ggauaucaguugccuguau

SEQ ID NO: 790136 - RNA, 19 nt, Homo sapiens
  misc_RNA (1)...(19): siRNA sense strand
gaacugguguguccaaagg

SEQ ID NO: 790137 - RNA, 19 nt, Homo sapiens
  misc_RNA (1)...(19): siRNA sense strand
gagcaaaggagaaaucugu

SEQ ID NO: 790138 - RNA, 19 nt, Homo sapiens
  misc_RNA (1)...(19): siRNA sense strand
ggaugucaguugcuuguau

SEQ ID NO: 790139 - RNA, 19 nt, Homo sapiens
  misc_RNA (1)...(19): siRNA sense strand
gcagccacguccuuuggua

SEQ ID NO: 790140 - RNA, 19 nt, Homo sapiens
  misc_RNA (1)...(19): siRNA sense strand
ggaugaaacugagauugga

SEQ ID NO: 790141 - RNA, 19 nt, Homo sapiens
  misc_RNA (1)...(19): siRNA sense strand
ccacguccuuugguaguua

SEQ ID NO: 790142 - RNA, 19 nt, Homo sapiens
  misc_RNA (1)...(19): siRNA sense strand
ucaguugccuguauauaau

SEQ ID NO: 790143 - RNA, 19 nt, Homo sapiens
  misc_RNA (1)...(19): siRNA sense strand
ucaguugccuguauauaau

SEQ ID NO: 790144 - RNA, 19 nt, Homo sapiens
  misc_RNA (1)...(19): siRNA sense strand
ucaguugccuguauauaau

SEQ ID NO: 790145 - RNA, 19 nt, Homo sapiens
  misc_RNA (1)...(19): siRNA sense strand
ucaggucacugcuggauau

SEQ ID NO: 790146 - RNA, 19 nt, Homo sapiens
  misc_RNA (1)...(19): siRNA sense strand
ucaggucacugcuggauau

SEQ ID NO: 790147 - RNA, 19 nt, Homo sapiens
  misc_RNA (1)...(19): siRNA sense strand
cagauacauuuccauggua

SEQ ID NO: 790148 - RNA, 19 nt, Homo sapiens
  misc_RNA (1)...(19): siRNA sense strand
ucaguugccuguauacaau

SEQ ID NO: 790149 - RNA, 19 nt, Homo sapiens
  misc_RNA (1)...(19): siRNA sense strand
ucaguucccuguauacaau

SEQ ID NO: 790150 - RNA, 19 nt, Homo sapiens
  misc_RNA (1)...(19): siRNA sense strand
ucaguucccuguauacaau

SEQ ID NO: 790151 - RNA, 19 nt, Homo sapiens
  misc_RNA (1)...(19): siRNA sense strand
uauccaagaucaccauuuc

SEQ ID NO: 790152 - RNA, 19 nt, Homo sapiens
  misc_RNA (1)...(19): siRNA sense strand
gaucacagauacauuucca

SEQ ID NO: 790153 - RNA, 19 nt, Homo sapiens
  misc_RNA (1)...(19): siRNA sense strand
gcuauggauuuguuucguu

SEQ ID NO: 790154 - RNA, 19 nt, Homo sapiens
  misc_RNA (1)...(19): siRNA sense strand
gaccgaagcauacaaaugg

SEQ ID NO: 790155 - RNA, 19 nt, Homo sapiens
  misc_RNA (1)...(19): siRNA sense strand
ggaccgaagcauacaaaug

SEQ ID NO: 790156 - RNA, 19 nt, Homo sapiens
  misc_RNA (1)...(19): siRNA sense strand
uacaaauggugguaucuug

SEQ ID NO: 790157 - RNA, 19 nt, Homo sapiens
  misc_RNA (1)...(19): siRNA sense strand
gugaaagaagugaagauaa

SEQ ID NO: 790158 - RNA, 19 nt, Homo sapiens
  misc_RNA (1)...(19): siRNA sense strand
ucaguuccauguauacaau

SEQ ID NO: 790159 - RNA, 19 nt, Homo sapiens
  misc_RNA (1)...(19): siRNA sense strand
gaaagaagugaagauaauc

SEQ ID NO: 790160 - RNA, 19 nt, Homo sapiens
  misc_RNA (1)...(19): siRNA sense strand
cuauggauuuguuucguuu

SEQ ID NO: 790161 - RNA, 19 nt, Homo sapiens
  misc_RNA (1)...(19): siRNA sense strand
uauccaaguucaccauuuc

SEQ ID NO: 790162 - RNA, 19 nt, Homo sapiens
  misc_RNA (1)...(19): siRNA sense strand
uaggaucacagauacauuu

SEQ ID NO: 790163 - RNA, 19 nt, Homo sapiens
  misc_RNA (1)...(19): siRNA sense strand
guuaugugcucgucaugug

SEQ ID NO: 790164 - RNA, 19 nt, Homo sapiens
  misc_RNA (1)...(19): siRNA sense strand
ucaagucgccacuggauau

SEQ ID NO: 790165 - RNA, 19 nt, Homo sapiens
  misc_RNA (1)...(19): siRNA sense strand
uaucagccauuuccugcuu

SEQ ID NO: 790166 - RNA, 19 nt, Homo sapiens
  misc_RNA (1)...(19): siRNA sense strand
ucaagucgccacuggauau

SEQ ID NO: 790167 - RNA, 19 nt, Homo sapiens
  misc_RNA (1)...(19): siRNA sense strand
uaucagccauuuccugcuu

SEQ ID NO: 790168 - RNA, 19 nt, Homo sapiens
  misc_RNA (1)...(19): siRNA sense strand
acagauacauuuccauggu

SEQ ID NO: 790169 - RNA, 19 nt, Homo sapiens
  misc_RNA (1)...(19): siRNA sense strand
agauacauuuccaugguaa

SEQ ID NO: 790170 - RNA, 19 nt, Homo sapiens
  misc_RNA (1)...(19): siRNA sense strand
uguauacaauuaccagaug

SEQ ID NO: 790171 - RNA, 19 nt, Homo sapiens
  misc_RNA (1)...(19): siRNA sense strand
uaucuugucuguuuaaucc

SEQ ID NO: 790172 - RNA, 19 nt, Homo sapiens
  misc_RNA (1)...(19): siRNA sense strand
gguguuaccagaaggcaaa

SEQ ID NO: 790173 - RNA, 19 nt, Homo sapiens
  misc_RNA (1)...(19): siRNA sense strand
aagauaaucacgaaucgaa

SEQ ID NO: 790174 - RNA, 19 nt, Homo sapiens
  misc_RNA (1)...(19): siRNA sense strand
gugguaucuugucuguuua

SEQ ID NO: 790175 - RNA, 19 nt, Homo sapiens
  misc_RNA (1)...(19): siRNA sense strand
uauccaaauucaccaguuc

SEQ ID NO: 790176 - RNA, 19 nt, Homo sapiens
  misc_RNA (1)...(19): siRNA sense strand
gaagcugggcccugcaauc

SEQ ID NO: 790177 - RNA, 19 nt, Homo sapiens
  misc_RNA (1)...(19): siRNA sense strand
gaauugaugcuaggaugga

SEQ ID NO: 790178 - RNA, 19 nt, Homo sapiens
  misc_RNA (1)...(19): siRNA sense strand
ggucaccacuggauaucag

SEQ ID NO: 790179 - RNA, 19 nt, Homo sapiens
  misc_RNA (1)...(19): siRNA sense strand
ggucaccacuggauaucag

SEQ ID NO: 790180 - RNA, 19 nt, Homo sapiens
  misc_RNA (1)...(19): siRNA sense strand
ggucaccacuggauaucag

SEQ ID NO: 790181 - RNA, 19 nt, Homo sapiens
  misc_RNA (1)...(19): siRNA sense strand
aaaguuaugugcucgucau

SEQ ID NO: 790182 - RNA, 19 nt, Homo sapiens
  misc_RNA (1)...(19): siRNA sense strand
gguagauacgguucaguga

SEQ ID NO: 790183 - RNA, 19 nt, Homo sapiens
  misc_RNA (1)...(19): siRNA sense strand
gaugaaacugagauuggaa

SEQ ID NO: 790184 - RNA, 19 nt, Homo sapiens
  misc_RNA (1)...(19): siRNA sense strand
ggucacugcuggauaucag

SEQ ID NO: 790185 - RNA, 19 nt, Homo sapiens
  misc_RNA (1)...(19): siRNA sense strand
uuauccaaguucaccauuu

SEQ ID NO: 790186 - RNA, 19 nt, Homo sapiens
  misc_RNA (1)...(19): siRNA sense strand
ggucacugcuggauaucag

SEQ ID NO: 790187 - RNA, 19 nt, Homo sapiens
  misc_RNA (1)...(19): siRNA sense strand
cucagcacguucaggcuua

SEQ ID NO: 790188 - RNA, 19 nt, Homo sapiens
  misc_RNA (1)...(19): siRNA sense strand
ggcggaauccaaacacuga

SEQ ID NO: 790189 - RNA, 19 nt, Homo sapiens
  misc_RNA (1)...(19): siRNA sense strand
ugaagauaaucacgaaucg

SEQ ID NO: 790190 - RNA, 19 nt, Homo sapiens
  misc_RNA (1)...(19): siRNA sense strand
ggucaggucaucacuggau

SEQ ID NO: 790191 - RNA, 19 nt, Homo sapiens
  misc_RNA (1)...(19): siRNA sense strand
gaagauaaucacgaaucga

SEQ ID NO: 790192 - RNA, 19 nt, Homo sapiens
  misc_RNA (1)...(19): siRNA sense strand
gaugcuaggauggaugaaa

SEQ ID NO: 790193 - RNA, 19 nt, Homo sapiens
  misc_RNA (1)...(19): siRNA sense strand
caaauccugagacuccaaa

SEQ ID NO: 790194 - RNA, 19 nt, Homo sapiens
  misc_RNA (1)...(19): siRNA sense strand
gauaaucacgaaucgaacu

SEQ ID NO: 790195 - RNA, 19 nt, Homo sapiens
  misc_RNA (1)...(19): siRNA sense strand
auaguaggaucacagauac

SEQ ID NO: 790196 - RNA, 19 nt, Homo sapiens
  misc_RNA (1)...(19): siRNA sense strand
uuaucccgauucagcauuu

SEQ ID NO: 790197 - RNA, 19 nt, Homo sapiens
  misc_RNA (1)...(19): siRNA sense strand
agugaaagaagugaagaua

SEQ ID NO: 790198 - RNA, 19 nt, Homo sapiens
  misc_RNA (1)...(19): siRNA sense strand
acuccaaacucaaccaucu

SEQ ID NO: 790199 - RNA, 19 nt, Homo sapiens
  misc_RNA (1)...(19): siRNA sense strand
gcaaauccugagacuccaa

SEQ ID NO: 790200 - RNA, 19 nt, Homo sapiens
  misc_RNA (1)...(19): siRNA sense strand
uaucaguugccuguauaua

SEQ ID NO: 790201 - RNA, 19 nt, Homo sapiens
  misc_RNA (1)...(19): siRNA sense strand
uaucaguugccuguauaua

SEQ ID NO: 790202 - RNA, 19 nt, Homo sapiens
  misc_RNA (1)...(19): siRNA sense strand
uaucaguugccuguauaua

SEQ ID NO: 790203 - RNA, 19 nt, Homo sapiens
  misc_RNA (1)...(19): siRNA sense strand
caccacaguuucagaacgu

SEQ ID NO: 790204 - RNA, 19 nt, Homo sapiens
  misc_RNA (1)...(19): siRNA sense strand
cgccgaauccuguaacuca

SEQ ID NO: 790205 - RNA, 19 nt, Homo sapiens
  misc_RNA (1)...(19): siRNA sense strand
caaauggugguaucuuguc

SEQ ID NO: 790206 - RNA, 19 nt, Homo sapiens
  misc_RNA (1)...(19): siRNA sense strand
ucaggucaccacuggauau

SEQ ID NO: 790207 - RNA, 19 nt, Homo sapiens
  misc_RNA (1)...(19): siRNA sense strand
aguugccuguauacaauua

SEQ ID NO: 790208 - RNA, 19 nt, Homo sapiens
  misc_RNA (1)...(19): siRNA sense strand
ucaggucaccacuggauau

SEQ ID NO: 790209 - RNA, 19 nt, Homo sapiens
  misc_RNA (1)...(19): siRNA sense strand
ucaggucaccacuggauau

SEQ ID NO: 790210 - RNA, 19 nt, Homo sapiens
  misc_RNA (1)...(19): siRNA sense strand
uauccuacuuaucccgauu

SEQ ID NO: 790211 - RNA, 19 nt, Homo sapiens
  misc_RNA (1)...(19): siRNA sense strand
uuacucugcuuauccacau

SEQ ID NO: 790212 - RNA, 19 nt, Homo sapiens
  misc_RNA (1)...(19): siRNA sense strand
guucaggcuuacucugcuu

SEQ ID NO: 790213 - RNA, 19 nt, Homo sapiens
  misc_RNA (1)...(19): siRNA sense strand
gauggaugaaacugagauu

SEQ ID NO: 790214 - RNA, 19 nt, Homo sapiens
  misc_RNA (1)...(19): siRNA sense strand
guaggaucacagauacauu

SEQ ID NO: 790215 - RNA, 19 nt, Homo sapiens
  misc_RNA (1)...(19): siRNA sense strand
ggauguccagaagauagua

SEQ ID NO: 790216 - RNA, 19 nt, Homo sapiens
  misc_RNA (1)...(19): siRNA sense strand
uauccaaauucagcaguuc

SEQ ID NO: 790217 - RNA, 19 nt, Homo sapiens
  misc_RNA (1)...(19): siRNA sense strand
gcagauugcuuaugaaaua

SEQ ID NO: 790218 - RNA, 19 nt, Homo sapiens
  misc_RNA (1)...(19): siRNA sense strand
gaaagagacuggaaaguga

SEQ ID NO: 790219 - RNA, 19 nt, Homo sapiens
  misc_RNA (1)...(19): siRNA sense strand
agaagaaggugcuguauua

SEQ ID NO: 790220 - RNA, 19 nt, Homo sapiens
  misc_RNA (1)...(19): siRNA sense strand
gcaagugaauuuccugaua

SEQ ID NO: 790221 - RNA, 19 nt, Homo sapiens
  misc_RNA (1)...(19): siRNA sense strand
gaaagcagaucucagcauu

SEQ ID NO: 790222 - RNA, 19 nt, Homo sapiens
  misc_RNA (1)...(19): siRNA sense strand
caacaacacccaaaugaua

SEQ ID NO: 790223 - RNA, 19 nt, Homo sapiens
  misc_RNA (1)...(19): siRNA sense strand
gauuauggcuuuaguguug

SEQ ID NO: 790224 - RNA, 19 nt, Homo sapiens
  misc_RNA (1)...(19): siRNA sense strand
gaaggaaccugcaaauagu

SEQ ID NO: 790225 - RNA, 19 nt, Homo sapiens
  misc_RNA (1)...(19): siRNA sense strand
cgaagauccuccauuaaua

SEQ ID NO: 790226 - RNA, 19 nt, Homo sapiens
  misc_RNA (1)...(19): siRNA sense strand
gaugacagcucuucuuaug

SEQ ID NO: 790227 - RNA, 19 nt, Homo sapiens
  misc_RNA (1)...(19): siRNA sense strand
ggaacgcuaugaugauaua

SEQ ID NO: 790228 - RNA, 19 nt, Homo sapiens
  misc_RNA (1)...(19): siRNA sense strand
ugaaggaucucaacaagaa

SEQ ID NO: 790229 - RNA, 19 nt, Homo sapiens
  misc_RNA (1)...(19): siRNA sense strand
gcaccuacauuguuuauca

SEQ ID NO: 790230 - RNA, 19 nt, Homo sapiens
  misc_RNA (1)...(19): siRNA sense strand
ggaacaaccucuuggaaau

SEQ ID NO: 790231 - RNA, 19 nt, Homo sapiens
  misc_RNA (1)...(19): siRNA sense strand
ccaaggagaugguggcuaa

SEQ ID NO: 790232 - RNA, 19 nt, Homo sapiens
  misc_RNA (1)...(19): siRNA sense strand
caagugaauuuccugauaa

SEQ ID NO: 790233 - RNA, 19 nt, Homo sapiens
  misc_RNA (1)...(19): siRNA sense strand
ggaaguaaguccaagaaca

SEQ ID NO: 790234 - RNA, 19 nt, Homo sapiens
  misc_RNA (1)...(19): siRNA sense strand
ggagaugggugguggagaa

SEQ ID NO: 790235 - RNA, 19 nt, Homo sapiens
  misc_RNA (1)...(19): siRNA sense strand
ggaaguaauuugcuaugga

SEQ ID NO: 790236 - RNA, 19 nt, Homo sapiens
  misc_RNA (1)...(19): siRNA sense strand
gcucaugccucuaaaguuc

SEQ ID NO: 790237 - RNA, 19 nt, Homo sapiens
  misc_RNA (1)...(19): siRNA sense strand
caacacccgugaauagauu

SEQ ID NO: 790238 - RNA, 19 nt, Homo sapiens
  misc_RNA (1)...(19): siRNA sense strand
ggaccaagauagugauuca

SEQ ID NO: 790239 - RNA, 19 nt, Homo sapiens
  misc_RNA (1)...(19): siRNA sense strand
gaagauccuccauuaauau

SEQ ID NO: 790240 - RNA, 19 nt, Homo sapiens
  misc_RNA (1)...(19): siRNA sense strand
gaucaguacugguguggaa

SEQ ID NO: 790241 - RNA, 19 nt, Homo sapiens
  misc_RNA (1)...(19): siRNA sense strand
gaucugcacuccaugauag

SEQ ID NO: 790242 - RNA, 19 nt, Homo sapiens
  misc_RNA (1)...(19): siRNA sense strand
gugaauagauuaaguaugc

SEQ ID NO: 790243 - RNA, 19 nt, Homo sapiens
  misc_RNA (1)...(19): siRNA sense strand
gaaguaaguccaagaacaa

SEQ ID NO: 790244 - RNA, 19 nt, Homo sapiens
  misc_RNA (1)...(19): siRNA sense strand
gaaggaaaguuuaguaacg

SEQ ID NO: 790245 - RNA, 19 nt, Homo sapiens
  misc_RNA (1)...(19): siRNA sense strand
gaaagggauugauguugug

SEQ ID NO: 790246 - RNA, 19 nt, Homo sapiens
  misc_RNA (1)...(19): siRNA sense strand
guccuuaacugauucauug

SEQ ID NO: 790247 - RNA, 19 nt, Homo sapiens
  misc_RNA (1)...(19): siRNA sense strand
uugcgaagauccuccauua

SEQ ID NO: 790248 - RNA, 19 nt, Homo sapiens
  misc_RNA (1)...(19): siRNA sense strand
caagaagacuggagaagag

SEQ ID NO: 790249 - RNA, 19 nt, Homo sapiens
  misc_RNA (1)...(19): siRNA sense strand
gacaagaguuucuguaguc

SEQ ID NO: 790250 - RNA, 19 nt, Homo sapiens
  misc_RNA (1)...(19): siRNA sense strand
gaagugauuuccucugaag

SEQ ID NO: 790251 - RNA, 19 nt, Homo sapiens
  misc_RNA (1)...(19): siRNA sense strand
gaccaaagguuaacagcau

SEQ ID NO: 790252 - RNA, 19 nt, Homo sapiens
  misc_RNA (1)...(19): siRNA sense strand
gguaaaggaugcugcugaa

SEQ ID NO: 790253 - RNA, 19 nt, Homo sapiens
  misc_RNA (1)...(19): siRNA sense strand
gaaacuggcccgugaguca

SEQ ID NO: 790254 - RNA, 19 nt, Homo sapiens
  misc_RNA (1)...(19): siRNA sense strand
ugacagcucuucuuaugau

SEQ ID NO: 790255 - RNA, 19 nt, Homo sapiens
  misc_RNA (1)...(19): siRNA sense strand
uuaaacaucugccucaaau

SEQ ID NO: 790256 - RNA, 19 nt, Homo sapiens
  misc_RNA (1)...(19): siRNA sense strand
gauauuggagcuagcauuu

SEQ ID NO: 790257 - RNA, 19 nt, Homo sapiens
  misc_RNA (1)...(19): siRNA sense strand
gaggaggaauugcagaaga

SEQ ID NO: 790258 - RNA, 19 nt, Homo sapiens
  misc_RNA (1)...(19): siRNA sense strand
ggaaaugagcagaaugauu

SEQ ID NO: 790259 - RNA, 19 nt, Homo sapiens
  misc_RNA (1)...(19): siRNA sense strand
ugacagagcacccugauau

SEQ ID NO: 790260 - RNA, 19 nt, Homo sapiens
  misc_RNA (1)...(19): siRNA sense strand
ugaaagggauugauguugu

SEQ ID NO: 790261 - RNA, 19 nt, Homo sapiens
  misc_RNA (1)...(19): siRNA sense strand
ggucacaaauguccacaga

SEQ ID NO: 790262 - RNA, 19 nt, Homo sapiens
  misc_RNA (1)...(19): siRNA sense strand
cagcauuuguucacuguaa

SEQ ID NO: 790263 - RNA, 19 nt, Homo sapiens
  misc_RNA (1)...(19): siRNA sense strand
ucuauuccauugccaguua

SEQ ID NO: 790264 - RNA, 19 nt, Homo sapiens
  misc_RNA (1)...(19): siRNA sense strand
gcgaagauccuccauuaau

SEQ ID NO: 790265 - RNA, 19 nt, Homo sapiens
  misc_RNA (1)...(19): siRNA sense strand
ucugguggaugcauucuua

SEQ ID NO: 790266 - RNA, 19 nt, Homo sapiens
  misc_RNA (1)...(19): siRNA sense strand
caggcgagcucuuggcuuu

SEQ ID NO: 790267 - RNA, 19 nt, Homo sapiens
  misc_RNA (1)...(19): siRNA sense strand
aaugagaccacuuugauua

SEQ ID NO: 790268 - RNA, 19 nt, Homo sapiens
  misc_RNA (1)...(19): siRNA sense strand
guugauugguguucucuuu

SEQ ID NO: 790269 - RNA, 19 nt, Homo sapiens
  misc_RNA (1)...(19): siRNA sense strand
gcacuucacugagaucuac

SEQ ID NO: 790270 - RNA, 19 nt, Homo sapiens
  misc_RNA (1)...(19): siRNA sense strand
guggaacgcuaugaugaua

SEQ ID NO: 790271 - RNA, 19 nt, Homo sapiens
  misc_RNA (1)...(19): siRNA sense strand
gauagugauucaaauaugg

SEQ ID NO: 790272 - RNA, 19 nt, Homo sapiens
  misc_RNA (1)...(19): siRNA sense strand
gauuuccucugaagauauu

SEQ ID NO: 790273 - RNA, 19 nt, Homo sapiens
  misc_RNA (1)...(19): siRNA sense strand
gguccugccucuccuugua

SEQ ID NO: 790274 - RNA, 19 nt, Homo sapiens
  misc_RNA (1)...(19): siRNA sense strand
gcaagaagacuggagaaga

SEQ ID NO: 790275 - RNA, 19 nt, Homo sapiens
  misc_RNA (1)...(19): siRNA sense strand
cggaaagggucacaaaugu

SEQ ID NO: 790276 - RNA, 19 nt, Homo sapiens
  misc_RNA (1)...(19): siRNA sense strand
aaacaucugccucaaauau

SEQ ID NO: 790277 - RNA, 19 nt, Homo sapiens
  misc_RNA (1)...(19): siRNA sense strand
caacaccuccuuauuggaa

SEQ ID NO: 790278 - RNA, 19 nt, Homo sapiens
  misc_RNA (1)...(19): siRNA sense strand
guaauuugcuauggacuga

SEQ ID NO: 790279 - RNA, 19 nt, Homo sapiens
  misc_RNA (1)...(19): siRNA sense strand
ggacugacccuuccauugg

SEQ ID NO: 790280 - RNA, 19 nt, Homo sapiens
  misc_RNA (1)...(19): siRNA sense strand
ucacugagaucuacaacuc

SEQ ID NO: 790281 - RNA, 19 nt, Homo sapiens
  misc_RNA (1)...(19): siRNA sense strand
ugaaggaaccugcaaauag

SEQ ID NO: 790282 - RNA, 19 nt, Homo sapiens
  misc_RNA (1)...(19): siRNA sense strand
gaaaguuuaguaacgauga

SEQ ID NO: 790283 - RNA, 19 nt, Homo sapiens
  misc_RNA (1)...(19): siRNA sense strand
guacugcucaugccucuaa

SEQ ID NO: 790284 - RNA, 19 nt, Homo sapiens
  misc_RNA (1)...(19): siRNA sense strand
guauauacagacuggauua

SEQ ID NO: 790285 - RNA, 19 nt, Homo sapiens
  misc_RNA (1)...(19): siRNA sense strand
cagcaugacugccauuaca

SEQ ID NO: 790286 - RNA, 19 nt, Homo sapiens
  misc_RNA (1)...(19): siRNA sense strand
gaugcauucuuagguauuu

SEQ ID NO: 790287 - RNA, 19 nt, Homo sapiens
  misc_RNA (1)...(19): siRNA sense strand
guggaugcauucuuaggua

SEQ ID NO: 790288 - RNA, 19 nt, Homo sapiens
  misc_RNA (1)...(19): siRNA sense strand
gaguaacccagcuauuaua

SEQ ID NO: 790289 - RNA, 19 nt, Homo sapiens
  misc_RNA (1)...(19): siRNA sense strand
agaaauggauaaugagugu

SEQ ID NO: 790290 - RNA, 19 nt, Homo sapiens
  misc_RNA (1)...(19): siRNA sense strand
cagacuggauuauggcuuu

SEQ ID NO: 790291 - RNA, 19 nt, Homo sapiens
  misc_RNA (1)...(19): siRNA sense strand
gaaugagaccacuuugauu

SEQ ID NO: 790292 - RNA, 19 nt, Homo sapiens
  misc_RNA (1)...(19): siRNA sense strand
ggacugccuuaaggaagua

SEQ ID NO: 790293 - RNA, 19 nt, Homo sapiens
  misc_RNA (1)...(19): siRNA sense strand
caacagaauugcgaagauc

SEQ ID NO: 790294 - RNA, 19 nt, Homo sapiens
  misc_RNA (1)...(19): siRNA sense strand
ucaaagugcugcugucagu

SEQ ID NO: 790295 - RNA, 19 nt, Homo sapiens
  misc_RNA (1)...(19): siRNA sense strand
uauaagcucuacucccaaa

SEQ ID NO: 790296 - RNA, 19 nt, Homo sapiens
  misc_RNA (1)...(19): siRNA sense strand
cgcaagaauugaaucagua

SEQ ID NO: 790297 - RNA, 19 nt, Homo sapiens
  misc_RNA (1)...(19): siRNA sense strand
gaagaaagagacuggaaag

SEQ ID NO: 790298 - RNA, 19 nt, Homo sapiens
  misc_RNA (1)...(19): siRNA sense strand
ggaggucacugcauuuggu

SEQ ID NO: 790299 - RNA, 19 nt, Homo sapiens
  misc_RNA (1)...(19): siRNA sense strand
ugaaauagucacugaagaa

SEQ ID NO: 790300 - RNA, 19 nt, Homo sapiens
  misc_RNA (1)...(19): siRNA sense strand
gaacaaccucuuggaaaug

SEQ ID NO: 790301 - RNA, 19 nt, Homo sapiens
  misc_RNA (1)...(19): siRNA sense strand
gacgagagguggcaaaugc

SEQ ID NO: 790302 - RNA, 19 nt, Homo sapiens
  misc_RNA (1)...(19): siRNA sense strand
guugagacuugugaauaua

SEQ ID NO: 790303 - RNA, 19 nt, Homo sapiens
  misc_RNA (1)...(19): siRNA sense strand
gaagagauucugccagcuu

SEQ ID NO: 790304 - RNA, 19 nt, Homo sapiens
  misc_RNA (1)...(19): siRNA sense strand
acaucugccucaaauauuu

SEQ ID NO: 790305 - RNA, 19 nt, Homo sapiens
  misc_RNA (1)...(19): siRNA sense strand
ccucggagaccaaagguua

SEQ ID NO: 790306 - RNA, 19 nt, Homo sapiens
  misc_RNA (1)...(19): siRNA sense strand
gaaauagucacugaagaau

SEQ ID NO: 790307 - RNA, 19 nt, Homo sapiens
  misc_RNA (1)...(19): siRNA sense strand
gagaccacuuugauuaaau

SEQ ID NO: 790308 - RNA, 19 nt, Homo sapiens
  misc_RNA (1)...(19): siRNA sense strand
gauauuaggggcaauguua

SEQ ID NO: 790309 - RNA, 19 nt, Homo sapiens
  misc_RNA (1)...(19): siRNA sense strand
ucuaaacucuccuccuuug

SEQ ID NO: 790310 - RNA, 19 nt, Homo sapiens
  misc_RNA (1)...(19): siRNA sense strand
aagagauucugccagcuua

SEQ ID NO: 790311 - RNA, 19 nt, Homo sapiens
  misc_RNA (1)...(19): siRNA sense strand
gccaaacccugcaucuaug

SEQ ID NO: 790312 - RNA, 19 nt, Homo sapiens
  misc_RNA (1)...(19): siRNA sense strand
gcugaugcccuuacagaaa

SEQ ID NO: 790313 - RNA, 19 nt, Homo sapiens
  misc_RNA (1)...(19): siRNA sense strand
aagaagugauuuccucuga

SEQ ID NO: 790314 - RNA, 19 nt, Homo sapiens
  misc_RNA (1)...(19): siRNA sense strand
ggugaaggaucucaacaag

SEQ ID NO: 790315 - RNA, 19 nt, Homo sapiens
  misc_RNA (1)...(19): siRNA sense strand
gggcauguuucuaccaguu

SEQ ID NO: 790316 - RNA, 19 nt, Homo sapiens
  misc_RNA (1)...(19): siRNA sense strand
gcacuugauuccacgauac

SEQ ID NO: 790317 - RNA, 19 nt, Homo sapiens
  misc_RNA (1)...(19): siRNA sense strand
gcagauugcuuaugaaaua

SEQ ID NO: 790318 - RNA, 19 nt, Homo sapiens
  misc_RNA (1)...(19): siRNA sense strand
gaaagagacuggaaaguga

SEQ ID NO: 790319 - RNA, 19 nt, Homo sapiens
  misc_RNA (1)...(19): siRNA sense strand
agaagaaggugcuguauua

SEQ ID NO: 790320 - RNA, 19 nt, Homo sapiens
  misc_RNA (1)...(19): siRNA sense strand
gcaagugaauuuccugaua

SEQ ID NO: 790321 - RNA, 19 nt, Homo sapiens
  misc_RNA (1)...(19): siRNA sense strand
gaaagcagaucucagcauu

SEQ ID NO: 790322 - RNA, 19 nt, Homo sapiens
  misc_RNA (1)...(19): siRNA sense strand
caacaacacccaaaugaua

SEQ ID NO: 790323 - RNA, 19 nt, Homo sapiens
  misc_RNA (1)...(19): siRNA sense strand
gauuauggcuuuaguguug

SEQ ID NO: 790324 - RNA, 19 nt, Homo sapiens
  misc_RNA (1)...(19): siRNA sense strand
gaaggaaccugcaaauagu

SEQ ID NO: 790325 - RNA, 19 nt, Homo sapiens
  misc_RNA (1)...(19): siRNA sense strand
cgaagauccuccauuaaua

SEQ ID NO: 790326 - RNA, 19 nt, Homo sapiens
  misc_RNA (1)...(19): siRNA sense strand
gaugacagcucuucuuaug

SEQ ID NO: 790327 - RNA, 19 nt, Homo sapiens
  misc_RNA (1)...(19): siRNA sense strand
ggaacgcuaugaugauaua

SEQ ID NO: 790328 - RNA, 19 nt, Homo sapiens
  misc_RNA (1)...(19): siRNA sense strand
ugaaggaucucaacaagaa

SEQ ID NO: 790329 - RNA, 19 nt, Homo sapiens
  misc_RNA (1)...(19): siRNA sense strand
gcaccuacauuguuuauca

SEQ ID NO: 790330 - RNA, 19 nt, Homo sapiens
  misc_RNA (1)...(19): siRNA sense strand
ggaacaaccucuuggaaau

SEQ ID NO: 790331 - RNA, 19 nt, Homo sapiens
  misc_RNA (1)...(19): siRNA sense strand
ccaaggagaugguggcuaa

SEQ ID NO: 790332 - RNA, 19 nt, Homo sapiens
  misc_RNA (1)...(19): siRNA sense strand
caagugaauuuccugauaa

SEQ ID NO: 790333 - RNA, 19 nt, Homo sapiens
  misc_RNA (1)...(19): siRNA sense strand
ggaaguaaguccaagaaca

SEQ ID NO: 790334 - RNA, 19 nt, Homo sapiens
  misc_RNA (1)...(19): siRNA sense strand
ggagaugggugguggagaa

SEQ ID NO: 790335 - RNA, 19 nt, Homo sapiens
  misc_RNA (1)...(19): siRNA sense strand
ggaaguaauuugcuaugga

SEQ ID NO: 790336 - RNA, 19 nt, Homo sapiens
  misc_RNA (1)...(19): siRNA sense strand
gcucaugccucuaaaguuc

SEQ ID NO: 790337 - RNA, 19 nt, Homo sapiens
  misc_RNA (1)...(19): siRNA sense strand
caacacccgugaauagauu

SEQ ID NO: 790338 - RNA, 19 nt, Homo sapiens
  misc_RNA (1)...(19): siRNA sense strand
ggaccaagauagugauuca

SEQ ID NO: 790339 - RNA, 19 nt, Homo sapiens
  misc_RNA (1)...(19): siRNA sense strand
gaagauccuccauuaauau

SEQ ID NO: 790340 - RNA, 19 nt, Homo sapiens
  misc_RNA (1)...(19): siRNA sense strand
gaucaguacugguguggaa

SEQ ID NO: 790341 - RNA, 19 nt, Homo sapiens
  misc_RNA (1)...(19): siRNA sense strand
gaucugcacuccaugauag

SEQ ID NO: 790342 - RNA, 19 nt, Homo sapiens
  misc_RNA (1)...(19): siRNA sense strand
gugaauagauuaaguaugc

SEQ ID NO: 790343 - RNA, 19 nt, Homo sapiens
  misc_RNA (1)...(19): siRNA sense strand
gaaguaaguccaagaacaa

SEQ ID NO: 790344 - RNA, 19 nt, Homo sapiens
  misc_RNA (1)...(19): siRNA sense strand
gaaggaaaguuuaguaacg

SEQ ID NO: 790345 - RNA, 19 nt, Homo sapiens
  misc_RNA (1)...(19): siRNA sense strand
gaaagggauugauguugug

SEQ ID NO: 790346 - RNA, 19 nt, Homo sapiens
  misc_RNA (1)...(19): siRNA sense strand
guccuuaacugauucauug

SEQ ID NO: 790347 - RNA, 19 nt, Homo sapiens
  misc_RNA (1)...(19): siRNA sense strand
uugcgaagauccuccauua

SEQ ID NO: 790348 - RNA, 19 nt, Homo sapiens
  misc_RNA (1)...(19): siRNA sense strand
caagaagacuggagaagag

SEQ ID NO: 790349 - RNA, 19 nt, Homo sapiens
  misc_RNA (1)...(19): siRNA sense strand
gacaagaguuucuguaguc

SEQ ID NO: 790350 - RNA, 19 nt, Homo sapiens
  misc_RNA (1)...(19): siRNA sense strand
gaagugauuuccucugaag

SEQ ID NO: 790351 - RNA, 19 nt, Homo sapiens
  misc_RNA (1)...(19): siRNA sense strand
gaccaaagguuaacagcau

SEQ ID NO: 790352 - RNA, 19 nt, Homo sapiens
  misc_RNA (1)...(19): siRNA sense strand
gguaaaggaugcugcugaa

SEQ ID NO: 790353 - RNA, 19 nt, Homo sapiens
  misc_RNA (1)...(19): siRNA sense strand
gaaacuggcccgugaguca

SEQ ID NO: 790354 - RNA, 19 nt, Homo sapiens
  misc_RNA (1)...(19): siRNA sense strand
ugacagcucuucuuaugau

SEQ ID NO: 790355 - RNA, 19 nt, Homo sapiens
  misc_RNA (1)...(19): siRNA sense strand
uuaaacaucugccucaaau

SEQ ID NO: 790356 - RNA, 19 nt, Homo sapiens
  misc_RNA (1)...(19): siRNA sense strand
gauauuggagcuagcauuu

SEQ ID NO: 790357 - RNA, 19 nt, Homo sapiens
  misc_RNA (1)...(19): siRNA sense strand
gaggaggaauugcagaaga

SEQ ID NO: 790358 - RNA, 19 nt, Homo sapiens
  misc_RNA (1)...(19): siRNA sense strand
ggaaaugagcagaaugauu

SEQ ID NO: 790359 - RNA, 19 nt, Homo sapiens
  misc_RNA (1)...(19): siRNA sense strand
ugacagagcacccugauau

SEQ ID NO: 790360 - RNA, 19 nt, Homo sapiens
  misc_RNA (1)...(19): siRNA sense strand
ugaaagggauugauguugu

SEQ ID NO: 790361 - RNA, 19 nt, Homo sapiens
  misc_RNA (1)...(19): siRNA sense strand
ggucacaaauguccacaga

SEQ ID NO: 790362 - RNA, 19 nt, Homo sapiens
  misc_RNA (1)...(19): siRNA sense strand
cagcauuuguucacuguaa

SEQ ID NO: 790363 - RNA, 19 nt, Homo sapiens
  misc_RNA (1)...(19): siRNA sense strand
ucuauuccauugccaguua

SEQ ID NO: 790364 - RNA, 19 nt, Homo sapiens
  misc_RNA (1)...(19): siRNA sense strand
gcgaagauccuccauuaau

SEQ ID NO: 790365 - RNA, 19 nt, Homo sapiens
  misc_RNA (1)...(19): siRNA sense strand
ucugguggaugcauucuua

SEQ ID NO: 790366 - RNA, 19 nt, Homo sapiens
  misc_RNA (1)...(19): siRNA sense strand
caggcgagcucuuggcuuu

SEQ ID NO: 790367 - RNA, 19 nt, Homo sapiens
  misc_RNA (1)...(19): siRNA sense strand
aaugagaccacuuugauua

SEQ ID NO: 790368 - RNA, 19 nt, Homo sapiens
  misc_RNA (1)...(19): siRNA sense strand
guugauugguguucucuuu

SEQ ID NO: 790369 - RNA, 19 nt, Homo sapiens
  misc_RNA (1)...(19): siRNA sense strand
gcacuucacugagaucuac

SEQ ID NO: 790370 - RNA, 19 nt, Homo sapiens
  misc_RNA (1)...(19): siRNA sense strand
guggaacgcuaugaugaua

SEQ ID NO: 790371 - RNA, 19 nt, Homo sapiens
  misc_RNA (1)...(19): siRNA sense strand
gauagugauucaaauaugg

SEQ ID NO: 790372 - RNA, 19 nt, Homo sapiens
  misc_RNA (1)...(19): siRNA sense strand
gauuuccucugaagauauu

SEQ ID NO: 790373 - RNA, 19 nt, Homo sapiens
  misc_RNA (1)...(19): siRNA sense strand
gguccugccucuccuugua

SEQ ID NO: 790374 - RNA, 19 nt, Homo sapiens
  misc_RNA (1)...(19): siRNA sense strand
gcaagaagacuggagaaga

SEQ ID NO: 790375 - RNA, 19 nt, Homo sapiens
  misc_RNA (1)...(19): siRNA sense strand
cggaaagggucacaaaugu

SEQ ID NO: 790376 - RNA, 19 nt, Homo sapiens
  misc_RNA (1)...(19): siRNA sense strand
aaacaucugccucaaauau

SEQ ID NO: 790377 - RNA, 19 nt, Homo sapiens
  misc_RNA (1)...(19): siRNA sense strand
caacaccuccuuauuggaa

SEQ ID NO: 790378 - RNA, 19 nt, Homo sapiens
  misc_RNA (1)...(19): siRNA sense strand
guaauuugcuauggacuga

SEQ ID NO: 790379 - RNA, 19 nt, Homo sapiens
  misc_RNA (1)...(19): siRNA sense strand
ggacugacccuuccauugg

SEQ ID NO: 790380 - RNA, 19 nt, Homo sapiens
  misc_RNA (1)...(19): siRNA sense strand
ucacugagaucuacaacuc

SEQ ID NO: 790381 - RNA, 19 nt, Homo sapiens
  misc_RNA (1)...(19): siRNA sense strand
ugaaggaaccugcaaauag

SEQ ID NO: 790382 - RNA, 19 nt, Homo sapiens
  misc_RNA (1)...(19): siRNA sense strand
gaaaguuuaguaacgauga

SEQ ID NO: 790383 - RNA, 19 nt, Homo sapiens
  misc_RNA (1)...(19): siRNA sense strand
guacugcucaugccucuaa

SEQ ID NO: 790384 - RNA, 19 nt, Homo sapiens
  misc_RNA (1)...(19): siRNA sense strand
guauauacagacuggauua

SEQ ID NO: 790385 - RNA, 19 nt, Homo sapiens
  misc_RNA (1)...(19): siRNA sense strand
cagcaugacugccauuaca

SEQ ID NO: 790386 - RNA, 19 nt, Homo sapiens
  misc_RNA (1)...(19): siRNA sense strand
gaugcauucuuagguauuu

SEQ ID NO: 790387 - RNA, 19 nt, Homo sapiens
  misc_RNA (1)...(19): siRNA sense strand
guggaugcauucuuaggua

SEQ ID NO: 790388 - RNA, 19 nt, Homo sapiens
  misc_RNA (1)...(19): siRNA sense strand
gaguaacccagcuauuaua

SEQ ID NO: 790389 - RNA, 19 nt, Homo sapiens
  misc_RNA (1)...(19): siRNA sense strand
agaaauggauaaugagugu

SEQ ID NO: 790390 - RNA, 19 nt, Homo sapiens
  misc_RNA (1)...(19): siRNA sense strand
cagacuggauuauggcuuu

SEQ ID NO: 790391 - RNA, 19 nt, Homo sapiens
  misc_RNA (1)...(19): siRNA sense strand
gaaugagaccacuuugauu

SEQ ID NO: 790392 - RNA, 19 nt, Homo sapiens
  misc_RNA (1)...(19): siRNA sense strand
ggacugccuuaaggaagua

SEQ ID NO: 790393 - RNA, 19 nt, Homo sapiens
  misc_RNA (1)...(19): siRNA sense strand
caacagaauugcgaagauc

SEQ ID NO: 790394 - RNA, 19 nt, Homo sapiens
  misc_RNA (1)...(19): siRNA sense strand
ucaaagugcugcugucagu

SEQ ID NO: 790395 - RNA, 19 nt, Homo sapiens
  misc_RNA (1)...(19): siRNA sense strand
uauaagcucuacucccaaa

SEQ ID NO: 790396 - RNA, 19 nt, Homo sapiens
  misc_RNA (1)...(19): siRNA sense strand
cgcaagaauugaaucagua

SEQ ID NO: 790397 - RNA, 19 nt, Homo sapiens
  misc_RNA (1)...(19): siRNA sense strand
gaagaaagagacuggaaag

SEQ ID NO: 790398 - RNA, 19 nt, Homo sapiens
  misc_RNA (1)...(19): siRNA sense strand
ggaggucacugcauuuggu

SEQ ID NO: 790399 - RNA, 19 nt, Homo sapiens
  misc_RNA (1)...(19): siRNA sense strand
ugaaauagucacugaagaa

SEQ ID NO: 790400 - RNA, 19 nt, Homo sapiens
  misc_RNA (1)...(19): siRNA sense strand
gaacaaccucuuggaaaug

SEQ ID NO: 790401 - RNA, 19 nt, Homo sapiens
  misc_RNA (1)...(19): siRNA sense strand
gacgagagguggcaaaugc

SEQ ID NO: 790402 - RNA, 19 nt, Homo sapiens
  misc_RNA (1)...(19): siRNA sense strand
guugagacuugugaauaua

SEQ ID NO: 790403 - RNA, 19 nt, Homo sapiens
  misc_RNA (1)...(19): siRNA sense strand
gaagagauucugccagcuu

SEQ ID NO: 790404 - RNA, 19 nt, Homo sapiens
  misc_RNA (1)...(19): siRNA sense strand
acaucugccucaaauauuu

SEQ ID NO: 790405 - RNA, 19 nt, Homo sapiens
  misc_RNA (1)...(19): siRNA sense strand
ccucggagaccaaagguua

SEQ ID NO: 790406 - RNA, 19 nt, Homo sapiens
  misc_RNA (1)...(19): siRNA sense strand
gaaauagucacugaagaau

SEQ ID NO: 790407 - RNA, 19 nt, Homo sapiens
  misc_RNA (1)...(19): siRNA sense strand
gagaccacuuugauuaaau

SEQ ID NO: 790408 - RNA, 19 nt, Homo sapiens
  misc_RNA (1)...(19): siRNA sense strand
gauauuaggggcaauguua

SEQ ID NO: 790409 - RNA, 19 nt, Homo sapiens
  misc_RNA (1)...(19): siRNA sense strand
ucuaaacucuccuccuuug

SEQ ID NO: 790410 - RNA, 19 nt, Homo sapiens
  misc_RNA (1)...(19): siRNA sense strand
aagagauucugccagcuua

SEQ ID NO: 790411 - RNA, 19 nt, Homo sapiens
  misc_RNA (1)...(19): siRNA sense strand
gccaaacccugcaucuaug

SEQ ID NO: 790412 - RNA, 19 nt, Homo sapiens
  misc_RNA (1)...(19): siRNA sense strand
gcugaugcccuuacagaaa

SEQ ID NO: 790413 - RNA, 19 nt, Homo sapiens
  misc_RNA (1)...(19): siRNA sense strand
aagaagugauuuccucuga

SEQ ID NO: 790414 - RNA, 19 nt, Homo sapiens
  misc_RNA (1)...(19): siRNA sense strand
ggugaaggaucucaacaag

SEQ ID NO: 790415 - RNA, 19 nt, Homo sapiens
  misc_RNA (1)...(19): siRNA sense strand
gggcauguuucuaccaguu

SEQ ID NO: 790416 - RNA, 19 nt, Homo sapiens
  misc_RNA (1)...(19): siRNA sense strand
gcacuugauuccacgauac

SEQ ID NO: 790417 - RNA, 19 nt, Homo sapiens
  misc_RNA (1)...(19): siRNA sense strand
uaacaaaugucucugauga

SEQ ID NO: 790418 - RNA, 19 nt, Homo sapiens
  misc_RNA (1)...(19): siRNA sense strand
gaaagucacaccauuauaa

SEQ ID NO: 790419 - RNA, 19 nt, Homo sapiens
  misc_RNA (1)...(19): siRNA sense strand
ggaauaggauaccagauuu

SEQ ID NO: 790420 - RNA, 19 nt, Homo sapiens
  misc_RNA (1)...(19): siRNA sense strand
ugaauccgcugcuuuauaa

SEQ ID NO: 790421 - RNA, 19 nt, Homo sapiens
  misc_RNA (1)...(19): siRNA sense strand
gaacugacacuagugaaua

SEQ ID NO: 790422 - RNA, 19 nt, Homo sapiens
  misc_RNA (1)...(19): siRNA sense strand
gcuauagucugguaucaaa

SEQ ID NO: 790423 - RNA, 19 nt, Homo sapiens
  misc_RNA (1)...(19): siRNA sense strand
ggaaggagaugguucuagu

SEQ ID NO: 790424 - RNA, 19 nt, Homo sapiens
  misc_RNA (1)...(19): siRNA sense strand
cuacuaaacugcuaaagga

SEQ ID NO: 790425 - RNA, 19 nt, Homo sapiens
  misc_RNA (1)...(19): siRNA sense strand
gggaagacuuguuacauug

SEQ ID NO: 790426 - RNA, 19 nt, Homo sapiens
  misc_RNA (1)...(19): siRNA sense strand
ugaaacaggauacucauua

SEQ ID NO: 790427 - RNA, 19 nt, Homo sapiens
  misc_RNA (1)...(19): siRNA sense strand
gaaccucagugugaaacua

SEQ ID NO: 790428 - RNA, 19 nt, Homo sapiens
  misc_RNA (1)...(19): siRNA sense strand
caaugaauccgcugcuuua

SEQ ID NO: 790429 - RNA, 19 nt, Homo sapiens
  misc_RNA (1)...(19): siRNA sense strand
uauaugggcuuacaaugaa

SEQ ID NO: 790430 - RNA, 19 nt, Homo sapiens
  misc_RNA (1)...(19): siRNA sense strand
gaucaaagaaagcaaagaa

SEQ ID NO: 790431 - RNA, 19 nt, Homo sapiens
  misc_RNA (1)...(19): siRNA sense strand
cacgagaucuuccuugauu

SEQ ID NO: 790432 - RNA, 19 nt, Homo sapiens
  misc_RNA (1)...(19): siRNA sense strand
gaacagagagaaaucaagu

SEQ ID NO: 790433 - RNA, 19 nt, Homo sapiens
  misc_RNA (1)...(19): siRNA sense strand
gaacaacucacagcacauu

SEQ ID NO: 790434 - RNA, 19 nt, Homo sapiens
  misc_RNA (1)...(19): siRNA sense strand
gaaacaggauacucauuac

SEQ ID NO: 790435 - RNA, 19 nt, Homo sapiens
  misc_RNA (1)...(19): siRNA sense strand
caaagucacagaugcuaua

SEQ ID NO: 790436 - RNA, 19 nt, Homo sapiens
  misc_RNA (1)...(19): siRNA sense strand
agauaaaccucuacuugaa

SEQ ID NO: 790437 - RNA, 19 nt, Homo sapiens
  misc_RNA (1)...(19): siRNA sense strand
gaaaacagcacaugugaaa

SEQ ID NO: 790438 - RNA, 19 nt, Homo sapiens
  misc_RNA (1)...(19): siRNA sense strand
gggaauuguucgaguugua

SEQ ID NO: 790439 - RNA, 19 nt, Homo sapiens
  misc_RNA (1)...(19): siRNA sense strand
guaagagggucugcauuug

SEQ ID NO: 790440 - RNA, 19 nt, Homo sapiens
  misc_RNA (1)...(19): siRNA sense strand
ggguuuaacuccauuuguu

SEQ ID NO: 790441 - RNA, 19 nt, Homo sapiens
  misc_RNA (1)...(19): siRNA sense strand
caaaggacaauaacaaaug

SEQ ID NO: 790442 - RNA, 19 nt, Homo sapiens
  misc_RNA (1)...(19): siRNA sense strand
ccacacagcauaccucuga

SEQ ID NO: 790443 - RNA, 19 nt, Homo sapiens
  misc_RNA (1)...(19): siRNA sense strand
caaagaaagcaaagaauuc

SEQ ID NO: 790444 - RNA, 19 nt, Homo sapiens
  misc_RNA (1)...(19): siRNA sense strand
gaacuuauaaacagcgauu

SEQ ID NO: 790445 - RNA, 19 nt, Homo sapiens
  misc_RNA (1)...(19): siRNA sense strand
gcagaaagaacuuauaaac

SEQ ID NO: 790446 - RNA, 19 nt, Homo sapiens
  misc_RNA (1)...(19): siRNA sense strand
uauggaagauuaagucaug

SEQ ID NO: 790447 - RNA, 19 nt, Homo sapiens
  misc_RNA (1)...(19): siRNA sense strand
gaaaccagaccucauagau

SEQ ID NO: 790448 - RNA, 19 nt, Homo sapiens
  misc_RNA (1)...(19): siRNA sense strand
gaaaugcagucucucucau

SEQ ID NO: 790449 - RNA, 19 nt, Homo sapiens
  misc_RNA (1)...(19): siRNA sense strand
ggaaguacauagggaagga

SEQ ID NO: 790450 - RNA, 19 nt, Homo sapiens
  misc_RNA (1)...(19): siRNA sense strand
caagggcucuucauucagu

SEQ ID NO: 790451 - RNA, 19 nt, Homo sapiens
  misc_RNA (1)...(19): siRNA sense strand
gagcauaugaucaacaaau

SEQ ID NO: 790452 - RNA, 19 nt, Homo sapiens
  misc_RNA (1)...(19): siRNA sense strand
gaagacuuguuacauugug

SEQ ID NO: 790453 - RNA, 19 nt, Homo sapiens
  misc_RNA (1)...(19): siRNA sense strand
ggaaugguccuagcaaaga

SEQ ID NO: 790454 - RNA, 19 nt, Homo sapiens
  misc_RNA (1)...(19): siRNA sense strand
ggaccaagggcucuucauu

SEQ ID NO: 790455 - RNA, 19 nt, Homo sapiens
  misc_RNA (1)...(19): siRNA sense strand
gaaggagaugguucuagua

SEQ ID NO: 790456 - RNA, 19 nt, Homo sapiens
  misc_RNA (1)...(19): siRNA sense strand
cagauaaaccucuacuuga

SEQ ID NO: 790457 - RNA, 19 nt, Homo sapiens
  misc_RNA (1)...(19): siRNA sense strand
caacugaaacugacaaugg

SEQ ID NO: 790458 - RNA, 19 nt, Homo sapiens
  misc_RNA (1)...(19): siRNA sense strand
ugggaagacuuguuacauu

SEQ ID NO: 790459 - RNA, 19 nt, Homo sapiens
  misc_RNA (1)...(19): siRNA sense strand
guuaugggaagacuuguua

SEQ ID NO: 790460 - RNA, 19 nt, Homo sapiens
  misc_RNA (1)...(19): siRNA sense strand
guaauaguuucaucugcuu

SEQ ID NO: 790461 - RNA, 19 nt, Homo sapiens
  misc_RNA (1)...(19): siRNA sense strand
gggaagguaaugauuguaa

SEQ ID NO: 790462 - RNA, 19 nt, Homo sapiens
  misc_RNA (1)...(19): siRNA sense strand
gcuauaguaugggaaggua

SEQ ID NO: 790463 - RNA, 19 nt, Homo sapiens
  misc_RNA (1)...(19): siRNA sense strand
aaccagaccucauagaugu

SEQ ID NO: 790464 - RNA, 19 nt, Homo sapiens
  misc_RNA (1)...(19): siRNA sense strand
gacuaucucaguuguauuu

SEQ ID NO: 790465 - RNA, 19 nt, Homo sapiens
  misc_RNA (1)...(19): siRNA sense strand
aauagaaagucacaccauu

SEQ ID NO: 790466 - RNA, 19 nt, Homo sapiens
  misc_RNA (1)...(19): siRNA sense strand
gaugggaagaagacuguua

SEQ ID NO: 790467 - RNA, 19 nt, Homo sapiens
  misc_RNA (1)...(19): siRNA sense strand
gaucaacaaauaugggaaa

SEQ ID NO: 790468 - RNA, 19 nt, Homo sapiens
  misc_RNA (1)...(19): siRNA sense strand
aguuucaucugcuuucuua

SEQ ID NO: 790469 - RNA, 19 nt, Homo sapiens
  misc_RNA (1)...(19): siRNA sense strand
ggaaaugcagucucucuca

SEQ ID NO: 790470 - RNA, 19 nt, Homo sapiens
  misc_RNA (1)...(19): siRNA sense strand
gguaaugauuguaagaaag

SEQ ID NO: 790471 - RNA, 19 nt, Homo sapiens
  misc_RNA (1)...(19): siRNA sense strand
gaagguaaugauuguaaga

SEQ ID NO: 790472 - RNA, 19 nt, Homo sapiens
  misc_RNA (1)...(19): siRNA sense strand
gaagagacagccuggaaca

SEQ ID NO: 790473 - RNA, 19 nt, Homo sapiens
  misc_RNA (1)...(19): siRNA sense strand
aaagggaauuguucgaguu

SEQ ID NO: 790474 - RNA, 19 nt, Homo sapiens
  misc_RNA (1)...(19): siRNA sense strand
ucaguggaaugauaaugaa

SEQ ID NO: 790475 - RNA, 19 nt, Homo sapiens
  misc_RNA (1)...(19): siRNA sense strand
ccacagauaacacacaaga

SEQ ID NO: 790476 - RNA, 19 nt, Homo sapiens
  misc_RNA (1)...(19): siRNA sense strand
gaagaagacuguuaaaagc

SEQ ID NO: 790477 - RNA, 19 nt, Homo sapiens
  misc_RNA (1)...(19): siRNA sense strand
uagcaaagauacccaaagg

SEQ ID NO: 790478 - RNA, 19 nt, Homo sapiens
  misc_RNA (1)...(19): siRNA sense strand
gaaugguccuagcaaagau

SEQ ID NO: 790479 - RNA, 19 nt, Homo sapiens
  misc_RNA (1)...(19): siRNA sense strand
ggaagguaaugauuguaag

SEQ ID NO: 790480 - RNA, 19 nt, Homo sapiens
  misc_RNA (1)...(19): siRNA sense strand
ucucuccguuccuaucuua

SEQ ID NO: 790481 - RNA, 19 nt, Homo sapiens
  misc_RNA (1)...(19): siRNA sense strand
cuucagaacuuuaugugau

SEQ ID NO: 790482 - RNA, 19 nt, Homo sapiens
  misc_RNA (1)...(19): siRNA sense strand
gaaugauaaugaacagagu

SEQ ID NO: 790483 - RNA, 19 nt, Homo sapiens
  misc_RNA (1)...(19): siRNA sense strand
gcuaaggaauaaaccaaag

SEQ ID NO: 790484 - RNA, 19 nt, Homo sapiens
  misc_RNA (1)...(19): siRNA sense strand
ugacacuagugaauaaugu

SEQ ID NO: 790485 - RNA, 19 nt, Homo sapiens
  misc_RNA (1)...(19): siRNA sense strand
acagauaaaccucuacuug

SEQ ID NO: 790486 - RNA, 19 nt, Homo sapiens
  misc_RNA (1)...(19): siRNA sense strand
cauuugcccuggcuccaua

SEQ ID NO: 790487 - RNA, 19 nt, Homo sapiens
  misc_RNA (1)...(19): siRNA sense strand
uguaagagggucugcauuu

SEQ ID NO: 790488 - RNA, 19 nt, Homo sapiens
  misc_RNA (1)...(19): siRNA sense strand
gaccaagggcucuucauuc

SEQ ID NO: 790489 - RNA, 19 nt, Homo sapiens
  misc_RNA (1)...(19): siRNA sense strand
acagagagaaaucaaguuu

SEQ ID NO: 790490 - RNA, 19 nt, Homo sapiens
  misc_RNA (1)...(19): siRNA sense strand
auagaaagucacaccauua

SEQ ID NO: 790491 - RNA, 19 nt, Homo sapiens
  misc_RNA (1)...(19): siRNA sense strand
gugcauugccagauuguuu

SEQ ID NO: 790492 - RNA, 19 nt, Homo sapiens
  misc_RNA (1)...(19): siRNA sense strand
gugacuugcuuggauuuaa

SEQ ID NO: 790493 - RNA, 19 nt, Homo sapiens
  misc_RNA (1)...(19): siRNA sense strand
ucagugacuugcuuggauu

SEQ ID NO: 790494 - RNA, 19 nt, Homo sapiens
  misc_RNA (1)...(19): siRNA sense strand
aauaagugcuauaguaugg

SEQ ID NO: 790495 - RNA, 19 nt, Homo sapiens
  misc_RNA (1)...(19): siRNA sense strand
cuaaaucggguacuaguug

SEQ ID NO: 790496 - RNA, 19 nt, Homo sapiens
  misc_RNA (1)...(19): siRNA sense strand
cugaugaagucuccaguga

SEQ ID NO: 790497 - RNA, 19 nt, Homo sapiens
  misc_RNA (1)...(19): siRNA sense strand
ugugaaaccagaccucaua

SEQ ID NO: 790498 - RNA, 19 nt, Homo sapiens
  misc_RNA (1)...(19): siRNA sense strand
ugacuugcuuggauuuaau

SEQ ID NO: 790499 - RNA, 19 nt, Homo sapiens
  misc_RNA (1)...(19): siRNA sense strand
cagagagaaaucaaguuua

SEQ ID NO: 790500 - RNA, 19 nt, Homo sapiens
  misc_RNA (1)...(19): siRNA sense strand
acaaaugucucugaugaag

SEQ ID NO: 790501 - RNA, 19 nt, Homo sapiens
  misc_RNA (1)...(19): siRNA sense strand
gauuggagcauaugaucaa

SEQ ID NO: 790502 - RNA, 19 nt, Homo sapiens
  misc_RNA (1)...(19): siRNA sense strand
gaaacuauucgaccagaag

SEQ ID NO: 790503 - RNA, 19 nt, Homo sapiens
  misc_RNA (1)...(19): siRNA sense strand
gaccagaaagggaauuguu

SEQ ID NO: 790504 - RNA, 19 nt, Homo sapiens
  misc_RNA (1)...(19): siRNA sense strand
guucuaguaccacagauaa

SEQ ID NO: 790505 - RNA, 19 nt, Homo sapiens
  misc_RNA (1)...(19): siRNA sense strand
ggaacugacacuagugaau

SEQ ID NO: 790506 - RNA, 19 nt, Homo sapiens
  misc_RNA (1)...(19): siRNA sense strand
ccauauaccaggaauagga

SEQ ID NO: 790507 - RNA, 19 nt, Homo sapiens
  misc_RNA (1)...(19): siRNA sense strand
aaaugucucugaugaaguc

SEQ ID NO: 790508 - RNA, 19 nt, Homo sapiens
  misc_RNA (1)...(19): siRNA sense strand
caauaacaaaugucucuga

SEQ ID NO: 790509 - RNA, 19 nt, Homo sapiens
  misc_RNA (1)...(19): siRNA sense strand
aaagauacccaaaggacaa

SEQ ID NO: 790510 - RNA, 19 nt, Homo sapiens
  misc_RNA (1)...(19): siRNA sense strand
ggaagaagacuguuaaaag

SEQ ID NO: 790511 - RNA, 19 nt, Homo sapiens
  misc_RNA (1)...(19): siRNA sense strand
cggugaagauggaauacaa

SEQ ID NO: 790512 - RNA, 19 nt, Homo sapiens
  misc_RNA (1)...(19): siRNA sense strand
uacacgagaucuuccuuga

SEQ ID NO: 790513 - RNA, 19 nt, Homo sapiens
  misc_RNA (1)...(19): siRNA sense strand
cagauuaauccauguguga

SEQ ID NO: 790514 - RNA, 19 nt, Homo sapiens
  misc_RNA (1)...(19): siRNA sense strand
agacagauguggaaaauca

SEQ ID NO: 790515 - RNA, 19 nt, Homo sapiens
  misc_RNA (1)...(19): siRNA sense strand
ccaaaggacaauaacaaau

SEQ ID NO: 790516 - RNA, 19 nt, Homo sapiens
  misc_RNA (1)...(19): siRNA sense strand
cagaagagacagccuggaa

SEQ ID NO: 790517 - RNA, 19 nt, Homo sapiens
  misc_RNA (1)...(19): siRNA sense strand
ucacaacgacgaagucaua

SEQ ID NO: 790518 - RNA, 19 nt, Homo sapiens
  misc_RNA (1)...(19): siRNA sense strand
gacaagagcgugcgcauca

SEQ ID NO: 790519 - RNA, 19 nt, Homo sapiens
  misc_RNA (1)...(19): siRNA sense strand
gaccucaucuacaauguca

SEQ ID NO: 790520 - RNA, 19 nt, Homo sapiens
  misc_RNA (1)...(19): siRNA sense strand
ugagggcgcuggucaagga

SEQ ID NO: 790521 - RNA, 19 nt, Homo sapiens
  misc_RNA (1)...(19): siRNA sense strand
gcaagcagcgggaccugaa

SEQ ID NO: 790522 - RNA, 19 nt, Homo sapiens
  misc_RNA (1)...(19): siRNA sense strand
gcaaauuccggcauguguu

SEQ ID NO: 790523 - RNA, 19 nt, Homo sapiens
  misc_RNA (1)...(19): siRNA sense strand
ccacaauggcagccuguuu

SEQ ID NO: 790524 - RNA, 19 nt, Homo sapiens
  misc_RNA (1)...(19): siRNA sense strand
cgucaugacugugccaaga

SEQ ID NO: 790525 - RNA, 19 nt, Homo sapiens
  misc_RNA (1)...(19): siRNA sense strand
ucaugacugugccaagaaa

SEQ ID NO: 790526 - RNA, 19 nt, Homo sapiens
  misc_RNA (1)...(19): siRNA sense strand
ccagugcuaugaggacauu

SEQ ID NO: 790527 - RNA, 19 nt, Homo sapiens
  misc_RNA (1)...(19): siRNA sense strand
caaauuccggcauguguuc

SEQ ID NO: 790528 - RNA, 19 nt, Homo sapiens
  misc_RNA (1)...(19): siRNA sense strand
caagaacgaccagugcuau

SEQ ID NO: 790529 - RNA, 19 nt, Homo sapiens
  misc_RNA (1)...(19): siRNA sense strand
acccugaccucaucuacaa

SEQ ID NO: 790530 - RNA, 19 nt, Homo sapiens
  misc_RNA (1)...(19): siRNA sense strand
ucaagaacgaccagugcua

SEQ ID NO: 790531 - RNA, 19 nt, Homo sapiens
  misc_RNA (1)...(19): siRNA sense strand
gaaagucggaccucuucca

SEQ ID NO: 790532 - RNA, 19 nt, Homo sapiens
  misc_RNA (1)...(19): siRNA sense strand
cgacugguguccucacaac

SEQ ID NO: 790533 - RNA, 19 nt, Homo sapiens
  misc_RNA (1)...(19): siRNA sense strand
gaacgaccagugcuaugag

SEQ ID NO: 790534 - RNA, 19 nt, Homo sapiens
  misc_RNA (1)...(19): siRNA sense strand
ccaaguuccuggcggugau

SEQ ID NO: 790535 - RNA, 19 nt, Homo sapiens
  misc_RNA (1)...(19): siRNA sense strand
cagcgggaccugaagauca

SEQ ID NO: 790536 - RNA, 19 nt, Homo sapiens
  misc_RNA (1)...(19): siRNA sense strand
uguggcagaucccagagaa

SEQ ID NO: 790537 - RNA, 19 nt, Homo sapiens
  misc_RNA (1)...(19): siRNA sense strand
ugcaugagcgcaaguguga

SEQ ID NO: 790538 - RNA, 19 nt, Homo sapiens
  misc_RNA (1)...(19): siRNA sense strand
gcagauggcaagguguuca

SEQ ID NO: 790539 - RNA, 19 nt, Homo sapiens
  misc_RNA (1)...(19): siRNA sense strand
ggcagccggucaagaacga

SEQ ID NO: 790540 - RNA, 19 nt, Homo sapiens
  misc_RNA (1)...(19): siRNA sense strand
gagcaaauuccggcaugug

SEQ ID NO: 790541 - RNA, 19 nt, Homo sapiens
  misc_RNA (1)...(19): siRNA sense strand
cgacaacgugguacucauc

SEQ ID NO: 790542 - RNA, 19 nt, Homo sapiens
  misc_RNA (1)...(19): siRNA sense strand
gcgacaacgugguacucau

SEQ ID NO: 790543 - RNA, 19 nt, Homo sapiens
  misc_RNA (1)...(19): siRNA sense strand
agaacgaccagugcuauga

SEQ ID NO: 790544 - RNA, 19 nt, Homo sapiens
  misc_RNA (1)...(19): siRNA sense strand
uacauccacuuccugaaca

SEQ ID NO: 790545 - RNA, 19 nt, Homo sapiens
  misc_RNA (1)...(19): siRNA sense strand
auucgcgugucccguguua

SEQ ID NO: 790546 - RNA, 19 nt, Homo sapiens
  misc_RNA (1)...(19): siRNA sense strand
caagagcgugcgcaucauc

SEQ ID NO: 790547 - RNA, 19 nt, Homo sapiens
  misc_RNA (1)...(19): siRNA sense strand
gacagagccggugguggua

SEQ ID NO: 790548 - RNA, 19 nt, Homo sapiens
  misc_RNA (1)...(19): siRNA sense strand
gaagcuggaggaggugaug

SEQ ID NO: 790549 - RNA, 19 nt, Homo sapiens
  misc_RNA (1)...(19): siRNA sense strand
ucgggcagccggucaagaa

SEQ ID NO: 790550 - RNA, 19 nt, Homo sapiens
  misc_RNA (1)...(19): siRNA sense strand
caccaccacugcugcugau

SEQ ID NO: 790551 - RNA, 19 nt, Homo sapiens
  misc_RNA (1)...(19): siRNA sense strand
ucuacaaugucagcuggaa

SEQ ID NO: 790552 - RNA, 19 nt, Homo sapiens
  misc_RNA (1)...(19): siRNA sense strand
ggucagcaagugcgagauc

SEQ ID NO: 790553 - RNA, 19 nt, Homo sapiens
  misc_RNA (1)...(19): siRNA sense strand
gccuggaggucagcaagug

SEQ ID NO: 790554 - RNA, 19 nt, Homo sapiens
  misc_RNA (1)...(19): siRNA sense strand
ccauggcccugcaggaacu

SEQ ID NO: 790555 - RNA, 19 nt, Homo sapiens
  misc_RNA (1)...(19): siRNA sense strand
gcaagggugacuccagcau

SEQ ID NO: 790556 - RNA, 19 nt, Homo sapiens
  misc_RNA (1)...(19): siRNA sense strand
gcuuugaucuggagucaua

SEQ ID NO: 790557 - RNA, 19 nt, Homo sapiens
  misc_RNA (1)...(19): siRNA sense strand
ggacauccaugaaugacuu

SEQ ID NO: 790558 - RNA, 19 nt, Homo sapiens
  misc_RNA (1)...(19): siRNA sense strand
ggagggacauccaugaaug

SEQ ID NO: 790559 - RNA, 19 nt, Homo sapiens
  misc_RNA (1)...(19): siRNA sense strand
ggaagcagcuacaguaacu

SEQ ID NO: 790560 - RNA, 19 nt, Homo sapiens
  misc_RNA (1)...(19): siRNA sense strand
cugacgagcuccugucuua

SEQ ID NO: 790561 - RNA, 19 nt, Homo sapiens
  misc_RNA (1)...(19): siRNA sense strand
ccaaggccauggcaacuuu

SEQ ID NO: 790562 - RNA, 19 nt, Homo sapiens
  misc_RNA (1)...(19): siRNA sense strand
acaaggauauaaaccagua

SEQ ID NO: 790563 - RNA, 19 nt, Homo sapiens
  misc_RNA (1)...(19): siRNA sense strand
acagcgaccugaccuuuaa

SEQ ID NO: 790564 - RNA, 19 nt, Homo sapiens
  misc_RNA (1)...(19): siRNA sense strand
uauaacagccaauucauga

SEQ ID NO: 790565 - RNA, 19 nt, Homo sapiens
  misc_RNA (1)...(19): siRNA sense strand
ggagguggaucaguacaug

SEQ ID NO: 790566 - RNA, 19 nt, Homo sapiens
  misc_RNA (1)...(19): siRNA sense strand
gacaucaagccaaauauga

SEQ ID NO: 790567 - RNA, 19 nt, Homo sapiens
  misc_RNA (1)...(19): siRNA sense strand
acaacaagguuugcacgua

SEQ ID NO: 790568 - RNA, 19 nt, Homo sapiens
  misc_RNA (1)...(19): siRNA sense strand
gaagucugccgccuuguug

SEQ ID NO: 790569 - RNA, 19 nt, Homo sapiens
  misc_RNA (1)...(19): siRNA sense strand
gcagcugaauugcgagaga

SEQ ID NO: 790570 - RNA, 19 nt, Homo sapiens
  misc_RNA (1)...(19): siRNA sense strand
caacaagaccucccacaag

SEQ ID NO: 790571 - RNA, 19 nt, Homo sapiens
  misc_RNA (1)...(19): siRNA sense strand
acacagaacaaggauauaa

SEQ ID NO: 790572 - RNA, 19 nt, Homo sapiens
  misc_RNA (1)...(19): siRNA sense strand
gccuggagguggaucagua

SEQ ID NO: 790573 - RNA, 19 nt, Homo sapiens
  misc_RNA (1)...(19): siRNA sense strand
uuacaagccagaacaguuu

SEQ ID NO: 790574 - RNA, 19 nt, Homo sapiens
  misc_RNA (1)...(19): siRNA sense strand
ccagucagggccuccauua

SEQ ID NO: 790575 - RNA, 19 nt, Homo sapiens
  misc_RNA (1)...(19): siRNA sense strand
agucauaccugcagcugaa

SEQ ID NO: 790576 - RNA, 19 nt, Homo sapiens
  misc_RNA (1)...(19): siRNA sense strand
aagcagcacuuacagaauc

SEQ ID NO: 790577 - RNA, 19 nt, Homo sapiens
  misc_RNA (1)...(19): siRNA sense strand
gaccuccugucucuauuug

SEQ ID NO: 790578 - RNA, 19 nt, Homo sapiens
  misc_RNA (1)...(19): siRNA sense strand
gaugaccuccugucucuau

SEQ ID NO: 790579 - RNA, 19 nt, Homo sapiens
  misc_RNA (1)...(19): siRNA sense strand
ucaagcagcacuuacagaa

SEQ ID NO: 790580 - RNA, 19 nt, Homo sapiens
  misc_RNA (1)...(19): siRNA sense strand
ggacuuacacaucaaggau

SEQ ID NO: 790581 - RNA, 19 nt, Homo sapiens
  misc_RNA (1)...(19): siRNA sense strand
gcaccaacuccaacgacua

SEQ ID NO: 790582 - RNA, 19 nt, Homo sapiens
  misc_RNA (1)...(19): siRNA sense strand
ggagguguccugugugcaa

SEQ ID NO: 790583 - RNA, 19 nt, Homo sapiens
  misc_RNA (1)...(19): siRNA sense strand
ggagagcccaacuauggaa

SEQ ID NO: 790584 - RNA, 19 nt, Homo sapiens
  misc_RNA (1)...(19): siRNA sense strand
acagaauccugccaacuuc

SEQ ID NO: 790585 - RNA, 19 nt, Homo sapiens
  misc_RNA (1)...(19): siRNA sense strand
agacacagaacaaggauau

SEQ ID NO: 790586 - RNA, 19 nt, Homo sapiens
  misc_RNA (1)...(19): siRNA sense strand
gguguccugugugcaauaa

SEQ ID NO: 790587 - RNA, 19 nt, Homo sapiens
  misc_RNA (1)...(19): siRNA sense strand
ccaucaaggugucucugaa

SEQ ID NO: 790588 - RNA, 19 nt, Homo sapiens
  misc_RNA (1)...(19): siRNA sense strand
cgguuccuguggcaaauua

SEQ ID NO: 790589 - RNA, 19 nt, Homo sapiens
  misc_RNA (1)...(19): siRNA sense strand
gaacauaaagaggccauac

SEQ ID NO: 790590 - RNA, 19 nt, Homo sapiens
  misc_RNA (1)...(19): siRNA sense strand
gagggacauccaugaauga

SEQ ID NO: 790591 - RNA, 19 nt, Homo sapiens
  misc_RNA (1)...(19): siRNA sense strand
cagaugaucaugcccaaug

SEQ ID NO: 790592 - RNA, 19 nt, Homo sapiens
  misc_RNA (1)...(19): siRNA sense strand
ggucagcaaccauguguuc

SEQ ID NO: 790593 - RNA, 19 nt, Homo sapiens
  misc_RNA (1)...(19): siRNA sense strand
ggauauaaaccaguaugga

SEQ ID NO: 790594 - RNA, 19 nt, Homo sapiens
  misc_RNA (1)...(19): siRNA sense strand
gcguauaacagccaauuca

SEQ ID NO: 790595 - RNA, 19 nt, Homo sapiens
  misc_RNA (1)...(19): siRNA sense strand
gaccugccgagcaauagua

SEQ ID NO: 790596 - RNA, 19 nt, Homo sapiens
  misc_RNA (1)...(19): siRNA sense strand
ccugacaucaagccaaaua

SEQ ID NO: 790597 - RNA, 19 nt, Homo sapiens
  misc_RNA (1)...(19): siRNA sense strand
guauaacagccaauucaug

SEQ ID NO: 790598 - RNA, 19 nt, Homo sapiens
  misc_RNA (1)...(19): siRNA sense strand
cgccugacaucaagccaaa

SEQ ID NO: 790599 - RNA, 19 nt, Homo sapiens
  misc_RNA (1)...(19): siRNA sense strand
gcaucaagcagcacuuaca

SEQ ID NO: 790600 - RNA, 19 nt, Homo sapiens
  misc_RNA (1)...(19): siRNA sense strand
ggaacccuauggccaaugc

SEQ ID NO: 790601 - RNA, 19 nt, Homo sapiens
  misc_RNA (1)...(19): siRNA sense strand
ugacaucaagccaaauaug

SEQ ID NO: 790602 - RNA, 19 nt, Homo sapiens
  misc_RNA (1)...(19): siRNA sense strand
cccagucccuuccuauuca

SEQ ID NO: 790603 - RNA, 19 nt, Homo sapiens
  misc_RNA (1)...(19): siRNA sense strand
uugaagaggucaccaucga

SEQ ID NO: 790604 - RNA, 19 nt, Homo sapiens
  misc_RNA (1)...(19): siRNA sense strand
cacagaacaaggauauaaa

SEQ ID NO: 790605 - RNA, 19 nt, Homo sapiens
  misc_RNA (1)...(19): siRNA sense strand
uacagaauccugccaacuu

SEQ ID NO: 790606 - RNA, 19 nt, Homo sapiens
  misc_RNA (1)...(19): siRNA sense strand
gcagccaaggcaacaacua

SEQ ID NO: 790607 - RNA, 19 nt, Homo sapiens
  misc_RNA (1)...(19): siRNA sense strand
gcaaaccgagacaaguuca

SEQ ID NO: 790608 - RNA, 19 nt, Homo sapiens
  misc_RNA (1)...(19): siRNA sense strand
ucgggaagcagcuacagua

SEQ ID NO: 790609 - RNA, 19 nt, Homo sapiens
  misc_RNA (1)...(19): siRNA sense strand
gggccuccauuacaucaca

SEQ ID NO: 790610 - RNA, 19 nt, Homo sapiens
  misc_RNA (1)...(19): siRNA sense strand
cgagcaauaguaacgauga

SEQ ID NO: 790611 - RNA, 19 nt, Homo sapiens
  misc_RNA (1)...(19): siRNA sense strand
gacgagcuccugucuuauc

SEQ ID NO: 790612 - RNA, 19 nt, Homo sapiens
  misc_RNA (1)...(19): siRNA sense strand
cacagcgaccugaccuuua

SEQ ID NO: 790613 - RNA, 19 nt, Homo sapiens
  misc_RNA (1)...(19): siRNA sense strand
ccagcaauauggaccaaac

SEQ ID NO: 790614 - RNA, 19 nt, Homo sapiens
  misc_RNA (1)...(19): siRNA sense strand
acgaugaccuccugucucu

SEQ ID NO: 790615 - RNA, 19 nt, Homo sapiens
  misc_RNA (1)...(19): siRNA sense strand
acacagcgaccugaccuuu

SEQ ID NO: 790616 - RNA, 19 nt, Homo sapiens
  misc_RNA (1)...(19): siRNA sense strand
caugugcagugcuuugauc

SEQ ID NO: 790617 - RNA, 19 nt, Homo sapiens
  misc_RNA (1)...(19): siRNA sense strand
uaacuacagccaagggaau

SEQ ID NO: 790618 - RNA, 19 nt, Homo sapiens
  misc_RNA (1)...(19): siRNA sense strand
gaacaguuuaauggacaaa

SEQ ID NO: 790619 - RNA, 19 nt, Homo sapiens
  misc_RNA (1)...(19): siRNA sense strand
cgaagucugccgccuuguu

SEQ ID NO: 790620 - RNA, 19 nt, Homo sapiens
  misc_RNA (1)...(19): siRNA sense strand
cuggagagcccaacuaugg

SEQ ID NO: 790621 - RNA, 19 nt, Homo sapiens
  misc_RNA (1)...(19): siRNA sense strand
gucagggccuccauuacau

SEQ ID NO: 790622 - RNA, 19 nt, Homo sapiens
  misc_RNA (1)...(19): siRNA sense strand
uauggaaaccagcaauaug

SEQ ID NO: 790623 - RNA, 19 nt, Homo sapiens
  misc_RNA (1)...(19): siRNA sense strand
ccugccaacuuccacaaug

SEQ ID NO: 790624 - RNA, 19 nt, Homo sapiens
  misc_RNA (1)...(19): siRNA sense strand
gagacacagaacaaggaua

SEQ ID NO: 790625 - RNA, 19 nt, Homo sapiens
  misc_RNA (1)...(19): siRNA sense strand
gcaacaccauccagaucac

SEQ ID NO: 790626 - RNA, 19 nt, Homo sapiens
  misc_RNA (1)...(19): siRNA sense strand
acaacaagaccucccacaa

SEQ ID NO: 790627 - RNA, 19 nt, Homo sapiens
  misc_RNA (1)...(19): siRNA sense strand
cacgaggaccggcagauga

SEQ ID NO: 790628 - RNA, 19 nt, Homo sapiens
  misc_RNA (1)...(19): siRNA sense strand
uaacagccaauucaugaac

SEQ ID NO: 790629 - RNA, 19 nt, Homo sapiens
  misc_RNA (1)...(19): siRNA sense strand
gagcaauaguaacgaugac

SEQ ID NO: 790630 - RNA, 19 nt, Homo sapiens
  misc_RNA (1)...(19): siRNA sense strand
ccaagcgguucaagaccau

SEQ ID NO: 790631 - RNA, 19 nt, Homo sapiens
  misc_RNA (1)...(19): siRNA sense strand
caagcagcacuuacagaau

SEQ ID NO: 790632 - RNA, 19 nt, Homo sapiens
  misc_RNA (1)...(19): siRNA sense strand
cugcaaaccgagacaaguu

SEQ ID NO: 790633 - RNA, 19 nt, Homo sapiens
  misc_RNA (1)...(19): siRNA sense strand
ugaccuccugucucuauuu

SEQ ID NO: 790634 - RNA, 19 nt, Homo sapiens
  misc_RNA (1)...(19): siRNA sense strand
gcacauccagcagaccaau

SEQ ID NO: 790635 - RNA, 19 nt, Homo sapiens
  misc_RNA (1)...(19): siRNA sense strand
gagguguccugugugcaau

SEQ ID NO: 790636 - RNA, 19 nt, Homo sapiens
  misc_RNA (1)...(19): siRNA sense strand
ccacgccccucaccauuga

SEQ ID NO: 790637 - RNA, 19 nt, Homo sapiens
  misc_RNA (1)...(19): siRNA sense strand
gagcagcaucccuccauac

SEQ ID NO: 790638 - RNA, 19 nt, Homo sapiens
  misc_RNA (1)...(19): siRNA sense strand
ggagacacagaacaaggau

SEQ ID NO: 790639 - RNA, 19 nt, Homo sapiens
  misc_RNA (1)...(19): siRNA sense strand
gugcuuugaucuggaguca

SEQ ID NO: 790640 - RNA, 19 nt, Homo sapiens
  misc_RNA (1)...(19): siRNA sense strand
gagagcccaacuauggaaa

SEQ ID NO: 790641 - RNA, 19 nt, Homo sapiens
  misc_RNA (1)...(19): siRNA sense strand
uacaagccagaacaguuua

SEQ ID NO: 790642 - RNA, 19 nt, Homo sapiens
  misc_RNA (1)...(19): siRNA sense strand
uaacgaugaccuccugucu

SEQ ID NO: 790643 - RNA, 19 nt, Homo sapiens
  misc_RNA (1)...(19): siRNA sense strand
gccgagcaauaguaacgau

SEQ ID NO: 790644 - RNA, 19 nt, Homo sapiens
  misc_RNA (1)...(19): siRNA sense strand
gaagcagcuacaguaacua

SEQ ID NO: 790645 - RNA, 19 nt, Homo sapiens
  misc_RNA (1)...(19): siRNA sense strand
gccagaacaguuuaaugga

SEQ ID NO: 790646 - RNA, 19 nt, Homo sapiens
  misc_RNA (1)...(19): siRNA sense strand
cgggaagcagcuacaguaa

SEQ ID NO: 790647 - RNA, 19 nt, Homo sapiens
  misc_RNA (1)...(19): siRNA sense strand
ccuccugucucuauuugag

SEQ ID NO: 790648 - RNA, 19 nt, Homo sapiens
  misc_RNA (1)...(19): siRNA sense strand
agucagggccuccauuaca

SEQ ID NO: 790649 - RNA, 19 nt, Homo sapiens
  misc_RNA (1)...(19): siRNA sense strand
gcagcagcagccacagcua

SEQ ID NO: 790650 - RNA, 19 nt, Homo sapiens
  misc_RNA (1)...(19): siRNA sense strand
acauccagcagaccaauga

SEQ ID NO: 790651 - RNA, 19 nt, Homo sapiens
  misc_RNA (1)...(19): siRNA sense strand
ccaaggcaacaacuaccaa

SEQ ID NO: 790652 - RNA, 19 nt, Homo sapiens
  misc_RNA (1)...(19): siRNA sense strand
gccaucaaggugucucuga

SEQ ID NO: 790653 - RNA, 19 nt, Homo sapiens
  misc_RNA (1)...(19): siRNA sense strand
acuauggaaaccagcaaua

SEQ ID NO: 790654 - RNA, 19 nt, Homo sapiens
  misc_RNA (1)...(19): siRNA sense strand
aauccugaaugccauccaa

SEQ ID NO: 790655 - RNA, 19 nt, Homo sapiens
  misc_RNA (1)...(19): siRNA sense strand
gaagugccccaucacauuc

SEQ ID NO: 790656 - RNA, 19 nt, Homo sapiens
  misc_RNA (1)...(19): siRNA sense strand
aaaggucagugaaguuuaa

SEQ ID NO: 790657 - RNA, 19 nt, Homo sapiens
  misc_RNA (1)...(19): siRNA sense strand
gguaucaccuggaugagau

SEQ ID NO: 790658 - RNA, 19 nt, Homo sapiens
  misc_RNA (1)...(19): siRNA sense strand
gaaaaggucagugaaguuu

SEQ ID NO: 790659 - RNA, 19 nt, Homo sapiens
  misc_RNA (1)...(19): siRNA sense strand
gggcagaucgguaauagag

SEQ ID NO: 790660 - RNA, 19 nt, Homo sapiens
  misc_RNA (1)...(19): siRNA sense strand
aagccaagcugcagaagca

SEQ ID NO: 790661 - RNA, 19 nt, Homo sapiens
  misc_RNA (1)...(19): siRNA sense strand
ggauggguaucaccuggau

SEQ ID NO: 790662 - RNA, 19 nt, Homo sapiens
  misc_RNA (1)...(19): siRNA sense strand
gaaccgcccagacucuuca

SEQ ID NO: 790663 - RNA, 19 nt, Homo sapiens
  misc_RNA (1)...(19): siRNA sense strand
gcccauggccucuucaaca

SEQ ID NO: 790664 - RNA, 19 nt, Homo sapiens
  misc_RNA (1)...(19): siRNA sense strand
cccagacucuucagggaaa

SEQ ID NO: 790665 - RNA, 19 nt, Homo sapiens
  misc_RNA (1)...(19): siRNA sense strand
ggucagugaaguuuaacaa

SEQ ID NO: 790666 - RNA, 19 nt, Homo sapiens
  misc_RNA (1)...(19): siRNA sense strand
caagggcuauacugcucuu

SEQ ID NO: 790667 - RNA, 19 nt, Homo sapiens
  misc_RNA (1)...(19): siRNA sense strand
gcgcgcacccuccauucaa

SEQ ID NO: 790668 - RNA, 19 nt, Homo sapiens
  misc_RNA (1)...(19): siRNA sense strand
cuaagcccauggccucuuc

SEQ ID NO: 790669 - RNA, 19 nt, Homo sapiens
  misc_RNA (1)...(19): siRNA sense strand
ccucgacucugacagugau

SEQ ID NO: 790670 - RNA, 19 nt, Homo sapiens
  misc_RNA (1)...(19): siRNA sense strand
uagccagaguccagaugaa

SEQ ID NO: 790671 - RNA, 19 nt, Homo sapiens
  misc_RNA (1)...(19): siRNA sense strand
ggaaaaggucagugaaguu

SEQ ID NO: 790672 - RNA, 19 nt, Homo sapiens
  misc_RNA (1)...(19): siRNA sense strand
gggaaaaggucagugaagu

SEQ ID NO: 790673 - RNA, 19 nt, Homo sapiens
  misc_RNA (1)...(19): siRNA sense strand
uggugucccucgacucuga

SEQ ID NO: 790674 - RNA, 19 nt, Homo sapiens
  misc_RNA (1)...(19): siRNA sense strand
cccauggccucuucaacau

SEQ ID NO: 790675 - RNA, 19 nt, Homo sapiens
  misc_RNA (1)...(19): siRNA sense strand
ccgggcagaucgguaauag

SEQ ID NO: 790676 - RNA, 19 nt, Homo sapiens
  misc_RNA (1)...(19): siRNA sense strand
caggugaaccaggauguga

SEQ ID NO: 790677 - RNA, 19 nt, Homo sapiens
  misc_RNA (1)...(19): siRNA sense strand
ggaugagauuccagaugac

SEQ ID NO: 790678 - RNA, 19 nt, Homo sapiens
  misc_RNA (1)...(19): siRNA sense strand
aaaggucagugaaguuuaa

SEQ ID NO: 790679 - RNA, 19 nt, Homo sapiens
  misc_RNA (1)...(19): siRNA sense strand
gguaucaccuggaugagau

SEQ ID NO: 790680 - RNA, 19 nt, Homo sapiens
  misc_RNA (1)...(19): siRNA sense strand
gaaaaggucagugaaguuu

SEQ ID NO: 790681 - RNA, 19 nt, Homo sapiens
  misc_RNA (1)...(19): siRNA sense strand
gggcagaucgguaauagag

SEQ ID NO: 790682 - RNA, 19 nt, Homo sapiens
  misc_RNA (1)...(19): siRNA sense strand
aagccaagcugcagaagca

SEQ ID NO: 790683 - RNA, 19 nt, Homo sapiens
  misc_RNA (1)...(19): siRNA sense strand
ggauggguaucaccuggau

SEQ ID NO: 790684 - RNA, 19 nt, Homo sapiens
  misc_RNA (1)...(19): siRNA sense strand
gaaccgcccagacucuuca

SEQ ID NO: 790685 - RNA, 19 nt, Homo sapiens
  misc_RNA (1)...(19): siRNA sense strand
gcccauggccucuucaaca

SEQ ID NO: 790686 - RNA, 19 nt, Homo sapiens
  misc_RNA (1)...(19): siRNA sense strand
cccagacucuucagggaaa

SEQ ID NO: 790687 - RNA, 19 nt, Homo sapiens
  misc_RNA (1)...(19): siRNA sense strand
ggucagugaaguuuaacaa

SEQ ID NO: 790688 - RNA, 19 nt, Homo sapiens
  misc_RNA (1)...(19): siRNA sense strand
caagggcuauacugcucuu

SEQ ID NO: 790689 - RNA, 19 nt, Homo sapiens
  misc_RNA (1)...(19): siRNA sense strand
gcgcgcacccuccauucaa

SEQ ID NO: 790690 - RNA, 19 nt, Homo sapiens
  misc_RNA (1)...(19): siRNA sense strand
cuaagcccauggccucuuc

SEQ ID NO: 790691 - RNA, 19 nt, Homo sapiens
  misc_RNA (1)...(19): siRNA sense strand
ccucgacucugacagugau

SEQ ID NO: 790692 - RNA, 19 nt, Homo sapiens
  misc_RNA (1)...(19): siRNA sense strand
uagccagaguccagaugaa

SEQ ID NO: 790693 - RNA, 19 nt, Homo sapiens
  misc_RNA (1)...(19): siRNA sense strand
ggaaaaggucagugaaguu

SEQ ID NO: 790694 - RNA, 19 nt, Homo sapiens
  misc_RNA (1)...(19): siRNA sense strand
gggaaaaggucagugaagu

SEQ ID NO: 790695 - RNA, 19 nt, Homo sapiens
  misc_RNA (1)...(19): siRNA sense strand
uggugucccucgacucuga

SEQ ID NO: 790696 - RNA, 19 nt, Homo sapiens
  misc_RNA (1)...(19): siRNA sense strand
cccauggccucuucaacau

SEQ ID NO: 790697 - RNA, 19 nt, Homo sapiens
  misc_RNA (1)...(19): siRNA sense strand
ccgggcagaucgguaauag

SEQ ID NO: 790698 - RNA, 19 nt, Homo sapiens
  misc_RNA (1)...(19): siRNA sense strand
caggugaaccaggauguga

SEQ ID NO: 790699 - RNA, 19 nt, Homo sapiens
  misc_RNA (1)...(19): siRNA sense strand
ggaugagauuccagaugac

SEQ ID NO: 790700 - RNA, 19 nt, Homo sapiens
  misc_RNA (1)...(19): siRNA sense strand
gagcaaagauggcuuccua

SEQ ID NO: 790701 - RNA, 19 nt, Homo sapiens
  misc_RNA (1)...(19): siRNA sense strand
caacuucccuggcucaauu

SEQ ID NO: 790702 - RNA, 19 nt, Homo sapiens
  misc_RNA (1)...(19): siRNA sense strand
ucaagaaggucuccuacuu

SEQ ID NO: 790703 - RNA, 19 nt, Homo sapiens
  misc_RNA (1)...(19): siRNA sense strand
gcaaggaggucaucaucca

SEQ ID NO: 790704 - RNA, 19 nt, Homo sapiens
  misc_RNA (1)...(19): siRNA sense strand
ccagugagcugagcauguu

SEQ ID NO: 790705 - RNA, 19 nt, Homo sapiens
  misc_RNA (1)...(19): siRNA sense strand
ugaaggagcuggaggaacu

SEQ ID NO: 790706 - RNA, 19 nt, Homo sapiens
  misc_RNA (1)...(19): siRNA sense strand
ggugagcccugguggauca

SEQ ID NO: 790707 - RNA, 19 nt, Homo sapiens
  misc_RNA (1)...(19): siRNA sense strand
gaccaguccugcugagguu

SEQ ID NO: 790708 - RNA, 19 nt, Homo sapiens
  misc_RNA (1)...(19): siRNA sense strand
uggaggaacugcagaacaa

SEQ ID NO: 790709 - RNA, 19 nt, Homo sapiens
  misc_RNA (1)...(19): siRNA sense strand
ucaaacccauugcugagaa

SEQ ID NO: 790710 - RNA, 19 nt, Homo sapiens
  misc_RNA (1)...(19): siRNA sense strand
ucacaucaaugccaacuac

SEQ ID NO: 790711 - RNA, 19 nt, Homo sapiens
  misc_RNA (1)...(19): siRNA sense strand
ggcaggaacuggcgcugaa

SEQ ID NO: 790712 - RNA, 19 nt, Homo sapiens
  misc_RNA (1)...(19): siRNA sense strand
gccugcaccuggagaagua

SEQ ID NO: 790713 - RNA, 19 nt, Homo sapiens
  misc_RNA (1)...(19): siRNA sense strand
cuacuacacugugauguuc

SEQ ID NO: 790714 - RNA, 19 nt, Homo sapiens
  misc_RNA (1)...(19): siRNA sense strand
gaacucgucccaccagaag

SEQ ID NO: 790715 - RNA, 19 nt, Homo sapiens
  misc_RNA (1)...(19): siRNA sense strand
gccuggagguggccaugua

SEQ ID NO: 790716 - RNA, 19 nt, Homo sapiens
  misc_RNA (1)...(19): siRNA sense strand
gaggagacgcucaccauag

SEQ ID NO: 790717 - RNA, 19 nt, Homo sapiens
  misc_RNA (1)...(19): siRNA sense strand
aggagacgcucaccauaga

SEQ ID NO: 790718 - RNA, 19 nt, Homo sapiens
  misc_RNA (1)...(19): siRNA sense strand
agacuguccuggaaaguuc

SEQ ID NO: 790719 - RNA, 19 nt, Homo sapiens
  misc_RNA (1)...(19): siRNA sense strand
aaccacaggucucugaaug

SEQ ID NO: 790720 - RNA, 19 nt, Homo sapiens
  misc_RNA (1)...(19): siRNA sense strand
ccgaggaaaucgagagcaa

SEQ ID NO: 790721 - RNA, 19 nt, Homo sapiens
  misc_RNA (1)...(19): siRNA sense strand
gaggaaaucgagagcaauc

SEQ ID NO: 790722 - RNA, 19 nt, Homo sapiens
  misc_RNA (1)...(19): siRNA sense strand
cgaggagacgcucaccaua

SEQ ID NO: 790723 - RNA, 19 nt, Homo sapiens
  misc_RNA (1)...(19): siRNA sense strand
gggagacuguccuggaaag

SEQ ID NO: 790724 - RNA, 19 nt, Homo sapiens
  misc_RNA (1)...(19): siRNA sense strand
ccacaucauccucuccaaa

SEQ ID NO: 790725 - RNA, 19 nt, Homo sapiens
  misc_RNA (1)...(19): siRNA sense strand
caucaaugccaacuacuuc

SEQ ID NO: 790726 - RNA, 19 nt, Homo sapiens
  misc_RNA (1)...(19): siRNA sense strand
cagcuucucauccaccuuu

SEQ ID NO: 790727 - RNA, 19 nt, Homo sapiens
  misc_RNA (1)...(19): siRNA sense strand
gagacuguccuggaaaguu

SEQ ID NO: 790728 - RNA, 19 nt, Homo sapiens
  misc_RNA (1)...(19): siRNA sense strand
gcaccgugguccaucacau

SEQ ID NO: 790729 - RNA, 19 nt, Homo sapiens
  misc_RNA (1)...(19): siRNA sense strand
caucagcgacuucuacuac

SEQ ID NO: 790730 - RNA, 19 nt, Homo sapiens
  misc_RNA (1)...(19): siRNA sense strand
ggacauggaguggcuuuac

SEQ ID NO: 790731 - RNA, 19 nt, Homo sapiens
  misc_RNA (1)...(19): siRNA sense strand
ccuggucccuggugaagga

SEQ ID NO: 790732 - RNA, 19 nt, Homo sapiens
  misc_RNA (1)...(19): siRNA sense strand
ccgggagacuguccuggaa

SEQ ID NO: 790733 - RNA, 19 nt, Homo sapiens
  misc_RNA (1)...(19): siRNA sense strand
gaacaagcuggugcacuca

SEQ ID NO: 790734 - RNA, 19 nt, Homo sapiens
  misc_RNA (1)...(19): siRNA sense strand
caccauagaagcccgauuc

SEQ ID NO: 790735 - RNA, 19 nt, Homo sapiens
  misc_RNA (1)...(19): siRNA sense strand
gguggacaucggcuacaua

SEQ ID NO: 790736 - RNA, 19 nt, Homo sapiens
  misc_RNA (1)...(19): siRNA sense strand
gaagcuaacagggucuugu

SEQ ID NO: 790737 - RNA, 19 nt, Homo sapiens
  misc_RNA (1)...(19): siRNA sense strand
ggaggaacugcagaacaaa

SEQ ID NO: 790738 - RNA, 19 nt, Homo sapiens
  misc_RNA (1)...(19): siRNA sense strand
gaugaggauggcagcauga

SEQ ID NO: 790739 - RNA, 19 nt, Homo sapiens
  misc_RNA (1)...(19): siRNA sense strand
caacauggagguggacauc

SEQ ID NO: 790740 - RNA, 19 nt, Homo sapiens
  misc_RNA (1)...(19): siRNA sense strand
ccucggcccuuugugaaga

SEQ ID NO: 790741 - RNA, 19 nt, Homo sapiens
  misc_RNA (1)...(19): siRNA sense strand
gggcaaggaggucaucauc

SEQ ID NO: 790742 - RNA, 19 nt, Homo sapiens
  misc_RNA (1)...(19): siRNA sense strand
ccggauccaugccgaguuc

SEQ ID NO: 790743 - RNA, 19 nt, Homo sapiens
  misc_RNA (1)...(19): siRNA sense strand
gaggaguucaaacccauug

SEQ ID NO: 790744 - RNA, 19 nt, Homo sapiens
  misc_RNA (1)...(19): siRNA sense strand
gcuacgaggaggaggaguu

SEQ ID NO: 790745 - RNA, 19 nt, Homo sapiens
  misc_RNA (1)...(19): siRNA sense strand
gaccaugaccaagagcaaa

SEQ ID NO: 790746 - RNA, 19 nt, Homo sapiens
  misc_RNA (1)...(19): siRNA sense strand
gcgaggagacgcucaccau

SEQ ID NO: 790747 - RNA, 19 nt, Homo sapiens
  misc_RNA (1)...(19): siRNA sense strand
caaugccaacuacuucuug

SEQ ID NO: 790748 - RNA, 19 nt, Homo sapiens
  misc_RNA (1)...(19): siRNA sense strand
guuccacccucggcccuuu

SEQ ID NO: 790749 - RNA, 19 nt, Homo sapiens
  misc_RNA (1)...(19): siRNA sense strand
ucacugcagccucaacuuc

SEQ ID NO: 790750 - RNA, 19 nt, Homo sapiens
  misc_RNA (1)...(19): siRNA sense strand
cuggcuaccuguccaacaa

SEQ ID NO: 790751 - RNA, 19 nt, Homo sapiens
  misc_RNA (1)...(19): siRNA sense strand
ggagacgcucaccauagaa

SEQ ID NO: 790752 - RNA, 19 nt, Homo sapiens
  misc_RNA (1)...(19): siRNA sense strand
ccggagaccaugaccaaga

SEQ ID NO: 790753 - RNA, 19 nt, Homo sapiens
  misc_RNA (1)...(19): siRNA sense strand
cgugguccaucacaucaau

SEQ ID NO: 790754 - RNA, 19 nt, Homo sapiens
  misc_RNA (1)...(19): siRNA sense strand
acaagcuggugcacucaau

SEQ ID NO: 790755 - RNA, 19 nt, Homo sapiens
  misc_RNA (1)...(19): siRNA sense strand
ugacugccaucagcgacuu

SEQ ID NO: 790756 - RNA, 19 nt, Homo sapiens
  misc_RNA (1)...(19): siRNA sense strand
caaacccauugcugagaag

SEQ ID NO: 790757 - RNA, 19 nt, Homo sapiens
  misc_RNA (1)...(19): siRNA sense strand
guccaacaaccgcuucuau

SEQ ID NO: 790758 - RNA, 19 nt, Homo sapiens
  misc_RNA (1)...(19): siRNA sense strand
ucucauccaccuuugaaga

SEQ ID NO: 790759 - RNA, 19 nt, Homo sapiens
  misc_RNA (1)...(19): siRNA sense strand
acaucauccucuccaaaga

SEQ ID NO: 790760 - RNA, 19 nt, Homo sapiens
  misc_RNA (1)...(19): siRNA sense strand
gacuucuacuacacuguga

SEQ ID NO: 790761 - RNA, 19 nt, Homo sapiens
  misc_RNA (1)...(19): siRNA sense strand
ugaucugccugcccaaugg

SEQ ID NO: 790762 - RNA, 19 nt, Homo sapiens
  misc_RNA (1)...(19): siRNA sense strand
caaccacaggucucugaau

SEQ ID NO: 790763 - RNA, 19 nt, Homo sapiens
  misc_RNA (1)...(19): siRNA sense strand
cggagaccaugaccaagag

SEQ ID NO: 790764 - RNA, 19 nt, Homo sapiens
  misc_RNA (1)...(19): siRNA sense strand
ccuacuugccguucacuga

SEQ ID NO: 790765 - RNA, 19 nt, Homo sapiens
  misc_RNA (1)...(19): siRNA sense strand
gacauggaguggcuuuacg

SEQ ID NO: 790766 - RNA, 19 nt, Homo sapiens
  misc_RNA (1)...(19): siRNA sense strand
acccauugcugagaagcua

SEQ ID NO: 790767 - RNA, 19 nt, Homo sapiens
  misc_RNA (1)...(19): siRNA sense strand
ccgugaagcccgaggaaau

SEQ ID NO: 790768 - RNA, 19 nt, Homo sapiens
  misc_RNA (1)...(19): siRNA sense strand
gagacgcucaccauagaag

SEQ ID NO: 790769 - RNA, 19 nt, Homo sapiens
  misc_RNA (1)...(19): siRNA sense strand
cucaccaagugcaguguuu

SEQ ID NO: 790770 - RNA, 19 nt, Homo sapiens
  misc_RNA (1)...(19): siRNA sense strand
ccaccuacaugcaguuccu

SEQ ID NO: 790771 - RNA, 19 nt, Homo sapiens
  misc_RNA (1)...(19): siRNA sense strand
ucaguucaccggccacauc

SEQ ID NO: 790772 - RNA, 19 nt, Homo sapiens
  misc_RNA (1)...(19): siRNA sense strand
gaugggaaaucuuaugaua

SEQ ID NO: 790773 - RNA, 19 nt, Homo sapiens
  misc_RNA (1)...(19): siRNA sense strand
gauaaugcaugccaaauca

SEQ ID NO: 790774 - RNA, 19 nt, Homo sapiens
  misc_RNA (1)...(19): siRNA sense strand
ggacuacaguguucuauac

SEQ ID NO: 790775 - RNA, 19 nt, Homo sapiens
  misc_RNA (1)...(19): siRNA sense strand
gcacuacaguucagacaau

SEQ ID NO: 790776 - RNA, 19 nt, Homo sapiens
  misc_RNA (1)...(19): siRNA sense strand
gaauugcucugguuaugau

SEQ ID NO: 790777 - RNA, 19 nt, Homo sapiens
  misc_RNA (1)...(19): siRNA sense strand
gaacagauuaugcagagaa

SEQ ID NO: 790778 - RNA, 19 nt, Homo sapiens
  misc_RNA (1)...(19): siRNA sense strand
gaggaugucuggugugugu

SEQ ID NO: 790779 - RNA, 19 nt, Homo sapiens
  misc_RNA (1)...(19): siRNA sense strand
caagauaacacaacuacaa

SEQ ID NO: 790780 - RNA, 19 nt, Homo sapiens
  misc_RNA (1)...(19): siRNA sense strand
caccaacaccuguaaauuu

SEQ ID NO: 790781 - RNA, 19 nt, Homo sapiens
  misc_RNA (1)...(19): siRNA sense strand
gauaacacaacuacaacua

SEQ ID NO: 790782 - RNA, 19 nt, Homo sapiens
  misc_RNA (1)...(19): siRNA sense strand
caugaaggcucuggagaaa

SEQ ID NO: 790783 - RNA, 19 nt, Homo sapiens
  misc_RNA (1)...(19): siRNA sense strand
gcgacaggcugcaugcaaa

SEQ ID NO: 790784 - RNA, 19 nt, Homo sapiens
  misc_RNA (1)...(19): siRNA sense strand
cagagaaugcuaacaaauu

SEQ ID NO: 790785 - RNA, 19 nt, Homo sapiens
  misc_RNA (1)...(19): siRNA sense strand
agaagaaagugccagagaa

SEQ ID NO: 790786 - RNA, 19 nt, Homo sapiens
  misc_RNA (1)...(19): siRNA sense strand
gcaacagaauucacagaca

SEQ ID NO: 790787 - RNA, 19 nt, Homo sapiens
  misc_RNA (1)...(19): siRNA sense strand
ugacgaagaugccgaggau

SEQ ID NO: 790788 - RNA, 19 nt, Homo sapiens
  misc_RNA (1)...(19): siRNA sense strand
aaagaagcaucgugucaga

SEQ ID NO: 790789 - RNA, 19 nt, Homo sapiens
  misc_RNA (1)...(19): siRNA sense strand
gcuaccagaaugaguguua

SEQ ID NO: 790790 - RNA, 19 nt, Homo sapiens
  misc_RNA (1)...(19): siRNA sense strand
caacaccuguaaauuugau

SEQ ID NO: 790791 - RNA, 19 nt, Homo sapiens
  misc_RNA (1)...(19): siRNA sense strand
gcaggugugaugcugguua

SEQ ID NO: 790792 - RNA, 19 nt, Homo sapiens
  misc_RNA (1)...(19): siRNA sense strand
uaacacaacuacaacuacu

SEQ ID NO: 790793 - RNA, 19 nt, Homo sapiens
  misc_RNA (1)...(19): siRNA sense strand
ggaagugugagcauucuau

SEQ ID NO: 790794 - RNA, 19 nt, Homo sapiens
  misc_RNA (1)...(19): siRNA sense strand
ccaguuuggugcagaaugu

SEQ ID NO: 790795 - RNA, 19 nt, Homo sapiens
  misc_RNA (1)...(19): siRNA sense strand
ugugagcauucuaucaaua

SEQ ID NO: 790796 - RNA, 19 nt, Homo sapiens
  misc_RNA (1)...(19): siRNA sense strand
uaccuuguccggaacauua

SEQ ID NO: 790797 - RNA, 19 nt, Homo sapiens
  misc_RNA (1)...(19): siRNA sense strand
cuacaacuacuaagucuga

SEQ ID NO: 790798 - RNA, 19 nt, Homo sapiens
  misc_RNA (1)...(19): siRNA sense strand
ggagaaaauugaagucaug

SEQ ID NO: 790799 - RNA, 19 nt, Homo sapiens
  misc_RNA (1)...(19): siRNA sense strand
gcaaacagcagagugagau

SEQ ID NO: 790800 - RNA, 19 nt, Homo sapiens
  misc_RNA (1)...(19): siRNA sense strand
cuacaguguucuauacguu

SEQ ID NO: 790801 - RNA, 19 nt, Homo sapiens
  misc_RNA (1)...(19): siRNA sense strand
gcagagaaugcuaacaaau

SEQ ID NO: 790802 - RNA, 19 nt, Homo sapiens
  misc_RNA (1)...(19): siRNA sense strand
ugaaggcucuggagaaacu

SEQ ID NO: 790803 - RNA, 19 nt, Homo sapiens
  misc_RNA (1)...(19): siRNA sense strand
ggaauugcucugguuauga

SEQ ID NO: 790804 - RNA, 19 nt, Homo sapiens
  misc_RNA (1)...(19): siRNA sense strand
gaacaccacauaccuuguc

SEQ ID NO: 790805 - RNA, 19 nt, Homo sapiens
  misc_RNA (1)...(19): siRNA sense strand
gugcaacaaugacuaugug

SEQ ID NO: 790806 - RNA, 19 nt, Homo sapiens
  misc_RNA (1)...(19): siRNA sense strand
accaacaccuguaaauuug

SEQ ID NO: 790807 - RNA, 19 nt, Homo sapiens
  misc_RNA (1)...(19): siRNA sense strand
acacaacuacaacuacuaa

SEQ ID NO: 790808 - RNA, 19 nt, Homo sapiens
  misc_RNA (1)...(19): siRNA sense strand
gaagaaagugccagagaac

SEQ ID NO: 790809 - RNA, 19 nt, Homo sapiens
  misc_RNA (1)...(19): siRNA sense strand
caacuacaacuacuaaguc

SEQ ID NO: 790810 - RNA, 19 nt, Homo sapiens
  misc_RNA (1)...(19): siRNA sense strand
caacuacuaagucugaaga

SEQ ID NO: 790811 - RNA, 19 nt, Homo sapiens
  misc_RNA (1)...(19): siRNA sense strand
uguguaauauugacuguuc

SEQ ID NO: 790812 - RNA, 19 nt, Homo sapiens
  misc_RNA (1)...(19): siRNA sense strand
gacauccaccugugauauu

SEQ ID NO: 790813 - RNA, 19 nt, Homo sapiens
  misc_RNA (1)...(19): siRNA sense strand
uugggucgaugucaagaua

SEQ ID NO: 790814 - RNA, 19 nt, Homo sapiens
  misc_RNA (1)...(19): siRNA sense strand
cuucugaugggaaaucuua

SEQ ID NO: 790815 - RNA, 19 nt, Homo sapiens
  misc_RNA (1)...(19): siRNA sense strand
ucaaagaagcaucguguca

SEQ ID NO: 790816 - RNA, 19 nt, Homo sapiens
  misc_RNA (1)...(19): siRNA sense strand
gagacauccaccugugaua

SEQ ID NO: 790817 - RNA, 19 nt, Homo sapiens
  misc_RNA (1)...(19): siRNA sense strand
caagagcguccacgagguu

SEQ ID NO: 790818 - RNA, 19 nt, Homo sapiens
  misc_RNA (1)...(19): siRNA sense strand
ugagauacuugugguguca

SEQ ID NO: 790819 - RNA, 19 nt, Homo sapiens
  misc_RNA (1)...(19): siRNA sense strand
ugugauauuugccaguuug

SEQ ID NO: 790820 - RNA, 19 nt, Homo sapiens
  misc_RNA (1)...(19): siRNA sense strand
gcuggaauugcucugguua

SEQ ID NO: 790821 - RNA, 19 nt, Homo sapiens
  misc_RNA (1)...(19): siRNA sense strand
ugccagagaacaccacaua

SEQ ID NO: 790822 - RNA, 19 nt, Homo sapiens
  misc_RNA (1)...(19): siRNA sense strand
agaagcaucgugucagaaa

SEQ ID NO: 790823 - RNA, 19 nt, Homo sapiens
  misc_RNA (1)...(19): siRNA sense strand
acauccaccugugauauuu

SEQ ID NO: 790824 - RNA, 19 nt, Homo sapiens
  misc_RNA (1)...(19): siRNA sense strand
caaacagcagagugagaua

SEQ ID NO: 790825 - RNA, 19 nt, Homo sapiens
  misc_RNA (1)...(19): siRNA sense strand
ggggagagcuaccagaaug

SEQ ID NO: 790826 - RNA, 19 nt, Homo sapiens
  misc_RNA (1)...(19): siRNA sense strand
gauggggaauguuuaagaa

SEQ ID NO: 790827 - RNA, 19 nt, Homo sapiens
  misc_RNA (1)...(19): siRNA sense strand
uaaugcaugccaaaucaaa

SEQ ID NO: 790828 - RNA, 19 nt, Homo sapiens
  misc_RNA (1)...(19): siRNA sense strand
ccaugaaggcucuggagaa

SEQ ID NO: 790829 - RNA, 19 nt, Homo sapiens
  misc_RNA (1)...(19): siRNA sense strand
caagugcaacaaugacuau

SEQ ID NO: 790830 - RNA, 19 nt, Homo sapiens
  misc_RNA (1)...(19): siRNA sense strand
uggaauugcucugguuaug

SEQ ID NO: 790831 - RNA, 19 nt, Homo sapiens
  misc_RNA (1)...(19): siRNA sense strand
cacuacaguucagacaaua

SEQ ID NO: 790832 - RNA, 19 nt, Homo sapiens
  misc_RNA (1)...(19): siRNA sense strand
ccuguacgauuucaguaug

SEQ ID NO: 790833 - RNA, 19 nt, Homo sapiens
  misc_RNA (1)...(19): siRNA sense strand
cagcagagugagauacuug

SEQ ID NO: 790834 - RNA, 19 nt, Homo sapiens
  misc_RNA (1)...(19): siRNA sense strand
caugggaagugugagcauu

SEQ ID NO: 790835 - RNA, 19 nt, Homo sapiens
  misc_RNA (1)...(19): siRNA sense strand
uagaagaaagugccagaga

SEQ ID NO: 790836 - RNA, 19 nt, Homo sapiens
  misc_RNA (1)...(19): siRNA sense strand
ugcagagaaugcuaacaaa

SEQ ID NO: 790837 - RNA, 19 nt, Homo sapiens
  misc_RNA (1)...(19): siRNA sense strand
ugccacagaugcaggauca

SEQ ID NO: 790838 - RNA, 19 nt, Homo sapiens
  misc_RNA (1)...(19): siRNA sense strand
ggagacauccaccugugau

SEQ ID NO: 790839 - RNA, 19 nt, Homo sapiens
  misc_RNA (1)...(19): siRNA sense strand
ugguguguguguaauauug

SEQ ID NO: 790840 - RNA, 19 nt, Homo sapiens
  misc_RNA (1)...(19): siRNA sense strand
auacagggcacuacaguuc

SEQ ID NO: 790841 - RNA, 19 nt, Homo sapiens
  misc_RNA (1)...(19): siRNA sense strand
gugagcauucuaucaauau

SEQ ID NO: 790842 - RNA, 19 nt, Homo sapiens
  misc_RNA (1)...(19): siRNA sense strand
gaagcaucgugucagaaac

SEQ ID NO: 790843 - RNA, 19 nt, Homo sapiens
  misc_RNA (1)...(19): siRNA sense strand
caguucaagugcaacaaug

SEQ ID NO: 790844 - RNA, 19 nt, Homo sapiens
  misc_RNA (1)...(19): siRNA sense strand
caggugugaugcugguuau

SEQ ID NO: 790845 - RNA, 19 nt, Homo sapiens
  misc_RNA (1)...(19): siRNA sense strand
gcaugcaugggaaguguga

SEQ ID NO: 790846 - RNA, 19 nt, Homo sapiens
  misc_RNA (1)...(19): siRNA sense strand
ucaagugcaacaaugacua

SEQ ID NO: 790847 - RNA, 19 nt, Homo sapiens
  misc_RNA (1)...(19): siRNA sense strand
ugcagaaugugacgaagau

SEQ ID NO: 790848 - RNA, 19 nt, Homo sapiens
  misc_RNA (1)...(19): siRNA sense strand
cgauuucaguaugucuuaa

SEQ ID NO: 790849 - RNA, 19 nt, Homo sapiens
  misc_RNA (1)...(19): siRNA sense strand
ucccgguccuguacgauuu

SEQ ID NO: 790850 - RNA, 19 nt, Homo sapiens
  misc_RNA (1)...(19): siRNA sense strand
gaagugugagcauucuauc

SEQ ID NO: 790851 - RNA, 19 nt, Homo sapiens
  misc_RNA (1)...(19): siRNA sense strand
gaugucuggugugugugua

SEQ ID NO: 790852 - RNA, 19 nt, Homo sapiens
  misc_RNA (1)...(19): siRNA sense strand
ggggaauguuuaagaauug

SEQ ID NO: 790853 - RNA, 19 nt, Homo sapiens
  misc_RNA (1)...(19): siRNA sense strand
caugcaaacagcagaguga

SEQ ID NO: 790854 - RNA, 19 nt, Homo sapiens
  misc_RNA (1)...(19): siRNA sense strand
gacaccaacaccuguaaau

SEQ ID NO: 790855 - RNA, 19 nt, Homo sapiens
  misc_RNA (1)...(19): siRNA sense strand
ccugugauauuugccaguu

SEQ ID NO: 790856 - RNA, 19 nt, Homo sapiens
  misc_RNA (1)...(19): siRNA sense strand
acaccaacaccuguaaauu

SEQ ID NO: 790857 - RNA, 19 nt, Homo sapiens
  misc_RNA (1)...(19): siRNA sense strand
guucagacaauacaacaag

SEQ ID NO: 790858 - RNA, 19 nt, Homo sapiens
  misc_RNA (1)...(19): siRNA sense strand
ugagcauucuaucaauaug

SEQ ID NO: 790859 - RNA, 19 nt, Homo sapiens
  misc_RNA (1)...(19): siRNA sense strand
gggagagcuaccagaauga

SEQ ID NO: 790860 - RNA, 19 nt, Homo sapiens
  misc_RNA (1)...(19): siRNA sense strand
gugugagcauucuaucaau

SEQ ID NO: 790861 - RNA, 19 nt, Homo sapiens
  misc_RNA (1)...(19): siRNA sense strand
agaauuggagacacuguga

SEQ ID NO: 790862 - RNA, 19 nt, Homo sapiens
  misc_RNA (1)...(19): siRNA sense strand
cccagaagcaacagaauuc

SEQ ID NO: 790863 - RNA, 19 nt, Homo sapiens
  misc_RNA (1)...(19): siRNA sense strand
gugguccucugcaucacaa

SEQ ID NO: 790864 - RNA, 19 nt, Homo sapiens
  misc_RNA (1)...(19): siRNA sense strand
gugcagaaugugacgaaga

SEQ ID NO: 790865 - RNA, 19 nt, Homo sapiens
  misc_RNA (1)...(19): siRNA sense strand
ccgaggaugucuggugugu

SEQ ID NO: 790866 - RNA, 19 nt, Homo sapiens
  misc_RNA (1)...(19): siRNA sense strand
ucugguguguguguaauau

SEQ ID NO: 790867 - RNA, 19 nt, Homo sapiens
  misc_RNA (1)...(19): siRNA sense strand
agaagcaacagaauucaca

SEQ ID NO: 790868 - RNA, 19 nt, Homo sapiens
  misc_RNA (1)...(19): siRNA sense strand
acaaggaaaugccccagaa

SEQ ID NO: 790869 - RNA, 19 nt, Homo sapiens
  misc_RNA (1)...(19): siRNA sense strand
gauuaugcagagaaugcua

SEQ ID NO: 790870 - RNA, 19 nt, Homo sapiens
  misc_RNA (1)...(19): siRNA sense strand
gucugaagaugggcauuau

SEQ ID NO: 790871 - RNA, 19 nt, Homo sapiens
  misc_RNA (1)...(19): siRNA sense strand
ugauaaugcaugccaaauc

SEQ ID NO: 790872 - RNA, 19 nt, Homo sapiens
  misc_RNA (1)...(19): siRNA sense strand
gcaagagaguggacacaaa

SEQ ID NO: 790873 - RNA, 19 nt, Homo sapiens
  misc_RNA (1)...(19): siRNA sense strand
gaaugacaguccuuaccaa

SEQ ID NO: 790874 - RNA, 19 nt, Homo sapiens
  misc_RNA (1)...(19): siRNA sense strand
uaaagcggauccagaagga

SEQ ID NO: 790875 - RNA, 19 nt, Homo sapiens
  misc_RNA (1)...(19): siRNA sense strand
aaaguucucuuguccaucu

SEQ ID NO: 790876 - RNA, 19 nt, Homo sapiens
  misc_RNA (1)...(19): siRNA sense strand
ccaaggagguguuuucuuc

SEQ ID NO: 790877 - RNA, 19 nt, Homo sapiens
  misc_RNA (1)...(19): siRNA sense strand
gaaggaauuaaccgacuug

SEQ ID NO: 790878 - RNA, 19 nt, Homo sapiens
  misc_RNA (1)...(19): siRNA sense strand
guacaacagacuagcaaga

SEQ ID NO: 790879 - RNA, 19 nt, Homo sapiens
  misc_RNA (1)...(19): siRNA sense strand
acaacagacuagcaagaga

SEQ ID NO: 790880 - RNA, 19 nt, Homo sapiens
  misc_RNA (1)...(19): siRNA sense strand
ccacuuuccuacagauuac

SEQ ID NO: 790881 - RNA, 19 nt, Homo sapiens
  misc_RNA (1)...(19): siRNA sense strand
gaaguacaacagacuagca

SEQ ID NO: 790882 - RNA, 19 nt, Homo sapiens
  misc_RNA (1)...(19): siRNA sense strand
ccuaauaucaacagcaaug

SEQ ID NO: 790883 - RNA, 19 nt, Homo sapiens
  misc_RNA (1)...(19): siRNA sense strand
agaaggaauuaaccgacuu

SEQ ID NO: 790884 - RNA, 19 nt, Homo sapiens
  misc_RNA (1)...(19): siRNA sense strand
gcggauccagaaggaauua

SEQ ID NO: 790885 - RNA, 19 nt, Homo sapiens
  misc_RNA (1)...(19): siRNA sense strand
caaaaguucucuuguccau

SEQ ID NO: 790886 - RNA, 19 nt, Homo sapiens
  misc_RNA (1)...(19): siRNA sense strand
gagaaguacaacagacuag

SEQ ID NO: 790887 - RNA, 19 nt, Homo sapiens
  misc_RNA (1)...(19): siRNA sense strand
ugucggugaugacuuguuc

SEQ ID NO: 790888 - RNA, 19 nt, Homo sapiens
  misc_RNA (1)...(19): siRNA sense strand
cagcaucugccuugauauc

SEQ ID NO: 790889 - RNA, 19 nt, Homo sapiens
  misc_RNA (1)...(19): siRNA sense strand
caagagaguggacacaaaa

SEQ ID NO: 790890 - RNA, 19 nt, Homo sapiens
  misc_RNA (1)...(19): siRNA sense strand
gagagaaguacaacagacu

SEQ ID NO: 790891 - RNA, 19 nt, Homo sapiens
  misc_RNA (1)...(19): siRNA sense strand
gcccgaaugacaguccuua

SEQ ID NO: 790892 - RNA, 19 nt, Homo sapiens
  misc_RNA (1)...(19): siRNA sense strand
gaccauccacuuuccuaca

SEQ ID NO: 790893 - RNA, 19 nt, Homo sapiens
  misc_RNA (1)...(19): siRNA sense strand
acccuaauaucaacagcaa

SEQ ID NO: 790894 - RNA, 19 nt, Homo sapiens
  misc_RNA (1)...(19): siRNA sense strand
cgaaugacaguccuuacca

SEQ ID NO: 790895 - RNA, 19 nt, Homo sapiens
  misc_RNA (1)...(19): siRNA sense strand
agagaaguacaacagacua

SEQ ID NO: 790896 - RNA, 19 nt, Homo sapiens
  misc_RNA (1)...(19): siRNA sense strand
ccuacaaggccgacagaga

SEQ ID NO: 790897 - RNA, 19 nt, Homo sapiens
  misc_RNA (1)...(19): siRNA sense strand
cagagagaaguacaacaga

SEQ ID NO: 790898 - RNA, 19 nt, Homo sapiens
  misc_RNA (1)...(19): siRNA sense strand
cuacagauuacccguucaa

SEQ ID NO: 790899 - RNA, 19 nt, Homo sapiens
  misc_RNA (1)...(19): siRNA sense strand
gauagcacacaccuacaag

SEQ ID NO: 790900 - RNA, 19 nt, Homo sapiens
  misc_RNA (1)...(19): siRNA sense strand
uccacuuuccuacagauua

SEQ ID NO: 790901 - RNA, 19 nt, Homo sapiens
  misc_RNA (1)...(19): siRNA sense strand
gcaucugccuugauauccu

SEQ ID NO: 790902 - RNA, 19 nt, Homo sapiens
  misc_RNA (1)...(19): siRNA sense strand
ccauccacuuuccuacaga

SEQ ID NO: 790903 - RNA, 19 nt, Homo sapiens
  misc_RNA (1)...(19): siRNA sense strand
ggauccuccugcccagugu

SEQ ID NO: 790904 - RNA, 19 nt, Homo sapiens
  misc_RNA (1)...(19): siRNA sense strand
acagagagaaguacaacag

SEQ ID NO: 790905 - RNA, 19 nt, Homo sapiens
  misc_RNA (1)...(19): siRNA sense strand
cauccacuuuccuacagau

SEQ ID NO: 790906 - RNA, 19 nt, Homo sapiens
  misc_RNA (1)...(19): siRNA sense strand
gaacaaagauccaucauuu

SEQ ID NO: 790907 - RNA, 19 nt, Homo sapiens
  misc_RNA (1)...(19): siRNA sense strand
uaacauagcugauccagaa

SEQ ID NO: 790908 - RNA, 19 nt, Homo sapiens
  misc_RNA (1)...(19): siRNA sense strand
gaaagaagccugauccaaa

SEQ ID NO: 790909 - RNA, 19 nt, Homo sapiens
  misc_RNA (1)...(19): siRNA sense strand
gaauaacgcuagcaggaau

SEQ ID NO: 790910 - RNA, 19 nt, Homo sapiens
  misc_RNA (1)...(19): siRNA sense strand
agaaauaacugucuugagu

SEQ ID NO: 790911 - RNA, 19 nt, Homo sapiens
  misc_RNA (1)...(19): siRNA sense strand
gauaaucacaccugcauuu

SEQ ID NO: 790912 - RNA, 19 nt, Homo sapiens
  misc_RNA (1)...(19): siRNA sense strand
ugugacagcucauauguaa

SEQ ID NO: 790913 - RNA, 19 nt, Homo sapiens
  misc_RNA (1)...(19): siRNA sense strand
acaaggagauguuaaacuu

SEQ ID NO: 790914 - RNA, 19 nt, Homo sapiens
  misc_RNA (1)...(19): siRNA sense strand
ggaagccgaagaugaaaua

SEQ ID NO: 790915 - RNA, 19 nt, Homo sapiens
  misc_RNA (1)...(19): siRNA sense strand
caaagaaaguacagaaugg

SEQ ID NO: 790916 - RNA, 19 nt, Homo sapiens
  misc_RNA (1)...(19): siRNA sense strand
gggaauuacugcuauugaa

SEQ ID NO: 790917 - RNA, 19 nt, Homo sapiens
  misc_RNA (1)...(19): siRNA sense strand
uagaagacauucagcaaga

SEQ ID NO: 790918 - RNA, 19 nt, Homo sapiens
  misc_RNA (1)...(19): siRNA sense strand
gcugacagauacacagauu

SEQ ID NO: 790919 - RNA, 19 nt, Homo sapiens
  misc_RNA (1)...(19): siRNA sense strand
ugacagauacacagauuaa

SEQ ID NO: 790920 - RNA, 19 nt, Homo sapiens
  misc_RNA (1)...(19): siRNA sense strand
ccagauugcuaccaugcua

SEQ ID NO: 790921 - RNA, 19 nt, Homo sapiens
  misc_RNA (1)...(19): siRNA sense strand
gaagccugauccaaagaaa

SEQ ID NO: 790922 - RNA, 19 nt, Homo sapiens
  misc_RNA (1)...(19): siRNA sense strand
aaagaagccugauccaaag

SEQ ID NO: 790923 - RNA, 19 nt, Homo sapiens
  misc_RNA (1)...(19): siRNA sense strand
gaagacauucagcaagaaa

SEQ ID NO: 790924 - RNA, 19 nt, Homo sapiens
  misc_RNA (1)...(19): siRNA sense strand
gaacugauagaucguuuua

SEQ ID NO: 790925 - RNA, 19 nt, Homo sapiens
  misc_RNA (1)...(19): siRNA sense strand
ggucuggacuaucugcauu

SEQ ID NO: 790926 - RNA, 19 nt, Homo sapiens
  misc_RNA (1)...(19): siRNA sense strand
ugagaguucuguuucuuau

SEQ ID NO: 790927 - RNA, 19 nt, Homo sapiens
  misc_RNA (1)...(19): siRNA sense strand
ccaaagaaaguacagaaug

SEQ ID NO: 790928 - RNA, 19 nt, Homo sapiens
  misc_RNA (1)...(19): siRNA sense strand
ugaggaagccgaagaugaa

SEQ ID NO: 790929 - RNA, 19 nt, Homo sapiens
  misc_RNA (1)...(19): siRNA sense strand
gagcugguccauuugauga

SEQ ID NO: 790930 - RNA, 19 nt, Homo sapiens
  misc_RNA (1)...(19): siRNA sense strand
gugcaaacccugaguuguu

SEQ ID NO: 790931 - RNA, 19 nt, Homo sapiens
  misc_RNA (1)...(19): siRNA sense strand
gauggcuccugaaguuauu

SEQ ID NO: 790932 - RNA, 19 nt, Homo sapiens
  misc_RNA (1)...(19): siRNA sense strand
ugccugggaugcagaauaa

SEQ ID NO: 790933 - RNA, 19 nt, Homo sapiens
  misc_RNA (1)...(19): siRNA sense strand
aaacaauccuccaacucuu

SEQ ID NO: 790934 - RNA, 19 nt, Homo sapiens
  misc_RNA (1)...(19): siRNA sense strand
agaguucuguuucuuauuc

SEQ ID NO: 790935 - RNA, 19 nt, Homo sapiens
  misc_RNA (1)...(19): siRNA sense strand
cgauaugcauccaaugaga

SEQ ID NO: 790936 - RNA, 19 nt, Homo sapiens
  misc_RNA (1)...(19): siRNA sense strand
aaauaacugucuugaguca

SEQ ID NO: 790937 - RNA, 19 nt, Homo sapiens
  misc_RNA (1)...(19): siRNA sense strand
gaaaauucaccgagacaua

SEQ ID NO: 790938 - RNA, 19 nt, Homo sapiens
  misc_RNA (1)...(19): siRNA sense strand
aaucauagaccuugaggaa

SEQ ID NO: 790939 - RNA, 19 nt, Homo sapiens
  misc_RNA (1)...(19): siRNA sense strand
acacagugaugaugaaucu

SEQ ID NO: 790940 - RNA, 19 nt, Homo sapiens
  misc_RNA (1)...(19): siRNA sense strand
gcagaaggacacagugaug

SEQ ID NO: 790941 - RNA, 19 nt, Homo sapiens
  misc_RNA (1)...(19): siRNA sense strand
agccgaagaugaaauagaa

SEQ ID NO: 790942 - RNA, 19 nt, Homo sapiens
  misc_RNA (1)...(19): siRNA sense strand
gauugaagaacucgagaaa

SEQ ID NO: 790943 - RNA, 19 nt, Homo sapiens
  misc_RNA (1)...(19): siRNA sense strand
ucuucgagcugguccauuu

SEQ ID NO: 790944 - RNA, 19 nt, Homo sapiens
  misc_RNA (1)...(19): siRNA sense strand
gaagaacucgagaaaagua

SEQ ID NO: 790945 - RNA, 19 nt, Homo sapiens
  misc_RNA (1)...(19): siRNA sense strand
gaacuucugaaacacaaau

SEQ ID NO: 790946 - RNA, 19 nt, Homo sapiens
  misc_RNA (1)...(19): siRNA sense strand
gauccaucauuucguccua

SEQ ID NO: 790947 - RNA, 19 nt, Homo sapiens
  misc_RNA (1)...(19): siRNA sense strand
uuggauggcuccugaaguu

SEQ ID NO: 790948 - RNA, 19 nt, Homo sapiens
  misc_RNA (1)...(19): siRNA sense strand
uaaaaggucuggacuaucu

SEQ ID NO: 790949 - RNA, 19 nt, Homo sapiens
  misc_RNA (1)...(19): siRNA sense strand
gauguuaaacuugcugauu

SEQ ID NO: 790950 - RNA, 19 nt, Homo sapiens
  misc_RNA (1)...(19): siRNA sense strand
gaaucuaccagcagggaaa

SEQ ID NO: 790951 - RNA, 19 nt, Homo sapiens
  misc_RNA (1)...(19): siRNA sense strand
agacauucagcaagaaaua

SEQ ID NO: 790952 - RNA, 19 nt, Homo sapiens
  misc_RNA (1)...(19): siRNA sense strand
ugcauuugcugaacuuaaa

SEQ ID NO: 790953 - RNA, 19 nt, Homo sapiens
  misc_RNA (1)...(19): siRNA sense strand
ccaaugagaguucuguuuc

SEQ ID NO: 790954 - RNA, 19 nt, Homo sapiens
  misc_RNA (1)...(19): siRNA sense strand
ugacagcucauauguaaca

SEQ ID NO: 790955 - RNA, 19 nt, Homo sapiens
  misc_RNA (1)...(19): siRNA sense strand
cauagcugauccagaagaa

SEQ ID NO: 790956 - RNA, 19 nt, Homo sapiens
  misc_RNA (1)...(19): siRNA sense strand
cauaaaagcugccaauguc

SEQ ID NO: 790957 - RNA, 19 nt, Homo sapiens
  misc_RNA (1)...(19): siRNA sense strand
guucagcacuggaucuucu

SEQ ID NO: 790958 - RNA, 19 nt, Homo sapiens
  misc_RNA (1)...(19): siRNA sense strand
cagauaaaauggugaagaa

SEQ ID NO: 790959 - RNA, 19 nt, Homo sapiens
  misc_RNA (1)...(19): siRNA sense strand
uuaaacagcaggacgagaa

SEQ ID NO: 790960 - RNA, 19 nt, Homo sapiens
  misc_RNA (1)...(19): siRNA sense strand
ggauggcuccugaaguuau

SEQ ID NO: 790961 - RNA, 19 nt, Homo sapiens
  misc_RNA (1)...(19): siRNA sense strand
ccaccuaacuccgauaugc

SEQ ID NO: 790962 - RNA, 19 nt, Homo sapiens
  misc_RNA (1)...(19): siRNA sense strand
gaaggacacagugaugaug

SEQ ID NO: 790963 - RNA, 19 nt, Homo sapiens
  misc_RNA (1)...(19): siRNA sense strand
caaugagaguucuguuucu

SEQ ID NO: 790964 - RNA, 19 nt, Homo sapiens
  misc_RNA (1)...(19): siRNA sense strand
gaaggcagaaggacacagu

SEQ ID NO: 790965 - RNA, 19 nt, Homo sapiens
  misc_RNA (1)...(19): siRNA sense strand
gaagaugaaauagaagaca

SEQ ID NO: 790966 - RNA, 19 nt, Homo sapiens
  misc_RNA (1)...(19): siRNA sense strand
gaugaguuccagauugcua

SEQ ID NO: 790967 - RNA, 19 nt, Homo sapiens
  misc_RNA (1)...(19): siRNA sense strand
gacauucagcaagaaauaa

SEQ ID NO: 790968 - RNA, 19 nt, Homo sapiens
  misc_RNA (1)...(19): siRNA sense strand
ccaaugucuugcucucaga

SEQ ID NO: 790969 - RNA, 19 nt, Homo sapiens
  misc_RNA (1)...(19): siRNA sense strand
ugaacaaagauccaucauu

SEQ ID NO: 790970 - RNA, 19 nt, Homo sapiens
  misc_RNA (1)...(19): siRNA sense strand
cuaccaugcuaaaggaaau

SEQ ID NO: 790971 - RNA, 19 nt, Homo sapiens
  misc_RNA (1)...(19): siRNA sense strand
cugaguuguuugucuauga

SEQ ID NO: 790972 - RNA, 19 nt, Homo sapiens
  misc_RNA (1)...(19): siRNA sense strand
cgaaagaagccugauccaa

SEQ ID NO: 790973 - RNA, 19 nt, Homo sapiens
  misc_RNA (1)...(19): siRNA sense strand
cuucuuaucugacugaacu

SEQ ID NO: 790974 - RNA, 19 nt, Homo sapiens
  misc_RNA (1)...(19): siRNA sense strand
augcuugccugaacaaaga

SEQ ID NO: 790975 - RNA, 19 nt, Homo sapiens
  misc_RNA (1)...(19): siRNA sense strand
ggaauuacugcuauugaac

SEQ ID NO: 790976 - RNA, 19 nt, Homo sapiens
  misc_RNA (1)...(19): siRNA sense strand
ggugaagaaacuaauugaa

SEQ ID NO: 790977 - RNA, 19 nt, Homo sapiens
  misc_RNA (1)...(19): siRNA sense strand
agaagacauucagcaagaa

SEQ ID NO: 790978 - RNA, 19 nt, Homo sapiens
  misc_RNA (1)...(19): siRNA sense strand
gucccggcaucacagauaa

SEQ ID NO: 790979 - RNA, 19 nt, Homo sapiens
  misc_RNA (1)...(19): siRNA sense strand
uuugaugaguuccagauug

SEQ ID NO: 790980 - RNA, 19 nt, Homo sapiens
  misc_RNA (1)...(19): siRNA sense strand
cagcucauauguaacaaaa

SEQ ID NO: 790981 - RNA, 19 nt, Homo sapiens
  misc_RNA (1)...(19): siRNA sense strand
gagauggaaggcagaagga

SEQ ID NO: 790982 - RNA, 19 nt, Homo sapiens
  misc_RNA (1)...(19): siRNA sense strand
gaauuacugcuauugaacu

SEQ ID NO: 790983 - RNA, 19 nt, Homo sapiens
  misc_RNA (1)...(19): siRNA sense strand
cagaauaacauagcugauc

SEQ ID NO: 790984 - RNA, 19 nt, Homo sapiens
  misc_RNA (1)...(19): siRNA sense strand
ggauaauaauggaauaccu

SEQ ID NO: 790985 - RNA, 19 nt, Homo sapiens
  misc_RNA (1)...(19): siRNA sense strand
caaugugacagcucauaug

SEQ ID NO: 790986 - RNA, 19 nt, Homo sapiens
  misc_RNA (1)...(19): siRNA sense strand
acagugaugaugaaucuga

SEQ ID NO: 790987 - RNA, 19 nt, Homo sapiens
  misc_RNA (1)...(19): siRNA sense strand
cagaaggacacagugauga

SEQ ID NO: 790988 - RNA, 19 nt, Homo sapiens
  misc_RNA (1)...(19): siRNA sense strand
cauugggaauuacugcuau

SEQ ID NO: 790989 - RNA, 19 nt, Homo sapiens
  misc_RNA (1)...(19): siRNA sense strand
uuauucaacagucagcuua

SEQ ID NO: 790990 - RNA, 19 nt, Homo sapiens
  misc_RNA (1)...(19): siRNA sense strand
ugaguuguuugucuaugau

SEQ ID NO: 790991 - RNA, 19 nt, Homo sapiens
  misc_RNA (1)...(19): siRNA sense strand
acaaagauccaucauuucg

SEQ ID NO: 790992 - RNA, 19 nt, Homo sapiens
  misc_RNA (1)...(19): siRNA sense strand
aaugagaguucuguuucuu

SEQ ID NO: 790993 - RNA, 19 nt, Homo sapiens
  misc_RNA (1)...(19): siRNA sense strand
ccaagggagagccaccuaa

SEQ ID NO: 790994 - RNA, 19 nt, Homo sapiens
  misc_RNA (1)...(19): siRNA sense strand
gaugaaauagaagacauuc

SEQ ID NO: 790995 - RNA, 19 nt, Homo sapiens
  misc_RNA (1)...(19): siRNA sense strand
aaucacaccugcauuugcu

SEQ ID NO: 790996 - RNA, 19 nt, Homo sapiens
  misc_RNA (1)...(19): siRNA sense strand
gauagaucguuuuaagaga

SEQ ID NO: 790997 - RNA, 19 nt, Homo sapiens
  misc_RNA (1)...(19): siRNA sense strand
gcuaccaugcuaaaggaaa

SEQ ID NO: 790998 - RNA, 19 nt, Homo sapiens
  misc_RNA (1)...(19): siRNA sense strand
aaacagcaggacgagaaua

SEQ ID NO: 790999 - RNA, 19 nt, Homo sapiens
  misc_RNA (1)...(19): siRNA sense strand
uaaacuugcugauuuugga

SEQ ID NO: 791000 - RNA, 19 nt, Homo sapiens
  misc_RNA (1)...(19): siRNA sense strand
gaggaagccgaagaugaaa

SEQ ID NO: 791001 - RNA, 19 nt, Homo sapiens
  misc_RNA (1)...(19): siRNA sense strand
gagaguucuguuucuuauu

SEQ ID NO: 791002 - RNA, 19 nt, Homo sapiens
  misc_RNA (1)...(19): siRNA sense strand
gugccugggaugcagaaua

SEQ ID NO: 791003 - RNA, 19 nt, Homo sapiens
  misc_RNA (1)...(19): siRNA sense strand
aacagcaggacgagaauaa

SEQ ID NO: 791004 - RNA, 19 nt, Homo sapiens
  misc_RNA (1)...(19): siRNA sense strand
ggacacagugaugaugaau

SEQ ID NO: 791005 - RNA, 19 nt, Homo sapiens
  misc_RNA (1)...(19): siRNA sense strand
ucaaugugacagcucauau

SEQ ID NO: 791006 - RNA, 19 nt, Homo sapiens
  misc_RNA (1)...(19): siRNA sense strand
ccacaacaaugaagagaaa

SEQ ID NO: 791007 - RNA, 19 nt, Homo sapiens
  misc_RNA (1)...(19): siRNA sense strand
gaaaugauggagcccuuua

SEQ ID NO: 791008 - RNA, 19 nt, Homo sapiens
  misc_RNA (1)...(19): siRNA sense strand
ggaagaagaauauguggaa

SEQ ID NO: 791009 - RNA, 19 nt, Homo sapiens
  misc_RNA (1)...(19): siRNA sense strand
ggagaugugguggguauua

SEQ ID NO: 791010 - RNA, 19 nt, Homo sapiens
  misc_RNA (1)...(19): siRNA sense strand
uuaugaccaugucgaauua

SEQ ID NO: 791011 - RNA, 19 nt, Homo sapiens
  misc_RNA (1)...(19): siRNA sense strand
guaaagaauggaagaagaa

SEQ ID NO: 791012 - RNA, 19 nt, Homo sapiens
  misc_RNA (1)...(19): siRNA sense strand
aagguuaacuugaaucaga

SEQ ID NO: 791013 - RNA, 19 nt, Homo sapiens
  misc_RNA (1)...(19): siRNA sense strand
gacaguguauccaguuguu

SEQ ID NO: 791014 - RNA, 19 nt, Homo sapiens
  misc_RNA (1)...(19): siRNA sense strand
cagcgcaccuuuacaucaa

SEQ ID NO: 791015 - RNA, 19 nt, Homo sapiens
  misc_RNA (1)...(19): siRNA sense strand
caacucagaagguuaacuu

SEQ ID NO: 791016 - RNA, 19 nt, Homo sapiens
  misc_RNA (1)...(19): siRNA sense strand
uguaaagaauggaagaaga

SEQ ID NO: 791017 - RNA, 19 nt, Homo sapiens
  misc_RNA (1)...(19): siRNA sense strand
gaauggaagaagaauaugu

SEQ ID NO: 791018 - RNA, 19 nt, Homo sapiens
  misc_RNA (1)...(19): siRNA sense strand
gaccaugucgaauuaaaug

SEQ ID NO: 791019 - RNA, 19 nt, Homo sapiens
  misc_RNA (1)...(19): siRNA sense strand
guauugguguugcaacuca

SEQ ID NO: 791020 - RNA, 19 nt, Homo sapiens
  misc_RNA (1)...(19): siRNA sense strand
ucagaagguuaacuugaau

SEQ ID NO: 791021 - RNA, 19 nt, Homo sapiens
  misc_RNA (1)...(19): siRNA sense strand
caguguauccaguuguuua

SEQ ID NO: 791022 - RNA, 19 nt, Homo sapiens
  misc_RNA (1)...(19): siRNA sense strand
cucagaagguuaacuugaa

SEQ ID NO: 791023 - RNA, 19 nt, Homo sapiens
  misc_RNA (1)...(19): siRNA sense strand
aaggagaugugguggguau

SEQ ID NO: 791024 - RNA, 19 nt, Homo sapiens
  misc_RNA (1)...(19): siRNA sense strand
guauccaguuguuuauguu

SEQ ID NO: 791025 - RNA, 19 nt, Homo sapiens
  misc_RNA (1)...(19): siRNA sense strand
gccgagauaugcacagucu

SEQ ID NO: 791026 - RNA, 19 nt, Homo sapiens
  misc_RNA (1)...(19): siRNA sense strand
ccaugucgaauuaaaugua

SEQ ID NO: 791027 - RNA, 19 nt, Homo sapiens
  misc_RNA (1)...(19): siRNA sense strand
gggacaguguauccaguug

SEQ ID NO: 791028 - RNA, 19 nt, Homo sapiens
  misc_RNA (1)...(19): siRNA sense strand
guugaugacagugcaauuu

SEQ ID NO: 791029 - RNA, 19 nt, Homo sapiens
  misc_RNA (1)...(19): siRNA sense strand
gagaugugguggguauuac

SEQ ID NO: 791030 - RNA, 19 nt, Homo sapiens
  misc_RNA (1)...(19): siRNA sense strand
uguauccaguuguuuaugu

SEQ ID NO: 791031 - RNA, 19 nt, Homo sapiens
  misc_RNA (1)...(19): siRNA sense strand
ugguggguauuacuuauga

SEQ ID NO: 791032 - RNA, 19 nt, Homo sapiens
  misc_RNA (1)...(19): siRNA sense strand
acagucuggugaugagaaa

SEQ ID NO: 791033 - RNA, 19 nt, Homo sapiens
  misc_RNA (1)...(19): siRNA sense strand
cuuaugaccaugucgaauu

SEQ ID NO: 791034 - RNA, 19 nt, Homo sapiens
  misc_RNA (1)...(19): siRNA sense strand
ggguauuacuuaugaccau

SEQ ID NO: 791035 - RNA, 19 nt, Homo sapiens
  misc_RNA (1)...(19): siRNA sense strand
gguauacgagggacagugu

SEQ ID NO: 791036 - RNA, 19 nt, Homo sapiens
  misc_RNA (1)...(19): siRNA sense strand
ggacaguguauccaguugu

SEQ ID NO: 791037 - RNA, 19 nt, Homo sapiens
  misc_RNA (1)...(19): siRNA sense strand
agaagaauauguggaacag

SEQ ID NO: 791038 - RNA, 19 nt, Homo sapiens
  misc_RNA (1)...(19): siRNA sense strand
gaugugguggguauuacuu

SEQ ID NO: 791039 - RNA, 19 nt, Homo sapiens
  misc_RNA (1)...(19): siRNA sense strand
ccagcgcaccuuuacauca

SEQ ID NO: 791040 - RNA, 19 nt, Homo sapiens
  misc_RNA (1)...(19): siRNA sense strand
acaggaaucugggguauug

SEQ ID NO: 791041 - RNA, 19 nt, Homo sapiens
  misc_RNA (1)...(19): siRNA sense strand
uugcaacucagaagguuaa

SEQ ID NO: 791042 - RNA, 19 nt, Homo sapiens
  misc_RNA (1)...(19): siRNA sense strand
cagcacaugggaacagaug

SEQ ID NO: 791043 - RNA, 19 nt, Homo sapiens
  misc_RNA (1)...(19): siRNA sense strand
ugugguggguauuacuuau

SEQ ID NO: 791044 - RNA, 19 nt, Homo sapiens
  misc_RNA (1)...(19): siRNA sense strand
acucagaagguuaacuuga

SEQ ID NO: 791045 - RNA, 19 nt, Homo sapiens
  misc_RNA (1)...(19): siRNA sense strand
gauugccaguucagugagu

SEQ ID NO: 791046 - RNA, 19 nt, Homo sapiens
  misc_RNA (1)...(19): siRNA sense strand
uggauugccaguucaguga

SEQ ID NO: 791047 - RNA, 19 nt, Homo sapiens
  misc_RNA (1)...(19): siRNA sense strand
ggguauugguguugcaacu

SEQ ID NO: 791048 - RNA, 19 nt, Homo sapiens
  misc_RNA (1)...(19): siRNA sense strand
ccaguuguuuauguugaug

SEQ ID NO: 791049 - RNA, 19 nt, Homo sapiens
  misc_RNA (1)...(19): siRNA sense strand
cccuuuaccacaacaauga

SEQ ID NO: 791050 - RNA, 19 nt, Homo sapiens
  misc_RNA (1)...(19): siRNA sense strand
ucagugaguuuuaucauac

SEQ ID NO: 791051 - RNA, 19 nt, Homo sapiens
  misc_RNA (1)...(19): siRNA sense strand
agaaacaucucaccaauuu

SEQ ID NO: 791052 - RNA, 19 nt, Homo sapiens
  misc_RNA (1)...(19): siRNA sense strand
caagaaacaucucaccaau

SEQ ID NO: 791053 - RNA, 19 nt, Homo sapiens
  misc_RNA (1)...(19): siRNA sense strand
ccagagagccagaaagaaa

SEQ ID NO: 791054 - RNA, 19 nt, Homo sapiens
  misc_RNA (1)...(19): siRNA sense strand
gaaauuuggugccgugacu

SEQ ID NO: 791055 - RNA, 19 nt, Homo sapiens
  misc_RNA (1)...(19): siRNA sense strand
aaacaucucaccaauuuca

SEQ ID NO: 791056 - RNA, 19 nt, Homo sapiens
  misc_RNA (1)...(19): siRNA sense strand
ccaagaaacaucucaccaa

SEQ ID NO: 791057 - RNA, 19 nt, Homo sapiens
  misc_RNA (1)...(19): siRNA sense strand
gcucuuugcuccgugagaa

SEQ ID NO: 791058 - RNA, 19 nt, Homo sapiens
  misc_RNA (1)...(19): siRNA sense strand
ucacacggaugcgcaugaa

SEQ ID NO: 791059 - RNA, 19 nt, Homo sapiens
  misc_RNA (1)...(19): siRNA sense strand
caggugaaauaaacagcuu

SEQ ID NO: 791060 - RNA, 19 nt, Homo sapiens
  misc_RNA (1)...(19): siRNA sense strand
cggaugcgcaugaaauuug

SEQ ID NO: 791061 - RNA, 19 nt, Homo sapiens
  misc_RNA (1)...(19): siRNA sense strand
gagaaagauccaccuacga

SEQ ID NO: 791062 - RNA, 19 nt, Homo sapiens
  misc_RNA (1)...(19): siRNA sense strand
gcucacacgaagccuguuu

SEQ ID NO: 791063 - RNA, 19 nt, Homo sapiens
  misc_RNA (1)...(19): siRNA sense strand
ggaugcgcaugaaauuugg

SEQ ID NO: 791064 - RNA, 19 nt, Homo sapiens
  misc_RNA (1)...(19): siRNA sense strand
acacggaugcgcaugaaau

SEQ ID NO: 791065 - RNA, 19 nt, Homo sapiens
  misc_RNA (1)...(19): siRNA sense strand
aagaaacaucucaccaauu

SEQ ID NO: 791066 - RNA, 19 nt, Homo sapiens
  misc_RNA (1)...(19): siRNA sense strand
agaccgaccagcccaagaa

SEQ ID NO: 791067 - RNA, 19 nt, Homo sapiens
  misc_RNA (1)...(19): siRNA sense strand
gaccgaccagcccaagaaa

SEQ ID NO: 791068 - RNA, 19 nt, Homo sapiens
  misc_RNA (1)...(19): siRNA sense strand
ccuguuugguggucucuuc

SEQ ID NO: 791069 - RNA, 19 nt, Homo sapiens
  misc_RNA (1)...(19): siRNA sense strand
cgucggaggagaacaagug

SEQ ID NO: 791070 - RNA, 19 nt, Homo sapiens
  misc_RNA (1)...(19): siRNA sense strand
gaccagcccaagaaacauc

SEQ ID NO: 791071 - RNA, 19 nt, Homo sapiens
  misc_RNA (1)...(19): siRNA sense strand
cacggaugcgcaugaaauu

SEQ ID NO: 791072 - RNA, 19 nt, Homo sapiens
  misc_RNA (1)...(19): siRNA sense strand
ccgaccagcccaagaaaca

SEQ ID NO: 791073 - RNA, 19 nt, Homo sapiens
  misc_RNA (1)...(19): siRNA sense strand
gcacaagccuucauacaua

SEQ ID NO: 791074 - RNA, 19 nt, Homo sapiens
  misc_RNA (1)...(19): siRNA sense strand
ggaaaugacuccaagaaag

SEQ ID NO: 791075 - RNA, 19 nt, Homo sapiens
  misc_RNA (1)...(19): siRNA sense strand
ggacuacuguaaauaaguu

SEQ ID NO: 791076 - RNA, 19 nt, Homo sapiens
  misc_RNA (1)...(19): siRNA sense strand
gcgaggagcuguucaucga

SEQ ID NO: 791077 - RNA, 19 nt, Homo sapiens
  misc_RNA (1)...(19): siRNA sense strand
uaaauaaguuccugucucu

SEQ ID NO: 791078 - RNA, 19 nt, Homo sapiens
  misc_RNA (1)...(19): siRNA sense strand
gaaaugacuccaagaaagu

SEQ ID NO: 791079 - RNA, 19 nt, Homo sapiens
  misc_RNA (1)...(19): siRNA sense strand
agacuaacaucaagaaauc

SEQ ID NO: 791080 - RNA, 19 nt, Homo sapiens
  misc_RNA (1)...(19): siRNA sense strand
aacaagagguuaccaguga

SEQ ID NO: 791081 - RNA, 19 nt, Homo sapiens
  misc_RNA (1)...(19): siRNA sense strand
ccaagaaaguuaaaguaca

SEQ ID NO: 791082 - RNA, 19 nt, Homo sapiens
  misc_RNA (1)...(19): siRNA sense strand
ggugaaagaaguuaauuug

SEQ ID NO: 791083 - RNA, 19 nt, Homo sapiens
  misc_RNA (1)...(19): siRNA sense strand
caggaaaggugaaagaagu

SEQ ID NO: 791084 - RNA, 19 nt, Homo sapiens
  misc_RNA (1)...(19): siRNA sense strand
ggaaaggugaaagaaguua

SEQ ID NO: 791085 - RNA, 19 nt, Homo sapiens
  misc_RNA (1)...(19): siRNA sense strand
gacgguggauggucagaaa

SEQ ID NO: 791086 - RNA, 19 nt, Homo sapiens
  misc_RNA (1)...(19): siRNA sense strand
cacaagccuucauacauaa

SEQ ID NO: 791087 - RNA, 19 nt, Homo sapiens
  misc_RNA (1)...(19): siRNA sense strand
gaaaggugaaagaaguuaa

SEQ ID NO: 791088 - RNA, 19 nt, Homo sapiens
  misc_RNA (1)...(19): siRNA sense strand
caagaaaucgccaggaaag

SEQ ID NO: 791089 - RNA, 19 nt, Homo sapiens
  misc_RNA (1)...(19): siRNA sense strand
acgaugaguuugacgauga

SEQ ID NO: 791090 - RNA, 19 nt, Homo sapiens
  misc_RNA (1)...(19): siRNA sense strand
aagagcugcuguccaguuu

SEQ ID NO: 791091 - RNA, 19 nt, Homo sapiens
  misc_RNA (1)...(19): siRNA sense strand
ggaaggggacgaugaguuu

SEQ ID NO: 791092 - RNA, 19 nt, Homo sapiens
  misc_RNA (1)...(19): siRNA sense strand
ccacagcuucacagacuaa

SEQ ID NO: 791093 - RNA, 19 nt, Homo sapiens
  misc_RNA (1)...(19): siRNA sense strand
caaaaugccaagagguuua

SEQ ID NO: 791094 - RNA, 19 nt, Homo sapiens
  misc_RNA (1)...(19): siRNA sense strand
caagagguuaccagugaaa

SEQ ID NO: 791095 - RNA, 19 nt, Homo sapiens
  misc_RNA (1)...(19): siRNA sense strand
ucaagaaaucgccaggaaa

SEQ ID NO: 791096 - RNA, 19 nt, Homo sapiens
  misc_RNA (1)...(19): siRNA sense strand
cagacuaacaucaagaaau

SEQ ID NO: 791097 - RNA, 19 nt, Homo sapiens
  misc_RNA (1)...(19): siRNA sense strand
aauaaguuccugucucuug

SEQ ID NO: 791098 - RNA, 19 nt, Homo sapiens
  misc_RNA (1)...(19): siRNA sense strand
ggaaccaacaggacuacug

SEQ ID NO: 791099 - RNA, 19 nt, Homo sapiens
  misc_RNA (1)...(19): siRNA sense strand
aaccacagcuucacagacu

SEQ ID NO: 791100 - RNA, 19 nt, Homo sapiens
  misc_RNA (1)...(19): siRNA sense strand
aaagagcugcuguccaguu

SEQ ID NO: 791101 - RNA, 19 nt, Homo sapiens
  misc_RNA (1)...(19): siRNA sense strand
ccaggaaccaacaggacua

SEQ ID NO: 791102 - RNA, 19 nt, Homo sapiens
  misc_RNA (1)...(19): siRNA sense strand
ggacgaugaguuugacgau

SEQ ID NO: 791103 - RNA, 19 nt, Homo sapiens
  misc_RNA (1)...(19): siRNA sense strand
caggacuacuguaaauaag

SEQ ID NO: 791104 - RNA, 19 nt, Homo sapiens
  misc_RNA (1)...(19): siRNA sense strand
acaagagguuaccagugaa

SEQ ID NO: 791105 - RNA, 19 nt, Homo sapiens
  misc_RNA (1)...(19): siRNA sense strand
gaauaaugcuuggggaauc

SEQ ID NO: 791106 - RNA, 19 nt, Homo sapiens
  misc_RNA (1)...(19): siRNA sense strand
aaggaaaugacuccaagaa

SEQ ID NO: 791107 - RNA, 19 nt, Homo sapiens
  misc_RNA (1)...(19): siRNA sense strand
caagccuucauacauaauu

SEQ ID NO: 791108 - RNA, 19 nt, Homo sapiens
  misc_RNA (1)...(19): siRNA sense strand
gaacagaagaaaagaaaac

SEQ ID NO: 791109 - RNA, 19 nt, Homo sapiens
  misc_RNA (1)...(19): siRNA sense strand
ucacagacuaacaucaaga

SEQ ID NO: 791110 - RNA, 19 nt, Homo sapiens
  misc_RNA (1)...(19): siRNA sense strand
aucaagaaaucgccaggaa

SEQ ID NO: 791111 - RNA, 19 nt, Homo sapiens
  misc_RNA (1)...(19): siRNA sense strand
gccaagagguuuaaaagac

SEQ ID NO: 791112 - RNA, 19 nt, Homo sapiens
  misc_RNA (1)...(19): siRNA sense strand
cagcacaagccuucauaca

SEQ ID NO: 791113 - RNA, 19 nt, Homo sapiens
  misc_RNA (1)...(19): siRNA sense strand
gagaaguuaaccacagcuu

SEQ ID NO: 791114 - RNA, 19 nt, Homo sapiens
  misc_RNA (1)...(19): siRNA sense strand
uggauggucagaaagauga

SEQ ID NO: 791115 - RNA, 19 nt, Homo sapiens
  misc_RNA (1)...(19): siRNA sense strand
cuucacagacuaacaucaa

SEQ ID NO: 791116 - RNA, 19 nt, Homo sapiens
  misc_RNA (1)...(19): siRNA sense strand
gguggauggucagaaagau

SEQ ID NO: 791117 - RNA, 19 nt, Homo sapiens
  misc_RNA (1)...(19): siRNA sense strand
gagaccgugcgcagggaua

SEQ ID NO: 791118 - RNA, 19 nt, Homo sapiens
  misc_RNA (1)...(19): siRNA sense strand
aggaaaugacuccaagaaa

SEQ ID NO: 791119 - RNA, 19 nt, Homo sapiens
  misc_RNA (1)...(19): siRNA sense strand
cuccaagaaaguuaaagua

SEQ ID NO: 791120 - RNA, 19 nt, Homo sapiens
  misc_RNA (1)...(19): siRNA sense strand
gaagaaaagaaaacuccuu

SEQ ID NO: 791121 - RNA, 19 nt, Homo sapiens
  misc_RNA (1)...(19): siRNA sense strand
gaaaagaaaacuccuucca

SEQ ID NO: 791122 - RNA, 19 nt, Homo sapiens
  misc_RNA (1)...(19): siRNA sense strand
cagcuucacagacuaacau

SEQ ID NO: 791123 - RNA, 19 nt, Homo sapiens
  misc_RNA (1)...(19): siRNA sense strand
ccaggaaaggugaaagaag

SEQ ID NO: 791124 - RNA, 19 nt, Homo sapiens
  misc_RNA (1)...(19): siRNA sense strand
cacagacuaacaucaagaa

SEQ ID NO: 791125 - RNA, 19 nt, Homo sapiens
  misc_RNA (1)...(19): siRNA sense strand
gcuaaaagaccaagaucug

SEQ ID NO: 791126 - RNA, 19 nt, Homo sapiens
  misc_RNA (1)...(19): siRNA sense strand
ggacuacgcuucugaaaua

SEQ ID NO: 791127 - RNA, 19 nt, Homo sapiens
  misc_RNA (1)...(19): siRNA sense strand
ggagguaccugcaguauua

SEQ ID NO: 791128 - RNA, 19 nt, Homo sapiens
  misc_RNA (1)...(19): siRNA sense strand
ggacuggccucucaacauu

SEQ ID NO: 791129 - RNA, 19 nt, Homo sapiens
  misc_RNA (1)...(19): siRNA sense strand
gcacauugcccacgacaua

SEQ ID NO: 791130 - RNA, 19 nt, Homo sapiens
  misc_RNA (1)...(19): siRNA sense strand
aaacgagacuacuuccuua

SEQ ID NO: 791131 - RNA, 19 nt, Homo sapiens
  misc_RNA (1)...(19): siRNA sense strand
ugaaggagauugagaagga

SEQ ID NO: 791132 - RNA, 19 nt, Homo sapiens
  misc_RNA (1)...(19): siRNA sense strand
ggacuguguucccguguuu

SEQ ID NO: 791133 - RNA, 19 nt, Homo sapiens
  misc_RNA (1)...(19): siRNA sense strand
gagaaggaauuacguaugg

SEQ ID NO: 791134 - RNA, 19 nt, Homo sapiens
  misc_RNA (1)...(19): siRNA sense strand
ucaagaagguggccuacaa

SEQ ID NO: 791135 - RNA, 19 nt, Homo sapiens
  misc_RNA (1)...(19): siRNA sense strand
gcaaggaggagaaggaauu

SEQ ID NO: 791136 - RNA, 19 nt, Homo sapiens
  misc_RNA (1)...(19): siRNA sense strand
uaccucagcuuccgagaua

SEQ ID NO: 791137 - RNA, 19 nt, Homo sapiens
  misc_RNA (1)...(19): siRNA sense strand
ucucugggcuggcuauuaa

SEQ ID NO: 791138 - RNA, 19 nt, Homo sapiens
  misc_RNA (1)...(19): siRNA sense strand
gcgugaagcugcuguccua

SEQ ID NO: 791139 - RNA, 19 nt, Homo sapiens
  misc_RNA (1)...(19): siRNA sense strand
gaacacccacggacacgua

SEQ ID NO: 791140 - RNA, 19 nt, Homo sapiens
  misc_RNA (1)...(19): siRNA sense strand
ggagaaacguuccguacag

SEQ ID NO: 791141 - RNA, 19 nt, Homo sapiens
  misc_RNA (1)...(19): siRNA sense strand
aggaggagcuggaugauga

SEQ ID NO: 791142 - RNA, 19 nt, Homo sapiens
  misc_RNA (1)...(19): siRNA sense strand
gcaucaacuucaacaacua

SEQ ID NO: 791143 - RNA, 19 nt, Homo sapiens
  misc_RNA (1)...(19): siRNA sense strand
gggagaaugugucagaugu

SEQ ID NO: 791144 - RNA, 19 nt, Homo sapiens
  misc_RNA (1)...(19): siRNA sense strand
gggagaaugugucagaugu

SEQ ID NO: 791145 - RNA, 19 nt, Homo sapiens
  misc_RNA (1)...(19): siRNA sense strand
ggagcuggaugaugacuuc

SEQ ID NO: 791146 - RNA, 19 nt, Homo sapiens
  misc_RNA (1)...(19): siRNA sense strand
gagacuacuuccuuaacaa

SEQ ID NO: 791147 - RNA, 19 nt, Homo sapiens
  misc_RNA (1)...(19): siRNA sense strand
ggaaacacuucagguuaug

SEQ ID NO: 791148 - RNA, 19 nt, Homo sapiens
  misc_RNA (1)...(19): siRNA sense strand
caggaaacacuucagguua

SEQ ID NO: 791149 - RNA, 19 nt, Homo sapiens
  misc_RNA (1)...(19): siRNA sense strand
ccacaggaguacgacuuua

SEQ ID NO: 791150 - RNA, 19 nt, Homo sapiens
  misc_RNA (1)...(19): siRNA sense strand
ucagcgaccugcucuuuga

SEQ ID NO: 791151 - RNA, 19 nt, Homo sapiens
  misc_RNA (1)...(19): siRNA sense strand
gaaggacugugccgucuac

SEQ ID NO: 791152 - RNA, 19 nt, Homo sapiens
  misc_RNA (1)...(19): siRNA sense strand
gcaaagcggagccucaaga

SEQ ID NO: 791153 - RNA, 19 nt, Homo sapiens
  misc_RNA (1)...(19): siRNA sense strand
gagaagaguguuuguguca

SEQ ID NO: 791154 - RNA, 19 nt, Homo sapiens
  misc_RNA (1)...(19): siRNA sense strand
ggacugugccgucuacguu

SEQ ID NO: 791155 - RNA, 19 nt, Homo sapiens
  misc_RNA (1)...(19): siRNA sense strand
gaagggacgcuuucgacaa

SEQ ID NO: 791156 - RNA, 19 nt, Homo sapiens
  misc_RNA (1)...(19): siRNA sense strand
cagugucucugaagaacua

SEQ ID NO: 791157 - RNA, 19 nt, Homo sapiens
  misc_RNA (1)...(19): siRNA sense strand
gcaagggccucguguucca

SEQ ID NO: 791158 - RNA, 19 nt, Homo sapiens
  misc_RNA (1)...(19): siRNA sense strand
caaauuggccucucaacuc

SEQ ID NO: 791159 - RNA, 19 nt, Homo sapiens
  misc_RNA (1)...(19): siRNA sense strand
gaaggaauuacguauggaa

SEQ ID NO: 791160 - RNA, 19 nt, Homo sapiens
  misc_RNA (1)...(19): siRNA sense strand
aggaggagcuggagaggaa

SEQ ID NO: 791161 - RNA, 19 nt, Homo sapiens
  misc_RNA (1)...(19): siRNA sense strand
ggacaguugugggaagaug

SEQ ID NO: 791162 - RNA, 19 nt, Homo sapiens
  misc_RNA (1)...(19): siRNA sense strand
caacuugacuccugauucc

SEQ ID NO: 791163 - RNA, 19 nt, Homo sapiens
  misc_RNA (1)...(19): siRNA sense strand
gaaacacauucaggagaug

SEQ ID NO: 791164 - RNA, 19 nt, Homo sapiens
  misc_RNA (1)...(19): siRNA sense strand
aagccgcacuuaccuauga

SEQ ID NO: 791165 - RNA, 19 nt, Homo sapiens
  misc_RNA (1)...(19): siRNA sense strand
ggagaaggaauuacguaug

SEQ ID NO: 791166 - RNA, 19 nt, Homo sapiens
  misc_RNA (1)...(19): siRNA sense strand
gaggagaaggaauuacgua

SEQ ID NO: 791167 - RNA, 19 nt, Homo sapiens
  misc_RNA (1)...(19): siRNA sense strand
ggaagccgcacuuaccuau

SEQ ID NO: 791168 - RNA, 19 nt, Homo sapiens
  misc_RNA (1)...(19): siRNA sense strand
caaggccgcugucgacuac

SEQ ID NO: 791169 - RNA, 19 nt, Homo sapiens
  misc_RNA (1)...(19): siRNA sense strand
agaaacacauucaggagau

SEQ ID NO: 791170 - RNA, 19 nt, Homo sapiens
  misc_RNA (1)...(19): siRNA sense strand
gaagaugagaaacacauuc

SEQ ID NO: 791171 - RNA, 19 nt, Homo sapiens
  misc_RNA (1)...(19): siRNA sense strand
caaggaggagaaggaauua

SEQ ID NO: 791172 - RNA, 19 nt, Homo sapiens
  misc_RNA (1)...(19): siRNA sense strand
ccaguggccugaggaggua

SEQ ID NO: 791173 - RNA, 19 nt, Homo sapiens
  misc_RNA (1)...(19): siRNA sense strand
cgagacuacuuccuuaaca

SEQ ID NO: 791174 - RNA, 19 nt, Homo sapiens
  misc_RNA (1)...(19): siRNA sense strand
aaauuggccucucaacuca

SEQ ID NO: 791175 - RNA, 19 nt, Homo sapiens
  misc_RNA (1)...(19): siRNA sense strand
caacgagcacuacccugua

SEQ ID NO: 791176 - RNA, 19 nt, Homo sapiens
  misc_RNA (1)...(19): siRNA sense strand
aggaaacacuucagguuau

SEQ ID NO: 791177 - RNA, 19 nt, Homo sapiens
  misc_RNA (1)...(19): siRNA sense strand
gaggacaguugugggaaga

SEQ ID NO: 791178 - RNA, 19 nt, Homo sapiens
  misc_RNA (1)...(19): siRNA sense strand
gaacacccacggacaugug

SEQ ID NO: 791179 - RNA, 19 nt, Homo sapiens
  misc_RNA (1)...(19): siRNA sense strand
cagccgcacuuaugacaug

SEQ ID NO: 791180 - RNA, 19 nt, Homo sapiens
  misc_RNA (1)...(19): siRNA sense strand
gaagguggccuacaaugcu

SEQ ID NO: 791181 - RNA, 19 nt, Homo sapiens
  misc_RNA (1)...(19): siRNA sense strand
gugcugaacgucuugauug

SEQ ID NO: 791182 - RNA, 19 nt, Homo sapiens
  misc_RNA (1)...(19): siRNA sense strand
ccagucagcguccaacuug

SEQ ID NO: 791183 - RNA, 19 nt, Homo sapiens
  misc_RNA (1)...(19): siRNA sense strand
gcuacgugcucaucuccaa

SEQ ID NO: 791184 - RNA, 19 nt, Homo sapiens
  misc_RNA (1)...(19): siRNA sense strand
ccaggaaacacuucagguu

SEQ ID NO: 791185 - RNA, 19 nt, Homo sapiens
  misc_RNA (1)...(19): siRNA sense strand
cagaacggauggccuugga

SEQ ID NO: 791186 - RNA, 19 nt, Homo sapiens
  misc_RNA (1)...(19): siRNA sense strand
agugcgagcuggugaaaga

SEQ ID NO: 791187 - RNA, 19 nt, Homo sapiens
  misc_RNA (1)...(19): siRNA sense strand
acacgcgccugagucauuu

SEQ ID NO: 791188 - RNA, 19 nt, Homo sapiens
  misc_RNA (1)...(19): siRNA sense strand
acaacaccuucaaguacua

SEQ ID NO: 791189 - RNA, 19 nt, Homo sapiens
  misc_RNA (1)...(19): siRNA sense strand
cauguuguccuuugacuug

SEQ ID NO: 791190 - RNA, 19 nt, Homo sapiens
  misc_RNA (1)...(19): siRNA sense strand
acaaugcucuuuucacaaa

SEQ ID NO: 791191 - RNA, 19 nt, Homo sapiens
  misc_RNA (1)...(19): siRNA sense strand
gaggcugaaagaacaauuu

SEQ ID NO: 791192 - RNA, 19 nt, Homo sapiens
  misc_RNA (1)...(19): siRNA sense strand
ccauuaaccugcugaagcu

SEQ ID NO: 791193 - RNA, 19 nt, Homo sapiens
  misc_RNA (1)...(19): siRNA sense strand
caaagcggagccucaagaa

SEQ ID NO: 791194 - RNA, 19 nt, Homo sapiens
  misc_RNA (1)...(19): siRNA sense strand
gcgaccugcucuuugagaa

SEQ ID NO: 791195 - RNA, 19 nt, Homo sapiens
  misc_RNA (1)...(19): siRNA sense strand
ccuacaacaccuucaagua

SEQ ID NO: 791196 - RNA, 19 nt, Homo sapiens
  misc_RNA (1)...(19): siRNA sense strand
guacagcggcuaugauugc

SEQ ID NO: 791197 - RNA, 19 nt, Homo sapiens
  misc_RNA (1)...(19): siRNA sense strand
cuacaacaccuucaaguac

SEQ ID NO: 791198 - RNA, 19 nt, Homo sapiens
  misc_RNA (1)...(19): siRNA sense strand
gucgggcucuucucauuug

SEQ ID NO: 791199 - RNA, 19 nt, Homo sapiens
  misc_RNA (1)...(19): siRNA sense strand
cagagaagaguguuugugu

SEQ ID NO: 791200 - RNA, 19 nt, Homo sapiens
  misc_RNA (1)...(19): siRNA sense strand
gcgacgaccugaguguguu

SEQ ID NO: 791201 - RNA, 19 nt, Homo sapiens
  misc_RNA (1)...(19): siRNA sense strand
ucaacccgcuggugcugaa

SEQ ID NO: 791202 - RNA, 19 nt, Homo sapiens
  misc_RNA (1)...(19): siRNA sense strand
caaccaugguggcccaaca

SEQ ID NO: 791203 - RNA, 19 nt, Homo sapiens
  misc_RNA (1)...(19): siRNA sense strand
ggccaaggcugugauucug

SEQ ID NO: 791204 - RNA, 19 nt, Homo sapiens
  misc_RNA (1)...(19): siRNA sense strand
gggacgcuuucgacaaguu

SEQ ID NO: 791205 - RNA, 19 nt, Homo sapiens
  misc_RNA (1)...(19): siRNA sense strand
agaaggcacuguggagaau

SEQ ID NO: 791206 - RNA, 19 nt, Homo sapiens
  misc_RNA (1)...(19): siRNA sense strand
gagagugcacggcuucguu

SEQ ID NO: 791207 - RNA, 19 nt, Homo sapiens
  misc_RNA (1)...(19): siRNA sense strand
gaccugaguguguuugaga

SEQ ID NO: 791208 - RNA, 19 nt, Homo sapiens
  misc_RNA (1)...(19): siRNA sense strand
gcccauugcucaucuuuug

SEQ ID NO: 791209 - RNA, 19 nt, Homo sapiens
  misc_RNA (1)...(19): siRNA sense strand
gagaaacaagauccucaug

SEQ ID NO: 791210 - RNA, 19 nt, Homo sapiens
  misc_RNA (1)...(19): siRNA sense strand
ggaaauugcaaaacaagaa

SEQ ID NO: 791211 - RNA, 19 nt, Homo sapiens
  misc_RNA (1)...(19): siRNA sense strand
cagcaagggccucguguuc

SEQ ID NO: 791212 - RNA, 19 nt, Homo sapiens
  misc_RNA (1)...(19): siRNA sense strand
gcuuauggcgaguucauga

SEQ ID NO: 791213 - RNA, 19 nt, Homo sapiens
  misc_RNA (1)...(19): siRNA sense strand
cuacaucgccaaccagauc

SEQ ID NO: 791214 - RNA, 19 nt, Homo sapiens
  misc_RNA (1)...(19): siRNA sense strand
gauggaggacggcgaguuc

SEQ ID NO: 791215 - RNA, 19 nt, Homo sapiens
  misc_RNA (1)...(19): siRNA sense strand
ccacggacacguauccaau

SEQ ID NO: 791216 - RNA, 19 nt, Homo sapiens
  misc_RNA (1)...(19): siRNA sense strand
ccucagcauuggagacuuc

SEQ ID NO: 791217 - RNA, 19 nt, Homo sapiens
  misc_RNA (1)...(19): siRNA sense strand
agacgaaggauuccaguca

SEQ ID NO: 791218 - RNA, 19 nt, Homo sapiens
  misc_RNA (1)...(19): siRNA sense strand
cagaaggcacuguggagaa

SEQ ID NO: 791219 - RNA, 19 nt, Homo sapiens
  misc_RNA (1)...(19): siRNA sense strand
caagaagguggccuacaau

SEQ ID NO: 791220 - RNA, 19 nt, Homo sapiens
  misc_RNA (1)...(19): siRNA sense strand
ggcaggaggagcuggauga

SEQ ID NO: 791221 - RNA, 19 nt, Homo sapiens
  misc_RNA (1)...(19): siRNA sense strand
acauauacgucugcggaaa

SEQ ID NO: 791222 - RNA, 19 nt, Homo sapiens
  misc_RNA (1)...(19): siRNA sense strand
aagggacgcuuucgacaag

SEQ ID NO: 791223 - RNA, 19 nt, Homo sapiens
  misc_RNA (1)...(19): siRNA sense strand
ggagugcgagcuggugaaa

SEQ ID NO: 791224 - RNA, 19 nt, Homo sapiens
  misc_RNA (1)...(19): siRNA sense strand
guacuacucccacuuucuc

SEQ ID NO: 791225 - RNA, 19 nt, Homo sapiens
  misc_RNA (1)...(19): siRNA sense strand
caacuucaacaacuacuac

SEQ ID NO: 791226 - RNA, 19 nt, Homo sapiens
  misc_RNA (1)...(19): siRNA sense strand
gaacuuauaugacaucuug

SEQ ID NO: 791227 - RNA, 19 nt, Homo sapiens
  misc_RNA (1)...(19): siRNA sense strand
gcgaugagcuuuaacauuu

SEQ ID NO: 791228 - RNA, 19 nt, Homo sapiens
  misc_RNA (1)...(19): siRNA sense strand
ugacuugacuuuacaguua

SEQ ID NO: 791229 - RNA, 19 nt, Homo sapiens
  misc_RNA (1)...(19): siRNA sense strand
caaaguugaugaccgaaua

SEQ ID NO: 791230 - RNA, 19 nt, Homo sapiens
  misc_RNA (1)...(19): siRNA sense strand
gaacuuggcagucauauuc

SEQ ID NO: 791231 - RNA, 19 nt, Homo sapiens
  misc_RNA (1)...(19): siRNA sense strand
uggaagaacuugaucgaua

SEQ ID NO: 791232 - RNA, 19 nt, Homo sapiens
  misc_RNA (1)...(19): siRNA sense strand
gaaguuaaauccacucaag

SEQ ID NO: 791233 - RNA, 19 nt, Homo sapiens
  misc_RNA (1)...(19): siRNA sense strand
gaacuugaucgauacuuua

SEQ ID NO: 791234 - RNA, 19 nt, Homo sapiens
  misc_RNA (1)...(19): siRNA sense strand
ugacagaaguccucacuga

SEQ ID NO: 791235 - RNA, 19 nt, Homo sapiens
  misc_RNA (1)...(19): siRNA sense strand
ugaaggaccucuuugaguu

SEQ ID NO: 791236 - RNA, 19 nt, Homo sapiens
  misc_RNA (1)...(19): siRNA sense strand
ggacccagcuccacugaau

SEQ ID NO: 791237 - RNA, 19 nt, Homo sapiens
  misc_RNA (1)...(19): siRNA sense strand
ucacaaugcugaccgauau

SEQ ID NO: 791238 - RNA, 19 nt, Homo sapiens
  misc_RNA (1)...(19): siRNA sense strand
ucacggaccugaucuggaa

SEQ ID NO: 791239 - RNA, 19 nt, Homo sapiens
  misc_RNA (1)...(19): siRNA sense strand
ugaagugccugcugaagaa

SEQ ID NO: 791240 - RNA, 19 nt, Homo sapiens
  misc_RNA (1)...(19): siRNA sense strand
agucagagaugaaggagua

SEQ ID NO: 791241 - RNA, 19 nt, Homo sapiens
  misc_RNA (1)...(19): siRNA sense strand
gcaaaguauuggaaacaga

SEQ ID NO: 791242 - RNA, 19 nt, Homo sapiens
  misc_RNA (1)...(19): siRNA sense strand
gagguggacuguaaagaga

SEQ ID NO: 791243 - RNA, 19 nt, Homo sapiens
  misc_RNA (1)...(19): siRNA sense strand
gaagagagguuuguaucca

SEQ ID NO: 791244 - RNA, 19 nt, Homo sapiens
  misc_RNA (1)...(19): siRNA sense strand
ggaagaacuugaucgauac

SEQ ID NO: 791245 - RNA, 19 nt, Homo sapiens
  misc_RNA (1)...(19): siRNA sense strand
gaacuuugccucuacuuuc

SEQ ID NO: 791246 - RNA, 19 nt, Homo sapiens
  misc_RNA (1)...(19): siRNA sense strand
ucaaagagcagaaccagaa

SEQ ID NO: 791247 - RNA, 19 nt, Homo sapiens
  misc_RNA (1)...(19): siRNA sense strand
uaacaguucucaaucagau

SEQ ID NO: 791248 - RNA, 19 nt, Homo sapiens
  misc_RNA (1)...(19): siRNA sense strand
gauacugaaugccgugaaa

SEQ ID NO: 791249 - RNA, 19 nt, Homo sapiens
  misc_RNA (1)...(19): siRNA sense strand
cgaugagcuuuaacauuua

SEQ ID NO: 791250 - RNA, 19 nt, Homo sapiens
  misc_RNA (1)...(19): siRNA sense strand
caucgaagcuugcuaugca

SEQ ID NO: 791251 - RNA, 19 nt, Homo sapiens
  misc_RNA (1)...(19): siRNA sense strand
caucaaggguggcaucgaa

SEQ ID NO: 791252 - RNA, 19 nt, Homo sapiens
  misc_RNA (1)...(19): siRNA sense strand
gcccagagcaggagaauug

SEQ ID NO: 791253 - RNA, 19 nt, Homo sapiens
  misc_RNA (1)...(19): siRNA sense strand
gcauggaacugugcaacaa

SEQ ID NO: 791254 - RNA, 19 nt, Homo sapiens
  misc_RNA (1)...(19): siRNA sense strand
gcgcugcucucaguuauug

SEQ ID NO: 791255 - RNA, 19 nt, Homo sapiens
  misc_RNA (1)...(19): siRNA sense strand
ggcauuugcucgcuauauu

SEQ ID NO: 791256 - RNA, 19 nt, Homo sapiens
  misc_RNA (1)...(19): siRNA sense strand
gugggcugcuccuguauua

SEQ ID NO: 791257 - RNA, 19 nt, Homo sapiens
  misc_RNA (1)...(19): siRNA sense strand
gaccauuccuacugggaua

SEQ ID NO: 791258 - RNA, 19 nt, Homo sapiens
  misc_RNA (1)...(19): siRNA sense strand
gaugcacucuccuggcuuu

SEQ ID NO: 791259 - RNA, 19 nt, Homo sapiens
  misc_RNA (1)...(19): siRNA sense strand
caagaccauuucaaaguug

SEQ ID NO: 791260 - RNA, 19 nt, Homo sapiens
  misc_RNA (1)...(19): siRNA sense strand
acaagaccauuucaaaguu

SEQ ID NO: 791261 - RNA, 19 nt, Homo sapiens
  misc_RNA (1)...(19): siRNA sense strand
ggaaugccaugcugaggau

SEQ ID NO: 791262 - RNA, 19 nt, Homo sapiens
  misc_RNA (1)...(19): siRNA sense strand
gcaggagaauacgauaauu

SEQ ID NO: 791263 - RNA, 19 nt, Homo sapiens
  misc_RNA (1)...(19): siRNA sense strand
caaauggacacaccaagaa

SEQ ID NO: 791264 - RNA, 19 nt, Homo sapiens
  misc_RNA (1)...(19): siRNA sense strand
gagauuccauggagaucaa

SEQ ID NO: 791265 - RNA, 19 nt, Homo sapiens
  misc_RNA (1)...(19): siRNA sense strand
gaaucaagggucaacagua

SEQ ID NO: 791266 - RNA, 19 nt, Homo sapiens
  misc_RNA (1)...(19): siRNA sense strand
ggaucuagguauagugaga

SEQ ID NO: 791267 - RNA, 19 nt, Homo sapiens
  misc_RNA (1)...(19): siRNA sense strand
gcacacugcccacgucuug

SEQ ID NO: 791268 - RNA, 19 nt, Homo sapiens
  misc_RNA (1)...(19): siRNA sense strand
gaagaaagcaucgcagucu

SEQ ID NO: 791269 - RNA, 19 nt, Homo sapiens
  misc_RNA (1)...(19): siRNA sense strand
ucaaagcuuucuacauuca

SEQ ID NO: 791270 - RNA, 19 nt, Homo sapiens
  misc_RNA (1)...(19): siRNA sense strand
aggccaagcuccaguguuu

SEQ ID NO: 791271 - RNA, 19 nt, Homo sapiens
  misc_RNA (1)...(19): siRNA sense strand
gggaacaagucagagauga

SEQ ID NO: 791272 - RNA, 19 nt, Homo sapiens
  misc_RNA (1)...(19): siRNA sense strand
gggcaacucucagucaaau

SEQ ID NO: 791273 - RNA, 19 nt, Homo sapiens
  misc_RNA (1)...(19): siRNA sense strand
gacaagaccauuucaaagu

SEQ ID NO: 791274 - RNA, 19 nt, Homo sapiens
  misc_RNA (1)...(19): siRNA sense strand
uacgagagcaugaucaaua

SEQ ID NO: 791275 - RNA, 19 nt, Homo sapiens
  misc_RNA (1)...(19): siRNA sense strand
ggagcacauucaaagcuuu

SEQ ID NO: 791276 - RNA, 19 nt, Homo sapiens
  misc_RNA (1)...(19): siRNA sense strand
gcaaugccaggagaaguua

SEQ ID NO: 791277 - RNA, 19 nt, Homo sapiens
  misc_RNA (1)...(19): siRNA sense strand
uaacuaacuuccugucagu

SEQ ID NO: 791278 - RNA, 19 nt, Homo sapiens
  misc_RNA (1)...(19): siRNA sense strand
gaagccacacggucccuua

SEQ ID NO: 791279 - RNA, 19 nt, Homo sapiens
  misc_RNA (1)...(19): siRNA sense strand
gagaggagccuugacauca

SEQ ID NO: 791280 - RNA, 19 nt, Homo sapiens
  misc_RNA (1)...(19): siRNA sense strand
gagcgaaggucaggugcaa

SEQ ID NO: 791281 - RNA, 19 nt, Homo sapiens
  misc_RNA (1)...(19): siRNA sense strand
cgacagaggcaggagaaua

SEQ ID NO: 791282 - RNA, 19 nt, Homo sapiens
  misc_RNA (1)...(19): siRNA sense strand
ggagugccgugcugaagau

SEQ ID NO: 791283 - RNA, 19 nt, Homo sapiens
  misc_RNA (1)...(19): siRNA sense strand
agagugggcugcuccugua

SEQ ID NO: 791284 - RNA, 19 nt, Homo sapiens
  misc_RNA (1)...(19): siRNA sense strand
ucaauaccaugcugaagga

SEQ ID NO: 791285 - RNA, 19 nt, Homo sapiens
  misc_RNA (1)...(19): siRNA sense strand
gaaagucucaucuggaucu

SEQ ID NO: 791286 - RNA, 19 nt, Homo sapiens
  misc_RNA (1)...(19): siRNA sense strand
gugaugauguugucucugu

SEQ ID NO: 791287 - RNA, 19 nt, Homo sapiens
  misc_RNA (1)...(19): siRNA sense strand
gcagaacuuggcagucaua

SEQ ID NO: 791288 - RNA, 19 nt, Homo sapiens
  misc_RNA (1)...(19): siRNA sense strand
agaacuugaucgauacuuu

SEQ ID NO: 791289 - RNA, 19 nt, Homo sapiens
  misc_RNA (1)...(19): siRNA sense strand
gaccaagaccuuucuagga

SEQ ID NO: 791290 - RNA, 19 nt, Homo sapiens
  misc_RNA (1)...(19): siRNA sense strand
gauguugucucuguacuca

SEQ ID NO: 791291 - RNA, 19 nt, Homo sapiens
  misc_RNA (1)...(19): siRNA sense strand
guaaggagacgcugagcaa

SEQ ID NO: 791292 - RNA, 19 nt, Homo sapiens
  misc_RNA (1)...(19): siRNA sense strand
caaagacaccaaacaacuu

SEQ ID NO: 791293 - RNA, 19 nt, Homo sapiens
  misc_RNA (1)...(19): siRNA sense strand
guugagagaugugacgaaa

SEQ ID NO: 791294 - RNA, 19 nt, Homo sapiens
  misc_RNA (1)...(19): siRNA sense strand
uaaagagauuggagacugu

SEQ ID NO: 791295 - RNA, 19 nt, Homo sapiens
  misc_RNA (1)...(19): siRNA sense strand
gagcugaaggcaucaaaga

SEQ ID NO: 791296 - RNA, 19 nt, Homo sapiens
  misc_RNA (1)...(19): siRNA sense strand
aaucaagggucaacaguag

SEQ ID NO: 791297 - RNA, 19 nt, Homo sapiens
  misc_RNA (1)...(19): siRNA sense strand
gaaggaccucuuugaguug

SEQ ID NO: 791298 - RNA, 19 nt, Homo sapiens
  misc_RNA (1)...(19): siRNA sense strand
ggacaccgcucugcagaac

SEQ ID NO: 791299 - RNA, 19 nt, Homo sapiens
  misc_RNA (1)...(19): siRNA sense strand
uaugacaucuuguuagaag

SEQ ID NO: 791300 - RNA, 19 nt, Homo sapiens
  misc_RNA (1)...(19): siRNA sense strand
ugacaccggucugauagaa

SEQ ID NO: 791301 - RNA, 19 nt, Homo sapiens
  misc_RNA (1)...(19): siRNA sense strand
gaacaagucagagaugaag

SEQ ID NO: 791302 - RNA, 19 nt, Homo sapiens
  misc_RNA (1)...(19): siRNA sense strand
gauauugacggcuuagaga

SEQ ID NO: 791303 - RNA, 19 nt, Homo sapiens
  misc_RNA (1)...(19): siRNA sense strand
uugaggagcucuaccauca

SEQ ID NO: 791304 - RNA, 19 nt, Homo sapiens
  misc_RNA (1)...(19): siRNA sense strand
aagaaagucucaucuggau

SEQ ID NO: 791305 - RNA, 19 nt, Homo sapiens
  misc_RNA (1)...(19): siRNA sense strand
caacauggugcuaacaguu

SEQ ID NO: 791306 - RNA, 19 nt, Homo sapiens
  misc_RNA (1)...(19): siRNA sense strand
gaccgauauugacggcuua

SEQ ID NO: 791307 - RNA, 19 nt, Homo sapiens
  misc_RNA (1)...(19): siRNA sense strand
gcggaggugugcauugaga

SEQ ID NO: 791308 - RNA, 19 nt, Homo sapiens
  misc_RNA (1)...(19): siRNA sense strand
gcgccaggcuguucauaca

SEQ ID NO: 791309 - RNA, 19 nt, Homo sapiens
  misc_RNA (1)...(19): siRNA sense strand
gcaucgcagucucagcuuu

SEQ ID NO: 791310 - RNA, 19 nt, Homo sapiens
  misc_RNA (1)...(19): siRNA sense strand
guugaugaccgaauacaaa

SEQ ID NO: 791311 - RNA, 19 nt, Homo sapiens
  misc_RNA (1)...(19): siRNA sense strand
ucaagaggcugcacaagcu

SEQ ID NO: 791312 - RNA, 19 nt, Homo sapiens
  misc_RNA (1)...(19): siRNA sense strand
ccugccagcucauuauuga

SEQ ID NO: 791313 - RNA, 19 nt, Homo sapiens
  misc_RNA (1)...(19): siRNA sense strand
ucuuugagcuguugagaga

SEQ ID NO: 791314 - RNA, 19 nt, Homo sapiens
  misc_RNA (1)...(19): siRNA sense strand
gcagugaggauggaauuga

SEQ ID NO: 791315 - RNA, 19 nt, Homo sapiens
  misc_RNA (1)...(19): siRNA sense strand
cagcuggaauugugugaug

SEQ ID NO: 791316 - RNA, 19 nt, Homo sapiens
  misc_RNA (1)...(19): siRNA sense strand
gugcuguucucaccaauca

SEQ ID NO: 791317 - RNA, 19 nt, Homo sapiens
  misc_RNA (1)...(19): siRNA sense strand
cuauuggucuguccuguga

SEQ ID NO: 791318 - RNA, 19 nt, Homo sapiens
  misc_RNA (1)...(19): siRNA sense strand
ccagaugucccacaggauu

SEQ ID NO: 791319 - RNA, 19 nt, Homo sapiens
  misc_RNA (1)...(19): siRNA sense strand
gcauugagacguacauaag

SEQ ID NO: 791320 - RNA, 19 nt, Homo sapiens
  misc_RNA (1)...(19): siRNA sense strand
ggacugccagggaguuuga

SEQ ID NO: 791321 - RNA, 19 nt, Homo sapiens
  misc_RNA (1)...(19): siRNA sense strand
ccaaauggacacaccaaga

SEQ ID NO: 791322 - RNA, 19 nt, Homo sapiens
  misc_RNA (1)...(19): siRNA sense strand
ggaacaagucagagaugaa

SEQ ID NO: 791323 - RNA, 19 nt, Homo sapiens
  misc_RNA (1)...(19): siRNA sense strand
gcugcaagccgccauaaau

SEQ ID NO: 791324 - RNA, 19 nt, Homo sapiens
  misc_RNA (1)...(19): siRNA sense strand
gccaacauuugaucugaau

SEQ ID NO: 791325 - RNA, 19 nt, Homo sapiens
  misc_RNA (1)...(19): siRNA sense strand
cuccagaacuuauaugaca

SEQ ID NO: 791326 - RNA, 19 nt, Homo sapiens
  misc_RNA (1)...(19): siRNA sense strand
gaacaucaguuuacccaau

SEQ ID NO: 791327 - RNA, 19 nt, Homo sapiens
  misc_RNA (1)...(19): siRNA sense strand
ggacagcgguggcaagauc

SEQ ID NO: 791328 - RNA, 19 nt, Homo sapiens
  misc_RNA (1)...(19): siRNA sense strand
ccaugaagaucccgcugaa

SEQ ID NO: 791329 - RNA, 19 nt, Homo sapiens
  misc_RNA (1)...(19): siRNA sense strand
gaagaucccgcugaacaau

SEQ ID NO: 791330 - RNA, 19 nt, Homo sapiens
  misc_RNA (1)...(19): siRNA sense strand
ggcuugacauucaggauga

SEQ ID NO: 791331 - RNA, 19 nt, Homo sapiens
  misc_RNA (1)...(19): siRNA sense strand
cuacucuucucuccaguga

SEQ ID NO: 791332 - RNA, 19 nt, Homo sapiens
  misc_RNA (1)...(19): siRNA sense strand
gaacgagcucuaugucgau

SEQ ID NO: 791333 - RNA, 19 nt, Homo sapiens
  misc_RNA (1)...(19): siRNA sense strand
ggccguuccugcugagaau

SEQ ID NO: 791334 - RNA, 19 nt, Homo sapiens
  misc_RNA (1)...(19): siRNA sense strand
gcgaguugguugggcuuga

SEQ ID NO: 791335 - RNA, 19 nt, Homo sapiens
  misc_RNA (1)...(19): siRNA sense strand
ugguugggcuugacauuca

SEQ ID NO: 791336 - RNA, 19 nt, Homo sapiens
  misc_RNA (1)...(19): siRNA sense strand
ugaagaucccgcugaacaa

SEQ ID NO: 791337 - RNA, 19 nt, Homo sapiens
  misc_RNA (1)...(19): siRNA sense strand
gcaucaacaagguauggaa

SEQ ID NO: 791338 - RNA, 19 nt, Homo sapiens
  misc_RNA (1)...(19): siRNA sense strand
guucagcaucaacaaggua

SEQ ID NO: 791339 - RNA, 19 nt, Homo sapiens
  misc_RNA (1)...(19): siRNA sense strand
cgacaacuccaugaagauc

SEQ ID NO: 791340 - RNA, 19 nt, Homo sapiens
  misc_RNA (1)...(19): siRNA sense strand
gcaguucagcaucaacaag

SEQ ID NO: 791341 - RNA, 19 nt, Homo sapiens
  misc_RNA (1)...(19): siRNA sense strand
aacaucaguuuacccaauc

SEQ ID NO: 791342 - RNA, 19 nt, Homo sapiens
  misc_RNA (1)...(19): siRNA sense strand
caaucugcacugcgaguug

SEQ ID NO: 791343 - RNA, 19 nt, Homo sapiens
  misc_RNA (1)...(19): siRNA sense strand
ucgaugacccagacaagga

SEQ ID NO: 791344 - RNA, 19 nt, Homo sapiens
  misc_RNA (1)...(19): siRNA sense strand
gggcaguucagcaucaaca

SEQ ID NO: 791345 - RNA, 19 nt, Homo sapiens
  misc_RNA (1)...(19): siRNA sense strand
ugacauucaggaugagaug

SEQ ID NO: 791346 - RNA, 19 nt, Homo sapiens
  misc_RNA (1)...(19): siRNA sense strand
uagcagaacugaaagauug

SEQ ID NO: 791347 - RNA, 19 nt, Homo sapiens
  misc_RNA (1)...(19): siRNA sense strand
ucaagaaacuuacacaugu

SEQ ID NO: 791348 - RNA, 19 nt, Homo sapiens
  misc_RNA (1)...(19): siRNA sense strand
ggagauguuuguauacuga

SEQ ID NO: 791349 - RNA, 19 nt, Homo sapiens
  misc_RNA (1)...(19): siRNA sense strand
acacagaucugacugcauu

SEQ ID NO: 791350 - RNA, 19 nt, Homo sapiens
  misc_RNA (1)...(19): siRNA sense strand
gaacugaaagauuguauug

SEQ ID NO: 791351 - RNA, 19 nt, Homo sapiens
  misc_RNA (1)...(19): siRNA sense strand
ucauggagauguuuguaua

SEQ ID NO: 791352 - RNA, 19 nt, Homo sapiens
  misc_RNA (1)...(19): siRNA sense strand
ggaaagacaaaggaaauuu

SEQ ID NO: 791353 - RNA, 19 nt, Homo sapiens
  misc_RNA (1)...(19): siRNA sense strand
ugaaauuacugucagauca

SEQ ID NO: 791354 - RNA, 19 nt, Homo sapiens
  misc_RNA (1)...(19): siRNA sense strand
gaagaauucuggucaagac

SEQ ID NO: 791355 - RNA, 19 nt, Homo sapiens
  misc_RNA (1)...(19): siRNA sense strand
agacucagcugaacacaga

SEQ ID NO: 791356 - RNA, 19 nt, Homo sapiens
  misc_RNA (1)...(19): siRNA sense strand
cuacagccaucauaucuau

SEQ ID NO: 791357 - RNA, 19 nt, Homo sapiens
  misc_RNA (1)...(19): siRNA sense strand
gagaagacauuccuuuuga

SEQ ID NO: 791358 - RNA, 19 nt, Homo sapiens
  misc_RNA (1)...(19): siRNA sense strand
gaacacgccucuggcuaug

SEQ ID NO: 791359 - RNA, 19 nt, Homo sapiens
  misc_RNA (1)...(19): siRNA sense strand
caaagugccugugaagaau

SEQ ID NO: 791360 - RNA, 19 nt, Homo sapiens
  misc_RNA (1)...(19): siRNA sense strand
gaaaccacauggacuuugg

SEQ ID NO: 791361 - RNA, 19 nt, Homo sapiens
  misc_RNA (1)...(19): siRNA sense strand
ggacuuuggucagcucuau

SEQ ID NO: 791362 - RNA, 19 nt, Homo sapiens
  misc_RNA (1)...(19): siRNA sense strand
ugucagaucaguauuauug

SEQ ID NO: 791363 - RNA, 19 nt, Homo sapiens
  misc_RNA (1)...(19): siRNA sense strand
ccacggcucaagaaacuua

SEQ ID NO: 791364 - RNA, 19 nt, Homo sapiens
  misc_RNA (1)...(19): siRNA sense strand
gccaucauaucuauaacaa

SEQ ID NO: 791365 - RNA, 19 nt, Homo sapiens
  misc_RNA (1)...(19): siRNA sense strand
aaauugagcuguccaugca

SEQ ID NO: 791366 - RNA, 19 nt, Homo sapiens
  misc_RNA (1)...(19): siRNA sense strand
acaaagugccugugaagaa

SEQ ID NO: 791367 - RNA, 19 nt, Homo sapiens
  misc_RNA (1)...(19): siRNA sense strand
gaauucuggucaagacuca

SEQ ID NO: 791368 - RNA, 19 nt, Homo sapiens
  misc_RNA (1)...(19): siRNA sense strand
ucacgagacucuggaucua

SEQ ID NO: 791369 - RNA, 19 nt, Homo sapiens
  misc_RNA (1)...(19): siRNA sense strand
ccuguauucuucccuuuaa

SEQ ID NO: 791370 - RNA, 19 nt, Homo sapiens
  misc_RNA (1)...(19): siRNA sense strand
gcacaguccagucaguuga

SEQ ID NO: 791371 - RNA, 19 nt, Homo sapiens
  misc_RNA (1)...(19): siRNA sense strand
gaagcacaguccagucagu

SEQ ID NO: 791372 - RNA, 19 nt, Homo sapiens
  misc_RNA (1)...(19): siRNA sense strand
gaugaaacggaaagacaaa

SEQ ID NO: 791373 - RNA, 19 nt, Homo sapiens
  misc_RNA (1)...(19): siRNA sense strand
ucagcucuaucaguucuua

SEQ ID NO: 791374 - RNA, 19 nt, Homo sapiens
  misc_RNA (1)...(19): siRNA sense strand
caagaaacuuacacauguc

SEQ ID NO: 791375 - RNA, 19 nt, Homo sapiens
  misc_RNA (1)...(19): siRNA sense strand
ggucaagacucagaaaauu

SEQ ID NO: 791376 - RNA, 19 nt, Homo sapiens
  misc_RNA (1)...(19): siRNA sense strand
gaaacggaaagacaaagga

SEQ ID NO: 791377 - RNA, 19 nt, Homo sapiens
  misc_RNA (1)...(19): siRNA sense strand
gaucaguauuauugaguag

SEQ ID NO: 791378 - RNA, 19 nt, Homo sapiens
  misc_RNA (1)...(19): siRNA sense strand
ggucagcucuaucaguucu

SEQ ID NO: 791379 - RNA, 19 nt, Homo sapiens
  misc_RNA (1)...(19): siRNA sense strand
ggccacggcucaagaaacu

SEQ ID NO: 791380 - RNA, 19 nt, Homo sapiens
  misc_RNA (1)...(19): siRNA sense strand
ucucuggccuguauucuuc

SEQ ID NO: 791381 - RNA, 19 nt, Homo sapiens
  misc_RNA (1)...(19): siRNA sense strand
uauguucccuggugagaau

SEQ ID NO: 791382 - RNA, 19 nt, Homo sapiens
  misc_RNA (1)...(19): siRNA sense strand
gaaacuuacacauguccaa

SEQ ID NO: 791383 - RNA, 19 nt, Homo sapiens
  misc_RNA (1)...(19): siRNA sense strand
guagaucccagcagacuca

SEQ ID NO: 791384 - RNA, 19 nt, Homo sapiens
  misc_RNA (1)...(19): siRNA sense strand
ggaaaccacauggacuuug

SEQ ID NO: 791385 - RNA, 19 nt, Homo sapiens
  misc_RNA (1)...(19): siRNA sense strand
caauaugaaccuggaugua

SEQ ID NO: 791386 - RNA, 19 nt, Homo sapiens
  misc_RNA (1)...(19): siRNA sense strand
acagccaucauaucuauaa

SEQ ID NO: 791387 - RNA, 19 nt, Homo sapiens
  misc_RNA (1)...(19): siRNA sense strand
gaucuacagccaucauauc

SEQ ID NO: 791388 - RNA, 19 nt, Homo sapiens
  misc_RNA (1)...(19): siRNA sense strand
gguuuagcaugccuggaaa

SEQ ID NO: 791389 - RNA, 19 nt, Homo sapiens
  misc_RNA (1)...(19): siRNA sense strand
gaaauuacugucagaucag

SEQ ID NO: 791390 - RNA, 19 nt, Homo sapiens
  misc_RNA (1)...(19): siRNA sense strand
ccagauguucuuuggugua

SEQ ID NO: 791391 - RNA, 19 nt, Homo sapiens
  misc_RNA (1)...(19): siRNA sense strand
uuggucagcucuaucaguu

SEQ ID NO: 791392 - RNA, 19 nt, Homo sapiens
  misc_RNA (1)...(19): siRNA sense strand
gcagaacugaaagauugua

SEQ ID NO: 791393 - RNA, 19 nt, Homo sapiens
  misc_RNA (1)...(19): siRNA sense strand
ggguuuagcaugccuggaa

SEQ ID NO: 791394 - RNA, 19 nt, Homo sapiens
  misc_RNA (1)...(19): siRNA sense strand
guagcagaacugaaagauu

SEQ ID NO: 791395 - RNA, 19 nt, Homo sapiens
  misc_RNA (1)...(19): siRNA sense strand
ggcuguagcagaacugaaa

SEQ ID NO: 791396 - RNA, 19 nt, Homo sapiens
  misc_RNA (1)...(19): siRNA sense strand
aauaugaaccuggauguau

SEQ ID NO: 791397 - RNA, 19 nt, Homo sapiens
  misc_RNA (1)...(19): siRNA sense strand
ggcuaugucagcagagaua

SEQ ID NO: 791398 - RNA, 19 nt, Homo sapiens
  misc_RNA (1)...(19): siRNA sense strand
cagaguggguuagagaaca

SEQ ID NO: 791399 - RNA, 19 nt, Homo sapiens
  misc_RNA (1)...(19): siRNA sense strand
cagcugaacacagaucuga

SEQ ID NO: 791400 - RNA, 19 nt, Homo sapiens
  misc_RNA (1)...(19): siRNA sense strand
uuaaauacccggcaguucu

SEQ ID NO: 791401 - RNA, 19 nt, Homo sapiens
  misc_RNA (1)...(19): siRNA sense strand
caaaugaugaaacggaaag

SEQ ID NO: 791402 - RNA, 19 nt, Homo sapiens
  misc_RNA (1)...(19): siRNA sense strand
uggaaaaccugguguuguu

SEQ ID NO: 791403 - RNA, 19 nt, Homo sapiens
  misc_RNA (1)...(19): siRNA sense strand
ggaucuacagccaucauau

SEQ ID NO: 791404 - RNA, 19 nt, Homo sapiens
  misc_RNA (1)...(19): siRNA sense strand
ucagaucaguauuauugag

SEQ ID NO: 791405 - RNA, 19 nt, Homo sapiens
  misc_RNA (1)...(19): siRNA sense strand
cagauguucuuugguguag

SEQ ID NO: 791406 - RNA, 19 nt, Homo sapiens
  misc_RNA (1)...(19): siRNA sense strand
gggaaaccacauggacuuu

SEQ ID NO: 791407 - RNA, 19 nt, Homo sapiens
  misc_RNA (1)...(19): siRNA sense strand
aaacggaaagacaaaggaa

SEQ ID NO: 791408 - RNA, 19 nt, Homo sapiens
  misc_RNA (1)...(19): siRNA sense strand
gugaagaauucuggucaag

SEQ ID NO: 791409 - RNA, 19 nt, Homo sapiens
  misc_RNA (1)...(19): siRNA sense strand
guucuuaaacaccaaagga

SEQ ID NO: 791410 - RNA, 19 nt, Homo sapiens
  misc_RNA (1)...(19): siRNA sense strand
ggccuguauucuucccuuu

SEQ ID NO: 791411 - RNA, 19 nt, Homo sapiens
  misc_RNA (1)...(19): siRNA sense strand
caaaggauguggggauguu

SEQ ID NO: 791412 - RNA, 19 nt, Homo sapiens
  misc_RNA (1)...(19): siRNA sense strand
aaacuuacacauguccaaa

SEQ ID NO: 791413 - RNA, 19 nt, Homo sapiens
  misc_RNA (1)...(19): siRNA sense strand
ucaguugaccucaucuuca

SEQ ID NO: 791414 - RNA, 19 nt, Homo sapiens
  misc_RNA (1)...(19): siRNA sense strand
agaacacgccucuggcuau

SEQ ID NO: 791415 - RNA, 19 nt, Homo sapiens
  misc_RNA (1)...(19): siRNA sense strand
gccuguauucuucccuuua

SEQ ID NO: 791416 - RNA, 19 nt, Homo sapiens
  misc_RNA (1)...(19): siRNA sense strand
auaugaaccuggauguauc

SEQ ID NO: 791417 - RNA, 19 nt, Homo sapiens
  misc_RNA (1)...(19): siRNA sense strand
gaugguacaaaugaugaaa

SEQ ID NO: 791418 - RNA, 19 nt, Homo sapiens
  misc_RNA (1)...(19): siRNA sense strand
gaagacauuccuuuugaug

SEQ ID NO: 791419 - RNA, 19 nt, Homo sapiens
  misc_RNA (1)...(19): siRNA sense strand
uaaauacccggcaguucug

SEQ ID NO: 791420 - RNA, 19 nt, Homo sapiens
  misc_RNA (1)...(19): siRNA sense strand
gaggggcgaucuucaaaag

SEQ ID NO: 791421 - RNA, 19 nt, Homo sapiens
  misc_RNA (1)...(19): siRNA sense strand
ugaugaaacggaaagacaa

SEQ ID NO: 791422 - RNA, 19 nt, Homo sapiens
  misc_RNA (1)...(19): siRNA sense strand
acacgccucuggcuauguc

SEQ ID NO: 791423 - RNA, 19 nt, Homo sapiens
  misc_RNA (1)...(19): siRNA sense strand
ugaagaauucuggucaaga

SEQ ID NO: 791424 - RNA, 19 nt, Homo sapiens
  misc_RNA (1)...(19): siRNA sense strand
ugugaagaauucuggucaa

SEQ ID NO: 791425 - RNA, 19 nt, Homo sapiens
  misc_RNA (1)...(19): siRNA sense strand
gaccugcuagccaguaugu

SEQ ID NO: 791426 - RNA, 19 nt, Homo sapiens
  misc_RNA (1)...(19): siRNA sense strand
aaccugguguuguuugugu

SEQ ID NO: 791427 - RNA, 19 nt, Homo sapiens
  misc_RNA (1)...(19): siRNA sense strand
cggaaagacaaaggaaauu

SEQ ID NO: 791428 - RNA, 19 nt, Homo sapiens
  misc_RNA (1)...(19): siRNA sense strand
gauguuuguauacugaaug

SEQ ID NO: 791429 - RNA, 19 nt, Homo sapiens
  misc_RNA (1)...(19): siRNA sense strand
uuaauucgccaucgagaag

SEQ ID NO: 791430 - RNA, 19 nt, Homo sapiens
  misc_RNA (1)...(19): siRNA sense strand
gcucaagaaacuuacacau

SEQ ID NO: 791431 - RNA, 19 nt, Homo sapiens
  misc_RNA (1)...(19): siRNA sense strand
cucaagaaacuuacacaug

SEQ ID NO: 791432 - RNA, 19 nt, Homo sapiens
  misc_RNA (1)...(19): siRNA sense strand
ucaauaugaaccuggaugu

SEQ ID NO: 791433 - RNA, 19 nt, Homo sapiens
  misc_RNA (1)...(19): siRNA sense strand
ugguguagaaggacaauga

SEQ ID NO: 791434 - RNA, 19 nt, Homo sapiens
  misc_RNA (1)...(19): siRNA sense strand
gucaagacucagaaaauua

SEQ ID NO: 791435 - RNA, 19 nt, Homo sapiens
  misc_RNA (1)...(19): siRNA sense strand
acgagacucuggaucuaca

SEQ ID NO: 791436 - RNA, 19 nt, Homo sapiens
  misc_RNA (1)...(19): siRNA sense strand
uagaccugcuagccaguau

SEQ ID NO: 791437 - RNA, 19 nt, Homo sapiens
  misc_RNA (1)...(19): siRNA sense strand
cuuaaacaccaaaggaugu

SEQ ID NO: 791438 - RNA, 19 nt, Homo sapiens
  misc_RNA (1)...(19): siRNA sense strand
aaauaaagcuccaggauua

SEQ ID NO: 791439 - RNA, 19 nt, Homo sapiens
  misc_RNA (1)...(19): siRNA sense strand
ggucaaagaucacuuagua

SEQ ID NO: 791440 - RNA, 19 nt, Homo sapiens
  misc_RNA (1)...(19): siRNA sense strand
gaaguaagccuugauauaa

SEQ ID NO: 791441 - RNA, 19 nt, Homo sapiens
  misc_RNA (1)...(19): siRNA sense strand
gcaacgaugugccauguua

SEQ ID NO: 791442 - RNA, 19 nt, Homo sapiens
  misc_RNA (1)...(19): siRNA sense strand
ggauggaacugacagaaua

SEQ ID NO: 791443 - RNA, 19 nt, Homo sapiens
  misc_RNA (1)...(19): siRNA sense strand
gaacagaagagauuuguaa

SEQ ID NO: 791444 - RNA, 19 nt, Homo sapiens
  misc_RNA (1)...(19): siRNA sense strand
caauagaucugacuguuaa

SEQ ID NO: 791445 - RNA, 19 nt, Homo sapiens
  misc_RNA (1)...(19): siRNA sense strand
caaggaaucugaugagaaa

SEQ ID NO: 791446 - RNA, 19 nt, Homo sapiens
  misc_RNA (1)...(19): siRNA sense strand
gaagaucacuguuauugga

SEQ ID NO: 791447 - RNA, 19 nt, Homo sapiens
  misc_RNA (1)...(19): siRNA sense strand
guagaggccuugaauaauu

SEQ ID NO: 791448 - RNA, 19 nt, Homo sapiens
  misc_RNA (1)...(19): siRNA sense strand
gcagaucucuuauuguuug

SEQ ID NO: 791449 - RNA, 19 nt, Homo sapiens
  misc_RNA (1)...(19): siRNA sense strand
cagauugucuuaccucuua

SEQ ID NO: 791450 - RNA, 19 nt, Homo sapiens
  misc_RNA (1)...(19): siRNA sense strand
gcaauaauaugguuacuag

SEQ ID NO: 791451 - RNA, 19 nt, Homo sapiens
  misc_RNA (1)...(19): siRNA sense strand
ggaggaaccugugaugaua

SEQ ID NO: 791452 - RNA, 19 nt, Homo sapiens
  misc_RNA (1)...(19): siRNA sense strand
ggaaguaagccuugauaua

SEQ ID NO: 791453 - RNA, 19 nt, Homo sapiens
  misc_RNA (1)...(19): siRNA sense strand
acaauuaccucgcucauuu

SEQ ID NO: 791454 - RNA, 19 nt, Homo sapiens
  misc_RNA (1)...(19): siRNA sense strand
gcaguagccuugauagauu

SEQ ID NO: 791455 - RNA, 19 nt, Homo sapiens
  misc_RNA (1)...(19): siRNA sense strand
gauauuuacuggacacuuu

SEQ ID NO: 791456 - RNA, 19 nt, Homo sapiens
  misc_RNA (1)...(19): siRNA sense strand
caacaggacugacuacuca

SEQ ID NO: 791457 - RNA, 19 nt, Homo sapiens
  misc_RNA (1)...(19): siRNA sense strand
uaaauggacucucuucuga

SEQ ID NO: 791458 - RNA, 19 nt, Homo sapiens
  misc_RNA (1)...(19): siRNA sense strand
ccaguuaucugagccauua

SEQ ID NO: 791459 - RNA, 19 nt, Homo sapiens
  misc_RNA (1)...(19): siRNA sense strand
gcaaguggauuacaucuca

SEQ ID NO: 791460 - RNA, 19 nt, Homo sapiens
  misc_RNA (1)...(19): siRNA sense strand
gcuaauaggauaccuguua

SEQ ID NO: 791461 - RNA, 19 nt, Homo sapiens
  misc_RNA (1)...(19): siRNA sense strand
gaacugauguugaaaauga

SEQ ID NO: 791462 - RNA, 19 nt, Homo sapiens
  misc_RNA (1)...(19): siRNA sense strand
ggaaucaaaucuugcugua

SEQ ID NO: 791463 - RNA, 19 nt, Homo sapiens
  misc_RNA (1)...(19): siRNA sense strand
gcagugauccuacagauuu

SEQ ID NO: 791464 - RNA, 19 nt, Homo sapiens
  misc_RNA (1)...(19): siRNA sense strand
gacaagagaucaacucaug

SEQ ID NO: 791465 - RNA, 19 nt, Homo sapiens
  misc_RNA (1)...(19): siRNA sense strand
ugaugaagcugauauacua

SEQ ID NO: 791466 - RNA, 19 nt, Homo sapiens
  misc_RNA (1)...(19): siRNA sense strand
ccacaacaauguaauaaga

SEQ ID NO: 791467 - RNA, 19 nt, Homo sapiens
  misc_RNA (1)...(19): siRNA sense strand
ugacaaacaugcagcuuaa

SEQ ID NO: 791468 - RNA, 19 nt, Homo sapiens
  misc_RNA (1)...(19): siRNA sense strand
ggauggaucucuuucuaaa

SEQ ID NO: 791469 - RNA, 19 nt, Homo sapiens
  misc_RNA (1)...(19): siRNA sense strand
guacagaggguuaugauuu

SEQ ID NO: 791470 - RNA, 19 nt, Homo sapiens
  misc_RNA (1)...(19): siRNA sense strand
gaucaagaguuauaacaga

SEQ ID NO: 791471 - RNA, 19 nt, Homo sapiens
  misc_RNA (1)...(19): siRNA sense strand
guacagacuccuuuaauaa

SEQ ID NO: 791472 - RNA, 19 nt, Homo sapiens
  misc_RNA (1)...(19): siRNA sense strand
ggaggagaaucuuuguaua

SEQ ID NO: 791473 - RNA, 19 nt, Homo sapiens
  misc_RNA (1)...(19): siRNA sense strand
ccaaagauacgguuacaua

SEQ ID NO: 791474 - RNA, 19 nt, Homo sapiens
  misc_RNA (1)...(19): siRNA sense strand
acaagcaccucucgcauua

SEQ ID NO: 791475 - RNA, 19 nt, Homo sapiens
  misc_RNA (1)...(19): siRNA sense strand
cagcucauaugcaauaaua

SEQ ID NO: 791476 - RNA, 19 nt, Homo sapiens
  misc_RNA (1)...(19): siRNA sense strand
caaaccagccagcuuauua

SEQ ID NO: 791477 - RNA, 19 nt, Homo sapiens
  misc_RNA (1)...(19): siRNA sense strand
caacuaaauuuggcucaua

SEQ ID NO: 791478 - RNA, 19 nt, Homo sapiens
  misc_RNA (1)...(19): siRNA sense strand
gauagaaucgguuacauuu

SEQ ID NO: 791479 - RNA, 19 nt, Homo sapiens
  misc_RNA (1)...(19): siRNA sense strand
uuuauuagcuggagguuua

SEQ ID NO: 791480 - RNA, 19 nt, Homo sapiens
  misc_RNA (1)...(19): siRNA sense strand
ggagaguacugcucauuug

SEQ ID NO: 791481 - RNA, 19 nt, Homo sapiens
  misc_RNA (1)...(19): siRNA sense strand
gguagaaguucaacaagaa

SEQ ID NO: 791482 - RNA, 19 nt, Homo sapiens
  misc_RNA (1)...(19): siRNA sense strand
gaaggaagccauggaagua

SEQ ID NO: 791483 - RNA, 19 nt, Homo sapiens
  misc_RNA (1)...(19): siRNA sense strand
gcaaagaacuccccaguga

SEQ ID NO: 791484 - RNA, 19 nt, Homo sapiens
  misc_RNA (1)...(19): siRNA sense strand
aaauugggaucaagaguua

SEQ ID NO: 791485 - RNA, 19 nt, Homo sapiens
  misc_RNA (1)...(19): siRNA sense strand
caacauguccucagauauu

SEQ ID NO: 791486 - RNA, 19 nt, Homo sapiens
  misc_RNA (1)...(19): siRNA sense strand
gaaaguauaucagaacaag

SEQ ID NO: 791487 - RNA, 19 nt, Homo sapiens
  misc_RNA (1)...(19): siRNA sense strand
gcucugggccuguguaaua

SEQ ID NO: 791488 - RNA, 19 nt, Homo sapiens
  misc_RNA (1)...(19): siRNA sense strand
ggaaggaaaugagaaccua

SEQ ID NO: 791489 - RNA, 19 nt, Homo sapiens
  misc_RNA (1)...(19): siRNA sense strand
ugacuuacauucagcaauu

SEQ ID NO: 791490 - RNA, 19 nt, Homo sapiens
  misc_RNA (1)...(19): siRNA sense strand
uuauauagcucaccauuug

SEQ ID NO: 791491 - RNA, 19 nt, Homo sapiens
  misc_RNA (1)...(19): siRNA sense strand
gauagaaccacuuccauuu

SEQ ID NO: 791492 - RNA, 19 nt, Homo sapiens
  misc_RNA (1)...(19): siRNA sense strand
gcucaaagaugguuuaaaa

SEQ ID NO: 791493 - RNA, 19 nt, Homo sapiens
  misc_RNA (1)...(19): siRNA sense strand
gcacuuuacuuguguguca

SEQ ID NO: 791494 - RNA, 19 nt, Homo sapiens
  misc_RNA (1)...(19): siRNA sense strand
ggaugaacauguauuugaa

SEQ ID NO: 791495 - RNA, 19 nt, Homo sapiens
  misc_RNA (1)...(19): siRNA sense strand
ggaaggagauagugaugau

SEQ ID NO: 791496 - RNA, 19 nt, Homo sapiens
  misc_RNA (1)...(19): siRNA sense strand
gagcuggaaucaaaucuug

SEQ ID NO: 791497 - RNA, 19 nt, Homo sapiens
  misc_RNA (1)...(19): siRNA sense strand
ggaacaggcucuacagcuu

SEQ ID NO: 791498 - RNA, 19 nt, Homo sapiens
  misc_RNA (1)...(19): siRNA sense strand
ggaguuaguuuaugaagca

SEQ ID NO: 791499 - RNA, 19 nt, Homo sapiens
  misc_RNA (1)...(19): siRNA sense strand
uauaagcacucauucacua

SEQ ID NO: 791500 - RNA, 19 nt, Homo sapiens
  misc_RNA (1)...(19): siRNA sense strand
gaaguaugguaucaacuau

SEQ ID NO: 791501 - RNA, 19 nt, Homo sapiens
  misc_RNA (1)...(19): siRNA sense strand
ggaggacaauaccugauaa

SEQ ID NO: 791502 - RNA, 19 nt, Homo sapiens
  misc_RNA (1)...(19): siRNA sense strand
gcugaagucucaaucuaaa

SEQ ID NO: 791503 - RNA, 19 nt, Homo sapiens
  misc_RNA (1)...(19): siRNA sense strand
ucagacaucuccucaaaga

SEQ ID NO: 791504 - RNA, 19 nt, Homo sapiens
  misc_RNA (1)...(19): siRNA sense strand
gcucuuaucagcauguuua

SEQ ID NO: 791505 - RNA, 19 nt, Homo sapiens
  misc_RNA (1)...(19): siRNA sense strand
gaacauuucaggguuuaua

SEQ ID NO: 791506 - RNA, 19 nt, Homo sapiens
  misc_RNA (1)...(19): siRNA sense strand
gcacagcaauugagaaugc

SEQ ID NO: 791507 - RNA, 19 nt, Homo sapiens
  misc_RNA (1)...(19): siRNA sense strand
guuaugagcugcuuguaga

SEQ ID NO: 791508 - RNA, 19 nt, Homo sapiens
  misc_RNA (1)...(19): siRNA sense strand
gauuacaucucacuaaaca

SEQ ID NO: 791509 - RNA, 19 nt, Homo sapiens
  misc_RNA (1)...(19): siRNA sense strand
ggauagggucuucauguua

SEQ ID NO: 791510 - RNA, 19 nt, Homo sapiens
  misc_RNA (1)...(19): siRNA sense strand
ccucaccaguccauuauua

SEQ ID NO: 791511 - RNA, 19 nt, Homo sapiens
  misc_RNA (1)...(19): siRNA sense strand
gcaaaugugcuugaagaua

SEQ ID NO: 791512 - RNA, 19 nt, Homo sapiens
  misc_RNA (1)...(19): siRNA sense strand
gaggaaagaucugcauaug

SEQ ID NO: 791513 - RNA, 19 nt, Homo sapiens
  misc_RNA (1)...(19): siRNA sense strand
gaaaagaguugagauaaug

SEQ ID NO: 791514 - RNA, 19 nt, Homo sapiens
  misc_RNA (1)...(19): siRNA sense strand
ggugagugcuccaguugua

SEQ ID NO: 791515 - RNA, 19 nt, Homo sapiens
  misc_RNA (1)...(19): siRNA sense strand
ccagugcaaugucaucaua

SEQ ID NO: 791516 - RNA, 19 nt, Homo sapiens
  misc_RNA (1)...(19): siRNA sense strand
ugacaaugcugaagggauu

SEQ ID NO: 791517 - RNA, 19 nt, Homo sapiens
  misc_RNA (1)...(19): siRNA sense strand
ggaggcagauuccauuuua

SEQ ID NO: 791518 - RNA, 19 nt, Homo sapiens
  misc_RNA (1)...(19): siRNA sense strand
aagcagaacugauguugaa

SEQ ID NO: 791519 - RNA, 19 nt, Homo sapiens
  misc_RNA (1)...(19): siRNA sense strand
caucauaaacagcaacuua

SEQ ID NO: 791520 - RNA, 19 nt, Homo sapiens
  misc_RNA (1)...(19): siRNA sense strand
acucagagcuuaaauagau

SEQ ID NO: 791521 - RNA, 19 nt, Homo sapiens
  misc_RNA (1)...(19): siRNA sense strand
ggaacagcuucucaucuuu

SEQ ID NO: 791522 - RNA, 19 nt, Homo sapiens
  misc_RNA (1)...(19): siRNA sense strand
gaauagaaccaucuucaga

SEQ ID NO: 791523 - RNA, 19 nt, Homo sapiens
  misc_RNA (1)...(19): siRNA sense strand
gauagugacuuuagaagag

SEQ ID NO: 791524 - RNA, 19 nt, Homo sapiens
  misc_RNA (1)...(19): siRNA sense strand
gaaguggaacucuguguuu

SEQ ID NO: 791525 - RNA, 19 nt, Homo sapiens
  misc_RNA (1)...(19): siRNA sense strand
caaaugugcuugaagauac

SEQ ID NO: 791526 - RNA, 19 nt, Homo sapiens
  misc_RNA (1)...(19): siRNA sense strand
gacagaauaucuugcuuug

SEQ ID NO: 791527 - RNA, 19 nt, Homo sapiens
  misc_RNA (1)...(19): siRNA sense strand
cagcuugaauuacccguua

SEQ ID NO: 791528 - RNA, 19 nt, Homo sapiens
  misc_RNA (1)...(19): siRNA sense strand
ccaaccagcugaagugcua

SEQ ID NO: 791529 - RNA, 19 nt, Homo sapiens
  misc_RNA (1)...(19): siRNA sense strand
uaggauaccuguuauuuca

SEQ ID NO: 791530 - RNA, 19 nt, Homo sapiens
  misc_RNA (1)...(19): siRNA sense strand
cauauaaacuccugguaga

SEQ ID NO: 791531 - RNA, 19 nt, Homo sapiens
  misc_RNA (1)...(19): siRNA sense strand
gaaagucaaugcucuuaac

SEQ ID NO: 791532 - RNA, 19 nt, Homo sapiens
  misc_RNA (1)...(19): siRNA sense strand
gcaguuaaccucaaagaau

SEQ ID NO: 791533 - RNA, 19 nt, Homo sapiens
  misc_RNA (1)...(19): siRNA sense strand
gaacucagggugaaaguau

SEQ ID NO: 791534 - RNA, 19 nt, Homo sapiens
  misc_RNA (1)...(19): siRNA sense strand
gggcugaagucucaaucua

SEQ ID NO: 791535 - RNA, 19 nt, Homo sapiens
  misc_RNA (1)...(19): siRNA sense strand
caucuuaucuacgaaauga

SEQ ID NO: 791536 - RNA, 19 nt, Homo sapiens
  misc_RNA (1)...(19): siRNA sense strand
ggaugaaucuuugcuugaa

SEQ ID NO: 791537 - RNA, 19 nt, Homo sapiens
  misc_RNA (1)...(19): siRNA sense strand
gauacuggaugaaucuuug

SEQ ID NO: 791538 - RNA, 19 nt, Homo sapiens
  misc_RNA (1)...(19): siRNA sense strand
ggaaaucauucagaacuuu

SEQ ID NO: 791539 - RNA, 19 nt, Homo sapiens
  misc_RNA (1)...(19): siRNA sense strand
ggacucaacuauaaaucuu

SEQ ID NO: 791540 - RNA, 19 nt, Homo sapiens
  misc_RNA (1)...(19): siRNA sense strand
uaacaggccucaccucuuc

SEQ ID NO: 791541 - RNA, 19 nt, Homo sapiens
  misc_RNA (1)...(19): siRNA sense strand
gccgagaccugaacuuuga

SEQ ID NO: 791542 - RNA, 19 nt, Homo sapiens
  misc_RNA (1)...(19): siRNA sense strand
ccaagcaccucaugaagau

SEQ ID NO: 791543 - RNA, 19 nt, Homo sapiens
  misc_RNA (1)...(19): siRNA sense strand
ggacaugcaggaaaucauu

SEQ ID NO: 791544 - RNA, 19 nt, Homo sapiens
  misc_RNA (1)...(19): siRNA sense strand
caaccuggauaacauugaa

SEQ ID NO: 791545 - RNA, 19 nt, Homo sapiens
  misc_RNA (1)...(19): siRNA sense strand
gcccagcgauccuuaccua

SEQ ID NO: 791546 - RNA, 19 nt, Homo sapiens
  misc_RNA (1)...(19): siRNA sense strand
gaugugggacucaacuaua

SEQ ID NO: 791547 - RNA, 19 nt, Homo sapiens
  misc_RNA (1)...(19): siRNA sense strand
guaccuaaauuucucuaca

SEQ ID NO: 791548 - RNA, 19 nt, Homo sapiens
  misc_RNA (1)...(19): siRNA sense strand
ugaccgaggccuucaagua

SEQ ID NO: 791549 - RNA, 19 nt, Homo sapiens
  misc_RNA (1)...(19): siRNA sense strand
gaaauucugaguugauaca

SEQ ID NO: 791550 - RNA, 19 nt, Homo sapiens
  misc_RNA (1)...(19): siRNA sense strand
ggauaacauugaauuguac

SEQ ID NO: 791551 - RNA, 19 nt, Homo sapiens
  misc_RNA (1)...(19): siRNA sense strand
gaaaucauucagaacuuug

SEQ ID NO: 791552 - RNA, 19 nt, Homo sapiens
  misc_RNA (1)...(19): siRNA sense strand
uggaaauucugaguugaua

SEQ ID NO: 791553 - RNA, 19 nt, Homo sapiens
  misc_RNA (1)...(19): siRNA sense strand
ggccucaccucuuccauuc

SEQ ID NO: 791554 - RNA, 19 nt, Homo sapiens
  misc_RNA (1)...(19): siRNA sense strand
ggaccagcuugcagacaug

SEQ ID NO: 791555 - RNA, 19 nt, Homo sapiens
  misc_RNA (1)...(19): siRNA sense strand
ggacacuguugaaggucuu

SEQ ID NO: 791556 - RNA, 19 nt, Homo sapiens
  misc_RNA (1)...(19): siRNA sense strand
ccuacauccuggcgagaua

SEQ ID NO: 791557 - RNA, 19 nt, Homo sapiens
  misc_RNA (1)...(19): siRNA sense strand
ugcaggaaaucauucagaa

SEQ ID NO: 791558 - RNA, 19 nt, Homo sapiens
  misc_RNA (1)...(19): siRNA sense strand
ucgaggacaugcaggaaau

SEQ ID NO: 791559 - RNA, 19 nt, Homo sapiens
  misc_RNA (1)...(19): siRNA sense strand
ggucuuguccucaucaaca

SEQ ID NO: 791560 - RNA, 19 nt, Homo sapiens
  misc_RNA (1)...(19): siRNA sense strand
guccugcaguaccuaaauu

SEQ ID NO: 791561 - RNA, 19 nt, Homo sapiens
  misc_RNA (1)...(19): siRNA sense strand
auacggcucugucacuuuc

SEQ ID NO: 791562 - RNA, 19 nt, Homo sapiens
  misc_RNA (1)...(19): siRNA sense strand
gaccgaggccuucaaguac

SEQ ID NO: 791563 - RNA, 19 nt, Homo sapiens
  misc_RNA (1)...(19): siRNA sense strand
augcagugguggaauguaa

SEQ ID NO: 791564 - RNA, 19 nt, Homo sapiens
  misc_RNA (1)...(19): siRNA sense strand
acauugaauuguacuggaa

SEQ ID NO: 791565 - RNA, 19 nt, Homo sapiens
  misc_RNA (1)...(19): siRNA sense strand
cacccaaccuggauaacau

SEQ ID NO: 791566 - RNA, 19 nt, Homo sapiens
  misc_RNA (1)...(19): siRNA sense strand
ggcgagauaugcucuuaac

SEQ ID NO: 791567 - RNA, 19 nt, Homo sapiens
  misc_RNA (1)...(19): siRNA sense strand
agaccaagcaccucaugaa

SEQ ID NO: 791568 - RNA, 19 nt, Homo sapiens
  misc_RNA (1)...(19): siRNA sense strand
cgagauaugcucuuaacca

SEQ ID NO: 791569 - RNA, 19 nt, Homo sapiens
  misc_RNA (1)...(19): siRNA sense strand
gaaggucuuguccucauca

SEQ ID NO: 791570 - RNA, 19 nt, Homo sapiens
  misc_RNA (1)...(19): siRNA sense strand
gcacccaaccuggauaaca

SEQ ID NO: 791571 - RNA, 19 nt, Homo sapiens
  misc_RNA (1)...(19): siRNA sense strand
augugggacucaacuauaa

SEQ ID NO: 791572 - RNA, 19 nt, Homo sapiens
  misc_RNA (1)...(19): siRNA sense strand
aagaugcagugguggaaug

SEQ ID NO: 791573 - RNA, 19 nt, Homo sapiens
  misc_RNA (1)...(19): siRNA sense strand
ccauacggcucugucacuu

SEQ ID NO: 791574 - RNA, 19 nt, Homo sapiens
  misc_RNA (1)...(19): siRNA sense strand
gagcguggaggugauauca

SEQ ID NO: 791575 - RNA, 19 nt, Homo sapiens
  misc_RNA (1)...(19): siRNA sense strand
ggauaucaguacccaucuc

SEQ ID NO: 791576 - RNA, 19 nt, Homo sapiens
  misc_RNA (1)...(19): siRNA sense strand
aggaaaucauucagaacuu

SEQ ID NO: 791577 - RNA, 19 nt, Homo sapiens
  misc_RNA (1)...(19): siRNA sense strand
agaccucguuccucaagau

SEQ ID NO: 791578 - RNA, 19 nt, Homo sapiens
  misc_RNA (1)...(19): siRNA sense strand
aaacgcccagcgauccuua

SEQ ID NO: 791579 - RNA, 19 nt, Homo sapiens
  misc_RNA (1)...(19): siRNA sense strand
cuggcgagauaugcucuua

SEQ ID NO: 791580 - RNA, 19 nt, Homo sapiens
  misc_RNA (1)...(19): siRNA sense strand
gguggaauguaacucaaaa

SEQ ID NO: 791581 - RNA, 19 nt, Homo sapiens
  misc_RNA (1)...(19): siRNA sense strand
gaagaugcagugguggaau

SEQ ID NO: 791582 - RNA, 19 nt, Homo sapiens
  misc_RNA (1)...(19): siRNA sense strand
ggagaccaagcaccucaug

SEQ ID NO: 791583 - RNA, 19 nt, Homo sapiens
  misc_RNA (1)...(19): siRNA sense strand
gcagaucacagaggagaag

SEQ ID NO: 791584 - RNA, 19 nt, Homo sapiens
  misc_RNA (1)...(19): siRNA sense strand
cagcgauccuuaccuacca

SEQ ID NO: 791585 - RNA, 19 nt, Homo sapiens
  misc_RNA (1)...(19): siRNA sense strand
cagaggagaagccacuguu

SEQ ID NO: 791586 - RNA, 19 nt, Homo sapiens
  misc_RNA (1)...(19): siRNA sense strand
gaccaagcaccucaugaag

SEQ ID NO: 791587 - RNA, 19 nt, Homo sapiens
  misc_RNA (1)...(19): siRNA sense strand
gagaccaagcaccucauga

SEQ ID NO: 791588 - RNA, 19 nt, Homo sapiens
  misc_RNA (1)...(19): siRNA sense strand
caggaaaucauucagaacu

SEQ ID NO: 791589 - RNA, 19 nt, Homo sapiens
  misc_RNA (1)...(19): siRNA sense strand
gagcagcgagucuggaacu

SEQ ID NO: 791590 - RNA, 19 nt, Homo sapiens
  misc_RNA (1)...(19): siRNA sense strand
ggagaugauccuuggacau

SEQ ID NO: 791591 - RNA, 19 nt, Homo sapiens
  misc_RNA (1)...(19): siRNA sense strand
ucccuugcguccugcagua

SEQ ID NO: 791592 - RNA, 19 nt, Homo sapiens
  misc_RNA (1)...(19): siRNA sense strand
ccucuuccauuccggagau

SEQ ID NO: 791593 - RNA, 19 nt, Homo sapiens
  misc_RNA (1)...(19): siRNA sense strand
ccgaggccuucaaguacuu

SEQ ID NO: 791594 - RNA, 19 nt, Homo sapiens
  misc_RNA (1)...(19): siRNA sense strand
gauaucaguacccaucucu

SEQ ID NO: 791595 - RNA, 19 nt, Homo sapiens
  misc_RNA (1)...(19): siRNA sense strand
gugguggaauguaacucaa

SEQ ID NO: 791596 - RNA, 19 nt, Homo sapiens
  misc_RNA (1)...(19): siRNA sense strand
gggacucaacuauaaaucu

SEQ ID NO: 791597 - RNA, 19 nt, Homo sapiens
  misc_RNA (1)...(19): siRNA sense strand
gaggacaugcaggaaauca

SEQ ID NO: 791598 - RNA, 19 nt, Homo sapiens
  misc_RNA (1)...(19): siRNA sense strand
cgaugugggacucaacuau

SEQ ID NO: 791599 - RNA, 19 nt, Homo sapiens
  misc_RNA (1)...(19): siRNA sense strand
aauuggaguugguguugga

SEQ ID NO: 791600 - RNA, 19 nt, Homo sapiens
  misc_RNA (1)...(19): siRNA sense strand
gcaggaaaucauucagaac

SEQ ID NO: 791601 - RNA, 19 nt, Homo sapiens
  misc_RNA (1)...(19): siRNA sense strand
ccgccgagaccugaacuuu

SEQ ID NO: 791602 - RNA, 19 nt, Homo sapiens
  misc_RNA (1)...(19): siRNA sense strand
gauccuuaccuaccacgau

SEQ ID NO: 791603 - RNA, 19 nt, Homo sapiens
  misc_RNA (1)...(19): siRNA sense strand
ugaaggucuuguccucauc

SEQ ID NO: 791604 - RNA, 19 nt, Homo sapiens
  misc_RNA (1)...(19): siRNA sense strand
uaaccacccggacacuguu

SEQ ID NO: 791605 - RNA, 19 nt, Homo sapiens
  misc_RNA (1)...(19): siRNA sense strand
cauacggcucugucacuuu

SEQ ID NO: 791606 - RNA, 19 nt, Homo sapiens
  misc_RNA (1)...(19): siRNA sense strand
uggaccagcuugcagacau

SEQ ID NO: 791607 - RNA, 19 nt, Homo sapiens
  misc_RNA (1)...(19): siRNA sense strand
caacagccauaaccucauu

SEQ ID NO: 791608 - RNA, 19 nt, Homo sapiens
  misc_RNA (1)...(19): siRNA sense strand
caagauuuccgccagguuu

SEQ ID NO: 791609 - RNA, 19 nt, Homo sapiens
  misc_RNA (1)...(19): siRNA sense strand
ccagguuuccucagucaua

SEQ ID NO: 791610 - RNA, 19 nt, Homo sapiens
  misc_RNA (1)...(19): siRNA sense strand
gaggugaagagcaaauuug

SEQ ID NO: 791611 - RNA, 19 nt, Homo sapiens
  misc_RNA (1)...(19): siRNA sense strand
cugcugagccugauaguga

SEQ ID NO: 791612 - RNA, 19 nt, Homo sapiens
  misc_RNA (1)...(19): siRNA sense strand
caaauuugacgccgaguuc

SEQ ID NO: 791613 - RNA, 19 nt, Homo sapiens
  misc_RNA (1)...(19): siRNA sense strand
gcaaauuugacgccgaguu

SEQ ID NO: 791614 - RNA, 19 nt, Homo sapiens
  misc_RNA (1)...(19): siRNA sense strand
cggccacccuugcuaauca

SEQ ID NO: 791615 - RNA, 19 nt, Homo sapiens
  misc_RNA (1)...(19): siRNA sense strand
ccaagugacggacaugaug

SEQ ID NO: 791616 - RNA, 19 nt, Homo sapiens
  misc_RNA (1)...(19): siRNA sense strand
cgaggugaagagcaaauuu

SEQ ID NO: 791617 - RNA, 19 nt, Homo sapiens
  misc_RNA (1)...(19): siRNA sense strand
cuucaucucccgccuggua

SEQ ID NO: 791618 - RNA, 19 nt, Homo sapiens
  misc_RNA (1)...(19): siRNA sense strand
ggacgugcuacuuggcuau

SEQ ID NO: 791619 - RNA, 19 nt, Homo sapiens
  misc_RNA (1)...(19): siRNA sense strand
agccauaaccucauuguca

SEQ ID NO: 791620 - RNA, 19 nt, Homo sapiens
  misc_RNA (1)...(19): siRNA sense strand
ggccuggacgugcuacuug

SEQ ID NO: 791621 - RNA, 19 nt, Homo sapiens
  misc_RNA (1)...(19): siRNA sense strand
agucauagacguggaccua

SEQ ID NO: 791622 - RNA, 19 nt, Homo sapiens
  misc_RNA (1)...(19): siRNA sense strand
ucauagacguggaccuacu

SEQ ID NO: 791623 - RNA, 19 nt, Homo sapiens
  misc_RNA (1)...(19): siRNA sense strand
ggcggucagugaugagauc

SEQ ID NO: 791624 - RNA, 19 nt, Homo sapiens
  misc_RNA (1)...(19): siRNA sense strand
gaccaagugacggacauga

SEQ ID NO: 791625 - RNA, 19 nt, Homo sapiens
  misc_RNA (1)...(19): siRNA sense strand
ccgccaaccagcgcaauaa

SEQ ID NO: 791626 - RNA, 19 nt, Homo sapiens
  misc_RNA (1)...(19): siRNA sense strand
gacgugcuacuuggcuaua

SEQ ID NO: 791627 - RNA, 19 nt, Homo sapiens
  misc_RNA (1)...(19): siRNA sense strand
cagguuuccucagucauag

SEQ ID NO: 791628 - RNA, 19 nt, Homo sapiens
  misc_RNA (1)...(19): siRNA sense strand
cgccagguuuccucaguca

SEQ ID NO: 791629 - RNA, 19 nt, Homo sapiens
  misc_RNA (1)...(19): siRNA sense strand
gaagagacuugaaagaaua

SEQ ID NO: 791630 - RNA, 19 nt, Homo sapiens
  misc_RNA (1)...(19): siRNA sense strand
ucagaacugucagaacuua

SEQ ID NO: 791631 - RNA, 19 nt, Homo sapiens
  misc_RNA (1)...(19): siRNA sense strand
gaacuucaacaacuuauuc

SEQ ID NO: 791632 - RNA, 19 nt, Homo sapiens
  misc_RNA (1)...(19): siRNA sense strand
gcaagaagaccgucaucaa

SEQ ID NO: 791633 - RNA, 19 nt, Homo sapiens
  misc_RNA (1)...(19): siRNA sense strand
uuuaacagcuccuuugaaa

SEQ ID NO: 791634 - RNA, 19 nt, Homo sapiens
  misc_RNA (1)...(19): siRNA sense strand
gcucagaacugucagaacu

SEQ ID NO: 791635 - RNA, 19 nt, Homo sapiens
  misc_RNA (1)...(19): siRNA sense strand
uaacagcuccuuugaaauc

SEQ ID NO: 791636 - RNA, 19 nt, Homo sapiens
  misc_RNA (1)...(19): siRNA sense strand
agaagagacuugaaagaau

SEQ ID NO: 791637 - RNA, 19 nt, Homo sapiens
  misc_RNA (1)...(19): siRNA sense strand
gcacucacuuugccucuca

SEQ ID NO: 791638 - RNA, 19 nt, Homo sapiens
  misc_RNA (1)...(19): siRNA sense strand
aaacaucccugugguagga

SEQ ID NO: 791639 - RNA, 19 nt, Homo sapiens
  misc_RNA (1)...(19): siRNA sense strand
caacuuauucuacagcaaa

SEQ ID NO: 791640 - RNA, 19 nt, Homo sapiens
  misc_RNA (1)...(19): siRNA sense strand
gaacuuacggguggaaaga

SEQ ID NO: 791641 - RNA, 19 nt, Homo sapiens
  misc_RNA (1)...(19): siRNA sense strand
ccagugaccugaccaacau

SEQ ID NO: 791642 - RNA, 19 nt, Homo sapiens
  misc_RNA (1)...(19): siRNA sense strand
gggagacggugcagaggaa

SEQ ID NO: 791643 - RNA, 19 nt, Homo sapiens
  misc_RNA (1)...(19): siRNA sense strand
caacucggcucagaacugu

SEQ ID NO: 791644 - RNA, 19 nt, Homo sapiens
  misc_RNA (1)...(19): siRNA sense strand
cagaagagacuugaaagaa

SEQ ID NO: 791645 - RNA, 19 nt, Homo sapiens
  misc_RNA (1)...(19): siRNA sense strand
caaacgagucagcuuauga

SEQ ID NO: 791646 - RNA, 19 nt, Homo sapiens
  misc_RNA (1)...(19): siRNA sense strand
cagaagugcugauguggau

SEQ ID NO: 791647 - RNA, 19 nt, Homo sapiens
  misc_RNA (1)...(19): siRNA sense strand
gaaagacagaagagacuug

SEQ ID NO: 791648 - RNA, 19 nt, Homo sapiens
  misc_RNA (1)...(19): siRNA sense strand
gaaugacgaggaugacuga

SEQ ID NO: 791649 - RNA, 19 nt, Homo sapiens
  misc_RNA (1)...(19): siRNA sense strand
cagcaucuccgacgacaaa

SEQ ID NO: 791650 - RNA, 19 nt, Homo sapiens
  misc_RNA (1)...(19): siRNA sense strand
gcaccuacgaugccuuaaa

SEQ ID NO: 791651 - RNA, 19 nt, Homo sapiens
  misc_RNA (1)...(19): siRNA sense strand
ggaaaggagagaagaaugg

SEQ ID NO: 791652 - RNA, 19 nt, Homo sapiens
  misc_RNA (1)...(19): siRNA sense strand
agacagaagagacuugaaa

SEQ ID NO: 791653 - RNA, 19 nt, Homo sapiens
  misc_RNA (1)...(19): siRNA sense strand
caccaaacgagucagcuua

SEQ ID NO: 791654 - RNA, 19 nt, Homo sapiens
  misc_RNA (1)...(19): siRNA sense strand
gcgcaccuacgaugccuua

SEQ ID NO: 791655 - RNA, 19 nt, Homo sapiens
  misc_RNA (1)...(19): siRNA sense strand
gaaagaauaaagcagaaac

SEQ ID NO: 791656 - RNA, 19 nt, Homo sapiens
  misc_RNA (1)...(19): siRNA sense strand
cgacgacaaaucagaauau

SEQ ID NO: 791657 - RNA, 19 nt, Homo sapiens
  misc_RNA (1)...(19): siRNA sense strand
gugcugauggccaugaaua

SEQ ID NO: 791658 - RNA, 19 nt, Homo sapiens
  misc_RNA (1)...(19): siRNA sense strand
ccuuugaaauccacgauga

SEQ ID NO: 791659 - RNA, 19 nt, Homo sapiens
  misc_RNA (1)...(19): siRNA sense strand
ccaaacgagucagcuuaug

SEQ ID NO: 791660 - RNA, 19 nt, Homo sapiens
  misc_RNA (1)...(19): siRNA sense strand
caagaagaccgucaucaac

SEQ ID NO: 791661 - RNA, 19 nt, Homo sapiens
  misc_RNA (1)...(19): siRNA sense strand
aaaagaagaucaaguggau

SEQ ID NO: 791662 - RNA, 19 nt, Homo sapiens
  misc_RNA (1)...(19): siRNA sense strand
ucagagaccagcagcauca

SEQ ID NO: 791663 - RNA, 19 nt, Homo sapiens
  misc_RNA (1)...(19): siRNA sense strand
ucuaauggcacguggcuuu

SEQ ID NO: 791664 - RNA, 19 nt, Homo sapiens
  misc_RNA (1)...(19): siRNA sense strand
agaaauggcucagggaacu

SEQ ID NO: 791665 - RNA, 19 nt, Homo sapiens
  misc_RNA (1)...(19): siRNA sense strand
gcaaccacgccucaccaaa

SEQ ID NO: 791666 - RNA, 19 nt, Homo sapiens
  misc_RNA (1)...(19): siRNA sense strand
gcagguuccaggucuaaug

SEQ ID NO: 791667 - RNA, 19 nt, Homo sapiens
  misc_RNA (1)...(19): siRNA sense strand
aagaagaucaaguggauug

SEQ ID NO: 791668 - RNA, 19 nt, Homo sapiens
  misc_RNA (1)...(19): siRNA sense strand
agaagaccgucaucaacug

SEQ ID NO: 791669 - RNA, 19 nt, Homo sapiens
  misc_RNA (1)...(19): siRNA sense strand
aauccacgaugacacagaa

SEQ ID NO: 791670 - RNA, 19 nt, Homo sapiens
  misc_RNA (1)...(19): siRNA sense strand
ccacgugcccuucaucauc

SEQ ID NO: 791671 - RNA, 19 nt, Homo sapiens
  misc_RNA (1)...(19): siRNA sense strand
gacgacaaaucagaauauc

SEQ ID NO: 791672 - RNA, 19 nt, Homo sapiens
  misc_RNA (1)...(19): siRNA sense strand
cacgugcccuucaucauca

SEQ ID NO: 791673 - RNA, 19 nt, Homo sapiens
  misc_RNA (1)...(19): siRNA sense strand
caccuacgaugccuuaaac

SEQ ID NO: 791674 - RNA, 19 nt, Homo sapiens
  misc_RNA (1)...(19): siRNA sense strand
caacaggaaaggagagaag

SEQ ID NO: 791675 - RNA, 19 nt, Homo sapiens
  misc_RNA (1)...(19): siRNA sense strand
caucagcaguagcaagaag

SEQ ID NO: 791676 - RNA, 19 nt, Homo sapiens
  misc_RNA (1)...(19): siRNA sense strand
ggaaagacagaagagacuu

SEQ ID NO: 791677 - RNA, 19 nt, Homo sapiens
  misc_RNA (1)...(19): siRNA sense strand
ugaaauccacgaugacaca

SEQ ID NO: 791678 - RNA, 19 nt, Homo sapiens
  misc_RNA (1)...(19): siRNA sense strand
caaccacgccucaccaaac

SEQ ID NO: 791679 - RNA, 19 nt, Homo sapiens
  misc_RNA (1)...(19): siRNA sense strand
ccacccagcacucacuuug

SEQ ID NO: 791680 - RNA, 19 nt, Homo sapiens
  misc_RNA (1)...(19): siRNA sense strand
gugagaaugacgaggauga

SEQ ID NO: 791681 - RNA, 19 nt, Homo sapiens
  misc_RNA (1)...(19): siRNA sense strand
gagcuggucgccaaguuca

SEQ ID NO: 791682 - RNA, 19 nt, Homo sapiens
  misc_RNA (1)...(19): siRNA sense strand
caucuccgacgacaaauca

SEQ ID NO: 791683 - RNA, 19 nt, Homo sapiens
  misc_RNA (1)...(19): siRNA sense strand
gucaucaacugcagcaucu

SEQ ID NO: 791684 - RNA, 19 nt, Homo sapiens
  misc_RNA (1)...(19): siRNA sense strand
ggaggaggacaacaacgau

SEQ ID NO: 791685 - RNA, 19 nt, Homo sapiens
  misc_RNA (1)...(19): siRNA sense strand
caacgaugacgaccucagu

SEQ ID NO: 791686 - RNA, 19 nt, Homo sapiens
  misc_RNA (1)...(19): siRNA sense strand
acagaagagacuugaaaga

SEQ ID NO: 791687 - RNA, 19 nt, Homo sapiens
  misc_RNA (1)...(19): siRNA sense strand
agaaccuggugcugagaaa

SEQ ID NO: 791688 - RNA, 19 nt, Homo sapiens
  misc_RNA (1)...(19): siRNA sense strand
gagccguacgugacagaaa

SEQ ID NO: 791689 - RNA, 19 nt, Homo sapiens
  misc_RNA (1)...(19): siRNA sense strand
gacagaagagacuugaaag

SEQ ID NO: 791690 - RNA, 19 nt, Homo sapiens
  misc_RNA (1)...(19): siRNA sense strand
gaaauggcucagggaacuu

SEQ ID NO: 791691 - RNA, 19 nt, Homo sapiens
  misc_RNA (1)...(19): siRNA sense strand
aaagacagaagagacuuga

SEQ ID NO: 791692 - RNA, 19 nt, Homo sapiens
  misc_RNA (1)...(19): siRNA sense strand
gaagaucaaguggauuggu

SEQ ID NO: 791693 - RNA, 19 nt, Homo sapiens
  misc_RNA (1)...(19): siRNA sense strand
aagaggaggaggacaacaa

SEQ ID NO: 791694 - RNA, 19 nt, Homo sapiens
  misc_RNA (1)...(19): siRNA sense strand
ugacacagaagugcugaug

SEQ ID NO: 791695 - RNA, 19 nt, Homo sapiens
  misc_RNA (1)...(19): siRNA sense strand
uaaguuuaacagcuccuuu

SEQ ID NO: 791696 - RNA, 19 nt, Homo sapiens
  misc_RNA (1)...(19): siRNA sense strand
ccaccaacucggcucagaa

SEQ ID NO: 791697 - RNA, 19 nt, Homo sapiens
  misc_RNA (1)...(19): siRNA sense strand
gagaccagcagcaucaaac

SEQ ID NO: 791698 - RNA, 19 nt, Homo sapiens
  misc_RNA (1)...(19): siRNA sense strand
gcugagaaaccaguaugug

SEQ ID NO: 791699 - RNA, 19 nt, Homo sapiens
  misc_RNA (1)...(19): siRNA sense strand
agaauaaagcagaaacagu

SEQ ID NO: 791700 - RNA, 19 nt, Homo sapiens
  misc_RNA (1)...(19): siRNA sense strand
ccaacucggcucagaacug

SEQ ID NO: 791701 - RNA, 19 nt, Homo sapiens
  misc_RNA (1)...(19): siRNA sense strand
gcugauggccaugaauauc

SEQ ID NO: 791702 - RNA, 19 nt, Homo sapiens
  misc_RNA (1)...(19): siRNA sense strand
caggaaaggagagaagaau

SEQ ID NO: 791703 - RNA, 19 nt, Homo sapiens
  misc_RNA (1)...(19): siRNA sense strand
ucaacaacuuauucuacag

SEQ ID NO: 791704 - RNA, 19 nt, Homo sapiens
  misc_RNA (1)...(19): siRNA sense strand
ucacuuugccucucagaac

SEQ ID NO: 791705 - RNA, 19 nt, Homo sapiens
  misc_RNA (1)...(19): siRNA sense strand
gccagugaccugaccaaca

SEQ ID NO: 791706 - RNA, 19 nt, Homo sapiens
  misc_RNA (1)...(19): siRNA sense strand
agccguacgugacagaaau

SEQ ID NO: 791707 - RNA, 19 nt, Homo sapiens
  misc_RNA (1)...(19): siRNA sense strand
ccacgaugacacagaagug

SEQ ID NO: 791708 - RNA, 19 nt, Homo sapiens
  misc_RNA (1)...(19): siRNA sense strand
cuuauucuacagcaaauug

SEQ ID NO: 791709 - RNA, 19 nt, Homo sapiens
  misc_RNA (1)...(19): siRNA sense strand
ccgacgacaaaucagaaua

SEQ ID NO: 791710 - RNA, 19 nt, Homo sapiens
  misc_RNA (1)...(19): siRNA sense strand
gggaaaagcuguauuauaa

SEQ ID NO: 791711 - RNA, 19 nt, Homo sapiens
  misc_RNA (1)...(19): siRNA sense strand
ggacaucccuucuucuaug

SEQ ID NO: 791712 - RNA, 19 nt, Homo sapiens
  misc_RNA (1)...(19): siRNA sense strand
gcaaaggguuccuguacuu

SEQ ID NO: 791713 - RNA, 19 nt, Homo sapiens
  misc_RNA (1)...(19): siRNA sense strand
cuaaauaccuggcaacaau

SEQ ID NO: 791714 - RNA, 19 nt, Homo sapiens
  misc_RNA (1)...(19): siRNA sense strand
caagauugauuguaccaaa

SEQ ID NO: 791715 - RNA, 19 nt, Homo sapiens
  misc_RNA (1)...(19): siRNA sense strand
gaaaugaguuuuacaagga

SEQ ID NO: 791716 - RNA, 19 nt, Homo sapiens
  misc_RNA (1)...(19): siRNA sense strand
ggagaaggcauuaaugaga

SEQ ID NO: 791717 - RNA, 19 nt, Homo sapiens
  misc_RNA (1)...(19): siRNA sense strand
gagaaggcauuaaugagau

SEQ ID NO: 791718 - RNA, 19 nt, Homo sapiens
  misc_RNA (1)...(19): siRNA sense strand
caauaaagcguaucggaaa

SEQ ID NO: 791719 - RNA, 19 nt, Homo sapiens
  misc_RNA (1)...(19): siRNA sense strand
gaaacuugcugugcuucuu

SEQ ID NO: 791720 - RNA, 19 nt, Homo sapiens
  misc_RNA (1)...(19): siRNA sense strand
gaaacgcccuaccaccaau

SEQ ID NO: 791721 - RNA, 19 nt, Homo sapiens
  misc_RNA (1)...(19): siRNA sense strand
gaaauaguaaagacaguug

SEQ ID NO: 791722 - RNA, 19 nt, Homo sapiens
  misc_RNA (1)...(19): siRNA sense strand
gacagagaaaucaaaguua

SEQ ID NO: 791723 - RNA, 19 nt, Homo sapiens
  misc_RNA (1)...(19): siRNA sense strand
gcagaauucgaaauaguaa

SEQ ID NO: 791724 - RNA, 19 nt, Homo sapiens
  misc_RNA (1)...(19): siRNA sense strand
ucuaugagguucgaaauga

SEQ ID NO: 791725 - RNA, 19 nt, Homo sapiens
  misc_RNA (1)...(19): siRNA sense strand
uaccaaacaucgcugugua

SEQ ID NO: 791726 - RNA, 19 nt, Homo sapiens
  misc_RNA (1)...(19): siRNA sense strand
caagggaugaagucaauaa

SEQ ID NO: 791727 - RNA, 19 nt, Homo sapiens
  misc_RNA (1)...(19): siRNA sense strand
guuaacaucuuugauaugg

SEQ ID NO: 791728 - RNA, 19 nt, Homo sapiens
  misc_RNA (1)...(19): siRNA sense strand
uggcagaaaugaagcaaga

SEQ ID NO: 791729 - RNA, 19 nt, Homo sapiens
  misc_RNA (1)...(19): siRNA sense strand
ggacgucuuugggcugaaa

SEQ ID NO: 791730 - RNA, 19 nt, Homo sapiens
  misc_RNA (1)...(19): siRNA sense strand
gcagaugccauucgcagaa

SEQ ID NO: 791731 - RNA, 19 nt, Homo sapiens
  misc_RNA (1)...(19): siRNA sense strand
gacaucccuucuucuauga

SEQ ID NO: 791732 - RNA, 19 nt, Homo sapiens
  misc_RNA (1)...(19): siRNA sense strand
gggaugaagucaauaaagc

SEQ ID NO: 791733 - RNA, 19 nt, Homo sapiens
  misc_RNA (1)...(19): siRNA sense strand
ggaaacgcccuaccaccaa

SEQ ID NO: 791734 - RNA, 19 nt, Homo sapiens
  misc_RNA (1)...(19): siRNA sense strand
gagcuuggaccucauggaa

SEQ ID NO: 791735 - RNA, 19 nt, Homo sapiens
  misc_RNA (1)...(19): siRNA sense strand
gagaaaagauucgugucua

SEQ ID NO: 791736 - RNA, 19 nt, Homo sapiens
  misc_RNA (1)...(19): siRNA sense strand
ggacaugcugggagucaaa

SEQ ID NO: 791737 - RNA, 19 nt, Homo sapiens
  misc_RNA (1)...(19): siRNA sense strand
gcaggucucuccgcaucaa

SEQ ID NO: 791738 - RNA, 19 nt, Homo sapiens
  misc_RNA (1)...(19): siRNA sense strand
agacagagaaaucaaaguu

SEQ ID NO: 791739 - RNA, 19 nt, Homo sapiens
  misc_RNA (1)...(19): siRNA sense strand
auaaagcgauacugugaga

SEQ ID NO: 791740 - RNA, 19 nt, Homo sapiens
  misc_RNA (1)...(19): siRNA sense strand
uaaagacaguugggacaug

SEQ ID NO: 791741 - RNA, 19 nt, Homo sapiens
  misc_RNA (1)...(19): siRNA sense strand
ugaagucaauaaagcguau

SEQ ID NO: 791742 - RNA, 19 nt, Homo sapiens
  misc_RNA (1)...(19): siRNA sense strand
gcuguauuauaaagcgaua

SEQ ID NO: 791743 - RNA, 19 nt, Homo sapiens
  misc_RNA (1)...(19): siRNA sense strand
gugcuaguuucaccaaaga

SEQ ID NO: 791744 - RNA, 19 nt, Homo sapiens
  misc_RNA (1)...(19): siRNA sense strand
gugugauacuggucuauga

SEQ ID NO: 791745 - RNA, 19 nt, Homo sapiens
  misc_RNA (1)...(19): siRNA sense strand
caaacuggagaaggcauua

SEQ ID NO: 791746 - RNA, 19 nt, Homo sapiens
  misc_RNA (1)...(19): siRNA sense strand
gcaucaaagucaucuccau

SEQ ID NO: 791747 - RNA, 19 nt, Homo sapiens
  misc_RNA (1)...(19): siRNA sense strand
uuauaaagcgauacuguga

SEQ ID NO: 791748 - RNA, 19 nt, Homo sapiens
  misc_RNA (1)...(19): siRNA sense strand
uaaagcguaucggaaacuu

SEQ ID NO: 791749 - RNA, 19 nt, Homo sapiens
  misc_RNA (1)...(19): siRNA sense strand
agaacaagcagaugccauu

SEQ ID NO: 791750 - RNA, 19 nt, Homo sapiens
  misc_RNA (1)...(19): siRNA sense strand
gauacuggucuaugauguu

SEQ ID NO: 791751 - RNA, 19 nt, Homo sapiens
  misc_RNA (1)...(19): siRNA sense strand
aaagcgauacugugagaaa

SEQ ID NO: 791752 - RNA, 19 nt, Homo sapiens
  misc_RNA (1)...(19): siRNA sense strand
uaaauaccuggcaacaauu

SEQ ID NO: 791753 - RNA, 19 nt, Homo sapiens
  misc_RNA (1)...(19): siRNA sense strand
ggggaaaagcuguauuaua

SEQ ID NO: 791754 - RNA, 19 nt, Homo sapiens
  misc_RNA (1)...(19): siRNA sense strand
gaacaagcagaugccauuc

SEQ ID NO: 791755 - RNA, 19 nt, Homo sapiens
  misc_RNA (1)...(19): siRNA sense strand
gcuuggaccucauggaaac

SEQ ID NO: 791756 - RNA, 19 nt, Homo sapiens
  misc_RNA (1)...(19): siRNA sense strand
caaagguacacgucagaga

SEQ ID NO: 791757 - RNA, 19 nt, Homo sapiens
  misc_RNA (1)...(19): siRNA sense strand
cgucagagacagagaaauc

SEQ ID NO: 791758 - RNA, 19 nt, Homo sapiens
  misc_RNA (1)...(19): siRNA sense strand
agaaaagauucgugucuaa

SEQ ID NO: 791759 - RNA, 19 nt, Homo sapiens
  misc_RNA (1)...(19): siRNA sense strand
ucgcagaauucgaaauagu

SEQ ID NO: 791760 - RNA, 19 nt, Homo sapiens
  misc_RNA (1)...(19): siRNA sense strand
aaggguuccuguacuuuga

SEQ ID NO: 791761 - RNA, 19 nt, Homo sapiens
  misc_RNA (1)...(19): siRNA sense strand
gaaaagauucgugucuaaa

SEQ ID NO: 791762 - RNA, 19 nt, Homo sapiens
  misc_RNA (1)...(19): siRNA sense strand
cgcagaauucgaaauagua

SEQ ID NO: 791763 - RNA, 19 nt, Homo sapiens
  misc_RNA (1)...(19): siRNA sense strand
ucggacagcccuccugaaa

SEQ ID NO: 791764 - RNA, 19 nt, Homo sapiens
  misc_RNA (1)...(19): siRNA sense strand
gcaccuggcagugaagaug

SEQ ID NO: 791765 - RNA, 19 nt, Homo sapiens
  misc_RNA (1)...(19): siRNA sense strand
uguagcaccuggcagugaa

SEQ ID NO: 791766 - RNA, 19 nt, Homo sapiens
  misc_RNA (1)...(19): siRNA sense strand
cucaagggaugaagucaau

SEQ ID NO: 791767 - RNA, 19 nt, Homo sapiens
  misc_RNA (1)...(19): siRNA sense strand
auacuggucuaugauguug

SEQ ID NO: 791768 - RNA, 19 nt, Homo sapiens
  misc_RNA (1)...(19): siRNA sense strand
cagagacagagaaaucaaa

SEQ ID NO: 791769 - RNA, 19 nt, Homo sapiens
  misc_RNA (1)...(19): siRNA sense strand
cgaaauaguaaagacaguu

SEQ ID NO: 791770 - RNA, 19 nt, Homo sapiens
  misc_RNA (1)...(19): siRNA sense strand
ucuaugauguugggcagaa

SEQ ID NO: 791771 - RNA, 19 nt, Homo sapiens
  misc_RNA (1)...(19): siRNA sense strand
agaaggcauuaaugagaug

SEQ ID NO: 791772 - RNA, 19 nt, Homo sapiens
  misc_RNA (1)...(19): siRNA sense strand
gcagugcuaguuucaccaa

SEQ ID NO: 791773 - RNA, 19 nt, Homo sapiens
  misc_RNA (1)...(19): siRNA sense strand
ggcuggacaucccuucuuc

SEQ ID NO: 791774 - RNA, 19 nt, Homo sapiens
  misc_RNA (1)...(19): siRNA sense strand
ugauacuggucuaugaugu

SEQ ID NO: 791775 - RNA, 19 nt, Homo sapiens
  misc_RNA (1)...(19): siRNA sense strand
ccaaacaucgcuguguaga

SEQ ID NO: 791776 - RNA, 19 nt, Homo sapiens
  misc_RNA (1)...(19): siRNA sense strand
caccaaagaacaagcagau

SEQ ID NO: 791777 - RNA, 19 nt, Homo sapiens
  misc_RNA (1)...(19): siRNA sense strand
cuguguagaugaaagugaa

SEQ ID NO: 791778 - RNA, 19 nt, Homo sapiens
  misc_RNA (1)...(19): siRNA sense strand
augcguggcuggcagaaau

SEQ ID NO: 791779 - RNA, 19 nt, Homo sapiens
  misc_RNA (1)...(19): siRNA sense strand
cuggagaaggcauuaauga

SEQ ID NO: 791780 - RNA, 19 nt, Homo sapiens
  misc_RNA (1)...(19): siRNA sense strand
guaccaaacaucgcugugu

SEQ ID NO: 791781 - RNA, 19 nt, Homo sapiens
  misc_RNA (1)...(19): siRNA sense strand
gaaacuucagcacaaacug

SEQ ID NO: 791782 - RNA, 19 nt, Homo sapiens
  misc_RNA (1)...(19): siRNA sense strand
ggguuccuguacuuugaaa

SEQ ID NO: 791783 - RNA, 19 nt, Homo sapiens
  misc_RNA (1)...(19): siRNA sense strand
ucggaaacuugcugugcuu

SEQ ID NO: 791784 - RNA, 19 nt, Homo sapiens
  misc_RNA (1)...(19): siRNA sense strand
gugccaacaagauugauug

SEQ ID NO: 791785 - RNA, 19 nt, Homo sapiens
  misc_RNA (1)...(19): siRNA sense strand
aaagcaaaggguuccugua

SEQ ID NO: 791786 - RNA, 19 nt, Homo sapiens
  misc_RNA (1)...(19): siRNA sense strand
guaaagacaguugggacau

SEQ ID NO: 791787 - RNA, 19 nt, Homo sapiens
  misc_RNA (1)...(19): siRNA sense strand
aaauaccuggcaacaauug

SEQ ID NO: 791788 - RNA, 19 nt, Homo sapiens
  misc_RNA (1)...(19): siRNA sense strand
aagcaaaggguuccuguac

SEQ ID NO: 791789 - RNA, 19 nt, Homo sapiens
  misc_RNA (1)...(19): siRNA sense strand
cuggacaucccuucuucua

SEQ ID NO: 791790 - RNA, 19 nt, Homo sapiens
  misc_RNA (1)...(19): siRNA sense strand
caaacaucgcuguguagau

SEQ ID NO: 791791 - RNA, 19 nt, Homo sapiens
  misc_RNA (1)...(19): siRNA sense strand
cuauggagucacaaaggua

SEQ ID NO: 791792 - RNA, 19 nt, Homo sapiens
  misc_RNA (1)...(19): siRNA sense strand
ucagagacagagaaaucaa

SEQ ID NO: 791793 - RNA, 19 nt, Homo sapiens
  misc_RNA (1)...(19): siRNA sense strand
aaacgcccuaccaccaaua

SEQ ID NO: 791794 - RNA, 19 nt, Homo sapiens
  misc_RNA (1)...(19): siRNA sense strand
aauaaagcguaucggaaac

SEQ ID NO: 791795 - RNA, 19 nt, Homo sapiens
  misc_RNA (1)...(19): siRNA sense strand
ucuucacccugacaaaugu

SEQ ID NO: 791796 - RNA, 19 nt, Homo sapiens
  misc_RNA (1)...(19): siRNA sense strand
gcagagaccuggacauuaa

SEQ ID NO: 791797 - RNA, 19 nt, Homo sapiens
  misc_RNA (1)...(19): siRNA sense strand
ccauggagguguccuguug

SEQ ID NO: 791798 - RNA, 19 nt, Homo sapiens
  misc_RNA (1)...(19): siRNA sense strand
cggccuaacuagcacuuua

SEQ ID NO: 791799 - RNA, 19 nt, Homo sapiens
  misc_RNA (1)...(19): siRNA sense strand
ggagaucaccaagcacuuu

SEQ ID NO: 791800 - RNA, 19 nt, Homo sapiens
  misc_RNA (1)...(19): siRNA sense strand
aggaggagcuggugaacaa

SEQ ID NO: 791801 - RNA, 19 nt, Homo sapiens
  misc_RNA (1)...(19): siRNA sense strand
ggaaggaacaugacaucga

SEQ ID NO: 791802 - RNA, 19 nt, Homo sapiens
  misc_RNA (1)...(19): siRNA sense strand
gacauuaaccggccuggaa

SEQ ID NO: 791803 - RNA, 19 nt, Homo sapiens
  misc_RNA (1)...(19): siRNA sense strand
ccuaugugcuggccaaguu

SEQ ID NO: 791804 - RNA, 19 nt, Homo sapiens
  misc_RNA (1)...(19): siRNA sense strand
ggcaaaggcuggauagacu

SEQ ID NO: 791805 - RNA, 19 nt, Homo sapiens
  misc_RNA (1)...(19): siRNA sense strand
gcccagccauccucaccua

SEQ ID NO: 791806 - RNA, 19 nt, Homo sapiens
  misc_RNA (1)...(19): siRNA sense strand
ccucuuggcugcagacaca

SEQ ID NO: 791807 - RNA, 19 nt, Homo sapiens
  misc_RNA (1)...(19): siRNA sense strand
aaacuggacccgaccacua

SEQ ID NO: 791808 - RNA, 19 nt, Homo sapiens
  misc_RNA (1)...(19): siRNA sense strand
cagaguuggugcagagcua

SEQ ID NO: 791809 - RNA, 19 nt, Homo sapiens
  misc_RNA (1)...(19): siRNA sense strand
cacaaacuaugcuucaaca

SEQ ID NO: 791810 - RNA, 19 nt, Homo sapiens
  misc_RNA (1)...(19): siRNA sense strand
ccagcguggugcagcauuu

SEQ ID NO: 791811 - RNA, 19 nt, Homo sapiens
  misc_RNA (1)...(19): siRNA sense strand
gcauuucggguucaaguau

SEQ ID NO: 791812 - RNA, 19 nt, Homo sapiens
  misc_RNA (1)...(19): siRNA sense strand
caaguuugcacucaucuuc

SEQ ID NO: 791813 - RNA, 19 nt, Homo sapiens
  misc_RNA (1)...(19): siRNA sense strand
caacaccuucuucaacuuc

SEQ ID NO: 791814 - RNA, 19 nt, Homo sapiens
  misc_RNA (1)...(19): siRNA sense strand
ucaacaccuucuucaacuu

SEQ ID NO: 791815 - RNA, 19 nt, Homo sapiens
  misc_RNA (1)...(19): siRNA sense strand
cugcagcucuucuggaaca

SEQ ID NO: 791816 - RNA, 19 nt, Homo sapiens
  misc_RNA (1)...(19): siRNA sense strand
gagaucaccaagcacuuug

SEQ ID NO: 791817 - RNA, 19 nt, Homo sapiens
  misc_RNA (1)...(19): siRNA sense strand
gcgauucccugaggagaag

SEQ ID NO: 791818 - RNA, 19 nt, Homo sapiens
  misc_RNA (1)...(19): siRNA sense strand
ggccaaguuugcacucauc

SEQ ID NO: 791819 - RNA, 19 nt, Homo sapiens
  misc_RNA (1)...(19): siRNA sense strand
ccgcagagaccuggacauu

SEQ ID NO: 791820 - RNA, 19 nt, Homo sapiens
  misc_RNA (1)...(19): siRNA sense strand
cagcucuucuggaacaugu

SEQ ID NO: 791821 - RNA, 19 nt, Homo sapiens
  misc_RNA (1)...(19): siRNA sense strand
gggccucaaccacaaacua

SEQ ID NO: 791822 - RNA, 19 nt, Homo sapiens
  misc_RNA (1)...(19): siRNA sense strand
ccuacggccuucugcaugu

SEQ ID NO: 791823 - RNA, 19 nt, Homo sapiens
  misc_RNA (1)...(19): siRNA sense strand
cuacggccuucugcaugua

SEQ ID NO: 791824 - RNA, 19 nt, Homo sapiens
  misc_RNA (1)...(19): siRNA sense strand
caauggcaaaggcuggaua

SEQ ID NO: 791825 - RNA, 19 nt, Homo sapiens
  misc_RNA (1)...(19): siRNA sense strand
ugcaggagaucaccaagca

SEQ ID NO: 791826 - RNA, 19 nt, Homo sapiens
  misc_RNA (1)...(19): siRNA sense strand
ggccucaaccacaaacuau

SEQ ID NO: 791827 - RNA, 19 nt, Homo sapiens
  misc_RNA (1)...(19): siRNA sense strand
agacacagacuggaaggaa

SEQ ID NO: 791828 - RNA, 19 nt, Homo sapiens
  misc_RNA (1)...(19): siRNA sense strand
ucgaggacaugcaggagau

SEQ ID NO: 791829 - RNA, 19 nt, Homo sapiens
  misc_RNA (1)...(19): siRNA sense strand
cgcagagaccuggacauua

SEQ ID NO: 791830 - RNA, 19 nt, Homo sapiens
  misc_RNA (1)...(19): siRNA sense strand
cuucaaauacuuccugcaa

SEQ ID NO: 791831 - RNA, 19 nt, Homo sapiens
  misc_RNA (1)...(19): siRNA sense strand
gaucaccaagcacuuugug

SEQ ID NO: 791832 - RNA, 19 nt, Homo sapiens
  misc_RNA (1)...(19): siRNA sense strand
cagacuggaaggaacauga

SEQ ID NO: 791833 - RNA, 19 nt, Homo sapiens
  misc_RNA (1)...(19): siRNA sense strand
ccacaaacuaugcuucaac

SEQ ID NO: 791834 - RNA, 19 nt, Homo sapiens
  misc_RNA (1)...(19): siRNA sense strand
ccagggaagcugacugaag

SEQ ID NO: 791835 - RNA, 19 nt, Homo sapiens
  misc_RNA (1)...(19): siRNA sense strand
gaggagcuggugaacaaca

SEQ ID NO: 791836 - RNA, 19 nt, Homo sapiens
  misc_RNA (1)...(19): siRNA sense strand
cauuucggguucaaguaug

SEQ ID NO: 791837 - RNA, 19 nt, Homo sapiens
  misc_RNA (1)...(19): siRNA sense strand
accaagcucuccggccuaa

SEQ ID NO: 791838 - RNA, 19 nt, Homo sapiens
  misc_RNA (1)...(19): siRNA sense strand
ggaacaugacaucgagaca

SEQ ID NO: 791839 - RNA, 19 nt, Homo sapiens
  misc_RNA (1)...(19): siRNA sense strand
ggguucaaguaugugauug

SEQ ID NO: 791840 - RNA, 19 nt, Homo sapiens
  misc_RNA (1)...(19): siRNA sense strand
caagcacuuuguggugugu

SEQ ID NO: 791841 - RNA, 19 nt, Homo sapiens
  misc_RNA (1)...(19): siRNA sense strand
gagcuaccggcagcagauu

SEQ ID NO: 791842 - RNA, 19 nt, Homo sapiens
  misc_RNA (1)...(19): siRNA sense strand
gcagagaccuggacauuaa

SEQ ID NO: 791843 - RNA, 19 nt, Homo sapiens
  misc_RNA (1)...(19): siRNA sense strand
ccauggagguguccuguug

SEQ ID NO: 791844 - RNA, 19 nt, Homo sapiens
  misc_RNA (1)...(19): siRNA sense strand
cggccuaacuagcacuuua

SEQ ID NO: 791845 - RNA, 19 nt, Homo sapiens
  misc_RNA (1)...(19): siRNA sense strand
ggagaucaccaagcacuuu

SEQ ID NO: 791846 - RNA, 19 nt, Homo sapiens
  misc_RNA (1)...(19): siRNA sense strand
aggaggagcuggugaacaa

SEQ ID NO: 791847 - RNA, 19 nt, Homo sapiens
  misc_RNA (1)...(19): siRNA sense strand
ggaaggaacaugacaucga

SEQ ID NO: 791848 - RNA, 19 nt, Homo sapiens
  misc_RNA (1)...(19): siRNA sense strand
gacauuaaccggccuggaa

SEQ ID NO: 791849 - RNA, 19 nt, Homo sapiens
  misc_RNA (1)...(19): siRNA sense strand
ccuaugugcuggccaaguu

SEQ ID NO: 791850 - RNA, 19 nt, Homo sapiens
  misc_RNA (1)...(19): siRNA sense strand
ggcaaaggcuggauagacu

SEQ ID NO: 791851 - RNA, 19 nt, Homo sapiens
  misc_RNA (1)...(19): siRNA sense strand
gcccagccauccucaccua

SEQ ID NO: 791852 - RNA, 19 nt, Homo sapiens
  misc_RNA (1)...(19): siRNA sense strand
ccucuuggcugcagacaca

SEQ ID NO: 791853 - RNA, 19 nt, Homo sapiens
  misc_RNA (1)...(19): siRNA sense strand
aaacuggacccgaccacua

SEQ ID NO: 791854 - RNA, 19 nt, Homo sapiens
  misc_RNA (1)...(19): siRNA sense strand
cagaguuggugcagagcua

SEQ ID NO: 791855 - RNA, 19 nt, Homo sapiens
  misc_RNA (1)...(19): siRNA sense strand
cacaaacuaugcuucaaca

SEQ ID NO: 791856 - RNA, 19 nt, Homo sapiens
  misc_RNA (1)...(19): siRNA sense strand
ccagcguggugcagcauuu

SEQ ID NO: 791857 - RNA, 19 nt, Homo sapiens
  misc_RNA (1)...(19): siRNA sense strand
gcauuucggguucaaguau

SEQ ID NO: 791858 - RNA, 19 nt, Homo sapiens
  misc_RNA (1)...(19): siRNA sense strand
caaguuugcacucaucuuc

SEQ ID NO: 791859 - RNA, 19 nt, Homo sapiens
  misc_RNA (1)...(19): siRNA sense strand
caacaccuucuucaacuuc

SEQ ID NO: 791860 - RNA, 19 nt, Homo sapiens
  misc_RNA (1)...(19): siRNA sense strand
ucaacaccuucuucaacuu

SEQ ID NO: 791861 - RNA, 19 nt, Homo sapiens
  misc_RNA (1)...(19): siRNA sense strand
cugcagcucuucuggaaca

SEQ ID NO: 791862 - RNA, 19 nt, Homo sapiens
  misc_RNA (1)...(19): siRNA sense strand
gagaucaccaagcacuuug

SEQ ID NO: 791863 - RNA, 19 nt, Homo sapiens
  misc_RNA (1)...(19): siRNA sense strand
gcgauucccugaggagaag

SEQ ID NO: 791864 - RNA, 19 nt, Homo sapiens
  misc_RNA (1)...(19): siRNA sense strand
ggccaaguuugcacucauc

SEQ ID NO: 791865 - RNA, 19 nt, Homo sapiens
  misc_RNA (1)...(19): siRNA sense strand
ccgcagagaccuggacauu

SEQ ID NO: 791866 - RNA, 19 nt, Homo sapiens
  misc_RNA (1)...(19): siRNA sense strand
cagcucuucuggaacaugu

SEQ ID NO: 791867 - RNA, 19 nt, Homo sapiens
  misc_RNA (1)...(19): siRNA sense strand
gggccucaaccacaaacua

SEQ ID NO: 791868 - RNA, 19 nt, Homo sapiens
  misc_RNA (1)...(19): siRNA sense strand
ccuacggccuucugcaugu

SEQ ID NO: 791869 - RNA, 19 nt, Homo sapiens
  misc_RNA (1)...(19): siRNA sense strand
cuacggccuucugcaugua

SEQ ID NO: 791870 - RNA, 19 nt, Homo sapiens
  misc_RNA (1)...(19): siRNA sense strand
caauggcaaaggcuggaua

SEQ ID NO: 791871 - RNA, 19 nt, Homo sapiens
  misc_RNA (1)...(19): siRNA sense strand
ugcaggagaucaccaagca

SEQ ID NO: 791872 - RNA, 19 nt, Homo sapiens
  misc_RNA (1)...(19): siRNA sense strand
ggccucaaccacaaacuau

SEQ ID NO: 791873 - RNA, 19 nt, Homo sapiens
  misc_RNA (1)...(19): siRNA sense strand
agacacagacuggaaggaa

SEQ ID NO: 791874 - RNA, 19 nt, Homo sapiens
  misc_RNA (1)...(19): siRNA sense strand
ucgaggacaugcaggagau

SEQ ID NO: 791875 - RNA, 19 nt, Homo sapiens
  misc_RNA (1)...(19): siRNA sense strand
cgcagagaccuggacauua

SEQ ID NO: 791876 - RNA, 19 nt, Homo sapiens
  misc_RNA (1)...(19): siRNA sense strand
cuucaaauacuuccugcaa

SEQ ID NO: 791877 - RNA, 19 nt, Homo sapiens
  misc_RNA (1)...(19): siRNA sense strand
gaucaccaagcacuuugug

SEQ ID NO: 791878 - RNA, 19 nt, Homo sapiens
  misc_RNA (1)...(19): siRNA sense strand
cagacuggaaggaacauga

SEQ ID NO: 791879 - RNA, 19 nt, Homo sapiens
  misc_RNA (1)...(19): siRNA sense strand
ccacaaacuaugcuucaac

SEQ ID NO: 791880 - RNA, 19 nt, Homo sapiens
  misc_RNA (1)...(19): siRNA sense strand
ccagggaagcugacugaag

SEQ ID NO: 791881 - RNA, 19 nt, Homo sapiens
  misc_RNA (1)...(19): siRNA sense strand
gaggagcuggugaacaaca

SEQ ID NO: 791882 - RNA, 19 nt, Homo sapiens
  misc_RNA (1)...(19): siRNA sense strand
cauuucggguucaaguaug

SEQ ID NO: 791883 - RNA, 19 nt, Homo sapiens
  misc_RNA (1)...(19): siRNA sense strand
accaagcucuccggccuaa

SEQ ID NO: 791884 - RNA, 19 nt, Homo sapiens
  misc_RNA (1)...(19): siRNA sense strand
ggaacaugacaucgagaca

SEQ ID NO: 791885 - RNA, 19 nt, Homo sapiens
  misc_RNA (1)...(19): siRNA sense strand
ggguucaaguaugugauug

SEQ ID NO: 791886 - RNA, 19 nt, Homo sapiens
  misc_RNA (1)...(19): siRNA sense strand
caagcacuuuguggugugu

SEQ ID NO: 791887 - RNA, 19 nt, Homo sapiens
  misc_RNA (1)...(19): siRNA sense strand
gagcuaccggcagcagauu

SEQ ID NO: 791888 - RNA, 19 nt, Homo sapiens
  misc_RNA (1)...(19): siRNA sense strand
gggaguaucuucacuaaug

SEQ ID NO: 791889 - RNA, 19 nt, Homo sapiens
  misc_RNA (1)...(19): siRNA sense strand
gaacauagguuuugauugu

SEQ ID NO: 791890 - RNA, 19 nt, Homo sapiens
  misc_RNA (1)...(19): siRNA sense strand
gcagaaacuuacuuugaaa

SEQ ID NO: 791891 - RNA, 19 nt, Homo sapiens
  misc_RNA (1)...(19): siRNA sense strand
gaugaacgcuaccgacauu

SEQ ID NO: 791892 - RNA, 19 nt, Homo sapiens
  misc_RNA (1)...(19): siRNA sense strand
gaaauuaacagugcagaaa

SEQ ID NO: 791893 - RNA, 19 nt, Homo sapiens
  misc_RNA (1)...(19): siRNA sense strand
gaaccuuuaucaagugaaa

SEQ ID NO: 791894 - RNA, 19 nt, Homo sapiens
  misc_RNA (1)...(19): siRNA sense strand
ccagauauaugcucucgaa

SEQ ID NO: 791895 - RNA, 19 nt, Homo sapiens
  misc_RNA (1)...(19): siRNA sense strand
agaaguagcuaauggcaaa

SEQ ID NO: 791896 - RNA, 19 nt, Homo sapiens
  misc_RNA (1)...(19): siRNA sense strand
acaaacauguccagaauug

SEQ ID NO: 791897 - RNA, 19 nt, Homo sapiens
  misc_RNA (1)...(19): siRNA sense strand
gaaauuugcuaugcucuuc

SEQ ID NO: 791898 - RNA, 19 nt, Homo sapiens
  misc_RNA (1)...(19): siRNA sense strand
gugaagaaguagaaauuga

SEQ ID NO: 791899 - RNA, 19 nt, Homo sapiens
  misc_RNA (1)...(19): siRNA sense strand
gcagaaccuuuaucaagug

SEQ ID NO: 791900 - RNA, 19 nt, Homo sapiens
  misc_RNA (1)...(19): siRNA sense strand
ggauuuugcucuuuaguua

SEQ ID NO: 791901 - RNA, 19 nt, Homo sapiens
  misc_RNA (1)...(19): siRNA sense strand
gcuaauggcaaacuaauga

SEQ ID NO: 791902 - RNA, 19 nt, Homo sapiens
  misc_RNA (1)...(19): siRNA sense strand
agaaugauaugacuguuug

SEQ ID NO: 791903 - RNA, 19 nt, Homo sapiens
  misc_RNA (1)...(19): siRNA sense strand
gagaagugcucuuagaaaa

SEQ ID NO: 791904 - RNA, 19 nt, Homo sapiens
  misc_RNA (1)...(19): siRNA sense strand
cagaguagagugugcaaua

SEQ ID NO: 791905 - RNA, 19 nt, Homo sapiens
  misc_RNA (1)...(19): siRNA sense strand
gaccuuggaugcuguaaag

SEQ ID NO: 791906 - RNA, 19 nt, Homo sapiens
  misc_RNA (1)...(19): siRNA sense strand
gauauaugcucucgaacag

SEQ ID NO: 791907 - RNA, 19 nt, Homo sapiens
  misc_RNA (1)...(19): siRNA sense strand
caucaauggugcuaaggaa

SEQ ID NO: 791908 - RNA, 19 nt, Homo sapiens
  misc_RNA (1)...(19): siRNA sense strand
gagugaagaaguagaaauu

SEQ ID NO: 791909 - RNA, 19 nt, Homo sapiens
  misc_RNA (1)...(19): siRNA sense strand
auacaaacauguccagaau

SEQ ID NO: 791910 - RNA, 19 nt, Homo sapiens
  misc_RNA (1)...(19): siRNA sense strand
gugcagaaacuuacuuuga

SEQ ID NO: 791911 - RNA, 19 nt, Homo sapiens
  misc_RNA (1)...(19): siRNA sense strand
guaaagugauucgucauag

SEQ ID NO: 791912 - RNA, 19 nt, Homo sapiens
  misc_RNA (1)...(19): siRNA sense strand
uuauugggcugacuuuauu

SEQ ID NO: 791913 - RNA, 19 nt, Homo sapiens
  misc_RNA (1)...(19): siRNA sense strand
gaacaguguggccugauga

SEQ ID NO: 791914 - RNA, 19 nt, Homo sapiens
  misc_RNA (1)...(19): siRNA sense strand
gaaacuaugggacccuuug

SEQ ID NO: 791915 - RNA, 19 nt, Homo sapiens
  misc_RNA (1)...(19): siRNA sense strand
ugaaagacaugaguuugug

SEQ ID NO: 791916 - RNA, 19 nt, Homo sapiens
  misc_RNA (1)...(19): siRNA sense strand
agaaaagccugguucauaa

SEQ ID NO: 791917 - RNA, 19 nt, Homo sapiens
  misc_RNA (1)...(19): siRNA sense strand
ugcagaaacuuacuuugaa

SEQ ID NO: 791918 - RNA, 19 nt, Homo sapiens
  misc_RNA (1)...(19): siRNA sense strand
uagggaguaucuucacuaa

SEQ ID NO: 791919 - RNA, 19 nt, Homo sapiens
  misc_RNA (1)...(19): siRNA sense strand
cuaaugauucugacuguaa

SEQ ID NO: 791920 - RNA, 19 nt, Homo sapiens
  misc_RNA (1)...(19): siRNA sense strand
cauuuaggauucucuguug

SEQ ID NO: 791921 - RNA, 19 nt, Homo sapiens
  misc_RNA (1)...(19): siRNA sense strand
acaccagacagccauauua

SEQ ID NO: 791922 - RNA, 19 nt, Homo sapiens
  misc_RNA (1)...(19): siRNA sense strand
caauggugcuaaggaaauu

SEQ ID NO: 791923 - RNA, 19 nt, Homo sapiens
  misc_RNA (1)...(19): siRNA sense strand
cuaccgacauuuaggauuc

SEQ ID NO: 791924 - RNA, 19 nt, Homo sapiens
  misc_RNA (1)...(19): siRNA sense strand
gaaagacaugaguuuguga

SEQ ID NO: 791925 - RNA, 19 nt, Homo sapiens
  misc_RNA (1)...(19): siRNA sense strand
ugaacgcuaccgacauuua

SEQ ID NO: 791926 - RNA, 19 nt, Homo sapiens
  misc_RNA (1)...(19): siRNA sense strand
uaaagugauucgucauagu

SEQ ID NO: 791927 - RNA, 19 nt, Homo sapiens
  misc_RNA (1)...(19): siRNA sense strand
uagcagaaccuuuaucaag

SEQ ID NO: 791928 - RNA, 19 nt, Homo sapiens
  misc_RNA (1)...(19): siRNA sense strand
gaacgcuaccgacauuuag

SEQ ID NO: 791929 - RNA, 19 nt, Homo sapiens
  misc_RNA (1)...(19): siRNA sense strand
guaaugaugcaccuguuga

SEQ ID NO: 791930 - RNA, 19 nt, Homo sapiens
  misc_RNA (1)...(19): siRNA sense strand
gaaucacuguuuccagaag

SEQ ID NO: 791931 - RNA, 19 nt, Homo sapiens
  misc_RNA (1)...(19): siRNA sense strand
caaugugcuuuguaacaga

SEQ ID NO: 791932 - RNA, 19 nt, Homo sapiens
  misc_RNA (1)...(19): siRNA sense strand
gauucugacuguaacacaa

SEQ ID NO: 791933 - RNA, 19 nt, Homo sapiens
  misc_RNA (1)...(19): siRNA sense strand
ggguacccauguaguugua

SEQ ID NO: 791934 - RNA, 19 nt, Homo sapiens
  misc_RNA (1)...(19): siRNA sense strand
guccagaauugcugcgaaa

SEQ ID NO: 791935 - RNA, 19 nt, Homo sapiens
  misc_RNA (1)...(19): siRNA sense strand
guagggaguaucuucacua

SEQ ID NO: 791936 - RNA, 19 nt, Homo sapiens
  misc_RNA (1)...(19): siRNA sense strand
uaucuucacuaaugcaaca

SEQ ID NO: 791937 - RNA, 19 nt, Homo sapiens
  misc_RNA (1)...(19): siRNA sense strand
gaauuucaggguaaugaug

SEQ ID NO: 791938 - RNA, 19 nt, Homo sapiens
  misc_RNA (1)...(19): siRNA sense strand
guuauugggcugacuuuau

SEQ ID NO: 791939 - RNA, 19 nt, Homo sapiens
  misc_RNA (1)...(19): siRNA sense strand
ggaaauuugcuaugcucuu

SEQ ID NO: 791940 - RNA, 19 nt, Homo sapiens
  misc_RNA (1)...(19): siRNA sense strand
gaagugcucuuagaaaagu

SEQ ID NO: 791941 - RNA, 19 nt, Homo sapiens
  misc_RNA (1)...(19): siRNA sense strand
cgaacaguguggccugaug

SEQ ID NO: 791942 - RNA, 19 nt, Homo sapiens
  misc_RNA (1)...(19): siRNA sense strand
cagaaccuuuaucaaguga

SEQ ID NO: 791943 - RNA, 19 nt, Homo sapiens
  misc_RNA (1)...(19): siRNA sense strand
gaaagugccagaguagagu

SEQ ID NO: 791944 - RNA, 19 nt, Homo sapiens
  misc_RNA (1)...(19): siRNA sense strand
cuuggaugcuguaaaguga

SEQ ID NO: 791945 - RNA, 19 nt, Homo sapiens
  misc_RNA (1)...(19): siRNA sense strand
ggcaaacuaaugauucuga

SEQ ID NO: 791946 - RNA, 19 nt, Homo sapiens
  misc_RNA (1)...(19): siRNA sense strand
uguaaagugauucgucaua

SEQ ID NO: 791947 - RNA, 19 nt, Homo sapiens
  misc_RNA (1)...(19): siRNA sense strand
cuaaggaaauuugcuaugc

SEQ ID NO: 791948 - RNA, 19 nt, Homo sapiens
  misc_RNA (1)...(19): siRNA sense strand
ggagugaagaaguagaaau

SEQ ID NO: 791949 - RNA, 19 nt, Homo sapiens
  misc_RNA (1)...(19): siRNA sense strand
ccaaugugcuuuguaacag

SEQ ID NO: 791950 - RNA, 19 nt, Homo sapiens
  misc_RNA (1)...(19): siRNA sense strand
guucaucaauggugcuaag

SEQ ID NO: 791951 - RNA, 19 nt, Homo sapiens
  misc_RNA (1)...(19): siRNA sense strand
uguuuggagugaagaagua

SEQ ID NO: 791952 - RNA, 19 nt, Homo sapiens
  misc_RNA (1)...(19): siRNA sense strand
guagcuaauggcaaacuaa

SEQ ID NO: 791953 - RNA, 19 nt, Homo sapiens
  misc_RNA (1)...(19): siRNA sense strand
caagugaaagacaugaguu

SEQ ID NO: 791954 - RNA, 19 nt, Homo sapiens
  misc_RNA (1)...(19): siRNA sense strand
ggaguaucuucacuaaugc

SEQ ID NO: 791955 - RNA, 19 nt, Homo sapiens
  misc_RNA (1)...(19): siRNA sense strand
gugaaagacaugaguuugu

SEQ ID NO: 791956 - RNA, 19 nt, Homo sapiens
  misc_RNA (1)...(19): siRNA sense strand
uaacagugcagaaacuuac

SEQ ID NO: 791957 - RNA, 19 nt, Homo sapiens
  misc_RNA (1)...(19): siRNA sense strand
guagagugugcaauacaaa

SEQ ID NO: 791958 - RNA, 19 nt, Homo sapiens
  misc_RNA (1)...(19): siRNA sense strand
gccaaugugcuuuguaaca

SEQ ID NO: 791959 - RNA, 19 nt, Homo sapiens
  misc_RNA (1)...(19): siRNA sense strand
uggaugcuguaaagugauu

SEQ ID NO: 791960 - RNA, 19 nt, Homo sapiens
  misc_RNA (1)...(19): siRNA sense strand
ugacuuuauugacccauca

SEQ ID NO: 791961 - RNA, 19 nt, Homo sapiens
  misc_RNA (1)...(19): siRNA sense strand
uaaggaaauuugcuaugcu

SEQ ID NO: 791962 - RNA, 19 nt, Homo sapiens
  misc_RNA (1)...(19): siRNA sense strand
gugcuaaggaaauuugcua

SEQ ID NO: 791963 - RNA, 19 nt, Homo sapiens
  misc_RNA (1)...(19): siRNA sense strand
uagaaaaguucaucaaugg

SEQ ID NO: 791964 - RNA, 19 nt, Homo sapiens
  misc_RNA (1)...(19): siRNA sense strand
cuaagaaugauaugacugu

SEQ ID NO: 791965 - RNA, 19 nt, Homo sapiens
  misc_RNA (1)...(19): siRNA sense strand
ggguaaugaugcaccuguu

SEQ ID NO: 791966 - RNA, 19 nt, Homo sapiens
  misc_RNA (1)...(19): siRNA sense strand
gaaaagccugguucauaaa

SEQ ID NO: 791967 - RNA, 19 nt, Homo sapiens
  misc_RNA (1)...(19): siRNA sense strand
agcagaaccuuuaucaagu

SEQ ID NO: 791968 - RNA, 19 nt, Homo sapiens
  misc_RNA (1)...(19): siRNA sense strand
caccagacagccauauuau

SEQ ID NO: 791969 - RNA, 19 nt, Homo sapiens
  misc_RNA (1)...(19): siRNA sense strand
gcaacaccagacagccaua

SEQ ID NO: 791970 - RNA, 19 nt, Homo sapiens
  misc_RNA (1)...(19): siRNA sense strand
gcuaaggaaauuugcuaug

SEQ ID NO: 791971 - RNA, 19 nt, Homo sapiens
  misc_RNA (1)...(19): siRNA sense strand
ucaauggugcuaaggaaau

SEQ ID NO: 791972 - RNA, 19 nt, Homo sapiens
  misc_RNA (1)...(19): siRNA sense strand
uuaacagugcagaaacuua

SEQ ID NO: 791973 - RNA, 19 nt, Homo sapiens
  misc_RNA (1)...(19): siRNA sense strand
gguaaugaugcaccuguug

SEQ ID NO: 791974 - RNA, 19 nt, Homo sapiens
  misc_RNA (1)...(19): siRNA sense strand
aagaaaagccugguucaua

SEQ ID NO: 791975 - RNA, 19 nt, Homo sapiens
  misc_RNA (1)...(19): siRNA sense strand
aguagagugugcaauacaa

SEQ ID NO: 791976 - RNA, 19 nt, Homo sapiens
  misc_RNA (1)...(19): siRNA sense strand
ucaaugggacugcuucaca

SEQ ID NO: 791977 - RNA, 19 nt, Homo sapiens
  misc_RNA (1)...(19): siRNA sense strand
cauaaaacuuugccugaug

SEQ ID NO: 791978 - RNA, 19 nt, Homo sapiens
  misc_RNA (1)...(19): siRNA sense strand
ugcugcaccuccagauaua

SEQ ID NO: 791979 - RNA, 19 nt, Homo sapiens
  misc_RNA (1)...(19): siRNA sense strand
caucaucugguuuggcauu

SEQ ID NO: 791980 - RNA, 19 nt, Homo sapiens
  misc_RNA (1)...(19): siRNA sense strand
gaguagagugugcaauaca

SEQ ID NO: 791981 - RNA, 19 nt, Homo sapiens
  misc_RNA (1)...(19): siRNA sense strand
gaaguagaaauugaaagag

SEQ ID NO: 791982 - RNA, 19 nt, Homo sapiens
  misc_RNA (1)...(19): siRNA sense strand
cagaauugcugcgaaaaga

SEQ ID NO: 791983 - RNA, 19 nt, Homo sapiens
  misc_RNA (1)...(19): siRNA sense strand
aaacuuugccugauguucu

SEQ ID NO: 791984 - RNA, 19 nt, Homo sapiens
  misc_RNA (1)...(19): siRNA sense strand
gcugcugcaccuccagaua

SEQ ID NO: 791985 - RNA, 19 nt, Homo sapiens
  misc_RNA (1)...(19): siRNA sense strand
ugaaagugccagaguagag

SEQ ID NO: 791986 - RNA, 19 nt, Homo sapiens
  misc_RNA (1)...(19): siRNA sense strand
aauacaaacauguccagaa

SEQ ID NO: 791987 - RNA, 19 nt, Homo sapiens
  misc_RNA (1)...(19): siRNA sense strand
uaaugaugcaccuguugaa

SEQ ID NO: 791988 - RNA, 19 nt, Homo sapiens
  misc_RNA (1)...(19): siRNA sense strand
ggaaggagauggcgaaagg

SEQ ID NO: 791989 - RNA, 19 nt, Homo sapiens
  misc_RNA (1)...(19): siRNA sense strand
ugaagaagaucccgacaug

SEQ ID NO: 791990 - RNA, 19 nt, Homo sapiens
  misc_RNA (1)...(19): siRNA sense strand
uggaggagcccagguauaa

SEQ ID NO: 791991 - RNA, 19 nt, Homo sapiens
  misc_RNA (1)...(19): siRNA sense strand
gaaggacgaggacaucuac

SEQ ID NO: 791992 - RNA, 19 nt, Homo sapiens
  misc_RNA (1)...(19): siRNA sense strand
guggacggcugcauucauc

SEQ ID NO: 791993 - RNA, 19 nt, Homo sapiens
  misc_RNA (1)...(19): siRNA sense strand
gcagcgacaucaccaagcu

SEQ ID NO: 791994 - RNA, 19 nt, Homo sapiens
  misc_RNA (1)...(19): siRNA sense strand
ugaagggccugagugacaa

SEQ ID NO: 791995 - RNA, 19 nt, Homo sapiens
  misc_RNA (1)...(19): siRNA sense strand
aagaagaucccgacaugga

SEQ ID NO: 791996 - RNA, 19 nt, Homo sapiens
  misc_RNA (1)...(19): siRNA sense strand
caucuccaccggcguguuu

SEQ ID NO: 791997 - RNA, 19 nt, Homo sapiens
  misc_RNA (1)...(19): siRNA sense strand
ggaggagcccagguauaaa

SEQ ID NO: 791998 - RNA, 19 nt, Homo sapiens
  misc_RNA (1)...(19): siRNA sense strand
gggaggaacauuacuucug

SEQ ID NO: 791999 - RNA, 19 nt, Homo sapiens
  misc_RNA (1)...(19): siRNA sense strand
cgaaagggguggcugugaa

SEQ ID NO: 792000 - RNA, 19 nt, Homo sapiens
  misc_RNA (1)...(19): siRNA sense strand
aggacaagcagcucaauga

SEQ ID NO: 792001 - RNA, 19 nt, Homo sapiens
  misc_RNA (1)...(19): siRNA sense strand
agaaggacgaggacaucua

SEQ ID NO: 792002 - RNA, 19 nt, Homo sapiens
  misc_RNA (1)...(19): siRNA sense strand
guggaggagcccagguaua

SEQ ID NO: 792003 - RNA, 19 nt, Homo sapiens
  misc_RNA (1)...(19): siRNA sense strand
gaggagcccagguauaaaa

SEQ ID NO: 792004 - RNA, 19 nt, Homo sapiens
  misc_RNA (1)...(19): siRNA sense strand
ggacccugcagagcuguaa

SEQ ID NO: 792005 - RNA, 19 nt, Homo sapiens
  misc_RNA (1)...(19): siRNA sense strand
agaagaucccgacauggaa

SEQ ID NO: 792006 - RNA, 19 nt, Homo sapiens
  misc_RNA (1)...(19): siRNA sense strand
gcgggaggaacauuacuuc

SEQ ID NO: 792007 - RNA, 19 nt, Homo sapiens
  misc_RNA (1)...(19): siRNA sense strand
cugaagggccugagugaca

SEQ ID NO: 792008 - RNA, 19 nt, Homo sapiens
  misc_RNA (1)...(19): siRNA sense strand
gcugaucaucugcguguuc

SEQ ID NO: 792009 - RNA, 19 nt, Homo sapiens
  misc_RNA (1)...(19): siRNA sense strand
acaagcagcgggaggaaca

SEQ ID NO: 792010 - RNA, 19 nt, Homo sapiens
  misc_RNA (1)...(19): siRNA sense strand
gaaacaaguucaagaagaa

SEQ ID NO: 792011 - RNA, 19 nt, Homo sapiens
  misc_RNA (1)...(19): siRNA sense strand
guaaagcucugaaggauga

SEQ ID NO: 792012 - RNA, 19 nt, Homo sapiens
  misc_RNA (1)...(19): siRNA sense strand
guugaagaaugcugaaaua

SEQ ID NO: 792013 - RNA, 19 nt, Homo sapiens
  misc_RNA (1)...(19): siRNA sense strand
gaagaaugcugaaauagcu

SEQ ID NO: 792014 - RNA, 19 nt, Homo sapiens
  misc_RNA (1)...(19): siRNA sense strand
caacuucagucuauucaug

SEQ ID NO: 792015 - RNA, 19 nt, Homo sapiens
  misc_RNA (1)...(19): siRNA sense strand
caauaaaccugcagcaucu

SEQ ID NO: 792016 - RNA, 19 nt, Homo sapiens
  misc_RNA (1)...(19): siRNA sense strand
ugaagcagcuccugucguu

SEQ ID NO: 792017 - RNA, 19 nt, Homo sapiens
  misc_RNA (1)...(19): siRNA sense strand
gcagaaacaaguucaagaa

SEQ ID NO: 792018 - RNA, 19 nt, Homo sapiens
  misc_RNA (1)...(19): siRNA sense strand
gaacaagaccagaggauag

SEQ ID NO: 792019 - RNA, 19 nt, Homo sapiens
  misc_RNA (1)...(19): siRNA sense strand
caacaggccucucuuuagg

SEQ ID NO: 792020 - RNA, 19 nt, Homo sapiens
  misc_RNA (1)...(19): siRNA sense strand
agaaacaaguucaagaaga

SEQ ID NO: 792021 - RNA, 19 nt, Homo sapiens
  misc_RNA (1)...(19): siRNA sense strand
gcucaggaguugaagaaug

SEQ ID NO: 792022 - RNA, 19 nt, Homo sapiens
  misc_RNA (1)...(19): siRNA sense strand
uucaguagcuccucagaua

SEQ ID NO: 792023 - RNA, 19 nt, Homo sapiens
  misc_RNA (1)...(19): siRNA sense strand
cggcacaacuucagucuau

SEQ ID NO: 792024 - RNA, 19 nt, Homo sapiens
  misc_RNA (1)...(19): siRNA sense strand
gaaucuugguucagcaauu

SEQ ID NO: 792025 - RNA, 19 nt, Homo sapiens
  misc_RNA (1)...(19): siRNA sense strand
ccaauggaauacagagaaa

SEQ ID NO: 792026 - RNA, 19 nt, Homo sapiens
  misc_RNA (1)...(19): siRNA sense strand
cagaacacacccagaguua

SEQ ID NO: 792027 - RNA, 19 nt, Homo sapiens
  misc_RNA (1)...(19): siRNA sense strand
ggaacaagaccagaggaua

SEQ ID NO: 792028 - RNA, 19 nt, Homo sapiens
  misc_RNA (1)...(19): siRNA sense strand
gcagcagauugaagaacua

SEQ ID NO: 792029 - RNA, 19 nt, Homo sapiens
  misc_RNA (1)...(19): siRNA sense strand
gagcagaagccaagaagug

SEQ ID NO: 792030 - RNA, 19 nt, Homo sapiens
  misc_RNA (1)...(19): siRNA sense strand
gagaugcuguugauguguu

SEQ ID NO: 792031 - RNA, 19 nt, Homo sapiens
  misc_RNA (1)...(19): siRNA sense strand
caccuggacuucaacauga

SEQ ID NO: 792032 - RNA, 19 nt, Homo sapiens
  misc_RNA (1)...(19): siRNA sense strand
gcagauugaagaacuagaa

SEQ ID NO: 792033 - RNA, 19 nt, Homo sapiens
  misc_RNA (1)...(19): siRNA sense strand
acaacaggcuucaguuuag

SEQ ID NO: 792034 - RNA, 19 nt, Homo sapiens
  misc_RNA (1)...(19): siRNA sense strand
gaagacaccaccuggacuu

SEQ ID NO: 792035 - RNA, 19 nt, Homo sapiens
  misc_RNA (1)...(19): siRNA sense strand
gcugaaauagcuuuaagaa

SEQ ID NO: 792036 - RNA, 19 nt, Homo sapiens
  misc_RNA (1)...(19): siRNA sense strand
caucaggacuuggacagaa

SEQ ID NO: 792037 - RNA, 19 nt, Homo sapiens
  misc_RNA (1)...(19): siRNA sense strand
gggagaugcuguugaugug

SEQ ID NO: 792038 - RNA, 19 nt, Homo sapiens
  misc_RNA (1)...(19): siRNA sense strand
gcagaacacacccagaguu

SEQ ID NO: 792039 - RNA, 19 nt, Homo sapiens
  misc_RNA (1)...(19): siRNA sense strand
uacaacaggcuucaguuua

SEQ ID NO: 792040 - RNA, 19 nt, Homo sapiens
  misc_RNA (1)...(19): siRNA sense strand
gcacaacuucagucuauuc

SEQ ID NO: 792041 - RNA, 19 nt, Homo sapiens
  misc_RNA (1)...(19): siRNA sense strand
ugaaggccuuggugguaua

SEQ ID NO: 792042 - RNA, 19 nt, Homo sapiens
  misc_RNA (1)...(19): siRNA sense strand
gaacuacagcagcuacuuc

SEQ ID NO: 792043 - RNA, 19 nt, Homo sapiens
  misc_RNA (1)...(19): siRNA sense strand
gcaacuacaucugcuccuu

SEQ ID NO: 792044 - RNA, 19 nt, Homo sapiens
  misc_RNA (1)...(19): siRNA sense strand
aggaacaaauacaggaaua

SEQ ID NO: 792045 - RNA, 19 nt, Homo sapiens
  misc_RNA (1)...(19): siRNA sense strand
gaacacacccagaguuacu

SEQ ID NO: 792046 - RNA, 19 nt, Homo sapiens
  misc_RNA (1)...(19): siRNA sense strand
gaacgggagcgucuagcaa

SEQ ID NO: 792047 - RNA, 19 nt, Homo sapiens
  misc_RNA (1)...(19): siRNA sense strand
ggaaaucuuggaaguacuu

SEQ ID NO: 792048 - RNA, 19 nt, Homo sapiens
  misc_RNA (1)...(19): siRNA sense strand
ggacaacagccacaacuac

SEQ ID NO: 792049 - RNA, 19 nt, Homo sapiens
  misc_RNA (1)...(19): siRNA sense strand
aaucuugguucagcaauuu

SEQ ID NO: 792050 - RNA, 19 nt, Homo sapiens
  misc_RNA (1)...(19): siRNA sense strand
ccauuugcucuaccuauua

SEQ ID NO: 792051 - RNA, 19 nt, Homo sapiens
  misc_RNA (1)...(19): siRNA sense strand
gucaauggcuaugcagaaa

SEQ ID NO: 792052 - RNA, 19 nt, Homo sapiens
  misc_RNA (1)...(19): siRNA sense strand
agguacagcuucagcagua

SEQ ID NO: 792053 - RNA, 19 nt, Homo sapiens
  misc_RNA (1)...(19): siRNA sense strand
gaagauauuaaagcucuga

SEQ ID NO: 792054 - RNA, 19 nt, Homo sapiens
  misc_RNA (1)...(19): siRNA sense strand
ggacuuggacagaaugcuu

SEQ ID NO: 792055 - RNA, 19 nt, Homo sapiens
  misc_RNA (1)...(19): siRNA sense strand
ugaaggagcagaaacaagu

SEQ ID NO: 792056 - RNA, 19 nt, Homo sapiens
  misc_RNA (1)...(19): siRNA sense strand
caagaccagaggauaguaa

SEQ ID NO: 792057 - RNA, 19 nt, Homo sapiens
  misc_RNA (1)...(19): siRNA sense strand
gaaggagcagaaacaaguu

SEQ ID NO: 792058 - RNA, 19 nt, Homo sapiens
  misc_RNA (1)...(19): siRNA sense strand
caacuauaacuacaggauu

SEQ ID NO: 792059 - RNA, 19 nt, Homo sapiens
  misc_RNA (1)...(19): siRNA sense strand
gaaacaaggcgagcagaag

SEQ ID NO: 792060 - RNA, 19 nt, Homo sapiens
  misc_RNA (1)...(19): siRNA sense strand
gacaccaccuggacuucaa

SEQ ID NO: 792061 - RNA, 19 nt, Homo sapiens
  misc_RNA (1)...(19): siRNA sense strand
cuacaacaggcuucaguuu

SEQ ID NO: 792062 - RNA, 19 nt, Homo sapiens
  misc_RNA (1)...(19): siRNA sense strand
uaguaaagcucugaaggau

SEQ ID NO: 792063 - RNA, 19 nt, Homo sapiens
  misc_RNA (1)...(19): siRNA sense strand
cuacuggacccacuccuuu

SEQ ID NO: 792064 - RNA, 19 nt, Homo sapiens
  misc_RNA (1)...(19): siRNA sense strand
uccacaggauuuacucuaa

SEQ ID NO: 792065 - RNA, 19 nt, Homo sapiens
  misc_RNA (1)...(19): siRNA sense strand
aaaucuaccuccugucauc

SEQ ID NO: 792066 - RNA, 19 nt, Homo sapiens
  misc_RNA (1)...(19): siRNA sense strand
gaaaaucuaccuccuguca

SEQ ID NO: 792067 - RNA, 19 nt, Homo sapiens
  misc_RNA (1)...(19): siRNA sense strand
caucaacaggccucucuuu

SEQ ID NO: 792068 - RNA, 19 nt, Homo sapiens
  misc_RNA (1)...(19): siRNA sense strand
ggaggaacaaauacaggaa

SEQ ID NO: 792069 - RNA, 19 nt, Homo sapiens
  misc_RNA (1)...(19): siRNA sense strand
ugccauggcugcaacacuu

SEQ ID NO: 792070 - RNA, 19 nt, Homo sapiens
  misc_RNA (1)...(19): siRNA sense strand
auguaaagguucugaaaga

SEQ ID NO: 792071 - RNA, 19 nt, Homo sapiens
  misc_RNA (1)...(19): siRNA sense strand
ccacucaagcaaauaauuc

SEQ ID NO: 792072 - RNA, 19 nt, Homo sapiens
  misc_RNA (1)...(19): siRNA sense strand
acaggaacaucaggacuug

SEQ ID NO: 792073 - RNA, 19 nt, Homo sapiens
  misc_RNA (1)...(19): siRNA sense strand
gaacaguaccuuggcuaca

SEQ ID NO: 792074 - RNA, 19 nt, Homo sapiens
  misc_RNA (1)...(19): siRNA sense strand
acaaauacaggaauagcaa

SEQ ID NO: 792075 - RNA, 19 nt, Homo sapiens
  misc_RNA (1)...(19): siRNA sense strand
ccucaagauuugucaaugg

SEQ ID NO: 792076 - RNA, 19 nt, Homo sapiens
  misc_RNA (1)...(19): siRNA sense strand
gcaauuugagguacagcuu

SEQ ID NO: 792077 - RNA, 19 nt, Homo sapiens
  misc_RNA (1)...(19): siRNA sense strand
caguagcuccucagauaaa

SEQ ID NO: 792078 - RNA, 19 nt, Homo sapiens
  misc_RNA (1)...(19): siRNA sense strand
gaacgccagccacuacauc

SEQ ID NO: 792079 - RNA, 19 nt, Homo sapiens
  misc_RNA (1)...(19): siRNA sense strand
gaacaaauacaggaauagc

SEQ ID NO: 792080 - RNA, 19 nt, Homo sapiens
  misc_RNA (1)...(19): siRNA sense strand
gaaugcugaaauagcuuua

SEQ ID NO: 792081 - RNA, 19 nt, Homo sapiens
  misc_RNA (1)...(19): siRNA sense strand
agaaacacucucaacauug

SEQ ID NO: 792082 - RNA, 19 nt, Homo sapiens
  misc_RNA (1)...(19): siRNA sense strand
gccaauggaauacagagaa

SEQ ID NO: 792083 - RNA, 19 nt, Homo sapiens
  misc_RNA (1)...(19): siRNA sense strand
acucuaggaggaacaaaua

SEQ ID NO: 792084 - RNA, 19 nt, Homo sapiens
  misc_RNA (1)...(19): siRNA sense strand
ucaacaggccucucuuuag

SEQ ID NO: 792085 - RNA, 19 nt, Homo sapiens
  misc_RNA (1)...(19): siRNA sense strand
gacaacagccacaacuaca

SEQ ID NO: 792086 - RNA, 19 nt, Homo sapiens
  misc_RNA (1)...(19): siRNA sense strand
ggugguauagauuucagua

SEQ ID NO: 792087 - RNA, 19 nt, Homo sapiens
  misc_RNA (1)...(19): siRNA sense strand
cagaaugcuuuaggguuga

SEQ ID NO: 792088 - RNA, 19 nt, Homo sapiens
  misc_RNA (1)...(19): siRNA sense strand
acaggaauagcaacaacua

SEQ ID NO: 792089 - RNA, 19 nt, Homo sapiens
  misc_RNA (1)...(19): siRNA sense strand
gcuuuaggguugacuuugg

SEQ ID NO: 792090 - RNA, 19 nt, Homo sapiens
  misc_RNA (1)...(19): siRNA sense strand
gcuagcggucugacucuuu

SEQ ID NO: 792091 - RNA, 19 nt, Homo sapiens
  misc_RNA (1)...(19): siRNA sense strand
gggacaacagccacaacua

SEQ ID NO: 792092 - RNA, 19 nt, Homo sapiens
  misc_RNA (1)...(19): siRNA sense strand
gccacuggguucacucuag

SEQ ID NO: 792093 - RNA, 19 nt, Homo sapiens
  misc_RNA (1)...(19): siRNA sense strand
ggcagcagauugaagaacu

SEQ ID NO: 792094 - RNA, 19 nt, Homo sapiens
  misc_RNA (1)...(19): siRNA sense strand
ccaccuggacuucaacaug

SEQ ID NO: 792095 - RNA, 19 nt, Homo sapiens
  misc_RNA (1)...(19): siRNA sense strand
caacaggcuucaguuuagg

SEQ ID NO: 792096 - RNA, 19 nt, Homo sapiens
  misc_RNA (1)...(19): siRNA sense strand
ggguugacuuugggaacua

SEQ ID NO: 792097 - RNA, 19 nt, Homo sapiens
  misc_RNA (1)...(19): siRNA sense strand
cagcaucugccacaccauu

SEQ ID NO: 792098 - RNA, 19 nt, Homo sapiens
  misc_RNA (1)...(19): siRNA sense strand
caacuacaacugcaucaac

SEQ ID NO: 792099 - RNA, 19 nt, Homo sapiens
  misc_RNA (1)...(19): siRNA sense strand
ugaaacaaggcgagcagaa

SEQ ID NO: 792100 - RNA, 19 nt, Homo sapiens
  misc_RNA (1)...(19): siRNA sense strand
gguauagauuucaguagcu

SEQ ID NO: 792101 - RNA, 19 nt, Homo sapiens
  misc_RNA (1)...(19): siRNA sense strand
aaugaaggccuugguggua

SEQ ID NO: 792102 - RNA, 19 nt, Homo sapiens
  misc_RNA (1)...(19): siRNA sense strand
guacaaacacaggaacauc

SEQ ID NO: 792103 - RNA, 19 nt, Homo sapiens
  misc_RNA (1)...(19): siRNA sense strand
gguuugggagguucacuuu

SEQ ID NO: 792104 - RNA, 19 nt, Homo sapiens
  misc_RNA (1)...(19): siRNA sense strand
uauaaccccucaagauuug

SEQ ID NO: 792105 - RNA, 19 nt, Homo sapiens
  misc_RNA (1)...(19): siRNA sense strand
cauauaaccccucaagauu

SEQ ID NO: 792106 - RNA, 19 nt, Homo sapiens
  misc_RNA (1)...(19): siRNA sense strand
gcuuuaagaacccagaaga

SEQ ID NO: 792107 - RNA, 19 nt, Homo sapiens
  misc_RNA (1)...(19): siRNA sense strand
gaggauaguaaagcucuga

SEQ ID NO: 792108 - RNA, 19 nt, Homo sapiens
  misc_RNA (1)...(19): siRNA sense strand
gccacuacaucugcagcua

SEQ ID NO: 792109 - RNA, 19 nt, Homo sapiens
  misc_RNA (1)...(19): siRNA sense strand
ucaguagcuccucagauaa

SEQ ID NO: 792110 - RNA, 19 nt, Homo sapiens
  misc_RNA (1)...(19): siRNA sense strand
gaaacaaguucaagaagaa

SEQ ID NO: 792111 - RNA, 19 nt, Homo sapiens
  misc_RNA (1)...(19): siRNA sense strand
guaaagcucugaaggauga

SEQ ID NO: 792112 - RNA, 19 nt, Homo sapiens
  misc_RNA (1)...(19): siRNA sense strand
guugaagaaugcugaaaua

SEQ ID NO: 792113 - RNA, 19 nt, Homo sapiens
  misc_RNA (1)...(19): siRNA sense strand
gaagaaugcugaaauagcu

SEQ ID NO: 792114 - RNA, 19 nt, Homo sapiens
  misc_RNA (1)...(19): siRNA sense strand
caacuucagucuauucaug

SEQ ID NO: 792115 - RNA, 19 nt, Homo sapiens
  misc_RNA (1)...(19): siRNA sense strand
caauaaaccugcagcaucu

SEQ ID NO: 792116 - RNA, 19 nt, Homo sapiens
  misc_RNA (1)...(19): siRNA sense strand
ugaagcagcuccugucguu

SEQ ID NO: 792117 - RNA, 19 nt, Homo sapiens
  misc_RNA (1)...(19): siRNA sense strand
gcagaaacaaguucaagaa

SEQ ID NO: 792118 - RNA, 19 nt, Homo sapiens
  misc_RNA (1)...(19): siRNA sense strand
gaacaagaccagaggauag

SEQ ID NO: 792119 - RNA, 19 nt, Homo sapiens
  misc_RNA (1)...(19): siRNA sense strand
caacaggccucucuuuagg

SEQ ID NO: 792120 - RNA, 19 nt, Homo sapiens
  misc_RNA (1)...(19): siRNA sense strand
agaaacaaguucaagaaga

SEQ ID NO: 792121 - RNA, 19 nt, Homo sapiens
  misc_RNA (1)...(19): siRNA sense strand
gcucaggaguugaagaaug

SEQ ID NO: 792122 - RNA, 19 nt, Homo sapiens
  misc_RNA (1)...(19): siRNA sense strand
uucaguagcuccucagaua

SEQ ID NO: 792123 - RNA, 19 nt, Homo sapiens
  misc_RNA (1)...(19): siRNA sense strand
cggcacaacuucagucuau

SEQ ID NO: 792124 - RNA, 19 nt, Homo sapiens
  misc_RNA (1)...(19): siRNA sense strand
gaaucuugguucagcaauu

SEQ ID NO: 792125 - RNA, 19 nt, Homo sapiens
  misc_RNA (1)...(19): siRNA sense strand
ccaauggaauacagagaaa

SEQ ID NO: 792126 - RNA, 19 nt, Homo sapiens
  misc_RNA (1)...(19): siRNA sense strand
cagaacacacccagaguua

SEQ ID NO: 792127 - RNA, 19 nt, Homo sapiens
  misc_RNA (1)...(19): siRNA sense strand
ggaacaagaccagaggaua

SEQ ID NO: 792128 - RNA, 19 nt, Homo sapiens
  misc_RNA (1)...(19): siRNA sense strand
gcagcagauugaagaacua

SEQ ID NO: 792129 - RNA, 19 nt, Homo sapiens
  misc_RNA (1)...(19): siRNA sense strand
gagcagaagccaagaagug

SEQ ID NO: 792130 - RNA, 19 nt, Homo sapiens
  misc_RNA (1)...(19): siRNA sense strand
gagaugcuguugauguguu

SEQ ID NO: 792131 - RNA, 19 nt, Homo sapiens
  misc_RNA (1)...(19): siRNA sense strand
caccuggacuucaacauga

SEQ ID NO: 792132 - RNA, 19 nt, Homo sapiens
  misc_RNA (1)...(19): siRNA sense strand
gcagauugaagaacuagaa

SEQ ID NO: 792133 - RNA, 19 nt, Homo sapiens
  misc_RNA (1)...(19): siRNA sense strand
acaacaggcuucaguuuag

SEQ ID NO: 792134 - RNA, 19 nt, Homo sapiens
  misc_RNA (1)...(19): siRNA sense strand
gaagacaccaccuggacuu

SEQ ID NO: 792135 - RNA, 19 nt, Homo sapiens
  misc_RNA (1)...(19): siRNA sense strand
gcugaaauagcuuuaagaa

SEQ ID NO: 792136 - RNA, 19 nt, Homo sapiens
  misc_RNA (1)...(19): siRNA sense strand
caucaggacuuggacagaa

SEQ ID NO: 792137 - RNA, 19 nt, Homo sapiens
  misc_RNA (1)...(19): siRNA sense strand
gggagaugcuguugaugug

SEQ ID NO: 792138 - RNA, 19 nt, Homo sapiens
  misc_RNA (1)...(19): siRNA sense strand
gcagaacacacccagaguu

SEQ ID NO: 792139 - RNA, 19 nt, Homo sapiens
  misc_RNA (1)...(19): siRNA sense strand
uacaacaggcuucaguuua

SEQ ID NO: 792140 - RNA, 19 nt, Homo sapiens
  misc_RNA (1)...(19): siRNA sense strand
gcacaacuucagucuauuc

SEQ ID NO: 792141 - RNA, 19 nt, Homo sapiens
  misc_RNA (1)...(19): siRNA sense strand
ugaaggccuuggugguaua

SEQ ID NO: 792142 - RNA, 19 nt, Homo sapiens
  misc_RNA (1)...(19): siRNA sense strand
gaacuacagcagcuacuuc

SEQ ID NO: 792143 - RNA, 19 nt, Homo sapiens
  misc_RNA (1)...(19): siRNA sense strand
gcaacuacaucugcuccuu

SEQ ID NO: 792144 - RNA, 19 nt, Homo sapiens
  misc_RNA (1)...(19): siRNA sense strand
aggaacaaauacaggaaua

SEQ ID NO: 792145 - RNA, 19 nt, Homo sapiens
  misc_RNA (1)...(19): siRNA sense strand
gaacacacccagaguuacu

SEQ ID NO: 792146 - RNA, 19 nt, Homo sapiens
  misc_RNA (1)...(19): siRNA sense strand
gaacgggagcgucuagcaa

SEQ ID NO: 792147 - RNA, 19 nt, Homo sapiens
  misc_RNA (1)...(19): siRNA sense strand
ggaaaucuuggaaguacuu

SEQ ID NO: 792148 - RNA, 19 nt, Homo sapiens
  misc_RNA (1)...(19): siRNA sense strand
ggacaacagccacaacuac

SEQ ID NO: 792149 - RNA, 19 nt, Homo sapiens
  misc_RNA (1)...(19): siRNA sense strand
aaucuugguucagcaauuu

SEQ ID NO: 792150 - RNA, 19 nt, Homo sapiens
  misc_RNA (1)...(19): siRNA sense strand
ccauuugcucuaccuauua

SEQ ID NO: 792151 - RNA, 19 nt, Homo sapiens
  misc_RNA (1)...(19): siRNA sense strand
gucaauggcuaugcagaaa

SEQ ID NO: 792152 - RNA, 19 nt, Homo sapiens
  misc_RNA (1)...(19): siRNA sense strand
agguacagcuucagcagua

SEQ ID NO: 792153 - RNA, 19 nt, Homo sapiens
  misc_RNA (1)...(19): siRNA sense strand
gaagauauuaaagcucuga

SEQ ID NO: 792154 - RNA, 19 nt, Homo sapiens
  misc_RNA (1)...(19): siRNA sense strand
ggacuuggacagaaugcuu

SEQ ID NO: 792155 - RNA, 19 nt, Homo sapiens
  misc_RNA (1)...(19): siRNA sense strand
ugaaggagcagaaacaagu

SEQ ID NO: 792156 - RNA, 19 nt, Homo sapiens
  misc_RNA (1)...(19): siRNA sense strand
caagaccagaggauaguaa

SEQ ID NO: 792157 - RNA, 19 nt, Homo sapiens
  misc_RNA (1)...(19): siRNA sense strand
gaaggagcagaaacaaguu

SEQ ID NO: 792158 - RNA, 19 nt, Homo sapiens
  misc_RNA (1)...(19): siRNA sense strand
caacuauaacuacaggauu

SEQ ID NO: 792159 - RNA, 19 nt, Homo sapiens
  misc_RNA (1)...(19): siRNA sense strand
gaaacaaggcgagcagaag

SEQ ID NO: 792160 - RNA, 19 nt, Homo sapiens
  misc_RNA (1)...(19): siRNA sense strand
gacaccaccuggacuucaa

SEQ ID NO: 792161 - RNA, 19 nt, Homo sapiens
  misc_RNA (1)...(19): siRNA sense strand
cuacaacaggcuucaguuu

SEQ ID NO: 792162 - RNA, 19 nt, Homo sapiens
  misc_RNA (1)...(19): siRNA sense strand
uaguaaagcucugaaggau

SEQ ID NO: 792163 - RNA, 19 nt, Homo sapiens
  misc_RNA (1)...(19): siRNA sense strand
cuacuggacccacuccuuu

SEQ ID NO: 792164 - RNA, 19 nt, Homo sapiens
  misc_RNA (1)...(19): siRNA sense strand
uccacaggauuuacucuaa

SEQ ID NO: 792165 - RNA, 19 nt, Homo sapiens
  misc_RNA (1)...(19): siRNA sense strand
aaaucuaccuccugucauc

SEQ ID NO: 792166 - RNA, 19 nt, Homo sapiens
  misc_RNA (1)...(19): siRNA sense strand
gaaaaucuaccuccuguca

SEQ ID NO: 792167 - RNA, 19 nt, Homo sapiens
  misc_RNA (1)...(19): siRNA sense strand
caucaacaggccucucuuu

SEQ ID NO: 792168 - RNA, 19 nt, Homo sapiens
  misc_RNA (1)...(19): siRNA sense strand
ggaggaacaaauacaggaa

SEQ ID NO: 792169 - RNA, 19 nt, Homo sapiens
  misc_RNA (1)...(19): siRNA sense strand
ugccauggcugcaacacuu

SEQ ID NO: 792170 - RNA, 19 nt, Homo sapiens
  misc_RNA (1)...(19): siRNA sense strand
auguaaagguucugaaaga

SEQ ID NO: 792171 - RNA, 19 nt, Homo sapiens
  misc_RNA (1)...(19): siRNA sense strand
ccacucaagcaaauaauuc

SEQ ID NO: 792172 - RNA, 19 nt, Homo sapiens
  misc_RNA (1)...(19): siRNA sense strand
acaggaacaucaggacuug

SEQ ID NO: 792173 - RNA, 19 nt, Homo sapiens
  misc_RNA (1)...(19): siRNA sense strand
gaacaguaccuuggcuaca

SEQ ID NO: 792174 - RNA, 19 nt, Homo sapiens
  misc_RNA (1)...(19): siRNA sense strand
acaaauacaggaauagcaa

SEQ ID NO: 792175 - RNA, 19 nt, Homo sapiens
  misc_RNA (1)...(19): siRNA sense strand
ccucaagauuugucaaugg

SEQ ID NO: 792176 - RNA, 19 nt, Homo sapiens
  misc_RNA (1)...(19): siRNA sense strand
gcaauuugagguacagcuu

SEQ ID NO: 792177 - RNA, 19 nt, Homo sapiens
  misc_RNA (1)...(19): siRNA sense strand
caguagcuccucagauaaa

SEQ ID NO: 792178 - RNA, 19 nt, Homo sapiens
  misc_RNA (1)...(19): siRNA sense strand
gaacgccagccacuacauc

SEQ ID NO: 792179 - RNA, 19 nt, Homo sapiens
  misc_RNA (1)...(19): siRNA sense strand
gaacaaauacaggaauagc

SEQ ID NO: 792180 - RNA, 19 nt, Homo sapiens
  misc_RNA (1)...(19): siRNA sense strand
gaaugcugaaauagcuuua

SEQ ID NO: 792181 - RNA, 19 nt, Homo sapiens
  misc_RNA (1)...(19): siRNA sense strand
agaaacacucucaacauug

SEQ ID NO: 792182 - RNA, 19 nt, Homo sapiens
  misc_RNA (1)...(19): siRNA sense strand
gccaauggaauacagagaa

SEQ ID NO: 792183 - RNA, 19 nt, Homo sapiens
  misc_RNA (1)...(19): siRNA sense strand
acucuaggaggaacaaaua

SEQ ID NO: 792184 - RNA, 19 nt, Homo sapiens
  misc_RNA (1)...(19): siRNA sense strand
ucaacaggccucucuuuag

SEQ ID NO: 792185 - RNA, 19 nt, Homo sapiens
  misc_RNA (1)...(19): siRNA sense strand
gacaacagccacaacuaca

SEQ ID NO: 792186 - RNA, 19 nt, Homo sapiens
  misc_RNA (1)...(19): siRNA sense strand
ggugguauagauuucagua

SEQ ID NO: 792187 - RNA, 19 nt, Homo sapiens
  misc_RNA (1)...(19): siRNA sense strand
cagaaugcuuuaggguuga

SEQ ID NO: 792188 - RNA, 19 nt, Homo sapiens
  misc_RNA (1)...(19): siRNA sense strand
acaggaauagcaacaacua

SEQ ID NO: 792189 - RNA, 19 nt, Homo sapiens
  misc_RNA (1)...(19): siRNA sense strand
gcuuuaggguugacuuugg

SEQ ID NO: 792190 - RNA, 19 nt, Homo sapiens
  misc_RNA (1)...(19): siRNA sense strand
gcuagcggucugacucuuu

SEQ ID NO: 792191 - RNA, 19 nt, Homo sapiens
  misc_RNA (1)...(19): siRNA sense strand
gggacaacagccacaacua

SEQ ID NO: 792192 - RNA, 19 nt, Homo sapiens
  misc_RNA (1)...(19): siRNA sense strand
gccacuggguucacucuag

SEQ ID NO: 792193 - RNA, 19 nt, Homo sapiens
  misc_RNA (1)...(19): siRNA sense strand
ggcagcagauugaagaacu

SEQ ID NO: 792194 - RNA, 19 nt, Homo sapiens
  misc_RNA (1)...(19): siRNA sense strand
ccaccuggacuucaacaug

SEQ ID NO: 792195 - RNA, 19 nt, Homo sapiens
  misc_RNA (1)...(19): siRNA sense strand
caacaggcuucaguuuagg

SEQ ID NO: 792196 - RNA, 19 nt, Homo sapiens
  misc_RNA (1)...(19): siRNA sense strand
ggguugacuuugggaacua

SEQ ID NO: 792197 - RNA, 19 nt, Homo sapiens
  misc_RNA (1)...(19): siRNA sense strand
cagcaucugccacaccauu

SEQ ID NO: 792198 - RNA, 19 nt, Homo sapiens
  misc_RNA (1)...(19): siRNA sense strand
caacuacaacugcaucaac

SEQ ID NO: 792199 - RNA, 19 nt, Homo sapiens
  misc_RNA (1)...(19): siRNA sense strand
ugaaacaaggcgagcagaa

SEQ ID NO: 792200 - RNA, 19 nt, Homo sapiens
  misc_RNA (1)...(19): siRNA sense strand
gguauagauuucaguagcu

SEQ ID NO: 792201 - RNA, 19 nt, Homo sapiens
  misc_RNA (1)...(19): siRNA sense strand
aaugaaggccuugguggua

SEQ ID NO: 792202 - RNA, 19 nt, Homo sapiens
  misc_RNA (1)...(19): siRNA sense strand
guacaaacacaggaacauc

SEQ ID NO: 792203 - RNA, 19 nt, Homo sapiens
  misc_RNA (1)...(19): siRNA sense strand
gguuugggagguucacuuu

SEQ ID NO: 792204 - RNA, 19 nt, Homo sapiens
  misc_RNA (1)...(19): siRNA sense strand
uauaaccccucaagauuug

SEQ ID NO: 792205 - RNA, 19 nt, Homo sapiens
  misc_RNA (1)...(19): siRNA sense strand
cauauaaccccucaagauu

SEQ ID NO: 792206 - RNA, 19 nt, Homo sapiens
  misc_RNA (1)...(19): siRNA sense strand
gcuuuaagaacccagaaga

SEQ ID NO: 792207 - RNA, 19 nt, Homo sapiens
  misc_RNA (1)...(19): siRNA sense strand
gaggauaguaaagcucuga

SEQ ID NO: 792208 - RNA, 19 nt, Homo sapiens
  misc_RNA (1)...(19): siRNA sense strand
gccacuacaucugcagcua

SEQ ID NO: 792209 - RNA, 19 nt, Homo sapiens
  misc_RNA (1)...(19): siRNA sense strand
ucaguagcuccucagauaa

SEQ ID NO: 792210 - RNA, 19 nt, Homo sapiens
  misc_RNA (1)...(19): siRNA sense strand
guuuguagcugacagauua

SEQ ID NO: 792211 - RNA, 19 nt, Homo sapiens
  misc_RNA (1)...(19): siRNA sense strand
caucagagaucccaagaaa

SEQ ID NO: 792212 - RNA, 19 nt, Homo sapiens
  misc_RNA (1)...(19): siRNA sense strand
gaacuuggauucucaaagg

SEQ ID NO: 792213 - RNA, 19 nt, Homo sapiens
  misc_RNA (1)...(19): siRNA sense strand
gauagacacuuacaucaga

SEQ ID NO: 792214 - RNA, 19 nt, Homo sapiens
  misc_RNA (1)...(19): siRNA sense strand
gaaaccaugcccuauguua

SEQ ID NO: 792215 - RNA, 19 nt, Homo sapiens
  misc_RNA (1)...(19): siRNA sense strand
cuucaucucucacaucuua

SEQ ID NO: 792216 - RNA, 19 nt, Homo sapiens
  misc_RNA (1)...(19): siRNA sense strand
acucagagauguacaguuu

SEQ ID NO: 792217 - RNA, 19 nt, Homo sapiens
  misc_RNA (1)...(19): siRNA sense strand
cagcagagaugaaggacuu

SEQ ID NO: 792218 - RNA, 19 nt, Homo sapiens
  misc_RNA (1)...(19): siRNA sense strand
gugauggaauuguaaauga

SEQ ID NO: 792219 - RNA, 19 nt, Homo sapiens
  misc_RNA (1)...(19): siRNA sense strand
cagaagaggucgacuuauc

SEQ ID NO: 792220 - RNA, 19 nt, Homo sapiens
  misc_RNA (1)...(19): siRNA sense strand
gcuauauucuggcuaaaga

SEQ ID NO: 792221 - RNA, 19 nt, Homo sapiens
  misc_RNA (1)...(19): siRNA sense strand
ucagggagaucauuguuga

SEQ ID NO: 792222 - RNA, 19 nt, Homo sapiens
  misc_RNA (1)...(19): siRNA sense strand
gauguacaguuugcugaua

SEQ ID NO: 792223 - RNA, 19 nt, Homo sapiens
  misc_RNA (1)...(19): siRNA sense strand
acagaagccuugccaguug

SEQ ID NO: 792224 - RNA, 19 nt, Homo sapiens
  misc_RNA (1)...(19): siRNA sense strand
ugacuuugcuugccugaug

SEQ ID NO: 792225 - RNA, 19 nt, Homo sapiens
  misc_RNA (1)...(19): siRNA sense strand
gcugcuauauucuggcuaa

SEQ ID NO: 792226 - RNA, 19 nt, Homo sapiens
  misc_RNA (1)...(19): siRNA sense strand
ggccuuugcugcuguagaa

SEQ ID NO: 792227 - RNA, 19 nt, Homo sapiens
  misc_RNA (1)...(19): siRNA sense strand
gaggcucgcuguuucuaug

SEQ ID NO: 792228 - RNA, 19 nt, Homo sapiens
  misc_RNA (1)...(19): siRNA sense strand
cagauaacgucuucaccuu

SEQ ID NO: 792229 - RNA, 19 nt, Homo sapiens
  misc_RNA (1)...(19): siRNA sense strand
gaagaggucgacuuaucaa

SEQ ID NO: 792230 - RNA, 19 nt, Homo sapiens
  misc_RNA (1)...(19): siRNA sense strand
uaaagcagaugagaaguac

SEQ ID NO: 792231 - RNA, 19 nt, Homo sapiens
  misc_RNA (1)...(19): siRNA sense strand
caucgagaauguucacuca

SEQ ID NO: 792232 - RNA, 19 nt, Homo sapiens
  misc_RNA (1)...(19): siRNA sense strand
ccaguuggccucauuggaa

SEQ ID NO: 792233 - RNA, 19 nt, Homo sapiens
  misc_RNA (1)...(19): siRNA sense strand
uggcagaaaccacagauaa

SEQ ID NO: 792234 - RNA, 19 nt, Homo sapiens
  misc_RNA (1)...(19): siRNA sense strand
ucgagaauguucacucaga

SEQ ID NO: 792235 - RNA, 19 nt, Homo sapiens
  misc_RNA (1)...(19): siRNA sense strand
uuaaagcagaugagaagua

SEQ ID NO: 792236 - RNA, 19 nt, Homo sapiens
  misc_RNA (1)...(19): siRNA sense strand
gaaagggucagggagauca

SEQ ID NO: 792237 - RNA, 19 nt, Homo sapiens
  misc_RNA (1)...(19): siRNA sense strand
gaggucgacuuaucaaagg

SEQ ID NO: 792238 - RNA, 19 nt, Homo sapiens
  misc_RNA (1)...(19): siRNA sense strand
aaaccaugcccuauguuaa

SEQ ID NO: 792239 - RNA, 19 nt, Homo sapiens
  misc_RNA (1)...(19): siRNA sense strand
gauugggccuugcgaugga

SEQ ID NO: 792240 - RNA, 19 nt, Homo sapiens
  misc_RNA (1)...(19): siRNA sense strand
ccugauguuccaauacuua

SEQ ID NO: 792241 - RNA, 19 nt, Homo sapiens
  misc_RNA (1)...(19): siRNA sense strand
ugaugaaacaguacauuga

SEQ ID NO: 792242 - RNA, 19 nt, Homo sapiens
  misc_RNA (1)...(19): siRNA sense strand
gcauuuugaugaaacagua

SEQ ID NO: 792243 - RNA, 19 nt, Homo sapiens
  misc_RNA (1)...(19): siRNA sense strand
gcugauagacacuuacauc

SEQ ID NO: 792244 - RNA, 19 nt, Homo sapiens
  misc_RNA (1)...(19): siRNA sense strand
ugaaacaguacauugaguu

SEQ ID NO: 792245 - RNA, 19 nt, Homo sapiens
  misc_RNA (1)...(19): siRNA sense strand
cagauuacuuguggaacuu

SEQ ID NO: 792246 - RNA, 19 nt, Homo sapiens
  misc_RNA (1)...(19): siRNA sense strand
aacaguacauugaguuugu

SEQ ID NO: 792247 - RNA, 19 nt, Homo sapiens
  misc_RNA (1)...(19): siRNA sense strand
ugacagauuacuuguggaa

SEQ ID NO: 792248 - RNA, 19 nt, Homo sapiens
  misc_RNA (1)...(19): siRNA sense strand
uucuauggcuuucaaauuc

SEQ ID NO: 792249 - RNA, 19 nt, Homo sapiens
  misc_RNA (1)...(19): siRNA sense strand
guagcugacagauuacuug

SEQ ID NO: 792250 - RNA, 19 nt, Homo sapiens
  misc_RNA (1)...(19): siRNA sense strand
ucagagauguacaguuugc

SEQ ID NO: 792251 - RNA, 19 nt, Homo sapiens
  misc_RNA (1)...(19): siRNA sense strand
gagaauguucacucagaga

SEQ ID NO: 792252 - RNA, 19 nt, Homo sapiens
  misc_RNA (1)...(19): siRNA sense strand
uugaaaccaugcccuaugu

SEQ ID NO: 792253 - RNA, 19 nt, Homo sapiens
  misc_RNA (1)...(19): siRNA sense strand
agccagugauggaauugua

SEQ ID NO: 792254 - RNA, 19 nt, Homo sapiens
  misc_RNA (1)...(19): siRNA sense strand
aaccacagauaacgucuuc

SEQ ID NO: 792255 - RNA, 19 nt, Homo sapiens
  misc_RNA (1)...(19): siRNA sense strand
uaucagcguuuugcaguua

SEQ ID NO: 792256 - RNA, 19 nt, Homo sapiens
  misc_RNA (1)...(19): siRNA sense strand
gaugaaacaguacauugag

SEQ ID NO: 792257 - RNA, 19 nt, Homo sapiens
  misc_RNA (1)...(19): siRNA sense strand
gaauguucacucagagaug

SEQ ID NO: 792258 - RNA, 19 nt, Homo sapiens
  misc_RNA (1)...(19): siRNA sense strand
agaagaggucgacuuauca

SEQ ID NO: 792259 - RNA, 19 nt, Homo sapiens
  misc_RNA (1)...(19): siRNA sense strand
ggucagggagaucauuguu

SEQ ID NO: 792260 - RNA, 19 nt, Homo sapiens
  misc_RNA (1)...(19): siRNA sense strand
guuugcugauagacacuua

SEQ ID NO: 792261 - RNA, 19 nt, Homo sapiens
  misc_RNA (1)...(19): siRNA sense strand
gcagaaaccacagauaacg

SEQ ID NO: 792262 - RNA, 19 nt, Homo sapiens
  misc_RNA (1)...(19): siRNA sense strand
cuuggauucucaaagguuu

SEQ ID NO: 792263 - RNA, 19 nt, Homo sapiens
  misc_RNA (1)...(19): siRNA sense strand
agcagaagaggucgacuua

SEQ ID NO: 792264 - RNA, 19 nt, Homo sapiens
  misc_RNA (1)...(19): siRNA sense strand
caugcccuauguuaagaaa

SEQ ID NO: 792265 - RNA, 19 nt, Homo sapiens
  misc_RNA (1)...(19): siRNA sense strand
caccuuggaugcagauuuu

SEQ ID NO: 792266 - RNA, 19 nt, Homo sapiens
  misc_RNA (1)...(19): siRNA sense strand
caguuggccucauuggaau

SEQ ID NO: 792267 - RNA, 19 nt, Homo sapiens
  misc_RNA (1)...(19): siRNA sense strand
acagauuacuuguggaacu

SEQ ID NO: 792268 - RNA, 19 nt, Homo sapiens
  misc_RNA (1)...(19): siRNA sense strand
uccagaggcucgcuguuuc

SEQ ID NO: 792269 - RNA, 19 nt, Homo sapiens
  misc_RNA (1)...(19): siRNA sense strand
guacuucaucucucacauc

SEQ ID NO: 792270 - RNA, 19 nt, Homo sapiens
  misc_RNA (1)...(19): siRNA sense strand
aagcagaugagaaguacuu

SEQ ID NO: 792271 - RNA, 19 nt, Homo sapiens
  misc_RNA (1)...(19): siRNA sense strand
gcuuucaaauucucaucga

SEQ ID NO: 792272 - RNA, 19 nt, Homo sapiens
  misc_RNA (1)...(19): siRNA sense strand
ccagugauggaauuguaaa

SEQ ID NO: 792273 - RNA, 19 nt, Homo sapiens
  misc_RNA (1)...(19): siRNA sense strand
gcagaagaggucgacuuau

SEQ ID NO: 792274 - RNA, 19 nt, Homo sapiens
  misc_RNA (1)...(19): siRNA sense strand
uguggaacuuggauucuca

SEQ ID NO: 792275 - RNA, 19 nt, Homo sapiens
  misc_RNA (1)...(19): siRNA sense strand
aagaaagggucagggagau

SEQ ID NO: 792276 - RNA, 19 nt, Homo sapiens
  misc_RNA (1)...(19): siRNA sense strand
ggucuuaugccaggacuca

SEQ ID NO: 792277 - RNA, 19 nt, Homo sapiens
  misc_RNA (1)...(19): siRNA sense strand
cagcagaagaggucgacuu

SEQ ID NO: 792278 - RNA, 19 nt, Homo sapiens
  misc_RNA (1)...(19): siRNA sense strand
aauguucacucagagaugu

SEQ ID NO: 792279 - RNA, 19 nt, Homo sapiens
  misc_RNA (1)...(19): siRNA sense strand
ggaguuuucuucucaggau

SEQ ID NO: 792280 - RNA, 19 nt, Homo sapiens
  misc_RNA (1)...(19): siRNA sense strand
gauggauagcagauagaaa

SEQ ID NO: 792281 - RNA, 19 nt, Homo sapiens
  misc_RNA (1)...(19): siRNA sense strand
gguggccuuugcugcugua

SEQ ID NO: 792282 - RNA, 19 nt, Homo sapiens
  misc_RNA (1)...(19): siRNA sense strand
ucaccuuggaugcagauuu

SEQ ID NO: 792283 - RNA, 19 nt, Homo sapiens
  misc_RNA (1)...(19): siRNA sense strand
gccagugauggaauuguaa

SEQ ID NO: 792284 - RNA, 19 nt, Homo sapiens
  misc_RNA (1)...(19): siRNA sense strand
ggaacuuggauucucaaag

SEQ ID NO: 792285 - RNA, 19 nt, Homo sapiens
  misc_RNA (1)...(19): siRNA sense strand
uuucagaguaucagcguuu

SEQ ID NO: 792286 - RNA, 19 nt, Homo sapiens
  misc_RNA (1)...(19): siRNA sense strand
gacuuugcuugccugaugu

SEQ ID NO: 792287 - RNA, 19 nt, Homo sapiens
  misc_RNA (1)...(19): siRNA sense strand
uaguaaauaagccuucaga

SEQ ID NO: 792288 - RNA, 19 nt, Homo sapiens
  misc_RNA (1)...(19): siRNA sense strand
ucagagaucccaagaaaag

SEQ ID NO: 792289 - RNA, 19 nt, Homo sapiens
  misc_RNA (1)...(19): siRNA sense strand
aacagaagccuugccaguu

SEQ ID NO: 792290 - RNA, 19 nt, Homo sapiens
  misc_RNA (1)...(19): siRNA sense strand
gaacugcccugacagaugu

SEQ ID NO: 792291 - RNA, 19 nt, Homo sapiens
  misc_RNA (1)...(19): siRNA sense strand
ugacagauguauuucacua

SEQ ID NO: 792292 - RNA, 19 nt, Homo sapiens
  misc_RNA (1)...(19): siRNA sense strand
gugguuugcugaucucuua

SEQ ID NO: 792293 - RNA, 19 nt, Homo sapiens
  misc_RNA (1)...(19): siRNA sense strand
guaugcaugugaaagaaua

SEQ ID NO: 792294 - RNA, 19 nt, Homo sapiens
  misc_RNA (1)...(19): siRNA sense strand
ggugaucucucuggcuuua

SEQ ID NO: 792295 - RNA, 19 nt, Homo sapiens
  misc_RNA (1)...(19): siRNA sense strand
aaaucaggcucuucacaua

SEQ ID NO: 792296 - RNA, 19 nt, Homo sapiens
  misc_RNA (1)...(19): siRNA sense strand
gagggucucuccaccauau

SEQ ID NO: 792297 - RNA, 19 nt, Homo sapiens
  misc_RNA (1)...(19): siRNA sense strand
ggaggagucuuuccauuac

SEQ ID NO: 792298 - RNA, 19 nt, Homo sapiens
  misc_RNA (1)...(19): siRNA sense strand
gagguguucauuucuauua

SEQ ID NO: 792299 - RNA, 19 nt, Homo sapiens
  misc_RNA (1)...(19): siRNA sense strand
ccuaugaguuguucuggua

SEQ ID NO: 792300 - RNA, 19 nt, Homo sapiens
  misc_RNA (1)...(19): siRNA sense strand
ccagagguguucauuucua

SEQ ID NO: 792301 - RNA, 19 nt, Homo sapiens
  misc_RNA (1)...(19): siRNA sense strand
gaggaggagucuuuccauu

SEQ ID NO: 792302 - RNA, 19 nt, Homo sapiens
  misc_RNA (1)...(19): siRNA sense strand
ucaagcagauugccuacaa

SEQ ID NO: 792303 - RNA, 19 nt, Homo sapiens
  misc_RNA (1)...(19): siRNA sense strand
caacaucaccuucuguaga

SEQ ID NO: 792304 - RNA, 19 nt, Homo sapiens
  misc_RNA (1)...(19): siRNA sense strand
aaacacaaccacugaauug

SEQ ID NO: 792305 - RNA, 19 nt, Homo sapiens
  misc_RNA (1)...(19): siRNA sense strand
gcuuuagucuugaucauga

SEQ ID NO: 792306 - RNA, 19 nt, Homo sapiens
  misc_RNA (1)...(19): siRNA sense strand
ugagcaagguguauuucua

SEQ ID NO: 792307 - RNA, 19 nt, Homo sapiens
  misc_RNA (1)...(19): siRNA sense strand
ucucauggcugggaauaaa

SEQ ID NO: 792308 - RNA, 19 nt, Homo sapiens
  misc_RNA (1)...(19): siRNA sense strand
ccacaaacacaaccacuga

SEQ ID NO: 792309 - RNA, 19 nt, Homo sapiens
  misc_RNA (1)...(19): siRNA sense strand
cacaaccacugaauugcua

SEQ ID NO: 792310 - RNA, 19 nt, Homo sapiens
  misc_RNA (1)...(19): siRNA sense strand
ugacgugauuacaggcuua

SEQ ID NO: 792311 - RNA, 19 nt, Homo sapiens
  misc_RNA (1)...(19): siRNA sense strand
ucagacaggccuccuauga

SEQ ID NO: 792312 - RNA, 19 nt, Homo sapiens
  misc_RNA (1)...(19): siRNA sense strand
ggucuuguaugcaugugaa

SEQ ID NO: 792313 - RNA, 19 nt, Homo sapiens
  misc_RNA (1)...(19): siRNA sense strand
ugggauagcuguuaaugca

SEQ ID NO: 792314 - RNA, 19 nt, Homo sapiens
  misc_RNA (1)...(19): siRNA sense strand
acaaugaguucaagcagau

SEQ ID NO: 792315 - RNA, 19 nt, Homo sapiens
  misc_RNA (1)...(19): siRNA sense strand
agacaggccuccuaugagu

SEQ ID NO: 792316 - RNA, 19 nt, Homo sapiens
  misc_RNA (1)...(19): siRNA sense strand
caaacacaaccacugaauu

SEQ ID NO: 792317 - RNA, 19 nt, Homo sapiens
  misc_RNA (1)...(19): siRNA sense strand
ggaacugcccugacagaug

SEQ ID NO: 792318 - RNA, 19 nt, Homo sapiens
  misc_RNA (1)...(19): siRNA sense strand
gcacgagcauccgcacugu

SEQ ID NO: 792319 - RNA, 19 nt, Homo sapiens
  misc_RNA (1)...(19): siRNA sense strand
caaaagaugugccacuugu

SEQ ID NO: 792320 - RNA, 19 nt, Homo sapiens
  misc_RNA (1)...(19): siRNA sense strand
guucuucuguggaccuaaa

SEQ ID NO: 792321 - RNA, 19 nt, Homo sapiens
  misc_RNA (1)...(19): siRNA sense strand
cgaaaauacugacgugauu

SEQ ID NO: 792322 - RNA, 19 nt, Homo sapiens
  misc_RNA (1)...(19): siRNA sense strand
aggaggagucuuuccauua

SEQ ID NO: 792323 - RNA, 19 nt, Homo sapiens
  misc_RNA (1)...(19): siRNA sense strand
cagagguguucauuucuau

SEQ ID NO: 792324 - RNA, 19 nt, Homo sapiens
  misc_RNA (1)...(19): siRNA sense strand
guguauuucuacuggauuu

SEQ ID NO: 792325 - RNA, 19 nt, Homo sapiens
  misc_RNA (1)...(19): siRNA sense strand
ccucagauuucacaaacug

SEQ ID NO: 792326 - RNA, 19 nt, Homo sapiens
  misc_RNA (1)...(19): siRNA sense strand
gaggaggcaauuagacaaa

SEQ ID NO: 792327 - RNA, 19 nt, Homo sapiens
  misc_RNA (1)...(19): siRNA sense strand
cauaagaggaacaaguauu

SEQ ID NO: 792328 - RNA, 19 nt, Homo sapiens
  misc_RNA (1)...(19): siRNA sense strand
ucgcugcucuucugaaauc

SEQ ID NO: 792329 - RNA, 19 nt, Homo sapiens
  misc_RNA (1)...(19): siRNA sense strand
caacaaggagagcuucuag

SEQ ID NO: 792330 - RNA, 19 nt, Homo sapiens
  misc_RNA (1)...(19): siRNA sense strand
aaagaugugccacuuguau

SEQ ID NO: 792331 - RNA, 19 nt, Homo sapiens
  misc_RNA (1)...(19): siRNA sense strand
gaaaauacugacgugauua

SEQ ID NO: 792332 - RNA, 19 nt, Homo sapiens
  misc_RNA (1)...(19): siRNA sense strand
ggaggaggcaauuagacaa

SEQ ID NO: 792333 - RNA, 19 nt, Homo sapiens
  misc_RNA (1)...(19): siRNA sense strand
gcacaacaucaccuucugu

SEQ ID NO: 792334 - RNA, 19 nt, Homo sapiens
  misc_RNA (1)...(19): siRNA sense strand
ggacuucuggccgcacuuu

SEQ ID NO: 792335 - RNA, 19 nt, Homo sapiens
  misc_RNA (1)...(19): siRNA sense strand
gggucucuccaccauauua

SEQ ID NO: 792336 - RNA, 19 nt, Homo sapiens
  misc_RNA (1)...(19): siRNA sense strand
caucguggcgcauuucuuc

SEQ ID NO: 792337 - RNA, 19 nt, Homo sapiens
  misc_RNA (1)...(19): siRNA sense strand
gguguucauuucuauuaca

SEQ ID NO: 792338 - RNA, 19 nt, Homo sapiens
  misc_RNA (1)...(19): siRNA sense strand
gagcaagguguauuucuac

SEQ ID NO: 792339 - RNA, 19 nt, Homo sapiens
  misc_RNA (1)...(19): siRNA sense strand
cacaacaucaccuucugua

SEQ ID NO: 792340 - RNA, 19 nt, Homo sapiens
  misc_RNA (1)...(19): siRNA sense strand
gcagugcccagccauaucu

SEQ ID NO: 792341 - RNA, 19 nt, Homo sapiens
  misc_RNA (1)...(19): siRNA sense strand
ggcagacaguggcccaaug

SEQ ID NO: 792342 - RNA, 19 nt, Homo sapiens
  misc_RNA (1)...(19): siRNA sense strand
gaggagucuuuccauuaca

SEQ ID NO: 792343 - RNA, 19 nt, Homo sapiens
  misc_RNA (1)...(19): siRNA sense strand
uaacugcaugcuaauucua

SEQ ID NO: 792344 - RNA, 19 nt, Homo sapiens
  misc_RNA (1)...(19): siRNA sense strand
gcuuuacacugggacgaaa

SEQ ID NO: 792345 - RNA, 19 nt, Homo sapiens
  misc_RNA (1)...(19): siRNA sense strand
gcucuucugaaaucuauau

SEQ ID NO: 792346 - RNA, 19 nt, Homo sapiens
  misc_RNA (1)...(19): siRNA sense strand
acaaacuggucgccuaugg

SEQ ID NO: 792347 - RNA, 19 nt, Homo sapiens
  misc_RNA (1)...(19): siRNA sense strand
cuucgcugcucuucugaaa

SEQ ID NO: 792348 - RNA, 19 nt, Homo sapiens
  misc_RNA (1)...(19): siRNA sense strand
ccauuacacacgaguuauu

SEQ ID NO: 792349 - RNA, 19 nt, Homo sapiens
  misc_RNA (1)...(19): siRNA sense strand
aagaaguugucauuaccaa

SEQ ID NO: 792350 - RNA, 19 nt, Homo sapiens
  misc_RNA (1)...(19): siRNA sense strand
caucagacaggccuccuau

SEQ ID NO: 792351 - RNA, 19 nt, Homo sapiens
  misc_RNA (1)...(19): siRNA sense strand
ggugcuggauuuugaauga

SEQ ID NO: 792352 - RNA, 19 nt, Homo sapiens
  misc_RNA (1)...(19): siRNA sense strand
uggaaacacggaugaguga

SEQ ID NO: 792353 - RNA, 19 nt, Homo sapiens
  misc_RNA (1)...(19): siRNA sense strand
cauuacacacgaguuauuu

SEQ ID NO: 792354 - RNA, 19 nt, Homo sapiens
  misc_RNA (1)...(19): siRNA sense strand
uaauuagguucuggcgauu

SEQ ID NO: 792355 - RNA, 19 nt, Homo sapiens
  misc_RNA (1)...(19): siRNA sense strand
uaauaccugucagucgaaa

SEQ ID NO: 792356 - RNA, 19 nt, Homo sapiens
  misc_RNA (1)...(19): siRNA sense strand
cagcaguauuggcguguuc

SEQ ID NO: 792357 - RNA, 19 nt, Homo sapiens
  misc_RNA (1)...(19): siRNA sense strand
ggaacccucggcuuggaaa

SEQ ID NO: 792358 - RNA, 19 nt, Homo sapiens
  misc_RNA (1)...(19): siRNA sense strand
ccauauuaguacucucaug

SEQ ID NO: 792359 - RNA, 19 nt, Homo sapiens
  misc_RNA (1)...(19): siRNA sense strand
ccugucagucgaaaccuua

SEQ ID NO: 792360 - RNA, 19 nt, Homo sapiens
  misc_RNA (1)...(19): siRNA sense strand
gcagcaguauuggcguguu

SEQ ID NO: 792361 - RNA, 19 nt, Homo sapiens
  misc_RNA (1)...(19): siRNA sense strand
cuucugaaaucuauauggu

SEQ ID NO: 792362 - RNA, 19 nt, Homo sapiens
  misc_RNA (1)...(19): siRNA sense strand
aaaccucagauuucacaaa

SEQ ID NO: 792363 - RNA, 19 nt, Homo sapiens
  misc_RNA (1)...(19): siRNA sense strand
uaagaggaacaaguauuug

SEQ ID NO: 792364 - RNA, 19 nt, Homo sapiens
  misc_RNA (1)...(19): siRNA sense strand
gucagucgaaaccuuauuu

SEQ ID NO: 792365 - RNA, 19 nt, Homo sapiens
  misc_RNA (1)...(19): siRNA sense strand
cgaggacacuucaaaagau

SEQ ID NO: 792366 - RNA, 19 nt, Homo sapiens
  misc_RNA (1)...(19): siRNA sense strand
guauuggcguguucuucug

SEQ ID NO: 792367 - RNA, 19 nt, Homo sapiens
  misc_RNA (1)...(19): siRNA sense strand
caagagcuuuugagugguu

SEQ ID NO: 792368 - RNA, 19 nt, Homo sapiens
  misc_RNA (1)...(19): siRNA sense strand
ucacaaacuggucgccuau

SEQ ID NO: 792369 - RNA, 19 nt, Homo sapiens
  misc_RNA (1)...(19): siRNA sense strand
uucauaagaggaacaagua

SEQ ID NO: 792370 - RNA, 19 nt, Homo sapiens
  misc_RNA (1)...(19): siRNA sense strand
aacaucaccuucuguagag

SEQ ID NO: 792371 - RNA, 19 nt, Homo sapiens
  misc_RNA (1)...(19): siRNA sense strand
gcaagguguauuucuacug

SEQ ID NO: 792372 - RNA, 19 nt, Homo sapiens
  misc_RNA (1)...(19): siRNA sense strand
agaccgcuaugcagaaugg

SEQ ID NO: 792373 - RNA, 19 nt, Homo sapiens
  misc_RNA (1)...(19): siRNA sense strand
acuggucgccuaugggaua

SEQ ID NO: 792374 - RNA, 19 nt, Homo sapiens
  misc_RNA (1)...(19): siRNA sense strand
ucucuccaccauauuagua

SEQ ID NO: 792375 - RNA, 19 nt, Homo sapiens
  misc_RNA (1)...(19): siRNA sense strand
cuaauucuaauaccuguca

SEQ ID NO: 792376 - RNA, 19 nt, Homo sapiens
  misc_RNA (1)...(19): siRNA sense strand
gaggacacuucaaaagaug

SEQ ID NO: 792377 - RNA, 19 nt, Homo sapiens
  misc_RNA (1)...(19): siRNA sense strand
gaaaaucaggcucuucaca

SEQ ID NO: 792378 - RNA, 19 nt, Homo sapiens
  misc_RNA (1)...(19): siRNA sense strand
cugcucuucugaaaucuau

SEQ ID NO: 792379 - RNA, 19 nt, Homo sapiens
  misc_RNA (1)...(19): siRNA sense strand
gcgauuucaacaagaaguu

SEQ ID NO: 792380 - RNA, 19 nt, Homo sapiens
  misc_RNA (1)...(19): siRNA sense strand
ucaauuuucuggcaaggaa

SEQ ID NO: 792381 - RNA, 19 nt, Homo sapiens
  misc_RNA (1)...(19): siRNA sense strand
gcagacaguggcccaaugc

SEQ ID NO: 792382 - RNA, 19 nt, Homo sapiens
  misc_RNA (1)...(19): siRNA sense strand
agagaccgcuaugcagaau

SEQ ID NO: 792383 - RNA, 19 nt, Homo sapiens
  misc_RNA (1)...(19): siRNA sense strand
acaaacacaaccacugaau

SEQ ID NO: 792384 - RNA, 19 nt, Homo sapiens
  misc_RNA (1)...(19): siRNA sense strand
ugaucucucuggcuuuagu

SEQ ID NO: 792385 - RNA, 19 nt, Homo sapiens
  misc_RNA (1)...(19): siRNA sense strand
uuaacugcaugcuaauucu

SEQ ID NO: 792386 - RNA, 19 nt, Homo sapiens
  misc_RNA (1)...(19): siRNA sense strand
uugacacguucuacuggua

SEQ ID NO: 792387 - RNA, 19 nt, Homo sapiens
  misc_RNA (1)...(19): siRNA sense strand
ccuguggucuuguaugcau

SEQ ID NO: 792388 - RNA, 19 nt, Homo sapiens
  misc_RNA (1)...(19): siRNA sense strand
gcccuguggucuuguaugc

SEQ ID NO: 792389 - RNA, 19 nt, Homo sapiens
  misc_RNA (1)...(19): siRNA sense strand
gacacguucuacugguaug

SEQ ID NO: 792390 - RNA, 19 nt, Homo sapiens
  misc_RNA (1)...(19): siRNA sense strand
gcagaaaggcuguuugaaa

SEQ ID NO: 792391 - RNA, 19 nt, Homo sapiens
  misc_RNA (1)...(19): siRNA sense strand
gaacauguccuuugugaau

SEQ ID NO: 792392 - RNA, 19 nt, Homo sapiens
  misc_RNA (1)...(19): siRNA sense strand
ggaagaacauguccuuugu

SEQ ID NO: 792393 - RNA, 19 nt, Homo sapiens
  misc_RNA (1)...(19): siRNA sense strand
ugaaguaaaucccuggaaa

SEQ ID NO: 792394 - RNA, 19 nt, Homo sapiens
  misc_RNA (1)...(19): siRNA sense strand
gagagacccuggauuaaaa

SEQ ID NO: 792395 - RNA, 19 nt, Homo sapiens
  misc_RNA (1)...(19): siRNA sense strand
cagaaaggcuguuugaaaa

SEQ ID NO: 792396 - RNA, 19 nt, Homo sapiens
  misc_RNA (1)...(19): siRNA sense strand
ggaggaagauuuauuucac

SEQ ID NO: 792397 - RNA, 19 nt, Homo sapiens
  misc_RNA (1)...(19): siRNA sense strand
aagaacauguccuuuguga

SEQ ID NO: 792398 - RNA, 19 nt, Homo sapiens
  misc_RNA (1)...(19): siRNA sense strand
ucugagagacccuggauua

SEQ ID NO: 792399 - RNA, 19 nt, Homo sapiens
  misc_RNA (1)...(19): siRNA sense strand
gggaagaacauguccuuug

SEQ ID NO: 792400 - RNA, 19 nt, Homo sapiens
  misc_RNA (1)...(19): siRNA sense strand
caagggacuauuugaagua

SEQ ID NO: 792401 - RNA, 19 nt, Homo sapiens
  misc_RNA (1)...(19): siRNA sense strand
aagagacggugaugaaguu

SEQ ID NO: 792402 - RNA, 19 nt, Homo sapiens
  misc_RNA (1)...(19): siRNA sense strand
caaugggacucucuuugug

SEQ ID NO: 792403 - RNA, 19 nt, Homo sapiens
  misc_RNA (1)...(19): siRNA sense strand
aaacaaccauggccaggau

SEQ ID NO: 792404 - RNA, 19 nt, Homo sapiens
  misc_RNA (1)...(19): siRNA sense strand
ggagaacaugccuggauuu

SEQ ID NO: 792405 - RNA, 19 nt, Homo sapiens
  misc_RNA (1)...(19): siRNA sense strand
cuggaaacgugaagugaaa

SEQ ID NO: 792406 - RNA, 19 nt, Homo sapiens
  misc_RNA (1)...(19): siRNA sense strand
cagcugcgguucccgaaug

SEQ ID NO: 792407 - RNA, 19 nt, Homo sapiens
  misc_RNA (1)...(19): siRNA sense strand
ugagagacccuggauuaaa

SEQ ID NO: 792408 - RNA, 19 nt, Homo sapiens
  misc_RNA (1)...(19): siRNA sense strand
gaugggaggaagauuuauu

SEQ ID NO: 792409 - RNA, 19 nt, Homo sapiens
  misc_RNA (1)...(19): siRNA sense strand
ccagcugucuccugcagaa

SEQ ID NO: 792410 - RNA, 19 nt, Homo sapiens
  misc_RNA (1)...(19): siRNA sense strand
guacagccucguccuagaa

SEQ ID NO: 792411 - RNA, 19 nt, Homo sapiens
  misc_RNA (1)...(19): siRNA sense strand
gcauacaagggacuauuug

SEQ ID NO: 792412 - RNA, 19 nt, Homo sapiens
  misc_RNA (1)...(19): siRNA sense strand
gguguucugcauccaaaua

SEQ ID NO: 792413 - RNA, 19 nt, Homo sapiens
  misc_RNA (1)...(19): siRNA sense strand
gguacagccucguccuaga

SEQ ID NO: 792414 - RNA, 19 nt, Homo sapiens
  misc_RNA (1)...(19): siRNA sense strand
ccaaugggacucucuuugu

SEQ ID NO: 792415 - RNA, 19 nt, Homo sapiens
  misc_RNA (1)...(19): siRNA sense strand
ccucucagcuucaaagaac

SEQ ID NO: 792416 - RNA, 19 nt, Homo sapiens
  misc_RNA (1)...(19): siRNA sense strand
uggagaacaugccuggauu

SEQ ID NO: 792417 - RNA, 19 nt, Homo sapiens
  misc_RNA (1)...(19): siRNA sense strand
cuacguuucuggccugaug

SEQ ID NO: 792418 - RNA, 19 nt, Homo sapiens
  misc_RNA (1)...(19): siRNA sense strand
gaaaggcuguuugaaaauc

SEQ ID NO: 792419 - RNA, 19 nt, Homo sapiens
  misc_RNA (1)...(19): siRNA sense strand
gucaagagacggugaugaa

SEQ ID NO: 792420 - RNA, 19 nt, Homo sapiens
  misc_RNA (1)...(19): siRNA sense strand
caggaugggaggaagauuu

SEQ ID NO: 792421 - RNA, 19 nt, Homo sapiens
  misc_RNA (1)...(19): siRNA sense strand
acaagggacuauuugaagu

SEQ ID NO: 792422 - RNA, 19 nt, Homo sapiens
  misc_RNA (1)...(19): siRNA sense strand
gaaguaaaucccuggaaac

SEQ ID NO: 792423 - RNA, 19 nt, Homo sapiens
  misc_RNA (1)...(19): siRNA sense strand
agacggugaugaaguuugu

SEQ ID NO: 792424 - RNA, 19 nt, Homo sapiens
  misc_RNA (1)...(19): siRNA sense strand
gggaggaagauuuauuuca

SEQ ID NO: 792425 - RNA, 19 nt, Homo sapiens
  misc_RNA (1)...(19): siRNA sense strand
gaagaacauguccuuugug

SEQ ID NO: 792426 - RNA, 19 nt, Homo sapiens
  misc_RNA (1)...(19): siRNA sense strand
uuuaagcucuuuagucaag

SEQ ID NO: 792427 - RNA, 19 nt, Homo sapiens
  misc_RNA (1)...(19): siRNA sense strand
auacgaagagucuacguuu

SEQ ID NO: 792428 - RNA, 19 nt, Homo sapiens
  misc_RNA (1)...(19): siRNA sense strand
caagagacggugaugaagu

SEQ ID NO: 792429 - RNA, 19 nt, Homo sapiens
  misc_RNA (1)...(19): siRNA sense strand
caugcuggauuucuuaucu

SEQ ID NO: 792430 - RNA, 19 nt, Homo sapiens
  misc_RNA (1)...(19): siRNA sense strand
ccaugaugcugcuggaauc

SEQ ID NO: 792431 - RNA, 19 nt, Homo sapiens
  misc_RNA (1)...(19): siRNA sense strand
ucagcgaggugcacgaaca

SEQ ID NO: 792432 - RNA, 19 nt, Homo sapiens
  misc_RNA (1)...(19): siRNA sense strand
cggagaagccugcaugauc

SEQ ID NO: 792433 - RNA, 19 nt, Homo sapiens
  misc_RNA (1)...(19): siRNA sense strand
gauacgaagagucuacguu

SEQ ID NO: 792434 - RNA, 19 nt, Homo sapiens
  misc_RNA (1)...(19): siRNA sense strand
acauguccuuugugaauga

SEQ ID NO: 792435 - RNA, 19 nt, Homo sapiens
  misc_RNA (1)...(19): siRNA sense strand
ggugaaauagagaccauug

SEQ ID NO: 792436 - RNA, 19 nt, Homo sapiens
  misc_RNA (1)...(19): siRNA sense strand
agauuuauuucaccgauuc

SEQ ID NO: 792437 - RNA, 19 nt, Homo sapiens
  misc_RNA (1)...(19): siRNA sense strand
gagaacaugccuggauuuc

SEQ ID NO: 792438 - RNA, 19 nt, Homo sapiens
  misc_RNA (1)...(19): siRNA sense strand
aagggacuauuugaaguaa

SEQ ID NO: 792439 - RNA, 19 nt, Homo sapiens
  misc_RNA (1)...(19): siRNA sense strand
aggaugggaggaagauuua

SEQ ID NO: 792440 - RNA, 19 nt, Homo sapiens
  misc_RNA (1)...(19): siRNA sense strand
cuggauuucuuaucugaga

SEQ ID NO: 792441 - RNA, 19 nt, Homo sapiens
  misc_RNA (1)...(19): siRNA sense strand
cggaguccauagcacauau

SEQ ID NO: 792442 - RNA, 19 nt, Homo sapiens
  misc_RNA (1)...(19): siRNA sense strand
cauacaagggacuauuuga

SEQ ID NO: 792443 - RNA, 19 nt, Homo sapiens
  misc_RNA (1)...(19): siRNA sense strand
gcaaaacccgagaugauga

SEQ ID NO: 792444 - RNA, 19 nt, Homo sapiens
  misc_RNA (1)...(19): siRNA sense strand
gaaaauggugaaauagaga

SEQ ID NO: 792445 - RNA, 19 nt, Homo sapiens
  misc_RNA (1)...(19): siRNA sense strand
cugcuggaaucuccuauag

SEQ ID NO: 792446 - RNA, 19 nt, Homo sapiens
  misc_RNA (1)...(19): siRNA sense strand
auacaagggacuauuugaa

SEQ ID NO: 792447 - RNA, 19 nt, Homo sapiens
  misc_RNA (1)...(19): siRNA sense strand
cgaagagucuacguuucug

SEQ ID NO: 792448 - RNA, 19 nt, Homo sapiens
  misc_RNA (1)...(19): siRNA sense strand
agagaccauugcccgguuu

SEQ ID NO: 792449 - RNA, 19 nt, Homo sapiens
  misc_RNA (1)...(19): siRNA sense strand
ggcgccugcuggaguauga

SEQ ID NO: 792450 - RNA, 19 nt, Homo sapiens
  misc_RNA (1)...(19): siRNA sense strand
ugauggagggcacagauga

SEQ ID NO: 792451 - RNA, 19 nt, Homo sapiens
  misc_RNA (1)...(19): siRNA sense strand
gcucuugcuugguguucug

SEQ ID NO: 792452 - RNA, 19 nt, Homo sapiens
  misc_RNA (1)...(19): siRNA sense strand
ccgagugaccuucuugaug

SEQ ID NO: 792453 - RNA, 19 nt, Homo sapiens
  misc_RNA (1)...(19): siRNA sense strand
gugaaugaucuuacaguca

SEQ ID NO: 792454 - RNA, 19 nt, Homo sapiens
  misc_RNA (1)...(19): siRNA sense strand
caccgauucuagcagcaaa

SEQ ID NO: 792455 - RNA, 19 nt, Homo sapiens
  misc_RNA (1)...(19): siRNA sense strand
gcugcuggaaucuccuaua

SEQ ID NO: 792456 - RNA, 19 nt, Homo sapiens
  misc_RNA (1)...(19): siRNA sense strand
uacgaagagucuacguuuc

SEQ ID NO: 792457 - RNA, 19 nt, Homo sapiens
  misc_RNA (1)...(19): siRNA sense strand
ggaguccauagcacauauu

SEQ ID NO: 792458 - RNA, 19 nt, Homo sapiens
  misc_RNA (1)...(19): siRNA sense strand
ugaaaauggugaaauagag

SEQ ID NO: 792459 - RNA, 19 nt, Homo sapiens
  misc_RNA (1)...(19): siRNA sense strand
gagacggugaugaaguuug

SEQ ID NO: 792460 - RNA, 19 nt, Homo sapiens
  misc_RNA (1)...(19): siRNA sense strand
ggauuucuuaucugagaga

SEQ ID NO: 792461 - RNA, 19 nt, Homo sapiens
  misc_RNA (1)...(19): siRNA sense strand
aggcagaaaggcuguuuga

SEQ ID NO: 792462 - RNA, 19 nt, Homo sapiens
  misc_RNA (1)...(19): siRNA sense strand
uacaagggacuauuugaag

SEQ ID NO: 792463 - RNA, 19 nt, Homo sapiens
  misc_RNA (1)...(19): siRNA sense strand
guggagaacaugccuggau

SEQ ID NO: 792464 - RNA, 19 nt, Homo sapiens
  misc_RNA (1)...(19): siRNA sense strand
ccacagccucucagcuuca

SEQ ID NO: 792465 - RNA, 19 nt, Homo sapiens
  misc_RNA (1)...(19): siRNA sense strand
gaguccauagcacauauug

SEQ ID NO: 792466 - RNA, 19 nt, Homo sapiens
  misc_RNA (1)...(19): siRNA sense strand
gccaugaugcugcuggaau

SEQ ID NO: 792467 - RNA, 19 nt, Homo sapiens
  misc_RNA (1)...(19): siRNA sense strand
gcgguacagccucguccua

SEQ ID NO: 792468 - RNA, 19 nt, Homo sapiens
  misc_RNA (1)...(19): siRNA sense strand
ggaaacgugaagugaaacu

SEQ ID NO: 792469 - RNA, 19 nt, Homo sapiens
  misc_RNA (1)...(19): siRNA sense strand
gaaacgugaagugaaacug

SEQ ID NO: 792470 - RNA, 19 nt, Homo sapiens
  misc_RNA (1)...(19): siRNA sense strand
gaaagcagcuccaguuaca

SEQ ID NO: 792471 - RNA, 19 nt, Homo sapiens
  misc_RNA (1)...(19): siRNA sense strand
caacgacacauuugacauu

SEQ ID NO: 792472 - RNA, 19 nt, Homo sapiens
  misc_RNA (1)...(19): siRNA sense strand
gaaccucacgcucaaauuc

SEQ ID NO: 792473 - RNA, 19 nt, Homo sapiens
  misc_RNA (1)...(19): siRNA sense strand
ucucccagcucuaccuuua

SEQ ID NO: 792474 - RNA, 19 nt, Homo sapiens
  misc_RNA (1)...(19): siRNA sense strand
uccagagccucaucaauaa

SEQ ID NO: 792475 - RNA, 19 nt, Homo sapiens
  misc_RNA (1)...(19): siRNA sense strand
gaucucacccucuuggaaa

SEQ ID NO: 792476 - RNA, 19 nt, Homo sapiens
  misc_RNA (1)...(19): siRNA sense strand
cuccagagccucaucaaua

SEQ ID NO: 792477 - RNA, 19 nt, Homo sapiens
  misc_RNA (1)...(19): siRNA sense strand
caacuacaauauccucauc

SEQ ID NO: 792478 - RNA, 19 nt, Homo sapiens
  misc_RNA (1)...(19): siRNA sense strand
gggagcggcuggaauuugu

SEQ ID NO: 792479 - RNA, 19 nt, Homo sapiens
  misc_RNA (1)...(19): siRNA sense strand
acaagaaccucacgcucaa

SEQ ID NO: 792480 - RNA, 19 nt, Homo sapiens
  misc_RNA (1)...(19): siRNA sense strand
cgacacauuugacauugau

SEQ ID NO: 792481 - RNA, 19 nt, Homo sapiens
  misc_RNA (1)...(19): siRNA sense strand
gcaagcugaugcugcaagu

SEQ ID NO: 792482 - RNA, 19 nt, Homo sapiens
  misc_RNA (1)...(19): siRNA sense strand
gcgacgaucucacccucuu

SEQ ID NO: 792483 - RNA, 19 nt, Homo sapiens
  misc_RNA (1)...(19): siRNA sense strand
uccacaagcuggucaaugu

SEQ ID NO: 792484 - RNA, 19 nt, Homo sapiens
  misc_RNA (1)...(19): siRNA sense strand
gaccuucgccgucgucuca

SEQ ID NO: 792485 - RNA, 19 nt, Homo sapiens
  misc_RNA (1)...(19): siRNA sense strand
ggaaagcagcuccaguuac

SEQ ID NO: 792486 - RNA, 19 nt, Homo sapiens
  misc_RNA (1)...(19): siRNA sense strand
gcaucgaggccaagaacuu

SEQ ID NO: 792487 - RNA, 19 nt, Homo sapiens
  misc_RNA (1)...(19): siRNA sense strand
ucaucagccucuucaucua

SEQ ID NO: 792488 - RNA, 19 nt, Homo sapiens
  misc_RNA (1)...(19): siRNA sense strand
gcuuccggcuccuguuuga

SEQ ID NO: 792489 - RNA, 19 nt, Homo sapiens
  misc_RNA (1)...(19): siRNA sense strand
gccgucgucucaaauacuu

SEQ ID NO: 792490 - RNA, 19 nt, Homo sapiens
  misc_RNA (1)...(19): siRNA sense strand
gcagcuccaguuacaagaa

SEQ ID NO: 792491 - RNA, 19 nt, Homo sapiens
  misc_RNA (1)...(19): siRNA sense strand
uaccuuuacuccuucauca

SEQ ID NO: 792492 - RNA, 19 nt, Homo sapiens
  misc_RNA (1)...(19): siRNA sense strand
ggcccuaucaugugaaguu

SEQ ID NO: 792493 - RNA, 19 nt, Homo sapiens
  misc_RNA (1)...(19): siRNA sense strand
ugaccuucuuccacaacua

SEQ ID NO: 792494 - RNA, 19 nt, Homo sapiens
  misc_RNA (1)...(19): siRNA sense strand
cugcguggcugucaucuac

SEQ ID NO: 792495 - RNA, 19 nt, Homo sapiens
  misc_RNA (1)...(19): siRNA sense strand
gugcagcucauccuguuug

SEQ ID NO: 792496 - RNA, 19 nt, Homo sapiens
  misc_RNA (1)...(19): siRNA sense strand
caaugucaccauccacuuc

SEQ ID NO: 792497 - RNA, 19 nt, Homo sapiens
  misc_RNA (1)...(19): siRNA sense strand
cagagccucaucaauaaug

SEQ ID NO: 792498 - RNA, 19 nt, Homo sapiens
  misc_RNA (1)...(19): siRNA sense strand
cggugcagcucauccuguu

SEQ ID NO: 792499 - RNA, 19 nt, Homo sapiens
  misc_RNA (1)...(19): siRNA sense strand
ugaucacguuugacaacaa

SEQ ID NO: 792500 - RNA, 19 nt, Homo sapiens
  misc_RNA (1)...(19): siRNA sense strand
ugagaucccggacugcuau

SEQ ID NO: 792501 - RNA, 19 nt, Homo sapiens
  misc_RNA (1)...(19): siRNA sense strand
uguuugggcucaguaauca

SEQ ID NO: 792502 - RNA, 19 nt, Homo sapiens
  misc_RNA (1)...(19): siRNA sense strand
cagcuuccggcuccuguuu

SEQ ID NO: 792503 - RNA, 19 nt, Homo sapiens
  misc_RNA (1)...(19): siRNA sense strand
ugugggagcggcuggaauu

SEQ ID NO: 792504 - RNA, 19 nt, Homo sapiens
  misc_RNA (1)...(19): siRNA sense strand
ccagcgaugugcucaccau

SEQ ID NO: 792505 - RNA, 19 nt, Homo sapiens
  misc_RNA (1)...(19): siRNA sense strand
cggcuggaauuugucaaug

SEQ ID NO: 792506 - RNA, 19 nt, Homo sapiens
  misc_RNA (1)...(19): siRNA sense strand
ggcuggaauuugucaaugg

SEQ ID NO: 792507 - RNA, 19 nt, Homo sapiens
  misc_RNA (1)...(19): siRNA sense strand
ucaugaagaucggcaucga

SEQ ID NO: 792508 - RNA, 19 nt, Homo sapiens
  misc_RNA (1)...(19): siRNA sense strand
aacgacacauuugacauug

SEQ ID NO: 792509 - RNA, 19 nt, Homo sapiens
  misc_RNA (1)...(19): siRNA sense strand
ugacaacaaagcacacagu

SEQ ID NO: 792510 - RNA, 19 nt, Homo sapiens
  misc_RNA (1)...(19): siRNA sense strand
guaccaggccaucuuccau

SEQ ID NO: 792511 - RNA, 19 nt, Homo sapiens
  misc_RNA (1)...(19): siRNA sense strand
gagaucccggacugcuaua

SEQ ID NO: 792512 - RNA, 19 nt, Homo sapiens
  misc_RNA (1)...(19): siRNA sense strand
gagaccgagcggcuucuga

SEQ ID NO: 792513 - RNA, 19 nt, Homo sapiens
  misc_RNA (1)...(19): siRNA sense strand
gagcggcuggaauuuguca

SEQ ID NO: 792514 - RNA, 19 nt, Homo sapiens
  misc_RNA (1)...(19): siRNA sense strand
uguucucgcucaucaaugg

SEQ ID NO: 792515 - RNA, 19 nt, Homo sapiens
  misc_RNA (1)...(19): siRNA sense strand
agaaggagcucuacaagaa

SEQ ID NO: 792516 - RNA, 19 nt, Homo sapiens
  misc_RNA (1)...(19): siRNA sense strand
caaggucccugucacauuu

SEQ ID NO: 792517 - RNA, 19 nt, Homo sapiens
  misc_RNA (1)...(19): siRNA sense strand
gacgagggcucagaaaguu

SEQ ID NO: 792518 - RNA, 19 nt, Homo sapiens
  misc_RNA (1)...(19): siRNA sense strand
gauaugaggccaguaugua

SEQ ID NO: 792519 - RNA, 19 nt, Homo sapiens
  misc_RNA (1)...(19): siRNA sense strand
gaugggaucgugauuaaga

SEQ ID NO: 792520 - RNA, 19 nt, Homo sapiens
  misc_RNA (1)...(19): siRNA sense strand
ggagauaugaggccaguau

SEQ ID NO: 792521 - RNA, 19 nt, Homo sapiens
  misc_RNA (1)...(19): siRNA sense strand
gaagaucaaccucaucauc

SEQ ID NO: 792522 - RNA, 19 nt, Homo sapiens
  misc_RNA (1)...(19): siRNA sense strand
cggcagcaauggagaaguu

SEQ ID NO: 792523 - RNA, 19 nt, Homo sapiens
  misc_RNA (1)...(19): siRNA sense strand
ggacuaugcaauuuccaaa

SEQ ID NO: 792524 - RNA, 19 nt, Homo sapiens
  misc_RNA (1)...(19): siRNA sense strand
gcccuaagcccuacaagug

SEQ ID NO: 792525 - RNA, 19 nt, Homo sapiens
  misc_RNA (1)...(19): siRNA sense strand
ggaacaagacgaggaggaa

SEQ ID NO: 792526 - RNA, 19 nt, Homo sapiens
  misc_RNA (1)...(19): siRNA sense strand
aaccagaccucaugucaca

SEQ ID NO: 792527 - RNA, 19 nt, Homo sapiens
  misc_RNA (1)...(19): siRNA sense strand
gcuguuaauuuccuugaca

SEQ ID NO: 792528 - RNA, 19 nt, Homo sapiens
  misc_RNA (1)...(19): siRNA sense strand
ggaaggcuccagcgaguuc

SEQ ID NO: 792529 - RNA, 19 nt, Homo sapiens
  misc_RNA (1)...(19): siRNA sense strand
caacuacgagucccugguu

SEQ ID NO: 792530 - RNA, 19 nt, Homo sapiens
  misc_RNA (1)...(19): siRNA sense strand
caaaccagaccucauguca

SEQ ID NO: 792531 - RNA, 19 nt, Homo sapiens
  misc_RNA (1)...(19): siRNA sense strand
ugauuaagaucgagguaca

SEQ ID NO: 792532 - RNA, 19 nt, Homo sapiens
  misc_RNA (1)...(19): siRNA sense strand
gaucaagacagaggaacaa

SEQ ID NO: 792533 - RNA, 19 nt, Homo sapiens
  misc_RNA (1)...(19): siRNA sense strand
caacgacgagggcucagaa

SEQ ID NO: 792534 - RNA, 19 nt, Homo sapiens
  misc_RNA (1)...(19): siRNA sense strand
gcagaaggagcucuacaag

SEQ ID NO: 792535 - RNA, 19 nt, Homo sapiens
  misc_RNA (1)...(19): siRNA sense strand
ccaaggucccugucacauu

SEQ ID NO: 792536 - RNA, 19 nt, Homo sapiens
  misc_RNA (1)...(19): siRNA sense strand
cagaaggagcucuacaaga

SEQ ID NO: 792537 - RNA, 19 nt, Homo sapiens
  misc_RNA (1)...(19): siRNA sense strand
guguagggcccaucuaguu

SEQ ID NO: 792538 - RNA, 19 nt, Homo sapiens
  misc_RNA (1)...(19): siRNA sense strand
gcaagagcuuccgccugaa

SEQ ID NO: 792539 - RNA, 19 nt, Homo sapiens
  misc_RNA (1)...(19): siRNA sense strand
cgacgagggcucagaaagu

SEQ ID NO: 792540 - RNA, 19 nt, Homo sapiens
  misc_RNA (1)...(19): siRNA sense strand
uccauggacuaugcaauuu

SEQ ID NO: 792541 - RNA, 19 nt, Homo sapiens
  misc_RNA (1)...(19): siRNA sense strand
ggcagaaggagcucuacaa

SEQ ID NO: 792542 - RNA, 19 nt, Homo sapiens
  misc_RNA (1)...(19): siRNA sense strand
caagacagaggaacaagac

SEQ ID NO: 792543 - RNA, 19 nt, Homo sapiens
  misc_RNA (1)...(19): siRNA sense strand
aagaggaggaggaggauga

SEQ ID NO: 792544 - RNA, 19 nt, Homo sapiens
  misc_RNA (1)...(19): siRNA sense strand
cgagggcucagaaaguuug

SEQ ID NO: 792545 - RNA, 19 nt, Homo sapiens
  misc_RNA (1)...(19): siRNA sense strand
gucccuugcugccgcguuu

SEQ ID NO: 792546 - RNA, 19 nt, Homo sapiens
  misc_RNA (1)...(19): siRNA sense strand
gcagcuguccgggagauau

SEQ ID NO: 792547 - RNA, 19 nt, Homo sapiens
  misc_RNA (1)...(19): siRNA sense strand
ccagaccucaugucacaga

SEQ ID NO: 792548 - RNA, 19 nt, Homo sapiens
  misc_RNA (1)...(19): siRNA sense strand
gaaggagcucuacaagaac

SEQ ID NO: 792549 - RNA, 19 nt, Homo sapiens
  misc_RNA (1)...(19): siRNA sense strand
gaacccuuucgggcuguua

SEQ ID NO: 792550 - RNA, 19 nt, Homo sapiens
  misc_RNA (1)...(19): siRNA sense strand
caagccgcgucccaaguca

SEQ ID NO: 792551 - RNA, 19 nt, Homo sapiens
  misc_RNA (1)...(19): siRNA sense strand
ugauguugcugugcacuuc

SEQ ID NO: 792552 - RNA, 19 nt, Homo sapiens
  misc_RNA (1)...(19): siRNA sense strand
ucaagacagaggaacaaga

SEQ ID NO: 792553 - RNA, 19 nt, Homo sapiens
  misc_RNA (1)...(19): siRNA sense strand
gagauaugaggccaguaug

SEQ ID NO: 792554 - RNA, 19 nt, Homo sapiens
  misc_RNA (1)...(19): siRNA sense strand
ccuuucgggcuguuaauuu

SEQ ID NO: 792555 - RNA, 19 nt, Homo sapiens
  misc_RNA (1)...(19): siRNA sense strand
aguccagccugaccaaaca

SEQ ID NO: 792556 - RNA, 19 nt, Homo sapiens
  misc_RNA (1)...(19): siRNA sense strand
cuuucgggcuguuaauuuc

SEQ ID NO: 792557 - RNA, 19 nt, Homo sapiens
  misc_RNA (1)...(19): siRNA sense strand
uuccauggacuaugcaauu

SEQ ID NO: 792558 - RNA, 19 nt, Homo sapiens
  misc_RNA (1)...(19): siRNA sense strand
cugaagaucaaccucauca

SEQ ID NO: 792559 - RNA, 19 nt, Homo sapiens
  misc_RNA (1)...(19): siRNA sense strand
gccugaagaucaaccucau

SEQ ID NO: 792560 - RNA, 19 nt, Homo sapiens
  misc_RNA (1)...(19): siRNA sense strand
gaucuuagccucagaauug

SEQ ID NO: 792561 - RNA, 19 nt, Homo sapiens
  misc_RNA (1)...(19): siRNA sense strand
ggauauaccuggagccauu

SEQ ID NO: 792562 - RNA, 19 nt, Homo sapiens
  misc_RNA (1)...(19): siRNA sense strand
agaaggagcugaggaauuu

SEQ ID NO: 792563 - RNA, 19 nt, Homo sapiens
  misc_RNA (1)...(19): siRNA sense strand
ggccagaccucuuauauca

SEQ ID NO: 792564 - RNA, 19 nt, Homo sapiens
  misc_RNA (1)...(19): siRNA sense strand
gagcaggucuguuggcauu

SEQ ID NO: 792565 - RNA, 19 nt, Homo sapiens
  misc_RNA (1)...(19): siRNA sense strand
gaagaaacaucagaacaca

SEQ ID NO: 792566 - RNA, 19 nt, Homo sapiens
  misc_RNA (1)...(19): siRNA sense strand
gcaacgagagauugaaaua

SEQ ID NO: 792567 - RNA, 19 nt, Homo sapiens
  misc_RNA (1)...(19): siRNA sense strand
ggaagagucuacugaagug

SEQ ID NO: 792568 - RNA, 19 nt, Homo sapiens
  misc_RNA (1)...(19): siRNA sense strand
ggucaugucaccauaauaa

SEQ ID NO: 792569 - RNA, 19 nt, Homo sapiens
  misc_RNA (1)...(19): siRNA sense strand
ucagaaauguggaccguuu

SEQ ID NO: 792570 - RNA, 19 nt, Homo sapiens
  misc_RNA (1)...(19): siRNA sense strand
ggaggcaucugcacaggaa

SEQ ID NO: 792571 - RNA, 19 nt, Homo sapiens
  misc_RNA (1)...(19): siRNA sense strand
gcacaccacucuauauguc

SEQ ID NO: 792572 - RNA, 19 nt, Homo sapiens
  misc_RNA (1)...(19): siRNA sense strand
ugacguugcuacucucuuu

SEQ ID NO: 792573 - RNA, 19 nt, Homo sapiens
  misc_RNA (1)...(19): siRNA sense strand
gcauaugcuugacagcuuu

SEQ ID NO: 792574 - RNA, 19 nt, Homo sapiens
  misc_RNA (1)...(19): siRNA sense strand
ccaaggagcaggucuguug

SEQ ID NO: 792575 - RNA, 19 nt, Homo sapiens
  misc_RNA (1)...(19): siRNA sense strand
gcuaugagcaccaauacaa

SEQ ID NO: 792576 - RNA, 19 nt, Homo sapiens
  misc_RNA (1)...(19): siRNA sense strand
gcagugacguugcuacucu

SEQ ID NO: 792577 - RNA, 19 nt, Homo sapiens
  misc_RNA (1)...(19): siRNA sense strand
gauccugaauggcaucuug

SEQ ID NO: 792578 - RNA, 19 nt, Homo sapiens
  misc_RNA (1)...(19): siRNA sense strand
ccacugagccugugccuau

SEQ ID NO: 792579 - RNA, 19 nt, Homo sapiens
  misc_RNA (1)...(19): siRNA sense strand
guacaagggucgaagaaaa

SEQ ID NO: 792580 - RNA, 19 nt, Homo sapiens
  misc_RNA (1)...(19): siRNA sense strand
gcuacucucuuuacccauu

SEQ ID NO: 792581 - RNA, 19 nt, Homo sapiens
  misc_RNA (1)...(19): siRNA sense strand
ggccauugcugcccaguug

SEQ ID NO: 792582 - RNA, 19 nt, Homo sapiens
  misc_RNA (1)...(19): siRNA sense strand
gagaaggagcugaggaauu

SEQ ID NO: 792583 - RNA, 19 nt, Homo sapiens
  misc_RNA (1)...(19): siRNA sense strand
gaaguauccucauguccau

SEQ ID NO: 792584 - RNA, 19 nt, Homo sapiens
  misc_RNA (1)...(19): siRNA sense strand
gagaggagccagacaagug

SEQ ID NO: 792585 - RNA, 19 nt, Homo sapiens
  misc_RNA (1)...(19): siRNA sense strand
ggagggugcuucccacauc

SEQ ID NO: 792586 - RNA, 19 nt, Homo sapiens
  misc_RNA (1)...(19): siRNA sense strand
uggaaucccuguuuauguu

SEQ ID NO: 792587 - RNA, 19 nt, Homo sapiens
  misc_RNA (1)...(19): siRNA sense strand
cuucauggcuugacaguuc

SEQ ID NO: 792588 - RNA, 19 nt, Homo sapiens
  misc_RNA (1)...(19): siRNA sense strand
gugauucuguugccuugua

SEQ ID NO: 792589 - RNA, 19 nt, Homo sapiens
  misc_RNA (1)...(19): siRNA sense strand
ccaccucucucaaccaguu

SEQ ID NO: 792590 - RNA, 19 nt, Homo sapiens
  misc_RNA (1)...(19): siRNA sense strand
gagggcagauccugaaugg

SEQ ID NO: 792591 - RNA, 19 nt, Homo sapiens
  misc_RNA (1)...(19): siRNA sense strand
ggacagccuuaugugcuuu

SEQ ID NO: 792592 - RNA, 19 nt, Homo sapiens
  misc_RNA (1)...(19): siRNA sense strand
gcaucaagcucugugacuu

SEQ ID NO: 792593 - RNA, 19 nt, Homo sapiens
  misc_RNA (1)...(19): siRNA sense strand
aaaccugccuuguggaaug

SEQ ID NO: 792594 - RNA, 19 nt, Homo sapiens
  misc_RNA (1)...(19): siRNA sense strand
gcaggucuguuggcauuug

SEQ ID NO: 792595 - RNA, 19 nt, Homo sapiens
  misc_RNA (1)...(19): siRNA sense strand
caacgagagauugaaauaa

SEQ ID NO: 792596 - RNA, 19 nt, Homo sapiens
  misc_RNA (1)...(19): siRNA sense strand
ucagggauauguccaguuc

SEQ ID NO: 792597 - RNA, 19 nt, Homo sapiens
  misc_RNA (1)...(19): siRNA sense strand
caaaggcacaccacucuau

SEQ ID NO: 792598 - RNA, 19 nt, Homo sapiens
  misc_RNA (1)...(19): siRNA sense strand
ccucucaccuugcugugua

SEQ ID NO: 792599 - RNA, 19 nt, Homo sapiens
  misc_RNA (1)...(19): siRNA sense strand
uaaucagucucgcaucuug

SEQ ID NO: 792600 - RNA, 19 nt, Homo sapiens
  misc_RNA (1)...(19): siRNA sense strand
ucuguuggcugcauacuau

SEQ ID NO: 792601 - RNA, 19 nt, Homo sapiens
  misc_RNA (1)...(19): siRNA sense strand
gguaaucagucucgcaucu

SEQ ID NO: 792602 - RNA, 19 nt, Homo sapiens
  misc_RNA (1)...(19): siRNA sense strand
ucaggaggcugccaaccuu

SEQ ID NO: 792603 - RNA, 19 nt, Homo sapiens
  misc_RNA (1)...(19): siRNA sense strand
gaaacuauccuugcucucu

SEQ ID NO: 792604 - RNA, 19 nt, Homo sapiens
  misc_RNA (1)...(19): siRNA sense strand
gcagcagccugucuauugg

SEQ ID NO: 792605 - RNA, 19 nt, Homo sapiens
  misc_RNA (1)...(19): siRNA sense strand
gaagcuaggcagugacguu

SEQ ID NO: 792606 - RNA, 19 nt, Homo sapiens
  misc_RNA (1)...(19): siRNA sense strand
gaaucccuguuuauguuga

SEQ ID NO: 792607 - RNA, 19 nt, Homo sapiens
  misc_RNA (1)...(19): siRNA sense strand
gauaugaagccucagaaca

SEQ ID NO: 792608 - RNA, 19 nt, Homo sapiens
  misc_RNA (1)...(19): siRNA sense strand
caucagcucugggcaacuu

SEQ ID NO: 792609 - RNA, 19 nt, Homo sapiens
  misc_RNA (1)...(19): siRNA sense strand
ggauauguccaguucagaa

SEQ ID NO: 792610 - RNA, 19 nt, Homo sapiens
  misc_RNA (1)...(19): siRNA sense strand
caugucgucucucuuguga

SEQ ID NO: 792611 - RNA, 19 nt, Homo sapiens
  misc_RNA (1)...(19): siRNA sense strand
cagcagcaaucuugguaug

SEQ ID NO: 792612 - RNA, 19 nt, Homo sapiens
  misc_RNA (1)...(19): siRNA sense strand
gcucugugacuuuggauuu

SEQ ID NO: 792613 - RNA, 19 nt, Homo sapiens
  misc_RNA (1)...(19): siRNA sense strand
gagagcagagugaggauau

SEQ ID NO: 792614 - RNA, 19 nt, Homo sapiens
  misc_RNA (1)...(19): siRNA sense strand
agggagagcucuuucagau

SEQ ID NO: 792615 - RNA, 19 nt, Homo sapiens
  misc_RNA (1)...(19): siRNA sense strand
gaauuugcaacgagagauu

SEQ ID NO: 792616 - RNA, 19 nt, Homo sapiens
  misc_RNA (1)...(19): siRNA sense strand
ccacuuguccuuuauccaa

SEQ ID NO: 792617 - RNA, 19 nt, Homo sapiens
  misc_RNA (1)...(19): siRNA sense strand
cuagaaccaucgucucguu

SEQ ID NO: 792618 - RNA, 19 nt, Homo sapiens
  misc_RNA (1)...(19): siRNA sense strand
gauauguccaguucagaaa

SEQ ID NO: 792619 - RNA, 19 nt, Homo sapiens
  misc_RNA (1)...(19): siRNA sense strand
ugucagcccuguacuaucu

SEQ ID NO: 792620 - RNA, 19 nt, Homo sapiens
  misc_RNA (1)...(19): siRNA sense strand
gaaccaucgucucguuucu

SEQ ID NO: 792621 - RNA, 19 nt, Homo sapiens
  misc_RNA (1)...(19): siRNA sense strand
gggacagccuuaugugcuu

SEQ ID NO: 792622 - RNA, 19 nt, Homo sapiens
  misc_RNA (1)...(19): siRNA sense strand
gagcagcugggcuaaauca

SEQ ID NO: 792623 - RNA, 19 nt, Homo sapiens
  misc_RNA (1)...(19): siRNA sense strand
gaagagcagcugggcuaaa

SEQ ID NO: 792624 - RNA, 19 nt, Homo sapiens
  misc_RNA (1)...(19): siRNA sense strand
cagcugcagugcccaguau

SEQ ID NO: 792625 - RNA, 19 nt, Homo sapiens
  misc_RNA (1)...(19): siRNA sense strand
gcggugcagugccagcuuu

SEQ ID NO: 792626 - RNA, 19 nt, Homo sapiens
  misc_RNA (1)...(19): siRNA sense strand
cccagccacuuguccuuua

SEQ ID NO: 792627 - RNA, 19 nt, Homo sapiens
  misc_RNA (1)...(19): siRNA sense strand
gcuaccaucuuccguugau

SEQ ID NO: 792628 - RNA, 19 nt, Homo sapiens
  misc_RNA (1)...(19): siRNA sense strand
caacugaaggcuccucuca

SEQ ID NO: 792629 - RNA, 19 nt, Homo sapiens
  misc_RNA (1)...(19): siRNA sense strand
caucaagcucugugacuuu

SEQ ID NO: 792630 - RNA, 19 nt, Homo sapiens
  misc_RNA (1)...(19): siRNA sense strand
gccaaacacugcaggaaac

SEQ ID NO: 792631 - RNA, 19 nt, Homo sapiens
  misc_RNA (1)...(19): siRNA sense strand
uggagaagcuaggcaguga

SEQ ID NO: 792632 - RNA, 19 nt, Homo sapiens
  misc_RNA (1)...(19): siRNA sense strand
gggaagagucuacugaagu

SEQ ID NO: 792633 - RNA, 19 nt, Homo sapiens
  misc_RNA (1)...(19): siRNA sense strand
gccuuggaaucccuguuua

SEQ ID NO: 792634 - RNA, 19 nt, Homo sapiens
  misc_RNA (1)...(19): siRNA sense strand
gaacuucagguccuaaagg

SEQ ID NO: 792635 - RNA, 19 nt, Homo sapiens
  misc_RNA (1)...(19): siRNA sense strand
gugcugacauccaucaaag

SEQ ID NO: 792636 - RNA, 19 nt, Homo sapiens
  misc_RNA (1)...(19): siRNA sense strand
aagagcagcugggcuaaau

SEQ ID NO: 792637 - RNA, 19 nt, Homo sapiens
  misc_RNA (1)...(19): siRNA sense strand
caguugcccuccugaguga

SEQ ID NO: 792638 - RNA, 19 nt, Homo sapiens
  misc_RNA (1)...(19): siRNA sense strand
caagcucugugacuuugga

SEQ ID NO: 792639 - RNA, 19 nt, Homo sapiens
  misc_RNA (1)...(19): siRNA sense strand
ccucacccuucuugucuuu

SEQ ID NO: 792640 - RNA, 19 nt, Homo sapiens
  misc_RNA (1)...(19): siRNA sense strand
caucuugacucaggccuau

SEQ ID NO: 792641 - RNA, 19 nt, Homo sapiens
  misc_RNA (1)...(19): siRNA sense strand
gaggaggccaugcagaaga

SEQ ID NO: 792642 - RNA, 19 nt, Homo sapiens
  misc_RNA (1)...(19): siRNA sense strand
ccucagggacucagaaguu

SEQ ID NO: 792643 - RNA, 19 nt, Homo sapiens
  misc_RNA (1)...(19): siRNA sense strand
cagcugcagugauucuguu

SEQ ID NO: 792644 - RNA, 19 nt, Homo sapiens
  misc_RNA (1)...(19): siRNA sense strand
aaccaucagucccugcuuu

SEQ ID NO: 792645 - RNA, 19 nt, Homo sapiens
  misc_RNA (1)...(19): siRNA sense strand
ggagacaaggauccuguug

SEQ ID NO: 792646 - RNA, 19 nt, Homo sapiens
  misc_RNA (1)...(19): siRNA sense strand
gaugcugaccuccuuauag

SEQ ID NO: 792647 - RNA, 19 nt, Homo sapiens
  misc_RNA (1)...(19): siRNA sense strand
uguugcagcuccucacuga

SEQ ID NO: 792648 - RNA, 19 nt, Homo sapiens
  misc_RNA (1)...(19): siRNA sense strand
ccuagaagaugacggaaaa

SEQ ID NO: 792649 - RNA, 19 nt, Homo sapiens
  misc_RNA (1)...(19): siRNA sense strand
ggaugcugaccuccuuaua

SEQ ID NO: 792650 - RNA, 19 nt, Homo sapiens
  misc_RNA (1)...(19): siRNA sense strand
ggaaaaguaccacguguug

SEQ ID NO: 792651 - RNA, 19 nt, Homo sapiens
  misc_RNA (1)...(19): siRNA sense strand
ugacagcuuugaaacugau

SEQ ID NO: 792652 - RNA, 19 nt, Homo sapiens
  misc_RNA (1)...(19): siRNA sense strand
aaaggcacaccacucuaua

SEQ ID NO: 792653 - RNA, 19 nt, Homo sapiens
  misc_RNA (1)...(19): siRNA sense strand
caagggugguggcaucaag

SEQ ID NO: 792654 - RNA, 19 nt, Homo sapiens
  misc_RNA (1)...(19): siRNA sense strand
cacagcagguugucuugga

SEQ ID NO: 792655 - RNA, 19 nt, Homo sapiens
  misc_RNA (1)...(19): siRNA sense strand
cauggaugcugaccuccuu

SEQ ID NO: 792656 - RNA, 19 nt, Homo sapiens
  misc_RNA (1)...(19): siRNA sense strand
ggaaucccuguuuauguug

SEQ ID NO: 792657 - RNA, 19 nt, Homo sapiens
  misc_RNA (1)...(19): siRNA sense strand
cagagaaggagcugaggaa

SEQ ID NO: 792658 - RNA, 19 nt, Homo sapiens
  misc_RNA (1)...(19): siRNA sense strand
guaguuguggauucuauga

SEQ ID NO: 792659 - RNA, 19 nt, Homo sapiens
  misc_RNA (1)...(19): siRNA sense strand
ggccuuggaaucccuguuu

SEQ ID NO: 792660 - RNA, 19 nt, Homo sapiens
  misc_RNA (1)...(19): siRNA sense strand
ggacuucccucaccaugua

SEQ ID NO: 792661 - RNA, 19 nt, Homo sapiens
  misc_RNA (1)...(19): siRNA sense strand
gcacgaagccaguauguuu

SEQ ID NO: 792662 - RNA, 19 nt, Homo sapiens
  misc_RNA (1)...(19): siRNA sense strand
gaacugcaguacaaagaaa

SEQ ID NO: 792663 - RNA, 19 nt, Homo sapiens
  misc_RNA (1)...(19): siRNA sense strand
gggauaggcuuuccagauu

SEQ ID NO: 792664 - RNA, 19 nt, Homo sapiens
  misc_RNA (1)...(19): siRNA sense strand
aagaacagcugcuccguua

SEQ ID NO: 792665 - RNA, 19 nt, Homo sapiens
  misc_RNA (1)...(19): siRNA sense strand
ggauaggcuuuccagauua

SEQ ID NO: 792666 - RNA, 19 nt, Homo sapiens
  misc_RNA (1)...(19): siRNA sense strand
ccgcaugucugucggauua

SEQ ID NO: 792667 - RNA, 19 nt, Homo sapiens
  misc_RNA (1)...(19): siRNA sense strand
gauaggcuuuccagauuaa

SEQ ID NO: 792668 - RNA, 19 nt, Homo sapiens
  misc_RNA (1)...(19): siRNA sense strand
gaaagagagucgccaacau

SEQ ID NO: 792669 - RNA, 19 nt, Homo sapiens
  misc_RNA (1)...(19): siRNA sense strand
gaguuugucuuugaugaua

SEQ ID NO: 792670 - RNA, 19 nt, Homo sapiens
  misc_RNA (1)...(19): siRNA sense strand
gaucggaagaugucaagua

SEQ ID NO: 792671 - RNA, 19 nt, Homo sapiens
  misc_RNA (1)...(19): siRNA sense strand
ggaauugucuacuuaugca

SEQ ID NO: 792672 - RNA, 19 nt, Homo sapiens
  misc_RNA (1)...(19): siRNA sense strand
uuucagcccucgccucuua

SEQ ID NO: 792673 - RNA, 19 nt, Homo sapiens
  misc_RNA (1)...(19): siRNA sense strand
gcaccucccuggacuugga

SEQ ID NO: 792674 - RNA, 19 nt, Homo sapiens
  misc_RNA (1)...(19): siRNA sense strand
gauugaggauccaagagaa

SEQ ID NO: 792675 - RNA, 19 nt, Homo sapiens
  misc_RNA (1)...(19): siRNA sense strand
cugagaagaugcugaagaa

SEQ ID NO: 792676 - RNA, 19 nt, Homo sapiens
  misc_RNA (1)...(19): siRNA sense strand
ugaagaagccagaaagaga

SEQ ID NO: 792677 - RNA, 19 nt, Homo sapiens
  misc_RNA (1)...(19): siRNA sense strand
agauuaaccuggcugacua

SEQ ID NO: 792678 - RNA, 19 nt, Homo sapiens
  misc_RNA (1)...(19): siRNA sense strand
gggaguuugucuuugauga

SEQ ID NO: 792679 - RNA, 19 nt, Homo sapiens
  misc_RNA (1)...(19): siRNA sense strand
acaaagagcccauccaagu

SEQ ID NO: 792680 - RNA, 19 nt, Homo sapiens
  misc_RNA (1)...(19): siRNA sense strand
gagcgcauguugaaggaau

SEQ ID NO: 792681 - RNA, 19 nt, Homo sapiens
  misc_RNA (1)...(19): siRNA sense strand
caccagcucugaaccauca

SEQ ID NO: 792682 - RNA, 19 nt, Homo sapiens
  misc_RNA (1)...(19): siRNA sense strand
gcauguugaaggaauauuu

SEQ ID NO: 792683 - RNA, 19 nt, Homo sapiens
  misc_RNA (1)...(19): siRNA sense strand
gcaggcggcugagaagaug

SEQ ID NO: 792684 - RNA, 19 nt, Homo sapiens
  misc_RNA (1)...(19): siRNA sense strand
gaagaacugcugggcauug

SEQ ID NO: 792685 - RNA, 19 nt, Homo sapiens
  misc_RNA (1)...(19): siRNA sense strand
gauagcggcuguagcaacu

SEQ ID NO: 792686 - RNA, 19 nt, Homo sapiens
  misc_RNA (1)...(19): siRNA sense strand
caagcggacucgguggaua

SEQ ID NO: 792687 - RNA, 19 nt, Homo sapiens
  misc_RNA (1)...(19): siRNA sense strand
gagcaagagcgcauguuga

SEQ ID NO: 792688 - RNA, 19 nt, Homo sapiens
  misc_RNA (1)...(19): siRNA sense strand
gcaugucugucggauuauu

SEQ ID NO: 792689 - RNA, 19 nt, Homo sapiens
  misc_RNA (1)...(19): siRNA sense strand
ccacaaagagcccauccaa

SEQ ID NO: 792690 - RNA, 19 nt, Homo sapiens
  misc_RNA (1)...(19): siRNA sense strand
ugaagaaggccuccaagga

SEQ ID NO: 792691 - RNA, 19 nt, Homo sapiens
  misc_RNA (1)...(19): siRNA sense strand
gcacacaccaucuccaucu

SEQ ID NO: 792692 - RNA, 19 nt, Homo sapiens
  misc_RNA (1)...(19): siRNA sense strand
uaugacaguuugagugaga

SEQ ID NO: 792693 - RNA, 19 nt, Homo sapiens
  misc_RNA (1)...(19): siRNA sense strand
caguauguuugcagacuuu

SEQ ID NO: 792694 - RNA, 19 nt, Homo sapiens
  misc_RNA (1)...(19): siRNA sense strand
ggaacugcaguacaaagaa

SEQ ID NO: 792695 - RNA, 19 nt, Homo sapiens
  misc_RNA (1)...(19): siRNA sense strand
ggcgggaccugaugcauag

SEQ ID NO: 792696 - RNA, 19 nt, Homo sapiens
  misc_RNA (1)...(19): siRNA sense strand
caaguacucacaccagcua

SEQ ID NO: 792697 - RNA, 19 nt, Homo sapiens
  misc_RNA (1)...(19): siRNA sense strand
caaagagcccauccaagug

SEQ ID NO: 792698 - RNA, 19 nt, Homo sapiens
  misc_RNA (1)...(19): siRNA sense strand
ggcagaggcagcugaauga

SEQ ID NO: 792699 - RNA, 19 nt, Homo sapiens
  misc_RNA (1)...(19): siRNA sense strand
uaaccuggcugacuaugac

SEQ ID NO: 792700 - RNA, 19 nt, Homo sapiens
  misc_RNA (1)...(19): siRNA sense strand
uuaacgaaguguucagaau

SEQ ID NO: 792701 - RNA, 19 nt, Homo sapiens
  misc_RNA (1)...(19): siRNA sense strand
cggaagaugucaaguacuc

SEQ ID NO: 792702 - RNA, 19 nt, Homo sapiens
  misc_RNA (1)...(19): siRNA sense strand
ccacauccgagucuauuug

SEQ ID NO: 792703 - RNA, 19 nt, Homo sapiens
  misc_RNA (1)...(19): siRNA sense strand
uggccaagcugaccgauag

SEQ ID NO: 792704 - RNA, 19 nt, Homo sapiens
  misc_RNA (1)...(19): siRNA sense strand
guaugacccacaccaaauu

SEQ ID NO: 792705 - RNA, 19 nt, Homo sapiens
  misc_RNA (1)...(19): siRNA sense strand
ccacauaaauaaacuuacc

SEQ ID NO: 792706 - RNA, 19 nt, Homo sapiens
  misc_RNA (1)...(19): siRNA sense strand
gggccaagcuggaguacac

SEQ ID NO: 792707 - RNA, 19 nt, Homo sapiens
  misc_RNA (1)...(19): siRNA sense strand
ggcugcagcucaucaagga

SEQ ID NO: 792708 - RNA, 19 nt, Homo sapiens
  misc_RNA (1)...(19): siRNA sense strand
accgauagcuucaagaaca

SEQ ID NO: 792709 - RNA, 19 nt, Homo sapiens
  misc_RNA (1)...(19): siRNA sense strand
aacgagagcugacccagau

SEQ ID NO: 792710 - RNA, 19 nt, Homo sapiens
  misc_RNA (1)...(19): siRNA sense strand
guggagacccugcaagaga

SEQ ID NO: 792711 - RNA, 19 nt, Homo sapiens
  misc_RNA (1)...(19): siRNA sense strand
cagccagccucgugaagga

SEQ ID NO: 792712 - RNA, 19 nt, Homo sapiens
  misc_RNA (1)...(19): siRNA sense strand
gcugggcauugcucagauu

SEQ ID NO: 792713 - RNA, 19 nt, Homo sapiens
  misc_RNA (1)...(19): siRNA sense strand
uaacgaaguguucagaauc

SEQ ID NO: 792714 - RNA, 19 nt, Homo sapiens
  misc_RNA (1)...(19): siRNA sense strand
gagaagacagugccaagag

SEQ ID NO: 792715 - RNA, 19 nt, Homo sapiens
  misc_RNA (1)...(19): siRNA sense strand
aacagugacucuucgagaa

SEQ ID NO: 792716 - RNA, 19 nt, Homo sapiens
  misc_RNA (1)...(19): siRNA sense strand
gcccucgccucuuaagguu

SEQ ID NO: 792717 - RNA, 19 nt, Homo sapiens
  misc_RNA (1)...(19): siRNA sense strand
aagugccgcugguguuuaa

SEQ ID NO: 792718 - RNA, 19 nt, Homo sapiens
  misc_RNA (1)...(19): siRNA sense strand
caagugccgcugguguuua

SEQ ID NO: 792719 - RNA, 19 nt, Homo sapiens
  misc_RNA (1)...(19): siRNA sense strand
ccucgccucuuaagguuga

SEQ ID NO: 792720 - RNA, 19 nt, Homo sapiens
  misc_RNA (1)...(19): siRNA sense strand
gggcauugcucagauuaac

SEQ ID NO: 792721 - RNA, 19 nt, Homo sapiens
  misc_RNA (1)...(19): siRNA sense strand
uaugacccacaccaaauua

SEQ ID NO: 792722 - RNA, 19 nt, Homo sapiens
  misc_RNA (1)...(19): siRNA sense strand
gcugagaagaugcugaaga

SEQ ID NO: 792723 - RNA, 19 nt, Homo sapiens
  misc_RNA (1)...(19): siRNA sense strand
cggagaggauucugcuuca

SEQ ID NO: 792724 - RNA, 19 nt, Homo sapiens
  misc_RNA (1)...(19): siRNA sense strand
aaagagagucgccaacauc

SEQ ID NO: 792725 - RNA, 19 nt, Homo sapiens
  misc_RNA (1)...(19): siRNA sense strand
ggugaaggaagacugcaaa

SEQ ID NO: 792726 - RNA, 19 nt, Homo sapiens
  misc_RNA (1)...(19): siRNA sense strand
acaccaaauuaaagcagaa

SEQ ID NO: 792727 - RNA, 19 nt, Homo sapiens
  misc_RNA (1)...(19): siRNA sense strand
gacaagacagaccaaacuu

SEQ ID NO: 792728 - RNA, 19 nt, Homo sapiens
  misc_RNA (1)...(19): siRNA sense strand
ucuacggccucccgcagua

SEQ ID NO: 792729 - RNA, 19 nt, Homo sapiens
  misc_RNA (1)...(19): siRNA sense strand
ugagugagcuccggaccau

SEQ ID NO: 792730 - RNA, 19 nt, Homo sapiens
  misc_RNA (1)...(19): siRNA sense strand
gagauugaucggaagaugu

SEQ ID NO: 792731 - RNA, 19 nt, Homo sapiens
  misc_RNA (1)...(19): siRNA sense strand
ccaagugccgcugguguuu

SEQ ID NO: 792732 - RNA, 19 nt, Homo sapiens
  misc_RNA (1)...(19): siRNA sense strand
cgcaggcuaucaugaguga

SEQ ID NO: 792733 - RNA, 19 nt, Homo sapiens
  misc_RNA (1)...(19): siRNA sense strand
caagagauugaucggaaga

SEQ ID NO: 792734 - RNA, 19 nt, Homo sapiens
  misc_RNA (1)...(19): siRNA sense strand
guagugacagcgacaguuc

SEQ ID NO: 792735 - RNA, 19 nt, Homo sapiens
  misc_RNA (1)...(19): siRNA sense strand
ccaguauguuugcagacuu

SEQ ID NO: 792736 - RNA, 19 nt, Homo sapiens
  misc_RNA (1)...(19): siRNA sense strand
gagcacgaagccaguaugu

SEQ ID NO: 792737 - RNA, 19 nt, Homo sapiens
  misc_RNA (1)...(19): siRNA sense strand
uuauacguguguucaguga

SEQ ID NO: 792738 - RNA, 19 nt, Homo sapiens
  misc_RNA (1)...(19): siRNA sense strand
cucauucucuggauauuca

SEQ ID NO: 792739 - RNA, 19 nt, Homo sapiens
  misc_RNA (1)...(19): siRNA sense strand
ugaccgauagcuucaagaa

SEQ ID NO: 792740 - RNA, 19 nt, Homo sapiens
  misc_RNA (1)...(19): siRNA sense strand
ugacccacaccaaauuaaa

SEQ ID NO: 792741 - RNA, 19 nt, Homo sapiens
  misc_RNA (1)...(19): siRNA sense strand
ggauucugcuucaggaaaa

SEQ ID NO: 792742 - RNA, 19 nt, Homo sapiens
  misc_RNA (1)...(19): siRNA sense strand
guuugcagacuuuaucgua

SEQ ID NO: 792743 - RNA, 19 nt, Homo sapiens
  misc_RNA (1)...(19): siRNA sense strand
gaaaccaacacggaagauc

SEQ ID NO: 792744 - RNA, 19 nt, Homo sapiens
  misc_RNA (1)...(19): siRNA sense strand
guggauagcggcuguagca

SEQ ID NO: 792745 - RNA, 19 nt, Homo sapiens
  misc_RNA (1)...(19): siRNA sense strand
cgagagcugacccagauga

SEQ ID NO: 792746 - RNA, 19 nt, Homo sapiens
  misc_RNA (1)...(19): siRNA sense strand
gcagacaagacagaccaaa

SEQ ID NO: 792747 - RNA, 19 nt, Homo sapiens
  misc_RNA (1)...(19): siRNA sense strand
ggcauuccgugcagguguu

SEQ ID NO: 792748 - RNA, 19 nt, Homo sapiens
  misc_RNA (1)...(19): siRNA sense strand
gcucguacgccagcucauu

SEQ ID NO: 792749 - RNA, 19 nt, Homo sapiens
  misc_RNA (1)...(19): siRNA sense strand
uggagacccugcaagagau

SEQ ID NO: 792750 - RNA, 19 nt, Homo sapiens
  misc_RNA (1)...(19): siRNA sense strand
cuccgcagcugcaggaaga

SEQ ID NO: 792751 - RNA, 19 nt, Homo sapiens
  misc_RNA (1)...(19): siRNA sense strand
cuaccuccagucccaguua

SEQ ID NO: 792752 - RNA, 19 nt, Homo sapiens
  misc_RNA (1)...(19): siRNA sense strand
aaggaauugucuacuuaug

SEQ ID NO: 792753 - RNA, 19 nt, Homo sapiens
  misc_RNA (1)...(19): siRNA sense strand
gccuggcgaugcuggugua

SEQ ID NO: 792754 - RNA, 19 nt, Homo sapiens
  misc_RNA (1)...(19): siRNA sense strand
gaacagcugcuccguuacc

SEQ ID NO: 792755 - RNA, 19 nt, Homo sapiens
  misc_RNA (1)...(19): siRNA sense strand
gcugaccgauagcuucaag

SEQ ID NO: 792756 - RNA, 19 nt, Homo sapiens
  misc_RNA (1)...(19): siRNA sense strand
agagauugaucggaagaug

SEQ ID NO: 792757 - RNA, 19 nt, Homo sapiens
  misc_RNA (1)...(19): siRNA sense strand
ggaagaacugcugggcauu

SEQ ID NO: 792758 - RNA, 19 nt, Homo sapiens
  misc_RNA (1)...(19): siRNA sense strand
gagcggcagacaagacaga

SEQ ID NO: 792759 - RNA, 19 nt, Homo sapiens
  misc_RNA (1)...(19): siRNA sense strand
uguccgaaauacuuuggaa

SEQ ID NO: 792760 - RNA, 19 nt, Homo sapiens
  misc_RNA (1)...(19): siRNA sense strand
gcgcugagguguacaugaa

SEQ ID NO: 792761 - RNA, 19 nt, Homo sapiens
  misc_RNA (1)...(19): siRNA sense strand
gcaaacacccugaggagaa

SEQ ID NO: 792762 - RNA, 19 nt, Homo sapiens
  misc_RNA (1)...(19): siRNA sense strand
caacaagucuuuugaaguu

SEQ ID NO: 792763 - RNA, 19 nt, Homo sapiens
  misc_RNA (1)...(19): siRNA sense strand
aaacauggauuuggcauug

SEQ ID NO: 792764 - RNA, 19 nt, Homo sapiens
  misc_RNA (1)...(19): siRNA sense strand
gagagaggcuccacugaca

SEQ ID NO: 792765 - RNA, 19 nt, Homo sapiens
  misc_RNA (1)...(19): siRNA sense strand
gggaugaccuggcuucugu

SEQ ID NO: 792766 - RNA, 19 nt, Homo sapiens
  misc_RNA (1)...(19): siRNA sense strand
gccaagcgcuucugaaagu

SEQ ID NO: 792767 - RNA, 19 nt, Homo sapiens
  misc_RNA (1)...(19): siRNA sense strand
gagcugacaccaaaggaua

SEQ ID NO: 792768 - RNA, 19 nt, Homo sapiens
  misc_RNA (1)...(19): siRNA sense strand
gcacaggcucgcagcuuua

SEQ ID NO: 792769 - RNA, 19 nt, Homo sapiens
  misc_RNA (1)...(19): siRNA sense strand
aggcagagcugacaccaaa

SEQ ID NO: 792770 - RNA, 19 nt, Homo sapiens
  misc_RNA (1)...(19): siRNA sense strand
caacaucagugacccaucu

SEQ ID NO: 792771 - RNA, 19 nt, Homo sapiens
  misc_RNA (1)...(19): siRNA sense strand
ggacgucccugagcacuuc

SEQ ID NO: 792772 - RNA, 19 nt, Homo sapiens
  misc_RNA (1)...(19): siRNA sense strand
cgagugcucuucuacuuug

SEQ ID NO: 792773 - RNA, 19 nt, Homo sapiens
  misc_RNA (1)...(19): siRNA sense strand
ggacacagcaggcaugauc

SEQ ID NO: 792774 - RNA, 19 nt, Homo sapiens
  misc_RNA (1)...(19): siRNA sense strand
gaggaggguuuauggaugu

SEQ ID NO: 792775 - RNA, 19 nt, Homo sapiens
  misc_RNA (1)...(19): siRNA sense strand
ggauaaagggacaaucaaa

SEQ ID NO: 792776 - RNA, 19 nt, Homo sapiens
  misc_RNA (1)...(19): siRNA sense strand
acaugucccugcaacuuua

SEQ ID NO: 792777 - RNA, 19 nt, Homo sapiens
  misc_RNA (1)...(19): siRNA sense strand
ggaagauuaugauguuucu

SEQ ID NO: 792778 - RNA, 19 nt, Homo sapiens
  misc_RNA (1)...(19): siRNA sense strand
gggugacgguccagauuaa

SEQ ID NO: 792779 - RNA, 19 nt, Homo sapiens
  misc_RNA (1)...(19): siRNA sense strand
caugcagggucuuccaaua

SEQ ID NO: 792780 - RNA, 19 nt, Homo sapiens
  misc_RNA (1)...(19): siRNA sense strand
gcugugcccugacuaccua

SEQ ID NO: 792781 - RNA, 19 nt, Homo sapiens
  misc_RNA (1)...(19): siRNA sense strand
gcccugagguggagagaga

SEQ ID NO: 792782 - RNA, 19 nt, Homo sapiens
  misc_RNA (1)...(19): siRNA sense strand
gauugcagcucccucuguu

SEQ ID NO: 792783 - RNA, 19 nt, Homo sapiens
  misc_RNA (1)...(19): siRNA sense strand
gcuggugccuuaacgauca

SEQ ID NO: 792784 - RNA, 19 nt, Homo sapiens
  misc_RNA (1)...(19): siRNA sense strand
guccagagccauccaauga

SEQ ID NO: 792785 - RNA, 19 nt, Homo sapiens
  misc_RNA (1)...(19): siRNA sense strand
gggaugaauucagaacauu

SEQ ID NO: 792786 - RNA, 19 nt, Homo sapiens
  misc_RNA (1)...(19): siRNA sense strand
aguuugagcuucugauuga

SEQ ID NO: 792787 - RNA, 19 nt, Homo sapiens
  misc_RNA (1)...(19): siRNA sense strand
ccaagggcauccaguuugu

SEQ ID NO: 792788 - RNA, 19 nt, Homo sapiens
  misc_RNA (1)...(19): siRNA sense strand
gaugggagguccagcaaac

SEQ ID NO: 792789 - RNA, 19 nt, Homo sapiens
  misc_RNA (1)...(19): siRNA sense strand
gaacuggaagauuaugaug

SEQ ID NO: 792790 - RNA, 19 nt, Homo sapiens
  misc_RNA (1)...(19): siRNA sense strand
ggugguugcucuccuggaa

SEQ ID NO: 792791 - RNA, 19 nt, Homo sapiens
  misc_RNA (1)...(19): siRNA sense strand
caacgucuuugucuugaag

SEQ ID NO: 792792 - RNA, 19 nt, Homo sapiens
  misc_RNA (1)...(19): siRNA sense strand
gggccaagcgcuucugaaa

SEQ ID NO: 792793 - RNA, 19 nt, Homo sapiens
  misc_RNA (1)...(19): siRNA sense strand
gccgagugcucuucuacuu

SEQ ID NO: 792794 - RNA, 19 nt, Homo sapiens
  misc_RNA (1)...(19): siRNA sense strand
gagaggcuccacugacaaa

SEQ ID NO: 792795 - RNA, 19 nt, Homo sapiens
  misc_RNA (1)...(19): siRNA sense strand
gaacaugauccacuuugca

SEQ ID NO: 792796 - RNA, 19 nt, Homo sapiens
  misc_RNA (1)...(19): siRNA sense strand
caaacacccugaggagaau

SEQ ID NO: 792797 - RNA, 19 nt, Homo sapiens
  misc_RNA (1)...(19): siRNA sense strand
ugauguuucugauuccuuu

SEQ ID NO: 792798 - RNA, 19 nt, Homo sapiens
  misc_RNA (1)...(19): siRNA sense strand
ccaccaaccuggacuacca

SEQ ID NO: 792799 - RNA, 19 nt, Homo sapiens
  misc_RNA (1)...(19): siRNA sense strand
gcacaggaccaaccagaag

SEQ ID NO: 792800 - RNA, 19 nt, Homo sapiens
  misc_RNA (1)...(19): siRNA sense strand
caccaaaggauaacaucua

SEQ ID NO: 792801 - RNA, 19 nt, Homo sapiens
  misc_RNA (1)...(19): siRNA sense strand
agagagagaccaccgacua

SEQ ID NO: 792802 - RNA, 19 nt, Homo sapiens
  misc_RNA (1)...(19): siRNA sense strand
aguaugaguuccaguaugu

SEQ ID NO: 792803 - RNA, 19 nt, Homo sapiens
  misc_RNA (1)...(19): siRNA sense strand
gaaacauggauuuggcauu

SEQ ID NO: 792804 - RNA, 19 nt, Homo sapiens
  misc_RNA (1)...(19): siRNA sense strand
ggguuugccuucaccgaaa

SEQ ID NO: 792805 - RNA, 19 nt, Homo sapiens
  misc_RNA (1)...(19): siRNA sense strand
acuggaagauuaugauguu

SEQ ID NO: 792806 - RNA, 19 nt, Homo sapiens
  misc_RNA (1)...(19): siRNA sense strand
ccaaggugauggcacugaa

SEQ ID NO: 792807 - RNA, 19 nt, Homo sapiens
  misc_RNA (1)...(19): siRNA sense strand
gcaacuuuacccuguacua

SEQ ID NO: 792808 - RNA, 19 nt, Homo sapiens
  misc_RNA (1)...(19): siRNA sense strand
aauaugccaucuuguccua

SEQ ID NO: 792809 - RNA, 19 nt, Homo sapiens
  misc_RNA (1)...(19): siRNA sense strand
ccagagccauccaaugagu

SEQ ID NO: 792810 - RNA, 19 nt, Homo sapiens
  misc_RNA (1)...(19): siRNA sense strand
gcaaacgccaugugaccaa

SEQ ID NO: 792811 - RNA, 19 nt, Homo sapiens
  misc_RNA (1)...(19): siRNA sense strand
aaacgggacugguggugau

SEQ ID NO: 792812 - RNA, 19 nt, Homo sapiens
  misc_RNA (1)...(19): siRNA sense strand
ggcugaauaugccaucuug

SEQ ID NO: 792813 - RNA, 19 nt, Homo sapiens
  misc_RNA (1)...(19): siRNA sense strand
ucacagccuuuguccugaa

SEQ ID NO: 792814 - RNA, 19 nt, Homo sapiens
  misc_RNA (1)...(19): siRNA sense strand
ccagagguccaguucauug

SEQ ID NO: 792815 - RNA, 19 nt, Homo sapiens
  misc_RNA (1)...(19): siRNA sense strand
caccagagguccaguucau

SEQ ID NO: 792816 - RNA, 19 nt, Homo sapiens
  misc_RNA (1)...(19): siRNA sense strand
acaaguaugaguuccagua

SEQ ID NO: 792817 - RNA, 19 nt, Homo sapiens
  misc_RNA (1)...(19): siRNA sense strand
ggaagguggagcuauccua

SEQ ID NO: 792818 - RNA, 19 nt, Homo sapiens
  misc_RNA (1)...(19): siRNA sense strand
agauugaugucaccuacaa

SEQ ID NO: 792819 - RNA, 19 nt, Homo sapiens
  misc_RNA (1)...(19): siRNA sense strand
cacuggagccugucaaauu

SEQ ID NO: 792820 - RNA, 19 nt, Homo sapiens
  misc_RNA (1)...(19): siRNA sense strand
gcagaacaugauccacuuu

SEQ ID NO: 792821 - RNA, 19 nt, Homo sapiens
  misc_RNA (1)...(19): siRNA sense strand
cagcaggcaugaucgagau

SEQ ID NO: 792822 - RNA, 19 nt, Homo sapiens
  misc_RNA (1)...(19): siRNA sense strand
ugacguauucagcaaauga

SEQ ID NO: 792823 - RNA, 19 nt, Homo sapiens
  misc_RNA (1)...(19): siRNA sense strand
guccaccucucagggcuua

SEQ ID NO: 792824 - RNA, 19 nt, Homo sapiens
  misc_RNA (1)...(19): siRNA sense strand
gauaaagggacaaucaaac

SEQ ID NO: 792825 - RNA, 19 nt, Homo sapiens
  misc_RNA (1)...(19): siRNA sense strand
caaguuugagcuucugauu

SEQ ID NO: 792826 - RNA, 19 nt, Homo sapiens
  misc_RNA (1)...(19): siRNA sense strand
ggaugaagagguaugaagu

SEQ ID NO: 792827 - RNA, 19 nt, Homo sapiens
  misc_RNA (1)...(19): siRNA sense strand
ccagaacagagaagagaaa

SEQ ID NO: 792828 - RNA, 19 nt, Homo sapiens
  misc_RNA (1)...(19): siRNA sense strand
caccaaggacucuggguuu

SEQ ID NO: 792829 - RNA, 19 nt, Homo sapiens
  misc_RNA (1)...(19): siRNA sense strand
ucagugacguauucagcaa

SEQ ID NO: 792830 - RNA, 19 nt, Homo sapiens
  misc_RNA (1)...(19): siRNA sense strand
gccgacagccuucaguuug

SEQ ID NO: 792831 - RNA, 19 nt, Homo sapiens
  misc_RNA (1)...(19): siRNA sense strand
ccacaugucccugcaacuu

SEQ ID NO: 792832 - RNA, 19 nt, Homo sapiens
  misc_RNA (1)...(19): siRNA sense strand
caucuacaccagugaaguu

SEQ ID NO: 792833 - RNA, 19 nt, Homo sapiens
  misc_RNA (1)...(19): siRNA sense strand
gaugaagagguaugaagug

SEQ ID NO: 792834 - RNA, 19 nt, Homo sapiens
  misc_RNA (1)...(19): siRNA sense strand
ccuacgcccuucugaccua

SEQ ID NO: 792835 - RNA, 19 nt, Homo sapiens
  misc_RNA (1)...(19): siRNA sense strand
ggaacuggaagauuaugau

SEQ ID NO: 792836 - RNA, 19 nt, Homo sapiens
  misc_RNA (1)...(19): siRNA sense strand
ugugugaccucucuucauc

SEQ ID NO: 792837 - RNA, 19 nt, Homo sapiens
  misc_RNA (1)...(19): siRNA sense strand
gaaguucagaaguaugugu

SEQ ID NO: 792838 - RNA, 19 nt, Homo sapiens
  misc_RNA (1)...(19): siRNA sense strand
gcagggucuuccaauaugg

SEQ ID NO: 792839 - RNA, 19 nt, Homo sapiens
  misc_RNA (1)...(19): siRNA sense strand
cgcacaggcucgcagcuuu

SEQ ID NO: 792840 - RNA, 19 nt, Homo sapiens
  misc_RNA (1)...(19): siRNA sense strand
cucaguaccugcccagcua

SEQ ID NO: 792841 - RNA, 19 nt, Homo sapiens
  misc_RNA (1)...(19): siRNA sense strand
cuacaccagugaaguugug

SEQ ID NO: 792842 - RNA, 19 nt, Homo sapiens
  misc_RNA (1)...(19): siRNA sense strand
uaacaucuacaccagugaa

SEQ ID NO: 792843 - RNA, 19 nt, Homo sapiens
  misc_RNA (1)...(19): siRNA sense strand
caaguaugaguuccaguau

SEQ ID NO: 792844 - RNA, 19 nt, Homo sapiens
  misc_RNA (1)...(19): siRNA sense strand
acuggagccugucaaauuc

SEQ ID NO: 792845 - RNA, 19 nt, Homo sapiens
  misc_RNA (1)...(19): siRNA sense strand
guggagagcagaacaugau

SEQ ID NO: 792846 - RNA, 19 nt, Homo sapiens
  misc_RNA (1)...(19): siRNA sense strand
gagcagcgggaaccuggaa

SEQ ID NO: 792847 - RNA, 19 nt, Homo sapiens
  misc_RNA (1)...(19): siRNA sense strand
ugacaaagcgaggcacuuc

SEQ ID NO: 792848 - RNA, 19 nt, Homo sapiens
  misc_RNA (1)...(19): siRNA sense strand
agaggcagcugguggacau

SEQ ID NO: 792849 - RNA, 19 nt, Homo sapiens
  misc_RNA (1)...(19): siRNA sense strand
gggaggaggguuuauggau

SEQ ID NO: 792850 - RNA, 19 nt, Homo sapiens
  misc_RNA (1)...(19): siRNA sense strand
ccaaaucugaggccuguca

SEQ ID NO: 792851 - RNA, 19 nt, Homo sapiens
  misc_RNA (1)...(19): siRNA sense strand
gggcgcuucuguauucauc

SEQ ID NO: 792852 - RNA, 19 nt, Homo sapiens
  misc_RNA (1)...(19): siRNA sense strand
gaagcuggaagccuacauc

SEQ ID NO: 792853 - RNA, 19 nt, Homo sapiens
  misc_RNA (1)...(19): siRNA sense strand
ugcagggucuuccaauaug

SEQ ID NO: 792854 - RNA, 19 nt, Homo sapiens
  misc_RNA (1)...(19): siRNA sense strand
acaccugcaccuugagaua

SEQ ID NO: 792855 - RNA, 19 nt, Homo sapiens
  misc_RNA (1)...(19): siRNA sense strand
gaggguuuauggaugucaa

SEQ ID NO: 792856 - RNA, 19 nt, Homo sapiens
  misc_RNA (1)...(19): siRNA sense strand
gaccugggacucaacaaca

SEQ ID NO: 792857 - RNA, 19 nt, Homo sapiens
  misc_RNA (1)...(19): siRNA sense strand
aaagggacaaucaaacuca

SEQ ID NO: 792858 - RNA, 19 nt, Homo sapiens
  misc_RNA (1)...(19): siRNA sense strand
gcacccaacgucuuugucu

SEQ ID NO: 792859 - RNA, 19 nt, Homo sapiens
  misc_RNA (1)...(19): siRNA sense strand
caccgucucuccaaaucug

SEQ ID NO: 792860 - RNA, 19 nt, Homo sapiens
  misc_RNA (1)...(19): siRNA sense strand
ccacaagcaugaaggagaa

SEQ ID NO: 792861 - RNA, 19 nt, Homo sapiens
  misc_RNA (1)...(19): siRNA sense strand
caugcaaccucauaauauu

SEQ ID NO: 792862 - RNA, 19 nt, Homo sapiens
  misc_RNA (1)...(19): siRNA sense strand
gacaugcaaccucauaaua

SEQ ID NO: 792863 - RNA, 19 nt, Homo sapiens
  misc_RNA (1)...(19): siRNA sense strand
ucucugaagugcaucauaa

SEQ ID NO: 792864 - RNA, 19 nt, Homo sapiens
  misc_RNA (1)...(19): siRNA sense strand
ugaggaggaugacaugauu

SEQ ID NO: 792865 - RNA, 19 nt, Homo sapiens
  misc_RNA (1)...(19): siRNA sense strand
gauaagcaccggcugauca

SEQ ID NO: 792866 - RNA, 19 nt, Homo sapiens
  misc_RNA (1)...(19): siRNA sense strand
gaagacagacaaggaagaa

SEQ ID NO: 792867 - RNA, 19 nt, Homo sapiens
  misc_RNA (1)...(19): siRNA sense strand
gacagucucuuugaaugaa

SEQ ID NO: 792868 - RNA, 19 nt, Homo sapiens
  misc_RNA (1)...(19): siRNA sense strand
ucaaggagcaugucaaauc

SEQ ID NO: 792869 - RNA, 19 nt, Homo sapiens
  misc_RNA (1)...(19): siRNA sense strand
caaaguagugggccagauu

SEQ ID NO: 792870 - RNA, 19 nt, Homo sapiens
  misc_RNA (1)...(19): siRNA sense strand
ucaaaucccacaagcauga

SEQ ID NO: 792871 - RNA, 19 nt, Homo sapiens
  misc_RNA (1)...(19): siRNA sense strand
ggacaugcaaccucauaau

SEQ ID NO: 792872 - RNA, 19 nt, Homo sapiens
  misc_RNA (1)...(19): siRNA sense strand
aaaccaaccugucuaagcu

SEQ ID NO: 792873 - RNA, 19 nt, Homo sapiens
  misc_RNA (1)...(19): siRNA sense strand
gaaaccaaccugucuaagc

SEQ ID NO: 792874 - RNA, 19 nt, Homo sapiens
  misc_RNA (1)...(19): siRNA sense strand
ggaagacagacaaggaaga

SEQ ID NO: 792875 - RNA, 19 nt, Homo sapiens
  misc_RNA (1)...(19): siRNA sense strand
aaacuugucccuuggucua

SEQ ID NO: 792876 - RNA, 19 nt, Homo sapiens
  misc_RNA (1)...(19): siRNA sense strand
aaagaagucugaggaggau

SEQ ID NO: 792877 - RNA, 19 nt, Homo sapiens
  misc_RNA (1)...(19): siRNA sense strand
ucauaaacuuggauaagca

SEQ ID NO: 792878 - RNA, 19 nt, Homo sapiens
  misc_RNA (1)...(19): siRNA sense strand
ggacagauugggacucaag

SEQ ID NO: 792879 - RNA, 19 nt, Homo sapiens
  misc_RNA (1)...(19): siRNA sense strand
gugaaagccuugguugaca

SEQ ID NO: 792880 - RNA, 19 nt, Homo sapiens
  misc_RNA (1)...(19): siRNA sense strand
caaggagcaugucaaaucc

SEQ ID NO: 792881 - RNA, 19 nt, Homo sapiens
  misc_RNA (1)...(19): siRNA sense strand
cagcugugguugaugacaa

SEQ ID NO: 792882 - RNA, 19 nt, Homo sapiens
  misc_RNA (1)...(19): siRNA sense strand
acaugcaaccucauaauau

SEQ ID NO: 792883 - RNA, 19 nt, Homo sapiens
  misc_RNA (1)...(19): siRNA sense strand
agacagacaaggaagaaau

SEQ ID NO: 792884 - RNA, 19 nt, Homo sapiens
  misc_RNA (1)...(19): siRNA sense strand
guggacagauugggacuca

SEQ ID NO: 792885 - RNA, 19 nt, Homo sapiens
  misc_RNA (1)...(19): siRNA sense strand
ugaagcaggcggugcaguu

SEQ ID NO: 792886 - RNA, 19 nt, Homo sapiens
  misc_RNA (1)...(19): siRNA sense strand
gaagcaggcggugcaguuc

SEQ ID NO: 792887 - RNA, 19 nt, Homo sapiens
  misc_RNA (1)...(19): siRNA sense strand
gaggaggaugacaugauuu

SEQ ID NO: 792888 - RNA, 19 nt, Homo sapiens
  misc_RNA (1)...(19): siRNA sense strand
ggacucaaggagcauguca

SEQ ID NO: 792889 - RNA, 19 nt, Homo sapiens
  misc_RNA (1)...(19): siRNA sense strand
uauaaucucaucucuuugg

SEQ ID NO: 792890 - RNA, 19 nt, Homo sapiens
  misc_RNA (1)...(19): siRNA sense strand
caucauaaacuuggauaag

SEQ ID NO: 792891 - RNA, 19 nt, Homo sapiens
  misc_RNA (1)...(19): siRNA sense strand
uggaaaccaaccugucuaa

SEQ ID NO: 792892 - RNA, 19 nt, Homo sapiens
  misc_RNA (1)...(19): siRNA sense strand
ccucuaagacgaacaaacu

SEQ ID NO: 792893 - RNA, 19 nt, Homo sapiens
  misc_RNA (1)...(19): siRNA sense strand
ugucaaaucccacaagcau

SEQ ID NO: 792894 - RNA, 19 nt, Homo sapiens
  misc_RNA (1)...(19): siRNA sense strand
agacgaacaaacucaauca

SEQ ID NO: 792895 - RNA, 19 nt, Homo sapiens
  misc_RNA (1)...(19): siRNA sense strand
gacagacaaggaagaaauc

SEQ ID NO: 792896 - RNA, 19 nt, Homo sapiens
  misc_RNA (1)...(19): siRNA sense strand
gcaucauaaacuuggauaa

SEQ ID NO: 792897 - RNA, 19 nt, Homo sapiens
  misc_RNA (1)...(19): siRNA sense strand
caaacucaaucaggcuaag

SEQ ID NO: 792898 - RNA, 19 nt, Homo sapiens
  misc_RNA (1)...(19): siRNA sense strand
ggaugugaaagccuugguu

SEQ ID NO: 792899 - RNA, 19 nt, Homo sapiens
  misc_RNA (1)...(19): siRNA sense strand
cagauugagcaccuaguga

SEQ ID NO: 792900 - RNA, 19 nt, Homo sapiens
  misc_RNA (1)...(19): siRNA sense strand
acucaaggagcaugucaaa

SEQ ID NO: 792901 - RNA, 19 nt, Homo sapiens
  misc_RNA (1)...(19): siRNA sense strand
gaaagccuugguugacaca

SEQ ID NO: 792902 - RNA, 19 nt, Homo sapiens
  misc_RNA (1)...(19): siRNA sense strand
aaggacaugcaaccucaua

SEQ ID NO: 792903 - RNA, 19 nt, Homo sapiens
  misc_RNA (1)...(19): siRNA sense strand
uaagacgaacaaacucaau

SEQ ID NO: 792904 - RNA, 19 nt, Homo sapiens
  misc_RNA (1)...(19): siRNA sense strand
ccagauugagcaccuagug

SEQ ID NO: 792905 - RNA, 19 nt, Homo sapiens
  misc_RNA (1)...(19): siRNA sense strand
aaaguagugggccagauug

SEQ ID NO: 792906 - RNA, 19 nt, Homo sapiens
  misc_RNA (1)...(19): siRNA sense strand
ccuauauaaucucaucucu

SEQ ID NO: 792907 - RNA, 19 nt, Homo sapiens
  misc_RNA (1)...(19): siRNA sense strand
agaagucugaggaggauga

SEQ ID NO: 792908 - RNA, 19 nt, Homo sapiens
  misc_RNA (1)...(19): siRNA sense strand
gcaaccucauaauauucug

SEQ ID NO: 792909 - RNA, 19 nt, Homo sapiens
  misc_RNA (1)...(19): siRNA sense strand
ucaaaguagugggccagau

SEQ ID NO: 792910 - RNA, 19 nt, Homo sapiens
  misc_RNA (1)...(19): siRNA sense strand
ucuacagacucuccgaucu

SEQ ID NO: 792911 - RNA, 19 nt, Homo sapiens
  misc_RNA (1)...(19): siRNA sense strand
ggaaauggcuccuacugaa

SEQ ID NO: 792912 - RNA, 19 nt, Homo sapiens
  misc_RNA (1)...(19): siRNA sense strand
ggaaucaucucuguaauca

SEQ ID NO: 792913 - RNA, 19 nt, Homo sapiens
  misc_RNA (1)...(19): siRNA sense strand
gaggagaagucaaaggaau

SEQ ID NO: 792914 - RNA, 19 nt, Homo sapiens
  misc_RNA (1)...(19): siRNA sense strand
cugcaaggcucccaaaguu

SEQ ID NO: 792915 - RNA, 19 nt, Homo sapiens
  misc_RNA (1)...(19): siRNA sense strand
ggucaugccuuuggccauu

SEQ ID NO: 792916 - RNA, 19 nt, Homo sapiens
  misc_RNA (1)...(19): siRNA sense strand
gcauacugaucacggguuu

SEQ ID NO: 792917 - RNA, 19 nt, Homo sapiens
  misc_RNA (1)...(19): siRNA sense strand
aaggaacccuggccaauga

SEQ ID NO: 792918 - RNA, 19 nt, Homo sapiens
  misc_RNA (1)...(19): siRNA sense strand
caacuacaaugcccacuac

SEQ ID NO: 792919 - RNA, 19 nt, Homo sapiens
  misc_RNA (1)...(19): siRNA sense strand
ggacguccauucucaucau

SEQ ID NO: 792920 - RNA, 19 nt, Homo sapiens
  misc_RNA (1)...(19): siRNA sense strand
guugaaaguuugcuuccuu

SEQ ID NO: 792921 - RNA, 19 nt, Homo sapiens
  misc_RNA (1)...(19): siRNA sense strand
aaucaucucuguaaucagu

SEQ ID NO: 792922 - RNA, 19 nt, Homo sapiens
  misc_RNA (1)...(19): siRNA sense strand
gcaaggcucccaaaguugu

SEQ ID NO: 792923 - RNA, 19 nt, Homo sapiens
  misc_RNA (1)...(19): siRNA sense strand
gcaacgugcuggucaucug

SEQ ID NO: 792924 - RNA, 19 nt, Homo sapiens
  misc_RNA (1)...(19): siRNA sense strand
ugacuugccuacugcuuau

SEQ ID NO: 792925 - RNA, 19 nt, Homo sapiens
  misc_RNA (1)...(19): siRNA sense strand
gcaucacaauccacuucua

SEQ ID NO: 792926 - RNA, 19 nt, Homo sapiens
  misc_RNA (1)...(19): siRNA sense strand
gcaacuacaaugcccacua

SEQ ID NO: 792927 - RNA, 19 nt, Homo sapiens
  misc_RNA (1)...(19): siRNA sense strand
gaaggguaggcaacacuuu

SEQ ID NO: 792928 - RNA, 19 nt, Homo sapiens
  misc_RNA (1)...(19): siRNA sense strand
cagagcugauuguaacuga

SEQ ID NO: 792929 - RNA, 19 nt, Homo sapiens
  misc_RNA (1)...(19): siRNA sense strand
gaucacggguuugggaauc

SEQ ID NO: 792930 - RNA, 19 nt, Homo sapiens
  misc_RNA (1)...(19): siRNA sense strand
gcagaccaccaccuucuau

SEQ ID NO: 792931 - RNA, 19 nt, Homo sapiens
  misc_RNA (1)...(19): siRNA sense strand
ccagggaugacauggauuu

SEQ ID NO: 792932 - RNA, 19 nt, Homo sapiens
  misc_RNA (1)...(19): siRNA sense strand
uaacagcaccaaucaugug

SEQ ID NO: 792933 - RNA, 19 nt, Homo sapiens
  misc_RNA (1)...(19): siRNA sense strand
ucauuccaguugaaaguuu

SEQ ID NO: 792934 - RNA, 19 nt, Homo sapiens
  misc_RNA (1)...(19): siRNA sense strand
ucauguggcucuucauucu

SEQ ID NO: 792935 - RNA, 19 nt, Homo sapiens
  misc_RNA (1)...(19): siRNA sense strand
gaccaccaccuucuauuuc

SEQ ID NO: 792936 - RNA, 19 nt, Homo sapiens
  misc_RNA (1)...(19): siRNA sense strand
gaagucaaaggaauagaag

SEQ ID NO: 792937 - RNA, 19 nt, Homo sapiens
  misc_RNA (1)...(19): siRNA sense strand
ggucaagcuuaccgucaga

SEQ ID NO: 792938 - RNA, 19 nt, Homo sapiens
  misc_RNA (1)...(19): siRNA sense strand
caaaggaacccuggccaau

SEQ ID NO: 792939 - RNA, 19 nt, Homo sapiens
  misc_RNA (1)...(19): siRNA sense strand
cuacaucaccauggaaauu

SEQ ID NO: 792940 - RNA, 19 nt, Homo sapiens
  misc_RNA (1)...(19): siRNA sense strand
ccuaacagcaccaaucaug

SEQ ID NO: 792941 - RNA, 19 nt, Homo sapiens
  misc_RNA (1)...(19): siRNA sense strand
ccagucauguggcucuuca

SEQ ID NO: 792942 - RNA, 19 nt, Homo sapiens
  misc_RNA (1)...(19): siRNA sense strand
ggaggagaagucaaaggaa

SEQ ID NO: 792943 - RNA, 19 nt, Homo sapiens
  misc_RNA (1)...(19): siRNA sense strand
acaaugcccacuacaagaa

SEQ ID NO: 792944 - RNA, 19 nt, Homo sapiens
  misc_RNA (1)...(19): siRNA sense strand
ggagaagucaaaggaauag

SEQ ID NO: 792945 - RNA, 19 nt, Homo sapiens
  misc_RNA (1)...(19): siRNA sense strand
cguccauucucaucauuug

SEQ ID NO: 792946 - RNA, 19 nt, Homo sapiens
  misc_RNA (1)...(19): siRNA sense strand
agaccuaucaggcaacaaa

SEQ ID NO: 792947 - RNA, 19 nt, Homo sapiens
  misc_RNA (1)...(19): siRNA sense strand
agaccaccaccuucuauuu

SEQ ID NO: 792948 - RNA, 19 nt, Homo sapiens
  misc_RNA (1)...(19): siRNA sense strand
uguccugccugaccaaaga

SEQ ID NO: 792949 - RNA, 19 nt, Homo sapiens
  misc_RNA (1)...(19): siRNA sense strand
cuccuuggcucucauuuca

SEQ ID NO: 792950 - RNA, 19 nt, Homo sapiens
  misc_RNA (1)...(19): siRNA sense strand
uuaccuacaucaccaugga

SEQ ID NO: 792951 - RNA, 19 nt, Homo sapiens
  misc_RNA (1)...(19): siRNA sense strand
gggaaucaucucuguaauc

SEQ ID NO: 792952 - RNA, 19 nt, Homo sapiens
  misc_RNA (1)...(19): siRNA sense strand
acaagaaucaccccaaaua

SEQ ID NO: 792953 - RNA, 19 nt, Homo sapiens
  misc_RNA (1)...(19): siRNA sense strand
gaggcuauuuccgugacua

SEQ ID NO: 792954 - RNA, 19 nt, Homo sapiens
  misc_RNA (1)...(19): siRNA sense strand
gaaauggcuccuacugaac

SEQ ID NO: 792955 - RNA, 19 nt, Homo sapiens
  misc_RNA (1)...(19): siRNA sense strand
gacguccauucucaucauu

SEQ ID NO: 792956 - RNA, 19 nt, Homo sapiens
  misc_RNA (1)...(19): siRNA sense strand
ccuuggcucucauuucaga

SEQ ID NO: 792957 - RNA, 19 nt, Homo sapiens
  misc_RNA (1)...(19): siRNA sense strand
ucuguaaucagucauuuga

SEQ ID NO: 792958 - RNA, 19 nt, Homo sapiens
  misc_RNA (1)...(19): siRNA sense strand
cuacaaugcccacuacaag

SEQ ID NO: 792959 - RNA, 19 nt, Homo sapiens
  misc_RNA (1)...(19): siRNA sense strand
gggcaucacaauccacuuc

SEQ ID NO: 792960 - RNA, 19 nt, Homo sapiens
  misc_RNA (1)...(19): siRNA sense strand
agaagucaaaggaauagaa

SEQ ID NO: 792961 - RNA, 19 nt, Homo sapiens
  misc_RNA (1)...(19): siRNA sense strand
acagggaaccagcucauug

SEQ ID NO: 792962 - RNA, 19 nt, Homo sapiens
  misc_RNA (1)...(19): siRNA sense strand
gaaaguuugcuuccuucca

SEQ ID NO: 792963 - RNA, 19 nt, Homo sapiens
  misc_RNA (1)...(19): siRNA sense strand
aggagaagucaaaggaaua

SEQ ID NO: 792964 - RNA, 19 nt, Homo sapiens
  misc_RNA (1)...(19): siRNA sense strand
ucucaucauuugcauacug

SEQ ID NO: 792965 - RNA, 19 nt, Homo sapiens
  misc_RNA (1)...(19): siRNA sense strand
aagcuuaccgucagauuca

SEQ ID NO: 792966 - RNA, 19 nt, Homo sapiens
  misc_RNA (1)...(19): siRNA sense strand
caccuucuauuucauuguc

SEQ ID NO: 792967 - RNA, 19 nt, Homo sapiens
  misc_RNA (1)...(19): siRNA sense strand
aaaggaacccuggccaaug

SEQ ID NO: 792968 - RNA, 19 nt, Homo sapiens
  misc_RNA (1)...(19): siRNA sense strand
guaacugacgacaaaggaa

SEQ ID NO: 792969 - RNA, 19 nt, Homo sapiens
  misc_RNA (1)...(19): siRNA sense strand
gggaaccagcucauuguca

SEQ ID NO: 792970 - RNA, 19 nt, Homo sapiens
  misc_RNA (1)...(19): siRNA sense strand
cugggugcauucuaucauu

SEQ ID NO: 792971 - RNA, 19 nt, Homo sapiens
  misc_RNA (1)...(19): siRNA sense strand
cuacaagaaucaccccaaa

SEQ ID NO: 792972 - RNA, 19 nt, Homo sapiens
  misc_RNA (1)...(19): siRNA sense strand
ucucuguaaucagucauuu

SEQ ID NO: 792973 - RNA, 19 nt, Homo sapiens
  misc_RNA (1)...(19): siRNA sense strand
uccaggacguccauucuca

SEQ ID NO: 792974 - RNA, 19 nt, Homo sapiens
  misc_RNA (1)...(19): siRNA sense strand
gaacccuggccaaugacuu

SEQ ID NO: 792975 - RNA, 19 nt, Homo sapiens
  misc_RNA (1)...(19): siRNA sense strand
caagcuuaccgucagauuc

SEQ ID NO: 792976 - RNA, 19 nt, Homo sapiens
  misc_RNA (1)...(19): siRNA sense strand
cgugacuacugcaacauca

SEQ ID NO: 792977 - RNA, 19 nt, Homo sapiens
  misc_RNA (1)...(19): siRNA sense strand
uacaucaccauggaaauuu

SEQ ID NO: 792978 - RNA, 19 nt, Homo sapiens
  misc_RNA (1)...(19): siRNA sense strand
ugccuacugcuuaucuuua

SEQ ID NO: 792979 - RNA, 19 nt, Homo sapiens
  misc_RNA (1)...(19): siRNA sense strand
aaaaggaggagaagucaaa

SEQ ID NO: 792980 - RNA, 19 nt, Homo sapiens
  misc_RNA (1)...(19): siRNA sense strand
uugggaaucaucucuguaa

SEQ ID NO: 792981 - RNA, 19 nt, Homo sapiens
  misc_RNA (1)...(19): siRNA sense strand
gcugcaaggcucccaaagu

SEQ ID NO: 792982 - RNA, 19 nt, Homo sapiens
  misc_RNA (1)...(19): siRNA sense strand
gggaugacauggauuuuac

SEQ ID NO: 792983 - RNA, 19 nt, Homo sapiens
  misc_RNA (1)...(19): siRNA sense strand
ugccagggaugacauggau

SEQ ID NO: 792984 - RNA, 19 nt, Homo sapiens
  misc_RNA (1)...(19): siRNA sense strand
gcaacaucaucgccuucuc

SEQ ID NO: 792985 - RNA, 19 nt, Homo sapiens
  misc_RNA (1)...(19): siRNA sense strand
cauucuaucauuccaguug

SEQ ID NO: 792986 - RNA, 19 nt, Homo sapiens
  misc_RNA (1)...(19): siRNA sense strand
cuauuucauugucucucua

SEQ ID NO: 792987 - RNA, 19 nt, Homo sapiens
  misc_RNA (1)...(19): siRNA sense strand
guuugggaaucaucucugu

SEQ ID NO: 792988 - RNA, 19 nt, Homo sapiens
  misc_RNA (1)...(19): siRNA sense strand
cagggaaccagcucauugu

SEQ ID NO: 792989 - RNA, 19 nt, Homo sapiens
  misc_RNA (1)...(19): siRNA sense strand
cauuccaguugaaaguuug

SEQ ID NO: 792990 - RNA, 19 nt, Homo sapiens
  misc_RNA (1)...(19): siRNA sense strand
uaucauuccaguugaaagu

SEQ ID NO: 792991 - RNA, 19 nt, Homo sapiens
  misc_RNA (1)...(19): siRNA sense strand
gggugcuggucaugccuuu

SEQ ID NO: 792992 - RNA, 19 nt, Homo sapiens
  misc_RNA (1)...(19): siRNA sense strand
uacaaugcccacuacaaga

SEQ ID NO: 792993 - RNA, 19 nt, Homo sapiens
  misc_RNA (1)...(19): siRNA sense strand
cuucugccaucugcaacua

SEQ ID NO: 792994 - RNA, 19 nt, Homo sapiens
  misc_RNA (1)...(19): siRNA sense strand
gccuacugcuuaucuuuac

SEQ ID NO: 792995 - RNA, 19 nt, Homo sapiens
  misc_RNA (1)...(19): siRNA sense strand
ccagcucauugucacuaug

SEQ ID NO: 792996 - RNA, 19 nt, Homo sapiens
  misc_RNA (1)...(19): siRNA sense strand
ccaccaccuucuauuucau

SEQ ID NO: 792997 - RNA, 19 nt, Homo sapiens
  misc_RNA (1)...(19): siRNA sense strand
cucaucauuugcauacuga

SEQ ID NO: 792998 - RNA, 19 nt, Homo sapiens
  misc_RNA (1)...(19): siRNA sense strand
aaagaccuaucaggcaaca

SEQ ID NO: 792999 - RNA, 19 nt, Homo sapiens
  misc_RNA (1)...(19): siRNA sense strand
gaugaaaaggucaagagaa

SEQ ID NO: 793000 - RNA, 19 nt, Homo sapiens
  misc_RNA (1)...(19): siRNA sense strand
aaauggcuccuacugaaca

SEQ ID NO: 793001 - RNA, 19 nt, Homo sapiens
  misc_RNA (1)...(19): siRNA sense strand
gcaagaacaugucggaguu

SEQ ID NO: 793002 - RNA, 19 nt, Homo sapiens
  misc_RNA (1)...(19): siRNA sense strand
ggaccacccugcugcuuaa

SEQ ID NO: 793003 - RNA, 19 nt, Homo sapiens
  misc_RNA (1)...(19): siRNA sense strand
gaagagcacaggccugaaa

SEQ ID NO: 793004 - RNA, 19 nt, Homo sapiens
  misc_RNA (1)...(19): siRNA sense strand
ucaagucggugcugaggaa

SEQ ID NO: 793005 - RNA, 19 nt, Homo sapiens
  misc_RNA (1)...(19): siRNA sense strand
agucagggcugcuguguga

SEQ ID NO: 793006 - RNA, 19 nt, Homo sapiens
  misc_RNA (1)...(19): siRNA sense strand
gccugaaacucuccaagaa

SEQ ID NO: 793007 - RNA, 19 nt, Homo sapiens
  misc_RNA (1)...(19): siRNA sense strand
ucaaaggcuucaagauguu

SEQ ID NO: 793008 - RNA, 19 nt, Homo sapiens
  misc_RNA (1)...(19): siRNA sense strand
aaggaaugcuucacucuga

SEQ ID NO: 793009 - RNA, 19 nt, Homo sapiens
  misc_RNA (1)...(19): siRNA sense strand
acagcaagauggaugugua

SEQ ID NO: 793010 - RNA, 19 nt, Homo sapiens
  misc_RNA (1)...(19): siRNA sense strand
gcccagcucuaccgaauca

SEQ ID NO: 793011 - RNA, 19 nt, Homo sapiens
  misc_RNA (1)...(19): siRNA sense strand
cugaaacucuccaagaaga

SEQ ID NO: 793012 - RNA, 19 nt, Homo sapiens
  misc_RNA (1)...(19): siRNA sense strand
ucacggaucugcuguuggu

SEQ ID NO: 793013 - RNA, 19 nt, Homo sapiens
  misc_RNA (1)...(19): siRNA sense strand
gggagagccuggacaucuu

SEQ ID NO: 793014 - RNA, 19 nt, Homo sapiens
  misc_RNA (1)...(19): siRNA sense strand
gaaacucuccaagaagaaa

SEQ ID NO: 793015 - RNA, 19 nt, Homo sapiens
  misc_RNA (1)...(19): siRNA sense strand
ggaggagacacacggauga

SEQ ID NO: 793016 - RNA, 19 nt, Homo sapiens
  misc_RNA (1)...(19): siRNA sense strand
gcugcugccuguauuugaa

SEQ ID NO: 793017 - RNA, 19 nt, Homo sapiens
  misc_RNA (1)...(19): siRNA sense strand
ccucaaaggcuucaagaug

SEQ ID NO: 793018 - RNA, 19 nt, Homo sapiens
  misc_RNA (1)...(19): siRNA sense strand
gcugugggcuagcgugaug

SEQ ID NO: 793019 - RNA, 19 nt, Homo sapiens
  misc_RNA (1)...(19): siRNA sense strand
gggaggaggaguacgauga

SEQ ID NO: 793020 - RNA, 19 nt, Homo sapiens
  misc_RNA (1)...(19): siRNA sense strand
cucaaaggcuucaagaugu

SEQ ID NO: 793021 - RNA, 19 nt, Homo sapiens
  misc_RNA (1)...(19): siRNA sense strand
gguccuuccuccuuaucua

SEQ ID NO: 793022 - RNA, 19 nt, Homo sapiens
  misc_RNA (1)...(19): siRNA sense strand
ggaaggacagcaagaugga

SEQ ID NO: 793023 - RNA, 19 nt, Homo sapiens
  misc_RNA (1)...(19): siRNA sense strand
ggaaagcagcagcgacgaa

SEQ ID NO: 793024 - RNA, 19 nt, Homo sapiens
  misc_RNA (1)...(19): siRNA sense strand
gaaauuugaccugaaugug

SEQ ID NO: 793025 - RNA, 19 nt, Homo sapiens
  misc_RNA (1)...(19): siRNA sense strand
ggaggaggaguacgaugaa

SEQ ID NO: 793026 - RNA, 19 nt, Homo sapiens
  misc_RNA (1)...(19): siRNA sense strand
ccuggguccuuccuccuua

SEQ ID NO: 793027 - RNA, 19 nt, Homo sapiens
  misc_RNA (1)...(19): siRNA sense strand
uuaucuaccugaaugaguu

SEQ ID NO: 793028 - RNA, 19 nt, Homo sapiens
  misc_RNA (1)...(19): siRNA sense strand
ucugaaauuugaccugaau

SEQ ID NO: 793029 - RNA, 19 nt, Homo sapiens
  misc_RNA (1)...(19): siRNA sense strand
cagcaccacugccucaucu

SEQ ID NO: 793030 - RNA, 19 nt, Homo sapiens
  misc_RNA (1)...(19): siRNA sense strand
gaccaaagcagugaagaag

SEQ ID NO: 793031 - RNA, 19 nt, Homo sapiens
  misc_RNA (1)...(19): siRNA sense strand
ucccagccaugaagaagaa

SEQ ID NO: 793032 - RNA, 19 nt, Homo sapiens
  misc_RNA (1)...(19): siRNA sense strand
accagcggcucaccaagua

SEQ ID NO: 793033 - RNA, 19 nt, Homo sapiens
  misc_RNA (1)...(19): siRNA sense strand
ggagagccuggacaucuug

SEQ ID NO: 793034 - RNA, 19 nt, Homo sapiens
  misc_RNA (1)...(19): siRNA sense strand
cagccaagccuggagauga

SEQ ID NO: 793035 - RNA, 19 nt, Homo sapiens
  misc_RNA (1)...(19): siRNA sense strand
uggaagaggaggaggauga

SEQ ID NO: 793036 - RNA, 19 nt, Homo sapiens
  misc_RNA (1)...(19): siRNA sense strand
agggcaagcugcacaccua

SEQ ID NO: 793037 - RNA, 19 nt, Homo sapiens
  misc_RNA (1)...(19): siRNA sense strand
gccgggagguagacaagau

SEQ ID NO: 793038 - RNA, 19 nt, Homo sapiens
  misc_RNA (1)...(19): siRNA sense strand
agacgaggaugaggacaau

SEQ ID NO: 793039 - RNA, 19 nt, Homo sapiens
  misc_RNA (1)...(19): siRNA sense strand
gcacaccuacagccucuuc

SEQ ID NO: 793040 - RNA, 19 nt, Homo sapiens
  misc_RNA (1)...(19): siRNA sense strand
gcaaggaaugcuucacucu

SEQ ID NO: 793041 - RNA, 19 nt, Homo sapiens
  misc_RNA (1)...(19): siRNA sense strand
gcaagauggauguguacug

SEQ ID NO: 793042 - RNA, 19 nt, Homo sapiens
  misc_RNA (1)...(19): siRNA sense strand
gaggggagccugaggauga

SEQ ID NO: 793043 - RNA, 19 nt, Homo sapiens
  misc_RNA (1)...(19): siRNA sense strand
ggacauugagacagagauc

SEQ ID NO: 793044 - RNA, 19 nt, Homo sapiens
  misc_RNA (1)...(19): siRNA sense strand
ggccugaaacucuccaaga

SEQ ID NO: 793045 - RNA, 19 nt, Homo sapiens
  misc_RNA (1)...(19): siRNA sense strand
gagaucgucccagccauga

SEQ ID NO: 793046 - RNA, 19 nt, Homo sapiens
  misc_RNA (1)...(19): siRNA sense strand
caaccuccuuacaagacuu

SEQ ID NO: 793047 - RNA, 19 nt, Homo sapiens
  misc_RNA (1)...(19): siRNA sense strand
cuccuuaucuaccugaaug

SEQ ID NO: 793048 - RNA, 19 nt, Homo sapiens
  misc_RNA (1)...(19): siRNA sense strand
agauggauguguacugcuu

SEQ ID NO: 793049 - RNA, 19 nt, Homo sapiens
  misc_RNA (1)...(19): siRNA sense strand
ccuacgaggugguggaaag

SEQ ID NO: 793050 - RNA, 19 nt, Homo sapiens
  misc_RNA (1)...(19): siRNA sense strand
gggcaaaguggacaucuac

SEQ ID NO: 793051 - RNA, 19 nt, Homo sapiens
  misc_RNA (1)...(19): siRNA sense strand
gaggugcugcugccuguau

SEQ ID NO: 793052 - RNA, 19 nt, Homo sapiens
  misc_RNA (1)...(19): siRNA sense strand
ugaccaaagcagugaagaa

SEQ ID NO: 793053 - RNA, 19 nt, Homo sapiens
  misc_RNA (1)...(19): siRNA sense strand
ggaggaaggcgaggacagu

SEQ ID NO: 793054 - RNA, 19 nt, Homo sapiens
  misc_RNA (1)...(19): siRNA sense strand
ggaaacugcgggugaucau

SEQ ID NO: 793055 - RNA, 19 nt, Homo sapiens
  misc_RNA (1)...(19): siRNA sense strand
ugaaauuugaccugaaugu

SEQ ID NO: 793056 - RNA, 19 nt, Homo sapiens
  misc_RNA (1)...(19): siRNA sense strand
ucccugaguuugccgauuc

SEQ ID NO: 793057 - RNA, 19 nt, Homo sapiens
  misc_RNA (1)...(19): siRNA sense strand
ggaggagagcucuguggau

SEQ ID NO: 793058 - RNA, 19 nt, Homo sapiens
  misc_RNA (1)...(19): siRNA sense strand
gcgacgaaguggacaagcu

SEQ ID NO: 793059 - RNA, 19 nt, Homo sapiens
  misc_RNA (1)...(19): siRNA sense strand
ucagcaacaucccggagau

SEQ ID NO: 793060 - RNA, 19 nt, Homo sapiens
  misc_RNA (1)...(19): siRNA sense strand
gaucgucccagccaugaag

SEQ ID NO: 793061 - RNA, 19 nt, Homo sapiens
  misc_RNA (1)...(19): siRNA sense strand
ucaggaaacugcgggugau

SEQ ID NO: 793062 - RNA, 19 nt, Homo sapiens
  misc_RNA (1)...(19): siRNA sense strand
cccaccugcucaagucuaa

SEQ ID NO: 793063 - RNA, 19 nt, Homo sapiens
  misc_RNA (1)...(19): siRNA sense strand
ugggcaaaguggacaucua

SEQ ID NO: 793064 - RNA, 19 nt, Homo sapiens
  misc_RNA (1)...(19): siRNA sense strand
gagcacaggccugaaacuc

SEQ ID NO: 793065 - RNA, 19 nt, Homo sapiens
  misc_RNA (1)...(19): siRNA sense strand
uggcccagcucuaccgaau

SEQ ID NO: 793066 - RNA, 19 nt, Homo sapiens
  misc_RNA (1)...(19): siRNA sense strand
gcgcgacaacgaccucuuc

SEQ ID NO: 793067 - RNA, 19 nt, Homo sapiens
  misc_RNA (1)...(19): siRNA sense strand
ggaugacccaagcaaggaa

SEQ ID NO: 793068 - RNA, 19 nt, Homo sapiens
  misc_RNA (1)...(19): siRNA sense strand
ccacccugcugcuuaacuc

SEQ ID NO: 793069 - RNA, 19 nt, Homo sapiens
  misc_RNA (1)...(19): siRNA sense strand
cuucacggaucugcuguug

SEQ ID NO: 793070 - RNA, 19 nt, Homo sapiens
  misc_RNA (1)...(19): siRNA sense strand
cggagcgccuguucagcaa

SEQ ID NO: 793071 - RNA, 19 nt, Homo sapiens
  misc_RNA (1)...(19): siRNA sense strand
ggaggaguacgaugaagac

SEQ ID NO: 793072 - RNA, 19 nt, Homo sapiens
  misc_RNA (1)...(19): siRNA sense strand
gaggaggaguacgaugaag

SEQ ID NO: 793073 - RNA, 19 nt, Homo sapiens
  misc_RNA (1)...(19): siRNA sense strand
gauguucggcucgcucuuc

SEQ ID NO: 793074 - RNA, 19 nt, Homo sapiens
  misc_RNA (1)...(19): siRNA sense strand
ggaggaggaggaggaggaa

SEQ ID NO: 793075 - RNA, 19 nt, Homo sapiens
  misc_RNA (1)...(19): siRNA sense strand
gcaaaguggacaucuaccu

SEQ ID NO: 793076 - RNA, 19 nt, Homo sapiens
  misc_RNA (1)...(19): siRNA sense strand
guguacugcuuccucuuca

SEQ ID NO: 793077 - RNA, 19 nt, Homo sapiens
  misc_RNA (1)...(19): siRNA sense strand
ucacgugggcggagaagca

SEQ ID NO: 793078 - RNA, 19 nt, Homo sapiens
  misc_RNA (1)...(19): siRNA sense strand
gcauuaugaugggcauguc

SEQ ID NO: 793079 - RNA, 19 nt, Homo sapiens
  misc_RNA (1)...(19): siRNA sense strand
gcauguccgcuucgaccuu

SEQ ID NO: 793080 - RNA, 19 nt, Homo sapiens
  misc_RNA (1)...(19): siRNA sense strand
ggccaugguugugguagag

SEQ ID NO: 793081 - RNA, 19 nt, Homo sapiens
  misc_RNA (1)...(19): siRNA sense strand
ugaaacucuccaagaagaa

SEQ ID NO: 793082 - RNA, 19 nt, Homo sapiens
  misc_RNA (1)...(19): siRNA sense strand
gcaagaacaugucggaguu

SEQ ID NO: 793083 - RNA, 19 nt, Homo sapiens
  misc_RNA (1)...(19): siRNA sense strand
gaagagcacaggccugaaa

SEQ ID NO: 793084 - RNA, 19 nt, Homo sapiens
  misc_RNA (1)...(19): siRNA sense strand
ucaagucggugcugaggaa

SEQ ID NO: 793085 - RNA, 19 nt, Homo sapiens
  misc_RNA (1)...(19): siRNA sense strand
agucagggcugcuguguga

SEQ ID NO: 793086 - RNA, 19 nt, Homo sapiens
  misc_RNA (1)...(19): siRNA sense strand
gccugaaacucuccaagaa

SEQ ID NO: 793087 - RNA, 19 nt, Homo sapiens
  misc_RNA (1)...(19): siRNA sense strand
ucaaaggcuucaagauguu

SEQ ID NO: 793088 - RNA, 19 nt, Homo sapiens
  misc_RNA (1)...(19): siRNA sense strand
aaggaaugcuucacucuga

SEQ ID NO: 793089 - RNA, 19 nt, Homo sapiens
  misc_RNA (1)...(19): siRNA sense strand
acagcaagauggaugugua

SEQ ID NO: 793090 - RNA, 19 nt, Homo sapiens
  misc_RNA (1)...(19): siRNA sense strand
cugaaacucuccaagaaga

SEQ ID NO: 793091 - RNA, 19 nt, Homo sapiens
  misc_RNA (1)...(19): siRNA sense strand
ucacggaucugcuguuggu

SEQ ID NO: 793092 - RNA, 19 nt, Homo sapiens
  misc_RNA (1)...(19): siRNA sense strand
gggagagccuggacaucuu

SEQ ID NO: 793093 - RNA, 19 nt, Homo sapiens
  misc_RNA (1)...(19): siRNA sense strand
gaaacucuccaagaagaaa

SEQ ID NO: 793094 - RNA, 19 nt, Homo sapiens
  misc_RNA (1)...(19): siRNA sense strand
ggaggagacacacggauga

SEQ ID NO: 793095 - RNA, 19 nt, Homo sapiens
  misc_RNA (1)...(19): siRNA sense strand
gcugcugccuguauuugaa

SEQ ID NO: 793096 - RNA, 19 nt, Homo sapiens
  misc_RNA (1)...(19): siRNA sense strand
ccucaaaggcuucaagaug

SEQ ID NO: 793097 - RNA, 19 nt, Homo sapiens
  misc_RNA (1)...(19): siRNA sense strand
gcugugggcuagcgugaug

SEQ ID NO: 793098 - RNA, 19 nt, Homo sapiens
  misc_RNA (1)...(19): siRNA sense strand
gggaggaggaguacgauga

SEQ ID NO: 793099 - RNA, 19 nt, Homo sapiens
  misc_RNA (1)...(19): siRNA sense strand
cucaaaggcuucaagaugu

SEQ ID NO: 793100 - RNA, 19 nt, Homo sapiens
  misc_RNA (1)...(19): siRNA sense strand
gguccuuccuccuuaucua

SEQ ID NO: 793101 - RNA, 19 nt, Homo sapiens
  misc_RNA (1)...(19): siRNA sense strand
ggaaggacagcaagaugga

SEQ ID NO: 793102 - RNA, 19 nt, Homo sapiens
  misc_RNA (1)...(19): siRNA sense strand
ggaaagcagcagcgacgaa

SEQ ID NO: 793103 - RNA, 19 nt, Homo sapiens
  misc_RNA (1)...(19): siRNA sense strand
gaaauuugaccugaaugug

SEQ ID NO: 793104 - RNA, 19 nt, Homo sapiens
  misc_RNA (1)...(19): siRNA sense strand
acagcaccaugcauuauga

SEQ ID NO: 793105 - RNA, 19 nt, Homo sapiens
  misc_RNA (1)...(19): siRNA sense strand
ggaggaggaguacgaugaa

SEQ ID NO: 793106 - RNA, 19 nt, Homo sapiens
  misc_RNA (1)...(19): siRNA sense strand
ccuggguccuuccuccuua

SEQ ID NO: 793107 - RNA, 19 nt, Homo sapiens
  misc_RNA (1)...(19): siRNA sense strand
ucugaaauuugaccugaau

SEQ ID NO: 793108 - RNA, 19 nt, Homo sapiens
  misc_RNA (1)...(19): siRNA sense strand
gaccaaagcagugaagaag

SEQ ID NO: 793109 - RNA, 19 nt, Homo sapiens
  misc_RNA (1)...(19): siRNA sense strand
ucccagccaugaagaagaa

SEQ ID NO: 793110 - RNA, 19 nt, Homo sapiens
  misc_RNA (1)...(19): siRNA sense strand
accagcggcucaccaagua

SEQ ID NO: 793111 - RNA, 19 nt, Homo sapiens
  misc_RNA (1)...(19): siRNA sense strand
ggagagccuggacaucuug

SEQ ID NO: 793112 - RNA, 19 nt, Homo sapiens
  misc_RNA (1)...(19): siRNA sense strand
cagccaagccuggagauga

SEQ ID NO: 793113 - RNA, 19 nt, Homo sapiens
  misc_RNA (1)...(19): siRNA sense strand
agggcaagcugcacaccua

SEQ ID NO: 793114 - RNA, 19 nt, Homo sapiens
  misc_RNA (1)...(19): siRNA sense strand
ccacagcaccaugcauuau

SEQ ID NO: 793115 - RNA, 19 nt, Homo sapiens
  misc_RNA (1)...(19): siRNA sense strand
agacgaggaugaggacaau

SEQ ID NO: 793116 - RNA, 19 nt, Homo sapiens
  misc_RNA (1)...(19): siRNA sense strand
gcacaccuacagccucuuc

SEQ ID NO: 793117 - RNA, 19 nt, Homo sapiens
  misc_RNA (1)...(19): siRNA sense strand
gccgggagguagacaagau

SEQ ID NO: 793118 - RNA, 19 nt, Homo sapiens
  misc_RNA (1)...(19): siRNA sense strand
gcaaggaaugcuucacucu

SEQ ID NO: 793119 - RNA, 19 nt, Homo sapiens
  misc_RNA (1)...(19): siRNA sense strand
gcaagauggauguguacug

SEQ ID NO: 793120 - RNA, 19 nt, Homo sapiens
  misc_RNA (1)...(19): siRNA sense strand
gaggggagccugaggauga

SEQ ID NO: 793121 - RNA, 19 nt, Homo sapiens
  misc_RNA (1)...(19): siRNA sense strand
ggacauugagacagagauc

SEQ ID NO: 793122 - RNA, 19 nt, Homo sapiens
  misc_RNA (1)...(19): siRNA sense strand
ggccugaaacucuccaaga

SEQ ID NO: 793123 - RNA, 19 nt, Homo sapiens
  misc_RNA (1)...(19): siRNA sense strand
gagaucgucccagccauga

SEQ ID NO: 793124 - RNA, 19 nt, Homo sapiens
  misc_RNA (1)...(19): siRNA sense strand
cuccuuaucuaccugaaug

SEQ ID NO: 793125 - RNA, 19 nt, Homo sapiens
  misc_RNA (1)...(19): siRNA sense strand
agauggauguguacugcuu

SEQ ID NO: 793126 - RNA, 19 nt, Homo sapiens
  misc_RNA (1)...(19): siRNA sense strand
ccuacgaggugguggaaag

SEQ ID NO: 793127 - RNA, 19 nt, Homo sapiens
  misc_RNA (1)...(19): siRNA sense strand
gggcaaaguggacaucuac

SEQ ID NO: 793128 - RNA, 19 nt, Homo sapiens
  misc_RNA (1)...(19): siRNA sense strand
gaggugcugcugccuguau

SEQ ID NO: 793129 - RNA, 19 nt, Homo sapiens
  misc_RNA (1)...(19): siRNA sense strand
ugaccaaagcagugaagaa

SEQ ID NO: 793130 - RNA, 19 nt, Homo sapiens
  misc_RNA (1)...(19): siRNA sense strand
ugaaauuugaccugaaugu

SEQ ID NO: 793131 - RNA, 19 nt, Homo sapiens
  misc_RNA (1)...(19): siRNA sense strand
ggaaacugcgggugaucau

SEQ ID NO: 793132 - RNA, 19 nt, Homo sapiens
  misc_RNA (1)...(19): siRNA sense strand
gaucgucccagccaugaag

SEQ ID NO: 793133 - RNA, 19 nt, Homo sapiens
  misc_RNA (1)...(19): siRNA sense strand
ggaggagagcucuguggau

SEQ ID NO: 793134 - RNA, 19 nt, Homo sapiens
  misc_RNA (1)...(19): siRNA sense strand
gcgacgaaguggacaagcu

SEQ ID NO: 793135 - RNA, 19 nt, Homo sapiens
  misc_RNA (1)...(19): siRNA sense strand
ucagcaacaucccggagau

SEQ ID NO: 793136 - RNA, 19 nt, Homo sapiens
  misc_RNA (1)...(19): siRNA sense strand
ucaggaaacugcgggugau

SEQ ID NO: 793137 - RNA, 19 nt, Homo sapiens
  misc_RNA (1)...(19): siRNA sense strand
ucccugaguuugccgauuc

SEQ ID NO: 793138 - RNA, 19 nt, Homo sapiens
  misc_RNA (1)...(19): siRNA sense strand
ugggcaaaguggacaucua

SEQ ID NO: 793139 - RNA, 19 nt, Homo sapiens
  misc_RNA (1)...(19): siRNA sense strand
gagcacaggccugaaacuc

SEQ ID NO: 793140 - RNA, 19 nt, Homo sapiens
  misc_RNA (1)...(19): siRNA sense strand
gcgcgacaacgaccucuuc

SEQ ID NO: 793141 - RNA, 19 nt, Homo sapiens
  misc_RNA (1)...(19): siRNA sense strand
ggaugacccaagcaaggaa

SEQ ID NO: 793142 - RNA, 19 nt, Homo sapiens
  misc_RNA (1)...(19): siRNA sense strand
cuucacggaucugcuguug

SEQ ID NO: 793143 - RNA, 19 nt, Homo sapiens
  misc_RNA (1)...(19): siRNA sense strand
cggagcgccuguucagcaa

SEQ ID NO: 793144 - RNA, 19 nt, Homo sapiens
  misc_RNA (1)...(19): siRNA sense strand
ggaggaguacgaugaagac

SEQ ID NO: 793145 - RNA, 19 nt, Homo sapiens
  misc_RNA (1)...(19): siRNA sense strand
gaggaggaguacgaugaag

SEQ ID NO: 793146 - RNA, 19 nt, Homo sapiens
  misc_RNA (1)...(19): siRNA sense strand
gauguucggcucgcucuuc

SEQ ID NO: 793147 - RNA, 19 nt, Homo sapiens
  misc_RNA (1)...(19): siRNA sense strand
gcauuaugaugggcauguc

SEQ ID NO: 793148 - RNA, 19 nt, Homo sapiens
  misc_RNA (1)...(19): siRNA sense strand
guguacugcuuccucuuca

SEQ ID NO: 793149 - RNA, 19 nt, Homo sapiens
  misc_RNA (1)...(19): siRNA sense strand
ucacgugggcggagaagca

SEQ ID NO: 793150 - RNA, 19 nt, Homo sapiens
  misc_RNA (1)...(19): siRNA sense strand
gcaaaguggacaucuaccu

SEQ ID NO: 793151 - RNA, 19 nt, Homo sapiens
  misc_RNA (1)...(19): siRNA sense strand
gcauguccgcuucgaccuu

SEQ ID NO: 793152 - RNA, 19 nt, Homo sapiens
  misc_RNA (1)...(19): siRNA sense strand
ugaaacucuccaagaagaa

SEQ ID NO: 793153 - RNA, 19 nt, Homo sapiens
  misc_RNA (1)...(19): siRNA sense strand
caaggaagguguucacugu

SEQ ID NO: 793154 - RNA, 19 nt, Homo sapiens
  misc_RNA (1)...(19): siRNA sense strand
gcccgauccugguacugua

SEQ ID NO: 793155 - RNA, 19 nt, Homo sapiens
  misc_RNA (1)...(19): siRNA sense strand
guucuucgccuacauccaa

SEQ ID NO: 793156 - RNA, 19 nt, Homo sapiens
  misc_RNA (1)...(19): siRNA sense strand
ggagaggucaucccugucu

SEQ ID NO: 793157 - RNA, 19 nt, Homo sapiens
  misc_RNA (1)...(19): siRNA sense strand
ggaagguguucacugucau

SEQ ID NO: 793158 - RNA, 19 nt, Homo sapiens
  misc_RNA (1)...(19): siRNA sense strand
caaggucuguguggauauc

SEQ ID NO: 793159 - RNA, 19 nt, Homo sapiens
  misc_RNA (1)...(19): siRNA sense strand
acgcagagcuacagugaac

SEQ ID NO: 793160 - RNA, 19 nt, Homo sapiens
  misc_RNA (1)...(19): siRNA sense strand
cucaaggucuguguggaua

SEQ ID NO: 793161 - RNA, 19 nt, Homo sapiens
  misc_RNA (1)...(19): siRNA sense strand
aggaagguguucacuguca

SEQ ID NO: 793162 - RNA, 19 nt, Homo sapiens
  misc_RNA (1)...(19): siRNA sense strand
gagaggucaucccugucuu

SEQ ID NO: 793163 - RNA, 19 nt, Homo sapiens
  misc_RNA (1)...(19): siRNA sense strand
ucgccuacauccaagaguu

SEQ ID NO: 793164 - RNA, 19 nt, Homo sapiens
  misc_RNA (1)...(19): siRNA sense strand
acacgcagagcuacaguga

SEQ ID NO: 793165 - RNA, 19 nt, Homo sapiens
  misc_RNA (1)...(19): siRNA sense strand
caucgagccuguggacauc

SEQ ID NO: 793166 - RNA, 19 nt, Homo sapiens
  misc_RNA (1)...(19): siRNA sense strand
gcuauucgacaaggugaaa

SEQ ID NO: 793167 - RNA, 19 nt, Homo sapiens
  misc_RNA (1)...(19): siRNA sense strand
gaggucaucccugucuuug

SEQ ID NO: 793168 - RNA, 19 nt, Homo sapiens
  misc_RNA (1)...(19): siRNA sense strand
ggauccaaacccacucuug

SEQ ID NO: 793169 - RNA, 19 nt, Homo sapiens
  misc_RNA (1)...(19): siRNA sense strand
cggcuuacacgcagagcua

SEQ ID NO: 793170 - RNA, 19 nt, Homo sapiens
  misc_RNA (1)...(19): siRNA sense strand
gccaugaguuccuguucag

SEQ ID NO: 793171 - RNA, 19 nt, Homo sapiens
  misc_RNA (1)...(19): siRNA sense strand
gaagguguucacugucauc

SEQ ID NO: 793172 - RNA, 19 nt, Homo sapiens
  misc_RNA (1)...(19): siRNA sense strand
cgccaugaguuccuguuca

SEQ ID NO: 793173 - RNA, 19 nt, Homo sapiens
  misc_RNA (1)...(19): siRNA sense strand
gcgucgagcccguguuuag

SEQ ID NO: 793174 - RNA, 19 nt, Homo sapiens
  misc_RNA (1)...(19): siRNA sense strand
ccauucccuugcacccuuu

SEQ ID NO: 793175 - RNA, 19 nt, Homo sapiens
  misc_RNA (1)...(19): siRNA sense strand
aguguccgcuacuguauca

SEQ ID NO: 793176 - RNA, 19 nt, Homo sapiens
  misc_RNA (1)...(19): siRNA sense strand
cgacccuggugacauccuu

SEQ ID NO: 793177 - RNA, 19 nt, Homo sapiens
  misc_RNA (1)...(19): siRNA sense strand
gugcagacacagacguuca

SEQ ID NO: 793178 - RNA, 19 nt, Homo sapiens
  misc_RNA (1)...(19): siRNA sense strand
agaggucaucccugucuuu

SEQ ID NO: 793179 - RNA, 19 nt, Homo sapiens
  misc_RNA (1)...(19): siRNA sense strand
ggaaagaucuucuguucua

SEQ ID NO: 793180 - RNA, 19 nt, Homo sapiens
  misc_RNA (1)...(19): siRNA sense strand
ccaaagaccugcuaaauga

SEQ ID NO: 793181 - RNA, 19 nt, Homo sapiens
  misc_RNA (1)...(19): siRNA sense strand
gaauuaagcugcaguguug

SEQ ID NO: 793182 - RNA, 19 nt, Homo sapiens
  misc_RNA (1)...(19): siRNA sense strand
gaacagaaauuuagaacug

SEQ ID NO: 793183 - RNA, 19 nt, Homo sapiens
  misc_RNA (1)...(19): siRNA sense strand
gaagagacuugaugguaua

SEQ ID NO: 793184 - RNA, 19 nt, Homo sapiens
  misc_RNA (1)...(19): siRNA sense strand
gaagaaacgucuccaacaa

SEQ ID NO: 793185 - RNA, 19 nt, Homo sapiens
  misc_RNA (1)...(19): siRNA sense strand
gagaagaugucuaugagaa

SEQ ID NO: 793186 - RNA, 19 nt, Homo sapiens
  misc_RNA (1)...(19): siRNA sense strand
gaagaagcauuuagcaaga

SEQ ID NO: 793187 - RNA, 19 nt, Homo sapiens
  misc_RNA (1)...(19): siRNA sense strand
caggaaaucugaccaaauu

SEQ ID NO: 793188 - RNA, 19 nt, Homo sapiens
  misc_RNA (1)...(19): siRNA sense strand
gagaugagcuuguuaaacu

SEQ ID NO: 793189 - RNA, 19 nt, Homo sapiens
  misc_RNA (1)...(19): siRNA sense strand
agaaagagaugaguugaua

SEQ ID NO: 793190 - RNA, 19 nt, Homo sapiens
  misc_RNA (1)...(19): siRNA sense strand
gaacagcacugcgacuuug

SEQ ID NO: 793191 - RNA, 19 nt, Homo sapiens
  misc_RNA (1)...(19): siRNA sense strand
gcacccagcuacauuuaaa

SEQ ID NO: 793192 - RNA, 19 nt, Homo sapiens
  misc_RNA (1)...(19): siRNA sense strand
gaagaagaaugguggaugu

SEQ ID NO: 793193 - RNA, 19 nt, Homo sapiens
  misc_RNA (1)...(19): siRNA sense strand
aaauagagcugaagaaauc

SEQ ID NO: 793194 - RNA, 19 nt, Homo sapiens
  misc_RNA (1)...(19): siRNA sense strand
gaacuaacacuugaaauug

SEQ ID NO: 793195 - RNA, 19 nt, Homo sapiens
  misc_RNA (1)...(19): siRNA sense strand
gaaggagucaguccaguua

SEQ ID NO: 793196 - RNA, 19 nt, Homo sapiens
  misc_RNA (1)...(19): siRNA sense strand
guaaggagcucagacuuga

SEQ ID NO: 793197 - RNA, 19 nt, Homo sapiens
  misc_RNA (1)...(19): siRNA sense strand
gcaaaugagcucacuauga

SEQ ID NO: 793198 - RNA, 19 nt, Homo sapiens
  misc_RNA (1)...(19): siRNA sense strand
ccagguagauuauucugua

SEQ ID NO: 793199 - RNA, 19 nt, Homo sapiens
  misc_RNA (1)...(19): siRNA sense strand
gaacaaagaagaucagcuu

SEQ ID NO: 793200 - RNA, 19 nt, Homo sapiens
  misc_RNA (1)...(19): siRNA sense strand
gaauuggaauguucugaaa

SEQ ID NO: 793201 - RNA, 19 nt, Homo sapiens
  misc_RNA (1)...(19): siRNA sense strand
gaaaagaacuuaaccaaag

SEQ ID NO: 793202 - RNA, 19 nt, Homo sapiens
  misc_RNA (1)...(19): siRNA sense strand
ccaggaagcugaacugaga

SEQ ID NO: 793203 - RNA, 19 nt, Homo sapiens
  misc_RNA (1)...(19): siRNA sense strand
uaagaaaucccuggaguua

SEQ ID NO: 793204 - RNA, 19 nt, Homo sapiens
  misc_RNA (1)...(19): siRNA sense strand
ggaacuaacacuugaaauu

SEQ ID NO: 793205 - RNA, 19 nt, Homo sapiens
  misc_RNA (1)...(19): siRNA sense strand
gaagaaacccguggaaaga

SEQ ID NO: 793206 - RNA, 19 nt, Homo sapiens
  misc_RNA (1)...(19): siRNA sense strand
gagaaugucugaacuagag

SEQ ID NO: 793207 - RNA, 19 nt, Homo sapiens
  misc_RNA (1)...(19): siRNA sense strand
ggaaguggaaagagaaaua

SEQ ID NO: 793208 - RNA, 19 nt, Homo sapiens
  misc_RNA (1)...(19): siRNA sense strand
gaacugagacacagauuuc

SEQ ID NO: 793209 - RNA, 19 nt, Homo sapiens
  misc_RNA (1)...(19): siRNA sense strand
ggucaagagucgaguuaaa

SEQ ID NO: 793210 - RNA, 19 nt, Homo sapiens
  misc_RNA (1)...(19): siRNA sense strand
ggaaagagaaauaacaaga

SEQ ID NO: 793211 - RNA, 19 nt, Homo sapiens
  misc_RNA (1)...(19): siRNA sense strand
ggaauguucugaaaguaga

SEQ ID NO: 793212 - RNA, 19 nt, Homo sapiens
  misc_RNA (1)...(19): siRNA sense strand
gcaccgagaugccauucuu

SEQ ID NO: 793213 - RNA, 19 nt, Homo sapiens
  misc_RNA (1)...(19): siRNA sense strand
gaagacagaagaugaguau

SEQ ID NO: 793214 - RNA, 19 nt, Homo sapiens
  misc_RNA (1)...(19): siRNA sense strand
gaagagaaugucugaacua

SEQ ID NO: 793215 - RNA, 19 nt, Homo sapiens
  misc_RNA (1)...(19): siRNA sense strand
agaaauugcucaaguuaga

SEQ ID NO: 793216 - RNA, 19 nt, Homo sapiens
  misc_RNA (1)...(19): siRNA sense strand
ggagaaauccauaggagaa

SEQ ID NO: 793217 - RNA, 19 nt, Homo sapiens
  misc_RNA (1)...(19): siRNA sense strand
aaucaagagucucacaaua

SEQ ID NO: 793218 - RNA, 19 nt, Homo sapiens
  misc_RNA (1)...(19): siRNA sense strand
caaagaagacagacagaaa

SEQ ID NO: 793219 - RNA, 19 nt, Homo sapiens
  misc_RNA (1)...(19): siRNA sense strand
ggaagaaacgccagcugua

SEQ ID NO: 793220 - RNA, 19 nt, Homo sapiens
  misc_RNA (1)...(19): siRNA sense strand
gaacaagagcgacgacuuc

SEQ ID NO: 793221 - RNA, 19 nt, Homo sapiens
  misc_RNA (1)...(19): siRNA sense strand
uaacaagcccgacaucuga

SEQ ID NO: 793222 - RNA, 19 nt, Homo sapiens
  misc_RNA (1)...(19): siRNA sense strand
uaaacacacugacuacaug

SEQ ID NO: 793223 - RNA, 19 nt, Homo sapiens
  misc_RNA (1)...(19): siRNA sense strand
guggaaagaucuucuguuc

SEQ ID NO: 793224 - RNA, 19 nt, Homo sapiens
  misc_RNA (1)...(19): siRNA sense strand
agaaacgucuccaacaauu

SEQ ID NO: 793225 - RNA, 19 nt, Homo sapiens
  misc_RNA (1)...(19): siRNA sense strand
acacaaggcuucgagguuu

SEQ ID NO: 793226 - RNA, 19 nt, Homo sapiens
  misc_RNA (1)...(19): siRNA sense strand
gacagaaauugcucaaguu

SEQ ID NO: 793227 - RNA, 19 nt, Homo sapiens
  misc_RNA (1)...(19): siRNA sense strand
ugucugaacuagagaaauu

SEQ ID NO: 793228 - RNA, 19 nt, Homo sapiens
  misc_RNA (1)...(19): siRNA sense strand
gacgagcacuaucaccaua

SEQ ID NO: 793229 - RNA, 19 nt, Homo sapiens
  misc_RNA (1)...(19): siRNA sense strand
ggagucaguccaguuauua

SEQ ID NO: 793230 - RNA, 19 nt, Homo sapiens
  misc_RNA (1)...(19): siRNA sense strand
caaagaagaccucauccaa

SEQ ID NO: 793231 - RNA, 19 nt, Homo sapiens
  misc_RNA (1)...(19): siRNA sense strand
cccgacaucugaagaauuu

SEQ ID NO: 793232 - RNA, 19 nt, Homo sapiens
  misc_RNA (1)...(19): siRNA sense strand
gcaccaaauugccaagaau

SEQ ID NO: 793233 - RNA, 19 nt, Homo sapiens
  misc_RNA (1)...(19): siRNA sense strand
aagcugcaguguugacuua

SEQ ID NO: 793234 - RNA, 19 nt, Homo sapiens
  misc_RNA (1)...(19): siRNA sense strand
gaauaaagcaauagagaag

SEQ ID NO: 793235 - RNA, 19 nt, Homo sapiens
  misc_RNA (1)...(19): siRNA sense strand
uuaaggaacuaacacuuga

SEQ ID NO: 793236 - RNA, 19 nt, Homo sapiens
  misc_RNA (1)...(19): siRNA sense strand
gaagaaacgccagcuguau

SEQ ID NO: 793237 - RNA, 19 nt, Homo sapiens
  misc_RNA (1)...(19): siRNA sense strand
ggagaucaagcaccaaauu

SEQ ID NO: 793238 - RNA, 19 nt, Homo sapiens
  misc_RNA (1)...(19): siRNA sense strand
gaaauggaagguaaagaug

SEQ ID NO: 793239 - RNA, 19 nt, Homo sapiens
  misc_RNA (1)...(19): siRNA sense strand
cagcugagauugcaguuuc

SEQ ID NO: 793240 - RNA, 19 nt, Homo sapiens
  misc_RNA (1)...(19): siRNA sense strand
gaaauugagagacugaaga

SEQ ID NO: 793241 - RNA, 19 nt, Homo sapiens
  misc_RNA (1)...(19): siRNA sense strand
gaaguggaaagagaaauaa

SEQ ID NO: 793242 - RNA, 19 nt, Homo sapiens
  misc_RNA (1)...(19): siRNA sense strand
uacaggaucuuacucagaa

SEQ ID NO: 793243 - RNA, 19 nt, Homo sapiens
  misc_RNA (1)...(19): siRNA sense strand
agaaaucccuggaguuauc

SEQ ID NO: 793244 - RNA, 19 nt, Homo sapiens
  misc_RNA (1)...(19): siRNA sense strand
ucacuuagggucucaguuu

SEQ ID NO: 793245 - RNA, 19 nt, Homo sapiens
  misc_RNA (1)...(19): siRNA sense strand
agaagagacuugaugguau

SEQ ID NO: 793246 - RNA, 19 nt, Homo sapiens
  misc_RNA (1)...(19): siRNA sense strand
agacagaaauugcucaagu

SEQ ID NO: 793247 - RNA, 19 nt, Homo sapiens
  misc_RNA (1)...(19): siRNA sense strand
ucaaagccauuacuuccaa

SEQ ID NO: 793248 - RNA, 19 nt, Homo sapiens
  misc_RNA (1)...(19): siRNA sense strand
caaauaggaaggaggauga

SEQ ID NO: 793249 - RNA, 19 nt, Homo sapiens
  misc_RNA (1)...(19): siRNA sense strand
caacuccaguacggaaaua

SEQ ID NO: 793250 - RNA, 19 nt, Homo sapiens
  misc_RNA (1)...(19): siRNA sense strand
gaagaugucuaugagaaac

SEQ ID NO: 793251 - RNA, 19 nt, Homo sapiens
  misc_RNA (1)...(19): siRNA sense strand
gcucuuaggcccaguguga

SEQ ID NO: 793252 - RNA, 19 nt, Homo sapiens
  misc_RNA (1)...(19): siRNA sense strand
gaagucauuuaccgugaug

SEQ ID NO: 793253 - RNA, 19 nt, Homo sapiens
  misc_RNA (1)...(19): siRNA sense strand
ggaaaaggcugaauuaagc

SEQ ID NO: 793254 - RNA, 19 nt, Homo sapiens
  misc_RNA (1)...(19): siRNA sense strand
augaagagaugaacgcuaa

SEQ ID NO: 793255 - RNA, 19 nt, Homo sapiens
  misc_RNA (1)...(19): siRNA sense strand
gagaagcucaaagccauua

SEQ ID NO: 793256 - RNA, 19 nt, Homo sapiens
  misc_RNA (1)...(19): siRNA sense strand
uaagagaugagcuuguuaa

SEQ ID NO: 793257 - RNA, 19 nt, Homo sapiens
  misc_RNA (1)...(19): siRNA sense strand
acgcuaaacuggcuaauca

SEQ ID NO: 793258 - RNA, 19 nt, Homo sapiens
  misc_RNA (1)...(19): siRNA sense strand
ggaaauacaacuccaaugc

SEQ ID NO: 793259 - RNA, 19 nt, Homo sapiens
  misc_RNA (1)...(19): siRNA sense strand
gggauuugaugaagacaga

SEQ ID NO: 793260 - RNA, 19 nt, Homo sapiens
  misc_RNA (1)...(19): siRNA sense strand
gaagaacaccauaguaagg

SEQ ID NO: 793261 - RNA, 19 nt, Homo sapiens
  misc_RNA (1)...(19): siRNA sense strand
uaaacuggcuaaucaagag

SEQ ID NO: 793262 - RNA, 19 nt, Homo sapiens
  misc_RNA (1)...(19): siRNA sense strand
agagaagacuccagaaagu

SEQ ID NO: 793263 - RNA, 19 nt, Homo sapiens
  misc_RNA (1)...(19): siRNA sense strand
ggcaggagguucucaaucu

SEQ ID NO: 793264 - RNA, 19 nt, Homo sapiens
  misc_RNA (1)...(19): siRNA sense strand
agacagaagaugaguauga

SEQ ID NO: 793265 - RNA, 19 nt, Homo sapiens
  misc_RNA (1)...(19): siRNA sense strand
uagaggaaguggaaagaga

SEQ ID NO: 793266 - RNA, 19 nt, Homo sapiens
  misc_RNA (1)...(19): siRNA sense strand
uuaccaaguugaagucauu

SEQ ID NO: 793267 - RNA, 19 nt, Homo sapiens
  misc_RNA (1)...(19): siRNA sense strand
gcagaaggcagaggaagaa

SEQ ID NO: 793268 - RNA, 19 nt, Homo sapiens
  misc_RNA (1)...(19): siRNA sense strand
gaacaacuuggccugcaaa

SEQ ID NO: 793269 - RNA, 19 nt, Homo sapiens
  misc_RNA (1)...(19): siRNA sense strand
gagucgaguuaaagaauug

SEQ ID NO: 793270 - RNA, 19 nt, Homo sapiens
  misc_RNA (1)...(19): siRNA sense strand
gaggaagaacaccauagua

SEQ ID NO: 793271 - RNA, 19 nt, Homo sapiens
  misc_RNA (1)...(19): siRNA sense strand
gaaggcagaggaagaacuu

SEQ ID NO: 793272 - RNA, 19 nt, Homo sapiens
  misc_RNA (1)...(19): siRNA sense strand
ucaagagcaugaagagaug

SEQ ID NO: 793273 - RNA, 19 nt, Homo sapiens
  misc_RNA (1)...(19): siRNA sense strand
gaauuaagccuaaaagaug

SEQ ID NO: 793274 - RNA, 19 nt, Homo sapiens
  misc_RNA (1)...(19): siRNA sense strand
gaaaauagagcugaagaaa

SEQ ID NO: 793275 - RNA, 19 nt, Homo sapiens
  misc_RNA (1)...(19): siRNA sense strand
gagagaagacuccagaaag

SEQ ID NO: 793276 - RNA, 19 nt, Homo sapiens
  misc_RNA (1)...(19): siRNA sense strand
gacagaagaugaguaugau

SEQ ID NO: 793277 - RNA, 19 nt, Homo sapiens
  misc_RNA (1)...(19): siRNA sense strand
gaaagagaaauaacaagag

SEQ ID NO: 793278 - RNA, 19 nt, Homo sapiens
  misc_RNA (1)...(19): siRNA sense strand
cgaaguacaagcucuuaaa

SEQ ID NO: 793279 - RNA, 19 nt, Homo sapiens
  misc_RNA (1)...(19): siRNA sense strand
ggaagaaucauauaucgaa

SEQ ID NO: 793280 - RNA, 19 nt, Homo sapiens
  misc_RNA (1)...(19): siRNA sense strand
gaagccaaaugaagaugaa

SEQ ID NO: 793281 - RNA, 19 nt, Homo sapiens
  misc_RNA (1)...(19): siRNA sense strand
caaagcagaugaagaacca

SEQ ID NO: 793282 - RNA, 19 nt, Homo sapiens
  misc_RNA (1)...(19): siRNA sense strand
aauaaaggcugccaaagca

SEQ ID NO: 793283 - RNA, 19 nt, Homo sapiens
  misc_RNA (1)...(19): siRNA sense strand
gaagaagccaaaugaagau

SEQ ID NO: 793284 - RNA, 19 nt, Homo sapiens
  misc_RNA (1)...(19): siRNA sense strand
auaguagccuccuuucuuu

SEQ ID NO: 793285 - RNA, 19 nt, Homo sapiens
  misc_RNA (1)...(19): siRNA sense strand
agaagaagccaaaugaaga

SEQ ID NO: 793286 - RNA, 19 nt, Homo sapiens
  misc_RNA (1)...(19): siRNA sense strand
gauggaagaaucauauauc

SEQ ID NO: 793287 - RNA, 19 nt, Homo sapiens
  misc_RNA (1)...(19): siRNA sense strand
agggagaccugucaguuga

SEQ ID NO: 793288 - RNA, 19 nt, Homo sapiens
  misc_RNA (1)...(19): siRNA sense strand
gccaaaugaagaugaagua

SEQ ID NO: 793289 - RNA, 19 nt, Homo sapiens
  misc_RNA (1)...(19): siRNA sense strand
gacccaccguagagacuaa

SEQ ID NO: 793290 - RNA, 19 nt, Homo sapiens
  misc_RNA (1)...(19): siRNA sense strand
caacgaagaugaaaaugag

SEQ ID NO: 793291 - RNA, 19 nt, Homo sapiens
  misc_RNA (1)...(19): siRNA sense strand
aauaguagccuccuuucuu

SEQ ID NO: 793292 - RNA, 19 nt, Homo sapiens
  misc_RNA (1)...(19): siRNA sense strand
agaaauaaaggcugccaaa

SEQ ID NO: 793293 - RNA, 19 nt, Homo sapiens
  misc_RNA (1)...(19): siRNA sense strand
ugccaaagcagaugaagaa

SEQ ID NO: 793294 - RNA, 19 nt, Homo sapiens
  misc_RNA (1)...(19): siRNA sense strand
gaaauaaaggcugccaaag

SEQ ID NO: 793295 - RNA, 19 nt, Homo sapiens
  misc_RNA (1)...(19): siRNA sense strand
gaagaugaacagccucaag

SEQ ID NO: 793296 - RNA, 19 nt, Homo sapiens
  misc_RNA (1)...(19): siRNA sense strand
ggaaccagguaucguacgu

SEQ ID NO: 793297 - RNA, 19 nt, Homo sapiens
  misc_RNA (1)...(19): siRNA sense strand
cguagagacuaagagaauu

SEQ ID NO: 793298 - RNA, 19 nt, Homo sapiens
  misc_RNA (1)...(19): siRNA sense strand
gagcaagcggaaccaggua

SEQ ID NO: 793299 - RNA, 19 nt, Homo sapiens
  misc_RNA (1)...(19): siRNA sense strand
ugacaaagaagaugaacag

SEQ ID NO: 793300 - RNA, 19 nt, Homo sapiens
  misc_RNA (1)...(19): siRNA sense strand
ccaaaugaagaugaaguaa

SEQ ID NO: 793301 - RNA, 19 nt, Homo sapiens
  misc_RNA (1)...(19): siRNA sense strand
guagagacuaagagaauuc

SEQ ID NO: 793302 - RNA, 19 nt, Homo sapiens
  misc_RNA (1)...(19): siRNA sense strand
aaaagaagaagccaaauga

SEQ ID NO: 793303 - RNA, 19 nt, Homo sapiens
  misc_RNA (1)...(19): siRNA sense strand
ggagaccugucaguugaag

SEQ ID NO: 793304 - RNA, 19 nt, Homo sapiens
  misc_RNA (1)...(19): siRNA sense strand
aaagaagaagccaaaugaa

SEQ ID NO: 793305 - RNA, 19 nt, Homo sapiens
  misc_RNA (1)...(19): siRNA sense strand
gccgauggaagaaucauau

SEQ ID NO: 793306 - RNA, 19 nt, Homo sapiens
  misc_RNA (1)...(19): siRNA sense strand
aaagggagaccugucaguu

SEQ ID NO: 793307 - RNA, 19 nt, Homo sapiens
  misc_RNA (1)...(19): siRNA sense strand
ggacccaccguagagacua

SEQ ID NO: 793308 - RNA, 19 nt, Homo sapiens
  misc_RNA (1)...(19): siRNA sense strand
cgauggaagaaucauauau

SEQ ID NO: 793309 - RNA, 19 nt, Homo sapiens
  misc_RNA (1)...(19): siRNA sense strand
uaaaucaggacucggucaa

SEQ ID NO: 793310 - RNA, 19 nt, Homo sapiens
  misc_RNA (1)...(19): siRNA sense strand
aagaagaagccaaaugaag

SEQ ID NO: 793311 - RNA, 19 nt, Homo sapiens
  misc_RNA (1)...(19): siRNA sense strand
aaauaaaggcugccaaagc

SEQ ID NO: 793312 - RNA, 19 nt, Homo sapiens
  misc_RNA (1)...(19): siRNA sense strand
ccguagagacuaagagaau

SEQ ID NO: 793313 - RNA, 19 nt, Homo sapiens
  misc_RNA (1)...(19): siRNA sense strand
agaccugucaguugaagaa

SEQ ID NO: 793314 - RNA, 19 nt, Homo sapiens
  misc_RNA (1)...(19): siRNA sense strand
ccugucaguugaagaaguc

SEQ ID NO: 793315 - RNA, 19 nt, Homo sapiens
  misc_RNA (1)...(19): siRNA sense strand
agucaagcaucccucagau

SEQ ID NO: 793316 - RNA, 19 nt, Homo sapiens
  misc_RNA (1)...(19): siRNA sense strand
ccgauggaagaaucauaua

SEQ ID NO: 793317 - RNA, 19 nt, Homo sapiens
  misc_RNA (1)...(19): siRNA sense strand
gcaagcggaaccagguauc

SEQ ID NO: 793318 - RNA, 19 nt, Homo sapiens
  misc_RNA (1)...(19): siRNA sense strand
acagugacaaagaagauga

SEQ ID NO: 793319 - RNA, 19 nt, Homo sapiens
  misc_RNA (1)...(19): siRNA sense strand
aagggagaccugucaguug

SEQ ID NO: 793320 - RNA, 19 nt, Homo sapiens
  misc_RNA (1)...(19): siRNA sense strand
gcagaugaagaaccaacuc

SEQ ID NO: 793321 - RNA, 19 nt, Homo sapiens
  misc_RNA (1)...(19): siRNA sense strand
caacauugcucacuugaaa

SEQ ID NO: 793322 - RNA, 19 nt, Homo sapiens
  misc_RNA (1)...(19): siRNA sense strand
caaaggacauuuccaaaga

SEQ ID NO: 793323 - RNA, 19 nt, Homo sapiens
  misc_RNA (1)...(19): siRNA sense strand
gaagaagaaucagaaauca

SEQ ID NO: 793324 - RNA, 19 nt, Homo sapiens
  misc_RNA (1)...(19): siRNA sense strand
gaaagaugcccacgugaaa

SEQ ID NO: 793325 - RNA, 19 nt, Homo sapiens
  misc_RNA (1)...(19): siRNA sense strand
ggauauacaucgcucuuug

SEQ ID NO: 793326 - RNA, 19 nt, Homo sapiens
  misc_RNA (1)...(19): siRNA sense strand
gcagacagccugaagcaaa

SEQ ID NO: 793327 - RNA, 19 nt, Homo sapiens
  misc_RNA (1)...(19): siRNA sense strand
ucagagagaucgagcagaa

SEQ ID NO: 793328 - RNA, 19 nt, Homo sapiens
  misc_RNA (1)...(19): siRNA sense strand
gaaaggaugauaauaccaa

SEQ ID NO: 793329 - RNA, 19 nt, Homo sapiens
  misc_RNA (1)...(19): siRNA sense strand
cgacaacauugcucacuug

SEQ ID NO: 793330 - RNA, 19 nt, Homo sapiens
  misc_RNA (1)...(19): siRNA sense strand
agaagaaguuagagcagua

SEQ ID NO: 793331 - RNA, 19 nt, Homo sapiens
  misc_RNA (1)...(19): siRNA sense strand
ccaaagaccaccugaagga

SEQ ID NO: 793332 - RNA, 19 nt, Homo sapiens
  misc_RNA (1)...(19): siRNA sense strand
caauaaguccagagaguuu

SEQ ID NO: 793333 - RNA, 19 nt, Homo sapiens
  misc_RNA (1)...(19): siRNA sense strand
ugacucuucuugcuauauu

SEQ ID NO: 793334 - RNA, 19 nt, Homo sapiens
  misc_RNA (1)...(19): siRNA sense strand
gaagagucgcugccacauu

SEQ ID NO: 793335 - RNA, 19 nt, Homo sapiens
  misc_RNA (1)...(19): siRNA sense strand
gaugauaauaccaagauga

SEQ ID NO: 793336 - RNA, 19 nt, Homo sapiens
  misc_RNA (1)...(19): siRNA sense strand
gcgcuaccaucgugaacaa

SEQ ID NO: 793337 - RNA, 19 nt, Homo sapiens
  misc_RNA (1)...(19): siRNA sense strand
aagagucgcugccacauuc

SEQ ID NO: 793338 - RNA, 19 nt, Homo sapiens
  misc_RNA (1)...(19): siRNA sense strand
ugagggagaucaaggauac

SEQ ID NO: 793339 - RNA, 19 nt, Homo sapiens
  misc_RNA (1)...(19): siRNA sense strand
gcucaaaggacauuuccaa

SEQ ID NO: 793340 - RNA, 19 nt, Homo sapiens
  misc_RNA (1)...(19): siRNA sense strand
gaucaaggauacccaagcu

SEQ ID NO: 793341 - RNA, 19 nt, Homo sapiens
  misc_RNA (1)...(19): siRNA sense strand
gcagugaugaugaauguuc

SEQ ID NO: 793342 - RNA, 19 nt, Homo sapiens
  misc_RNA (1)...(19): siRNA sense strand
gaaggugcaguuuaagaga

SEQ ID NO: 793343 - RNA, 19 nt, Homo sapiens
  misc_RNA (1)...(19): siRNA sense strand
aaagaccaccugaaggaua

SEQ ID NO: 793344 - RNA, 19 nt, Homo sapiens
  misc_RNA (1)...(19): siRNA sense strand
gagaagaagaaucagaaau

SEQ ID NO: 793345 - RNA, 19 nt, Homo sapiens
  misc_RNA (1)...(19): siRNA sense strand
gauauacaucgcucuuuga

SEQ ID NO: 793346 - RNA, 19 nt, Homo sapiens
  misc_RNA (1)...(19): siRNA sense strand
cggaguaucugaaacuagu

SEQ ID NO: 793347 - RNA, 19 nt, Homo sapiens
  misc_RNA (1)...(19): siRNA sense strand
caccgugaaugcuaaaguu

SEQ ID NO: 793348 - RNA, 19 nt, Homo sapiens
  misc_RNA (1)...(19): siRNA sense strand
ggacaucgaggcacugaag

SEQ ID NO: 793349 - RNA, 19 nt, Homo sapiens
  misc_RNA (1)...(19): siRNA sense strand
guauggcagugaugaugaa

SEQ ID NO: 793350 - RNA, 19 nt, Homo sapiens
  misc_RNA (1)...(19): siRNA sense strand
gcagacagacaccgugaau

SEQ ID NO: 793351 - RNA, 19 nt, Homo sapiens
  misc_RNA (1)...(19): siRNA sense strand
cagacaccgugaaugcuaa

SEQ ID NO: 793352 - RNA, 19 nt, Homo sapiens
  misc_RNA (1)...(19): siRNA sense strand
ggacguaucaagcaagucu

SEQ ID NO: 793353 - RNA, 19 nt, Homo sapiens
  misc_RNA (1)...(19): siRNA sense strand
uggcagugaugaugaaugu

SEQ ID NO: 793354 - RNA, 19 nt, Homo sapiens
  misc_RNA (1)...(19): siRNA sense strand
ugaaagaugcccacgugaa

SEQ ID NO: 793355 - RNA, 19 nt, Homo sapiens
  misc_RNA (1)...(19): siRNA sense strand
ucgcccagcugcagaagaa

SEQ ID NO: 793356 - RNA, 19 nt, Homo sapiens
  misc_RNA (1)...(19): siRNA sense strand
agaagaagaaucagaaauc

SEQ ID NO: 793357 - RNA, 19 nt, Homo sapiens
  misc_RNA (1)...(19): siRNA sense strand
ugaacaaacccaaguaugg

SEQ ID NO: 793358 - RNA, 19 nt, Homo sapiens
  misc_RNA (1)...(19): siRNA sense strand
gccagacucgcauuucuaa

SEQ ID NO: 793359 - RNA, 19 nt, Homo sapiens
  misc_RNA (1)...(19): siRNA sense strand
aagaccaccugaaggauau

SEQ ID NO: 793360 - RNA, 19 nt, Homo sapiens
  misc_RNA (1)...(19): siRNA sense strand
uggcagcgccgacaacauu

SEQ ID NO: 793361 - RNA, 19 nt, Homo sapiens
  misc_RNA (1)...(19): siRNA sense strand
ccaaccugauccggaauaa

SEQ ID NO: 793362 - RNA, 19 nt, Homo sapiens
  misc_RNA (1)...(19): siRNA sense strand
uauccugugugccauagaa

SEQ ID NO: 793363 - RNA, 19 nt, Homo sapiens
  misc_RNA (1)...(19): siRNA sense strand
uagaggaguuuaggcaaga

SEQ ID NO: 793364 - RNA, 19 nt, Homo sapiens
  misc_RNA (1)...(19): siRNA sense strand
caucgaaagcucagagaga

SEQ ID NO: 793365 - RNA, 19 nt, Homo sapiens
  misc_RNA (1)...(19): siRNA sense strand
agacaccaaccucaacuuu

SEQ ID NO: 793366 - RNA, 19 nt, Homo sapiens
  misc_RNA (1)...(19): siRNA sense strand
gaagaaguuagagcaguau

SEQ ID NO: 793367 - RNA, 19 nt, Homo sapiens
  misc_RNA (1)...(19): siRNA sense strand
ggaugauaauaccaagaug

SEQ ID NO: 793368 - RNA, 19 nt, Homo sapiens
  misc_RNA (1)...(19): siRNA sense strand
ccagagaguuugccaaccu

SEQ ID NO: 793369 - RNA, 19 nt, Homo sapiens
  misc_RNA (1)...(19): siRNA sense strand
gaaguuagagcaguaucau

SEQ ID NO: 793370 - RNA, 19 nt, Homo sapiens
  misc_RNA (1)...(19): siRNA sense strand
ucaaaggacauuuccaaag

SEQ ID NO: 793371 - RNA, 19 nt, Homo sapiens
  misc_RNA (1)...(19): siRNA sense strand
ugacaugaauaccuuaagc

SEQ ID NO: 793372 - RNA, 19 nt, Homo sapiens
  misc_RNA (1)...(19): siRNA sense strand
ggucagacaccaaccucaa

SEQ ID NO: 793373 - RNA, 19 nt, Homo sapiens
  misc_RNA (1)...(19): siRNA sense strand
uuagagcaguaucaucgaa

SEQ ID NO: 793374 - RNA, 19 nt, Homo sapiens
  misc_RNA (1)...(19): siRNA sense strand
gccauagaaaggaugauaa

SEQ ID NO: 793375 - RNA, 19 nt, Homo sapiens
  misc_RNA (1)...(19): siRNA sense strand
ggacuuccacaaggucaaa

SEQ ID NO: 793376 - RNA, 19 nt, Homo sapiens
  misc_RNA (1)...(19): siRNA sense strand
ggaauguugcggaguaucu

SEQ ID NO: 793377 - RNA, 19 nt, Homo sapiens
  misc_RNA (1)...(19): siRNA sense strand
cagaauggagccucuagga

SEQ ID NO: 793378 - RNA, 19 nt, Homo sapiens
  misc_RNA (1)...(19): siRNA sense strand
ccaaguauggcagugauga

SEQ ID NO: 793379 - RNA, 19 nt, Homo sapiens
  misc_RNA (1)...(19): siRNA sense strand
ccauagaaaggaugauaau

SEQ ID NO: 793380 - RNA, 19 nt, Homo sapiens
  misc_RNA (1)...(19): siRNA sense strand
gacaccaaccucaacuuug

SEQ ID NO: 793381 - RNA, 19 nt, Homo sapiens
  misc_RNA (1)...(19): siRNA sense strand
ucaauaaguccagagaguu

SEQ ID NO: 793382 - RNA, 19 nt, Homo sapiens
  misc_RNA (1)...(19): siRNA sense strand
uagaaaggaugauaauacc

SEQ ID NO: 793383 - RNA, 19 nt, Homo sapiens
  misc_RNA (1)...(19): siRNA sense strand
gcaguuuaagagagaauau

SEQ ID NO: 793384 - RNA, 19 nt, Homo sapiens
  misc_RNA (1)...(19): siRNA sense strand
cacgugaaaucucgaacug

SEQ ID NO: 793385 - RNA, 19 nt, Homo sapiens
  misc_RNA (1)...(19): siRNA sense strand
acagacaccgugaaugcua

SEQ ID NO: 793386 - RNA, 19 nt, Homo sapiens
  misc_RNA (1)...(19): siRNA sense strand
ccgacaacauugcucacuu

SEQ ID NO: 793387 - RNA, 19 nt, Homo sapiens
  misc_RNA (1)...(19): siRNA sense strand
caagcaagucuuugagaag

SEQ ID NO: 793388 - RNA, 19 nt, Homo sapiens
  misc_RNA (1)...(19): siRNA sense strand
gacucuucuugcuauauuu

SEQ ID NO: 793389 - RNA, 19 nt, Homo sapiens
  misc_RNA (1)...(19): siRNA sense strand
gauccuggccuucaugacu

SEQ ID NO: 793390 - RNA, 19 nt, Homo sapiens
  misc_RNA (1)...(19): siRNA sense strand
agacagacaccgugaaugc

SEQ ID NO: 793391 - RNA, 19 nt, Homo sapiens
  misc_RNA (1)...(19): siRNA sense strand
ugagaagaagaaucagaaa

SEQ ID NO: 793392 - RNA, 19 nt, Homo sapiens
  misc_RNA (1)...(19): siRNA sense strand
ccgugacucuucuugcuau

SEQ ID NO: 793393 - RNA, 19 nt, Homo sapiens
  misc_RNA (1)...(19): siRNA sense strand
ucacuuacuccaccugugu

SEQ ID NO: 793394 - RNA, 19 nt, Homo sapiens
  misc_RNA (1)...(19): siRNA sense strand
agagagaucgagcagaaug

SEQ ID NO: 793395 - RNA, 19 nt, Homo sapiens
  misc_RNA (1)...(19): siRNA sense strand
ugagacagccaaccugaag

SEQ ID NO: 793396 - RNA, 19 nt, Homo sapiens
  misc_RNA (1)...(19): siRNA sense strand
gugaacaaacccaaguaug

SEQ ID NO: 793397 - RNA, 19 nt, Homo sapiens
  misc_RNA (1)...(19): siRNA sense strand
augggaauguugcggagua

SEQ ID NO: 793398 - RNA, 19 nt, Homo sapiens
  misc_RNA (1)...(19): siRNA sense strand
gacaacauugcucacuuga

SEQ ID NO: 793399 - RNA, 19 nt, Homo sapiens
  misc_RNA (1)...(19): siRNA sense strand
gccaaccugauccggaaua

SEQ ID NO: 793400 - RNA, 19 nt, Homo sapiens
  misc_RNA (1)...(19): siRNA sense strand
gcauggagagcagcaaauc

SEQ ID NO: 793401 - RNA, 19 nt, Homo sapiens
  misc_RNA (1)...(19): siRNA sense strand
gaguaucugaaacuaguga

SEQ ID NO: 793402 - RNA, 19 nt, Homo sapiens
  misc_RNA (1)...(19): siRNA sense strand
uggaggaccagcugcauga

SEQ ID NO: 793403 - RNA, 19 nt, Homo sapiens
  misc_RNA (1)...(19): siRNA sense strand
uggaggaacugagggagau

SEQ ID NO: 793404 - RNA, 19 nt, Homo sapiens
  misc_RNA (1)...(19): siRNA sense strand
ggagcucaaaggacauuuc

SEQ ID NO: 793405 - RNA, 19 nt, Homo sapiens
  misc_RNA (1)...(19): siRNA sense strand
aaguucgucucacccauga

SEQ ID NO: 793406 - RNA, 19 nt, Homo sapiens
  misc_RNA (1)...(19): siRNA sense strand
aaucagaaaucagcucacu

SEQ ID NO: 793407 - RNA, 19 nt, Homo sapiens
  misc_RNA (1)...(19): siRNA sense strand
uguccaccaucgcgaaguu

SEQ ID NO: 793408 - RNA, 19 nt, Homo sapiens
  misc_RNA (1)...(19): siRNA sense strand
ggaccugcaucagcaugag

SEQ ID NO: 793409 - RNA, 19 nt, Homo sapiens
  misc_RNA (1)...(19): siRNA sense strand
aaccugauccggaauaagu

SEQ ID NO: 793410 - RNA, 19 nt, Homo sapiens
  misc_RNA (1)...(19): siRNA sense strand
uucaauaaguccagagagu

SEQ ID NO: 793411 - RNA, 19 nt, Homo sapiens
  misc_RNA (1)...(19): siRNA sense strand
cagacagccugaagcaaaa

SEQ ID NO: 793412 - RNA, 19 nt, Homo sapiens
  misc_RNA (1)...(19): siRNA sense strand
gagcagaauggagccucua

SEQ ID NO: 793413 - RNA, 19 nt, Homo sapiens
  misc_RNA (1)...(19): siRNA sense strand
ggcgggacguaucaagcaa

SEQ ID NO: 793414 - RNA, 19 nt, Homo sapiens
  misc_RNA (1)...(19): siRNA sense strand
cagcaggcgggacguauca

SEQ ID NO: 793415 - RNA, 19 nt, Homo sapiens
  misc_RNA (1)...(19): siRNA sense strand
aggagaagguggccuacca

SEQ ID NO: 793416 - RNA, 19 nt, Homo sapiens
  misc_RNA (1)...(19): siRNA sense strand
aagaggaaagauacaggua

SEQ ID NO: 793417 - RNA, 19 nt, Homo sapiens
  misc_RNA (1)...(19): siRNA sense strand
gaggacaucgaggcacuga

SEQ ID NO: 793418 - RNA, 19 nt, Homo sapiens
  misc_RNA (1)...(19): siRNA sense strand
caggcucggccgacaguaa

SEQ ID NO: 793419 - RNA, 19 nt, Homo sapiens
  misc_RNA (1)...(19): siRNA sense strand
aaaggacauuuccaaagac

SEQ ID NO: 793420 - RNA, 19 nt, Homo sapiens
  misc_RNA (1)...(19): siRNA sense strand
guucgucucacccaugaug

SEQ ID NO: 793421 - RNA, 19 nt, Homo sapiens
  misc_RNA (1)...(19): siRNA sense strand
ccagugagcucauccucua

SEQ ID NO: 793422 - RNA, 19 nt, Homo sapiens
  misc_RNA (1)...(19): siRNA sense strand
ggacagacagccaguauug

SEQ ID NO: 793423 - RNA, 19 nt, Homo sapiens
  misc_RNA (1)...(19): siRNA sense strand
aagaagcccucgaccuuua

SEQ ID NO: 793424 - RNA, 19 nt, Homo sapiens
  misc_RNA (1)...(19): siRNA sense strand
gcauccagguucacccaua

SEQ ID NO: 793425 - RNA, 19 nt, Homo sapiens
  misc_RNA (1)...(19): siRNA sense strand
gcagaccaccuuccaagaa

SEQ ID NO: 793426 - RNA, 19 nt, Homo sapiens
  misc_RNA (1)...(19): siRNA sense strand
ccaagaagcccucgaccuu

SEQ ID NO: 793427 - RNA, 19 nt, Homo sapiens
  misc_RNA (1)...(19): siRNA sense strand
gcaacccagugccuuguga

SEQ ID NO: 793428 - RNA, 19 nt, Homo sapiens
  misc_RNA (1)...(19): siRNA sense strand
ggaggccucugaagcugaa

SEQ ID NO: 793429 - RNA, 19 nt, Homo sapiens
  misc_RNA (1)...(19): siRNA sense strand
ccacgucgcugccccauuu

SEQ ID NO: 793430 - RNA, 19 nt, Homo sapiens
  misc_RNA (1)...(19): siRNA sense strand
caagaagcccucgaccuuu

SEQ ID NO: 793431 - RNA, 19 nt, Homo sapiens
  misc_RNA (1)...(19): siRNA sense strand
gcgcaggucccacagaaga

SEQ ID NO: 793432 - RNA, 19 nt, Homo sapiens
  misc_RNA (1)...(19): siRNA sense strand
cagaaggcauccagguuca

SEQ ID NO: 793433 - RNA, 19 nt, Homo sapiens
  misc_RNA (1)...(19): siRNA sense strand
ccaccucccugccuuacga

SEQ ID NO: 793434 - RNA, 19 nt, Homo sapiens
  misc_RNA (1)...(19): siRNA sense strand
ccacgcaguuccucucaag

SEQ ID NO: 793435 - RNA, 19 nt, Homo sapiens
  misc_RNA (1)...(19): siRNA sense strand
cagcucccgugccaggaua

SEQ ID NO: 793436 - RNA, 19 nt, Homo sapiens
  misc_RNA (1)...(19): siRNA sense strand
cgacaacacccaguuugga

SEQ ID NO: 793437 - RNA, 19 nt, Homo sapiens
  misc_RNA (1)...(19): siRNA sense strand
gcuccacggcucugccuuu

SEQ ID NO: 793438 - RNA, 19 nt, Homo sapiens
  misc_RNA (1)...(19): siRNA sense strand
ggacagugagggccaagag

SEQ ID NO: 793439 - RNA, 19 nt, Homo sapiens
  misc_RNA (1)...(19): siRNA sense strand
gcagggaaggcugaagaga

SEQ ID NO: 793440 - RNA, 19 nt, Homo sapiens
  misc_RNA (1)...(19): siRNA sense strand
ccaccaccucccugccuua

SEQ ID NO: 793441 - RNA, 19 nt, Homo sapiens
  misc_RNA (1)...(19): siRNA sense strand
gcaggucccacagaagaug

SEQ ID NO: 793442 - RNA, 19 nt, Homo sapiens
  misc_RNA (1)...(19): siRNA sense strand
cccagugccuugugaaguc

SEQ ID NO: 793443 - RNA, 19 nt, Homo sapiens
  misc_RNA (1)...(19): siRNA sense strand
cauccagguucacccauac

SEQ ID NO: 793444 - RNA, 19 nt, Homo sapiens
  misc_RNA (1)...(19): siRNA sense strand
gggacagacagccaguauu

SEQ ID NO: 793445 - RNA, 19 nt, Homo sapiens
  misc_RNA (1)...(19): siRNA sense strand
cacccaguuuggacaguga

SEQ ID NO: 793446 - RNA, 19 nt, Homo sapiens
  misc_RNA (1)...(19): siRNA sense strand
aaucaucugaggccaguga

SEQ ID NO: 793447 - RNA, 19 nt, Homo sapiens
  misc_RNA (1)...(19): siRNA sense strand
guuccuccgccaccacuuu

SEQ ID NO: 793448 - RNA, 19 nt, Homo sapiens
  misc_RNA (1)...(19): siRNA sense strand
agaaagagcugcggaaguu

SEQ ID NO: 793449 - RNA, 19 nt, Homo sapiens
  misc_RNA (1)...(19): siRNA sense strand
ggaaguugguucaugaaau

SEQ ID NO: 793450 - RNA, 19 nt, Homo sapiens
  misc_RNA (1)...(19): siRNA sense strand
agaaggcccuggugaugua

SEQ ID NO: 793451 - RNA, 19 nt, Homo sapiens
  misc_RNA (1)...(19): siRNA sense strand
gggcaaagcuacagaugac

SEQ ID NO: 793452 - RNA, 19 nt, Homo sapiens
  misc_RNA (1)...(19): siRNA sense strand
ggaagccucccgcuccuaa

SEQ ID NO: 793453 - RNA, 19 nt, Homo sapiens
  misc_RNA (1)...(19): siRNA sense strand
ggaagcaccugcgggauac

SEQ ID NO: 793454 - RNA, 19 nt, Homo sapiens
  misc_RNA (1)...(19): siRNA sense strand
cugcagagcuggagaagag

SEQ ID NO: 793455 - RNA, 19 nt, Homo sapiens
  misc_RNA (1)...(19): siRNA sense strand
uagagaagacaaccuauga

SEQ ID NO: 793456 - RNA, 19 nt, Homo sapiens
  misc_RNA (1)...(19): siRNA sense strand
gcaggcuccucaccgauau

SEQ ID NO: 793457 - RNA, 19 nt, Homo sapiens
  misc_RNA (1)...(19): siRNA sense strand
guacaaugcucaucuuacc

SEQ ID NO: 793458 - RNA, 19 nt, Homo sapiens
  misc_RNA (1)...(19): siRNA sense strand
gcaaagcuacagaugacuu

SEQ ID NO: 793459 - RNA, 19 nt, Homo sapiens
  misc_RNA (1)...(19): siRNA sense strand
ccaccagcguacccucuuu

SEQ ID NO: 793460 - RNA, 19 nt, Homo sapiens
  misc_RNA (1)...(19): siRNA sense strand
ccaggaggccuaugagaug

SEQ ID NO: 793461 - RNA, 19 nt, Homo sapiens
  misc_RNA (1)...(19): siRNA sense strand
ucaccgauauguacaaugc

SEQ ID NO: 793462 - RNA, 19 nt, Homo sapiens
  misc_RNA (1)...(19): siRNA sense strand
cagcguacccucuuucauc

SEQ ID NO: 793463 - RNA, 19 nt, Homo sapiens
  misc_RNA (1)...(19): siRNA sense strand
guagagaagacaaccuaug

SEQ ID NO: 793464 - RNA, 19 nt, Homo sapiens
  misc_RNA (1)...(19): siRNA sense strand
ggaaggcagcgaagagaag

SEQ ID NO: 793465 - RNA, 19 nt, Homo sapiens
  misc_RNA (1)...(19): siRNA sense strand
uggaagcaccugcgggaua

SEQ ID NO: 793466 - RNA, 19 nt, Homo sapiens
  misc_RNA (1)...(19): siRNA sense strand
gggauacaguggagcuaca

SEQ ID NO: 793467 - RNA, 19 nt, Homo sapiens
  misc_RNA (1)...(19): siRNA sense strand
gaaagagcugcggaaguug

SEQ ID NO: 793468 - RNA, 19 nt, Homo sapiens
  misc_RNA (1)...(19): siRNA sense strand
gaccagcauucgcccaucu

SEQ ID NO: 793469 - RNA, 19 nt, Homo sapiens
  misc_RNA (1)...(19): siRNA sense strand
ccaaggcucccaucagaag

SEQ ID NO: 793470 - RNA, 19 nt, Homo sapiens
  misc_RNA (1)...(19): siRNA sense strand
acgggaggcugguagagaa

SEQ ID NO: 793471 - RNA, 19 nt, Homo sapiens
  misc_RNA (1)...(19): siRNA sense strand
uauguacaaugcucaucuu

SEQ ID NO: 793472 - RNA, 19 nt, Homo sapiens
  misc_RNA (1)...(19): siRNA sense strand
gaagcuggaccgcauucug

SEQ ID NO: 793473 - RNA, 19 nt, Homo sapiens
  misc_RNA (1)...(19): siRNA sense strand
ugcggaaguugguucauga

SEQ ID NO: 793474 - RNA, 19 nt, Homo sapiens
  misc_RNA (1)...(19): siRNA sense strand
auccaaggcucccaucaga

SEQ ID NO: 793475 - RNA, 19 nt, Homo sapiens
  misc_RNA (1)...(19): siRNA sense strand
ucagaaggcccuggugaug

SEQ ID NO: 793476 - RNA, 19 nt, Homo sapiens
  misc_RNA (1)...(19): siRNA sense strand
augcucaucuuaccaagga

SEQ ID NO: 793477 - RNA, 19 nt, Homo sapiens
  misc_RNA (1)...(19): siRNA sense strand
gaugcuauccgggcugcua

SEQ ID NO: 793478 - RNA, 19 nt, Homo sapiens
  misc_RNA (1)...(19): siRNA sense strand
caguggagcuacaacuucu

SEQ ID NO: 793479 - RNA, 19 nt, Homo sapiens
  misc_RNA (1)...(19): siRNA sense strand
caaagcuacagaugacuuc

SEQ ID NO: 793480 - RNA, 19 nt, Homo sapiens
  misc_RNA (1)...(19): siRNA sense strand
ugcaugagacgcagaaaga

SEQ ID NO: 793481 - RNA, 19 nt, Homo sapiens
  misc_RNA (1)...(19): siRNA sense strand
gcucaucuuaccaaggauu

SEQ ID NO: 793482 - RNA, 19 nt, Homo sapiens
  misc_RNA (1)...(19): siRNA sense strand
acuccaaccucgaccugaa

SEQ ID NO: 793483 - RNA, 19 nt, Homo sapiens
  misc_RNA (1)...(19): siRNA sense strand
acaaugcucaucuuaccaa

SEQ ID NO: 793484 - RNA, 19 nt, Homo sapiens
  misc_RNA (1)...(19): siRNA sense strand
gagaagcuggaccgcauuc

SEQ ID NO: 793485 - RNA, 19 nt, Homo sapiens
  misc_RNA (1)...(19): siRNA sense strand
gaagccucccgcuccuaaa

SEQ ID NO: 793486 - RNA, 19 nt, Homo sapiens
  misc_RNA (1)...(19): siRNA sense strand
cagaaggcccuggugaugu

SEQ ID NO: 793487 - RNA, 19 nt, Homo sapiens
  misc_RNA (1)...(19): siRNA sense strand
gcaugcaugagacgcagaa

SEQ ID NO: 793488 - RNA, 19 nt, Homo sapiens
  misc_RNA (1)...(19): siRNA sense strand
gcuccucaccgauauguac

SEQ ID NO: 793489 - RNA, 19 nt, Homo sapiens
  misc_RNA (1)...(19): siRNA sense strand
cagaaagagcugcggaagu

SEQ ID NO: 793490 - RNA, 19 nt, Homo sapiens
  misc_RNA (1)...(19): siRNA sense strand
agacccaggaggccuauga

SEQ ID NO: 793491 - RNA, 19 nt, Homo sapiens
  misc_RNA (1)...(19): siRNA sense strand
ccacgugaccagagagaag

SEQ ID NO: 793492 - RNA, 19 nt, Homo sapiens
  misc_RNA (1)...(19): siRNA sense strand
gacgggaggcugguagaga

SEQ ID NO: 793493 - RNA, 19 nt, Homo sapiens
  misc_RNA (1)...(19): siRNA sense strand
guggagcuacaacuucuga

SEQ ID NO: 793494 - RNA, 19 nt, Homo sapiens
  misc_RNA (1)...(19): siRNA sense strand
gaccgcauucuggccguua

SEQ ID NO: 793495 - RNA, 19 nt, Homo sapiens
  misc_RNA (1)...(19): siRNA sense strand
ccucaccgauauguacaau

SEQ ID NO: 793496 - RNA, 19 nt, Homo sapiens
  misc_RNA (1)...(19): siRNA sense strand
cugcggaaguugguucaug

SEQ ID NO: 793497 - RNA, 19 nt, Homo sapiens
  misc_RNA (1)...(19): siRNA sense strand
ggauacaguggagcuacaa

SEQ ID NO: 793498 - RNA, 19 nt, Homo sapiens
  misc_RNA (1)...(19): siRNA sense strand
gaaaggggcuccaggauaa

SEQ ID NO: 793499 - RNA, 19 nt, Homo sapiens
  misc_RNA (1)...(19): siRNA sense strand
gaaagaagcaagaaaugaa

SEQ ID NO: 793500 - RNA, 19 nt, Homo sapiens
  misc_RNA (1)...(19): siRNA sense strand
caagaucucugacuucaug

SEQ ID NO: 793501 - RNA, 19 nt, Homo sapiens
  misc_RNA (1)...(19): siRNA sense strand
gaacacugaugacaacgaa

SEQ ID NO: 793502 - RNA, 19 nt, Homo sapiens
  misc_RNA (1)...(19): siRNA sense strand
uaacugacaucaaugagaa

SEQ ID NO: 793503 - RNA, 19 nt, Homo sapiens
  misc_RNA (1)...(19): siRNA sense strand
gaagagaacccuaacaaca

SEQ ID NO: 793504 - RNA, 19 nt, Homo sapiens
  misc_RNA (1)...(19): siRNA sense strand
ugagauaacugacaucaau

SEQ ID NO: 793505 - RNA, 19 nt, Homo sapiens
  misc_RNA (1)...(19): siRNA sense strand
ggaagaggcgaucaucaua

SEQ ID NO: 793506 - RNA, 19 nt, Homo sapiens
  misc_RNA (1)...(19): siRNA sense strand
caaugaaggugacaaugaa

SEQ ID NO: 793507 - RNA, 19 nt, Homo sapiens
  misc_RNA (1)...(19): siRNA sense strand
gcaaugaaggugacaauga

SEQ ID NO: 793508 - RNA, 19 nt, Homo sapiens
  misc_RNA (1)...(19): siRNA sense strand
acagagacauugaguacua

SEQ ID NO: 793509 - RNA, 19 nt, Homo sapiens
  misc_RNA (1)...(19): siRNA sense strand
gcagagaccucaucaucca

SEQ ID NO: 793510 - RNA, 19 nt, Homo sapiens
  misc_RNA (1)...(19): siRNA sense strand
ggaaggaagugaagauguc

SEQ ID NO: 793511 - RNA, 19 nt, Homo sapiens
  misc_RNA (1)...(19): siRNA sense strand
caacgaaggugacaaugag

SEQ ID NO: 793512 - RNA, 19 nt, Homo sapiens
  misc_RNA (1)...(19): siRNA sense strand
gaagaugucugggaagaag

SEQ ID NO: 793513 - RNA, 19 nt, Homo sapiens
  misc_RNA (1)...(19): siRNA sense strand
ggacaucuaugaggaagga

SEQ ID NO: 793514 - RNA, 19 nt, Homo sapiens
  misc_RNA (1)...(19): siRNA sense strand
cgaaaccacugacaacaau

SEQ ID NO: 793515 - RNA, 19 nt, Homo sapiens
  misc_RNA (1)...(19): siRNA sense strand
agaaugaucuguggguuaa

SEQ ID NO: 793516 - RNA, 19 nt, Homo sapiens
  misc_RNA (1)...(19): siRNA sense strand
gaacaucaaggcaggcaaa

SEQ ID NO: 793517 - RNA, 19 nt, Homo sapiens
  misc_RNA (1)...(19): siRNA sense strand
caagaacacugaugacaac

SEQ ID NO: 793518 - RNA, 19 nt, Homo sapiens
  misc_RNA (1)...(19): siRNA sense strand
gaaagcagagagagaaaug

SEQ ID NO: 793519 - RNA, 19 nt, Homo sapiens
  misc_RNA (1)...(19): siRNA sense strand
gaucaucucagacgaauca

SEQ ID NO: 793520 - RNA, 19 nt, Homo sapiens
  misc_RNA (1)...(19): siRNA sense strand
guacaggaucucagacaua

SEQ ID NO: 793521 - RNA, 19 nt, Homo sapiens
  misc_RNA (1)...(19): siRNA sense strand
gcaacgaaggugacaauga

SEQ ID NO: 793522 - RNA, 19 nt, Homo sapiens
  misc_RNA (1)...(19): siRNA sense strand
ugacaggauugcugagauu

SEQ ID NO: 793523 - RNA, 19 nt, Homo sapiens
  misc_RNA (1)...(19): siRNA sense strand
caagaaaugaagaaacgua

SEQ ID NO: 793524 - RNA, 19 nt, Homo sapiens
  misc_RNA (1)...(19): siRNA sense strand
uugcugagauuaucaagaa

SEQ ID NO: 793525 - RNA, 19 nt, Homo sapiens
  misc_RNA (1)...(19): siRNA sense strand
gcaacaacuucuucaaagg

SEQ ID NO: 793526 - RNA, 19 nt, Homo sapiens
  misc_RNA (1)...(19): siRNA sense strand
ggcaacaacuucuucaaag

SEQ ID NO: 793527 - RNA, 19 nt, Homo sapiens
  misc_RNA (1)...(19): siRNA sense strand
gagaaagaagcaagaaaug

SEQ ID NO: 793528 - RNA, 19 nt, Homo sapiens
  misc_RNA (1)...(19): siRNA sense strand
cgagaauccugaagacaau

SEQ ID NO: 793529 - RNA, 19 nt, Homo sapiens
  misc_RNA (1)...(19): siRNA sense strand
gaugugagguggugaucau

SEQ ID NO: 793530 - RNA, 19 nt, Homo sapiens
  misc_RNA (1)...(19): siRNA sense strand
gcuccaggauaaagagaaa

SEQ ID NO: 793531 - RNA, 19 nt, Homo sapiens
  misc_RNA (1)...(19): siRNA sense strand
cgagaauccugaccacaau

SEQ ID NO: 793532 - RNA, 19 nt, Homo sapiens
  misc_RNA (1)...(19): siRNA sense strand
acaacgagaccacugauaa

SEQ ID NO: 793533 - RNA, 19 nt, Homo sapiens
  misc_RNA (1)...(19): siRNA sense strand
ccagugaugaugaagauaa

SEQ ID NO: 793534 - RNA, 19 nt, Homo sapiens
  misc_RNA (1)...(19): siRNA sense strand
gaagaggcgaucaucauag

SEQ ID NO: 793535 - RNA, 19 nt, Homo sapiens
  misc_RNA (1)...(19): siRNA sense strand
ugacuacgaggacgugaua

SEQ ID NO: 793536 - RNA, 19 nt, Homo sapiens
  misc_RNA (1)...(19): siRNA sense strand
gacauugaguacuaugaga

SEQ ID NO: 793537 - RNA, 19 nt, Homo sapiens
  misc_RNA (1)...(19): siRNA sense strand
gcgcagagaccucaucauc

SEQ ID NO: 793538 - RNA, 19 nt, Homo sapiens
  misc_RNA (1)...(19): siRNA sense strand
ggagaccaccgacuacuuc

SEQ ID NO: 793539 - RNA, 19 nt, Homo sapiens
  misc_RNA (1)...(19): siRNA sense strand
gugaagaugucugggaaga

SEQ ID NO: 793540 - RNA, 19 nt, Homo sapiens
  misc_RNA (1)...(19): siRNA sense strand
gcagcgacagugacaauga

SEQ ID NO: 793541 - RNA, 19 nt, Homo sapiens
  misc_RNA (1)...(19): siRNA sense strand
caacgagaauccugaagac

SEQ ID NO: 793542 - RNA, 19 nt, Homo sapiens
  misc_RNA (1)...(19): siRNA sense strand
ggucaaagcauuccucaac

SEQ ID NO: 793543 - RNA, 19 nt, Homo sapiens
  misc_RNA (1)...(19): siRNA sense strand
cagcgacagugacaaugaa

SEQ ID NO: 793544 - RNA, 19 nt, Homo sapiens
  misc_RNA (1)...(19): siRNA sense strand
acaaugagagugcagauga

SEQ ID NO: 793545 - RNA, 19 nt, Homo sapiens
  misc_RNA (1)...(19): siRNA sense strand
gcgagaauccugaccacaa

SEQ ID NO: 793546 - RNA, 19 nt, Homo sapiens
  misc_RNA (1)...(19): siRNA sense strand
gaccucaucauccagcaua

SEQ ID NO: 793547 - RNA, 19 nt, Homo sapiens
  misc_RNA (1)...(19): siRNA sense strand
acaacaacgagaacacuua

SEQ ID NO: 793548 - RNA, 19 nt, Homo sapiens
  misc_RNA (1)...(19): siRNA sense strand
uacaggaucucagacauau

SEQ ID NO: 793549 - RNA, 19 nt, Homo sapiens
  misc_RNA (1)...(19): siRNA sense strand
ugaccaaucugcagguaca

SEQ ID NO: 793550 - RNA, 19 nt, Homo sapiens
  misc_RNA (1)...(19): siRNA sense strand
gaugagcgggagaguauga

SEQ ID NO: 793551 - RNA, 19 nt, Homo sapiens
  misc_RNA (1)...(19): siRNA sense strand
cgacagagacauugaguac

SEQ ID NO: 793552 - RNA, 19 nt, Homo sapiens
  misc_RNA (1)...(19): siRNA sense strand
ggccagugaugaugaagau

SEQ ID NO: 793553 - RNA, 19 nt, Homo sapiens
  misc_RNA (1)...(19): siRNA sense strand
acaaugagauaacugacau

SEQ ID NO: 793554 - RNA, 19 nt, Homo sapiens
  misc_RNA (1)...(19): siRNA sense strand
ugacuauuaugcaguggaa

SEQ ID NO: 793555 - RNA, 19 nt, Homo sapiens
  misc_RNA (1)...(19): siRNA sense strand
gaagcaagaaaugaagaaa

SEQ ID NO: 793556 - RNA, 19 nt, Homo sapiens
  misc_RNA (1)...(19): siRNA sense strand
caaacauggugauugucaa

SEQ ID NO: 793557 - RNA, 19 nt, Homo sapiens
  misc_RNA (1)...(19): siRNA sense strand
gcagguacaggaucucaga

SEQ ID NO: 793558 - RNA, 19 nt, Homo sapiens
  misc_RNA (1)...(19): siRNA sense strand
caaccgacgugaugaagac

SEQ ID NO: 793559 - RNA, 19 nt, Homo sapiens
  misc_RNA (1)...(19): siRNA sense strand
ggaagcagaggaaggugaa

SEQ ID NO: 793560 - RNA, 19 nt, Homo sapiens
  misc_RNA (1)...(19): siRNA sense strand
gacaauucaugacaucaag

SEQ ID NO: 793561 - RNA, 19 nt, Homo sapiens
  misc_RNA (1)...(19): siRNA sense strand
ggaagaagagggcauugag

SEQ ID NO: 793562 - RNA, 19 nt, Homo sapiens
  misc_RNA (1)...(19): siRNA sense strand
cccagaggcugacaggauu

SEQ ID NO: 793563 - RNA, 19 nt, Homo sapiens
  misc_RNA (1)...(19): siRNA sense strand
ugaguacuaugagaaaguu

SEQ ID NO: 793564 - RNA, 19 nt, Homo sapiens
  misc_RNA (1)...(19): siRNA sense strand
acaauaacaagaacacuga

SEQ ID NO: 793565 - RNA, 19 nt, Homo sapiens
  misc_RNA (1)...(19): siRNA sense strand
ugacaucaaugagaacauc

SEQ ID NO: 793566 - RNA, 19 nt, Homo sapiens
  misc_RNA (1)...(19): siRNA sense strand
ggauaaagagaaagaagca

SEQ ID NO: 793567 - RNA, 19 nt, Homo sapiens
  misc_RNA (1)...(19): siRNA sense strand
ugagaaaguuauugaagac

SEQ ID NO: 793568 - RNA, 19 nt, Homo sapiens
  misc_RNA (1)...(19): siRNA sense strand
cagcgaugaugacgacaga

SEQ ID NO: 793569 - RNA, 19 nt, Homo sapiens
  misc_RNA (1)...(19): siRNA sense strand
aagagaacccuaacaacaa

SEQ ID NO: 793570 - RNA, 19 nt, Homo sapiens
  misc_RNA (1)...(19): siRNA sense strand
caacaacgagaauccugaa

SEQ ID NO: 793571 - RNA, 19 nt, Homo sapiens
  misc_RNA (1)...(19): siRNA sense strand
cacaggugcuggccgauau

SEQ ID NO: 793572 - RNA, 19 nt, Homo sapiens
  misc_RNA (1)...(19): siRNA sense strand
agaaagaagcaagaaauga

SEQ ID NO: 793573 - RNA, 19 nt, Homo sapiens
  misc_RNA (1)...(19): siRNA sense strand
gcuacuaccugagagaaag

SEQ ID NO: 793574 - RNA, 19 nt, Homo sapiens
  misc_RNA (1)...(19): siRNA sense strand
ggaggaaggaagugaagau

SEQ ID NO: 793575 - RNA, 19 nt, Homo sapiens
  misc_RNA (1)...(19): siRNA sense strand
caacaacuucuucaaaggu

SEQ ID NO: 793576 - RNA, 19 nt, Homo sapiens
  misc_RNA (1)...(19): siRNA sense strand
cgagaccacugauaacaac

SEQ ID NO: 793577 - RNA, 19 nt, Homo sapiens
  misc_RNA (1)...(19): siRNA sense strand
aagcuguacuuccagacua

SEQ ID NO: 793578 - RNA, 19 nt, Homo sapiens
  misc_RNA (1)...(19): siRNA sense strand
ggaggaggaagcagaggaa

SEQ ID NO: 793579 - RNA, 19 nt, Homo sapiens
  misc_RNA (1)...(19): siRNA sense strand
ugagacaauucaugacauc

SEQ ID NO: 793580 - RNA, 19 nt, Homo sapiens
  misc_RNA (1)...(19): siRNA sense strand
ggaagacgccccugacuau

SEQ ID NO: 793581 - RNA, 19 nt, Homo sapiens
  misc_RNA (1)...(19): siRNA sense strand
agagaaagaagcaagaaau

SEQ ID NO: 793582 - RNA, 19 nt, Homo sapiens
  misc_RNA (1)...(19): siRNA sense strand
uaaagagaaagaagcaaga

SEQ ID NO: 793583 - RNA, 19 nt, Homo sapiens
  misc_RNA (1)...(19): siRNA sense strand
gacaggauugcugagauua

SEQ ID NO: 793584 - RNA, 19 nt, Homo sapiens
  misc_RNA (1)...(19): siRNA sense strand
gcagaugaggccagugaug

SEQ ID NO: 793585 - RNA, 19 nt, Homo sapiens
  misc_RNA (1)...(19): siRNA sense strand
cugagauuaucaagaauga

SEQ ID NO: 793586 - RNA, 19 nt, Homo sapiens
  misc_RNA (1)...(19): siRNA sense strand
aagaaugaucuguggguua

SEQ ID NO: 793587 - RNA, 19 nt, Homo sapiens
  misc_RNA (1)...(19): siRNA sense strand
acgaaucaguggaagaaga

SEQ ID NO: 793588 - RNA, 19 nt, Homo sapiens
  misc_RNA (1)...(19): siRNA sense strand
agauaaugauggcaacgaa

SEQ ID NO: 793589 - RNA, 19 nt, Homo sapiens
  misc_RNA (1)...(19): siRNA sense strand
gugaugaugaagauaauga

SEQ ID NO: 793590 - RNA, 19 nt, Homo sapiens
  misc_RNA (1)...(19): siRNA sense strand
cagaugaggccagugauga

SEQ ID NO: 793591 - RNA, 19 nt, Homo sapiens
  misc_RNA (1)...(19): siRNA sense strand
cggcaacaacuucuucaaa

SEQ ID NO: 793592 - RNA, 19 nt, Homo sapiens
  misc_RNA (1)...(19): siRNA sense strand
caacgagagugcugaugac

SEQ ID NO: 793593 - RNA, 19 nt, Homo sapiens
  misc_RNA (1)...(19): siRNA sense strand
gaccacugacaaugagaua

SEQ ID NO: 793594 - RNA, 19 nt, Homo sapiens
  misc_RNA (1)...(19): siRNA sense strand
cgagaccacugacaaugag

SEQ ID NO: 793595 - RNA, 19 nt, Homo sapiens
  misc_RNA (1)...(19): siRNA sense strand
ggaaagcagagagagaaau

SEQ ID NO: 793596 - RNA, 19 nt, Homo sapiens
  misc_RNA (1)...(19): siRNA sense strand
ugaagacuuugacaaggau

SEQ ID NO: 793597 - RNA, 19 nt, Homo sapiens
  misc_RNA (1)...(19): siRNA sense strand
uugaagacuuugacaagga

SEQ ID NO: 793598 - RNA, 19 nt, Homo sapiens
  misc_RNA (1)...(19): siRNA sense strand
gaaacgaauugagcgcuua

SEQ ID NO: 793599 - RNA, 19 nt, Homo sapiens
  misc_RNA (1)...(19): siRNA sense strand
gcgcagcucuggaauuuga

SEQ ID NO: 793600 - RNA, 19 nt, Homo sapiens
  misc_RNA (1)...(19): siRNA sense strand
ccaugcagguuuccaaaua

SEQ ID NO: 793601 - RNA, 19 nt, Homo sapiens
  misc_RNA (1)...(19): siRNA sense strand
gaaauacgagaaacgaauu

SEQ ID NO: 793602 - RNA, 19 nt, Homo sapiens
  misc_RNA (1)...(19): siRNA sense strand
uuauguagaucgcgugaua

SEQ ID NO: 793603 - RNA, 19 nt, Homo sapiens
  misc_RNA (1)...(19): siRNA sense strand
gcuuaacgauccugaaaga

SEQ ID NO: 793604 - RNA, 19 nt, Homo sapiens
  misc_RNA (1)...(19): siRNA sense strand
gaauugagcgcuuaacgau

SEQ ID NO: 793605 - RNA, 19 nt, Homo sapiens
  misc_RNA (1)...(19): siRNA sense strand
cagcaugacuguccaucuu

SEQ ID NO: 793606 - RNA, 19 nt, Homo sapiens
  misc_RNA (1)...(19): siRNA sense strand
ccacguuccuaacauuuau

SEQ ID NO: 793607 - RNA, 19 nt, Homo sapiens
  misc_RNA (1)...(19): siRNA sense strand
ccaagaucauggagaaaug

SEQ ID NO: 793608 - RNA, 19 nt, Homo sapiens
  misc_RNA (1)...(19): siRNA sense strand
gaagacauccacguuccua

SEQ ID NO: 793609 - RNA, 19 nt, Homo sapiens
  misc_RNA (1)...(19): siRNA sense strand
gcucaggacccgcgugaaa

SEQ ID NO: 793610 - RNA, 19 nt, Homo sapiens
  misc_RNA (1)...(19): siRNA sense strand
uggagacgcuggaaaggaa

SEQ ID NO: 793611 - RNA, 19 nt, Homo sapiens
  misc_RNA (1)...(19): siRNA sense strand
acgcgcagcucuggaauuu

SEQ ID NO: 793612 - RNA, 19 nt, Homo sapiens
  misc_RNA (1)...(19): siRNA sense strand
ggacacauccaacuaacca

SEQ ID NO: 793613 - RNA, 19 nt, Homo sapiens
  misc_RNA (1)...(19): siRNA sense strand
cauccacguuccuaacauu

SEQ ID NO: 793614 - RNA, 19 nt, Homo sapiens
  misc_RNA (1)...(19): siRNA sense strand
gcaugacuguccaucuuca

SEQ ID NO: 793615 - RNA, 19 nt, Homo sapiens
  misc_RNA (1)...(19): siRNA sense strand
gcagaaauacgagaaacga

SEQ ID NO: 793616 - RNA, 19 nt, Homo sapiens
  misc_RNA (1)...(19): siRNA sense strand
gcgcuuaacgauccugaaa

SEQ ID NO: 793617 - RNA, 19 nt, Homo sapiens
  misc_RNA (1)...(19): siRNA sense strand
guacgccaaucugggcaua

SEQ ID NO: 793618 - RNA, 19 nt, Homo sapiens
  misc_RNA (1)...(19): siRNA sense strand
guagaucgcgugauaaagg

SEQ ID NO: 793619 - RNA, 19 nt, Homo sapiens
  misc_RNA (1)...(19): siRNA sense strand
caacggcgaccacuuccuu

SEQ ID NO: 793620 - RNA, 19 nt, Homo sapiens
  misc_RNA (1)...(19): siRNA sense strand
ccgagaaggccguguuuga

SEQ ID NO: 793621 - RNA, 19 nt, Homo sapiens
  misc_RNA (1)...(19): siRNA sense strand
gaagauggagacgcuggaa

SEQ ID NO: 793622 - RNA, 19 nt, Homo sapiens
  misc_RNA (1)...(19): siRNA sense strand
guucaacggcgaccacuuc

SEQ ID NO: 793623 - RNA, 19 nt, Homo sapiens
  misc_RNA (1)...(19): siRNA sense strand
cgguggagauggugaagga

SEQ ID NO: 793624 - RNA, 19 nt, Homo sapiens
  misc_RNA (1)...(19): siRNA sense strand
agacuucgcccuggugaaa

SEQ ID NO: 793625 - RNA, 19 nt, Homo sapiens
  misc_RNA (1)...(19): siRNA sense strand
gcaggaaacguggucuuca

SEQ ID NO: 793626 - RNA, 19 nt, Homo sapiens
  misc_RNA (1)...(19): siRNA sense strand
agaaauacgagaaacgaau

SEQ ID NO: 793627 - RNA, 19 nt, Homo sapiens
  misc_RNA (1)...(19): siRNA sense strand
cgaauugagcgcuuaacga

SEQ ID NO: 793628 - RNA, 19 nt, Homo sapiens
  misc_RNA (1)...(19): siRNA sense strand
caacgugcccaugugcaaa

SEQ ID NO: 793629 - RNA, 19 nt, Homo sapiens
  misc_RNA (1)...(19): siRNA sense strand
gggcagaaauacgagaaac

SEQ ID NO: 793630 - RNA, 19 nt, Homo sapiens
  misc_RNA (1)...(19): siRNA sense strand
ugauaaaggggcagaaaua

SEQ ID NO: 793631 - RNA, 19 nt, Homo sapiens
  misc_RNA (1)...(19): siRNA sense strand
caggaaacguggucuucag

SEQ ID NO: 793632 - RNA, 19 nt, Homo sapiens
  misc_RNA (1)...(19): siRNA sense strand
aaacgaauugagcgcuuaa

SEQ ID NO: 793633 - RNA, 19 nt, Homo sapiens
  misc_RNA (1)...(19): siRNA sense strand
gacgacuccuucgccauga

SEQ ID NO: 793634 - RNA, 19 nt, Homo sapiens
  misc_RNA (1)...(19): siRNA sense strand
aacguggucuucaggagaa

SEQ ID NO: 793635 - RNA, 19 nt, Homo sapiens
  misc_RNA (1)...(19): siRNA sense strand
caugcagguuuccaaauac

SEQ ID NO: 793636 - RNA, 19 nt, Homo sapiens
  misc_RNA (1)...(19): siRNA sense strand
ucaggacccgcgugaaaga

SEQ ID NO: 793637 - RNA, 19 nt, Homo sapiens
  misc_RNA (1)...(19): siRNA sense strand
cccgagaggugagggaguu

SEQ ID NO: 793638 - RNA, 19 nt, Homo sapiens
  misc_RNA (1)...(19): siRNA sense strand
uguuugacgugcacaggaa

SEQ ID NO: 793639 - RNA, 19 nt, Homo sapiens
  misc_RNA (1)...(19): siRNA sense strand
gccaggacgcgcaucauca

SEQ ID NO: 793640 - RNA, 19 nt, Homo sapiens
  misc_RNA (1)...(19): siRNA sense strand
ccugaaagaggaagaugga

SEQ ID NO: 793641 - RNA, 19 nt, Homo sapiens
  misc_RNA (1)...(19): siRNA sense strand
cgguggagguggaagagau

SEQ ID NO: 793642 - RNA, 19 nt, Homo sapiens
  misc_RNA (1)...(19): siRNA sense strand
gggugugccuuugcugugu

SEQ ID NO: 793643 - RNA, 19 nt, Homo sapiens
  misc_RNA (1)...(19): siRNA sense strand
cagaaauacgagaaacgaa

SEQ ID NO: 793644 - RNA, 19 nt, Homo sapiens
  misc_RNA (1)...(19): siRNA sense strand
guuccuacgugggcgagaa

SEQ ID NO: 793645 - RNA, 19 nt, Homo sapiens
  misc_RNA (1)...(19): siRNA sense strand
gacauccacguuccuaaca

SEQ ID NO: 793646 - RNA, 19 nt, Homo sapiens
  misc_RNA (1)...(19): siRNA sense strand
gagccaugcagguuuccaa

SEQ ID NO: 793647 - RNA, 19 nt, Homo sapiens
  misc_RNA (1)...(19): siRNA sense strand
gagaggugagggaguucaa

SEQ ID NO: 793648 - RNA, 19 nt, Homo sapiens
  misc_RNA (1)...(19): siRNA sense strand
uccacguuccuaacauuua

SEQ ID NO: 793649 - RNA, 19 nt, Homo sapiens
  misc_RNA (1)...(19): siRNA sense strand
cacggaagaugagguggau

SEQ ID NO: 793650 - RNA, 19 nt, Homo sapiens
  misc_RNA (1)...(19): siRNA sense strand
cgaaugaaaucuacucuga

SEQ ID NO: 793651 - RNA, 19 nt, Homo sapiens
  misc_RNA (1)...(19): siRNA sense strand
ugaauuaccuucuuagcaa

SEQ ID NO: 793652 - RNA, 19 nt, Homo sapiens
  misc_RNA (1)...(19): siRNA sense strand
gaagaacggaggauauauu

SEQ ID NO: 793653 - RNA, 19 nt, Homo sapiens
  misc_RNA (1)...(19): siRNA sense strand
guaaauauggaccucaaua

SEQ ID NO: 793654 - RNA, 19 nt, Homo sapiens
  misc_RNA (1)...(19): siRNA sense strand
ucucagaacccaucaauuu

SEQ ID NO: 793655 - RNA, 19 nt, Homo sapiens
  misc_RNA (1)...(19): siRNA sense strand
agaauugacugccauaugu

SEQ ID NO: 793656 - RNA, 19 nt, Homo sapiens
  misc_RNA (1)...(19): siRNA sense strand
gaacggaggauauauuugg

SEQ ID NO: 793657 - RNA, 19 nt, Homo sapiens
  misc_RNA (1)...(19): siRNA sense strand
cgacaaggcauccaucauu

SEQ ID NO: 793658 - RNA, 19 nt, Homo sapiens
  misc_RNA (1)...(19): siRNA sense strand
gaaaucuacucugaccaaa

SEQ ID NO: 793659 - RNA, 19 nt, Homo sapiens
  misc_RNA (1)...(19): siRNA sense strand
ggauauauuuggauacagu

SEQ ID NO: 793660 - RNA, 19 nt, Homo sapiens
  misc_RNA (1)...(19): siRNA sense strand
gacaaggcauccaucauuc

SEQ ID NO: 793661 - RNA, 19 nt, Homo sapiens
  misc_RNA (1)...(19): siRNA sense strand
caucaaaucaucaggauau

SEQ ID NO: 793662 - RNA, 19 nt, Homo sapiens
  misc_RNA (1)...(19): siRNA sense strand
guucgucacucgaguaaau

SEQ ID NO: 793663 - RNA, 19 nt, Homo sapiens
  misc_RNA (1)...(19): siRNA sense strand
gcagcagugucuuugacua

SEQ ID NO: 793664 - RNA, 19 nt, Homo sapiens
  misc_RNA (1)...(19): siRNA sense strand
gaggauauauuuggauaca

SEQ ID NO: 793665 - RNA, 19 nt, Homo sapiens
  misc_RNA (1)...(19): siRNA sense strand
ccaccuaacacaucaguaa

SEQ ID NO: 793666 - RNA, 19 nt, Homo sapiens
  misc_RNA (1)...(19): siRNA sense strand
gcgagaacguuuacaagca

SEQ ID NO: 793667 - RNA, 19 nt, Homo sapiens
  misc_RNA (1)...(19): siRNA sense strand
cggaggauauauuuggaua

SEQ ID NO: 793668 - RNA, 19 nt, Homo sapiens
  misc_RNA (1)...(19): siRNA sense strand
gcagaagaacggaggauau

SEQ ID NO: 793669 - RNA, 19 nt, Homo sapiens
  misc_RNA (1)...(19): siRNA sense strand
gaguaaauauggaccucaa

SEQ ID NO: 793670 - RNA, 19 nt, Homo sapiens
  misc_RNA (1)...(19): siRNA sense strand
gcauccaucauucgacuua

SEQ ID NO: 793671 - RNA, 19 nt, Homo sapiens
  misc_RNA (1)...(19): siRNA sense strand
cagaagaacggaggauaua

SEQ ID NO: 793672 - RNA, 19 nt, Homo sapiens
  misc_RNA (1)...(19): siRNA sense strand
gaucaaugaagucagaauu

SEQ ID NO: 793673 - RNA, 19 nt, Homo sapiens
  misc_RNA (1)...(19): siRNA sense strand
ccagugcacuagccauuga

SEQ ID NO: 793674 - RNA, 19 nt, Homo sapiens
  misc_RNA (1)...(19): siRNA sense strand
gaauuaccuucuuagcaau

SEQ ID NO: 793675 - RNA, 19 nt, Homo sapiens
  misc_RNA (1)...(19): siRNA sense strand
aaucaugggucucgugguu

SEQ ID NO: 793676 - RNA, 19 nt, Homo sapiens
  misc_RNA (1)...(19): siRNA sense strand
ggaaggcccuccaccuaac

SEQ ID NO: 793677 - RNA, 19 nt, Homo sapiens
  misc_RNA (1)...(19): siRNA sense strand
ccaucaauuucgacaauga

SEQ ID NO: 793678 - RNA, 19 nt, Homo sapiens
  misc_RNA (1)...(19): siRNA sense strand
cacuuggacuugcugaaua

SEQ ID NO: 793679 - RNA, 19 nt, Homo sapiens
  misc_RNA (1)...(19): siRNA sense strand
ccgaaacagucuccaucua

SEQ ID NO: 793680 - RNA, 19 nt, Homo sapiens
  misc_RNA (1)...(19): siRNA sense strand
gcagugucuuugacuaugu

SEQ ID NO: 793681 - RNA, 19 nt, Homo sapiens
  misc_RNA (1)...(19): siRNA sense strand
gcacuagccauugaaguau

SEQ ID NO: 793682 - RNA, 19 nt, Homo sapiens
  misc_RNA (1)...(19): siRNA sense strand
gagaacguuuacaagcauu

SEQ ID NO: 793683 - RNA, 19 nt, Homo sapiens
  misc_RNA (1)...(19): siRNA sense strand
ggaccucaauaucauuuac

SEQ ID NO: 793684 - RNA, 19 nt, Homo sapiens
  misc_RNA (1)...(19): siRNA sense strand
caaaucaucaggauauaag

SEQ ID NO: 793685 - RNA, 19 nt, Homo sapiens
  misc_RNA (1)...(19): siRNA sense strand
aauaucaucugggugaauu

SEQ ID NO: 793686 - RNA, 19 nt, Homo sapiens
  misc_RNA (1)...(19): siRNA sense strand
ggagaaaucccgagaugcu

SEQ ID NO: 793687 - RNA, 19 nt, Homo sapiens
  misc_RNA (1)...(19): siRNA sense strand
ugggugaauuaccuucuua

SEQ ID NO: 793688 - RNA, 19 nt, Homo sapiens
  misc_RNA (1)...(19): siRNA sense strand
guagauaucguagggaaga

SEQ ID NO: 793689 - RNA, 19 nt, Homo sapiens
  misc_RNA (1)...(19): siRNA sense strand
ucuaugaauuggccaaguu

SEQ ID NO: 793690 - RNA, 19 nt, Homo sapiens
  misc_RNA (1)...(19): siRNA sense strand
gcuaaccacugacaacacu

SEQ ID NO: 793691 - RNA, 19 nt, Homo sapiens
  misc_RNA (1)...(19): siRNA sense strand
ggagaaaacuuccgaaucc

SEQ ID NO: 793692 - RNA, 19 nt, Homo sapiens
  misc_RNA (1)...(19): siRNA sense strand
aaggagaaaucccgagaug

SEQ ID NO: 793693 - RNA, 19 nt, Homo sapiens
  misc_RNA (1)...(19): siRNA sense strand
cgagaacguuuacaagcau

SEQ ID NO: 793694 - RNA, 19 nt, Homo sapiens
  misc_RNA (1)...(19): siRNA sense strand
uggaggcgcugcagagguu

SEQ ID NO: 793695 - RNA, 19 nt, Homo sapiens
  misc_RNA (1)...(19): siRNA sense strand
uuacaagcauugagaaagg

SEQ ID NO: 793696 - RNA, 19 nt, Homo sapiens
  misc_RNA (1)...(19): siRNA sense strand
cuggauggcuuuguauuug

SEQ ID NO: 793697 - RNA, 19 nt, Homo sapiens
  misc_RNA (1)...(19): siRNA sense strand
ugaaguauuugaagcacau

SEQ ID NO: 793698 - RNA, 19 nt, Homo sapiens
  misc_RNA (1)...(19): siRNA sense strand
ugaauaagggucagugugu

SEQ ID NO: 793699 - RNA, 19 nt, Homo sapiens
  misc_RNA (1)...(19): siRNA sense strand
cagcuagccugacgcagau

SEQ ID NO: 793700 - RNA, 19 nt, Homo sapiens
  misc_RNA (1)...(19): siRNA sense strand
ccaagacgcccauggagau

SEQ ID NO: 793701 - RNA, 19 nt, Homo sapiens
  misc_RNA (1)...(19): siRNA sense strand
gaucucagaacccaucaau

SEQ ID NO: 793702 - RNA, 19 nt, Homo sapiens
  misc_RNA (1)...(19): siRNA sense strand
uuacagaggacaacgagaa

SEQ ID NO: 793703 - RNA, 19 nt, Homo sapiens
  misc_RNA (1)...(19): siRNA sense strand
aagaacggaggauauauuu

SEQ ID NO: 793704 - RNA, 19 nt, Homo sapiens
  misc_RNA (1)...(19): siRNA sense strand
gaauugacugccauauguu

SEQ ID NO: 793705 - RNA, 19 nt, Homo sapiens
  misc_RNA (1)...(19): siRNA sense strand
acaacgacaugaacugcaa

SEQ ID NO: 793706 - RNA, 19 nt, Homo sapiens
  misc_RNA (1)...(19): siRNA sense strand
ccacugacaacacucuuga

SEQ ID NO: 793707 - RNA, 19 nt, Homo sapiens
  misc_RNA (1)...(19): siRNA sense strand
ccauggagaugcucuacca

SEQ ID NO: 793708 - RNA, 19 nt, Homo sapiens
  misc_RNA (1)...(19): siRNA sense strand
ccaacgcgcacgcuguuaa

SEQ ID NO: 793709 - RNA, 19 nt, Homo sapiens
  misc_RNA (1)...(19): siRNA sense strand
gucccuggauggcuuugua

SEQ ID NO: 793710 - RNA, 19 nt, Homo sapiens
  misc_RNA (1)...(19): siRNA sense strand
gcaccagaagcgcaagaaa

SEQ ID NO: 793711 - RNA, 19 nt, Homo sapiens
  misc_RNA (1)...(19): siRNA sense strand
gccaagaaugcaaaugaaa

SEQ ID NO: 793712 - RNA, 19 nt, Homo sapiens
  misc_RNA (1)...(19): siRNA sense strand
gugccaccauagcuauuaa

SEQ ID NO: 793713 - RNA, 19 nt, Homo sapiens
  misc_RNA (1)...(19): siRNA sense strand
ugaaaucuacucugaccaa

SEQ ID NO: 793714 - RNA, 19 nt, Homo sapiens
  misc_RNA (1)...(19): siRNA sense strand
ucauucgacuuacaauuag

SEQ ID NO: 793715 - RNA, 19 nt, Homo sapiens
  misc_RNA (1)...(19): siRNA sense strand
gaacguuuacaagcauuga

SEQ ID NO: 793716 - RNA, 19 nt, Homo sapiens
  misc_RNA (1)...(19): siRNA sense strand
caaacgcggugugcacauc

SEQ ID NO: 793717 - RNA, 19 nt, Homo sapiens
  misc_RNA (1)...(19): siRNA sense strand
gccaaguuguugccucuuc

SEQ ID NO: 793718 - RNA, 19 nt, Homo sapiens
  misc_RNA (1)...(19): siRNA sense strand
ccucggugcucaagaucaa

SEQ ID NO: 793719 - RNA, 19 nt, Homo sapiens
  misc_RNA (1)...(19): siRNA sense strand
ggccacagcuccaguaacc

SEQ ID NO: 793720 - RNA, 19 nt, Homo sapiens
  misc_RNA (1)...(19): siRNA sense strand
ugaauuggccaaguuguug

SEQ ID NO: 793721 - RNA, 19 nt, Homo sapiens
  misc_RNA (1)...(19): siRNA sense strand
uacgaucaaugaagucaga

SEQ ID NO: 793722 - RNA, 19 nt, Homo sapiens
  misc_RNA (1)...(19): siRNA sense strand
cgaaacagucuccaucuac

SEQ ID NO: 793723 - RNA, 19 nt, Homo sapiens
  misc_RNA (1)...(19): siRNA sense strand
ugccaagaaugcaaaugaa

SEQ ID NO: 793724 - RNA, 19 nt, Homo sapiens
  misc_RNA (1)...(19): siRNA sense strand
acuagccauugaaguauuu

SEQ ID NO: 793725 - RNA, 19 nt, Homo sapiens
  misc_RNA (1)...(19): siRNA sense strand
cagaacccaucaauuucga

SEQ ID NO: 793726 - RNA, 19 nt, Homo sapiens
  misc_RNA (1)...(19): siRNA sense strand
ggacacacccauggacauc

SEQ ID NO: 793727 - RNA, 19 nt, Homo sapiens
  misc_RNA (1)...(19): siRNA sense strand
acuuggacuugcugaauaa

SEQ ID NO: 793728 - RNA, 19 nt, Homo sapiens
  misc_RNA (1)...(19): siRNA sense strand
cagaauugacugccauaug

SEQ ID NO: 793729 - RNA, 19 nt, Homo sapiens
  misc_RNA (1)...(19): siRNA sense strand
gcacuaaaucaggaaggaa

SEQ ID NO: 793730 - RNA, 19 nt, Homo sapiens
  misc_RNA (1)...(19): siRNA sense strand
gcuauuaaugccaagaaug

SEQ ID NO: 793731 - RNA, 19 nt, Homo sapiens
  misc_RNA (1)...(19): siRNA sense strand
acaguccagugccaccaua

SEQ ID NO: 793732 - RNA, 19 nt, Homo sapiens
  misc_RNA (1)...(19): siRNA sense strand
ccguggaacuugcgaaugg

SEQ ID NO: 793733 - RNA, 19 nt, Homo sapiens
  misc_RNA (1)...(19): siRNA sense strand
caggauauaaggugauuca

SEQ ID NO: 793734 - RNA, 19 nt, Homo sapiens
  misc_RNA (1)...(19): siRNA sense strand
cacaucaaaucaucaggau

SEQ ID NO: 793735 - RNA, 19 nt, Homo sapiens
  misc_RNA (1)...(19): siRNA sense strand
ggauggcuuuguauuugca

SEQ ID NO: 793736 - RNA, 19 nt, Homo sapiens
  misc_RNA (1)...(19): siRNA sense strand
ugcacuagccauugaagua

SEQ ID NO: 793737 - RNA, 19 nt, Homo sapiens
  misc_RNA (1)...(19): siRNA sense strand
cacuagccauugaaguauu

SEQ ID NO: 793738 - RNA, 19 nt, Homo sapiens
  misc_RNA (1)...(19): siRNA sense strand
ucaagacggagaucucaga

SEQ ID NO: 793739 - RNA, 19 nt, Homo sapiens
  misc_RNA (1)...(19): siRNA sense strand
gugccucggugcucaagau

SEQ ID NO: 793740 - RNA, 19 nt, Homo sapiens
  misc_RNA (1)...(19): siRNA sense strand
gcacucggacuuugagaac

SEQ ID NO: 793741 - RNA, 19 nt, Homo sapiens
  misc_RNA (1)...(19): siRNA sense strand
ggcuuuguauuugcacuaa

SEQ ID NO: 793742 - RNA, 19 nt, Homo sapiens
  misc_RNA (1)...(19): siRNA sense strand
ccuggauggcuuuguauuu

SEQ ID NO: 793743 - RNA, 19 nt, Homo sapiens
  misc_RNA (1)...(19): siRNA sense strand
gacaaugacagcagcaucu

SEQ ID NO: 793744 - RNA, 19 nt, Homo sapiens
  misc_RNA (1)...(19): siRNA sense strand
cgacuuacaauuagcuauc

SEQ ID NO: 793745 - RNA, 19 nt, Homo sapiens
  misc_RNA (1)...(19): siRNA sense strand
ucaugggucucgugguugu

SEQ ID NO: 793746 - RNA, 19 nt, Homo sapiens
  misc_RNA (1)...(19): siRNA sense strand
caucauucgacuuacaauu

SEQ ID NO: 793747 - RNA, 19 nt, Homo sapiens
  misc_RNA (1)...(19): siRNA sense strand
gaauaucaucugggugaau

SEQ ID NO: 793748 - RNA, 19 nt, Homo sapiens
  misc_RNA (1)...(19): siRNA sense strand
caucaggcacagucacuug

SEQ ID NO: 793749 - RNA, 19 nt, Homo sapiens
  misc_RNA (1)...(19): siRNA sense strand
ucacucgaguaaauaugga

SEQ ID NO: 793750 - RNA, 19 nt, Homo sapiens
  misc_RNA (1)...(19): siRNA sense strand
ggaaacaacucaauaagaa

SEQ ID NO: 793751 - RNA, 19 nt, Homo sapiens
  misc_RNA (1)...(19): siRNA sense strand
gaaagaagguggacccaaa

SEQ ID NO: 793752 - RNA, 19 nt, Homo sapiens
  misc_RNA (1)...(19): siRNA sense strand
gcaaugggaucucuaauac

SEQ ID NO: 793753 - RNA, 19 nt, Homo sapiens
  misc_RNA (1)...(19): siRNA sense strand
gagaacacauggaggauga

SEQ ID NO: 793754 - RNA, 19 nt, Homo sapiens
  misc_RNA (1)...(19): siRNA sense strand
ucaaugaauuuguggcuua

SEQ ID NO: 793755 - RNA, 19 nt, Homo sapiens
  misc_RNA (1)...(19): siRNA sense strand
ggauggaucaugcuaguua

SEQ ID NO: 793756 - RNA, 19 nt, Homo sapiens
  misc_RNA (1)...(19): siRNA sense strand
gggaucaucuccuauugaa

SEQ ID NO: 793757 - RNA, 19 nt, Homo sapiens
  misc_RNA (1)...(19): siRNA sense strand
uaaacggugugcagcaaua

SEQ ID NO: 793758 - RNA, 19 nt, Homo sapiens
  misc_RNA (1)...(19): siRNA sense strand
gaagguggacccaaauuug

SEQ ID NO: 793759 - RNA, 19 nt, Homo sapiens
  misc_RNA (1)...(19): siRNA sense strand
caacaucgcugugaaucug

SEQ ID NO: 793760 - RNA, 19 nt, Homo sapiens
  misc_RNA (1)...(19): siRNA sense strand
gacugacccuggauuuaua

SEQ ID NO: 793761 - RNA, 19 nt, Homo sapiens
  misc_RNA (1)...(19): siRNA sense strand
cugaugcaguggauuauua

SEQ ID NO: 793762 - RNA, 19 nt, Homo sapiens
  misc_RNA (1)...(19): siRNA sense strand
gaccacuucuuugcauuua

SEQ ID NO: 793763 - RNA, 19 nt, Homo sapiens
  misc_RNA (1)...(19): siRNA sense strand
ggacugacccuggauuuau

SEQ ID NO: 793764 - RNA, 19 nt, Homo sapiens
  misc_RNA (1)...(19): siRNA sense strand
caaauacgaacaucgaauu

SEQ ID NO: 793765 - RNA, 19 nt, Homo sapiens
  misc_RNA (1)...(19): siRNA sense strand
caacugccaucacguuuua

SEQ ID NO: 793766 - RNA, 19 nt, Homo sapiens
  misc_RNA (1)...(19): siRNA sense strand
gaucaucuccuauugaauc

SEQ ID NO: 793767 - RNA, 19 nt, Homo sapiens
  misc_RNA (1)...(19): siRNA sense strand
gggcuacaguuucuucuug

SEQ ID NO: 793768 - RNA, 19 nt, Homo sapiens
  misc_RNA (1)...(19): siRNA sense strand
gaagaacaggucacaguug

SEQ ID NO: 793769 - RNA, 19 nt, Homo sapiens
  misc_RNA (1)...(19): siRNA sense strand
gcagugagagcucugauug

SEQ ID NO: 793770 - RNA, 19 nt, Homo sapiens
  misc_RNA (1)...(19): siRNA sense strand
gaacuccacgccaucauga

SEQ ID NO: 793771 - RNA, 19 nt, Homo sapiens
  misc_RNA (1)...(19): siRNA sense strand
ucaauucguucugagauaa

SEQ ID NO: 793772 - RNA, 19 nt, Homo sapiens
  misc_RNA (1)...(19): siRNA sense strand
gaaauacaaagaccacuuc

SEQ ID NO: 793773 - RNA, 19 nt, Homo sapiens
  misc_RNA (1)...(19): siRNA sense strand
gaacacaucaggaaacaac

SEQ ID NO: 793774 - RNA, 19 nt, Homo sapiens
  misc_RNA (1)...(19): siRNA sense strand
gagaacacaucaggaaaca

SEQ ID NO: 793775 - RNA, 19 nt, Homo sapiens
  misc_RNA (1)...(19): siRNA sense strand
ccucaagaaugccaugaaa

SEQ ID NO: 793776 - RNA, 19 nt, Homo sapiens
  misc_RNA (1)...(19): siRNA sense strand
aagaacaggucacaguuga

SEQ ID NO: 793777 - RNA, 19 nt, Homo sapiens
  misc_RNA (1)...(19): siRNA sense strand
ugggaucucuaauacauuu

SEQ ID NO: 793778 - RNA, 19 nt, Homo sapiens
  misc_RNA (1)...(19): siRNA sense strand
gcugccaucuucuuuguug

SEQ ID NO: 793779 - RNA, 19 nt, Homo sapiens
  misc_RNA (1)...(19): siRNA sense strand
gaagggcugcugcacauug

SEQ ID NO: 793780 - RNA, 19 nt, Homo sapiens
  misc_RNA (1)...(19): siRNA sense strand
gaagcgugcuaggugcaua

SEQ ID NO: 793781 - RNA, 19 nt, Homo sapiens
  misc_RNA (1)...(19): siRNA sense strand
ucaggaaacaacucaauaa

SEQ ID NO: 793782 - RNA, 19 nt, Homo sapiens
  misc_RNA (1)...(19): siRNA sense strand
gggaaucgggcuacaguuu

SEQ ID NO: 793783 - RNA, 19 nt, Homo sapiens
  misc_RNA (1)...(19): siRNA sense strand
ucggugggcucauaaugua

SEQ ID NO: 793784 - RNA, 19 nt, Homo sapiens
  misc_RNA (1)...(19): siRNA sense strand
gucauuggcugcugcuaaa

SEQ ID NO: 793785 - RNA, 19 nt, Homo sapiens
  misc_RNA (1)...(19): siRNA sense strand
guacauuguccuguuauuu

SEQ ID NO: 793786 - RNA, 19 nt, Homo sapiens
  misc_RNA (1)...(19): siRNA sense strand
uugaauccaucgaccuuua

SEQ ID NO: 793787 - RNA, 19 nt, Homo sapiens
  misc_RNA (1)...(19): siRNA sense strand
gcacuccuguggacaucaa

SEQ ID NO: 793788 - RNA, 19 nt, Homo sapiens
  misc_RNA (1)...(19): siRNA sense strand
aaacacaaccaaggugaua

SEQ ID NO: 793789 - RNA, 19 nt, Homo sapiens
  misc_RNA (1)...(19): siRNA sense strand
caaacaggaugaagaacag

SEQ ID NO: 793790 - RNA, 19 nt, Homo sapiens
  misc_RNA (1)...(19): siRNA sense strand
gaaucgggcuacaguuucu

SEQ ID NO: 793791 - RNA, 19 nt, Homo sapiens
  misc_RNA (1)...(19): siRNA sense strand
ggaauggcaggacagcuuu

SEQ ID NO: 793792 - RNA, 19 nt, Homo sapiens
  misc_RNA (1)...(19): siRNA sense strand
aaauaacccucaagaaugc

SEQ ID NO: 793793 - RNA, 19 nt, Homo sapiens
  misc_RNA (1)...(19): siRNA sense strand
gaccauauuuaccuuacau

SEQ ID NO: 793794 - RNA, 19 nt, Homo sapiens
  misc_RNA (1)...(19): siRNA sense strand
aaggagguaugacacagua

SEQ ID NO: 793795 - RNA, 19 nt, Homo sapiens
  misc_RNA (1)...(19): siRNA sense strand
gaagucaucccaggaggaa

SEQ ID NO: 793796 - RNA, 19 nt, Homo sapiens
  misc_RNA (1)...(19): siRNA sense strand
caacgugggcuuccagaau

SEQ ID NO: 793797 - RNA, 19 nt, Homo sapiens
  misc_RNA (1)...(19): siRNA sense strand
cuugggcucuugauucuaa

SEQ ID NO: 793798 - RNA, 19 nt, Homo sapiens
  misc_RNA (1)...(19): siRNA sense strand
guaugugguuucuguagga

SEQ ID NO: 793799 - RNA, 19 nt, Homo sapiens
  misc_RNA (1)...(19): siRNA sense strand
ugcaguggauuauuagaaa

SEQ ID NO: 793800 - RNA, 19 nt, Homo sapiens
  misc_RNA (1)...(19): siRNA sense strand
gacccuggauuuauagcuu

SEQ ID NO: 793801 - RNA, 19 nt, Homo sapiens
  misc_RNA (1)...(19): siRNA sense strand
cagguuaucugguuauggu

SEQ ID NO: 793802 - RNA, 19 nt, Homo sapiens
  misc_RNA (1)...(19): siRNA sense strand
cgugcuaggugcauacauu

SEQ ID NO: 793803 - RNA, 19 nt, Homo sapiens
  misc_RNA (1)...(19): siRNA sense strand
ggaaaggagguaugacaca

SEQ ID NO: 793804 - RNA, 19 nt, Homo sapiens
  misc_RNA (1)...(19): siRNA sense strand
aaugggaucucuaauacau

SEQ ID NO: 793805 - RNA, 19 nt, Homo sapiens
  misc_RNA (1)...(19): siRNA sense strand
gcaggacagcuuuaugguu

SEQ ID NO: 793806 - RNA, 19 nt, Homo sapiens
  misc_RNA (1)...(19): siRNA sense strand
ugauguccaugcuguacua

SEQ ID NO: 793807 - RNA, 19 nt, Homo sapiens
  misc_RNA (1)...(19): siRNA sense strand
gaugaggagaugcaacaaa

SEQ ID NO: 793808 - RNA, 19 nt, Homo sapiens
  misc_RNA (1)...(19): siRNA sense strand
gaccguggccugcuucaug

SEQ ID NO: 793809 - RNA, 19 nt, Homo sapiens
  misc_RNA (1)...(19): siRNA sense strand
aaacaacucuucggcacau

SEQ ID NO: 793810 - RNA, 19 nt, Homo sapiens
  misc_RNA (1)...(19): siRNA sense strand
caaggguccuggugaaguc

SEQ ID NO: 793811 - RNA, 19 nt, Homo sapiens
  misc_RNA (1)...(19): siRNA sense strand
cugagauaaucgccacuua

SEQ ID NO: 793812 - RNA, 19 nt, Homo sapiens
  misc_RNA (1)...(19): siRNA sense strand
gugcagcaauauauaucaa

SEQ ID NO: 793813 - RNA, 19 nt, Homo sapiens
  misc_RNA (1)...(19): siRNA sense strand
uugccagacucauagguua

SEQ ID NO: 793814 - RNA, 19 nt, Homo sapiens
  misc_RNA (1)...(19): siRNA sense strand
ccacuucuuugcauuuaag

SEQ ID NO: 793815 - RNA, 19 nt, Homo sapiens
  misc_RNA (1)...(19): siRNA sense strand
ugagcaggauucuccaaga

SEQ ID NO: 793816 - RNA, 19 nt, Homo sapiens
  misc_RNA (1)...(19): siRNA sense strand
gaauggcaggacagcuuua

SEQ ID NO: 793817 - RNA, 19 nt, Homo sapiens
  misc_RNA (1)...(19): siRNA sense strand
ggaaucgggcuacaguuuc

SEQ ID NO: 793818 - RNA, 19 nt, Homo sapiens
  misc_RNA (1)...(19): siRNA sense strand
ccaaacaggaugaagaaca

SEQ ID NO: 793819 - RNA, 19 nt, Homo sapiens
  misc_RNA (1)...(19): siRNA sense strand
gcaguggauuauuagaaag

SEQ ID NO: 793820 - RNA, 19 nt, Homo sapiens
  misc_RNA (1)...(19): siRNA sense strand
auacgaacaucgaauugau

SEQ ID NO: 793821 - RNA, 19 nt, Homo sapiens
  misc_RNA (1)...(19): siRNA sense strand
gaaacaacucaauaagaag

SEQ ID NO: 793822 - RNA, 19 nt, Homo sapiens
  misc_RNA (1)...(19): siRNA sense strand
gcacugugauguccaugcu

SEQ ID NO: 793823 - RNA, 19 nt, Homo sapiens
  misc_RNA (1)...(19): siRNA sense strand
ugcaaugggaucucuaaua

SEQ ID NO: 793824 - RNA, 19 nt, Homo sapiens
  misc_RNA (1)...(19): siRNA sense strand
aauggaaaguggugauuca

SEQ ID NO: 793825 - RNA, 19 nt, Homo sapiens
  misc_RNA (1)...(19): siRNA sense strand
caucuccuauugaaucugu

SEQ ID NO: 793826 - RNA, 19 nt, Homo sapiens
  misc_RNA (1)...(19): siRNA sense strand
uuagaaagguuggauggau

SEQ ID NO: 793827 - RNA, 19 nt, Homo sapiens
  misc_RNA (1)...(19): siRNA sense strand
ggagguaugacacaguaug

SEQ ID NO: 793828 - RNA, 19 nt, Homo sapiens
  misc_RNA (1)...(19): siRNA sense strand
gauagcuuguugccaaagu

SEQ ID NO: 793829 - RNA, 19 nt, Homo sapiens
  misc_RNA (1)...(19): siRNA sense strand
caaugaauuuguggcuuau

SEQ ID NO: 793830 - RNA, 19 nt, Homo sapiens
  misc_RNA (1)...(19): siRNA sense strand
guccuucggugggcucaua

SEQ ID NO: 793831 - RNA, 19 nt, Homo sapiens
  misc_RNA (1)...(19): siRNA sense strand
caccaaacaggaugaagaa

SEQ ID NO: 793832 - RNA, 19 nt, Homo sapiens
  misc_RNA (1)...(19): siRNA sense strand
gugauagcuuguugccaaa

SEQ ID NO: 793833 - RNA, 19 nt, Homo sapiens
  misc_RNA (1)...(19): siRNA sense strand
aagcagagcugugcaaagc

SEQ ID NO: 793834 - RNA, 19 nt, Homo sapiens
  misc_RNA (1)...(19): siRNA sense strand
caaaauggauccacuugag

SEQ ID NO: 793835 - RNA, 19 nt, Homo sapiens
  misc_RNA (1)...(19): siRNA sense strand
gcccuguccugguuuggaa

SEQ ID NO: 793836 - RNA, 19 nt, Homo sapiens
  misc_RNA (1)...(19): siRNA sense strand
ccuauugaaucuguaguug

SEQ ID NO: 793837 - RNA, 19 nt, Homo sapiens
  misc_RNA (1)...(19): siRNA sense strand
ggaugaugaugaggagaug

SEQ ID NO: 793838 - RNA, 19 nt, Homo sapiens
  misc_RNA (1)...(19): siRNA sense strand
gaacacauggaggaugaug

SEQ ID NO: 793839 - RNA, 19 nt, Homo sapiens
  misc_RNA (1)...(19): siRNA sense strand
gaaacacaaccaaggugau

SEQ ID NO: 793840 - RNA, 19 nt, Homo sapiens
  misc_RNA (1)...(19): siRNA sense strand
ccagacucauagguuauaa

SEQ ID NO: 793841 - RNA, 19 nt, Homo sapiens
  misc_RNA (1)...(19): siRNA sense strand
ccaaguacccaaccagagu

SEQ ID NO: 793842 - RNA, 19 nt, Homo sapiens
  misc_RNA (1)...(19): siRNA sense strand
caucaacugccaucacguu

SEQ ID NO: 793843 - RNA, 19 nt, Homo sapiens
  misc_RNA (1)...(19): siRNA sense strand
gguggacccaaauuuguaa

SEQ ID NO: 793844 - RNA, 19 nt, Homo sapiens
  misc_RNA (1)...(19): siRNA sense strand
ugaagaacaggucacaguu

SEQ ID NO: 793845 - RNA, 19 nt, Homo sapiens
  misc_RNA (1)...(19): siRNA sense strand
gcuaaucugcuccuacauc

SEQ ID NO: 793846 - RNA, 19 nt, Homo sapiens
  misc_RNA (1)...(19): siRNA sense strand
gccggguucucuaccauug

SEQ ID NO: 793847 - RNA, 19 nt, Homo sapiens
  misc_RNA (1)...(19): siRNA sense strand
uaccuuacaucaccaaguc

SEQ ID NO: 793848 - RNA, 19 nt, Homo sapiens
  misc_RNA (1)...(19): siRNA sense strand
gcagggagcacacaaacac

SEQ ID NO: 793849 - RNA, 19 nt, Homo sapiens
  misc_RNA (1)...(19): siRNA sense strand
ucauuugucuuuggugaga

SEQ ID NO: 793850 - RNA, 19 nt, Homo sapiens
  misc_RNA (1)...(19): siRNA sense strand
guagaggacuugauaaaga

SEQ ID NO: 793851 - RNA, 19 nt, Homo sapiens
  misc_RNA (1)...(19): siRNA sense strand
gaacagcacgcucacguuu

SEQ ID NO: 793852 - RNA, 19 nt, Homo sapiens
  misc_RNA (1)...(19): siRNA sense strand
gaggagagcugggaauuuc

SEQ ID NO: 793853 - RNA, 19 nt, Homo sapiens
  misc_RNA (1)...(19): siRNA sense strand
gugaaagggcuuauucuua

SEQ ID NO: 793854 - RNA, 19 nt, Homo sapiens
  misc_RNA (1)...(19): siRNA sense strand
ggacugagaugguuuacac

SEQ ID NO: 793855 - RNA, 19 nt, Homo sapiens
  misc_RNA (1)...(19): siRNA sense strand
ugaaagggcuuauucuuac

SEQ ID NO: 793856 - RNA, 19 nt, Homo sapiens
  misc_RNA (1)...(19): siRNA sense strand
ggacuugccucuuuaucca

SEQ ID NO: 793857 - RNA, 19 nt, Homo sapiens
  misc_RNA (1)...(19): siRNA sense strand
gacccaagcauuugacuuu

SEQ ID NO: 793858 - RNA, 19 nt, Homo sapiens
  misc_RNA (1)...(19): siRNA sense strand
gagaaucugcugcaaguug

SEQ ID NO: 793859 - RNA, 19 nt, Homo sapiens
  misc_RNA (1)...(19): siRNA sense strand
gggcuuauucuuacccuua

SEQ ID NO: 793860 - RNA, 19 nt, Homo sapiens
  misc_RNA (1)...(19): siRNA sense strand
uggagaaccugaaagugaa

SEQ ID NO: 793861 - RNA, 19 nt, Homo sapiens
  misc_RNA (1)...(19): siRNA sense strand
uagaggaggugcagcuguu

SEQ ID NO: 793862 - RNA, 19 nt, Homo sapiens
  misc_RNA (1)...(19): siRNA sense strand
cggagaaucugcugcaagu

SEQ ID NO: 793863 - RNA, 19 nt, Homo sapiens
  misc_RNA (1)...(19): siRNA sense strand
cggaaggguugacauuaga

SEQ ID NO: 793864 - RNA, 19 nt, Homo sapiens
  misc_RNA (1)...(19): siRNA sense strand
ggaggagagcugggaauuu

SEQ ID NO: 793865 - RNA, 19 nt, Homo sapiens
  misc_RNA (1)...(19): siRNA sense strand
agaaucugcugcaaguuga

SEQ ID NO: 793866 - RNA, 19 nt, Homo sapiens
  misc_RNA (1)...(19): siRNA sense strand
gacggaaggguugacauua

SEQ ID NO: 793867 - RNA, 19 nt, Homo sapiens
  misc_RNA (1)...(19): siRNA sense strand
gcacccgacagacaacuuu

SEQ ID NO: 793868 - RNA, 19 nt, Homo sapiens
  misc_RNA (1)...(19): siRNA sense strand
ggugaaagggcuuauucuu

SEQ ID NO: 793869 - RNA, 19 nt, Homo sapiens
  misc_RNA (1)...(19): siRNA sense strand
caggacaucuguuauucuc

SEQ ID NO: 793870 - RNA, 19 nt, Homo sapiens
  misc_RNA (1)...(19): siRNA sense strand
gggcagacccaagcauuug

SEQ ID NO: 793871 - RNA, 19 nt, Homo sapiens
  misc_RNA (1)...(19): siRNA sense strand
acagcacgcucacguuugu

SEQ ID NO: 793872 - RNA, 19 nt, Homo sapiens
  misc_RNA (1)...(19): siRNA sense strand
ucagugacguuuacaacag

SEQ ID NO: 793873 - RNA, 19 nt, Homo sapiens
  misc_RNA (1)...(19): siRNA sense strand
ggcuuauucuuacccuuaa

SEQ ID NO: 793874 - RNA, 19 nt, Homo sapiens
  misc_RNA (1)...(19): siRNA sense strand
gaaggugaaagggcuuauu

SEQ ID NO: 793875 - RNA, 19 nt, Homo sapiens
  misc_RNA (1)...(19): siRNA sense strand
cuggagaaccugaaaguga

SEQ ID NO: 793876 - RNA, 19 nt, Homo sapiens
  misc_RNA (1)...(19): siRNA sense strand
gaaagugaacacggagaau

SEQ ID NO: 793877 - RNA, 19 nt, Homo sapiens
  misc_RNA (1)...(19): siRNA sense strand
gcuuuggacugagaugguu

SEQ ID NO: 793878 - RNA, 19 nt, Homo sapiens
  misc_RNA (1)...(19): siRNA sense strand
ggaggugcagcuguuguuu

SEQ ID NO: 793879 - RNA, 19 nt, Homo sapiens
  misc_RNA (1)...(19): siRNA sense strand
agacggaaggguugacauu

SEQ ID NO: 793880 - RNA, 19 nt, Homo sapiens
  misc_RNA (1)...(19): siRNA sense strand
aaacugcacccgacagaca

SEQ ID NO: 793881 - RNA, 19 nt, Homo sapiens
  misc_RNA (1)...(19): siRNA sense strand
agaugaaccucucugaaac

SEQ ID NO: 793882 - RNA, 19 nt, Homo sapiens
  misc_RNA (1)...(19): siRNA sense strand
ugaaagugaacacggagaa

SEQ ID NO: 793883 - RNA, 19 nt, Homo sapiens
  misc_RNA (1)...(19): siRNA sense strand
acggaaggguugacauuag

SEQ ID NO: 793884 - RNA, 19 nt, Homo sapiens
  misc_RNA (1)...(19): siRNA sense strand
ggguugguguggcugaaga

SEQ ID NO: 793885 - RNA, 19 nt, Homo sapiens
  misc_RNA (1)...(19): siRNA sense strand
gaaagggcuuauucuuacc

SEQ ID NO: 793886 - RNA, 19 nt, Homo sapiens
  misc_RNA (1)...(19): siRNA sense strand
uagaggacuugauaaagac

SEQ ID NO: 793887 - RNA, 19 nt, Homo sapiens
  misc_RNA (1)...(19): siRNA sense strand
gacagacaacuuugcacaa

SEQ ID NO: 793888 - RNA, 19 nt, Homo sapiens
  misc_RNA (1)...(19): siRNA sense strand
aaacacagggaaggugaaa

SEQ ID NO: 793889 - RNA, 19 nt, Homo sapiens
  misc_RNA (1)...(19): siRNA sense strand
gcuuauucuuacccuuaaa

SEQ ID NO: 793890 - RNA, 19 nt, Homo sapiens
  misc_RNA (1)...(19): siRNA sense strand
uccaggacaucuguuauuc

SEQ ID NO: 793891 - RNA, 19 nt, Homo sapiens
  misc_RNA (1)...(19): siRNA sense strand
gaagaaagaaaugcaugcu

SEQ ID NO: 793892 - RNA, 19 nt, Homo sapiens
  misc_RNA (1)...(19): siRNA sense strand
cccaagcauuugacuuuua

SEQ ID NO: 793893 - RNA, 19 nt, Homo sapiens
  misc_RNA (1)...(19): siRNA sense strand
ugauaaagacugccauagg

SEQ ID NO: 793894 - RNA, 19 nt, Homo sapiens
  misc_RNA (1)...(19): siRNA sense strand
gaaaacugcacccgacaga

SEQ ID NO: 793895 - RNA, 19 nt, Homo sapiens
  misc_RNA (1)...(19): siRNA sense strand
gggaaggugaaagggcuua

SEQ ID NO: 793896 - RNA, 19 nt, Homo sapiens
  misc_RNA (1)...(19): siRNA sense strand
gaugaaccucucugaaacu

SEQ ID NO: 793897 - RNA, 19 nt, Homo sapiens
  misc_RNA (1)...(19): siRNA sense strand
gugcagcuguuguuuuaga

SEQ ID NO: 793898 - RNA, 19 nt, Homo sapiens
  misc_RNA (1)...(19): siRNA sense strand
aggugcagcuguuguuuua

SEQ ID NO: 793899 - RNA, 19 nt, Homo sapiens
  misc_RNA (1)...(19): siRNA sense strand
aaacugcuuuuauccgaaa

SEQ ID NO: 793900 - RNA, 19 nt, Homo sapiens
  misc_RNA (1)...(19): siRNA sense strand
gguuuacaccagcgaguga

SEQ ID NO: 793901 - RNA, 19 nt, Homo sapiens
  misc_RNA (1)...(19): siRNA sense strand
uccuggacuugccucuuua

SEQ ID NO: 793902 - RNA, 19 nt, Homo sapiens
  misc_RNA (1)...(19): siRNA sense strand
ggcagacccaagcauuuga

SEQ ID NO: 793903 - RNA, 19 nt, Homo sapiens
  misc_RNA (1)...(19): siRNA sense strand
ggaaaugcuucauaacuua

SEQ ID NO: 793904 - RNA, 19 nt, Homo sapiens
  misc_RNA (1)...(19): siRNA sense strand
ucacagagcugcagacuaa

SEQ ID NO: 793905 - RNA, 19 nt, Homo sapiens
  misc_RNA (1)...(19): siRNA sense strand
gaagacguaugcaucagua

SEQ ID NO: 793906 - RNA, 19 nt, Homo sapiens
  misc_RNA (1)...(19): siRNA sense strand
gauggaaggugacgacauu

SEQ ID NO: 793907 - RNA, 19 nt, Homo sapiens
  misc_RNA (1)...(19): siRNA sense strand
ccaagaaccugaccgauca

SEQ ID NO: 793908 - RNA, 19 nt, Homo sapiens
  misc_RNA (1)...(19): siRNA sense strand
gcacuacuaugucaucaau

SEQ ID NO: 793909 - RNA, 19 nt, Homo sapiens
  misc_RNA (1)...(19): siRNA sense strand
uagaggaaaugcuucauaa

SEQ ID NO: 793910 - RNA, 19 nt, Homo sapiens
  misc_RNA (1)...(19): siRNA sense strand
ggaagaagccgaggaagaa

SEQ ID NO: 793911 - RNA, 19 nt, Homo sapiens
  misc_RNA (1)...(19): siRNA sense strand
gccaggagcugcccuuuga

SEQ ID NO: 793912 - RNA, 19 nt, Homo sapiens
  misc_RNA (1)...(19): siRNA sense strand
caagaucuaugacagcauu

SEQ ID NO: 793913 - RNA, 19 nt, Homo sapiens
  misc_RNA (1)...(19): siRNA sense strand
cgacagaaauggcaacauc

SEQ ID NO: 793914 - RNA, 19 nt, Homo sapiens
  misc_RNA (1)...(19): siRNA sense strand
cagaaagucuccuacauca

SEQ ID NO: 793915 - RNA, 19 nt, Homo sapiens
  misc_RNA (1)...(19): siRNA sense strand
cgaccaggcugacaccuuu

SEQ ID NO: 793916 - RNA, 19 nt, Homo sapiens
  misc_RNA (1)...(19): siRNA sense strand
aggaagggcuggacauuaa

SEQ ID NO: 793917 - RNA, 19 nt, Homo sapiens
  misc_RNA (1)...(19): siRNA sense strand
ggaccaagaggauugagua

SEQ ID NO: 793918 - RNA, 19 nt, Homo sapiens
  misc_RNA (1)...(19): siRNA sense strand
gcucaguucuuucauggaa

SEQ ID NO: 793919 - RNA, 19 nt, Homo sapiens
  misc_RNA (1)...(19): siRNA sense strand
ugaaggaugucaacgaguu

SEQ ID NO: 793920 - RNA, 19 nt, Homo sapiens
  misc_RNA (1)...(19): siRNA sense strand
caaaguauccuccaaaguc

SEQ ID NO: 793921 - RNA, 19 nt, Homo sapiens
  misc_RNA (1)...(19): siRNA sense strand
uaaccgugcucuccagaaa

SEQ ID NO: 793922 - RNA, 19 nt, Homo sapiens
  misc_RNA (1)...(19): siRNA sense strand
gaaaugaaccggcaucacu

SEQ ID NO: 793923 - RNA, 19 nt, Homo sapiens
  misc_RNA (1)...(19): siRNA sense strand
gaucgagacuucauaucau

SEQ ID NO: 793924 - RNA, 19 nt, Homo sapiens
  misc_RNA (1)...(19): siRNA sense strand
ucaaagagccagccuacaa

SEQ ID NO: 793925 - RNA, 19 nt, Homo sapiens
  misc_RNA (1)...(19): siRNA sense strand
gaaagucuccuacaucaac

SEQ ID NO: 793926 - RNA, 19 nt, Homo sapiens
  misc_RNA (1)...(19): siRNA sense strand
gcugagcuaugacaaacaa

SEQ ID NO: 793927 - RNA, 19 nt, Homo sapiens
  misc_RNA (1)...(19): siRNA sense strand
gagaccugcugcccaguuu

SEQ ID NO: 793928 - RNA, 19 nt, Homo sapiens
  misc_RNA (1)...(19): siRNA sense strand
ggaaaucugugcguucaag

SEQ ID NO: 793929 - RNA, 19 nt, Homo sapiens
  misc_RNA (1)...(19): siRNA sense strand
gagauggacugggacgauu

SEQ ID NO: 793930 - RNA, 19 nt, Homo sapiens
  misc_RNA (1)...(19): siRNA sense strand
gaagcuggaucagauuugu

SEQ ID NO: 793931 - RNA, 19 nt, Homo sapiens
  misc_RNA (1)...(19): siRNA sense strand
ggacagcagugagaugauc

SEQ ID NO: 793932 - RNA, 19 nt, Homo sapiens
  misc_RNA (1)...(19): siRNA sense strand
gaaauggcaacaucaggaa

SEQ ID NO: 793933 - RNA, 19 nt, Homo sapiens
  misc_RNA (1)...(19): siRNA sense strand
acaaacaacaccaguauga

SEQ ID NO: 793934 - RNA, 19 nt, Homo sapiens
  misc_RNA (1)...(19): siRNA sense strand
gcagaaggaguacacauuc

SEQ ID NO: 793935 - RNA, 19 nt, Homo sapiens
  misc_RNA (1)...(19): siRNA sense strand
gagcaugucaaucaucuga

SEQ ID NO: 793936 - RNA, 19 nt, Homo sapiens
  misc_RNA (1)...(19): siRNA sense strand
ucagaagucuuagaggaaa

SEQ ID NO: 793937 - RNA, 19 nt, Homo sapiens
  misc_RNA (1)...(19): siRNA sense strand
ugagguagaugccuaugug

SEQ ID NO: 793938 - RNA, 19 nt, Homo sapiens
  misc_RNA (1)...(19): siRNA sense strand
gaaaucgucaccacagaug

SEQ ID NO: 793939 - RNA, 19 nt, Homo sapiens
  misc_RNA (1)...(19): siRNA sense strand
gccaaggaauaaaguauca

SEQ ID NO: 793940 - RNA, 19 nt, Homo sapiens
  misc_RNA (1)...(19): siRNA sense strand
caacugccgccucgucuuu

SEQ ID NO: 793941 - RNA, 19 nt, Homo sapiens
  misc_RNA (1)...(19): siRNA sense strand
ggaucgagacuucauauca

SEQ ID NO: 793942 - RNA, 19 nt, Homo sapiens
  misc_RNA (1)...(19): siRNA sense strand
ccaagaggauugaguacca

SEQ ID NO: 793943 - RNA, 19 nt, Homo sapiens
  misc_RNA (1)...(19): siRNA sense strand
cagagcugcagacuaauua

SEQ ID NO: 793944 - RNA, 19 nt, Homo sapiens
  misc_RNA (1)...(19): siRNA sense strand
ggaggaagaagccgaggaa

SEQ ID NO: 793945 - RNA, 19 nt, Homo sapiens
  misc_RNA (1)...(19): siRNA sense strand
aggaaaugcuucauaacuu

SEQ ID NO: 793946 - RNA, 19 nt, Homo sapiens
  misc_RNA (1)...(19): siRNA sense strand
gaagggcuggacauuaauu

SEQ ID NO: 793947 - RNA, 19 nt, Homo sapiens
  misc_RNA (1)...(19): siRNA sense strand
ggagaccuacucugagaaa

SEQ ID NO: 793948 - RNA, 19 nt, Homo sapiens
  misc_RNA (1)...(19): siRNA sense strand
ugacaaacaacaccaguau

SEQ ID NO: 793949 - RNA, 19 nt, Homo sapiens
  misc_RNA (1)...(19): siRNA sense strand
gacugaggcugccaaggaa

SEQ ID NO: 793950 - RNA, 19 nt, Homo sapiens
  misc_RNA (1)...(19): siRNA sense strand
acaguuugcucaguucuuu

SEQ ID NO: 793951 - RNA, 19 nt, Homo sapiens
  misc_RNA (1)...(19): siRNA sense strand
ggauggagcaacauaugaa

SEQ ID NO: 793952 - RNA, 19 nt, Homo sapiens
  misc_RNA (1)...(19): siRNA sense strand
gcugcagacuaauuacauu

SEQ ID NO: 793953 - RNA, 19 nt, Homo sapiens
  misc_RNA (1)...(19): siRNA sense strand
uggcaagacuggaccaaga

SEQ ID NO: 793954 - RNA, 19 nt, Homo sapiens
  misc_RNA (1)...(19): siRNA sense strand
aaacaacaccaguaugaga

SEQ ID NO: 793955 - RNA, 19 nt, Homo sapiens
  misc_RNA (1)...(19): siRNA sense strand
gaucugcaacuaugaaauc

SEQ ID NO: 793956 - RNA, 19 nt, Homo sapiens
  misc_RNA (1)...(19): siRNA sense strand
gugacccucuucccugaua

SEQ ID NO: 793957 - RNA, 19 nt, Homo sapiens
  misc_RNA (1)...(19): siRNA sense strand
gaaggaugucaacgaguuu

SEQ ID NO: 793958 - RNA, 19 nt, Homo sapiens
  misc_RNA (1)...(19): siRNA sense strand
gaagaagccgaggaagaaa

SEQ ID NO: 793959 - RNA, 19 nt, Homo sapiens
  misc_RNA (1)...(19): siRNA sense strand
gaccaagucucagauaagg

SEQ ID NO: 793960 - RNA, 19 nt, Homo sapiens
  misc_RNA (1)...(19): siRNA sense strand
cagaaggaguacacauuca

SEQ ID NO: 793961 - RNA, 19 nt, Homo sapiens
  misc_RNA (1)...(19): siRNA sense strand
agucauaacugagaacaau

SEQ ID NO: 793962 - RNA, 19 nt, Homo sapiens
  misc_RNA (1)...(19): siRNA sense strand
auaaggagcaugucaauca

SEQ ID NO: 793963 - RNA, 19 nt, Homo sapiens
  misc_RNA (1)...(19): siRNA sense strand
gaggaaaugcuucauaacu

SEQ ID NO: 793964 - RNA, 19 nt, Homo sapiens
  misc_RNA (1)...(19): siRNA sense strand
cgggagaccuacucugaga

SEQ ID NO: 793965 - RNA, 19 nt, Homo sapiens
  misc_RNA (1)...(19): siRNA sense strand
auacauggauggagcaaca

SEQ ID NO: 793966 - RNA, 19 nt, Homo sapiens
  misc_RNA (1)...(19): siRNA sense strand
ugucaucaauguggaguuu

SEQ ID NO: 793967 - RNA, 19 nt, Homo sapiens
  misc_RNA (1)...(19): siRNA sense strand
acaaggccgugguccauau

SEQ ID NO: 793968 - RNA, 19 nt, Homo sapiens
  misc_RNA (1)...(19): siRNA sense strand
cggcuaaagucaauaagca

SEQ ID NO: 793969 - RNA, 19 nt, Homo sapiens
  misc_RNA (1)...(19): siRNA sense strand
ggaguacacauucaucauc

SEQ ID NO: 793970 - RNA, 19 nt, Homo sapiens
  misc_RNA (1)...(19): siRNA sense strand
gaggucagcauccuucaug

SEQ ID NO: 793971 - RNA, 19 nt, Homo sapiens
  misc_RNA (1)...(19): siRNA sense strand
gguagaugccuaugugaug

SEQ ID NO: 793972 - RNA, 19 nt, Homo sapiens
  misc_RNA (1)...(19): siRNA sense strand
gacgacauugggaacauua

SEQ ID NO: 793973 - RNA, 19 nt, Homo sapiens
  misc_RNA (1)...(19): siRNA sense strand
gaggagaagucaccaaacc

SEQ ID NO: 793974 - RNA, 19 nt, Homo sapiens
  misc_RNA (1)...(19): siRNA sense strand
gaaaccauccucugcaacu

SEQ ID NO: 793975 - RNA, 19 nt, Homo sapiens
  misc_RNA (1)...(19): siRNA sense strand
ugacggagggcaagaucua

SEQ ID NO: 793976 - RNA, 19 nt, Homo sapiens
  misc_RNA (1)...(19): siRNA sense strand
cauccugagucccggagua

SEQ ID NO: 793977 - RNA, 19 nt, Homo sapiens
  misc_RNA (1)...(19): siRNA sense strand
caaaucagaagucuuagag

SEQ ID NO: 793978 - RNA, 19 nt, Homo sapiens
  misc_RNA (1)...(19): siRNA sense strand
ccagaaagucuccuacauc

SEQ ID NO: 793979 - RNA, 19 nt, Homo sapiens
  misc_RNA (1)...(19): siRNA sense strand
gaaaugcuucauaacuuag

SEQ ID NO: 793980 - RNA, 19 nt, Homo sapiens
  misc_RNA (1)...(19): siRNA sense strand
ugguagcccuggauaaaga

SEQ ID NO: 793981 - RNA, 19 nt, Homo sapiens
  misc_RNA (1)...(19): siRNA sense strand
ccucuucccugauaucaag

SEQ ID NO: 793982 - RNA, 19 nt, Homo sapiens
  misc_RNA (1)...(19): siRNA sense strand
gaaggaguacacauucauc

SEQ ID NO: 793983 - RNA, 19 nt, Homo sapiens
  misc_RNA (1)...(19): siRNA sense strand
agacugaggcugccaagga

SEQ ID NO: 793984 - RNA, 19 nt, Homo sapiens
  misc_RNA (1)...(19): siRNA sense strand
agccagaucugcaacuaug

SEQ ID NO: 793985 - RNA, 19 nt, Homo sapiens
  misc_RNA (1)...(19): siRNA sense strand
ucaguggucccaagcauug

SEQ ID NO: 793986 - RNA, 19 nt, Homo sapiens
  misc_RNA (1)...(19): siRNA sense strand
uaaggagcaugucaaucau

SEQ ID NO: 793987 - RNA, 19 nt, Homo sapiens
  misc_RNA (1)...(19): siRNA sense strand
caaggaagggcuggacauu

SEQ ID NO: 793988 - RNA, 19 nt, Homo sapiens
  misc_RNA (1)...(19): siRNA sense strand
acuacuaugucaucaaugu

SEQ ID NO: 793989 - RNA, 19 nt, Homo sapiens
  misc_RNA (1)...(19): siRNA sense strand
acuggaagcuggaucagau

SEQ ID NO: 793990 - RNA, 19 nt, Homo sapiens
  misc_RNA (1)...(19): siRNA sense strand
uggcaucauugaccucuug

SEQ ID NO: 793991 - RNA, 19 nt, Homo sapiens
  misc_RNA (1)...(19): siRNA sense strand
ggaagcuggaucagauuug

SEQ ID NO: 793992 - RNA, 19 nt, Homo sapiens
  misc_RNA (1)...(19): siRNA sense strand
ucaaugggcgcuacacuag

SEQ ID NO: 793993 - RNA, 19 nt, Homo sapiens
  misc_RNA (1)...(19): siRNA sense strand
uuagaggaaaugcuucaua

SEQ ID NO: 793994 - RNA, 19 nt, Homo sapiens
  misc_RNA (1)...(19): siRNA sense strand
ugacgacauugggaacauu

SEQ ID NO: 793995 - RNA, 19 nt, Homo sapiens
  misc_RNA (1)...(19): siRNA sense strand
gcagacaugggcagaaugg

SEQ ID NO: 793996 - RNA, 19 nt, Homo sapiens
  misc_RNA (1)...(19): siRNA sense strand
gggagaagaggaggaagaa

SEQ ID NO: 793997 - RNA, 19 nt, Homo sapiens
  misc_RNA (1)...(19): siRNA sense strand
ccugauaucaagauuguga

SEQ ID NO: 793998 - RNA, 19 nt, Homo sapiens
  misc_RNA (1)...(19): siRNA sense strand
aaccacaguuugcucaguu

SEQ ID NO: 793999 - RNA, 19 nt, Homo sapiens
  misc_RNA (1)...(19): siRNA sense strand
uaagugcucagaacucaau

SEQ ID NO: 794000 - RNA, 19 nt, Homo sapiens
  misc_RNA (1)...(19): siRNA sense strand
ccacagaccccaaaucaga

SEQ ID NO: 794001 - RNA, 19 nt, Homo sapiens
  misc_RNA (1)...(19): siRNA sense strand
gaaaucugugcguucaaga

SEQ ID NO: 794002 - RNA, 19 nt, Homo sapiens
  misc_RNA (1)...(19): siRNA sense strand
ccacugguagcccuggaua

SEQ ID NO: 794003 - RNA, 19 nt, Homo sapiens
  misc_RNA (1)...(19): siRNA sense strand
cagcagcgcuucaacauca

SEQ ID NO: 794004 - RNA, 19 nt, Homo sapiens
  misc_RNA (1)...(19): siRNA sense strand
caacgacaccuucuacuuc

SEQ ID NO: 794005 - RNA, 19 nt, Homo sapiens
  misc_RNA (1)...(19): siRNA sense strand
caacaugugguucgacuuc

SEQ ID NO: 794006 - RNA, 19 nt, Homo sapiens
  misc_RNA (1)...(19): siRNA sense strand
ccaagaacaacaugugguu

SEQ ID NO: 794007 - RNA, 19 nt, Homo sapiens
  misc_RNA (1)...(19): siRNA sense strand
gaacgucuacgccaagaac

SEQ ID NO: 794008 - RNA, 19 nt, Homo sapiens
  misc_RNA (1)...(19): siRNA sense strand
ggacuuagagcuggacaca

SEQ ID NO: 794009 - RNA, 19 nt, Homo sapiens
  misc_RNA (1)...(19): siRNA sense strand
gaaccacacgcagaucaga

SEQ ID NO: 794010 - RNA, 19 nt, Homo sapiens
  misc_RNA (1)...(19): siRNA sense strand
ugccugagcuccaguacau

SEQ ID NO: 794011 - RNA, 19 nt, Homo sapiens
  misc_RNA (1)...(19): siRNA sense strand
aggccgacauccuggguua

SEQ ID NO: 794012 - RNA, 19 nt, Homo sapiens
  misc_RNA (1)...(19): siRNA sense strand
ccaacgacaccuucuacuu

SEQ ID NO: 794013 - RNA, 19 nt, Homo sapiens
  misc_RNA (1)...(19): siRNA sense strand
agaaagucaugcccaacga

SEQ ID NO: 794014 - RNA, 19 nt, Homo sapiens
  misc_RNA (1)...(19): siRNA sense strand
ucaagaaccacacgcagau

SEQ ID NO: 794015 - RNA, 19 nt, Homo sapiens
  misc_RNA (1)...(19): siRNA sense strand
ugccucaggugcagaaagu

SEQ ID NO: 794016 - RNA, 19 nt, Homo sapiens
  misc_RNA (1)...(19): siRNA sense strand
gcagcagcgcuucaacauc

SEQ ID NO: 794017 - RNA, 19 nt, Homo sapiens
  misc_RNA (1)...(19): siRNA sense strand
cggagaagccccucaagaa

SEQ ID NO: 794018 - RNA, 19 nt, Homo sapiens
  misc_RNA (1)...(19): siRNA sense strand
gagaagccccucaagaaca

SEQ ID NO: 794019 - RNA, 19 nt, Homo sapiens
  misc_RNA (1)...(19): siRNA sense strand
gaacaacaccaacauaaga

SEQ ID NO: 794020 - RNA, 19 nt, Homo sapiens
  misc_RNA (1)...(19): siRNA sense strand
gaacaaagacaaggucauu

SEQ ID NO: 794021 - RNA, 19 nt, Homo sapiens
  misc_RNA (1)...(19): siRNA sense strand
gaauaaaacuccuguaugu

SEQ ID NO: 794022 - RNA, 19 nt, Homo sapiens
  misc_RNA (1)...(19): siRNA sense strand
cgagguagaugcaaagaug

SEQ ID NO: 794023 - RNA, 19 nt, Homo sapiens
  misc_RNA (1)...(19): siRNA sense strand
guagugcacugguauuuca

SEQ ID NO: 794024 - RNA, 19 nt, Homo sapiens
  misc_RNA (1)...(19): siRNA sense strand
ggaagaaaauggaguuuau

SEQ ID NO: 794025 - RNA, 19 nt, Homo sapiens
  misc_RNA (1)...(19): siRNA sense strand
ggaaagaugacgggucuaa

SEQ ID NO: 794026 - RNA, 19 nt, Homo sapiens
  misc_RNA (1)...(19): siRNA sense strand
gaaauucagagaaagucua

SEQ ID NO: 794027 - RNA, 19 nt, Homo sapiens
  misc_RNA (1)...(19): siRNA sense strand
gguguucgauggagaugaa

SEQ ID NO: 794028 - RNA, 19 nt, Homo sapiens
  misc_RNA (1)...(19): siRNA sense strand
cgauggagaugaaaucaca

SEQ ID NO: 794029 - RNA, 19 nt, Homo sapiens
  misc_RNA (1)...(19): siRNA sense strand
gaucaaggacuccaaacug

SEQ ID NO: 794030 - RNA, 19 nt, Homo sapiens
  misc_RNA (1)...(19): siRNA sense strand
ccagguuucuaauaaguga

SEQ ID NO: 794031 - RNA, 19 nt, Homo sapiens
  misc_RNA (1)...(19): siRNA sense strand
gaaagccaagcccaagaaa

SEQ ID NO: 794032 - RNA, 19 nt, Homo sapiens
  misc_RNA (1)...(19): siRNA sense strand
ggaagaggcccagcagaau

SEQ ID NO: 794033 - RNA, 19 nt, Homo sapiens
  misc_RNA (1)...(19): siRNA sense strand
acugugaccugaacaaaga

SEQ ID NO: 794034 - RNA, 19 nt, Homo sapiens
  misc_RNA (1)...(19): siRNA sense strand
gaagaggcccagcagaauc

SEQ ID NO: 794035 - RNA, 19 nt, Homo sapiens
  misc_RNA (1)...(19): siRNA sense strand
uggaugcucucaccacuga

SEQ ID NO: 794036 - RNA, 19 nt, Homo sapiens
  misc_RNA (1)...(19): siRNA sense strand
ucaggaagcuguguuuguc

SEQ ID NO: 794037 - RNA, 19 nt, Homo sapiens
  misc_RNA (1)...(19): siRNA sense strand
caggguaacucaggaagga

SEQ ID NO: 794038 - RNA, 19 nt, Homo sapiens
  misc_RNA (1)...(19): siRNA sense strand
ccaacucuauggauuaaac

SEQ ID NO: 794039 - RNA, 19 nt, Homo sapiens
  misc_RNA (1)...(19): siRNA sense strand
caaagacaaggucauuuca

SEQ ID NO: 794040 - RNA, 19 nt, Homo sapiens
  misc_RNA (1)...(19): siRNA sense strand
gcuacgugaugcccaguug

SEQ ID NO: 794041 - RNA, 19 nt, Homo sapiens
  misc_RNA (1)...(19): siRNA sense strand
aagccaagcccaagaaaug

SEQ ID NO: 794042 - RNA, 19 nt, Homo sapiens
  misc_RNA (1)...(19): siRNA sense strand
caagaagccucaggaagcu

SEQ ID NO: 794043 - RNA, 19 nt, Homo sapiens
  misc_RNA (1)...(19): siRNA sense strand
cuaccaggcuguccagaag

SEQ ID NO: 794044 - RNA, 19 nt, Homo sapiens
  misc_RNA (1)...(19): siRNA sense strand
uuaaacacuuggugaucaa

SEQ ID NO: 794045 - RNA, 19 nt, Homo sapiens
  misc_RNA (1)...(19): siRNA sense strand
cugaacaacaccaacauaa

SEQ ID NO: 794046 - RNA, 19 nt, Homo sapiens
  misc_RNA (1)...(19): siRNA sense strand
acaaagacaaggucauuuc

SEQ ID NO: 794047 - RNA, 19 nt, Homo sapiens
  misc_RNA (1)...(19): siRNA sense strand
gcagcaacgacauuaacaa

SEQ ID NO: 794048 - RNA, 19 nt, Homo sapiens
  misc_RNA (1)...(19): siRNA sense strand
caacaccaacauaagaaau

SEQ ID NO: 794049 - RNA, 19 nt, Homo sapiens
  misc_RNA (1)...(19): siRNA sense strand
cgacuacugugaccugaac

SEQ ID NO: 794050 - RNA, 19 nt, Homo sapiens
  misc_RNA (1)...(19): siRNA sense strand
ggauuaaacacuuggugau

SEQ ID NO: 794051 - RNA, 19 nt, Homo sapiens
  misc_RNA (1)...(19): siRNA sense strand
ucuauaagccagugcaaug

SEQ ID NO: 794052 - RNA, 19 nt, Homo sapiens
  misc_RNA (1)...(19): siRNA sense strand
gguauugucaucccugaau

SEQ ID NO: 794053 - RNA, 19 nt, Homo sapiens
  misc_RNA (1)...(19): siRNA sense strand
caggugcagugccauacuu

SEQ ID NO: 794054 - RNA, 19 nt, Homo sapiens
  misc_RNA (1)...(19): siRNA sense strand
cuccaggacucaacccaaa

SEQ ID NO: 794055 - RNA, 19 nt, Homo sapiens
  misc_RNA (1)...(19): siRNA sense strand
uuaacaagcgggagaugaa

SEQ ID NO: 794056 - RNA, 19 nt, Homo sapiens
  misc_RNA (1)...(19): siRNA sense strand
caauagcagcaacgacauu

SEQ ID NO: 794057 - RNA, 19 nt, Homo sapiens
  misc_RNA (1)...(19): siRNA sense strand
uggaagaggcccagcagaa

SEQ ID NO: 794058 - RNA, 19 nt, Homo sapiens
  misc_RNA (1)...(19): siRNA sense strand
acaccaacauaagaaauuc

SEQ ID NO: 794059 - RNA, 19 nt, Homo sapiens
  misc_RNA (1)...(19): siRNA sense strand
aucaaggacuccaaacuga

SEQ ID NO: 794060 - RNA, 19 nt, Homo sapiens
  misc_RNA (1)...(19): siRNA sense strand
ggguacugcugguguguca

SEQ ID NO: 794061 - RNA, 19 nt, Homo sapiens
  misc_RNA (1)...(19): siRNA sense strand
guauugucaucccugaaug

SEQ ID NO: 794062 - RNA, 19 nt, Homo sapiens
  misc_RNA (1)...(19): siRNA sense strand
aaacugaacaacaccaaca

SEQ ID NO: 794063 - RNA, 19 nt, Homo sapiens
  misc_RNA (1)...(19): siRNA sense strand
ggccccagguuucuaauaa

SEQ ID NO: 794064 - RNA, 19 nt, Homo sapiens
  misc_RNA (1)...(19): siRNA sense strand
aauagcagcaacgacauua

SEQ ID NO: 794065 - RNA, 19 nt, Homo sapiens
  misc_RNA (1)...(19): siRNA sense strand
gaggugggagguucucaga

SEQ ID NO: 794066 - RNA, 19 nt, Homo sapiens
  misc_RNA (1)...(19): siRNA sense strand
agaaagccaagcccaagaa

SEQ ID NO: 794067 - RNA, 19 nt, Homo sapiens
  misc_RNA (1)...(19): siRNA sense strand
cagguucagucaccgacaa

SEQ ID NO: 794068 - RNA, 19 nt, Homo sapiens
  misc_RNA (1)...(19): siRNA sense strand
aagacaaggucauuucacu

SEQ ID NO: 794069 - RNA, 19 nt, Homo sapiens
  misc_RNA (1)...(19): siRNA sense strand
ucuauggauuaaacacuug

SEQ ID NO: 794070 - RNA, 19 nt, Homo sapiens
  misc_RNA (1)...(19): siRNA sense strand
ggguagugcacugguauuu

SEQ ID NO: 794071 - RNA, 19 nt, Homo sapiens
  misc_RNA (1)...(19): siRNA sense strand
gcuaccaggcuguccagaa

SEQ ID NO: 794072 - RNA, 19 nt, Homo sapiens
  misc_RNA (1)...(19): siRNA sense strand
ucaaggacuccaaacugaa

SEQ ID NO: 794073 - RNA, 19 nt, Homo sapiens
  misc_RNA (1)...(19): siRNA sense strand
ggguaacucaggaaggaaa

SEQ ID NO: 794074 - RNA, 19 nt, Homo sapiens
  misc_RNA (1)...(19): siRNA sense strand
cagcaacgacauuaacaag

SEQ ID NO: 794075 - RNA, 19 nt, Homo sapiens
  misc_RNA (1)...(19): siRNA sense strand
gcaauagcagcaacgacau

SEQ ID NO: 794076 - RNA, 19 nt, Homo sapiens
  misc_RNA (1)...(19): siRNA sense strand
ggugaucaaggacuccaaa

SEQ ID NO: 794077 - RNA, 19 nt, Homo sapiens
  misc_RNA (1)...(19): siRNA sense strand
auuaaacacuuggugauca

SEQ ID NO: 794078 - RNA, 19 nt, Homo sapiens
  misc_RNA (1)...(19): siRNA sense strand
gauuaaacacuuggugauc

SEQ ID NO: 794079 - RNA, 19 nt, Homo sapiens
  misc_RNA (1)...(19): siRNA sense strand
gcccaucaguggcucuucu

SEQ ID NO: 794080 - RNA, 19 nt, Homo sapiens
  misc_RNA (1)...(19): siRNA sense strand
gaaagaugacgggucuaag

SEQ ID NO: 794081 - RNA, 19 nt, Homo sapiens
  misc_RNA (1)...(19): siRNA sense strand
uaaaacuccuguauguuca

SEQ ID NO: 794082 - RNA, 19 nt, Homo sapiens
  misc_RNA (1)...(19): siRNA sense strand
ugaacaacaccaacauaag

SEQ ID NO: 794083 - RNA, 19 nt, Homo sapiens
  misc_RNA (1)...(19): siRNA sense strand
ccuacgaguccauguguga

SEQ ID NO: 794084 - RNA, 19 nt, Homo sapiens
  misc_RNA (1)...(19): siRNA sense strand
cugccuggguguuagcaaa

SEQ ID NO: 794085 - RNA, 19 nt, Homo sapiens
  misc_RNA (1)...(19): siRNA sense strand
gugaugcccaguugugaga

SEQ ID NO: 794086 - RNA, 19 nt, Homo sapiens
  misc_RNA (1)...(19): siRNA sense strand
acgaguccaugugugagua

SEQ ID NO: 794087 - RNA, 19 nt, Homo sapiens
  misc_RNA (1)...(19): siRNA sense strand
gaagggcugccuggguguu

SEQ ID NO: 794088 - RNA, 19 nt, Homo sapiens
  misc_RNA (1)...(19): siRNA sense strand
gggaagaaaauggaguuua

SEQ ID NO: 794089 - RNA, 19 nt, Homo sapiens
  misc_RNA (1)...(19): siRNA sense strand
caaggacuccaaacugaac

SEQ ID NO: 794090 - RNA, 19 nt, Homo sapiens
  misc_RNA (1)...(19): siRNA sense strand
gcguuucaccgacuacugu

SEQ ID NO: 794091 - RNA, 19 nt, Homo sapiens
  misc_RNA (1)...(19): siRNA sense strand
acaacaccaacauaagaaa

SEQ ID NO: 794092 - RNA, 19 nt, Homo sapiens
  misc_RNA (1)...(19): siRNA sense strand
ccaaacugaacaacaccaa

SEQ ID NO: 794093 - RNA, 19 nt, Homo sapiens
  misc_RNA (1)...(19): siRNA sense strand
gugcagugccauacuuaca

SEQ ID NO: 794094 - RNA, 19 nt, Homo sapiens
  misc_RNA (1)...(19): siRNA sense strand
agacuacagaggcggauga

SEQ ID NO: 794095 - RNA, 19 nt, Homo sapiens
  misc_RNA (1)...(19): siRNA sense strand
aacaacaccaacauaagaa

SEQ ID NO: 794096 - RNA, 19 nt, Homo sapiens
  misc_RNA (1)...(19): siRNA sense strand
gagaguggaucaagauaaa

SEQ ID NO: 794097 - RNA, 19 nt, Homo sapiens
  misc_RNA (1)...(19): siRNA sense strand
gaagaaguuuguugaauac

SEQ ID NO: 794098 - RNA, 19 nt, Homo sapiens
  misc_RNA (1)...(19): siRNA sense strand
ggaaggaguuucagcaagu

SEQ ID NO: 794099 - RNA, 19 nt, Homo sapiens
  misc_RNA (1)...(19): siRNA sense strand
ucaaggagaugaagaagau

SEQ ID NO: 794100 - RNA, 19 nt, Homo sapiens
  misc_RNA (1)...(19): siRNA sense strand
gaaaucaaacccuucaaga

SEQ ID NO: 794101 - RNA, 19 nt, Homo sapiens
  misc_RNA (1)...(19): siRNA sense strand
ugaagaagauauugcauca

SEQ ID NO: 794102 - RNA, 19 nt, Homo sapiens
  misc_RNA (1)...(19): siRNA sense strand
gcacugguacuucaaacua

SEQ ID NO: 794103 - RNA, 19 nt, Homo sapiens
  misc_RNA (1)...(19): siRNA sense strand
gaaguuuguugaauacugu

SEQ ID NO: 794104 - RNA, 19 nt, Homo sapiens
  misc_RNA (1)...(19): siRNA sense strand
gcaaagcggacaccaagaa

SEQ ID NO: 794105 - RNA, 19 nt, Homo sapiens
  misc_RNA (1)...(19): siRNA sense strand
gcugaaaguacgucuaaua

SEQ ID NO: 794106 - RNA, 19 nt, Homo sapiens
  misc_RNA (1)...(19): siRNA sense strand
caauaagaauucaguguca

SEQ ID NO: 794107 - RNA, 19 nt, Homo sapiens
  misc_RNA (1)...(19): siRNA sense strand
gaagauauugcaucacguu

SEQ ID NO: 794108 - RNA, 19 nt, Homo sapiens
  misc_RNA (1)...(19): siRNA sense strand
gaacgacaauguggugauc

SEQ ID NO: 794109 - RNA, 19 nt, Homo sapiens
  misc_RNA (1)...(19): siRNA sense strand
gagauugcauaucgaggaa

SEQ ID NO: 794110 - RNA, 19 nt, Homo sapiens
  misc_RNA (1)...(19): siRNA sense strand
ugacgugaauaaugacaaa

SEQ ID NO: 794111 - RNA, 19 nt, Homo sapiens
  misc_RNA (1)...(19): siRNA sense strand
gugaagaaguuuguugaau

SEQ ID NO: 794112 - RNA, 19 nt, Homo sapiens
  misc_RNA (1)...(19): siRNA sense strand
ugaauacugugacgugaau

SEQ ID NO: 794113 - RNA, 19 nt, Homo sapiens
  misc_RNA (1)...(19): siRNA sense strand
gaaggaguuucagcaagug

SEQ ID NO: 794114 - RNA, 19 nt, Homo sapiens
  misc_RNA (1)...(19): siRNA sense strand
ggaucaagauaaagacaag

SEQ ID NO: 794115 - RNA, 19 nt, Homo sapiens
  misc_RNA (1)...(19): siRNA sense strand
acugugacgugaauaauga

SEQ ID NO: 794116 - RNA, 19 nt, Homo sapiens
  misc_RNA (1)...(19): siRNA sense strand
caagauaaagacaaggauu

SEQ ID NO: 794117 - RNA, 19 nt, Homo sapiens
  misc_RNA (1)...(19): siRNA sense strand
ccaagcagcccaagaacga

SEQ ID NO: 794118 - RNA, 19 nt, Homo sapiens
  misc_RNA (1)...(19): siRNA sense strand
gguacgagcagccgaaaug

SEQ ID NO: 794119 - RNA, 19 nt, Homo sapiens
  misc_RNA (1)...(19): siRNA sense strand
ggaaaucaaacccuucaag

SEQ ID NO: 794120 - RNA, 19 nt, Homo sapiens
  misc_RNA (1)...(19): siRNA sense strand
gcaaagauccccagcuaga

SEQ ID NO: 794121 - RNA, 19 nt, Homo sapiens
  misc_RNA (1)...(19): siRNA sense strand
caaagcggacaccaagaaa

SEQ ID NO: 794122 - RNA, 19 nt, Homo sapiens
  misc_RNA (1)...(19): siRNA sense strand
gugcaaagauccccagcua

SEQ ID NO: 794123 - RNA, 19 nt, Homo sapiens
  misc_RNA (1)...(19): siRNA sense strand
gccaaggaaacaaggauaa

SEQ ID NO: 794124 - RNA, 19 nt, Homo sapiens
  misc_RNA (1)...(19): siRNA sense strand
acagucagguccaguguca

SEQ ID NO: 794125 - RNA, 19 nt, Homo sapiens
  misc_RNA (1)...(19): siRNA sense strand
ggagaugaagaagauauug

SEQ ID NO: 794126 - RNA, 19 nt, Homo sapiens
  misc_RNA (1)...(19): siRNA sense strand
gaguggaucaagauaaaga

SEQ ID NO: 794127 - RNA, 19 nt, Homo sapiens
  misc_RNA (1)...(19): siRNA sense strand
acaaauccaucuccguaca

SEQ ID NO: 794128 - RNA, 19 nt, Homo sapiens
  misc_RNA (1)...(19): siRNA sense strand
ugagaguggaucaagauaa

SEQ ID NO: 794129 - RNA, 19 nt, Homo sapiens
  misc_RNA (1)...(19): siRNA sense strand
gcaaugacgacggcaccua

SEQ ID NO: 794130 - RNA, 19 nt, Homo sapiens
  misc_RNA (1)...(19): siRNA sense strand
uaauagacagccaaggaaa

SEQ ID NO: 794131 - RNA, 19 nt, Homo sapiens
  misc_RNA (1)...(19): siRNA sense strand
caagagguuccuucgcaaa

SEQ ID NO: 794132 - RNA, 19 nt, Homo sapiens
  misc_RNA (1)...(19): siRNA sense strand
ucacguuacccuacccuuu

SEQ ID NO: 794133 - RNA, 19 nt, Homo sapiens
  misc_RNA (1)...(19): siRNA sense strand
gcuagagauugcauaucga

SEQ ID NO: 794134 - RNA, 19 nt, Homo sapiens
  misc_RNA (1)...(19): siRNA sense strand
guggugcacugguacuuca

SEQ ID NO: 794135 - RNA, 19 nt, Homo sapiens
  misc_RNA (1)...(19): siRNA sense strand
ggacugaacagguuaaaag

SEQ ID NO: 794136 - RNA, 19 nt, Homo sapiens
  misc_RNA (1)...(19): siRNA sense strand
agaaguuuguugaauacug

SEQ ID NO: 794137 - RNA, 19 nt, Homo sapiens
  misc_RNA (1)...(19): siRNA sense strand
ccuuucccguugugaauuu

SEQ ID NO: 794138 - RNA, 19 nt, Homo sapiens
  misc_RNA (1)...(19): siRNA sense strand
cuaauagacagccaaggaa

SEQ ID NO: 794139 - RNA, 19 nt, Homo sapiens
  misc_RNA (1)...(19): siRNA sense strand
gaaguauacccaggagcaa

SEQ ID NO: 794140 - RNA, 19 nt, Homo sapiens
  misc_RNA (1)...(19): siRNA sense strand
aagauaaagacaaggauug

SEQ ID NO: 794141 - RNA, 19 nt, Homo sapiens
  misc_RNA (1)...(19): siRNA sense strand
cagcggagacaucggcaaa

SEQ ID NO: 794142 - RNA, 19 nt, Homo sapiens
  misc_RNA (1)...(19): siRNA sense strand
acuucaaacuacuggauaa

SEQ ID NO: 794143 - RNA, 19 nt, Homo sapiens
  misc_RNA (1)...(19): siRNA sense strand
acgagcagccgaaauguga

SEQ ID NO: 794144 - RNA, 19 nt, Homo sapiens
  misc_RNA (1)...(19): siRNA sense strand
ccuuuggacugaacagguu

SEQ ID NO: 794145 - RNA, 19 nt, Homo sapiens
  misc_RNA (1)...(19): siRNA sense strand
gauauugcaucacguuacc

SEQ ID NO: 794146 - RNA, 19 nt, Homo sapiens
  misc_RNA (1)...(19): siRNA sense strand
ggcgaaagaggacggcaaa

SEQ ID NO: 794147 - RNA, 19 nt, Homo sapiens
  misc_RNA (1)...(19): siRNA sense strand
cagaggucaugcugaaagu

SEQ ID NO: 794148 - RNA, 19 nt, Homo sapiens
  misc_RNA (1)...(19): siRNA sense strand
gauugcauaucgaggaaac

SEQ ID NO: 794149 - RNA, 19 nt, Homo sapiens
  misc_RNA (1)...(19): siRNA sense strand
gaccuuccuuucccguugu

SEQ ID NO: 794150 - RNA, 19 nt, Homo sapiens
  misc_RNA (1)...(19): siRNA sense strand
caaauccaucuccguacaa

SEQ ID NO: 794151 - RNA, 19 nt, Homo sapiens
  misc_RNA (1)...(19): siRNA sense strand
aagccaagcagcccaagaa

SEQ ID NO: 794152 - RNA, 19 nt, Homo sapiens
  misc_RNA (1)...(19): siRNA sense strand
gcaaaucuuuuccguucug

SEQ ID NO: 794153 - RNA, 19 nt, Homo sapiens
  misc_RNA (1)...(19): siRNA sense strand
aaaacagucuccuugcaaa

SEQ ID NO: 794154 - RNA, 19 nt, Homo sapiens
  misc_RNA (1)...(19): siRNA sense strand
ccagguguguggccgaaag

SEQ ID NO: 794155 - RNA, 19 nt, Homo sapiens
  misc_RNA (1)...(19): siRNA sense strand
guucauuccugagugcaau

SEQ ID NO: 794156 - RNA, 19 nt, Homo sapiens
  misc_RNA (1)...(19): siRNA sense strand
guacuucaaacuacuggau

SEQ ID NO: 794157 - RNA, 19 nt, Homo sapiens
  misc_RNA (1)...(19): siRNA sense strand
cacguuacccuacccuuug

SEQ ID NO: 794158 - RNA, 19 nt, Homo sapiens
  misc_RNA (1)...(19): siRNA sense strand
gcacauccacaagguacga

SEQ ID NO: 794159 - RNA, 19 nt, Homo sapiens
  misc_RNA (1)...(19): siRNA sense strand
gaagccaagcagcccaaga

SEQ ID NO: 794160 - RNA, 19 nt, Homo sapiens
  misc_RNA (1)...(19): siRNA sense strand
guucucggcgcucacguuu

SEQ ID NO: 794161 - RNA, 19 nt, Homo sapiens
  misc_RNA (1)...(19): siRNA sense strand
ccagaggucaugcugaaag

SEQ ID NO: 794162 - RNA, 19 nt, Homo sapiens
  misc_RNA (1)...(19): siRNA sense strand
ccagcuagagauugcauau

SEQ ID NO: 794163 - RNA, 19 nt, Homo sapiens
  misc_RNA (1)...(19): siRNA sense strand
cugaaaguacgucuaauag

SEQ ID NO: 794164 - RNA, 19 nt, Homo sapiens
  misc_RNA (1)...(19): siRNA sense strand
ggaguuucagcaaguguuc

SEQ ID NO: 794165 - RNA, 19 nt, Homo sapiens
  misc_RNA (1)...(19): siRNA sense strand
gaggucaugcugaaaguac

SEQ ID NO: 794166 - RNA, 19 nt, Homo sapiens
  misc_RNA (1)...(19): siRNA sense strand
aauacugugacgugaauaa

SEQ ID NO: 794167 - RNA, 19 nt, Homo sapiens
  misc_RNA (1)...(19): siRNA sense strand
cagccgaaaugugacaaca

SEQ ID NO: 794168 - RNA, 19 nt, Homo sapiens
  misc_RNA (1)...(19): siRNA sense strand
caacgugccaagugcaaag

SEQ ID NO: 794169 - RNA, 19 nt, Homo sapiens
  misc_RNA (1)...(19): siRNA sense strand
gaacccgaccccagccaua

SEQ ID NO: 794170 - RNA, 19 nt, Homo sapiens
  misc_RNA (1)...(19): siRNA sense strand
caacgcgaaggcacaggaa

SEQ ID NO: 794171 - RNA, 19 nt, Homo sapiens
  misc_RNA (1)...(19): siRNA sense strand
ggugcccgcucagaaguuc

SEQ ID NO: 794172 - RNA, 19 nt, Homo sapiens
  misc_RNA (1)...(19): siRNA sense strand
gugugaagaaguuuguuga

SEQ ID NO: 794173 - RNA, 19 nt, Homo sapiens
  misc_RNA (1)...(19): siRNA sense strand
gcccaagaacgacaaugug

SEQ ID NO: 794174 - RNA, 19 nt, Homo sapiens
  misc_RNA (1)...(19): siRNA sense strand
gagaugaagaagauauugc

SEQ ID NO: 794175 - RNA, 19 nt, Homo sapiens
  misc_RNA (1)...(19): siRNA sense strand
aaacagucuccuugcaaau

SEQ ID NO: 794176 - RNA, 19 nt, Homo sapiens
  misc_RNA (1)...(19): siRNA sense strand
aaaucaaacccuucaagag

SEQ ID NO: 794177 - RNA, 19 nt, Homo sapiens
  misc_RNA (1)...(19): siRNA sense strand
aaaccucucugcgcaucug

SEQ ID NO: 794178 - RNA, 19 nt, Homo sapiens
  misc_RNA (1)...(19): siRNA sense strand
gaauuucaacgugccaagu

SEQ ID NO: 794179 - RNA, 19 nt, Homo sapiens
  misc_RNA (1)...(19): siRNA sense strand
gacucagccucaaggagau

SEQ ID NO: 794180 - RNA, 19 nt, Homo sapiens
  misc_RNA (1)...(19): siRNA sense strand
acagucuccuugcaaaucu

SEQ ID NO: 794181 - RNA, 19 nt, Homo sapiens
  misc_RNA (1)...(19): siRNA sense strand
caaguguucauuccugagu

SEQ ID NO: 794182 - RNA, 19 nt, Homo sapiens
  misc_RNA (1)...(19): siRNA sense strand
gagcagccgaaaugugaca

SEQ ID NO: 794183 - RNA, 19 nt, Homo sapiens
  misc_RNA (1)...(19): siRNA sense strand
ucaagaagcuggaguauau

SEQ ID NO: 794184 - RNA, 19 nt, Homo sapiens
  misc_RNA (1)...(19): siRNA sense strand
gaacugugauugugacauu

SEQ ID NO: 794185 - RNA, 19 nt, Homo sapiens
  misc_RNA (1)...(19): siRNA sense strand
acaauaaccucucuucuuu

SEQ ID NO: 794186 - RNA, 19 nt, Homo sapiens
  misc_RNA (1)...(19): siRNA sense strand
acaggaaacucaaauauga

SEQ ID NO: 794187 - RNA, 19 nt, Homo sapiens
  misc_RNA (1)...(19): siRNA sense strand
gaucaucauuggcugcuuu

SEQ ID NO: 794188 - RNA, 19 nt, Homo sapiens
  misc_RNA (1)...(19): siRNA sense strand
ugagguaccugguggaguu

SEQ ID NO: 794189 - RNA, 19 nt, Homo sapiens
  misc_RNA (1)...(19): siRNA sense strand
gagaguauauacccaccaa

SEQ ID NO: 794190 - RNA, 19 nt, Homo sapiens
  misc_RNA (1)...(19): siRNA sense strand
guacaggaaacucaaauau

SEQ ID NO: 794191 - RNA, 19 nt, Homo sapiens
  misc_RNA (1)...(19): siRNA sense strand
uuaaagacaugcccaaucu

SEQ ID NO: 794192 - RNA, 19 nt, Homo sapiens
  misc_RNA (1)...(19): siRNA sense strand
gcgcaaguguggauucugu

SEQ ID NO: 794193 - RNA, 19 nt, Homo sapiens
  misc_RNA (1)...(19): siRNA sense strand
ccacaacccuuggaacugu

SEQ ID NO: 794194 - RNA, 19 nt, Homo sapiens
  misc_RNA (1)...(19): siRNA sense strand
gaguauauacccaccaauu

SEQ ID NO: 794195 - RNA, 19 nt, Homo sapiens
  misc_RNA (1)...(19): siRNA sense strand
agacaccacugacaagaug

SEQ ID NO: 794196 - RNA, 19 nt, Homo sapiens
  misc_RNA (1)...(19): siRNA sense strand
gcaguaaccaguucagcaa

SEQ ID NO: 794197 - RNA, 19 nt, Homo sapiens
  misc_RNA (1)...(19): siRNA sense strand
ggacacaacgcgaaaguac

SEQ ID NO: 794198 - RNA, 19 nt, Homo sapiens
  misc_RNA (1)...(19): siRNA sense strand
gaagacaucccagcagcaa

SEQ ID NO: 794199 - RNA, 19 nt, Homo sapiens
  misc_RNA (1)...(19): siRNA sense strand
caacuuggcccacaauaac

SEQ ID NO: 794200 - RNA, 19 nt, Homo sapiens
  misc_RNA (1)...(19): siRNA sense strand
uaucugaacuugggcaugu

SEQ ID NO: 794201 - RNA, 19 nt, Homo sapiens
  misc_RNA (1)...(19): siRNA sense strand
cacaauucaugaccauauu

SEQ ID NO: 794202 - RNA, 19 nt, Homo sapiens
  misc_RNA (1)...(19): siRNA sense strand
cgacagacaccacugacaa

SEQ ID NO: 794203 - RNA, 19 nt, Homo sapiens
  misc_RNA (1)...(19): siRNA sense strand
aagaagcucugggucauga

SEQ ID NO: 794204 - RNA, 19 nt, Homo sapiens
  misc_RNA (1)...(19): siRNA sense strand
ugauugagcggaaugcuuu

SEQ ID NO: 794205 - RNA, 19 nt, Homo sapiens
  misc_RNA (1)...(19): siRNA sense strand
uaacuacaacaccuacaaa

SEQ ID NO: 794206 - RNA, 19 nt, Homo sapiens
  misc_RNA (1)...(19): siRNA sense strand
ccacaauucaugaccauau

SEQ ID NO: 794207 - RNA, 19 nt, Homo sapiens
  misc_RNA (1)...(19): siRNA sense strand
ccauguugauugucuucua

SEQ ID NO: 794208 - RNA, 19 nt, Homo sapiens
  misc_RNA (1)...(19): siRNA sense strand
cgacggcaccuugaacuuu

SEQ ID NO: 794209 - RNA, 19 nt, Homo sapiens
  misc_RNA (1)...(19): siRNA sense strand
cacaauaaccucucuucuu

SEQ ID NO: 794210 - RNA, 19 nt, Homo sapiens
  misc_RNA (1)...(19): siRNA sense strand
ccucgagaccucaacauuu

SEQ ID NO: 794211 - RNA, 19 nt, Homo sapiens
  misc_RNA (1)...(19): siRNA sense strand
gguacaggaaacucaaaua

SEQ ID NO: 794212 - RNA, 19 nt, Homo sapiens
  misc_RNA (1)...(19): siRNA sense strand
ggucggauggcagaacuua

SEQ ID NO: 794213 - RNA, 19 nt, Homo sapiens
  misc_RNA (1)...(19): siRNA sense strand
uggaggagcuggagauguc

SEQ ID NO: 794214 - RNA, 19 nt, Homo sapiens
  misc_RNA (1)...(19): siRNA sense strand
cauguugauugucuucuau

SEQ ID NO: 794215 - RNA, 19 nt, Homo sapiens
  misc_RNA (1)...(19): siRNA sense strand
gagcacggcugagcuuaac

SEQ ID NO: 794216 - RNA, 19 nt, Homo sapiens
  misc_RNA (1)...(19): siRNA sense strand
ccugguggcuucgagagua

SEQ ID NO: 794217 - RNA, 19 nt, Homo sapiens
  misc_RNA (1)...(19): siRNA sense strand
ucaagaagcucugggucau

SEQ ID NO: 794218 - RNA, 19 nt, Homo sapiens
  misc_RNA (1)...(19): siRNA sense strand
ucaacuuggcccacaauaa

SEQ ID NO: 794219 - RNA, 19 nt, Homo sapiens
  misc_RNA (1)...(19): siRNA sense strand
gcauauaccaccucuacca

SEQ ID NO: 794220 - RNA, 19 nt, Homo sapiens
  misc_RNA (1)...(19): siRNA sense strand
cacuaucucugaaccuuau

SEQ ID NO: 794221 - RNA, 19 nt, Homo sapiens
  misc_RNA (1)...(19): siRNA sense strand
cuaccacggugcucauuca

SEQ ID NO: 794222 - RNA, 19 nt, Homo sapiens
  misc_RNA (1)...(19): siRNA sense strand
gugcaacauuaaagacaug

SEQ ID NO: 794223 - RNA, 19 nt, Homo sapiens
  misc_RNA (1)...(19): siRNA sense strand
ccacuaucucugaaccuua

SEQ ID NO: 794224 - RNA, 19 nt, Homo sapiens
  misc_RNA (1)...(19): siRNA sense strand
caguagugcugcccacaau

SEQ ID NO: 794225 - RNA, 19 nt, Homo sapiens
  misc_RNA (1)...(19): siRNA sense strand
acacaacgcgaaaguacaa

SEQ ID NO: 794226 - RNA, 19 nt, Homo sapiens
  misc_RNA (1)...(19): siRNA sense strand
cucgagaccucaacauuuc

SEQ ID NO: 794227 - RNA, 19 nt, Homo sapiens
  misc_RNA (1)...(19): siRNA sense strand
guagugcugcccacaauuc

SEQ ID NO: 794228 - RNA, 19 nt, Homo sapiens
  misc_RNA (1)...(19): siRNA sense strand
gagcuuaacaccuccaacu

SEQ ID NO: 794229 - RNA, 19 nt, Homo sapiens
  misc_RNA (1)...(19): siRNA sense strand
gaagcuggaguauaucucu

SEQ ID NO: 794230 - RNA, 19 nt, Homo sapiens
  misc_RNA (1)...(19): siRNA sense strand
gaucucgccugaggacaca

SEQ ID NO: 794231 - RNA, 19 nt, Homo sapiens
  misc_RNA (1)...(19): siRNA sense strand
cuuaacaccuccaacuaca

SEQ ID NO: 794232 - RNA, 19 nt, Homo sapiens
  misc_RNA (1)...(19): siRNA sense strand
ggaucucuguccucaacga

SEQ ID NO: 794233 - RNA, 19 nt, Homo sapiens
  misc_RNA (1)...(19): siRNA sense strand
gauggcagaacuuaagugu

SEQ ID NO: 794234 - RNA, 19 nt, Homo sapiens
  misc_RNA (1)...(19): siRNA sense strand
aaagacaugcccaaucuca

SEQ ID NO: 794235 - RNA, 19 nt, Homo sapiens
  misc_RNA (1)...(19): siRNA sense strand
uugaauaccuguccaagcu

SEQ ID NO: 794236 - RNA, 19 nt, Homo sapiens
  misc_RNA (1)...(19): siRNA sense strand
cuacaacaccuacaaacca

SEQ ID NO: 794237 - RNA, 19 nt, Homo sapiens
  misc_RNA (1)...(19): siRNA sense strand
gcagcuccguccgguguau

SEQ ID NO: 794238 - RNA, 19 nt, Homo sapiens
  misc_RNA (1)...(19): siRNA sense strand
ucgaaagcauccccucuua

SEQ ID NO: 794239 - RNA, 19 nt, Homo sapiens
  misc_RNA (1)...(19): siRNA sense strand
gcuguucaaccucaaguau

SEQ ID NO: 794240 - RNA, 19 nt, Homo sapiens
  misc_RNA (1)...(19): siRNA sense strand
caauaaccucucuucuuug

SEQ ID NO: 794241 - RNA, 19 nt, Homo sapiens
  misc_RNA (1)...(19): siRNA sense strand
ggaacuccauccggcagau

SEQ ID NO: 794242 - RNA, 19 nt, Homo sapiens
  misc_RNA (1)...(19): siRNA sense strand
gcaaguguggauucugugu

SEQ ID NO: 794243 - RNA, 19 nt, Homo sapiens
  misc_RNA (1)...(19): siRNA sense strand
aauaaccucucuucuuugc

SEQ ID NO: 794244 - RNA, 19 nt, Homo sapiens
  misc_RNA (1)...(19): siRNA sense strand
gaaccacuucccugagauc

SEQ ID NO: 794245 - RNA, 19 nt, Homo sapiens
  misc_RNA (1)...(19): siRNA sense strand
gacggcaccuugaacuuuu

SEQ ID NO: 794246 - RNA, 19 nt, Homo sapiens
  misc_RNA (1)...(19): siRNA sense strand
caaggacaagguacaggaa

SEQ ID NO: 794247 - RNA, 19 nt, Homo sapiens
  misc_RNA (1)...(19): siRNA sense strand
gaacuccauccggcagauu

SEQ ID NO: 794248 - RNA, 19 nt, Homo sapiens
  misc_RNA (1)...(19): siRNA sense strand
gcuagcugccgccauguug

SEQ ID NO: 794249 - RNA, 19 nt, Homo sapiens
  misc_RNA (1)...(19): siRNA sense strand
gaagaccaccaagaucauc

SEQ ID NO: 794250 - RNA, 19 nt, Homo sapiens
  misc_RNA (1)...(19): siRNA sense strand
ucaugaagaccaccaagau

SEQ ID NO: 794251 - RNA, 19 nt, Homo sapiens
  misc_RNA (1)...(19): siRNA sense strand
gcaguacccgcgacagaca

SEQ ID NO: 794252 - RNA, 19 nt, Homo sapiens
  misc_RNA (1)...(19): siRNA sense strand
gcagcggaguacagucaca

SEQ ID NO: 794253 - RNA, 19 nt, Homo sapiens
  misc_RNA (1)...(19): siRNA sense strand
caagguacaggaaacucaa

SEQ ID NO: 794254 - RNA, 19 nt, Homo sapiens
  misc_RNA (1)...(19): siRNA sense strand
uaauucagacccauaccaa

SEQ ID NO: 794255 - RNA, 19 nt, Homo sapiens
  misc_RNA (1)...(19): siRNA sense strand
cccuggagcuguucgacaa

SEQ ID NO: 794256 - RNA, 19 nt, Homo sapiens
  misc_RNA (1)...(19): siRNA sense strand
uacaggaaacucaaauaug

SEQ ID NO: 794257 - RNA, 19 nt, Homo sapiens
  misc_RNA (1)...(19): siRNA sense strand
cagcagcggaguacaguca

SEQ ID NO: 794258 - RNA, 19 nt, Homo sapiens
  misc_RNA (1)...(19): siRNA sense strand
gaacacccgguaccucaac

SEQ ID NO: 794259 - RNA, 19 nt, Homo sapiens
  misc_RNA (1)...(19): siRNA sense strand
gaggacacaacgcgaaagu

SEQ ID NO: 794260 - RNA, 19 nt, Homo sapiens
  misc_RNA (1)...(19): siRNA sense strand
guaaccaguucagcaaggu

SEQ ID NO: 794261 - RNA, 19 nt, Homo sapiens
  misc_RNA (1)...(19): siRNA sense strand
guuaccagccggcauauac

SEQ ID NO: 794262 - RNA, 19 nt, Homo sapiens
  misc_RNA (1)...(19): siRNA sense strand
ugagcacggcugagcuuaa

SEQ ID NO: 794263 - RNA, 19 nt, Homo sapiens
  misc_RNA (1)...(19): siRNA sense strand
gcccacaauucaugaccau

SEQ ID NO: 794264 - RNA, 19 nt, Homo sapiens
  misc_RNA (1)...(19): siRNA sense strand
ccagguggacgaagacauc

SEQ ID NO: 794265 - RNA, 19 nt, Homo sapiens
  misc_RNA (1)...(19): siRNA sense strand
caucauuggcugcuuugug

SEQ ID NO: 794266 - RNA, 19 nt, Homo sapiens
  misc_RNA (1)...(19): siRNA sense strand
cgaaaguacaagccuguuc

SEQ ID NO: 794267 - RNA, 19 nt, Homo sapiens
  misc_RNA (1)...(19): siRNA sense strand
gcuuaacaccuccaacuac

SEQ ID NO: 794268 - RNA, 19 nt, Homo sapiens
  misc_RNA (1)...(19): siRNA sense strand
uguucaaccucaaguaucu

SEQ ID NO: 794269 - RNA, 19 nt, Homo sapiens
  misc_RNA (1)...(19): siRNA sense strand
ggacaagguacaggaaacu

SEQ ID NO: 794270 - RNA, 19 nt, Homo sapiens
  misc_RNA (1)...(19): siRNA sense strand
cggcauauaccaccucuac

SEQ ID NO: 794271 - RNA, 19 nt, Homo sapiens
  misc_RNA (1)...(19): siRNA sense strand
cgggcuggcuucacuugug

SEQ ID NO: 794272 - RNA, 19 nt, Homo sapiens
  misc_RNA (1)...(19): siRNA sense strand
uggcuucacuuguggaacu

SEQ ID NO: 794273 - RNA, 19 nt, Homo sapiens
  misc_RNA (1)...(19): siRNA sense strand
gaccauauuaacuacaaca

SEQ ID NO: 794274 - RNA, 19 nt, Homo sapiens
  misc_RNA (1)...(19): siRNA sense strand
agacaucccagcagcaaca

SEQ ID NO: 794275 - RNA, 19 nt, Homo sapiens
  misc_RNA (1)...(19): siRNA sense strand
gcucaagaagcuggaguau

SEQ ID NO: 794276 - RNA, 19 nt, Homo sapiens
  misc_RNA (1)...(19): siRNA sense strand
gcucgugcaguaaccaguu

SEQ ID NO: 794277 - RNA, 19 nt, Homo sapiens
  misc_RNA (1)...(19): siRNA sense strand
gaugucagggaaccacuuc

SEQ ID NO: 794278 - RNA, 19 nt, Homo sapiens
  misc_RNA (1)...(19): siRNA sense strand
gaaaacagccuggggaacu

SEQ ID NO: 794279 - RNA, 19 nt, Homo sapiens
  misc_RNA (1)...(19): siRNA sense strand
gugcugcccacaauucaug

SEQ ID NO: 794280 - RNA, 19 nt, Homo sapiens
  misc_RNA (1)...(19): siRNA sense strand
caugaagaccaccaagauc

SEQ ID NO: 794281 - RNA, 19 nt, Homo sapiens
  misc_RNA (1)...(19): siRNA sense strand
agucaccacuaucucugaa

SEQ ID NO: 794282 - RNA, 19 nt, Homo sapiens
  misc_RNA (1)...(19): siRNA sense strand
gaccaccaagaucaucauu

SEQ ID NO: 794283 - RNA, 19 nt, Homo sapiens
  misc_RNA (1)...(19): siRNA sense strand
ggaaauagaugagaaugaa

SEQ ID NO: 794284 - RNA, 19 nt, Homo sapiens
  misc_RNA (1)...(19): siRNA sense strand
gaccagaacugaaauauuc

SEQ ID NO: 794285 - RNA, 19 nt, Homo sapiens
  misc_RNA (1)...(19): siRNA sense strand
gagagaagaagaagauuua

SEQ ID NO: 794286 - RNA, 19 nt, Homo sapiens
  misc_RNA (1)...(19): siRNA sense strand
gaagaagauuuacauggaa

SEQ ID NO: 794287 - RNA, 19 nt, Homo sapiens
  misc_RNA (1)...(19): siRNA sense strand
caaagaauccuccagagaa

SEQ ID NO: 794288 - RNA, 19 nt, Homo sapiens
  misc_RNA (1)...(19): siRNA sense strand
gaucaaucccacucuaaua

SEQ ID NO: 794289 - RNA, 19 nt, Homo sapiens
  misc_RNA (1)...(19): siRNA sense strand
ggaaauggcacugaugaaa

SEQ ID NO: 794290 - RNA, 19 nt, Homo sapiens
  misc_RNA (1)...(19): siRNA sense strand
gagagagguuauuguugua

SEQ ID NO: 794291 - RNA, 19 nt, Homo sapiens
  misc_RNA (1)...(19): siRNA sense strand
agaagaagauuuacaugga

SEQ ID NO: 794292 - RNA, 19 nt, Homo sapiens
  misc_RNA (1)...(19): siRNA sense strand
gugauaacgugaccaugua

SEQ ID NO: 794293 - RNA, 19 nt, Homo sapiens
  misc_RNA (1)...(19): siRNA sense strand
ugagagagguuauuguugu

SEQ ID NO: 794294 - RNA, 19 nt, Homo sapiens
  misc_RNA (1)...(19): siRNA sense strand
ggagagaagaagaagauuu

SEQ ID NO: 794295 - RNA, 19 nt, Homo sapiens
  misc_RNA (1)...(19): siRNA sense strand
gcaaagaauccuccagaga

SEQ ID NO: 794296 - RNA, 19 nt, Homo sapiens
  misc_RNA (1)...(19): siRNA sense strand
gaagaaauuaccacaacuu

SEQ ID NO: 794297 - RNA, 19 nt, Homo sapiens
  misc_RNA (1)...(19): siRNA sense strand
gguggucccucaagugaaa

SEQ ID NO: 794298 - RNA, 19 nt, Homo sapiens
  misc_RNA (1)...(19): siRNA sense strand
ugaagacugucacauucua

SEQ ID NO: 794299 - RNA, 19 nt, Homo sapiens
  misc_RNA (1)...(19): siRNA sense strand
gaugagagagguuauuguu

SEQ ID NO: 794300 - RNA, 19 nt, Homo sapiens
  misc_RNA (1)...(19): siRNA sense strand
uaccacaacuuucuuugaa

SEQ ID NO: 794301 - RNA, 19 nt, Homo sapiens
  misc_RNA (1)...(19): siRNA sense strand
gagagguuauuguuguauu

SEQ ID NO: 794302 - RNA, 19 nt, Homo sapiens
  misc_RNA (1)...(19): siRNA sense strand
cgagucaucugucguguca

SEQ ID NO: 794303 - RNA, 19 nt, Homo sapiens
  misc_RNA (1)...(19): siRNA sense strand
gaugaaacauuggaaguac

SEQ ID NO: 794304 - RNA, 19 nt, Homo sapiens
  misc_RNA (1)...(19): siRNA sense strand
ccacaacuuucuuugaaca

SEQ ID NO: 794305 - RNA, 19 nt, Homo sapiens
  misc_RNA (1)...(19): siRNA sense strand
aaagaauccuccagagaau

SEQ ID NO: 794306 - RNA, 19 nt, Homo sapiens
  misc_RNA (1)...(19): siRNA sense strand
ccgcgucugugaaccuuua

SEQ ID NO: 794307 - RNA, 19 nt, Homo sapiens
  misc_RNA (1)...(19): siRNA sense strand
gacccuaacucuaauuguc

SEQ ID NO: 794308 - RNA, 19 nt, Homo sapiens
  misc_RNA (1)...(19): siRNA sense strand
cagaaaagccuauugaaaa

SEQ ID NO: 794309 - RNA, 19 nt, Homo sapiens
  misc_RNA (1)...(19): siRNA sense strand
gaagaagaagauuuacaug

SEQ ID NO: 794310 - RNA, 19 nt, Homo sapiens
  misc_RNA (1)...(19): siRNA sense strand
cagaagaggaaauagauga

SEQ ID NO: 794311 - RNA, 19 nt, Homo sapiens
  misc_RNA (1)...(19): siRNA sense strand
gcuacuacccauauccaua

SEQ ID NO: 794312 - RNA, 19 nt, Homo sapiens
  misc_RNA (1)...(19): siRNA sense strand
ucacuuuccugccaacgaa

SEQ ID NO: 794313 - RNA, 19 nt, Homo sapiens
  misc_RNA (1)...(19): siRNA sense strand
aaauggcacugaugaaaca

SEQ ID NO: 794314 - RNA, 19 nt, Homo sapiens
  misc_RNA (1)...(19): siRNA sense strand
gaagacugucacauucuaa

SEQ ID NO: 794315 - RNA, 19 nt, Homo sapiens
  misc_RNA (1)...(19): siRNA sense strand
caaucccacucuaauauca

SEQ ID NO: 794316 - RNA, 19 nt, Homo sapiens
  misc_RNA (1)...(19): siRNA sense strand
gaaauggcacugaugaaac

SEQ ID NO: 794317 - RNA, 19 nt, Homo sapiens
  misc_RNA (1)...(19): siRNA sense strand
gcagaaaagccuauugaaa

SEQ ID NO: 794318 - RNA, 19 nt, Homo sapiens
  misc_RNA (1)...(19): siRNA sense strand
gaagaggaaauagaugaga

SEQ ID NO: 794319 - RNA, 19 nt, Homo sapiens
  misc_RNA (1)...(19): siRNA sense strand
aagaggaaauagaugagaa

SEQ ID NO: 794320 - RNA, 19 nt, Homo sapiens
  misc_RNA (1)...(19): siRNA sense strand
gcaguggagagaagaagaa

SEQ ID NO: 794321 - RNA, 19 nt, Homo sapiens
  misc_RNA (1)...(19): siRNA sense strand
gagaagaagaagauuuaca

SEQ ID NO: 794322 - RNA, 19 nt, Homo sapiens
  misc_RNA (1)...(19): siRNA sense strand
gaacuuccaauaaaugacu

SEQ ID NO: 794323 - RNA, 19 nt, Homo sapiens
  misc_RNA (1)...(19): siRNA sense strand
gcggaaauggcacugauga

SEQ ID NO: 794324 - RNA, 19 nt, Homo sapiens
  misc_RNA (1)...(19): siRNA sense strand
cuacagcaguggagagaag

SEQ ID NO: 794325 - RNA, 19 nt, Homo sapiens
  misc_RNA (1)...(19): siRNA sense strand
gcacugaugaaacauugga

SEQ ID NO: 794326 - RNA, 19 nt, Homo sapiens
  misc_RNA (1)...(19): siRNA sense strand
acaagcaagugaggaagaa

SEQ ID NO: 794327 - RNA, 19 nt, Homo sapiens
  misc_RNA (1)...(19): siRNA sense strand
uaacucuaauuguccuguu

SEQ ID NO: 794328 - RNA, 19 nt, Homo sapiens
  misc_RNA (1)...(19): siRNA sense strand
uggcacugaugaaacauug

SEQ ID NO: 794329 - RNA, 19 nt, Homo sapiens
  misc_RNA (1)...(19): siRNA sense strand
gauaacgugaccauguauu

SEQ ID NO: 794330 - RNA, 19 nt, Homo sapiens
  misc_RNA (1)...(19): siRNA sense strand
cggauacacuggcaucuac

SEQ ID NO: 794331 - RNA, 19 nt, Homo sapiens
  misc_RNA (1)...(19): siRNA sense strand
ugaugaaacauuggaagua

SEQ ID NO: 794332 - RNA, 19 nt, Homo sapiens
  misc_RNA (1)...(19): siRNA sense strand
ggacugguguuugguaucc

SEQ ID NO: 794333 - RNA, 19 nt, Homo sapiens
  misc_RNA (1)...(19): siRNA sense strand
ugaaccagaagaggaaaua

SEQ ID NO: 794334 - RNA, 19 nt, Homo sapiens
  misc_RNA (1)...(19): siRNA sense strand
ugaccagaacugaaauauu

SEQ ID NO: 794335 - RNA, 19 nt, Homo sapiens
  misc_RNA (1)...(19): siRNA sense strand
caucugucgugucaucaug

SEQ ID NO: 794336 - RNA, 19 nt, Homo sapiens
  misc_RNA (1)...(19): siRNA sense strand
ccaaggaggacgagucauc

SEQ ID NO: 794337 - RNA, 19 nt, Homo sapiens
  misc_RNA (1)...(19): siRNA sense strand
agagaauugugaagacugu

SEQ ID NO: 794338 - RNA, 19 nt, Homo sapiens
  misc_RNA (1)...(19): siRNA sense strand
acauggagcacacuuucua

SEQ ID NO: 794339 - RNA, 19 nt, Homo sapiens
  misc_RNA (1)...(19): siRNA sense strand
gacaagcaagugaggaaga

SEQ ID NO: 794340 - RNA, 19 nt, Homo sapiens
  misc_RNA (1)...(19): siRNA sense strand
ggaggagggagaagaucuu

SEQ ID NO: 794341 - RNA, 19 nt, Homo sapiens
  misc_RNA (1)...(19): siRNA sense strand
guggagagaagaagaagau

SEQ ID NO: 794342 - RNA, 19 nt, Homo sapiens
  misc_RNA (1)...(19): siRNA sense strand
gcacuucuggccggaggua

SEQ ID NO: 794343 - RNA, 19 nt, Homo sapiens
  misc_RNA (1)...(19): siRNA sense strand
ugacauggagcacacuuuc

SEQ ID NO: 794344 - RNA, 19 nt, Homo sapiens
  misc_RNA (1)...(19): siRNA sense strand
caagugaaaguagagaaga

SEQ ID NO: 794345 - RNA, 19 nt, Homo sapiens
  misc_RNA (1)...(19): siRNA sense strand
gaaauagaugagaaugaag

SEQ ID NO: 794346 - RNA, 19 nt, Homo sapiens
  misc_RNA (1)...(19): siRNA sense strand
agaauccuccagagaauug

SEQ ID NO: 794347 - RNA, 19 nt, Homo sapiens
  misc_RNA (1)...(19): siRNA sense strand
ccugugaccagaacugaaa

SEQ ID NO: 794348 - RNA, 19 nt, Homo sapiens
  misc_RNA (1)...(19): siRNA sense strand
ugaagaaauuaccacaacu

SEQ ID NO: 794349 - RNA, 19 nt, Homo sapiens
  misc_RNA (1)...(19): siRNA sense strand
cagacaagcaagugaggaa

SEQ ID NO: 794350 - RNA, 19 nt, Homo sapiens
  misc_RNA (1)...(19): siRNA sense strand
uuugaacagucagugauuu

SEQ ID NO: 794351 - RNA, 19 nt, Homo sapiens
  misc_RNA (1)...(19): siRNA sense strand
ccagagaauugugaagacu

SEQ ID NO: 794352 - RNA, 19 nt, Homo sapiens
  misc_RNA (1)...(19): siRNA sense strand
gauuaaagugauuccugaa

SEQ ID NO: 794353 - RNA, 19 nt, Homo sapiens
  misc_RNA (1)...(19): siRNA sense strand
aagcggaaauggcacugau

SEQ ID NO: 794354 - RNA, 19 nt, Homo sapiens
  misc_RNA (1)...(19): siRNA sense strand
agucaucugucgugucauc

SEQ ID NO: 794355 - RNA, 19 nt, Homo sapiens
  misc_RNA (1)...(19): siRNA sense strand
guggacugguguuugguau

SEQ ID NO: 794356 - RNA, 19 nt, Homo sapiens
  misc_RNA (1)...(19): siRNA sense strand
gagaaugaagaaauuacca

SEQ ID NO: 794357 - RNA, 19 nt, Homo sapiens
  misc_RNA (1)...(19): siRNA sense strand
gaggaaauagaugagaaug

SEQ ID NO: 794358 - RNA, 19 nt, Homo sapiens
  misc_RNA (1)...(19): siRNA sense strand
gauacacuggcaucuacuu

SEQ ID NO: 794359 - RNA, 19 nt, Homo sapiens
  misc_RNA (1)...(19): siRNA sense strand
uuugguauccugacccuaa

SEQ ID NO: 794360 - RNA, 19 nt, Homo sapiens
  misc_RNA (1)...(19): siRNA sense strand
ugugauaacgugaccaugu

SEQ ID NO: 794361 - RNA, 19 nt, Homo sapiens
  misc_RNA (1)...(19): siRNA sense strand
uuaccacaacuuucuuuga

SEQ ID NO: 794362 - RNA, 19 nt, Homo sapiens
  misc_RNA (1)...(19): siRNA sense strand
gaagcggaaauggcacuga

SEQ ID NO: 794363 - RNA, 19 nt, Homo sapiens
  misc_RNA (1)...(19): siRNA sense strand
ggaugagagagguuauugu

SEQ ID NO: 794364 - RNA, 19 nt, Homo sapiens
  misc_RNA (1)...(19): siRNA sense strand
gugaccauguauuggauca

SEQ ID NO: 794365 - RNA, 19 nt, Homo sapiens
  misc_RNA (1)...(19): siRNA sense strand
augaagaaauuaccacaac

SEQ ID NO: 794366 - RNA, 19 nt, Homo sapiens
  misc_RNA (1)...(19): siRNA sense strand
gaaccagaagaggaaauag

SEQ ID NO: 794367 - RNA, 19 nt, Homo sapiens
  misc_RNA (1)...(19): siRNA sense strand
auccugacccuaacucuaa

SEQ ID NO: 794368 - RNA, 19 nt, Homo sapiens
  misc_RNA (1)...(19): siRNA sense strand
cgugucaucaugccuugua

SEQ ID NO: 794369 - RNA, 19 nt, Homo sapiens
  misc_RNA (1)...(19): siRNA sense strand
ccacucuaauaucaguuuc

SEQ ID NO: 794370 - RNA, 19 nt, Homo sapiens
  misc_RNA (1)...(19): siRNA sense strand
ccagaagaggaaauagaug

SEQ ID NO: 794371 - RNA, 19 nt, Homo sapiens
  misc_RNA (1)...(19): siRNA sense strand
acccauauccauacugcua

SEQ ID NO: 794372 - RNA, 19 nt, Homo sapiens
  misc_RNA (1)...(19): siRNA sense strand
ccaauaaaugacuauacug

SEQ ID NO: 794373 - RNA, 19 nt, Homo sapiens
  misc_RNA (1)...(19): siRNA sense strand
uuucugaguuacaagacuu

SEQ ID NO: 794374 - RNA, 19 nt, Homo sapiens
  misc_RNA (1)...(19): siRNA sense strand
ugacuauacugaaaaugga

SEQ ID NO: 794375 - RNA, 19 nt, Homo sapiens
  misc_RNA (1)...(19): siRNA sense strand
cuacuacccauauccauac

SEQ ID NO: 794376 - RNA, 19 nt, Homo sapiens
  misc_RNA (1)...(19): siRNA sense strand
uauccugacccuaacucua

SEQ ID NO: 794377 - RNA, 19 nt, Homo sapiens
  misc_RNA (1)...(19): siRNA sense strand
agaaaagccuauugaaaac

SEQ ID NO: 794378 - RNA, 19 nt, Homo sapiens
  misc_RNA (1)...(19): siRNA sense strand
cgucugugaaccuuuacua

SEQ ID NO: 794379 - RNA, 19 nt, Homo sapiens
  misc_RNA (1)...(19): siRNA sense strand
uucuggagauuugugauaa

SEQ ID NO: 794380 - RNA, 19 nt, Homo sapiens
  misc_RNA (1)...(19): siRNA sense strand
ggaaggcgcucgucaccau

SEQ ID NO: 794381 - RNA, 19 nt, Homo sapiens
  misc_RNA (1)...(19): siRNA sense strand
cuacaaaccucaccuucuc

SEQ ID NO: 794382 - RNA, 19 nt, Homo sapiens
  misc_RNA (1)...(19): siRNA sense strand
agaaugggacuaacacuga

SEQ ID NO: 794383 - RNA, 19 nt, Homo sapiens
  misc_RNA (1)...(19): siRNA sense strand
gacaaugccacaugcaaga

SEQ ID NO: 794384 - RNA, 19 nt, Homo sapiens
  misc_RNA (1)...(19): siRNA sense strand
ccauugcuguggaaagguu

SEQ ID NO: 794385 - RNA, 19 nt, Homo sapiens
  misc_RNA (1)...(19): siRNA sense strand
cuacaccacugugcucuuc

SEQ ID NO: 794386 - RNA, 19 nt, Homo sapiens
  misc_RNA (1)...(19): siRNA sense strand
caucaucuacggcuacuuc

SEQ ID NO: 794387 - RNA, 19 nt, Homo sapiens
  misc_RNA (1)...(19): siRNA sense strand
gugcagggcaugucugugu

SEQ ID NO: 794388 - RNA, 19 nt, Homo sapiens
  misc_RNA (1)...(19): siRNA sense strand
caccuucuccuccuacuau

SEQ ID NO: 794389 - RNA, 19 nt, Homo sapiens
  misc_RNA (1)...(19): siRNA sense strand
uggcuggccuucuucaaca

SEQ ID NO: 794390 - RNA, 19 nt, Homo sapiens
  misc_RNA (1)...(19): siRNA sense strand
ggccauugcuguggaaagg

SEQ ID NO: 794391 - RNA, 19 nt, Homo sapiens
  misc_RNA (1)...(19): siRNA sense strand
gggcaacacccuggucugu

SEQ ID NO: 794392 - RNA, 19 nt, Homo sapiens
  misc_RNA (1)...(19): siRNA sense strand
gcaguuggccccuaaguca

SEQ ID NO: 794393 - RNA, 19 nt, Homo sapiens
  misc_RNA (1)...(19): siRNA sense strand
gcuacaaaccucaccuucu

SEQ ID NO: 794394 - RNA, 19 nt, Homo sapiens
  misc_RNA (1)...(19): siRNA sense strand
gcacuggcuggccuucuuc

SEQ ID NO: 794395 - RNA, 19 nt, Homo sapiens
  misc_RNA (1)...(19): siRNA sense strand
aaugccacaugcaagauga

SEQ ID NO: 794396 - RNA, 19 nt, Homo sapiens
  misc_RNA (1)...(19): siRNA sense strand
ucaagaaccggcacaugca

SEQ ID NO: 794397 - RNA, 19 nt, Homo sapiens
  misc_RNA (1)...(19): siRNA sense strand
gcuccuacccucucuacuc

SEQ ID NO: 794398 - RNA, 19 nt, Homo sapiens
  misc_RNA (1)...(19): siRNA sense strand
ccaacauguucauccucaa

SEQ ID NO: 794399 - RNA, 19 nt, Homo sapiens
  misc_RNA (1)...(19): siRNA sense strand
gcucuucucgcacaucuac

SEQ ID NO: 794400 - RNA, 19 nt, Homo sapiens
  misc_RNA (1)...(19): siRNA sense strand
ggguggcccuucgacaaug

SEQ ID NO: 794401 - RNA, 19 nt, Homo sapiens
  misc_RNA (1)...(19): siRNA sense strand
gugaggagcaccacuucau

SEQ ID NO: 794402 - RNA, 19 nt, Homo sapiens
  misc_RNA (1)...(19): siRNA sense strand
ccuaugcgcucaucuuccu

SEQ ID NO: 794403 - RNA, 19 nt, Homo sapiens
  misc_RNA (1)...(19): siRNA sense strand
aagaaccggcacaugcaua

SEQ ID NO: 794404 - RNA, 19 nt, Homo sapiens
  misc_RNA (1)...(19): siRNA sense strand
gcucaagaaccggcacaug

SEQ ID NO: 794405 - RNA, 19 nt, Homo sapiens
  misc_RNA (1)...(19): siRNA sense strand
ucacacugguggccauugc

SEQ ID NO: 794406 - RNA, 19 nt, Homo sapiens
  misc_RNA (1)...(19): siRNA sense strand
cgcacuggcuggccuucuu

SEQ ID NO: 794407 - RNA, 19 nt, Homo sapiens
  misc_RNA (1)...(19): siRNA sense strand
gcucaucguggucauguac

SEQ ID NO: 794408 - RNA, 19 nt, Homo sapiens
  misc_RNA (1)...(19): siRNA sense strand
gguggccauugcuguggaa

SEQ ID NO: 794409 - RNA, 19 nt, Homo sapiens
  misc_RNA (1)...(19): siRNA sense strand
caacauguucauccucaac

SEQ ID NO: 794410 - RNA, 19 nt, Homo sapiens
  misc_RNA (1)...(19): siRNA sense strand
ggacgaaaguuuagcaaua

SEQ ID NO: 794411 - RNA, 19 nt, Homo sapiens
  misc_RNA (1)...(19): siRNA sense strand
gagcgaagcuuuagccaaa

SEQ ID NO: 794412 - RNA, 19 nt, Homo sapiens
  misc_RNA (1)...(19): siRNA sense strand
ggacgaggcuuuauccaaa

SEQ ID NO: 794413 - RNA, 19 nt, Homo sapiens
  misc_RNA (1)...(19): siRNA sense strand
ggacgaggcuauaccagua

SEQ ID NO: 794414 - RNA, 19 nt, Homo sapiens
  misc_RNA (1)...(19): siRNA sense strand
gaagucaaaucuugugaaa

SEQ ID NO: 794415 - RNA, 19 nt, Homo sapiens
  misc_RNA (1)...(19): siRNA sense strand
gggcgaggcuauacuaaua

SEQ ID NO: 794416 - RNA, 19 nt, Homo sapiens
  misc_RNA (1)...(19): siRNA sense strand
gggcgaagguuuaacgaua

SEQ ID NO: 794417 - RNA, 19 nt, Homo sapiens
  misc_RNA (1)...(19): siRNA sense strand
gcacuaagcccauggcauu

SEQ ID NO: 794418 - RNA, 19 nt, Homo sapiens
  misc_RNA (1)...(19): siRNA sense strand
ggagaagccuuucaucugu

SEQ ID NO: 794419 - RNA, 19 nt, Homo sapiens
  misc_RNA (1)...(19): siRNA sense strand
ggagaagccuuauggaugu

SEQ ID NO: 794420 - RNA, 19 nt, Homo sapiens
  misc_RNA (1)...(19): siRNA sense strand
ggagagaaguccuaugugu

SEQ ID NO: 794421 - RNA, 19 nt, Homo sapiens
  misc_RNA (1)...(19): siRNA sense strand
ggccgaggcuuuagcaaua

SEQ ID NO: 794422 - RNA, 19 nt, Homo sapiens
  misc_RNA (1)...(19): siRNA sense strand
gacgaaaguuuagcaauaa

SEQ ID NO: 794423 - RNA, 19 nt, Homo sapiens
  misc_RNA (1)...(19): siRNA sense strand
gagagaagccuuaugaaug

SEQ ID NO: 794424 - RNA, 19 nt, Homo sapiens
  misc_RNA (1)...(19): siRNA sense strand
gggcgaggcuucauccuaa

SEQ ID NO: 794425 - RNA, 19 nt, Homo sapiens
  misc_RNA (1)...(19): siRNA sense strand
gaagccaaaucucaccaua

SEQ ID NO: 794426 - RNA, 19 nt, Homo sapiens
  misc_RNA (1)...(19): siRNA sense strand
gggcaaggauuuauucaga

SEQ ID NO: 794427 - RNA, 19 nt, Homo sapiens
  misc_RNA (1)...(19): siRNA sense strand
gcacuuaaagagacacuua

SEQ ID NO: 794428 - RNA, 19 nt, Homo sapiens
  misc_RNA (1)...(19): siRNA sense strand
gaagucaacccuugugaaa

SEQ ID NO: 794429 - RNA, 19 nt, Homo sapiens
  misc_RNA (1)...(19): siRNA sense strand
gaagggaaaucuccucaca

SEQ ID NO: 794430 - RNA, 19 nt, Homo sapiens
  misc_RNA (1)...(19): siRNA sense strand
gagagaagccuuacagaug

SEQ ID NO: 794431 - RNA, 19 nt, Homo sapiens
  misc_RNA (1)...(19): siRNA sense strand
gauaaguccuccuauaaca

SEQ ID NO: 794432 - RNA, 19 nt, Homo sapiens
  misc_RNA (1)...(19): siRNA sense strand
ggaaaauccuacagaaaua

SEQ ID NO: 794433 - RNA, 19 nt, Homo sapiens
  misc_RNA (1)...(19): siRNA sense strand
gaaaggccauuuaauugca

SEQ ID NO: 794434 - RNA, 19 nt, Homo sapiens
  misc_RNA (1)...(19): siRNA sense strand
gacaaaguauugaaaggaa

SEQ ID NO: 794435 - RNA, 19 nt, Homo sapiens
  misc_RNA (1)...(19): siRNA sense strand
gggcgaggcuuuaccuuga

SEQ ID NO: 794436 - RNA, 19 nt, Homo sapiens
  misc_RNA (1)...(19): siRNA sense strand
gggaaaggccauuuaauug

SEQ ID NO: 794437 - RNA, 19 nt, Homo sapiens
  misc_RNA (1)...(19): siRNA sense strand
gggauaaguccuccuauaa

SEQ ID NO: 794438 - RNA, 19 nt, Homo sapiens
  misc_RNA (1)...(19): siRNA sense strand
ggagagaggccuuaugaau

SEQ ID NO: 794439 - RNA, 19 nt, Homo sapiens
  misc_RNA (1)...(19): siRNA sense strand
ggauuuaucuggaagucaa

SEQ ID NO: 794440 - RNA, 19 nt, Homo sapiens
  misc_RNA (1)...(19): siRNA sense strand
gagaagccuuucaucugua

SEQ ID NO: 794441 - RNA, 19 nt, Homo sapiens
  misc_RNA (1)...(19): siRNA sense strand
gauaaguccucauacaaca

SEQ ID NO: 794442 - RNA, 19 nt, Homo sapiens
  misc_RNA (1)...(19): siRNA sense strand
gaggaacaguguaguggaa

SEQ ID NO: 794443 - RNA, 19 nt, Homo sapiens
  misc_RNA (1)...(19): siRNA sense strand
gagagaggccuuaugaaug

SEQ ID NO: 794444 - RNA, 19 nt, Homo sapiens
  misc_RNA (1)...(19): siRNA sense strand
gaacaguguaguggaaaua

SEQ ID NO: 794445 - RNA, 19 nt, Homo sapiens
  misc_RNA (1)...(19): siRNA sense strand
caccagggcuuuagagaug

SEQ ID NO: 794446 - RNA, 19 nt, Homo sapiens
  misc_RNA (1)...(19): siRNA sense strand
agucaaaucuugugaaaca

SEQ ID NO: 794447 - RNA, 19 nt, Homo sapiens
  misc_RNA (1)...(19): siRNA sense strand
ggagagaagccuuaugaau

SEQ ID NO: 794448 - RNA, 19 nt, Homo sapiens
  misc_RNA (1)...(19): siRNA sense strand
ggcgaagguuuaacgauaa

SEQ ID NO: 794449 - RNA, 19 nt, Homo sapiens
  misc_RNA (1)...(19): siRNA sense strand
gcaacagcaacuacaauuu

SEQ ID NO: 794450 - RNA, 19 nt, Homo sapiens
  misc_RNA (1)...(19): siRNA sense strand
cgggauaaguccuccuaua

SEQ ID NO: 794451 - RNA, 19 nt, Homo sapiens
  misc_RNA (1)...(19): siRNA sense strand
gcaaggauuuauucagaag

SEQ ID NO: 794452 - RNA, 19 nt, Homo sapiens
  misc_RNA (1)...(19): siRNA sense strand
cuacagaaauagacaaagu

SEQ ID NO: 794453 - RNA, 19 nt, Homo sapiens
  misc_RNA (1)...(19): siRNA sense strand
gaauauaugcagaacaugu

SEQ ID NO: 794454 - RNA, 19 nt, Homo sapiens
  misc_RNA (1)...(19): siRNA sense strand
aagcgaggcuauaccagua

SEQ ID NO: 794455 - RNA, 19 nt, Homo sapiens
  misc_RNA (1)...(19): siRNA sense strand
gaaugugggcaaggauuua

SEQ ID NO: 794456 - RNA, 19 nt, Homo sapiens
  misc_RNA (1)...(19): siRNA sense strand
gggugaggcuucaucuuga

SEQ ID NO: 794457 - RNA, 19 nt, Homo sapiens
  misc_RNA (1)...(19): siRNA sense strand
gaguguggacgaaaguuua

SEQ ID NO: 794458 - RNA, 19 nt, Homo sapiens
  misc_RNA (1)...(19): siRNA sense strand
gaaugugggcaaggauuua

SEQ ID NO: 794459 - RNA, 19 nt, Homo sapiens
  misc_RNA (1)...(19): siRNA sense strand
ggagagaagccuuacagau

SEQ ID NO: 794460 - RNA, 19 nt, Homo sapiens
  misc_RNA (1)...(19): siRNA sense strand
aggcaaaucuucuuagaca

SEQ ID NO: 794461 - RNA, 19 nt, Homo sapiens
  misc_RNA (1)...(19): siRNA sense strand
caggagagaagccuuauga

SEQ ID NO: 794462 - RNA, 19 nt, Homo sapiens
  misc_RNA (1)...(19): siRNA sense strand
ggaacaguguaguggaaau

SEQ ID NO: 794463 - RNA, 19 nt, Homo sapiens
  misc_RNA (1)...(19): siRNA sense strand
gcaaaucuucuuagacauc

SEQ ID NO: 794464 - RNA, 19 nt, Homo sapiens
  misc_RNA (1)...(19): siRNA sense strand
aaagucaacucuugucuac

SEQ ID NO: 794465 - RNA, 19 nt, Homo sapiens
  misc_RNA (1)...(19): siRNA sense strand
gcuauaccaguaagucaua

SEQ ID NO: 794466 - RNA, 19 nt, Homo sapiens
  misc_RNA (1)...(19): siRNA sense strand
ggaugucacuguggauuuc

SEQ ID NO: 794467 - RNA, 19 nt, Homo sapiens
  misc_RNA (1)...(19): siRNA sense strand
caggagagaggccuuauga

SEQ ID NO: 794468 - RNA, 19 nt, Homo sapiens
  misc_RNA (1)...(19): siRNA sense strand
ggcaaggauuuauucagaa

SEQ ID NO: 794469 - RNA, 19 nt, Homo sapiens
  misc_RNA (1)...(19): siRNA sense strand
ggaaaggccauuuaauugc

SEQ ID NO: 794470 - RNA, 19 nt, Homo sapiens
  misc_RNA (1)...(19): siRNA sense strand
aagagacacuuacgugaga

SEQ ID NO: 794471 - RNA, 19 nt, Homo sapiens
  misc_RNA (1)...(19): siRNA sense strand
ccauuuaauugcaaggauu

SEQ ID NO: 794472 - RNA, 19 nt, Homo sapiens
  misc_RNA (1)...(19): siRNA sense strand
gaaggucaagagaaagaaa

SEQ ID NO: 794473 - RNA, 19 nt, Homo sapiens
  misc_RNA (1)...(19): siRNA sense strand
gggagaagccuuucaucug

SEQ ID NO: 794474 - RNA, 19 nt, Homo sapiens
  misc_RNA (1)...(19): siRNA sense strand
caaaucuucuuagacauca

SEQ ID NO: 794475 - RNA, 19 nt, Homo sapiens
  misc_RNA (1)...(19): siRNA sense strand
gagugugggcgaagguuua

SEQ ID NO: 794476 - RNA, 19 nt, Homo sapiens
  misc_RNA (1)...(19): siRNA sense strand
agagaagccuuaugaaugc

SEQ ID NO: 794477 - RNA, 19 nt, Homo sapiens
  misc_RNA (1)...(19): siRNA sense strand
ggcaaggauuuaucuggaa

SEQ ID NO: 794478 - RNA, 19 nt, Homo sapiens
  misc_RNA (1)...(19): siRNA sense strand
gaacacacacaggagagaa

SEQ ID NO: 794479 - RNA, 19 nt, Homo sapiens
  misc_RNA (1)...(19): siRNA sense strand
caccuggucucacuaggaa

SEQ ID NO: 794480 - RNA, 19 nt, Homo sapiens
  misc_RNA (1)...(19): siRNA sense strand
agucaacccuugugaaaca

SEQ ID NO: 794481 - RNA, 19 nt, Homo sapiens
  misc_RNA (1)...(19): siRNA sense strand
caacagcaacuacaauuuu

SEQ ID NO: 794482 - RNA, 19 nt, Homo sapiens
  misc_RNA (1)...(19): siRNA sense strand
agagaggccuuaugaaugc

SEQ ID NO: 794483 - RNA, 19 nt, Homo sapiens
  misc_RNA (1)...(19): siRNA sense strand
gauugugagcgaagcuuua

SEQ ID NO: 794484 - RNA, 19 nt, Homo sapiens
  misc_RNA (1)...(19): siRNA sense strand
agaauacacucaggagaga

SEQ ID NO: 794485 - RNA, 19 nt, Homo sapiens
  misc_RNA (1)...(19): siRNA sense strand
gccggaagaugaugguaau

SEQ ID NO: 794486 - RNA, 19 nt, Homo sapiens
  misc_RNA (1)...(19): siRNA sense strand
ccaagaguguggacgaaag

SEQ ID NO: 794487 - RNA, 19 nt, Homo sapiens
  misc_RNA (1)...(19): siRNA sense strand
ggaagucaaaucuugugaa

SEQ ID NO: 794488 - RNA, 19 nt, Homo sapiens
  misc_RNA (1)...(19): siRNA sense strand
ccaaaucucaccauacauc

SEQ ID NO: 794489 - RNA, 19 nt, Homo sapiens
  misc_RNA (1)...(19): siRNA sense strand
gcacaagagaauacacuca

SEQ ID NO: 794490 - RNA, 19 nt, Homo sapiens
  misc_RNA (1)...(19): siRNA sense strand
ggcaacagcaacuacaauu

SEQ ID NO: 794491 - RNA, 19 nt, Homo sapiens
  misc_RNA (1)...(19): siRNA sense strand
gaaaguuuagcaauaaguc

SEQ ID NO: 794492 - RNA, 19 nt, Homo sapiens
  misc_RNA (1)...(19): siRNA sense strand
gacaggcuuucuuggcauu

SEQ ID NO: 794493 - RNA, 19 nt, Homo sapiens
  misc_RNA (1)...(19): siRNA sense strand
gaggagaagccuuauggau

SEQ ID NO: 794494 - RNA, 19 nt, Homo sapiens
  misc_RNA (1)...(19): siRNA sense strand
acucagaggagaagccuua

SEQ ID NO: 794495 - RNA, 19 nt, Homo sapiens
  misc_RNA (1)...(19): siRNA sense strand
gagaaugugggcaaggauu

SEQ ID NO: 794496 - RNA, 19 nt, Homo sapiens
  misc_RNA (1)...(19): siRNA sense strand
gaugguaaucauacacaaa

SEQ ID NO: 794497 - RNA, 19 nt, Homo sapiens
  misc_RNA (1)...(19): siRNA sense strand
gcaauaagucauacuacag

SEQ ID NO: 794498 - RNA, 19 nt, Homo sapiens
  misc_RNA (1)...(19): siRNA sense strand
cacugugcaugaaagaaua

SEQ ID NO: 794499 - RNA, 19 nt, Homo sapiens
  misc_RNA (1)...(19): siRNA sense strand
ggacuguggacgaggcuuu

SEQ ID NO: 794500 - RNA, 19 nt, Homo sapiens
  misc_RNA (1)...(19): siRNA sense strand
aggaauauaugcagaacau

SEQ ID NO: 794501 - RNA, 19 nt, Homo sapiens
  misc_RNA (1)...(19): siRNA sense strand
gaguguggccgaggcuuua

SEQ ID NO: 794502 - RNA, 19 nt, Homo sapiens
  misc_RNA (1)...(19): siRNA sense strand
acacaggagagaagccuua

SEQ ID NO: 794503 - RNA, 19 nt, Homo sapiens
  misc_RNA (1)...(19): siRNA sense strand
gccgaggcuuuagcaauaa

SEQ ID NO: 794504 - RNA, 19 nt, Homo sapiens
  misc_RNA (1)...(19): siRNA sense strand
ccuaagacaugcaguaagc

SEQ ID NO: 794505 - RNA, 19 nt, Homo sapiens
  misc_RNA (1)...(19): siRNA sense strand
ggacacacucagaggagaa

SEQ ID NO: 794506 - RNA, 19 nt, Homo sapiens
  misc_RNA (1)...(19): siRNA sense strand
agucacaccuuaucacaca

SEQ ID NO: 794507 - RNA, 19 nt, Homo sapiens
  misc_RNA (1)...(19): siRNA sense strand
ggaguguggccgaggcuuu

SEQ ID NO: 794508 - RNA, 19 nt, Homo sapiens
  misc_RNA (1)...(19): siRNA sense strand
aaaaucaacucuccucuuc

SEQ ID NO: 794509 - RNA, 19 nt, Homo sapiens
  misc_RNA (1)...(19): siRNA sense strand
agggaaaucuccucacaca

SEQ ID NO: 794510 - RNA, 19 nt, Homo sapiens
  misc_RNA (1)...(19): siRNA sense strand
ugacaggucuuauacuuua

SEQ ID NO: 794511 - RNA, 19 nt, Homo sapiens
  misc_RNA (1)...(19): siRNA sense strand
gaaacagccuccuucagua

SEQ ID NO: 794512 - RNA, 19 nt, Homo sapiens
  misc_RNA (1)...(19): siRNA sense strand
gaagguaaaucagcacaaa

SEQ ID NO: 794513 - RNA, 19 nt, Homo sapiens
  misc_RNA (1)...(19): siRNA sense strand
ccaaggcacugucuucuuu

SEQ ID NO: 794514 - RNA, 19 nt, Homo sapiens
  misc_RNA (1)...(19): siRNA sense strand
caaagcaucugaucacaug

SEQ ID NO: 794515 - RNA, 19 nt, Homo sapiens
  misc_RNA (1)...(19): siRNA sense strand
ggaagaugcugcucccauu

SEQ ID NO: 794516 - RNA, 19 nt, Homo sapiens
  misc_RNA (1)...(19): siRNA sense strand
gggaagugauuuauuaaga

SEQ ID NO: 794517 - RNA, 19 nt, Homo sapiens
  misc_RNA (1)...(19): siRNA sense strand
gcacagagaggacucauau

SEQ ID NO: 794518 - RNA, 19 nt, Homo sapiens
  misc_RNA (1)...(19): siRNA sense strand
ucaaugaaauguccaaugu

SEQ ID NO: 794519 - RNA, 19 nt, Homo sapiens
  misc_RNA (1)...(19): siRNA sense strand
ggagacaacuggagcaaca

SEQ ID NO: 794520 - RNA, 19 nt, Homo sapiens
  misc_RNA (1)...(19): siRNA sense strand
ggagguuguuaaugaauuu

SEQ ID NO: 794521 - RNA, 19 nt, Homo sapiens
  misc_RNA (1)...(19): siRNA sense strand
agagaggacucauauagaa

SEQ ID NO: 794522 - RNA, 19 nt, Homo sapiens
  misc_RNA (1)...(19): siRNA sense strand
aagaaaggcuugaaggauu

SEQ ID NO: 794523 - RNA, 19 nt, Homo sapiens
  misc_RNA (1)...(19): siRNA sense strand
gaauuugguuucucaagug

SEQ ID NO: 794524 - RNA, 19 nt, Homo sapiens
  misc_RNA (1)...(19): siRNA sense strand
uggaggagguuguuaauga

SEQ ID NO: 794525 - RNA, 19 nt, Homo sapiens
  misc_RNA (1)...(19): siRNA sense strand
ggaggagguuguuaaugaa

SEQ ID NO: 794526 - RNA, 19 nt, Homo sapiens
  misc_RNA (1)...(19): siRNA sense strand
gaagguagguuggcuuuac

SEQ ID NO: 794527 - RNA, 19 nt, Homo sapiens
  misc_RNA (1)...(19): siRNA sense strand
caacagagacagacaaauc

SEQ ID NO: 794528 - RNA, 19 nt, Homo sapiens
  misc_RNA (1)...(19): siRNA sense strand
gcgagucccugguggcuaa

SEQ ID NO: 794529 - RNA, 19 nt, Homo sapiens
  misc_RNA (1)...(19): siRNA sense strand
cagccaaggucaacauuug

SEQ ID NO: 794530 - RNA, 19 nt, Homo sapiens
  misc_RNA (1)...(19): siRNA sense strand
ggaaucccaucuuggaaug

SEQ ID NO: 794531 - RNA, 19 nt, Homo sapiens
  misc_RNA (1)...(19): siRNA sense strand
gaacacagcccaggugcuu

SEQ ID NO: 794532 - RNA, 19 nt, Homo sapiens
  misc_RNA (1)...(19): siRNA sense strand
ugucaaggcucaugcaaga

SEQ ID NO: 794533 - RNA, 19 nt, Homo sapiens
  misc_RNA (1)...(19): siRNA sense strand
uaaaucagcacaaacagaa

SEQ ID NO: 794534 - RNA, 19 nt, Homo sapiens
  misc_RNA (1)...(19): siRNA sense strand
ggaagcugguagccuguuu

SEQ ID NO: 794535 - RNA, 19 nt, Homo sapiens
  misc_RNA (1)...(19): siRNA sense strand
gaagaaaggcuugaaggau

SEQ ID NO: 794536 - RNA, 19 nt, Homo sapiens
  misc_RNA (1)...(19): siRNA sense strand
ccugagaacuuuccaguca

SEQ ID NO: 794537 - RNA, 19 nt, Homo sapiens
  misc_RNA (1)...(19): siRNA sense strand
gaagaauuauagccagcuu

SEQ ID NO: 794538 - RNA, 19 nt, Homo sapiens
  misc_RNA (1)...(19): siRNA sense strand
caacaagccacucucaaga

SEQ ID NO: 794539 - RNA, 19 nt, Homo sapiens
  misc_RNA (1)...(19): siRNA sense strand
gagggcagguggccaucua

SEQ ID NO: 794540 - RNA, 19 nt, Homo sapiens
  misc_RNA (1)...(19): siRNA sense strand
guaacugacaggucuuaua

SEQ ID NO: 794541 - RNA, 19 nt, Homo sapiens
  misc_RNA (1)...(19): siRNA sense strand
gauccuggcuugcugucaa

SEQ ID NO: 794542 - RNA, 19 nt, Homo sapiens
  misc_RNA (1)...(19): siRNA sense strand
cucgggaagugauuuauua

SEQ ID NO: 794543 - RNA, 19 nt, Homo sapiens
  misc_RNA (1)...(19): siRNA sense strand
gagguggacauguuccuua

SEQ ID NO: 794544 - RNA, 19 nt, Homo sapiens
  misc_RNA (1)...(19): siRNA sense strand
ugaaagagcaccugaugga

SEQ ID NO: 794545 - RNA, 19 nt, Homo sapiens
  misc_RNA (1)...(19): siRNA sense strand
caacagcccuugaaaagug

SEQ ID NO: 794546 - RNA, 19 nt, Homo sapiens
  misc_RNA (1)...(19): siRNA sense strand
gaaccucgugcgccuuuaa

SEQ ID NO: 794547 - RNA, 19 nt, Homo sapiens
  misc_RNA (1)...(19): siRNA sense strand
agaaaggcuugaaggauug

SEQ ID NO: 794548 - RNA, 19 nt, Homo sapiens
  misc_RNA (1)...(19): siRNA sense strand
guggacauguuccuuagaa

SEQ ID NO: 794549 - RNA, 19 nt, Homo sapiens
  misc_RNA (1)...(19): siRNA sense strand
caacuggagcaacacauaa

SEQ ID NO: 794550 - RNA, 19 nt, Homo sapiens
  misc_RNA (1)...(19): siRNA sense strand
gagcccauauugugagguu

SEQ ID NO: 794551 - RNA, 19 nt, Homo sapiens
  misc_RNA (1)...(19): siRNA sense strand
ggaugaaggcguccagcua

SEQ ID NO: 794552 - RNA, 19 nt, Homo sapiens
  misc_RNA (1)...(19): siRNA sense strand
agaaagcugugucuuaugg

SEQ ID NO: 794553 - RNA, 19 nt, Homo sapiens
  misc_RNA (1)...(19): siRNA sense strand
uuauuaagaugcacagaga

SEQ ID NO: 794554 - RNA, 19 nt, Homo sapiens
  misc_RNA (1)...(19): siRNA sense strand
ccucagcacuggccgaaga

SEQ ID NO: 794555 - RNA, 19 nt, Homo sapiens
  misc_RNA (1)...(19): siRNA sense strand
ggucaacauuugggaagaa

SEQ ID NO: 794556 - RNA, 19 nt, Homo sapiens
  misc_RNA (1)...(19): siRNA sense strand
aaacagccuccuucaguaa

SEQ ID NO: 794557 - RNA, 19 nt, Homo sapiens
  misc_RNA (1)...(19): siRNA sense strand
gaaggugaaguuccagcua

SEQ ID NO: 794558 - RNA, 19 nt, Homo sapiens
  misc_RNA (1)...(19): siRNA sense strand
ggauacaagucacagaaac

SEQ ID NO: 794559 - RNA, 19 nt, Homo sapiens
  misc_RNA (1)...(19): siRNA sense strand
gagccaaaggccaauguuu

SEQ ID NO: 794560 - RNA, 19 nt, Homo sapiens
  misc_RNA (1)...(19): siRNA sense strand
ccagaaacccaaacuguca

SEQ ID NO: 794561 - RNA, 19 nt, Homo sapiens
  misc_RNA (1)...(19): siRNA sense strand
gggaaagccugugugaaca

SEQ ID NO: 794562 - RNA, 19 nt, Homo sapiens
  misc_RNA (1)...(19): siRNA sense strand
uccaaugucugcccaauuc

SEQ ID NO: 794563 - RNA, 19 nt, Homo sapiens
  misc_RNA (1)...(19): siRNA sense strand
gcagaauacugagcuaugc

SEQ ID NO: 794564 - RNA, 19 nt, Homo sapiens
  misc_RNA (1)...(19): siRNA sense strand
guaaaucagcacaaacaga

SEQ ID NO: 794565 - RNA, 19 nt, Homo sapiens
  misc_RNA (1)...(19): siRNA sense strand
gacggcaguuggacaaaug

SEQ ID NO: 794566 - RNA, 19 nt, Homo sapiens
  misc_RNA (1)...(19): siRNA sense strand
gagaggacucauauagaaa

SEQ ID NO: 794567 - RNA, 19 nt, Homo sapiens
  misc_RNA (1)...(19): siRNA sense strand
gaaaguuugacauccauuc

SEQ ID NO: 794568 - RNA, 19 nt, Homo sapiens
  misc_RNA (1)...(19): siRNA sense strand
gacccagccucaaguuugu

SEQ ID NO: 794569 - RNA, 19 nt, Homo sapiens
  misc_RNA (1)...(19): siRNA sense strand
aaaccuguaugcuggcaaa

SEQ ID NO: 794570 - RNA, 19 nt, Homo sapiens
  misc_RNA (1)...(19): siRNA sense strand
gcaaggaggcacagaaggu

SEQ ID NO: 794571 - RNA, 19 nt, Homo sapiens
  misc_RNA (1)...(19): siRNA sense strand
ggacauguuccuuagaaag

SEQ ID NO: 794572 - RNA, 19 nt, Homo sapiens
  misc_RNA (1)...(19): siRNA sense strand
uaggaaacccaacuuagaa

SEQ ID NO: 794573 - RNA, 19 nt, Homo sapiens
  misc_RNA (1)...(19): siRNA sense strand
gagcuuaggagcccaaucu

SEQ ID NO: 794574 - RNA, 19 nt, Homo sapiens
  misc_RNA (1)...(19): siRNA sense strand
acagacaaaucagaaauca

SEQ ID NO: 794575 - RNA, 19 nt, Homo sapiens
  misc_RNA (1)...(19): siRNA sense strand
aaacagaagacacccauca

SEQ ID NO: 794576 - RNA, 19 nt, Homo sapiens
  misc_RNA (1)...(19): siRNA sense strand
caaagcuugucuccacaug

SEQ ID NO: 794577 - RNA, 19 nt, Homo sapiens
  misc_RNA (1)...(19): siRNA sense strand
ggaccugcuuucacaacug

SEQ ID NO: 794578 - RNA, 19 nt, Homo sapiens
  misc_RNA (1)...(19): siRNA sense strand
agaaacagccuccuucagu

SEQ ID NO: 794579 - RNA, 19 nt, Homo sapiens
  misc_RNA (1)...(19): siRNA sense strand
cuaggaaacccaacuuaga

SEQ ID NO: 794580 - RNA, 19 nt, Homo sapiens
  misc_RNA (1)...(19): siRNA sense strand
caaagggagacuacaaugu

SEQ ID NO: 794581 - RNA, 19 nt, Homo sapiens
  misc_RNA (1)...(19): siRNA sense strand
uaacugacaggucuuauac

SEQ ID NO: 794582 - RNA, 19 nt, Homo sapiens
  misc_RNA (1)...(19): siRNA sense strand
ucagaacacuggaguagcu

SEQ ID NO: 794583 - RNA, 19 nt, Homo sapiens
  misc_RNA (1)...(19): siRNA sense strand
gagugucugucucccaaga

SEQ ID NO: 794584 - RNA, 19 nt, Homo sapiens
  misc_RNA (1)...(19): siRNA sense strand
caucuuggaaugaucauga

SEQ ID NO: 794585 - RNA, 19 nt, Homo sapiens
  misc_RNA (1)...(19): siRNA sense strand
cgaggaaucccaucuugga

SEQ ID NO: 794586 - RNA, 19 nt, Homo sapiens
  misc_RNA (1)...(19): siRNA sense strand
aaugaaauguccaaugucu

SEQ ID NO: 794587 - RNA, 19 nt, Homo sapiens
  misc_RNA (1)...(19): siRNA sense strand
gaagaugcugcucccauuc

SEQ ID NO: 794588 - RNA, 19 nt, Homo sapiens
  misc_RNA (1)...(19): siRNA sense strand
cagcagagcaggagcuuag

SEQ ID NO: 794589 - RNA, 19 nt, Homo sapiens
  misc_RNA (1)...(19): siRNA sense strand
acagagaggacucauauag

SEQ ID NO: 794590 - RNA, 19 nt, Homo sapiens
  misc_RNA (1)...(19): siRNA sense strand
ggaagcccuugaggaguga

SEQ ID NO: 794591 - RNA, 19 nt, Homo sapiens
  misc_RNA (1)...(19): siRNA sense strand
acugacaggucuuauacuu

SEQ ID NO: 794592 - RNA, 19 nt, Homo sapiens
  misc_RNA (1)...(19): siRNA sense strand
gaagcucagggucucauga

SEQ ID NO: 794593 - RNA, 19 nt, Homo sapiens
  misc_RNA (1)...(19): siRNA sense strand
guccaacacccaugugaaa

SEQ ID NO: 794594 - RNA, 19 nt, Homo sapiens
  misc_RNA (1)...(19): siRNA sense strand
cagagaggacucauauaga

SEQ ID NO: 794595 - RNA, 19 nt, Homo sapiens
  misc_RNA (1)...(19): siRNA sense strand
gcagcaaggaggcacagaa

SEQ ID NO: 794596 - RNA, 19 nt, Homo sapiens
  misc_RNA (1)...(19): siRNA sense strand
cugaggaguuggaaaggaa

SEQ ID NO: 794597 - RNA, 19 nt, Homo sapiens
  misc_RNA (1)...(19): siRNA sense strand
ccaaaacccuucuggaaca

SEQ ID NO: 794598 - RNA, 19 nt, Homo sapiens
  misc_RNA (1)...(19): siRNA sense strand
gagacagacaaaucagaaa

SEQ ID NO: 794599 - RNA, 19 nt, Homo sapiens
  misc_RNA (1)...(19): siRNA sense strand
cuucggaccugcuuucaca

SEQ ID NO: 794600 - RNA, 19 nt, Homo sapiens
  misc_RNA (1)...(19): siRNA sense strand
caggaaaguuugacaucca

SEQ ID NO: 794601 - RNA, 19 nt, Homo sapiens
  misc_RNA (1)...(19): siRNA sense strand
gggauacaagucacagaaa

SEQ ID NO: 794602 - RNA, 19 nt, Homo sapiens
  misc_RNA (1)...(19): siRNA sense strand
agacaaaucagaaaucaac

SEQ ID NO: 794603 - RNA, 19 nt, Homo sapiens
  misc_RNA (1)...(19): siRNA sense strand
gcuacugccaucaaagaaa

SEQ ID NO: 794604 - RNA, 19 nt, Homo sapiens
  misc_RNA (1)...(19): siRNA sense strand
ugaagaaaggcuugaagga

SEQ ID NO: 794605 - RNA, 19 nt, Homo sapiens
  misc_RNA (1)...(19): siRNA sense strand
gcccagaaacccaaacugu

SEQ ID NO: 794606 - RNA, 19 nt, Homo sapiens
  misc_RNA (1)...(19): siRNA sense strand
aaguugagguggacauguu

SEQ ID NO: 794607 - RNA, 19 nt, Homo sapiens
  misc_RNA (1)...(19): siRNA sense strand
ugacucgggaagugauuua

SEQ ID NO: 794608 - RNA, 19 nt, Homo sapiens
  misc_RNA (1)...(19): siRNA sense strand
gagugccaacccuuuauuu

SEQ ID NO: 794609 - RNA, 19 nt, Homo sapiens
  misc_RNA (1)...(19): siRNA sense strand
gauacaagucacagaaaca

SEQ ID NO: 794610 - RNA, 19 nt, Homo sapiens
  misc_RNA (1)...(19): siRNA sense strand
gcaccaagauucuguguua

SEQ ID NO: 794611 - RNA, 19 nt, Homo sapiens
  misc_RNA (1)...(19): siRNA sense strand
gaaaggaguuugaaagauu

SEQ ID NO: 794612 - RNA, 19 nt, Homo sapiens
  misc_RNA (1)...(19): siRNA sense strand
gaaagaagaauucagcuua

SEQ ID NO: 794613 - RNA, 19 nt, Homo sapiens
  misc_RNA (1)...(19): siRNA sense strand
ggacaccacuugugaaauu

SEQ ID NO: 794614 - RNA, 19 nt, Homo sapiens
  misc_RNA (1)...(19): siRNA sense strand
gcagcaaagucauucauuu

SEQ ID NO: 794615 - RNA, 19 nt, Homo sapiens
  misc_RNA (1)...(19): siRNA sense strand
gauagaagauacgcuuaua

SEQ ID NO: 794616 - RNA, 19 nt, Homo sapiens
  misc_RNA (1)...(19): siRNA sense strand
ggaagaauuuaacagauga

SEQ ID NO: 794617 - RNA, 19 nt, Homo sapiens
  misc_RNA (1)...(19): siRNA sense strand
gaagauacgcuuauacaga

SEQ ID NO: 794618 - RNA, 19 nt, Homo sapiens
  misc_RNA (1)...(19): siRNA sense strand
ggaccaaauugcuuauaaa

SEQ ID NO: 794619 - RNA, 19 nt, Homo sapiens
  misc_RNA (1)...(19): siRNA sense strand
aaauagagcuggauucuuc

SEQ ID NO: 794620 - RNA, 19 nt, Homo sapiens
  misc_RNA (1)...(19): siRNA sense strand
uaaugaugcuccacaauuu

SEQ ID NO: 794621 - RNA, 19 nt, Homo sapiens
  misc_RNA (1)...(19): siRNA sense strand
gagcaagcccagaagauua

SEQ ID NO: 794622 - RNA, 19 nt, Homo sapiens
  misc_RNA (1)...(19): siRNA sense strand
aaacuuaaaucaccagcua

SEQ ID NO: 794623 - RNA, 19 nt, Homo sapiens
  misc_RNA (1)...(19): siRNA sense strand
caauaaaucaccugaagua

SEQ ID NO: 794624 - RNA, 19 nt, Homo sapiens
  misc_RNA (1)...(19): siRNA sense strand
ggacaaagaugguaaaauc

SEQ ID NO: 794625 - RNA, 19 nt, Homo sapiens
  misc_RNA (1)...(19): siRNA sense strand
gaaggacaguguguacuuu

SEQ ID NO: 794626 - RNA, 19 nt, Homo sapiens
  misc_RNA (1)...(19): siRNA sense strand
gggaggaucugacauggaa

SEQ ID NO: 794627 - RNA, 19 nt, Homo sapiens
  misc_RNA (1)...(19): siRNA sense strand
ggaagccuguggagaguaa

SEQ ID NO: 794628 - RNA, 19 nt, Homo sapiens
  misc_RNA (1)...(19): siRNA sense strand
gaaauaacuuacagagauc

SEQ ID NO: 794629 - RNA, 19 nt, Homo sapiens
  misc_RNA (1)...(19): siRNA sense strand
gagcaguuccggagaaaua

SEQ ID NO: 794630 - RNA, 19 nt, Homo sapiens
  misc_RNA (1)...(19): siRNA sense strand
agaaagacuuccagcauuu

SEQ ID NO: 794631 - RNA, 19 nt, Homo sapiens
  misc_RNA (1)...(19): siRNA sense strand
caagacaauuucaacguuu

SEQ ID NO: 794632 - RNA, 19 nt, Homo sapiens
  misc_RNA (1)...(19): siRNA sense strand
gguuugaccugcaggcuua

SEQ ID NO: 794633 - RNA, 19 nt, Homo sapiens
  misc_RNA (1)...(19): siRNA sense strand
ggagaggucagaagagaua

SEQ ID NO: 794634 - RNA, 19 nt, Homo sapiens
  misc_RNA (1)...(19): siRNA sense strand
gaauucagcuuaucacaac

SEQ ID NO: 794635 - RNA, 19 nt, Homo sapiens
  misc_RNA (1)...(19): siRNA sense strand
caaaguacaugucagaaag

SEQ ID NO: 794636 - RNA, 19 nt, Homo sapiens
  misc_RNA (1)...(19): siRNA sense strand
gaucugacauggaaaauuu

SEQ ID NO: 794637 - RNA, 19 nt, Homo sapiens
  misc_RNA (1)...(19): siRNA sense strand
gaccauauguauuuagaga

SEQ ID NO: 794638 - RNA, 19 nt, Homo sapiens
  misc_RNA (1)...(19): siRNA sense strand
gaacagaauauugggauaa

SEQ ID NO: 794639 - RNA, 19 nt, Homo sapiens
  misc_RNA (1)...(19): siRNA sense strand
caaauuggucucacaagua

SEQ ID NO: 794640 - RNA, 19 nt, Homo sapiens
  misc_RNA (1)...(19): siRNA sense strand
ggaaggaguuaggaccaua

SEQ ID NO: 794641 - RNA, 19 nt, Homo sapiens
  misc_RNA (1)...(19): siRNA sense strand
ggaaaaugguuuacucuuu

SEQ ID NO: 794642 - RNA, 19 nt, Homo sapiens
  misc_RNA (1)...(19): siRNA sense strand
gaagauaaagguacagaug

SEQ ID NO: 794643 - RNA, 19 nt, Homo sapiens
  misc_RNA (1)...(19): siRNA sense strand
caaguaagauggagcaagu

SEQ ID NO: 794644 - RNA, 19 nt, Homo sapiens
  misc_RNA (1)...(19): siRNA sense strand
aaauuggucucacaaguaa

SEQ ID NO: 794645 - RNA, 19 nt, Homo sapiens
  misc_RNA (1)...(19): siRNA sense strand
ggaguuaggaccauaugua

SEQ ID NO: 794646 - RNA, 19 nt, Homo sapiens
  misc_RNA (1)...(19): siRNA sense strand
uuacagagaucgaaaucaa

SEQ ID NO: 794647 - RNA, 19 nt, Homo sapiens
  misc_RNA (1)...(19): siRNA sense strand
cagcaaagucauucauuua

SEQ ID NO: 794648 - RNA, 19 nt, Homo sapiens
  misc_RNA (1)...(19): siRNA sense strand
gaauacagguuagccaaau

SEQ ID NO: 794649 - RNA, 19 nt, Homo sapiens
  misc_RNA (1)...(19): siRNA sense strand
gagaaagggucaaaguaca

SEQ ID NO: 794650 - RNA, 19 nt, Homo sapiens
  misc_RNA (1)...(19): siRNA sense strand
ggauggauauugagagguu

SEQ ID NO: 794651 - RNA, 19 nt, Homo sapiens
  misc_RNA (1)...(19): siRNA sense strand
aagaaacacuucagccuuu

SEQ ID NO: 794652 - RNA, 19 nt, Homo sapiens
  misc_RNA (1)...(19): siRNA sense strand
guaaguggaucucuucauc

SEQ ID NO: 794653 - RNA, 19 nt, Homo sapiens
  misc_RNA (1)...(19): siRNA sense strand
gcaaacaguaucaaccuuu

SEQ ID NO: 794654 - RNA, 19 nt, Homo sapiens
  misc_RNA (1)...(19): siRNA sense strand
uauaaggacuugugccauu

SEQ ID NO: 794655 - RNA, 19 nt, Homo sapiens
  misc_RNA (1)...(19): siRNA sense strand
ugaaagacauagcagaaga

SEQ ID NO: 794656 - RNA, 19 nt, Homo sapiens
  misc_RNA (1)...(19): siRNA sense strand
caauggagauuacuaccuu

SEQ ID NO: 794657 - RNA, 19 nt, Homo sapiens
  misc_RNA (1)...(19): siRNA sense strand
gaagaugagaccauuaaug

SEQ ID NO: 794658 - RNA, 19 nt, Homo sapiens
  misc_RNA (1)...(19): siRNA sense strand
guuaggaccauauguauuu

SEQ ID NO: 794659 - RNA, 19 nt, Homo sapiens
  misc_RNA (1)...(19): siRNA sense strand
gaacauuuccgucaguuuc

SEQ ID NO: 794660 - RNA, 19 nt, Homo sapiens
  misc_RNA (1)...(19): siRNA sense strand
aagauacgcuuauacagaa

SEQ ID NO: 794661 - RNA, 19 nt, Homo sapiens
  misc_RNA (1)...(19): siRNA sense strand
gcaaguccggcaugaauuu

SEQ ID NO: 794662 - RNA, 19 nt, Homo sapiens
  misc_RNA (1)...(19): siRNA sense strand
gaugaaagccugacaaugc

SEQ ID NO: 794663 - RNA, 19 nt, Homo sapiens
  misc_RNA (1)...(19): siRNA sense strand
gaacaggagagaauucuuc

SEQ ID NO: 794664 - RNA, 19 nt, Homo sapiens
  misc_RNA (1)...(19): siRNA sense strand
gagagaagacaagaauaua

SEQ ID NO: 794665 - RNA, 19 nt, Homo sapiens
  misc_RNA (1)...(19): siRNA sense strand
gaagagauagaacaaacaa

SEQ ID NO: 794666 - RNA, 19 nt, Homo sapiens
  misc_RNA (1)...(19): siRNA sense strand
gcggagccaccaacuauua

SEQ ID NO: 794667 - RNA, 19 nt, Homo sapiens
  misc_RNA (1)...(19): siRNA sense strand
cugcagaaaucuuaucaaa

SEQ ID NO: 794668 - RNA, 19 nt, Homo sapiens
  misc_RNA (1)...(19): siRNA sense strand
gaggagcaauucagcaaau

SEQ ID NO: 794669 - RNA, 19 nt, Homo sapiens
  misc_RNA (1)...(19): siRNA sense strand
uuagugaucugcuuaacaa

SEQ ID NO: 794670 - RNA, 19 nt, Homo sapiens
  misc_RNA (1)...(19): siRNA sense strand
gcuggauucuucuuuacua

SEQ ID NO: 794671 - RNA, 19 nt, Homo sapiens
  misc_RNA (1)...(19): siRNA sense strand
gaugagaccauuaauguca

SEQ ID NO: 794672 - RNA, 19 nt, Homo sapiens
  misc_RNA (1)...(19): siRNA sense strand
gaaaucaaaggaaggcaaa

SEQ ID NO: 794673 - RNA, 19 nt, Homo sapiens
  misc_RNA (1)...(19): siRNA sense strand
gaaaggaaagaaugagguu

SEQ ID NO: 794674 - RNA, 19 nt, Homo sapiens
  misc_RNA (1)...(19): siRNA sense strand
aaggcuagcucuucaacua

SEQ ID NO: 794675 - RNA, 19 nt, Homo sapiens
  misc_RNA (1)...(19): siRNA sense strand
ucaagacaauuucaacguu

SEQ ID NO: 794676 - RNA, 19 nt, Homo sapiens
  misc_RNA (1)...(19): siRNA sense strand
gaugaaagacauagcagaa

SEQ ID NO: 794677 - RNA, 19 nt, Homo sapiens
  misc_RNA (1)...(19): siRNA sense strand
gaucuuaugugcggacaga

SEQ ID NO: 794678 - RNA, 19 nt, Homo sapiens
  misc_RNA (1)...(19): siRNA sense strand
gcuacaggcuuugcauaaa

SEQ ID NO: 794679 - RNA, 19 nt, Homo sapiens
  misc_RNA (1)...(19): siRNA sense strand
gcaaagucauucauuuaac

SEQ ID NO: 794680 - RNA, 19 nt, Homo sapiens
  misc_RNA (1)...(19): siRNA sense strand
ccuccuaaaucucccaaua

SEQ ID NO: 794681 - RNA, 19 nt, Homo sapiens
  misc_RNA (1)...(19): siRNA sense strand
uaccugagauccagaaaga

SEQ ID NO: 794682 - RNA, 19 nt, Homo sapiens
  misc_RNA (1)...(19): siRNA sense strand
gaguauaccuugaaaagaa

SEQ ID NO: 794683 - RNA, 19 nt, Homo sapiens
  misc_RNA (1)...(19): siRNA sense strand
gaagaagaggugucuguau

SEQ ID NO: 794684 - RNA, 19 nt, Homo sapiens
  misc_RNA (1)...(19): siRNA sense strand
ccagcuauuucaucuguuu

SEQ ID NO: 794685 - RNA, 19 nt, Homo sapiens
  misc_RNA (1)...(19): siRNA sense strand
aagaaagacuuccagcauu

SEQ ID NO: 794686 - RNA, 19 nt, Homo sapiens
  misc_RNA (1)...(19): siRNA sense strand
ccauuaaugucaacuacaa

SEQ ID NO: 794687 - RNA, 19 nt, Homo sapiens
  misc_RNA (1)...(19): siRNA sense strand
guauauagaagccuuagaa

SEQ ID NO: 794688 - RNA, 19 nt, Homo sapiens
  misc_RNA (1)...(19): siRNA sense strand
agagcuggauucuucuuua

SEQ ID NO: 794689 - RNA, 19 nt, Homo sapiens
  misc_RNA (1)...(19): siRNA sense strand
caaaggagaggucagaaga

SEQ ID NO: 794690 - RNA, 19 nt, Homo sapiens
  misc_RNA (1)...(19): siRNA sense strand
gacaaugcauuucucaaca

SEQ ID NO: 794691 - RNA, 19 nt, Homo sapiens
  misc_RNA (1)...(19): siRNA sense strand
gcaauagaaaggaguuuga

SEQ ID NO: 794692 - RNA, 19 nt, Homo sapiens
  misc_RNA (1)...(19): siRNA sense strand
ggcaacagaugauuuccuu

SEQ ID NO: 794693 - RNA, 19 nt, Homo sapiens
  misc_RNA (1)...(19): siRNA sense strand
uaacgucucuaaacgaaca

SEQ ID NO: 794694 - RNA, 19 nt, Homo sapiens
  misc_RNA (1)...(19): siRNA sense strand
cagaagaagauuacaacua

SEQ ID NO: 794695 - RNA, 19 nt, Homo sapiens
  misc_RNA (1)...(19): siRNA sense strand
ugcaaccucucacaaauuu

SEQ ID NO: 794696 - RNA, 19 nt, Homo sapiens
  misc_RNA (1)...(19): siRNA sense strand
gauccaagaagaacuagaa

SEQ ID NO: 794697 - RNA, 19 nt, Homo sapiens
  misc_RNA (1)...(19): siRNA sense strand
gagcaaguccggcaugaau

SEQ ID NO: 794698 - RNA, 19 nt, Homo sapiens
  misc_RNA (1)...(19): siRNA sense strand
caacuauuaucaacugcuu

SEQ ID NO: 794699 - RNA, 19 nt, Homo sapiens
  misc_RNA (1)...(19): siRNA sense strand
cggaccaaauugcuuauaa

SEQ ID NO: 794700 - RNA, 19 nt, Homo sapiens
  misc_RNA (1)...(19): siRNA sense strand
cagaggcaauuagauuuaa

SEQ ID NO: 794701 - RNA, 19 nt, Homo sapiens
  misc_RNA (1)...(19): siRNA sense strand
cuaaaucucccaauaaauc

SEQ ID NO: 794702 - RNA, 19 nt, Homo sapiens
  misc_RNA (1)...(19): siRNA sense strand
gcucuucaacuaugucuuu

SEQ ID NO: 794703 - RNA, 19 nt, Homo sapiens
  misc_RNA (1)...(19): siRNA sense strand
gaaucaagcaauaugcaaa

SEQ ID NO: 794704 - RNA, 19 nt, Homo sapiens
  misc_RNA (1)...(19): siRNA sense strand
ccaccagcuuuacaaauug

SEQ ID NO: 794705 - RNA, 19 nt, Homo sapiens
  misc_RNA (1)...(19): siRNA sense strand
ucagaggcaauuagauuua

SEQ ID NO: 794706 - RNA, 19 nt, Homo sapiens
  misc_RNA (1)...(19): siRNA sense strand
ggauaauguuccugcagaa

SEQ ID NO: 794707 - RNA, 19 nt, Homo sapiens
  misc_RNA (1)...(19): siRNA sense strand
cgaacagaauauugggaua

SEQ ID NO: 794708 - RNA, 19 nt, Homo sapiens
  misc_RNA (1)...(19): siRNA sense strand
ggaaggacaguguguacuu

SEQ ID NO: 794709 - RNA, 19 nt, Homo sapiens
  misc_RNA (1)...(19): siRNA sense strand
ucagaaagcagcaaaguca

SEQ ID NO: 794710 - RNA, 19 nt, Homo sapiens
  misc_RNA (1)...(19): siRNA sense strand
ucaaguaccucgaauauga

SEQ ID NO: 794711 - RNA, 19 nt, Homo sapiens
  misc_RNA (1)...(19): siRNA sense strand
gcaaggcacuggcuucuuc

SEQ ID NO: 794712 - RNA, 19 nt, Homo sapiens
  misc_RNA (1)...(19): siRNA sense strand
ggacacaaguucugcuuuc

SEQ ID NO: 794713 - RNA, 19 nt, Homo sapiens
  misc_RNA (1)...(19): siRNA sense strand
gauacgaguucgagcugaa

SEQ ID NO: 794714 - RNA, 19 nt, Homo sapiens
  misc_RNA (1)...(19): siRNA sense strand
gcuggagacaucaaaguua

SEQ ID NO: 794715 - RNA, 19 nt, Homo sapiens
  misc_RNA (1)...(19): siRNA sense strand
cuggagacaucaaaguuaa

SEQ ID NO: 794716 - RNA, 19 nt, Homo sapiens
  misc_RNA (1)...(19): siRNA sense strand
gcagaggaaugcggacugu

SEQ ID NO: 794717 - RNA, 19 nt, Homo sapiens
  misc_RNA (1)...(19): siRNA sense strand
ugacagggccacaucauca

SEQ ID NO: 794718 - RNA, 19 nt, Homo sapiens
  misc_RNA (1)...(19): siRNA sense strand
ggagacaucaaaguuaaga

SEQ ID NO: 794719 - RNA, 19 nt, Homo sapiens
  misc_RNA (1)...(19): siRNA sense strand
ucaaugugcgcuucaagaa

SEQ ID NO: 794720 - RNA, 19 nt, Homo sapiens
  misc_RNA (1)...(19): siRNA sense strand
gcauggaucaggagaaugg

SEQ ID NO: 794721 - RNA, 19 nt, Homo sapiens
  misc_RNA (1)...(19): siRNA sense strand
gagaagcagcagaggaaug

SEQ ID NO: 794722 - RNA, 19 nt, Homo sapiens
  misc_RNA (1)...(19): siRNA sense strand
aagagaagcagcagaggaa

SEQ ID NO: 794723 - RNA, 19 nt, Homo sapiens
  misc_RNA (1)...(19): siRNA sense strand
ccaaagcagugcgggaaca

SEQ ID NO: 794724 - RNA, 19 nt, Homo sapiens
  misc_RNA (1)...(19): siRNA sense strand
caaguaccucgaauaugaa

SEQ ID NO: 794725 - RNA, 19 nt, Homo sapiens
  misc_RNA (1)...(19): siRNA sense strand
cauccuugcuggagacauc

SEQ ID NO: 794726 - RNA, 19 nt, Homo sapiens
  misc_RNA (1)...(19): siRNA sense strand
cgagaucgccaccauccuu

SEQ ID NO: 794727 - RNA, 19 nt, Homo sapiens
  misc_RNA (1)...(19): siRNA sense strand
cggcauggaucaggagaau

SEQ ID NO: 794728 - RNA, 19 nt, Homo sapiens
  misc_RNA (1)...(19): siRNA sense strand
caacggcgaagcagaaguc

SEQ ID NO: 794729 - RNA, 19 nt, Homo sapiens
  misc_RNA (1)...(19): siRNA sense strand
cuucaaguaccucgaauau

SEQ ID NO: 794730 - RNA, 19 nt, Homo sapiens
  misc_RNA (1)...(19): siRNA sense strand
cuccaugccuggcuugaug

SEQ ID NO: 794731 - RNA, 19 nt, Homo sapiens
  misc_RNA (1)...(19): siRNA sense strand
ccgcaacggcgaagcagaa

SEQ ID NO: 794732 - RNA, 19 nt, Homo sapiens
  misc_RNA (1)...(19): siRNA sense strand
gcuucaaguaccucgaaua

SEQ ID NO: 794733 - RNA, 19 nt, Homo sapiens
  misc_RNA (1)...(19): siRNA sense strand
cuucuucgggcuucaagua

SEQ ID NO: 794734 - RNA, 19 nt, Homo sapiens
  misc_RNA (1)...(19): siRNA sense strand
ggccaggaccgcuaugaca

SEQ ID NO: 794735 - RNA, 19 nt, Homo sapiens
  misc_RNA (1)...(19): siRNA sense strand
ugugcgaccugcccaagau

SEQ ID NO: 794736 - RNA, 19 nt, Homo sapiens
  misc_RNA (1)...(19): siRNA sense strand
cggcgaagcagaagucagu

SEQ ID NO: 794737 - RNA, 19 nt, Homo sapiens
  misc_RNA (1)...(19): siRNA sense strand
gggcuucaaguaccucgaa

SEQ ID NO: 794738 - RNA, 19 nt, Homo sapiens
  misc_RNA (1)...(19): siRNA sense strand
gcuaugacagggccacauc

SEQ ID NO: 794739 - RNA, 19 nt, Homo sapiens
  misc_RNA (1)...(19): siRNA sense strand
gacaucaaaguuaagaaag

SEQ ID NO: 794740 - RNA, 19 nt, Homo sapiens
  misc_RNA (1)...(19): siRNA sense strand
agacaaggcugcaguuuga

SEQ ID NO: 794741 - RNA, 19 nt, Homo sapiens
  misc_RNA (1)...(19): siRNA sense strand
gauuuaaacuuccaugaga

SEQ ID NO: 794742 - RNA, 19 nt, Homo sapiens
  misc_RNA (1)...(19): siRNA sense strand
uaucaggaaugcagaaauu

SEQ ID NO: 794743 - RNA, 19 nt, Homo sapiens
  misc_RNA (1)...(19): siRNA sense strand
gaagaacgcccgugcugaa

SEQ ID NO: 794744 - RNA, 19 nt, Homo sapiens
  misc_RNA (1)...(19): siRNA sense strand
gcagucagauaaugauguu

SEQ ID NO: 794745 - RNA, 19 nt, Homo sapiens
  misc_RNA (1)...(19): siRNA sense strand
gagacuauuucacacaauu

SEQ ID NO: 794746 - RNA, 19 nt, Homo sapiens
  misc_RNA (1)...(19): siRNA sense strand
ggaauacgauaucaggaau

SEQ ID NO: 794747 - RNA, 19 nt, Homo sapiens
  misc_RNA (1)...(19): siRNA sense strand
gggagaggauuuaaacuuc

SEQ ID NO: 794748 - RNA, 19 nt, Homo sapiens
  misc_RNA (1)...(19): siRNA sense strand
gaacgcccgugcugaacaa

SEQ ID NO: 794749 - RNA, 19 nt, Homo sapiens
  misc_RNA (1)...(19): siRNA sense strand
gaaacucgccgugaauuug

SEQ ID NO: 794750 - RNA, 19 nt, Homo sapiens
  misc_RNA (1)...(19): siRNA sense strand
gauaaugauguucggaaua

SEQ ID NO: 794751 - RNA, 19 nt, Homo sapiens
  misc_RNA (1)...(19): siRNA sense strand
gccagaaacucgccgugaa

SEQ ID NO: 794752 - RNA, 19 nt, Homo sapiens
  misc_RNA (1)...(19): siRNA sense strand
gcgccacccugcuguuuga

SEQ ID NO: 794753 - RNA, 19 nt, Homo sapiens
  misc_RNA (1)...(19): siRNA sense strand
gggagacuauuucacacaa

SEQ ID NO: 794754 - RNA, 19 nt, Homo sapiens
  misc_RNA (1)...(19): siRNA sense strand
gaaagcaccaccagaaagg

SEQ ID NO: 794755 - RNA, 19 nt, Homo sapiens
  misc_RNA (1)...(19): siRNA sense strand
guagggcuaucaaugacuu

SEQ ID NO: 794756 - RNA, 19 nt, Homo sapiens
  misc_RNA (1)...(19): siRNA sense strand
ggaaagcaccaccagaaag

SEQ ID NO: 794757 - RNA, 19 nt, Homo sapiens
  misc_RNA (1)...(19): siRNA sense strand
gagacaaggcugcaguuug

SEQ ID NO: 794758 - RNA, 19 nt, Homo sapiens
  misc_RNA (1)...(19): siRNA sense strand
gugcaucugugaaagacuu

SEQ ID NO: 794759 - RNA, 19 nt, Homo sapiens
  misc_RNA (1)...(19): siRNA sense strand
ggagcagcauuugcagaaa

SEQ ID NO: 794760 - RNA, 19 nt, Homo sapiens
  misc_RNA (1)...(19): siRNA sense strand
aaacagagaauggucuuug

SEQ ID NO: 794761 - RNA, 19 nt, Homo sapiens
  misc_RNA (1)...(19): siRNA sense strand
ggagacuauuucacacaau

SEQ ID NO: 794762 - RNA, 19 nt, Homo sapiens
  misc_RNA (1)...(19): siRNA sense strand
ccaagcaccuccagaagcu

SEQ ID NO: 794763 - RNA, 19 nt, Homo sapiens
  misc_RNA (1)...(19): siRNA sense strand
uaauacaggaagucgauaa

SEQ ID NO: 794764 - RNA, 19 nt, Homo sapiens
  misc_RNA (1)...(19): siRNA sense strand
ccaaggagcagcauuugca

SEQ ID NO: 794765 - RNA, 19 nt, Homo sapiens
  misc_RNA (1)...(19): siRNA sense strand
gagcagcauuugcagaaaa

SEQ ID NO: 794766 - RNA, 19 nt, Homo sapiens
  misc_RNA (1)...(19): siRNA sense strand
cagcaaagggaauggaaga

SEQ ID NO: 794767 - RNA, 19 nt, Homo sapiens
  misc_RNA (1)...(19): siRNA sense strand
cccuagcccuuaagaaaga

SEQ ID NO: 794768 - RNA, 19 nt, Homo sapiens
  misc_RNA (1)...(19): siRNA sense strand
gagaggauuuaaacuucca

SEQ ID NO: 794769 - RNA, 19 nt, Homo sapiens
  misc_RNA (1)...(19): siRNA sense strand
gaaauucaugggagaggau

SEQ ID NO: 794770 - RNA, 19 nt, Homo sapiens
  misc_RNA (1)...(19): siRNA sense strand
aaacucgccgugaauuuga

SEQ ID NO: 794771 - RNA, 19 nt, Homo sapiens
  misc_RNA (1)...(19): siRNA sense strand
gacaaaaucaugugcauau

SEQ ID NO: 794772 - RNA, 19 nt, Homo sapiens
  misc_RNA (1)...(19): siRNA sense strand
aaaggcaguuugugcaucu

SEQ ID NO: 794773 - RNA, 19 nt, Homo sapiens
  misc_RNA (1)...(19): siRNA sense strand
auaaugauguucggaauac

SEQ ID NO: 794774 - RNA, 19 nt, Homo sapiens
  misc_RNA (1)...(19): siRNA sense strand
cagccaagcaccuccagaa

SEQ ID NO: 794775 - RNA, 19 nt, Homo sapiens
  misc_RNA (1)...(19): siRNA sense strand
ggauuuaaacuuccaugag

SEQ ID NO: 794776 - RNA, 19 nt, Homo sapiens
  misc_RNA (1)...(19): siRNA sense strand
gauguucggaauacgauau

SEQ ID NO: 794777 - RNA, 19 nt, Homo sapiens
  misc_RNA (1)...(19): siRNA sense strand
agaaacucgccgugaauuu

SEQ ID NO: 794778 - RNA, 19 nt, Homo sapiens
  misc_RNA (1)...(19): siRNA sense strand
ucgagucaguggaaaggaa

SEQ ID NO: 794779 - RNA, 19 nt, Homo sapiens
  misc_RNA (1)...(19): siRNA sense strand
gagccaggccaucgaguca

SEQ ID NO: 794780 - RNA, 19 nt, Homo sapiens
  misc_RNA (1)...(19): siRNA sense strand
gcaguuugugcaucuguga

SEQ ID NO: 794781 - RNA, 19 nt, Homo sapiens
  misc_RNA (1)...(19): siRNA sense strand
cggaauacgauaucaggaa

SEQ ID NO: 794782 - RNA, 19 nt, Homo sapiens
  misc_RNA (1)...(19): siRNA sense strand
gauaucaggaaugcagaaa

SEQ ID NO: 794783 - RNA, 19 nt, Homo sapiens
  misc_RNA (1)...(19): siRNA sense strand
ccagaaacucgccgugaau

SEQ ID NO: 794784 - RNA, 19 nt, Homo sapiens
  misc_RNA (1)...(19): siRNA sense strand
uccaugagaggaagaaauu

SEQ ID NO: 794785 - RNA, 19 nt, Homo sapiens
  misc_RNA (1)...(19): siRNA sense strand
aucaaugacuuccaacaga

SEQ ID NO: 794786 - RNA, 19 nt, Homo sapiens
  misc_RNA (1)...(19): siRNA sense strand
ucuguagggcuaucaauga

SEQ ID NO: 794787 - RNA, 19 nt, Homo sapiens
  misc_RNA (1)...(19): siRNA sense strand
ggacaacuuggccgagauc

SEQ ID NO: 794788 - RNA, 19 nt, Homo sapiens
  misc_RNA (1)...(19): siRNA sense strand
ggcuaucaaugacuuccaa

SEQ ID NO: 794789 - RNA, 19 nt, Homo sapiens
  misc_RNA (1)...(19): siRNA sense strand
cagaaacucgccgugaauu

SEQ ID NO: 794790 - RNA, 19 nt, Homo sapiens
  misc_RNA (1)...(19): siRNA sense strand
agauaaugauguucggaau

SEQ ID NO: 794791 - RNA, 19 nt, Homo sapiens
  misc_RNA (1)...(19): siRNA sense strand
gaagcugaggcuccaggaa

SEQ ID NO: 794792 - RNA, 19 nt, Homo sapiens
  misc_RNA (1)...(19): siRNA sense strand
aggagcagcuggagcagau

SEQ ID NO: 794793 - RNA, 19 nt, Homo sapiens
  misc_RNA (1)...(19): siRNA sense strand
gcaaagggaauggaagaac

SEQ ID NO: 794794 - RNA, 19 nt, Homo sapiens
  misc_RNA (1)...(19): siRNA sense strand
gaauacgauaucaggaaug

SEQ ID NO: 794795 - RNA, 19 nt, Homo sapiens
  misc_RNA (1)...(19): siRNA sense strand
caaaaucaugugcauauug

SEQ ID NO: 794796 - RNA, 19 nt, Homo sapiens
  misc_RNA (1)...(19): siRNA sense strand
ggccaucgagucaguggaa

SEQ ID NO: 794797 - RNA, 19 nt, Homo sapiens
  misc_RNA (1)...(19): siRNA sense strand
gaggcaaaaugacaaaauc

SEQ ID NO: 794798 - RNA, 19 nt, Homo sapiens
  misc_RNA (1)...(19): siRNA sense strand
ugggagaggauuuaaacuu

SEQ ID NO: 794799 - RNA, 19 nt, Homo sapiens
  misc_RNA (1)...(19): siRNA sense strand
uggaaagcaccaccagaaa

SEQ ID NO: 794800 - RNA, 19 nt, Homo sapiens
  misc_RNA (1)...(19): siRNA sense strand
gaacaaaacagagaauggu

SEQ ID NO: 794801 - RNA, 19 nt, Homo sapiens
  misc_RNA (1)...(19): siRNA sense strand
gccaggccaucgagucagu

SEQ ID NO: 794802 - RNA, 19 nt, Homo sapiens
  misc_RNA (1)...(19): siRNA sense strand
caccagaaaggcaguuugu

SEQ ID NO: 794803 - RNA, 19 nt, Homo sapiens
  misc_RNA (1)...(19): siRNA sense strand
caugggagaggauuuaaac

SEQ ID NO: 794804 - RNA, 19 nt, Homo sapiens
  misc_RNA (1)...(19): siRNA sense strand
uggccaaggagcagcauuu

SEQ ID NO: 794805 - RNA, 19 nt, Homo sapiens
  misc_RNA (1)...(19): siRNA sense strand
gcaagaacaagaggacaac

SEQ ID NO: 794806 - RNA, 19 nt, Homo sapiens
  misc_RNA (1)...(19): siRNA sense strand
cgagucaguggaaaggaaa

SEQ ID NO: 794807 - RNA, 19 nt, Homo sapiens
  misc_RNA (1)...(19): siRNA sense strand
aaucaugugcauauuggaa

SEQ ID NO: 794808 - RNA, 19 nt, Homo sapiens
  misc_RNA (1)...(19): siRNA sense strand
aaaaucaugugcauauugg

SEQ ID NO: 794809 - RNA, 19 nt, Homo sapiens
  misc_RNA (1)...(19): siRNA sense strand
cacgggagacuauuucaca

SEQ ID NO: 794810 - RNA, 19 nt, Homo sapiens
  misc_RNA (1)...(19): siRNA sense strand
caaauuggcucuucgcaaa

SEQ ID NO: 794811 - RNA, 19 nt, Homo sapiens
  misc_RNA (1)...(19): siRNA sense strand
ccagaagacuccaguugua

SEQ ID NO: 794812 - RNA, 19 nt, Homo sapiens
  misc_RNA (1)...(19): siRNA sense strand
gagaugauguccuggcaaa

SEQ ID NO: 794813 - RNA, 19 nt, Homo sapiens
  misc_RNA (1)...(19): siRNA sense strand
gaaccuugcuucucauauc

SEQ ID NO: 794814 - RNA, 19 nt, Homo sapiens
  misc_RNA (1)...(19): siRNA sense strand
gcucuucgcuugaaucugu

SEQ ID NO: 794815 - RNA, 19 nt, Homo sapiens
  misc_RNA (1)...(19): siRNA sense strand
ggaaauugaacagcgauua

SEQ ID NO: 794816 - RNA, 19 nt, Homo sapiens
  misc_RNA (1)...(19): siRNA sense strand
acucaaagcagccaacuua

SEQ ID NO: 794817 - RNA, 19 nt, Homo sapiens
  misc_RNA (1)...(19): siRNA sense strand
ucaagcagcugagggauga

SEQ ID NO: 794818 - RNA, 19 nt, Homo sapiens
  misc_RNA (1)...(19): siRNA sense strand
gcagucaaguucuucuguu

SEQ ID NO: 794819 - RNA, 19 nt, Homo sapiens
  misc_RNA (1)...(19): siRNA sense strand
caacauugcauacuugaau

SEQ ID NO: 794820 - RNA, 19 nt, Homo sapiens
  misc_RNA (1)...(19): siRNA sense strand
ccacaacacccaacaugaa

SEQ ID NO: 794821 - RNA, 19 nt, Homo sapiens
  misc_RNA (1)...(19): siRNA sense strand
cgacugguccuguuaaaga

SEQ ID NO: 794822 - RNA, 19 nt, Homo sapiens
  misc_RNA (1)...(19): siRNA sense strand
agagucagcuacagaaaga

SEQ ID NO: 794823 - RNA, 19 nt, Homo sapiens
  misc_RNA (1)...(19): siRNA sense strand
gcaaagaaaacaucaauga

SEQ ID NO: 794824 - RNA, 19 nt, Homo sapiens
  misc_RNA (1)...(19): siRNA sense strand
uaaaccuccugcucccuua

SEQ ID NO: 794825 - RNA, 19 nt, Homo sapiens
  misc_RNA (1)...(19): siRNA sense strand
ugaaucccgccaucaauua

SEQ ID NO: 794826 - RNA, 19 nt, Homo sapiens
  misc_RNA (1)...(19): siRNA sense strand
gcuccaugcuuucaaacuu

SEQ ID NO: 794827 - RNA, 19 nt, Homo sapiens
  misc_RNA (1)...(19): siRNA sense strand
gcaaacagcuggaaaagac

SEQ ID NO: 794828 - RNA, 19 nt, Homo sapiens
  misc_RNA (1)...(19): siRNA sense strand
ggaagaagucguacagagu

SEQ ID NO: 794829 - RNA, 19 nt, Homo sapiens
  misc_RNA (1)...(19): siRNA sense strand
ccagguggccuccuuggua

SEQ ID NO: 794830 - RNA, 19 nt, Homo sapiens
  misc_RNA (1)...(19): siRNA sense strand
aaacuuaacgggaaucuca

SEQ ID NO: 794831 - RNA, 19 nt, Homo sapiens
  misc_RNA (1)...(19): siRNA sense strand
gggaugagcuacgauugga

SEQ ID NO: 794832 - RNA, 19 nt, Homo sapiens
  misc_RNA (1)...(19): siRNA sense strand
gaggagcggcagcagcuua

SEQ ID NO: 794833 - RNA, 19 nt, Homo sapiens
  misc_RNA (1)...(19): siRNA sense strand
ggacagcagggccuaucua

SEQ ID NO: 794834 - RNA, 19 nt, Homo sapiens
  misc_RNA (1)...(19): siRNA sense strand
gcaggaacaggaaauugaa

SEQ ID NO: 794835 - RNA, 19 nt, Homo sapiens
  misc_RNA (1)...(19): siRNA sense strand
ugaggugccacaugaguua

SEQ ID NO: 794836 - RNA, 19 nt, Homo sapiens
  misc_RNA (1)...(19): siRNA sense strand
gccuaagccuggccuugua

SEQ ID NO: 794837 - RNA, 19 nt, Homo sapiens
  misc_RNA (1)...(19): siRNA sense strand
ggaagaaagacucaaagca

SEQ ID NO: 794838 - RNA, 19 nt, Homo sapiens
  misc_RNA (1)...(19): siRNA sense strand
ggaaggccaggcaaagaaa

SEQ ID NO: 794839 - RNA, 19 nt, Homo sapiens
  misc_RNA (1)...(19): siRNA sense strand
gcagccaacuuagagaugu

SEQ ID NO: 794840 - RNA, 19 nt, Homo sapiens
  misc_RNA (1)...(19): siRNA sense strand
caacauccucugccaucua

SEQ ID NO: 794841 - RNA, 19 nt, Homo sapiens
  misc_RNA (1)...(19): siRNA sense strand
aagagaaugugguccagaa

SEQ ID NO: 794842 - RNA, 19 nt, Homo sapiens
  misc_RNA (1)...(19): siRNA sense strand
uuaaagaaacugagacaga

SEQ ID NO: 794843 - RNA, 19 nt, Homo sapiens
  misc_RNA (1)...(19): siRNA sense strand
gucaagggcuaugaagaaa

SEQ ID NO: 794844 - RNA, 19 nt, Homo sapiens
  misc_RNA (1)...(19): siRNA sense strand
caaccgcagucaaguucuu

SEQ ID NO: 794845 - RNA, 19 nt, Homo sapiens
  misc_RNA (1)...(19): siRNA sense strand
gagcuacgauuggaagaag

SEQ ID NO: 794846 - RNA, 19 nt, Homo sapiens
  misc_RNA (1)...(19): siRNA sense strand
caaagcagccaacuuagag

SEQ ID NO: 794847 - RNA, 19 nt, Homo sapiens
  misc_RNA (1)...(19): siRNA sense strand
aaacaagagaccaucauga

SEQ ID NO: 794848 - RNA, 19 nt, Homo sapiens
  misc_RNA (1)...(19): siRNA sense strand
gaaauugaacagcgauuac

SEQ ID NO: 794849 - RNA, 19 nt, Homo sapiens
  misc_RNA (1)...(19): siRNA sense strand
gacagcagggccuaucuaa

SEQ ID NO: 794850 - RNA, 19 nt, Homo sapiens
  misc_RNA (1)...(19): siRNA sense strand
guucuucuguuccauguca

SEQ ID NO: 794851 - RNA, 19 nt, Homo sapiens
  misc_RNA (1)...(19): siRNA sense strand
gagaaugugguccagaaga

SEQ ID NO: 794852 - RNA, 19 nt, Homo sapiens
  misc_RNA (1)...(19): siRNA sense strand
ugucaacauugcauacuug

SEQ ID NO: 794853 - RNA, 19 nt, Homo sapiens
  misc_RNA (1)...(19): siRNA sense strand
gacugguccuguuaaagaa

SEQ ID NO: 794854 - RNA, 19 nt, Homo sapiens
  misc_RNA (1)...(19): siRNA sense strand
augguaagauucuauguga

SEQ ID NO: 794855 - RNA, 19 nt, Homo sapiens
  misc_RNA (1)...(19): siRNA sense strand
ucaccagacaucauuguuu

SEQ ID NO: 794856 - RNA, 19 nt, Homo sapiens
  misc_RNA (1)...(19): siRNA sense strand
ccucugccaucuauaugaa

SEQ ID NO: 794857 - RNA, 19 nt, Homo sapiens
  misc_RNA (1)...(19): siRNA sense strand
ucaaagcagccaacuuaga

SEQ ID NO: 794858 - RNA, 19 nt, Homo sapiens
  misc_RNA (1)...(19): siRNA sense strand
ccagagcgaggaaggcuaa

SEQ ID NO: 794859 - RNA, 19 nt, Homo sapiens
  misc_RNA (1)...(19): siRNA sense strand
cagguggccuccuugguau

SEQ ID NO: 794860 - RNA, 19 nt, Homo sapiens
  misc_RNA (1)...(19): siRNA sense strand
auaugaaccuugcuucuca

SEQ ID NO: 794861 - RNA, 19 nt, Homo sapiens
  misc_RNA (1)...(19): siRNA sense strand
ugucaagggcuaugaagaa

SEQ ID NO: 794862 - RNA, 19 nt, Homo sapiens
  misc_RNA (1)...(19): siRNA sense strand
uaugccaggugucaacauu

SEQ ID NO: 794863 - RNA, 19 nt, Homo sapiens
  misc_RNA (1)...(19): siRNA sense strand
gggaaucucaggccucaug

SEQ ID NO: 794864 - RNA, 19 nt, Homo sapiens
  misc_RNA (1)...(19): siRNA sense strand
ggauggcaguggugucaag

SEQ ID NO: 794865 - RNA, 19 nt, Homo sapiens
  misc_RNA (1)...(19): siRNA sense strand
cuucauuucuugccuagug

SEQ ID NO: 794866 - RNA, 19 nt, Homo sapiens
  misc_RNA (1)...(19): siRNA sense strand
ccugcucccuuacuucauu

SEQ ID NO: 794867 - RNA, 19 nt, Homo sapiens
  misc_RNA (1)...(19): siRNA sense strand
gacugaugcugccaacuca

SEQ ID NO: 794868 - RNA, 19 nt, Homo sapiens
  misc_RNA (1)...(19): siRNA sense strand
gaaucccgccaucaauuau

SEQ ID NO: 794869 - RNA, 19 nt, Homo sapiens
  misc_RNA (1)...(19): siRNA sense strand
agacuccaguuguacagaa

SEQ ID NO: 794870 - RNA, 19 nt, Homo sapiens
  misc_RNA (1)...(19): siRNA sense strand
cagaugagcgagaugaugu

SEQ ID NO: 794871 - RNA, 19 nt, Homo sapiens
  misc_RNA (1)...(19): siRNA sense strand
ggccauggaacgucugaaa

SEQ ID NO: 794872 - RNA, 19 nt, Homo sapiens
  misc_RNA (1)...(19): siRNA sense strand
gcaaagcgacucaaaaugg

SEQ ID NO: 794873 - RNA, 19 nt, Homo sapiens
  misc_RNA (1)...(19): siRNA sense strand
gcugagggaugagcuacga

SEQ ID NO: 794874 - RNA, 19 nt, Homo sapiens
  misc_RNA (1)...(19): siRNA sense strand
caccagacaucauuguuuu

SEQ ID NO: 794875 - RNA, 19 nt, Homo sapiens
  misc_RNA (1)...(19): siRNA sense strand
cuaacucccucaccagaca

SEQ ID NO: 794876 - RNA, 19 nt, Homo sapiens
  misc_RNA (1)...(19): siRNA sense strand
caucaguggacagaaauaa

SEQ ID NO: 794877 - RNA, 19 nt, Homo sapiens
  misc_RNA (1)...(19): siRNA sense strand
cuccaugcuuucaaacuuu

SEQ ID NO: 794878 - RNA, 19 nt, Homo sapiens
  misc_RNA (1)...(19): siRNA sense strand
uaaacaagagaccaucaug

SEQ ID NO: 794879 - RNA, 19 nt, Homo sapiens
  misc_RNA (1)...(19): siRNA sense strand
guugaacccuuuguaugug

SEQ ID NO: 794880 - RNA, 19 nt, Homo sapiens
  misc_RNA (1)...(19): siRNA sense strand
caaaagcugugccucacuu

SEQ ID NO: 794881 - RNA, 19 nt, Homo sapiens
  misc_RNA (1)...(19): siRNA sense strand
ucccuuacuucauuucuug

SEQ ID NO: 794882 - RNA, 19 nt, Homo sapiens
  misc_RNA (1)...(19): siRNA sense strand
gagcuuggacccagcagau

SEQ ID NO: 794883 - RNA, 19 nt, Homo sapiens
  misc_RNA (1)...(19): siRNA sense strand
gauagaaugacagaagaug

SEQ ID NO: 794884 - RNA, 19 nt, Homo sapiens
  misc_RNA (1)...(19): siRNA sense strand
gacagagucagcuacagaa

SEQ ID NO: 794885 - RNA, 19 nt, Homo sapiens
  misc_RNA (1)...(19): siRNA sense strand
gcagaugagcgagaugaug

SEQ ID NO: 794886 - RNA, 19 nt, Homo sapiens
  misc_RNA (1)...(19): siRNA sense strand
ccaauagcgaguucaucua

SEQ ID NO: 794887 - RNA, 19 nt, Homo sapiens
  misc_RNA (1)...(19): siRNA sense strand
cgacagcgugaauaccuuu

SEQ ID NO: 794888 - RNA, 19 nt, Homo sapiens
  misc_RNA (1)...(19): siRNA sense strand
cgaguucaucuacauggua

SEQ ID NO: 794889 - RNA, 19 nt, Homo sapiens
  misc_RNA (1)...(19): siRNA sense strand
agacagagucagcuacaga

SEQ ID NO: 794890 - RNA, 19 nt, Homo sapiens
  misc_RNA (1)...(19): siRNA sense strand
gugaauaccuuuuagacau

SEQ ID NO: 794891 - RNA, 19 nt, Homo sapiens
  misc_RNA (1)...(19): siRNA sense strand
caaagcgacucaaaaugga

SEQ ID NO: 794892 - RNA, 19 nt, Homo sapiens
  misc_RNA (1)...(19): siRNA sense strand
gccaauagcgaguucaucu

SEQ ID NO: 794893 - RNA, 19 nt, Homo sapiens
  misc_RNA (1)...(19): siRNA sense strand
cagcagggccuaucuaagc

SEQ ID NO: 794894 - RNA, 19 nt, Homo sapiens
  misc_RNA (1)...(19): siRNA sense strand
augaugagccuguggauau

SEQ ID NO: 794895 - RNA, 19 nt, Homo sapiens
  misc_RNA (1)...(19): siRNA sense strand
gcagaccgacagcgugaau

SEQ ID NO: 794896 - RNA, 19 nt, Homo sapiens
  misc_RNA (1)...(19): siRNA sense strand
ccagcuguguccaguguca

SEQ ID NO: 794897 - RNA, 19 nt, Homo sapiens
  misc_RNA (1)...(19): siRNA sense strand
gaagucguacagaguguca

SEQ ID NO: 794898 - RNA, 19 nt, Homo sapiens
  misc_RNA (1)...(19): siRNA sense strand
caugguaggcuuggaagaa

SEQ ID NO: 794899 - RNA, 19 nt, Homo sapiens
  misc_RNA (1)...(19): siRNA sense strand
cagggacggugaacagagu

SEQ ID NO: 794900 - RNA, 19 nt, Homo sapiens
  misc_RNA (1)...(19): siRNA sense strand
cagucaaguucuucuguuc

SEQ ID NO: 794901 - RNA, 19 nt, Homo sapiens
  misc_RNA (1)...(19): siRNA sense strand
gagcggcagcagcuuauca

SEQ ID NO: 794902 - RNA, 19 nt, Homo sapiens
  misc_RNA (1)...(19): siRNA sense strand
cacaugaguuacccaccaa

SEQ ID NO: 794903 - RNA, 19 nt, Homo sapiens
  misc_RNA (1)...(19): siRNA sense strand
aacauccucugccaucuau

SEQ ID NO: 794904 - RNA, 19 nt, Homo sapiens
  misc_RNA (1)...(19): siRNA sense strand
cauccucugccaucuauau

SEQ ID NO: 794905 - RNA, 19 nt, Homo sapiens
  misc_RNA (1)...(19): siRNA sense strand
gugucaacauugcauacuu

SEQ ID NO: 794906 - RNA, 19 nt, Homo sapiens
  misc_RNA (1)...(19): siRNA sense strand
gcuuggacccagcagauga

SEQ ID NO: 794907 - RNA, 19 nt, Homo sapiens
  misc_RNA (1)...(19): siRNA sense strand
acaagagaccaucaugaga

SEQ ID NO: 794908 - RNA, 19 nt, Homo sapiens
  misc_RNA (1)...(19): siRNA sense strand
gauucuaugugagcagugu

SEQ ID NO: 794909 - RNA, 19 nt, Homo sapiens
  misc_RNA (1)...(19): siRNA sense strand
caauagcgaguucaucuac

SEQ ID NO: 794910 - RNA, 19 nt, Homo sapiens
  misc_RNA (1)...(19): siRNA sense strand
gcgaauccauugccucuuu

SEQ ID NO: 794911 - RNA, 19 nt, Homo sapiens
  misc_RNA (1)...(19): siRNA sense strand
gggccagccugcaguuuga

SEQ ID NO: 794912 - RNA, 19 nt, Homo sapiens
  misc_RNA (1)...(19): siRNA sense strand
ugaacgagcagggacauua

SEQ ID NO: 794913 - RNA, 19 nt, Homo sapiens
  misc_RNA (1)...(19): siRNA sense strand
ugacuacauuggcaucuau

SEQ ID NO: 794914 - RNA, 19 nt, Homo sapiens
  misc_RNA (1)...(19): siRNA sense strand
gcacagcuccccagucuuu

SEQ ID NO: 794915 - RNA, 19 nt, Homo sapiens
  misc_RNA (1)...(19): siRNA sense strand
gggugugggugacuacauu

SEQ ID NO: 794916 - RNA, 19 nt, Homo sapiens
  misc_RNA (1)...(19): siRNA sense strand
aguuugaucuggugaagaa

SEQ ID NO: 794917 - RNA, 19 nt, Homo sapiens
  misc_RNA (1)...(19): siRNA sense strand
gaacgagcagggacauuac

SEQ ID NO: 794918 - RNA, 19 nt, Homo sapiens
  misc_RNA (1)...(19): siRNA sense strand
gcaguuugaucuggugaag

SEQ ID NO: 794919 - RNA, 19 nt, Homo sapiens
  misc_RNA (1)...(19): siRNA sense strand
gugacuacauuggcaucua

SEQ ID NO: 794920 - RNA, 19 nt, Homo sapiens
  misc_RNA (1)...(19): siRNA sense strand
ggugaagaauggcgaaucc

SEQ ID NO: 794921 - RNA, 19 nt, Homo sapiens
  misc_RNA (1)...(19): siRNA sense strand
cgaauccauugccucuuuc

SEQ ID NO: 794922 - RNA, 19 nt, Homo sapiens
  misc_RNA (1)...(19): siRNA sense strand
ccacuggacgacaacaaga

SEQ ID NO: 794923 - RNA, 19 nt, Homo sapiens
  misc_RNA (1)...(19): siRNA sense strand
gcuggagccugaggaccaa

SEQ ID NO: 794924 - RNA, 19 nt, Homo sapiens
  misc_RNA (1)...(19): siRNA sense strand
cagcaccuucuccggauuu

SEQ ID NO: 794925 - RNA, 19 nt, Homo sapiens
  misc_RNA (1)...(19): siRNA sense strand
ccggauuucugguguacuc

SEQ ID NO: 794926 - RNA, 19 nt, Homo sapiens
  misc_RNA (1)...(19): siRNA sense strand
gaaauuaacaagcugcuaa

SEQ ID NO: 794927 - RNA, 19 nt, Homo sapiens
  misc_RNA (1)...(19): siRNA sense strand
gaaaagaagucccaggaaa

SEQ ID NO: 794928 - RNA, 19 nt, Homo sapiens
  misc_RNA (1)...(19): siRNA sense strand
guacugaacugccuaaagc

SEQ ID NO: 794929 - RNA, 19 nt, Homo sapiens
  misc_RNA (1)...(19): siRNA sense strand
gcugggagguccugauuau

SEQ ID NO: 794930 - RNA, 19 nt, Homo sapiens
  misc_RNA (1)...(19): siRNA sense strand
ugaccugaaugaugaaauu

SEQ ID NO: 794931 - RNA, 19 nt, Homo sapiens
  misc_RNA (1)...(19): siRNA sense strand
ugaagaugaugguguuauu

SEQ ID NO: 794932 - RNA, 19 nt, Homo sapiens
  misc_RNA (1)...(19): siRNA sense strand
guacuaugguuaccuagau

SEQ ID NO: 794933 - RNA, 19 nt, Homo sapiens
  misc_RNA (1)...(19): siRNA sense strand
uuagagagcuguuugaaaa

SEQ ID NO: 794934 - RNA, 19 nt, Homo sapiens
  misc_RNA (1)...(19): siRNA sense strand
ugaguacuaugguuaccua

SEQ ID NO: 794935 - RNA, 19 nt, Homo sapiens
  misc_RNA (1)...(19): siRNA sense strand
ucagaaugcugguuuaggu

SEQ ID NO: 794936 - RNA, 19 nt, Homo sapiens
  misc_RNA (1)...(19): siRNA sense strand
gaacaggaauaugaaaaga

SEQ ID NO: 794937 - RNA, 19 nt, Homo sapiens
  misc_RNA (1)...(19): siRNA sense strand
gaagaugaugguguuauug

SEQ ID NO: 794938 - RNA, 19 nt, Homo sapiens
  misc_RNA (1)...(19): siRNA sense strand
gaaugcugguuuaggugaa

SEQ ID NO: 794939 - RNA, 19 nt, Homo sapiens
  misc_RNA (1)...(19): siRNA sense strand
uuaccuagaugaagaugau

SEQ ID NO: 794940 - RNA, 19 nt, Homo sapiens
  misc_RNA (1)...(19): siRNA sense strand
cuaaaaugcuggaucauga

SEQ ID NO: 794941 - RNA, 19 nt, Homo sapiens
  misc_RNA (1)...(19): siRNA sense strand
cgacagaucauuggagaga

SEQ ID NO: 794942 - RNA, 19 nt, Homo sapiens
  misc_RNA (1)...(19): siRNA sense strand
gaacuccuccagaaguaug

SEQ ID NO: 794943 - RNA, 19 nt, Homo sapiens
  misc_RNA (1)...(19): siRNA sense strand
gagcugggagguccugauu

SEQ ID NO: 794944 - RNA, 19 nt, Homo sapiens
  misc_RNA (1)...(19): siRNA sense strand
gaaggcuccugggguauua

SEQ ID NO: 794945 - RNA, 19 nt, Homo sapiens
  misc_RNA (1)...(19): siRNA sense strand
ggaagaggaggaagagauc

SEQ ID NO: 794946 - RNA, 19 nt, Homo sapiens
  misc_RNA (1)...(19): siRNA sense strand
agaugaagaugaugguguu

SEQ ID NO: 794947 - RNA, 19 nt, Homo sapiens
  misc_RNA (1)...(19): siRNA sense strand
gggagguccugauuaugga

SEQ ID NO: 794948 - RNA, 19 nt, Homo sapiens
  misc_RNA (1)...(19): siRNA sense strand
gaccugaaugaugaaauua

SEQ ID NO: 794949 - RNA, 19 nt, Homo sapiens
  misc_RNA (1)...(19): siRNA sense strand
ucaugaaggcaaucgauuu

SEQ ID NO: 794950 - RNA, 19 nt, Homo sapiens
  misc_RNA (1)...(19): siRNA sense strand
agauuugccugguguuaga

SEQ ID NO: 794951 - RNA, 19 nt, Homo sapiens
  misc_RNA (1)...(19): siRNA sense strand
ggaaggcagccaggagaaa

SEQ ID NO: 794952 - RNA, 19 nt, Homo sapiens
  misc_RNA (1)...(19): siRNA sense strand
ggaggagucggacgaggaa

SEQ ID NO: 794953 - RNA, 19 nt, Homo sapiens
  misc_RNA (1)...(19): siRNA sense strand
ggaggaagagaucaacauc

SEQ ID NO: 794954 - RNA, 19 nt, Homo sapiens
  misc_RNA (1)...(19): siRNA sense strand
gagaaguggagacgacaga

SEQ ID NO: 794955 - RNA, 19 nt, Homo sapiens
  misc_RNA (1)...(19): siRNA sense strand
ugacggccuuagcaagauu

SEQ ID NO: 794956 - RNA, 19 nt, Homo sapiens
  misc_RNA (1)...(19): siRNA sense strand
guuagagagcuguuugaaa

SEQ ID NO: 794957 - RNA, 19 nt, Homo sapiens
  misc_RNA (1)...(19): siRNA sense strand
aaagauuugccugguguua

SEQ ID NO: 794958 - RNA, 19 nt, Homo sapiens
  misc_RNA (1)...(19): siRNA sense strand
caugacggccuuagcaaga

SEQ ID NO: 794959 - RNA, 19 nt, Homo sapiens
  misc_RNA (1)...(19): siRNA sense strand
uucgugaccugaaugauga

SEQ ID NO: 794960 - RNA, 19 nt, Homo sapiens
  misc_RNA (1)...(19): siRNA sense strand
gaaguggagacgacagauc

SEQ ID NO: 794961 - RNA, 19 nt, Homo sapiens
  misc_RNA (1)...(19): siRNA sense strand
ugaaggcaaucgauuuuga

SEQ ID NO: 794962 - RNA, 19 nt, Homo sapiens
  misc_RNA (1)...(19): siRNA sense strand
gaaggcagccaggagaaag

SEQ ID NO: 794963 - RNA, 19 nt, Homo sapiens
  misc_RNA (1)...(19): siRNA sense strand
ggagacgacagaucauugg

SEQ ID NO: 794964 - RNA, 19 nt, Homo sapiens
  misc_RNA (1)...(19): siRNA sense strand
gaugaagaugaugguguua

SEQ ID NO: 794965 - RNA, 19 nt, Homo sapiens
  misc_RNA (1)...(19): siRNA sense strand
acacugggagguccggaua

SEQ ID NO: 794966 - RNA, 19 nt, Homo sapiens
  misc_RNA (1)...(19): siRNA sense strand
ggaaaaguuggcccuaaaa

SEQ ID NO: 794967 - RNA, 19 nt, Homo sapiens
  misc_RNA (1)...(19): siRNA sense strand
gacacgugcugagcucaug

SEQ ID NO: 794968 - RNA, 19 nt, Homo sapiens
  misc_RNA (1)...(19): siRNA sense strand
aaugcuggaucaugaagga

SEQ ID NO: 794969 - RNA, 19 nt, Homo sapiens
  misc_RNA (1)...(19): siRNA sense strand
gagccgaguuaguggaaaa

SEQ ID NO: 794970 - RNA, 19 nt, Homo sapiens
  misc_RNA (1)...(19): siRNA sense strand
gagguuacaaguacuuugg

SEQ ID NO: 794971 - RNA, 19 nt, Homo sapiens
  misc_RNA (1)...(19): siRNA sense strand
gguguuagagagcuguuug

SEQ ID NO: 794972 - RNA, 19 nt, Homo sapiens
  misc_RNA (1)...(19): siRNA sense strand
gaagaggaggaagagauca

SEQ ID NO: 794973 - RNA, 19 nt, Homo sapiens
  misc_RNA (1)...(19): siRNA sense strand
ccugaaugaugaaauuaac

SEQ ID NO: 794974 - RNA, 19 nt, Homo sapiens
  misc_RNA (1)...(19): siRNA sense strand
gacgacagccagcagaagu

SEQ ID NO: 794975 - RNA, 19 nt, Homo sapiens
  misc_RNA (1)...(19): siRNA sense strand
caaucgauuuugaguacua

SEQ ID NO: 794976 - RNA, 19 nt, Homo sapiens
  misc_RNA (1)...(19): siRNA sense strand
ggaacgaagacccuuucug

SEQ ID NO: 794977 - RNA, 19 nt, Homo sapiens
  misc_RNA (1)...(19): siRNA sense strand
gaaaaguuggcccuaaaau

SEQ ID NO: 794978 - RNA, 19 nt, Homo sapiens
  misc_RNA (1)...(19): siRNA sense strand
ugguuuaggugaauuucga

SEQ ID NO: 794979 - RNA, 19 nt, Homo sapiens
  misc_RNA (1)...(19): siRNA sense strand
ggaggaagaggaggaagag

SEQ ID NO: 794980 - RNA, 19 nt, Homo sapiens
  misc_RNA (1)...(19): siRNA sense strand
ggaggaggaagaggaggaa

SEQ ID NO: 794981 - RNA, 19 nt, Homo sapiens
  misc_RNA (1)...(19): siRNA sense strand
acugggagguccggauaaa

SEQ ID NO: 794982 - RNA, 19 nt, Homo sapiens
  misc_RNA (1)...(19): siRNA sense strand
gcucaugaaggcaaucgau

SEQ ID NO: 794983 - RNA, 19 nt, Homo sapiens
  misc_RNA (1)...(19): siRNA sense strand
ccucgcagcaagagauuga

SEQ ID NO: 794984 - RNA, 19 nt, Homo sapiens
  misc_RNA (1)...(19): siRNA sense strand
augguuaccuagaugaaga

SEQ ID NO: 794985 - RNA, 19 nt, Homo sapiens
  misc_RNA (1)...(19): siRNA sense strand
ggaaaagaagucccaggaa

SEQ ID NO: 794986 - RNA, 19 nt, Homo sapiens
  misc_RNA (1)...(19): siRNA sense strand
ggaagaggaggaggaagag

SEQ ID NO: 794987 - RNA, 19 nt, Homo sapiens
  misc_RNA (1)...(19): siRNA sense strand
ggcaaucgauuuugaguac

SEQ ID NO: 794988 - RNA, 19 nt, Homo sapiens
  misc_RNA (1)...(19): siRNA sense strand
uggaaaaguuggcccuaaa

SEQ ID NO: 794989 - RNA, 19 nt, Homo sapiens
  misc_RNA (1)...(19): siRNA sense strand
ggaacuccuccagaaguau

SEQ ID NO: 794990 - RNA, 19 nt, Homo sapiens
  misc_RNA (1)...(19): siRNA sense strand
aggaagaggaggaggaaga

SEQ ID NO: 794991 - RNA, 19 nt, Homo sapiens
  misc_RNA (1)...(19): siRNA sense strand
aaaggaagaggaggaggaa

SEQ ID NO: 794992 - RNA, 19 nt, Homo sapiens
  misc_RNA (1)...(19): siRNA sense strand
cuuuggaacaggaauauga

SEQ ID NO: 794993 - RNA, 19 nt, Homo sapiens
  misc_RNA (1)...(19): siRNA sense strand
gcccuaaaaugcuggauca

SEQ ID NO: 794994 - RNA, 19 nt, Homo sapiens
  misc_RNA (1)...(19): siRNA sense strand
aagaugaugguguuauugu

SEQ ID NO: 794995 - RNA, 19 nt, Homo sapiens
  misc_RNA (1)...(19): siRNA sense strand
agaugaugguguuauugug

SEQ ID NO: 794996 - RNA, 19 nt, Homo sapiens
  misc_RNA (1)...(19): siRNA sense strand
gggagguccggauaaagga

SEQ ID NO: 794997 - RNA, 19 nt, Homo sapiens
  misc_RNA (1)...(19): siRNA sense strand
ccacauuucuguaucauuu

SEQ ID NO: 794998 - RNA, 19 nt, Homo sapiens
  misc_RNA (1)...(19): siRNA sense strand
caagaacguuuccauguuu

SEQ ID NO: 794999 - RNA, 19 nt, Homo sapiens
  misc_RNA (1)...(19): siRNA sense strand
gauaugaccuccuacuuca

SEQ ID NO: 795000 - RNA, 19 nt, Homo sapiens
  misc_RNA (1)...(19): siRNA sense strand
gaaacaaugucacagagau

SEQ ID NO: 795001 - RNA, 19 nt, Homo sapiens
  misc_RNA (1)...(19): siRNA sense strand
ucaaguaugucaacaaguu

SEQ ID NO: 795002 - RNA, 19 nt, Homo sapiens
  misc_RNA (1)...(19): siRNA sense strand
agaaggaucugaccacauu

SEQ ID NO: 795003 - RNA, 19 nt, Homo sapiens
  misc_RNA (1)...(19): siRNA sense strand
aaccacagcuggccacuua

SEQ ID NO: 795004 - RNA, 19 nt, Homo sapiens
  misc_RNA (1)...(19): siRNA sense strand
gaacaucuuuggcgucauc

SEQ ID NO: 795005 - RNA, 19 nt, Homo sapiens
  misc_RNA (1)...(19): siRNA sense strand
ggaaagcagucccuucauc

SEQ ID NO: 795006 - RNA, 19 nt, Homo sapiens
  misc_RNA (1)...(19): siRNA sense strand
ggaccacccuuaugucuuc

SEQ ID NO: 795007 - RNA, 19 nt, Homo sapiens
  misc_RNA (1)...(19): siRNA sense strand
ccaagaacguuuccauguu

SEQ ID NO: 795008 - RNA, 19 nt, Homo sapiens
  misc_RNA (1)...(19): siRNA sense strand
caucucagcuuacaccuau

SEQ ID NO: 795009 - RNA, 19 nt, Homo sapiens
  misc_RNA (1)...(19): siRNA sense strand
gaucauggcugguucuaac

SEQ ID NO: 795010 - RNA, 19 nt, Homo sapiens
  misc_RNA (1)...(19): siRNA sense strand
ccaguggccucaucaaaga

SEQ ID NO: 795011 - RNA, 19 nt, Homo sapiens
  misc_RNA (1)...(19): siRNA sense strand
ccuuaugucuucagugaua

SEQ ID NO: 795012 - RNA, 19 nt, Homo sapiens
  misc_RNA (1)...(19): siRNA sense strand
gagauuggcauccucauug

SEQ ID NO: 795013 - RNA, 19 nt, Homo sapiens
  misc_RNA (1)...(19): siRNA sense strand
ggacucaucuacaaguaca

SEQ ID NO: 795014 - RNA, 19 nt, Homo sapiens
  misc_RNA (1)...(19): siRNA sense strand
gaaagcagucccuucauca

SEQ ID NO: 795015 - RNA, 19 nt, Homo sapiens
  misc_RNA (1)...(19): siRNA sense strand
gcucauugcuggacucauc

SEQ ID NO: 795016 - RNA, 19 nt, Homo sapiens
  misc_RNA (1)...(19): siRNA sense strand
ucagugauaugaccuccua

SEQ ID NO: 795017 - RNA, 19 nt, Homo sapiens
  misc_RNA (1)...(19): siRNA sense strand
ucaaacagaugcauuuaac

SEQ ID NO: 795018 - RNA, 19 nt, Homo sapiens
  misc_RNA (1)...(19): siRNA sense strand
ucgaaauccugcuggcuua

SEQ ID NO: 795019 - RNA, 19 nt, Homo sapiens
  misc_RNA (1)...(19): siRNA sense strand
gaucugaccacauuucugu

SEQ ID NO: 795020 - RNA, 19 nt, Homo sapiens
  misc_RNA (1)...(19): siRNA sense strand
caaccgcaauggugaugaa

SEQ ID NO: 795021 - RNA, 19 nt, Homo sapiens
  misc_RNA (1)...(19): siRNA sense strand
gaaguagggagcaugaaga

SEQ ID NO: 795022 - RNA, 19 nt, Homo sapiens
  misc_RNA (1)...(19): siRNA sense strand
agagcgacaucucagcuua

SEQ ID NO: 795023 - RNA, 19 nt, Homo sapiens
  misc_RNA (1)...(19): siRNA sense strand
gcacuccuaucgacaugga

SEQ ID NO: 795024 - RNA, 19 nt, Homo sapiens
  misc_RNA (1)...(19): siRNA sense strand
ggagacagauccggagaag

SEQ ID NO: 795025 - RNA, 19 nt, Homo sapiens
  misc_RNA (1)...(19): siRNA sense strand
acaagucgguggcagagaa

SEQ ID NO: 795026 - RNA, 19 nt, Homo sapiens
  misc_RNA (1)...(19): siRNA sense strand
cagcuccguuguucuguuu

SEQ ID NO: 795027 - RNA, 19 nt, Homo sapiens
  misc_RNA (1)...(19): siRNA sense strand
ggugaucuccuccaacuug

SEQ ID NO: 795028 - RNA, 19 nt, Homo sapiens
  misc_RNA (1)...(19): siRNA sense strand
ggaagggccugaccaucgu

SEQ ID NO: 795029 - RNA, 19 nt, Homo sapiens
  misc_RNA (1)...(19): siRNA sense strand
ggacaaguuuggcgaagcu

SEQ ID NO: 795030 - RNA, 19 nt, Homo sapiens
  misc_RNA (1)...(19): siRNA sense strand
ggccacgcuuucgauauua

SEQ ID NO: 795031 - RNA, 19 nt, Homo sapiens
  misc_RNA (1)...(19): siRNA sense strand
cgacauggaccacccuuau

SEQ ID NO: 795032 - RNA, 19 nt, Homo sapiens
  misc_RNA (1)...(19): siRNA sense strand
gaaagaauccagccaacac

SEQ ID NO: 795033 - RNA, 19 nt, Homo sapiens
  misc_RNA (1)...(19): siRNA sense strand
gcugguggcuccuacuaca

SEQ ID NO: 795034 - RNA, 19 nt, Homo sapiens
  misc_RNA (1)...(19): siRNA sense strand
cagaugcauuuaaccaaga

SEQ ID NO: 795035 - RNA, 19 nt, Homo sapiens
  misc_RNA (1)...(19): siRNA sense strand
caacgccaccugugaugaa

SEQ ID NO: 795036 - RNA, 19 nt, Homo sapiens
  misc_RNA (1)...(19): siRNA sense strand
ggaguaugauggcaagaac

SEQ ID NO: 795037 - RNA, 19 nt, Homo sapiens
  misc_RNA (1)...(19): siRNA sense strand
ggaggccacgcuuucgaua

SEQ ID NO: 795038 - RNA, 19 nt, Homo sapiens
  misc_RNA (1)...(19): siRNA sense strand
caucagacguggaggaacu

SEQ ID NO: 795039 - RNA, 19 nt, Homo sapiens
  misc_RNA (1)...(19): siRNA sense strand
cgaucugccuccuggguaa

SEQ ID NO: 795040 - RNA, 19 nt, Homo sapiens
  misc_RNA (1)...(19): siRNA sense strand
gcgaggucaucaccaucua

SEQ ID NO: 795041 - RNA, 19 nt, Homo sapiens
  misc_RNA (1)...(19): siRNA sense strand
cagcuuacaccuaugagaa

SEQ ID NO: 795042 - RNA, 19 nt, Homo sapiens
  misc_RNA (1)...(19): siRNA sense strand
ugaccacauuucuguauca

SEQ ID NO: 795043 - RNA, 19 nt, Homo sapiens
  misc_RNA (1)...(19): siRNA sense strand
ccagauggaugacaauagc

SEQ ID NO: 795044 - RNA, 19 nt, Homo sapiens
  misc_RNA (1)...(19): siRNA sense strand
aggccacgcuuucgauauu

SEQ ID NO: 795045 - RNA, 19 nt, Homo sapiens
  misc_RNA (1)...(19): siRNA sense strand
ccaguccugucuccucuga

SEQ ID NO: 795046 - RNA, 19 nt, Homo sapiens
  misc_RNA (1)...(19): siRNA sense strand
agacagauccggagaaggu

SEQ ID NO: 795047 - RNA, 19 nt, Homo sapiens
  misc_RNA (1)...(19): siRNA sense strand
ggaaguagggagcaugaag

SEQ ID NO: 795048 - RNA, 19 nt, Homo sapiens
  misc_RNA (1)...(19): siRNA sense strand
ggaagugcaagaugcguau

SEQ ID NO: 795049 - RNA, 19 nt, Homo sapiens
  misc_RNA (1)...(19): siRNA sense strand
guuugugggugucaaguau

SEQ ID NO: 795050 - RNA, 19 nt, Homo sapiens
  misc_RNA (1)...(19): siRNA sense strand
cagagaagggaaaggagua

SEQ ID NO: 795051 - RNA, 19 nt, Homo sapiens
  misc_RNA (1)...(19): siRNA sense strand
guucccagauccucaaaca

SEQ ID NO: 795052 - RNA, 19 nt, Homo sapiens
  misc_RNA (1)...(19): siRNA sense strand
cacaaggucuggcggaagu

SEQ ID NO: 795053 - RNA, 19 nt, Homo sapiens
  misc_RNA (1)...(19): siRNA sense strand
ccacccaacuucccgaucu

SEQ ID NO: 795054 - RNA, 19 nt, Homo sapiens
  misc_RNA (1)...(19): siRNA sense strand
caacuggaggccacgcuuu

SEQ ID NO: 795055 - RNA, 19 nt, Homo sapiens
  misc_RNA (1)...(19): siRNA sense strand
gagcgggagauccagagua

SEQ ID NO: 795056 - RNA, 19 nt, Homo sapiens
  misc_RNA (1)...(19): siRNA sense strand
caaguaugucaacaaguuu

SEQ ID NO: 795057 - RNA, 19 nt, Homo sapiens
  misc_RNA (1)...(19): siRNA sense strand
agagacggcuggugacagu

SEQ ID NO: 795058 - RNA, 19 nt, Homo sapiens
  misc_RNA (1)...(19): siRNA sense strand
ggagcagcguucccagauc

SEQ ID NO: 795059 - RNA, 19 nt, Homo sapiens
  misc_RNA (1)...(19): siRNA sense strand
agaagacguuggugaugga

SEQ ID NO: 795060 - RNA, 19 nt, Homo sapiens
  misc_RNA (1)...(19): siRNA sense strand
ggaccaagaccagaaugug

SEQ ID NO: 795061 - RNA, 19 nt, Homo sapiens
  misc_RNA (1)...(19): siRNA sense strand
caccugugaugaauacuuc

SEQ ID NO: 795062 - RNA, 19 nt, Homo sapiens
  misc_RNA (1)...(19): siRNA sense strand
gaggucaucgugaagaaau

SEQ ID NO: 795063 - RNA, 19 nt, Homo sapiens
  misc_RNA (1)...(19): siRNA sense strand
ucaaggacuucuucagcau

SEQ ID NO: 795064 - RNA, 19 nt, Homo sapiens
  misc_RNA (1)...(19): siRNA sense strand
gaguaucacagaugaguca

SEQ ID NO: 795065 - RNA, 19 nt, Homo sapiens
  misc_RNA (1)...(19): siRNA sense strand
acccuuaugucuucaguga

SEQ ID NO: 795066 - RNA, 19 nt, Homo sapiens
  misc_RNA (1)...(19): siRNA sense strand
gggcauugcaggcaucaug

SEQ ID NO: 795067 - RNA, 19 nt, Homo sapiens
  misc_RNA (1)...(19): siRNA sense strand
uacaucagcuccguuguuc

SEQ ID NO: 795068 - RNA, 19 nt, Homo sapiens
  misc_RNA (1)...(19): siRNA sense strand
ugucaaguaugucaacaag

SEQ ID NO: 795069 - RNA, 19 nt, Homo sapiens
  misc_RNA (1)...(19): siRNA sense strand
ccugcuggcuuaccucuuc

SEQ ID NO: 795070 - RNA, 19 nt, Homo sapiens
  misc_RNA (1)...(19): siRNA sense strand
gaagagacggcuggugaca

SEQ ID NO: 795071 - RNA, 19 nt, Homo sapiens
  misc_RNA (1)...(19): siRNA sense strand
gauccagaguaucacagau

SEQ ID NO: 795072 - RNA, 19 nt, Homo sapiens
  misc_RNA (1)...(19): siRNA sense strand
aaacagaugcauuuaacca

SEQ ID NO: 795073 - RNA, 19 nt, Homo sapiens
  misc_RNA (1)...(19): siRNA sense strand
ccucaaacagaugcauuua

SEQ ID NO: 795074 - RNA, 19 nt, Homo sapiens
  misc_RNA (1)...(19): siRNA sense strand
gcuuacaccuaugagaaga

SEQ ID NO: 795075 - RNA, 19 nt, Homo sapiens
  misc_RNA (1)...(19): siRNA sense strand
uugcuggacucaucuacaa

SEQ ID NO: 795076 - RNA, 19 nt, Homo sapiens
  misc_RNA (1)...(19): siRNA sense strand
ugauaugaccuccuacuuc

SEQ ID NO: 795077 - RNA, 19 nt, Homo sapiens
  misc_RNA (1)...(19): siRNA sense strand
cuacaucagcuccguuguu

SEQ ID NO: 795078 - RNA, 19 nt, Homo sapiens
  misc_RNA (1)...(19): siRNA sense strand
aaggacuucuucagcauga

SEQ ID NO: 795079 - RNA, 19 nt, Homo sapiens
  misc_RNA (1)...(19): siRNA sense strand
gaggcucaauccggagaaa

SEQ ID NO: 795080 - RNA, 19 nt, Homo sapiens
  misc_RNA (1)...(19): siRNA sense strand
gcaccuucaugggcgugua

SEQ ID NO: 795081 - RNA, 19 nt, Homo sapiens
  misc_RNA (1)...(19): siRNA sense strand
guggugaucuccuccaacu

SEQ ID NO: 795082 - RNA, 19 nt, Homo sapiens
  misc_RNA (1)...(19): siRNA sense strand
ggcucgcuaugcccucuua

SEQ ID NO: 795083 - RNA, 19 nt, Homo sapiens
  misc_RNA (1)...(19): siRNA sense strand
ucuauguucuuccugaugu

SEQ ID NO: 795084 - RNA, 19 nt, Homo sapiens
  misc_RNA (1)...(19): siRNA sense strand
cgaaacaaugucacagaga

SEQ ID NO: 795085 - RNA, 19 nt, Homo sapiens
  misc_RNA (1)...(19): siRNA sense strand
agaagggaaaggaguauga

SEQ ID NO: 795086 - RNA, 19 nt, Homo sapiens
  misc_RNA (1)...(19): siRNA sense strand
uccagaguaucacagauga

SEQ ID NO: 795087 - RNA, 19 nt, Homo sapiens
  misc_RNA (1)...(19): siRNA sense strand
cgggagauccagaguauca

SEQ ID NO: 795088 - RNA, 19 nt, Homo sapiens
  misc_RNA (1)...(19): siRNA sense strand
ucccagauccucaaacaga

SEQ ID NO: 795089 - RNA, 19 nt, Homo sapiens
  misc_RNA (1)...(19): siRNA sense strand
caucgacguuugguggauu

SEQ ID NO: 795090 - RNA, 19 nt, Homo sapiens
  misc_RNA (1)...(19): siRNA sense strand
gagggcagcaucgacguuu

SEQ ID NO: 795091 - RNA, 19 nt, Homo sapiens
  misc_RNA (1)...(19): siRNA sense strand
gaagggaaaggaguaugau

SEQ ID NO: 795092 - RNA, 19 nt, Homo sapiens
  misc_RNA (1)...(19): siRNA sense strand
gaauacuucacccgaaaca

SEQ ID NO: 795093 - RNA, 19 nt, Homo sapiens
  misc_RNA (1)...(19): siRNA sense strand
gggcaucaaggacuucuuc

SEQ ID NO: 795094 - RNA, 19 nt, Homo sapiens
  misc_RNA (1)...(19): siRNA sense strand
ugagggcaccuuucuggaa

SEQ ID NO: 795095 - RNA, 19 nt, Homo sapiens
  misc_RNA (1)...(19): siRNA sense strand
gcuacauguuugugaaucu

SEQ ID NO: 795096 - RNA, 19 nt, Homo sapiens
  misc_RNA (1)...(19): siRNA sense strand
gccugaacgucccagaaga

SEQ ID NO: 795097 - RNA, 19 nt, Homo sapiens
  misc_RNA (1)...(19): siRNA sense strand
gaacgaauauuucaacuug

SEQ ID NO: 795098 - RNA, 19 nt, Homo sapiens
  misc_RNA (1)...(19): siRNA sense strand
ggaaagccauugaaauuga

SEQ ID NO: 795099 - RNA, 19 nt, Homo sapiens
  misc_RNA (1)...(19): siRNA sense strand
ucaaauaacucgagaauca

SEQ ID NO: 795100 - RNA, 19 nt, Homo sapiens
  misc_RNA (1)...(19): siRNA sense strand
gagcagcacuccaagauug

SEQ ID NO: 795101 - RNA, 19 nt, Homo sapiens
  misc_RNA (1)...(19): siRNA sense strand
ggaagaaauucaagaacuu

SEQ ID NO: 795102 - RNA, 19 nt, Homo sapiens
  misc_RNA (1)...(19): siRNA sense strand
ggaacaagaacgaauauuu

SEQ ID NO: 795103 - RNA, 19 nt, Homo sapiens
  misc_RNA (1)...(19): siRNA sense strand
gaggaaagccauugaaauu

SEQ ID NO: 795104 - RNA, 19 nt, Homo sapiens
  misc_RNA (1)...(19): siRNA sense strand
gaacaagaacgaauauuuc

SEQ ID NO: 795105 - RNA, 19 nt, Homo sapiens
  misc_RNA (1)...(19): siRNA sense strand
guacaucucuggaagaaca

SEQ ID NO: 795106 - RNA, 19 nt, Homo sapiens
  misc_RNA (1)...(19): siRNA sense strand
agagagauccuucaaauaa

SEQ ID NO: 795107 - RNA, 19 nt, Homo sapiens
  misc_RNA (1)...(19): siRNA sense strand
ugagagagauccuucaaau

SEQ ID NO: 795108 - RNA, 19 nt, Homo sapiens
  misc_RNA (1)...(19): siRNA sense strand
gaaacaguaucaggaagaa

SEQ ID NO: 795109 - RNA, 19 nt, Homo sapiens
  misc_RNA (1)...(19): siRNA sense strand
uagaagccaugaaacagua

SEQ ID NO: 795110 - RNA, 19 nt, Homo sapiens
  misc_RNA (1)...(19): siRNA sense strand
gaugaugcgucggaaagua

SEQ ID NO: 795111 - RNA, 19 nt, Homo sapiens
  misc_RNA (1)...(19): siRNA sense strand
guugaaagauuaagagauc

SEQ ID NO: 795112 - RNA, 19 nt, Homo sapiens
  misc_RNA (1)...(19): siRNA sense strand
ggaagcaaaucagaaugaa

SEQ ID NO: 795113 - RNA, 19 nt, Homo sapiens
  misc_RNA (1)...(19): siRNA sense strand
gaaggcacuuggaagcaaa

SEQ ID NO: 795114 - RNA, 19 nt, Homo sapiens
  misc_RNA (1)...(19): siRNA sense strand
ucagagaguugcaacaaga

SEQ ID NO: 795115 - RNA, 19 nt, Homo sapiens
  misc_RNA (1)...(19): siRNA sense strand
gagagagauccuucaaaua

SEQ ID NO: 795116 - RNA, 19 nt, Homo sapiens
  misc_RNA (1)...(19): siRNA sense strand
caaggaacaagaacgaaua

SEQ ID NO: 795117 - RNA, 19 nt, Homo sapiens
  misc_RNA (1)...(19): siRNA sense strand
gaugauccggguauaauaa

SEQ ID NO: 795118 - RNA, 19 nt, Homo sapiens
  misc_RNA (1)...(19): siRNA sense strand
cuaaagcucuuguugaaag

SEQ ID NO: 795119 - RNA, 19 nt, Homo sapiens
  misc_RNA (1)...(19): siRNA sense strand
uaacaaguccgaaggauuc

SEQ ID NO: 795120 - RNA, 19 nt, Homo sapiens
  misc_RNA (1)...(19): siRNA sense strand
gaacugcaagcacauguug

SEQ ID NO: 795121 - RNA, 19 nt, Homo sapiens
  misc_RNA (1)...(19): siRNA sense strand
ugaaauggcagcaguaaug

SEQ ID NO: 795122 - RNA, 19 nt, Homo sapiens
  misc_RNA (1)...(19): siRNA sense strand
guacuucuuugucagcauu

SEQ ID NO: 795123 - RNA, 19 nt, Homo sapiens
  misc_RNA (1)...(19): siRNA sense strand
gaaauggcagcaguaauga

SEQ ID NO: 795124 - RNA, 19 nt, Homo sapiens
  misc_RNA (1)...(19): siRNA sense strand
aacaaaggcuugagagaga

SEQ ID NO: 795125 - RNA, 19 nt, Homo sapiens
  misc_RNA (1)...(19): siRNA sense strand
gcaaguaccgagaacaaau

SEQ ID NO: 795126 - RNA, 19 nt, Homo sapiens
  misc_RNA (1)...(19): siRNA sense strand
ggagagaaggcacuuggaa

SEQ ID NO: 795127 - RNA, 19 nt, Homo sapiens
  misc_RNA (1)...(19): siRNA sense strand
gaccaacagugauuugagu

SEQ ID NO: 795128 - RNA, 19 nt, Homo sapiens
  misc_RNA (1)...(19): siRNA sense strand
gcgaguagaagccaugaaa

SEQ ID NO: 795129 - RNA, 19 nt, Homo sapiens
  misc_RNA (1)...(19): siRNA sense strand
cgcuaaagcucuuguugaa

SEQ ID NO: 795130 - RNA, 19 nt, Homo sapiens
  misc_RNA (1)...(19): siRNA sense strand
gagcaaguaccgagaacaa

SEQ ID NO: 795131 - RNA, 19 nt, Homo sapiens
  misc_RNA (1)...(19): siRNA sense strand
gcacauguugaccagauaa

SEQ ID NO: 795132 - RNA, 19 nt, Homo sapiens
  misc_RNA (1)...(19): siRNA sense strand
caacauggacuggagagaa

SEQ ID NO: 795133 - RNA, 19 nt, Homo sapiens
  misc_RNA (1)...(19): siRNA sense strand
ccacgguccacguuaguua

SEQ ID NO: 795134 - RNA, 19 nt, Homo sapiens
  misc_RNA (1)...(19): siRNA sense strand
gagagauccuucaaauaac

SEQ ID NO: 795135 - RNA, 19 nt, Homo sapiens
  misc_RNA (1)...(19): siRNA sense strand
gcaaggaacaagaacgaau

SEQ ID NO: 795136 - RNA, 19 nt, Homo sapiens
  misc_RNA (1)...(19): siRNA sense strand
guaacaaguccgaaggauu

SEQ ID NO: 795137 - RNA, 19 nt, Homo sapiens
  misc_RNA (1)...(19): siRNA sense strand
gaguagaagccaugaaaca

SEQ ID NO: 795138 - RNA, 19 nt, Homo sapiens
  misc_RNA (1)...(19): siRNA sense strand
gauccggguauaauaauga

SEQ ID NO: 795139 - RNA, 19 nt, Homo sapiens
  misc_RNA (1)...(19): siRNA sense strand
uuaaugaagucgcgagaca

SEQ ID NO: 795140 - RNA, 19 nt, Homo sapiens
  misc_RNA (1)...(19): siRNA sense strand
gaaagccauugaaauugac

SEQ ID NO: 795141 - RNA, 19 nt, Homo sapiens
  misc_RNA (1)...(19): siRNA sense strand
caagaaaacagacaaauca

SEQ ID NO: 795142 - RNA, 19 nt, Homo sapiens
  misc_RNA (1)...(19): siRNA sense strand
aaccacagcucucaacaag

SEQ ID NO: 795143 - RNA, 19 nt, Homo sapiens
  misc_RNA (1)...(19): siRNA sense strand
ucaugacgaugcagcagaa

SEQ ID NO: 795144 - RNA, 19 nt, Homo sapiens
  misc_RNA (1)...(19): siRNA sense strand
caugguacaucguaacaag

SEQ ID NO: 795145 - RNA, 19 nt, Homo sapiens
  misc_RNA (1)...(19): siRNA sense strand
auuaagagaucaugacgau

SEQ ID NO: 795146 - RNA, 19 nt, Homo sapiens
  misc_RNA (1)...(19): siRNA sense strand
ucaggaagaaauucaagaa

SEQ ID NO: 795147 - RNA, 19 nt, Homo sapiens
  misc_RNA (1)...(19): siRNA sense strand
gauuugagucugaggaaga

SEQ ID NO: 795148 - RNA, 19 nt, Homo sapiens
  misc_RNA (1)...(19): siRNA sense strand
ccacguuaguuaugggaau

SEQ ID NO: 795149 - RNA, 19 nt, Homo sapiens
  misc_RNA (1)...(19): siRNA sense strand
gaaccuaaggaaagaugau

SEQ ID NO: 795150 - RNA, 19 nt, Homo sapiens
  misc_RNA (1)...(19): siRNA sense strand
caagaacgaauauuucaac

SEQ ID NO: 795151 - RNA, 19 nt, Homo sapiens
  misc_RNA (1)...(19): siRNA sense strand
caaguaccgagaacaaaug

SEQ ID NO: 795152 - RNA, 19 nt, Homo sapiens
  misc_RNA (1)...(19): siRNA sense strand
cagucggccuuggaacuua

SEQ ID NO: 795153 - RNA, 19 nt, Homo sapiens
  misc_RNA (1)...(19): siRNA sense strand
caugaaacaguaucaggaa

SEQ ID NO: 795154 - RNA, 19 nt, Homo sapiens
  misc_RNA (1)...(19): siRNA sense strand
ugaaacaguaucaggaaga

SEQ ID NO: 795155 - RNA, 19 nt, Homo sapiens
  misc_RNA (1)...(19): siRNA sense strand
guagaagccaugaaacagu

SEQ ID NO: 795156 - RNA, 19 nt, Homo sapiens
  misc_RNA (1)...(19): siRNA sense strand
acagacaaaucagagaguu

SEQ ID NO: 795157 - RNA, 19 nt, Homo sapiens
  misc_RNA (1)...(19): siRNA sense strand
aaagaugauccggguauaa

SEQ ID NO: 795158 - RNA, 19 nt, Homo sapiens
  misc_RNA (1)...(19): siRNA sense strand
gaaagauuaagagaucaug

SEQ ID NO: 795159 - RNA, 19 nt, Homo sapiens
  misc_RNA (1)...(19): siRNA sense strand
ugaggaaagccauugaaau

SEQ ID NO: 795160 - RNA, 19 nt, Homo sapiens
  misc_RNA (1)...(19): siRNA sense strand
aagcacauguugaccagau

SEQ ID NO: 795161 - RNA, 19 nt, Homo sapiens
  misc_RNA (1)...(19): siRNA sense strand
agaaggcacuuggaagcaa

SEQ ID NO: 795162 - RNA, 19 nt, Homo sapiens
  misc_RNA (1)...(19): siRNA sense strand
uaaaagagcagcacuccaa

SEQ ID NO: 795163 - RNA, 19 nt, Homo sapiens
  misc_RNA (1)...(19): siRNA sense strand
caaagaauuacguacaucu

SEQ ID NO: 795164 - RNA, 19 nt, Homo sapiens
  misc_RNA (1)...(19): siRNA sense strand
ggccuuggaacuuauaaug

SEQ ID NO: 795165 - RNA, 19 nt, Homo sapiens
  misc_RNA (1)...(19): siRNA sense strand
aggaagaaauucaagaacu

SEQ ID NO: 795166 - RNA, 19 nt, Homo sapiens
  misc_RNA (1)...(19): siRNA sense strand
gcuaaagcucuuguugaaa

SEQ ID NO: 795167 - RNA, 19 nt, Homo sapiens
  misc_RNA (1)...(19): siRNA sense strand
gcaaaccacagcucucaac

SEQ ID NO: 795168 - RNA, 19 nt, Homo sapiens
  misc_RNA (1)...(19): siRNA sense strand
uggaagcaaaucagaauga

SEQ ID NO: 795169 - RNA, 19 nt, Homo sapiens
  misc_RNA (1)...(19): siRNA sense strand
acaaagaauuacguacauc

SEQ ID NO: 795170 - RNA, 19 nt, Homo sapiens
  misc_RNA (1)...(19): siRNA sense strand
agagauccuucaaauaacu

SEQ ID NO: 795171 - RNA, 19 nt, Homo sapiens
  misc_RNA (1)...(19): siRNA sense strand
uggcagcaguaaugaggaa

SEQ ID NO: 795172 - RNA, 19 nt, Homo sapiens
  misc_RNA (1)...(19): siRNA sense strand
cuccaagauugacauggua

SEQ ID NO: 795173 - RNA, 19 nt, Homo sapiens
  misc_RNA (1)...(19): siRNA sense strand
ccuuggaacuuauaaugag

SEQ ID NO: 795174 - RNA, 19 nt, Homo sapiens
  misc_RNA (1)...(19): siRNA sense strand
cauugaaauugacgagcaa

SEQ ID NO: 795175 - RNA, 19 nt, Homo sapiens
  misc_RNA (1)...(19): siRNA sense strand
gcaacaagaaaacaaagaa

SEQ ID NO: 795176 - RNA, 19 nt, Homo sapiens
  misc_RNA (1)...(19): siRNA sense strand
aacagugauuugagucuga

SEQ ID NO: 795177 - RNA, 19 nt, Homo sapiens
  misc_RNA (1)...(19): siRNA sense strand
gcacuuggaagcaaaucag

SEQ ID NO: 795178 - RNA, 19 nt, Homo sapiens
  misc_RNA (1)...(19): siRNA sense strand
gcaagaaaacagacaaauc

SEQ ID NO: 795179 - RNA, 19 nt, Homo sapiens
  misc_RNA (1)...(19): siRNA sense strand
gaccagauaacugaaaugg

SEQ ID NO: 795180 - RNA, 19 nt, Homo sapiens
  misc_RNA (1)...(19): siRNA sense strand
gccuuggaacuuauaauga

SEQ ID NO: 795181 - RNA, 19 nt, Homo sapiens
  misc_RNA (1)...(19): siRNA sense strand
aaaucagaaugaacugcaa

SEQ ID NO: 795182 - RNA, 19 nt, Homo sapiens
  misc_RNA (1)...(19): siRNA sense strand
agaugauccggguauaaua

SEQ ID NO: 795183 - RNA, 19 nt, Homo sapiens
  misc_RNA (1)...(19): siRNA sense strand
aaucagagaguugcaacaa

SEQ ID NO: 795184 - RNA, 19 nt, Homo sapiens
  misc_RNA (1)...(19): siRNA sense strand
uuagugaccaacagugauu

SEQ ID NO: 795185 - RNA, 19 nt, Homo sapiens
  misc_RNA (1)...(19): siRNA sense strand
cauuagugaccaacaguga

SEQ ID NO: 795186 - RNA, 19 nt, Homo sapiens
  misc_RNA (1)...(19): siRNA sense strand
cagcauuagugaccaacag

SEQ ID NO: 795187 - RNA, 19 nt, Homo sapiens
  misc_RNA (1)...(19): siRNA sense strand
gagaaggcacuuggaagca

SEQ ID NO: 795188 - RNA, 19 nt, Homo sapiens
  misc_RNA (1)...(19): siRNA sense strand
aaaccacagcucucaacaa

SEQ ID NO: 795189 - RNA, 19 nt, Homo sapiens
  misc_RNA (1)...(19): siRNA sense strand
uuaugggaauccagcaaga

SEQ ID NO: 795190 - RNA, 19 nt, Homo sapiens
  misc_RNA (1)...(19): siRNA sense strand
aagcaaaucagaaugaacu

SEQ ID NO: 795191 - RNA, 19 nt, Homo sapiens
  misc_RNA (1)...(19): siRNA sense strand
aacauggacuggagagaag

SEQ ID NO: 795192 - RNA, 19 nt, Homo sapiens
  misc_RNA (1)...(19): siRNA sense strand
gcacuccaagauugacaug

SEQ ID NO: 795193 - RNA, 19 nt, Homo sapiens
  misc_RNA (1)...(19): siRNA sense strand
gacaugguacaucguaaca

SEQ ID NO: 795194 - RNA, 19 nt, Homo sapiens
  misc_RNA (1)...(19): siRNA sense strand
caaauaacucgagaaucau

SEQ ID NO: 795195 - RNA, 19 nt, Homo sapiens
  misc_RNA (1)...(19): siRNA sense strand
gacgcuaaagcucuuguug

SEQ ID NO: 795196 - RNA, 19 nt, Homo sapiens
  misc_RNA (1)...(19): siRNA sense strand
ugacgaugcagcagaaucu

SEQ ID NO: 795197 - RNA, 19 nt, Homo sapiens
  misc_RNA (1)...(19): siRNA sense strand
caacaucauuggaacauua

SEQ ID NO: 795198 - RNA, 19 nt, Homo sapiens
  misc_RNA (1)...(19): siRNA sense strand
gauaaacagucugaacuua

SEQ ID NO: 795199 - RNA, 19 nt, Homo sapiens
  misc_RNA (1)...(19): siRNA sense strand
gcacaugcuuacuaugaua

SEQ ID NO: 795200 - RNA, 19 nt, Homo sapiens
  misc_RNA (1)...(19): siRNA sense strand
guaaagagaugguuagucu

SEQ ID NO: 795201 - RNA, 19 nt, Homo sapiens
  misc_RNA (1)...(19): siRNA sense strand
ggaaauagaaguugagcua

SEQ ID NO: 795202 - RNA, 19 nt, Homo sapiens
  misc_RNA (1)...(19): siRNA sense strand
agaaagagcuggaaaauuu

SEQ ID NO: 795203 - RNA, 19 nt, Homo sapiens
  misc_RNA (1)...(19): siRNA sense strand
gcaaggugcuggaucaaau

SEQ ID NO: 795204 - RNA, 19 nt, Homo sapiens
  misc_RNA (1)...(19): siRNA sense strand
uaggagagcuugaucuuga

SEQ ID NO: 795205 - RNA, 19 nt, Homo sapiens
  misc_RNA (1)...(19): siRNA sense strand
cagaagcacuauauaauca

SEQ ID NO: 795206 - RNA, 19 nt, Homo sapiens
  misc_RNA (1)...(19): siRNA sense strand
gcuaagggauccugauuca

SEQ ID NO: 795207 - RNA, 19 nt, Homo sapiens
  misc_RNA (1)...(19): siRNA sense strand
uaaacagucugaacuuaga

SEQ ID NO: 795208 - RNA, 19 nt, Homo sapiens
  misc_RNA (1)...(19): siRNA sense strand
gagaagugccagagcuuua

SEQ ID NO: 795209 - RNA, 19 nt, Homo sapiens
  misc_RNA (1)...(19): siRNA sense strand
caucagaagcacuauauaa

SEQ ID NO: 795210 - RNA, 19 nt, Homo sapiens
  misc_RNA (1)...(19): siRNA sense strand
gaagaagccagagaacuuu

SEQ ID NO: 795211 - RNA, 19 nt, Homo sapiens
  misc_RNA (1)...(19): siRNA sense strand
gaaacuuacugaacaagag

SEQ ID NO: 795212 - RNA, 19 nt, Homo sapiens
  misc_RNA (1)...(19): siRNA sense strand
acagacagauccaguuuga

SEQ ID NO: 795213 - RNA, 19 nt, Homo sapiens
  misc_RNA (1)...(19): siRNA sense strand
ugccagagcuuuaucauca

SEQ ID NO: 795214 - RNA, 19 nt, Homo sapiens
  misc_RNA (1)...(19): siRNA sense strand
caacagacagauccaguuu

SEQ ID NO: 795215 - RNA, 19 nt, Homo sapiens
  misc_RNA (1)...(19): siRNA sense strand
guacuaccagcucuucuua

SEQ ID NO: 795216 - RNA, 19 nt, Homo sapiens
  misc_RNA (1)...(19): siRNA sense strand
gaagagaaacuuacugaac

SEQ ID NO: 795217 - RNA, 19 nt, Homo sapiens
  misc_RNA (1)...(19): siRNA sense strand
uaaggugcuugcauucuuu

SEQ ID NO: 795218 - RNA, 19 nt, Homo sapiens
  misc_RNA (1)...(19): siRNA sense strand
caagauggcccugacuuaa

SEQ ID NO: 795219 - RNA, 19 nt, Homo sapiens
  misc_RNA (1)...(19): siRNA sense strand
gagagacccaaauaaagua

SEQ ID NO: 795220 - RNA, 19 nt, Homo sapiens
  misc_RNA (1)...(19): siRNA sense strand
agacagauccaguuugaaa

SEQ ID NO: 795221 - RNA, 19 nt, Homo sapiens
  misc_RNA (1)...(19): siRNA sense strand
aagagaaacuuacugaaca

SEQ ID NO: 795222 - RNA, 19 nt, Homo sapiens
  misc_RNA (1)...(19): siRNA sense strand
ccaagauggcccugacuua

SEQ ID NO: 795223 - RNA, 19 nt, Homo sapiens
  misc_RNA (1)...(19): siRNA sense strand
gugcuugcauucuuugaaa

SEQ ID NO: 795224 - RNA, 19 nt, Homo sapiens
  misc_RNA (1)...(19): siRNA sense strand
aaauagaaguugagcuaga

SEQ ID NO: 795225 - RNA, 19 nt, Homo sapiens
  misc_RNA (1)...(19): siRNA sense strand
ugaagaagccagagaacuu

SEQ ID NO: 795226 - RNA, 19 nt, Homo sapiens
  misc_RNA (1)...(19): siRNA sense strand
gauccugauucacacauug

SEQ ID NO: 795227 - RNA, 19 nt, Homo sapiens
  misc_RNA (1)...(19): siRNA sense strand
uuaccuagcucaagucuac

SEQ ID NO: 795228 - RNA, 19 nt, Homo sapiens
  misc_RNA (1)...(19): siRNA sense strand
gcauccaggcgcagaauaa

SEQ ID NO: 795229 - RNA, 19 nt, Homo sapiens
  misc_RNA (1)...(19): siRNA sense strand
ccagagcuuuaucaucaaa

SEQ ID NO: 795230 - RNA, 19 nt, Homo sapiens
  misc_RNA (1)...(19): siRNA sense strand
gaagcacuauauaaucagu

SEQ ID NO: 795231 - RNA, 19 nt, Homo sapiens
  misc_RNA (1)...(19): siRNA sense strand
uauauuaccuagcucaagu

SEQ ID NO: 795232 - RNA, 19 nt, Homo sapiens
  misc_RNA (1)...(19): siRNA sense strand
ucuuucagauugaugguua

SEQ ID NO: 795233 - RNA, 19 nt, Homo sapiens
  misc_RNA (1)...(19): siRNA sense strand
cacaaugccuaccauccua

SEQ ID NO: 795234 - RNA, 19 nt, Homo sapiens
  misc_RNA (1)...(19): siRNA sense strand
gaaggcugcucacuauugc

SEQ ID NO: 795235 - RNA, 19 nt, Homo sapiens
  misc_RNA (1)...(19): siRNA sense strand
agaauaaccuggguaucuu

SEQ ID NO: 795236 - RNA, 19 nt, Homo sapiens
  misc_RNA (1)...(19): siRNA sense strand
gcccugccauguuagcuaa

SEQ ID NO: 795237 - RNA, 19 nt, Homo sapiens
  misc_RNA (1)...(19): siRNA sense strand
ggagagacggugcaagaug

SEQ ID NO: 795238 - RNA, 19 nt, Homo sapiens
  misc_RNA (1)...(19): siRNA sense strand
ggucagcacuaugucuuug

SEQ ID NO: 795239 - RNA, 19 nt, Homo sapiens
  misc_RNA (1)...(19): siRNA sense strand
gcacaggcuuaccuagagu

SEQ ID NO: 795240 - RNA, 19 nt, Homo sapiens
  misc_RNA (1)...(19): siRNA sense strand
gcaacaucauuggaacauu

SEQ ID NO: 795241 - RNA, 19 nt, Homo sapiens
  misc_RNA (1)...(19): siRNA sense strand
ccugagagacccaaauaaa

SEQ ID NO: 795242 - RNA, 19 nt, Homo sapiens
  misc_RNA (1)...(19): siRNA sense strand
ugccaucucugcaguagaa

SEQ ID NO: 795243 - RNA, 19 nt, Homo sapiens
  misc_RNA (1)...(19): siRNA sense strand
gcugcucacuauugccaua

SEQ ID NO: 795244 - RNA, 19 nt, Homo sapiens
  misc_RNA (1)...(19): siRNA sense strand
uaaccuauauuaccuagcu

SEQ ID NO: 795245 - RNA, 19 nt, Homo sapiens
  misc_RNA (1)...(19): siRNA sense strand
caaggugcuggaucaaaua

SEQ ID NO: 795246 - RNA, 19 nt, Homo sapiens
  misc_RNA (1)...(19): siRNA sense strand
uaagggauccugauucaca

SEQ ID NO: 795247 - RNA, 19 nt, Homo sapiens
  misc_RNA (1)...(19): siRNA sense strand
ggagagcuugaucuugaua

SEQ ID NO: 795248 - RNA, 19 nt, Homo sapiens
  misc_RNA (1)...(19): siRNA sense strand
aauagaaguugagcuagaa

SEQ ID NO: 795249 - RNA, 19 nt, Homo sapiens
  misc_RNA (1)...(19): siRNA sense strand
aaccauacaaguccaaaua

SEQ ID NO: 795250 - RNA, 19 nt, Homo sapiens
  misc_RNA (1)...(19): siRNA sense strand
ggaggaaagcauucggaaa

SEQ ID NO: 795251 - RNA, 19 nt, Homo sapiens
  misc_RNA (1)...(19): siRNA sense strand
agucugaacuuagagcuuu

SEQ ID NO: 795252 - RNA, 19 nt, Homo sapiens
  misc_RNA (1)...(19): siRNA sense strand
uuaaggugcuugcauucuu

SEQ ID NO: 795253 - RNA, 19 nt, Homo sapiens
  misc_RNA (1)...(19): siRNA sense strand
gagcuagaacuuaguaaag

SEQ ID NO: 795254 - RNA, 19 nt, Homo sapiens
  misc_RNA (1)...(19): siRNA sense strand
cugcagaucccaagaaaga

SEQ ID NO: 795255 - RNA, 19 nt, Homo sapiens
  misc_RNA (1)...(19): siRNA sense strand
aguauucccugagcauaua

SEQ ID NO: 795256 - RNA, 19 nt, Homo sapiens
  misc_RNA (1)...(19): siRNA sense strand
agagaaacuuacugaacaa

SEQ ID NO: 795257 - RNA, 19 nt, Homo sapiens
  misc_RNA (1)...(19): siRNA sense strand
ccauacaaguccaaauaca

SEQ ID NO: 795258 - RNA, 19 nt, Homo sapiens
  misc_RNA (1)...(19): siRNA sense strand
gaauaaccuggguaucuug

SEQ ID NO: 795259 - RNA, 19 nt, Homo sapiens
  misc_RNA (1)...(19): siRNA sense strand
uuagcuaaguuucgaguug

SEQ ID NO: 795260 - RNA, 19 nt, Homo sapiens
  misc_RNA (1)...(19): siRNA sense strand
ugagagacccaaauaaagu

SEQ ID NO: 795261 - RNA, 19 nt, Homo sapiens
  misc_RNA (1)...(19): siRNA sense strand
uaugauggauuugaagguu

SEQ ID NO: 795262 - RNA, 19 nt, Homo sapiens
  misc_RNA (1)...(19): siRNA sense strand
gaggaaagcauucggaaaa

SEQ ID NO: 795263 - RNA, 19 nt, Homo sapiens
  misc_RNA (1)...(19): siRNA sense strand
gagaaggaaccauacaagu

SEQ ID NO: 795264 - RNA, 19 nt, Homo sapiens
  misc_RNA (1)...(19): siRNA sense strand
gcugcuaccuugucacagu

SEQ ID NO: 795265 - RNA, 19 nt, Homo sapiens
  misc_RNA (1)...(19): siRNA sense strand
ggagaagugccagagcuuu

SEQ ID NO: 795266 - RNA, 19 nt, Homo sapiens
  misc_RNA (1)...(19): siRNA sense strand
ggagaaggaaccauacaag

SEQ ID NO: 795267 - RNA, 19 nt, Homo sapiens
  misc_RNA (1)...(19): siRNA sense strand
aguauuaucuguuggucaa

SEQ ID NO: 795268 - RNA, 19 nt, Homo sapiens
  misc_RNA (1)...(19): siRNA sense strand
agaacuagaugaggaggaa

SEQ ID NO: 795269 - RNA, 19 nt, Homo sapiens
  misc_RNA (1)...(19): siRNA sense strand
caacauaggagagcuugau

SEQ ID NO: 795270 - RNA, 19 nt, Homo sapiens
  misc_RNA (1)...(19): siRNA sense strand
gguaucuuguggucugaaa

SEQ ID NO: 795271 - RNA, 19 nt, Homo sapiens
  misc_RNA (1)...(19): siRNA sense strand
cagauccaguuugaaauug

SEQ ID NO: 795272 - RNA, 19 nt, Homo sapiens
  misc_RNA (1)...(19): siRNA sense strand
gaagaagagaaacuuacug

SEQ ID NO: 795273 - RNA, 19 nt, Homo sapiens
  misc_RNA (1)...(19): siRNA sense strand
gcuagaacuuaguaaagag

SEQ ID NO: 795274 - RNA, 19 nt, Homo sapiens
  misc_RNA (1)...(19): siRNA sense strand
aagaagagaaacuuacuga

SEQ ID NO: 795275 - RNA, 19 nt, Homo sapiens
  misc_RNA (1)...(19): siRNA sense strand
ggauccugauucacacauu

SEQ ID NO: 795276 - RNA, 19 nt, Homo sapiens
  misc_RNA (1)...(19): siRNA sense strand
agaccugaauccacaguau

SEQ ID NO: 795277 - RNA, 19 nt, Homo sapiens
  misc_RNA (1)...(19): siRNA sense strand
cuugagaccuuuagauuuu

SEQ ID NO: 795278 - RNA, 19 nt, Homo sapiens
  misc_RNA (1)...(19): siRNA sense strand
gaagagaaagugagcuacu

SEQ ID NO: 795279 - RNA, 19 nt, Homo sapiens
  misc_RNA (1)...(19): siRNA sense strand
cagaauaaccuggguaucu

SEQ ID NO: 795280 - RNA, 19 nt, Homo sapiens
  misc_RNA (1)...(19): siRNA sense strand
guuugacucucaugcagaa

SEQ ID NO: 795281 - RNA, 19 nt, Homo sapiens
  misc_RNA (1)...(19): siRNA sense strand
ucagaagcacuauauaauc

SEQ ID NO: 795282 - RNA, 19 nt, Homo sapiens
  misc_RNA (1)...(19): siRNA sense strand
acuaccagcucuucuuaga

SEQ ID NO: 795283 - RNA, 19 nt, Homo sapiens
  misc_RNA (1)...(19): siRNA sense strand
uguuuaaggugcuugcauu

SEQ ID NO: 795284 - RNA, 19 nt, Homo sapiens
  misc_RNA (1)...(19): siRNA sense strand
ucacugaccauauugaagu

SEQ ID NO: 795285 - RNA, 19 nt, Homo sapiens
  misc_RNA (1)...(19): siRNA sense strand
ucagauugaugguuauguc

SEQ ID NO: 795286 - RNA, 19 nt, Homo sapiens
  misc_RNA (1)...(19): siRNA sense strand
uagaagagaaagugagcua

SEQ ID NO: 795287 - RNA, 19 nt, Homo sapiens
  misc_RNA (1)...(19): siRNA sense strand
aaagaucucagccacagaa

SEQ ID NO: 795288 - RNA, 19 nt, Homo sapiens
  misc_RNA (1)...(19): siRNA sense strand
agaaggcugcucacuauug

SEQ ID NO: 795289 - RNA, 19 nt, Homo sapiens
  misc_RNA (1)...(19): siRNA sense strand
cauguuagcuaaguuucga

SEQ ID NO: 795290 - RNA, 19 nt, Homo sapiens
  misc_RNA (1)...(19): siRNA sense strand
acagauccaguuugaaauu

SEQ ID NO: 795291 - RNA, 19 nt, Homo sapiens
  misc_RNA (1)...(19): siRNA sense strand
gcaguagaagagaaaguga

SEQ ID NO: 795292 - RNA, 19 nt, Homo sapiens
  misc_RNA (1)...(19): siRNA sense strand
agagcuugaucuugauaaa

SEQ ID NO: 795293 - RNA, 19 nt, Homo sapiens
  misc_RNA (1)...(19): siRNA sense strand
ggugcuggaucaaauacug

SEQ ID NO: 795294 - RNA, 19 nt, Homo sapiens
  misc_RNA (1)...(19): siRNA sense strand
ggaggccaggcacuguuua

SEQ ID NO: 795295 - RNA, 19 nt, Homo sapiens
  misc_RNA (1)...(19): siRNA sense strand
gaaccggugaacuguguga

SEQ ID NO: 795296 - RNA, 19 nt, Homo sapiens
  misc_RNA (1)...(19): siRNA sense strand
gagagauucagaaccaaga

SEQ ID NO: 795297 - RNA, 19 nt, Homo sapiens
  misc_RNA (1)...(19): siRNA sense strand
uaaaucgccuuauucguua

SEQ ID NO: 795298 - RNA, 19 nt, Homo sapiens
  misc_RNA (1)...(19): siRNA sense strand
cgaaugauccuuauguaua

SEQ ID NO: 795299 - RNA, 19 nt, Homo sapiens
  misc_RNA (1)...(19): siRNA sense strand
guaaaucgccuuauucguu

SEQ ID NO: 795300 - RNA, 19 nt, Homo sapiens
  misc_RNA (1)...(19): siRNA sense strand
ggauuaugcugcucaacua

SEQ ID NO: 795301 - RNA, 19 nt, Homo sapiens
  misc_RNA (1)...(19): siRNA sense strand
gguaguggauguauuauuc

SEQ ID NO: 795302 - RNA, 19 nt, Homo sapiens
  misc_RNA (1)...(19): siRNA sense strand
guacuuguguggaucuuaa

SEQ ID NO: 795303 - RNA, 19 nt, Homo sapiens
  misc_RNA (1)...(19): siRNA sense strand
caaagaaggucucccaaag

SEQ ID NO: 795304 - RNA, 19 nt, Homo sapiens
  misc_RNA (1)...(19): siRNA sense strand
gcggaaguauguauucuuu

SEQ ID NO: 795305 - RNA, 19 nt, Homo sapiens
  misc_RNA (1)...(19): siRNA sense strand
gcagagaauucuauaugga

SEQ ID NO: 795306 - RNA, 19 nt, Homo sapiens
  misc_RNA (1)...(19): siRNA sense strand
gaugugugcugaaaucuug

SEQ ID NO: 795307 - RNA, 19 nt, Homo sapiens
  misc_RNA (1)...(19): siRNA sense strand
gcaguccuguucagaauga

SEQ ID NO: 795308 - RNA, 19 nt, Homo sapiens
  misc_RNA (1)...(19): siRNA sense strand
gaccguagcugcacagaca

SEQ ID NO: 795309 - RNA, 19 nt, Homo sapiens
  misc_RNA (1)...(19): siRNA sense strand
guaaugaccagcaaagaaa

SEQ ID NO: 795310 - RNA, 19 nt, Homo sapiens
  misc_RNA (1)...(19): siRNA sense strand
gcucauugcuuccugucua

SEQ ID NO: 795311 - RNA, 19 nt, Homo sapiens
  misc_RNA (1)...(19): siRNA sense strand
ugagugauguucagaaguu

SEQ ID NO: 795312 - RNA, 19 nt, Homo sapiens
  misc_RNA (1)...(19): siRNA sense strand
gaucaucgucugccucuuu

SEQ ID NO: 795313 - RNA, 19 nt, Homo sapiens
  misc_RNA (1)...(19): siRNA sense strand
caggagcugugguaacaua

SEQ ID NO: 795314 - RNA, 19 nt, Homo sapiens
  misc_RNA (1)...(19): siRNA sense strand
gcaaagaaggucucccaaa

SEQ ID NO: 795315 - RNA, 19 nt, Homo sapiens
  misc_RNA (1)...(19): siRNA sense strand
ucagaaguuugcagagaua

SEQ ID NO: 795316 - RNA, 19 nt, Homo sapiens
  misc_RNA (1)...(19): siRNA sense strand
aagaaggucucccaaagaa

SEQ ID NO: 795317 - RNA, 19 nt, Homo sapiens
  misc_RNA (1)...(19): siRNA sense strand
gagcugugguaacauacua

SEQ ID NO: 795318 - RNA, 19 nt, Homo sapiens
  misc_RNA (1)...(19): siRNA sense strand
cgacagcuauggaaauauc

SEQ ID NO: 795319 - RNA, 19 nt, Homo sapiens
  misc_RNA (1)...(19): siRNA sense strand
acagucagcucaaaggaaa

SEQ ID NO: 795320 - RNA, 19 nt, Homo sapiens
  misc_RNA (1)...(19): siRNA sense strand
cuaguucuauccaugauuu

SEQ ID NO: 795321 - RNA, 19 nt, Homo sapiens
  misc_RNA (1)...(19): siRNA sense strand
gggaugggauuuauuugug

SEQ ID NO: 795322 - RNA, 19 nt, Homo sapiens
  misc_RNA (1)...(19): siRNA sense strand
cagcaggacuacacaguau

SEQ ID NO: 795323 - RNA, 19 nt, Homo sapiens
  misc_RNA (1)...(19): siRNA sense strand
caagacuagugucaggaua

SEQ ID NO: 795324 - RNA, 19 nt, Homo sapiens
  misc_RNA (1)...(19): siRNA sense strand
gaccagcaaagaaauuaua

SEQ ID NO: 795325 - RNA, 19 nt, Homo sapiens
  misc_RNA (1)...(19): siRNA sense strand
ccuaaagccuucugaauac

SEQ ID NO: 795326 - RNA, 19 nt, Homo sapiens
  misc_RNA (1)...(19): siRNA sense strand
uugauaaaccggaagauua

SEQ ID NO: 795327 - RNA, 19 nt, Homo sapiens
  misc_RNA (1)...(19): siRNA sense strand
uaugguggcuguaugcaaa

SEQ ID NO: 795328 - RNA, 19 nt, Homo sapiens
  misc_RNA (1)...(19): siRNA sense strand
ugauaaaccggaagauuaa

SEQ ID NO: 795329 - RNA, 19 nt, Homo sapiens
  misc_RNA (1)...(19): siRNA sense strand
uacgacagcuauggaaaua

SEQ ID NO: 795330 - RNA, 19 nt, Homo sapiens
  misc_RNA (1)...(19): siRNA sense strand
auaaagugcugauggaguu

SEQ ID NO: 795331 - RNA, 19 nt, Homo sapiens
  misc_RNA (1)...(19): siRNA sense strand
gcauugggaugggauuuau

SEQ ID NO: 795332 - RNA, 19 nt, Homo sapiens
  misc_RNA (1)...(19): siRNA sense strand
ggacuuugcuuguuaucac

SEQ ID NO: 795333 - RNA, 19 nt, Homo sapiens
  misc_RNA (1)...(19): siRNA sense strand
gcagagcuccaaacgagaa

SEQ ID NO: 795334 - RNA, 19 nt, Homo sapiens
  misc_RNA (1)...(19): siRNA sense strand
ggcaggagcugugguaaca

SEQ ID NO: 795335 - RNA, 19 nt, Homo sapiens
  misc_RNA (1)...(19): siRNA sense strand
guucagaaguuugcagaga

SEQ ID NO: 795336 - RNA, 19 nt, Homo sapiens
  misc_RNA (1)...(19): siRNA sense strand
guacuaugguggcuguaug

SEQ ID NO: 795337 - RNA, 19 nt, Homo sapiens
  misc_RNA (1)...(19): siRNA sense strand
auacaaaguuggaagcaau

SEQ ID NO: 795338 - RNA, 19 nt, Homo sapiens
  misc_RNA (1)...(19): siRNA sense strand
gaaguuugcagagauaaau

SEQ ID NO: 795339 - RNA, 19 nt, Homo sapiens
  misc_RNA (1)...(19): siRNA sense strand
guguggaucuuaacgauuc

SEQ ID NO: 795340 - RNA, 19 nt, Homo sapiens
  misc_RNA (1)...(19): siRNA sense strand
gaaaugguaguggauguau

SEQ ID NO: 795341 - RNA, 19 nt, Homo sapiens
  misc_RNA (1)...(19): siRNA sense strand
aaugguaguggauguauua

SEQ ID NO: 795342 - RNA, 19 nt, Homo sapiens
  misc_RNA (1)...(19): siRNA sense strand
gaaggucucccaaagaaac

SEQ ID NO: 795343 - RNA, 19 nt, Homo sapiens
  misc_RNA (1)...(19): siRNA sense strand
guaggaaagcaaugaaaga

SEQ ID NO: 795344 - RNA, 19 nt, Homo sapiens
  misc_RNA (1)...(19): siRNA sense strand
gcaaggucuucauucacuu

SEQ ID NO: 795345 - RNA, 19 nt, Homo sapiens
  misc_RNA (1)...(19): siRNA sense strand
gggauuuauuuguggcuuu

SEQ ID NO: 795346 - RNA, 19 nt, Homo sapiens
  misc_RNA (1)...(19): siRNA sense strand
gcaaggcuuuguggaguuc

SEQ ID NO: 795347 - RNA, 19 nt, Homo sapiens
  misc_RNA (1)...(19): siRNA sense strand
gagugcaccuauuccauuc

SEQ ID NO: 795348 - RNA, 19 nt, Homo sapiens
  misc_RNA (1)...(19): siRNA sense strand
gcaaugaaagaagcuggua

SEQ ID NO: 795349 - RNA, 19 nt, Homo sapiens
  misc_RNA (1)...(19): siRNA sense strand
cagaggcccugaucaccuu

SEQ ID NO: 795350 - RNA, 19 nt, Homo sapiens
  misc_RNA (1)...(19): siRNA sense strand
ggcaaggucuucauucacu

SEQ ID NO: 795351 - RNA, 19 nt, Homo sapiens
  misc_RNA (1)...(19): siRNA sense strand
ggcagagaauucuauaugg

SEQ ID NO: 795352 - RNA, 19 nt, Homo sapiens
  misc_RNA (1)...(19): siRNA sense strand
ggacuuucuuugcucuugu

SEQ ID NO: 795353 - RNA, 19 nt, Homo sapiens
  misc_RNA (1)...(19): siRNA sense strand
uaacgauucuggucauacu

SEQ ID NO: 795354 - RNA, 19 nt, Homo sapiens
  misc_RNA (1)...(19): siRNA sense strand
gcgaaugauccuuauguau

SEQ ID NO: 795355 - RNA, 19 nt, Homo sapiens
  misc_RNA (1)...(19): siRNA sense strand
aaaggaauuugccauuuac

SEQ ID NO: 795356 - RNA, 19 nt, Homo sapiens
  misc_RNA (1)...(19): siRNA sense strand
aaagaaggucucccaaaga

SEQ ID NO: 795357 - RNA, 19 nt, Homo sapiens
  misc_RNA (1)...(19): siRNA sense strand
guucagcccuauguagcua

SEQ ID NO: 795358 - RNA, 19 nt, Homo sapiens
  misc_RNA (1)...(19): siRNA sense strand
guggauguauuauucuugu

SEQ ID NO: 795359 - RNA, 19 nt, Homo sapiens
  misc_RNA (1)...(19): siRNA sense strand
uuucuuugcucuugucuug

SEQ ID NO: 795360 - RNA, 19 nt, Homo sapiens
  misc_RNA (1)...(19): siRNA sense strand
cauuucagcuacaguguuc

SEQ ID NO: 795361 - RNA, 19 nt, Homo sapiens
  misc_RNA (1)...(19): siRNA sense strand
cgagugcaccuauuccauu

SEQ ID NO: 795362 - RNA, 19 nt, Homo sapiens
  misc_RNA (1)...(19): siRNA sense strand
uaccauggcugcugcucuu

SEQ ID NO: 795363 - RNA, 19 nt, Homo sapiens
  misc_RNA (1)...(19): siRNA sense strand
gcgaguggcuaccaucaac

SEQ ID NO: 795364 - RNA, 19 nt, Homo sapiens
  misc_RNA (1)...(19): siRNA sense strand
ucagguauauaucaagagu

SEQ ID NO: 795365 - RNA, 19 nt, Homo sapiens
  misc_RNA (1)...(19): siRNA sense strand
accuaaagccuucugaaua

SEQ ID NO: 795366 - RNA, 19 nt, Homo sapiens
  misc_RNA (1)...(19): siRNA sense strand
ccucuuugcuuuccuaguc

SEQ ID NO: 795367 - RNA, 19 nt, Homo sapiens
  misc_RNA (1)...(19): siRNA sense strand
cauacucgguucacuugga

SEQ ID NO: 795368 - RNA, 19 nt, Homo sapiens
  misc_RNA (1)...(19): siRNA sense strand
uuacacaggcugauuagug

SEQ ID NO: 795369 - RNA, 19 nt, Homo sapiens
  misc_RNA (1)...(19): siRNA sense strand
caugcaaccuggacuugau

SEQ ID NO: 795370 - RNA, 19 nt, Homo sapiens
  misc_RNA (1)...(19): siRNA sense strand
uggauaaagugcugaugga

SEQ ID NO: 795371 - RNA, 19 nt, Homo sapiens
  misc_RNA (1)...(19): siRNA sense strand
cgcgaaugauccuuaugua

SEQ ID NO: 795372 - RNA, 19 nt, Homo sapiens
  misc_RNA (1)...(19): siRNA sense strand
cggcaguccuguucagaau

SEQ ID NO: 795373 - RNA, 19 nt, Homo sapiens
  misc_RNA (1)...(19): siRNA sense strand
ccucauuuaugccauuuca

SEQ ID NO: 795374 - RNA, 19 nt, Homo sapiens
  misc_RNA (1)...(19): siRNA sense strand
gauacgacagcuauggaaa

SEQ ID NO: 795375 - RNA, 19 nt, Homo sapiens
  misc_RNA (1)...(19): siRNA sense strand
gaagauuaagucuguagca

SEQ ID NO: 795376 - RNA, 19 nt, Homo sapiens
  misc_RNA (1)...(19): siRNA sense strand
gugaacauuuccugcuaug

SEQ ID NO: 795377 - RNA, 19 nt, Homo sapiens
  misc_RNA (1)...(19): siRNA sense strand
auugggacuuugcuuguua

SEQ ID NO: 795378 - RNA, 19 nt, Homo sapiens
  misc_RNA (1)...(19): siRNA sense strand
gagugauguucagaaguuu

SEQ ID NO: 795379 - RNA, 19 nt, Homo sapiens
  misc_RNA (1)...(19): siRNA sense strand
gcugauggaguuuguggaa

SEQ ID NO: 795380 - RNA, 19 nt, Homo sapiens
  misc_RNA (1)...(19): siRNA sense strand
ccagcaggacuacacagua

SEQ ID NO: 795381 - RNA, 19 nt, Homo sapiens
  misc_RNA (1)...(19): siRNA sense strand
ucaacuaccagcaggacua

SEQ ID NO: 795382 - RNA, 19 nt, Homo sapiens
  misc_RNA (1)...(19): siRNA sense strand
cagcuacaguguucacagu

SEQ ID NO: 795383 - RNA, 19 nt, Homo sapiens
  misc_RNA (1)...(19): siRNA sense strand
aggcacagguguacuaugg

SEQ ID NO: 795384 - RNA, 19 nt, Homo sapiens
  misc_RNA (1)...(19): siRNA sense strand
ggucauacucgguucacuu

SEQ ID NO: 795385 - RNA, 19 nt, Homo sapiens
  misc_RNA (1)...(19): siRNA sense strand
gugcaccuauuccauucuu

SEQ ID NO: 795386 - RNA, 19 nt, Homo sapiens
  misc_RNA (1)...(19): siRNA sense strand
uggcagagaauucuauaug

SEQ ID NO: 795387 - RNA, 19 nt, Homo sapiens
  misc_RNA (1)...(19): siRNA sense strand
ggauacgacagcuauggaa

SEQ ID NO: 795388 - RNA, 19 nt, Homo sapiens
  misc_RNA (1)...(19): siRNA sense strand
gcauacacagccacagcua

SEQ ID NO: 795389 - RNA, 19 nt, Homo sapiens
  misc_RNA (1)...(19): siRNA sense strand
cacgaugugugcugaaauc

SEQ ID NO: 795390 - RNA, 19 nt, Homo sapiens
  misc_RNA (1)...(19): siRNA sense strand
ucaguaaaucgccuuauuc

SEQ ID NO: 795391 - RNA, 19 nt, Homo sapiens
  misc_RNA (1)...(19): siRNA sense strand
ucacuaguucuauccauga

SEQ ID NO: 795392 - RNA, 19 nt, Homo sapiens
  misc_RNA (1)...(19): siRNA sense strand
ggaguaaugaccagcaaag

SEQ ID NO: 795393 - RNA, 19 nt, Homo sapiens
  misc_RNA (1)...(19): siRNA sense strand
caaccuaaagccuucugaa

SEQ ID NO: 795394 - RNA, 19 nt, Homo sapiens
  misc_RNA (1)...(19): siRNA sense strand
ugggagcccuggcagagaa

SEQ ID NO: 795395 - RNA, 19 nt, Homo sapiens
  misc_RNA (1)...(19): siRNA sense strand
ucaacacaguaggagauuu

SEQ ID NO: 795396 - RNA, 19 nt, Homo sapiens
  misc_RNA (1)...(19): siRNA sense strand
gcaagacuagugucaggau

SEQ ID NO: 795397 - RNA, 19 nt, Homo sapiens
  misc_RNA (1)...(19): siRNA sense strand
uaaaucgccuuauucguua

SEQ ID NO: 795398 - RNA, 19 nt, Homo sapiens
  misc_RNA (1)...(19): siRNA sense strand
cgaaugauccuuauguaua

SEQ ID NO: 795399 - RNA, 19 nt, Homo sapiens
  misc_RNA (1)...(19): siRNA sense strand
guaaaucgccuuauucguu

SEQ ID NO: 795400 - RNA, 19 nt, Homo sapiens
  misc_RNA (1)...(19): siRNA sense strand
ggauuaugcugcucaacua

SEQ ID NO: 795401 - RNA, 19 nt, Homo sapiens
  misc_RNA (1)...(19): siRNA sense strand
gguaguggauguauuauuc

SEQ ID NO: 795402 - RNA, 19 nt, Homo sapiens
  misc_RNA (1)...(19): siRNA sense strand
guacuuguguggaucuuaa

SEQ ID NO: 795403 - RNA, 19 nt, Homo sapiens
  misc_RNA (1)...(19): siRNA sense strand
caaagaaggucucccaaag

SEQ ID NO: 795404 - RNA, 19 nt, Homo sapiens
  misc_RNA (1)...(19): siRNA sense strand
gcggaaguauguauucuuu

SEQ ID NO: 795405 - RNA, 19 nt, Homo sapiens
  misc_RNA (1)...(19): siRNA sense strand
gcagagaauucuauaugga

SEQ ID NO: 795406 - RNA, 19 nt, Homo sapiens
  misc_RNA (1)...(19): siRNA sense strand
gaugugugcugaaaucuug

SEQ ID NO: 795407 - RNA, 19 nt, Homo sapiens
  misc_RNA (1)...(19): siRNA sense strand
gcaguccuguucagaauga

SEQ ID NO: 795408 - RNA, 19 nt, Homo sapiens
  misc_RNA (1)...(19): siRNA sense strand
gaccguagcugcacagaca

SEQ ID NO: 795409 - RNA, 19 nt, Homo sapiens
  misc_RNA (1)...(19): siRNA sense strand
guaaugaccagcaaagaaa

SEQ ID NO: 795410 - RNA, 19 nt, Homo sapiens
  misc_RNA (1)...(19): siRNA sense strand
gcucauugcuuccugucua

SEQ ID NO: 795411 - RNA, 19 nt, Homo sapiens
  misc_RNA (1)...(19): siRNA sense strand
ugagugauguucagaaguu

SEQ ID NO: 795412 - RNA, 19 nt, Homo sapiens
  misc_RNA (1)...(19): siRNA sense strand
gaucaucgucugccucuuu

SEQ ID NO: 795413 - RNA, 19 nt, Homo sapiens
  misc_RNA (1)...(19): siRNA sense strand
caggagcugugguaacaua

SEQ ID NO: 795414 - RNA, 19 nt, Homo sapiens
  misc_RNA (1)...(19): siRNA sense strand
gcaaagaaggucucccaaa

SEQ ID NO: 795415 - RNA, 19 nt, Homo sapiens
  misc_RNA (1)...(19): siRNA sense strand
ucagaaguuugcagagaua

SEQ ID NO: 795416 - RNA, 19 nt, Homo sapiens
  misc_RNA (1)...(19): siRNA sense strand
aagaaggucucccaaagaa

SEQ ID NO: 795417 - RNA, 19 nt, Homo sapiens
  misc_RNA (1)...(19): siRNA sense strand
gagcugugguaacauacua

SEQ ID NO: 795418 - RNA, 19 nt, Homo sapiens
  misc_RNA (1)...(19): siRNA sense strand
cgacagcuauggaaauauc

SEQ ID NO: 795419 - RNA, 19 nt, Homo sapiens
  misc_RNA (1)...(19): siRNA sense strand
acagucagcucaaaggaaa

SEQ ID NO: 795420 - RNA, 19 nt, Homo sapiens
  misc_RNA (1)...(19): siRNA sense strand
cuaguucuauccaugauuu

SEQ ID NO: 795421 - RNA, 19 nt, Homo sapiens
  misc_RNA (1)...(19): siRNA sense strand
gggaugggauuuauuugug

SEQ ID NO: 795422 - RNA, 19 nt, Homo sapiens
  misc_RNA (1)...(19): siRNA sense strand
cagcaggacuacacaguau

SEQ ID NO: 795423 - RNA, 19 nt, Homo sapiens
  misc_RNA (1)...(19): siRNA sense strand
caagacuagugucaggaua

SEQ ID NO: 795424 - RNA, 19 nt, Homo sapiens
  misc_RNA (1)...(19): siRNA sense strand
gaccagcaaagaaauuaua

SEQ ID NO: 795425 - RNA, 19 nt, Homo sapiens
  misc_RNA (1)...(19): siRNA sense strand
ccuaaagccuucugaauac

SEQ ID NO: 795426 - RNA, 19 nt, Homo sapiens
  misc_RNA (1)...(19): siRNA sense strand
uugauaaaccggaagauua

SEQ ID NO: 795427 - RNA, 19 nt, Homo sapiens
  misc_RNA (1)...(19): siRNA sense strand
uaugguggcuguaugcaaa

SEQ ID NO: 795428 - RNA, 19 nt, Homo sapiens
  misc_RNA (1)...(19): siRNA sense strand
ugauaaaccggaagauuaa

SEQ ID NO: 795429 - RNA, 19 nt, Homo sapiens
  misc_RNA (1)...(19): siRNA sense strand
uacgacagcuauggaaaua

SEQ ID NO: 795430 - RNA, 19 nt, Homo sapiens
  misc_RNA (1)...(19): siRNA sense strand
auaaagugcugauggaguu

SEQ ID NO: 795431 - RNA, 19 nt, Homo sapiens
  misc_RNA (1)...(19): siRNA sense strand
gcauugggaugggauuuau

SEQ ID NO: 795432 - RNA, 19 nt, Homo sapiens
  misc_RNA (1)...(19): siRNA sense strand
ggacuuugcuuguuaucac

SEQ ID NO: 795433 - RNA, 19 nt, Homo sapiens
  misc_RNA (1)...(19): siRNA sense strand
gcagagcuccaaacgagaa

SEQ ID NO: 795434 - RNA, 19 nt, Homo sapiens
  misc_RNA (1)...(19): siRNA sense strand
ggcaggagcugugguaaca

SEQ ID NO: 795435 - RNA, 19 nt, Homo sapiens
  misc_RNA (1)...(19): siRNA sense strand
guucagaaguuugcagaga

SEQ ID NO: 795436 - RNA, 19 nt, Homo sapiens
  misc_RNA (1)...(19): siRNA sense strand
guacuaugguggcuguaug

SEQ ID NO: 795437 - RNA, 19 nt, Homo sapiens
  misc_RNA (1)...(19): siRNA sense strand
auacaaaguuggaagcaau

SEQ ID NO: 795438 - RNA, 19 nt, Homo sapiens
  misc_RNA (1)...(19): siRNA sense strand
gaaguuugcagagauaaau

SEQ ID NO: 795439 - RNA, 19 nt, Homo sapiens
  misc_RNA (1)...(19): siRNA sense strand
guguggaucuuaacgauuc

SEQ ID NO: 795440 - RNA, 19 nt, Homo sapiens
  misc_RNA (1)...(19): siRNA sense strand
gaaaugguaguggauguau

SEQ ID NO: 795441 - RNA, 19 nt, Homo sapiens
  misc_RNA (1)...(19): siRNA sense strand
aaugguaguggauguauua

SEQ ID NO: 795442 - RNA, 19 nt, Homo sapiens
  misc_RNA (1)...(19): siRNA sense strand
gaaggucucccaaagaaac

SEQ ID NO: 795443 - RNA, 19 nt, Homo sapiens
  misc_RNA (1)...(19): siRNA sense strand
guaggaaagcaaugaaaga

SEQ ID NO: 795444 - RNA, 19 nt, Homo sapiens
  misc_RNA (1)...(19): siRNA sense strand
gcaaggucuucauucacuu

SEQ ID NO: 795445 - RNA, 19 nt, Homo sapiens
  misc_RNA (1)...(19): siRNA sense strand
gggauuuauuuguggcuuu

SEQ ID NO: 795446 - RNA, 19 nt, Homo sapiens
  misc_RNA (1)...(19): siRNA sense strand
gcaaggcuuuguggaguuc

SEQ ID NO: 795447 - RNA, 19 nt, Homo sapiens
  misc_RNA (1)...(19): siRNA sense strand
gagugcaccuauuccauuc

SEQ ID NO: 795448 - RNA, 19 nt, Homo sapiens
  misc_RNA (1)...(19): siRNA sense strand
gcaaugaaagaagcuggua

SEQ ID NO: 795449 - RNA, 19 nt, Homo sapiens
  misc_RNA (1)...(19): siRNA sense strand
cagaggcccugaucaccuu

SEQ ID NO: 795450 - RNA, 19 nt, Homo sapiens
  misc_RNA (1)...(19): siRNA sense strand
ggcaaggucuucauucacu

SEQ ID NO: 795451 - RNA, 19 nt, Homo sapiens
  misc_RNA (1)...(19): siRNA sense strand
ggcagagaauucuauaugg

SEQ ID NO: 795452 - RNA, 19 nt, Homo sapiens
  misc_RNA (1)...(19): siRNA sense strand
ggacuuucuuugcucuugu

SEQ ID NO: 795453 - RNA, 19 nt, Homo sapiens
  misc_RNA (1)...(19): siRNA sense strand
uaacgauucuggucauacu

SEQ ID NO: 795454 - RNA, 19 nt, Homo sapiens
  misc_RNA (1)...(19): siRNA sense strand
gcgaaugauccuuauguau

SEQ ID NO: 795455 - RNA, 19 nt, Homo sapiens
  misc_RNA (1)...(19): siRNA sense strand
aaaggaauuugccauuuac

SEQ ID NO: 795456 - RNA, 19 nt, Homo sapiens
  misc_RNA (1)...(19): siRNA sense strand
aaagaaggucucccaaaga

SEQ ID NO: 795457 - RNA, 19 nt, Homo sapiens
  misc_RNA (1)...(19): siRNA sense strand
guucagcccuauguagcua

SEQ ID NO: 795458 - RNA, 19 nt, Homo sapiens
  misc_RNA (1)...(19): siRNA sense strand
guggauguauuauucuugu

SEQ ID NO: 795459 - RNA, 19 nt, Homo sapiens
  misc_RNA (1)...(19): siRNA sense strand
uuucuuugcucuugucuug

SEQ ID NO: 795460 - RNA, 19 nt, Homo sapiens
  misc_RNA (1)...(19): siRNA sense strand
cauuucagcuacaguguuc

SEQ ID NO: 795461 - RNA, 19 nt, Homo sapiens
  misc_RNA (1)...(19): siRNA sense strand
cgagugcaccuauuccauu

SEQ ID NO: 795462 - RNA, 19 nt, Homo sapiens
  misc_RNA (1)...(19): siRNA sense strand
uaccauggcugcugcucuu

SEQ ID NO: 795463 - RNA, 19 nt, Homo sapiens
  misc_RNA (1)...(19): siRNA sense strand
gcgaguggcuaccaucaac

SEQ ID NO: 795464 - RNA, 19 nt, Homo sapiens
  misc_RNA (1)...(19): siRNA sense strand
ucagguauauaucaagagu

SEQ ID NO: 795465 - RNA, 19 nt, Homo sapiens
  misc_RNA (1)...(19): siRNA sense strand
accuaaagccuucugaaua

SEQ ID NO: 795466 - RNA, 19 nt, Homo sapiens
  misc_RNA (1)...(19): siRNA sense strand
ccucuuugcuuuccuaguc

SEQ ID NO: 795467 - RNA, 19 nt, Homo sapiens
  misc_RNA (1)...(19): siRNA sense strand
cauacucgguucacuugga

SEQ ID NO: 795468 - RNA, 19 nt, Homo sapiens
  misc_RNA (1)...(19): siRNA sense strand
uuacacaggcugauuagug

SEQ ID NO: 795469 - RNA, 19 nt, Homo sapiens
  misc_RNA (1)...(19): siRNA sense strand
caugcaaccuggacuugau

SEQ ID NO: 795470 - RNA, 19 nt, Homo sapiens
  misc_RNA (1)...(19): siRNA sense strand
uggauaaagugcugaugga

SEQ ID NO: 795471 - RNA, 19 nt, Homo sapiens
  misc_RNA (1)...(19): siRNA sense strand
cgcgaaugauccuuaugua

SEQ ID NO: 795472 - RNA, 19 nt, Homo sapiens
  misc_RNA (1)...(19): siRNA sense strand
cggcaguccuguucagaau

SEQ ID NO: 795473 - RNA, 19 nt, Homo sapiens
  misc_RNA (1)...(19): siRNA sense strand
ccucauuuaugccauuuca

SEQ ID NO: 795474 - RNA, 19 nt, Homo sapiens
  misc_RNA (1)...(19): siRNA sense strand
gauacgacagcuauggaaa

SEQ ID NO: 795475 - RNA, 19 nt, Homo sapiens
  misc_RNA (1)...(19): siRNA sense strand
gaagauuaagucuguagca

SEQ ID NO: 795476 - RNA, 19 nt, Homo sapiens
  misc_RNA (1)...(19): siRNA sense strand
gugaacauuuccugcuaug

SEQ ID NO: 795477 - RNA, 19 nt, Homo sapiens
  misc_RNA (1)...(19): siRNA sense strand
auugggacuuugcuuguua

SEQ ID NO: 795478 - RNA, 19 nt, Homo sapiens
  misc_RNA (1)...(19): siRNA sense strand
gagugauguucagaaguuu

SEQ ID NO: 795479 - RNA, 19 nt, Homo sapiens
  misc_RNA (1)...(19): siRNA sense strand
gcugauggaguuuguggaa

SEQ ID NO: 795480 - RNA, 19 nt, Homo sapiens
  misc_RNA (1)...(19): siRNA sense strand
ccagcaggacuacacagua

SEQ ID NO: 795481 - RNA, 19 nt, Homo sapiens
  misc_RNA (1)...(19): siRNA sense strand
ucaacuaccagcaggacua

SEQ ID NO: 795482 - RNA, 19 nt, Homo sapiens
  misc_RNA (1)...(19): siRNA sense strand
cagcuacaguguucacagu

SEQ ID NO: 795483 - RNA, 19 nt, Homo sapiens
  misc_RNA (1)...(19): siRNA sense strand
aggcacagguguacuaugg

SEQ ID NO: 795484 - RNA, 19 nt, Homo sapiens
  misc_RNA (1)...(19): siRNA sense strand
ggucauacucgguucacuu

SEQ ID NO: 795485 - RNA, 19 nt, Homo sapiens
  misc_RNA (1)...(19): siRNA sense strand
gugcaccuauuccauucuu

SEQ ID NO: 795486 - RNA, 19 nt, Homo sapiens
  misc_RNA (1)...(19): siRNA sense strand
uggcagagaauucuauaug

SEQ ID NO: 795487 - RNA, 19 nt, Homo sapiens
  misc_RNA (1)...(19): siRNA sense strand
ggauacgacagcuauggaa

SEQ ID NO: 795488 - RNA, 19 nt, Homo sapiens
  misc_RNA (1)...(19): siRNA sense strand
gcauacacagccacagcua

SEQ ID NO: 795489 - RNA, 19 nt, Homo sapiens
  misc_RNA (1)...(19): siRNA sense strand
cacgaugugugcugaaauc

SEQ ID NO: 795490 - RNA, 19 nt, Homo sapiens
  misc_RNA (1)...(19): siRNA sense strand
ucaguaaaucgccuuauuc

SEQ ID NO: 795491 - RNA, 19 nt, Homo sapiens
  misc_RNA (1)...(19): siRNA sense strand
ucacuaguucuauccauga

SEQ ID NO: 795492 - RNA, 19 nt, Homo sapiens
  misc_RNA (1)...(19): siRNA sense strand
ggaguaaugaccagcaaag

SEQ ID NO: 795493 - RNA, 19 nt, Homo sapiens
  misc_RNA (1)...(19): siRNA sense strand
caaccuaaagccuucugaa

SEQ ID NO: 795494 - RNA, 19 nt, Homo sapiens
  misc_RNA (1)...(19): siRNA sense strand
ugggagcccuggcagagaa

SEQ ID NO: 795495 - RNA, 19 nt, Homo sapiens
  misc_RNA (1)...(19): siRNA sense strand
ucaacacaguaggagauuu

SEQ ID NO: 795496 - RNA, 19 nt, Homo sapiens
  misc_RNA (1)...(19): siRNA sense strand
gcaagacuagugucaggau

SEQ ID NO: 795497 - RNA, 19 nt, Homo sapiens
  misc_RNA (1)...(19): siRNA sense strand
ggacagagcugggaacuga

SEQ ID NO: 795498 - RNA, 19 nt, Homo sapiens
  misc_RNA (1)...(19): siRNA sense strand
guaagucccugcagugaaa

SEQ ID NO: 795499 - RNA, 19 nt, Homo sapiens
  misc_RNA (1)...(19): siRNA sense strand
gaggcgagcuucagaucug

SEQ ID NO: 795500 - RNA, 19 nt, Homo sapiens
  misc_RNA (1)...(19): siRNA sense strand
gugccgacaucccaaguuu

SEQ ID NO: 795501 - RNA, 19 nt, Homo sapiens
  misc_RNA (1)...(19): siRNA sense strand
guucagagcauuggacaga

SEQ ID NO: 795502 - RNA, 19 nt, Homo sapiens
  misc_RNA (1)...(19): siRNA sense strand
cuucagaucugcucaagcu

SEQ ID NO: 795503 - RNA, 19 nt, Homo sapiens
  misc_RNA (1)...(19): siRNA sense strand
gguaagucccugcagugaa

SEQ ID NO: 795504 - RNA, 19 nt, Homo sapiens
  misc_RNA (1)...(19): siRNA sense strand
acaccuggcuggguaaguc

SEQ ID NO: 795505 - RNA, 19 nt, Homo sapiens
  misc_RNA (1)...(19): siRNA sense strand
ggguaagucccugcaguga

SEQ ID NO: 795506 - RNA, 19 nt, Homo sapiens
  misc_RNA (1)...(19): siRNA sense strand
gaauggcagggcucagaca

SEQ ID NO: 795507 - RNA, 19 nt, Homo sapiens
  misc_RNA (1)...(19): siRNA sense strand
ucacaaagaucuccgaaga

SEQ ID NO: 795508 - RNA, 19 nt, Homo sapiens
  misc_RNA (1)...(19): siRNA sense strand
gaggaagcauuugaaguua

SEQ ID NO: 795509 - RNA, 19 nt, Homo sapiens
  misc_RNA (1)...(19): siRNA sense strand
ggaagcauuugaaguuaaa

SEQ ID NO: 795510 - RNA, 19 nt, Homo sapiens
  misc_RNA (1)...(19): siRNA sense strand
ccacgaaggcggucuguua

SEQ ID NO: 795511 - RNA, 19 nt, Homo sapiens
  misc_RNA (1)...(19): siRNA sense strand
ucagugagcagguaauuua

SEQ ID NO: 795512 - RNA, 19 nt, Homo sapiens
  misc_RNA (1)...(19): siRNA sense strand
gcaaugaugcugucccuuu

SEQ ID NO: 795513 - RNA, 19 nt, Homo sapiens
  misc_RNA (1)...(19): siRNA sense strand
gcaaacgcuucgaauguga

SEQ ID NO: 795514 - RNA, 19 nt, Homo sapiens
  misc_RNA (1)...(19): siRNA sense strand
ccacaucgcugcucaagag

SEQ ID NO: 795515 - RNA, 19 nt, Homo sapiens
  misc_RNA (1)...(19): siRNA sense strand
cuacauuccugaagacauu

SEQ ID NO: 795516 - RNA, 19 nt, Homo sapiens
  misc_RNA (1)...(19): siRNA sense strand
ggccagauguucagcacua

SEQ ID NO: 795517 - RNA, 19 nt, Homo sapiens
  misc_RNA (1)...(19): siRNA sense strand
gaaccaggcauaugcaaug

SEQ ID NO: 795518 - RNA, 19 nt, Homo sapiens
  misc_RNA (1)...(19): siRNA sense strand
gcagcuggcucaaguacau

SEQ ID NO: 795519 - RNA, 19 nt, Homo sapiens
  misc_RNA (1)...(19): siRNA sense strand
cgaggugccugucuucuau

SEQ ID NO: 795520 - RNA, 19 nt, Homo sapiens
  misc_RNA (1)...(19): siRNA sense strand
gcaagaaccacgucuaugg

SEQ ID NO: 795521 - RNA, 19 nt, Homo sapiens
  misc_RNA (1)...(19): siRNA sense strand
caggaaggcugcaucacaa

SEQ ID NO: 795522 - RNA, 19 nt, Homo sapiens
  misc_RNA (1)...(19): siRNA sense strand
gaaguuaaagaugugcuua

SEQ ID NO: 795523 - RNA, 19 nt, Homo sapiens
  misc_RNA (1)...(19): siRNA sense strand
guacaaaugcgaccagugu

SEQ ID NO: 795524 - RNA, 19 nt, Homo sapiens
  misc_RNA (1)...(19): siRNA sense strand
gaccagaaccucaccaugu

SEQ ID NO: 795525 - RNA, 19 nt, Homo sapiens
  misc_RNA (1)...(19): siRNA sense strand
ugaggaagcauuugaaguu

SEQ ID NO: 795526 - RNA, 19 nt, Homo sapiens
  misc_RNA (1)...(19): siRNA sense strand
acggugacguuguaaauaa

SEQ ID NO: 795527 - RNA, 19 nt, Homo sapiens
  misc_RNA (1)...(19): siRNA sense strand
ggacaaccacgcacuuuua

SEQ ID NO: 795528 - RNA, 19 nt, Homo sapiens
  misc_RNA (1)...(19): siRNA sense strand
ccgaagaccugggcaguga

SEQ ID NO: 795529 - RNA, 19 nt, Homo sapiens
  misc_RNA (1)...(19): siRNA sense strand
caaggacuguggccagaug

SEQ ID NO: 795530 - RNA, 19 nt, Homo sapiens
  misc_RNA (1)...(19): siRNA sense strand
ucggaaaucagaaacuuua

SEQ ID NO: 795531 - RNA, 19 nt, Homo sapiens
  misc_RNA (1)...(19): siRNA sense strand
ggacagcgacccugacaag

SEQ ID NO: 795532 - RNA, 19 nt, Homo sapiens
  misc_RNA (1)...(19): siRNA sense strand
gaaggcugcaucacaaaga

SEQ ID NO: 795533 - RNA, 19 nt, Homo sapiens
  misc_RNA (1)...(19): siRNA sense strand
ccaggcauaugcaaugaug

SEQ ID NO: 795534 - RNA, 19 nt, Homo sapiens
  misc_RNA (1)...(19): siRNA sense strand
ggaagggcaaggagcgaua

SEQ ID NO: 795535 - RNA, 19 nt, Homo sapiens
  misc_RNA (1)...(19): siRNA sense strand
ggacggcagugacuuugag

SEQ ID NO: 795536 - RNA, 19 nt, Homo sapiens
  misc_RNA (1)...(19): siRNA sense strand
ggcaaacgcuucgaaugug

SEQ ID NO: 795537 - RNA, 19 nt, Homo sapiens
  misc_RNA (1)...(19): siRNA sense strand
caaugaugcugucccuuuc

SEQ ID NO: 795538 - RNA, 19 nt, Homo sapiens
  misc_RNA (1)...(19): siRNA sense strand
ccauagagaccaugacaga

SEQ ID NO: 795539 - RNA, 19 nt, Homo sapiens
  misc_RNA (1)...(19): siRNA sense strand
ucaagcagcacaagcauau

SEQ ID NO: 795540 - RNA, 19 nt, Homo sapiens
  misc_RNA (1)...(19): siRNA sense strand
ucagaucagugagcaggua

SEQ ID NO: 795541 - RNA, 19 nt, Homo sapiens
  misc_RNA (1)...(19): siRNA sense strand
cagccaaucucaccagaca

SEQ ID NO: 795542 - RNA, 19 nt, Homo sapiens
  misc_RNA (1)...(19): siRNA sense strand
gcgagggcaagaaccauua

SEQ ID NO: 795543 - RNA, 19 nt, Homo sapiens
  misc_RNA (1)...(19): siRNA sense strand
ccaaggccuucaacuggaa

SEQ ID NO: 795544 - RNA, 19 nt, Homo sapiens
  misc_RNA (1)...(19): siRNA sense strand
gucggagucuggagcauuu

SEQ ID NO: 795545 - RNA, 19 nt, Homo sapiens
  misc_RNA (1)...(19): siRNA sense strand
uagagaccaugacagagaa

SEQ ID NO: 795546 - RNA, 19 nt, Homo sapiens
  misc_RNA (1)...(19): siRNA sense strand
gaucagugagcagguaauu

SEQ ID NO: 795547 - RNA, 19 nt, Homo sapiens
  misc_RNA (1)...(19): siRNA sense strand
aggaagcauuugaaguuaa

SEQ ID NO: 795548 - RNA, 19 nt, Homo sapiens
  misc_RNA (1)...(19): siRNA sense strand
ccgcagagcagcugaggaa

SEQ ID NO: 795549 - RNA, 19 nt, Homo sapiens
  misc_RNA (1)...(19): siRNA sense strand
guccaggccuagccaguga

SEQ ID NO: 795550 - RNA, 19 nt, Homo sapiens
  misc_RNA (1)...(19): siRNA sense strand
ggugacguuguaaauaaua

SEQ ID NO: 795551 - RNA, 19 nt, Homo sapiens
  misc_RNA (1)...(19): siRNA sense strand
gacggugacguuguaaaua

SEQ ID NO: 795552 - RNA, 19 nt, Homo sapiens
  misc_RNA (1)...(19): siRNA sense strand
acagcacggugaagccuuu

SEQ ID NO: 795553 - RNA, 19 nt, Homo sapiens
  misc_RNA (1)...(19): siRNA sense strand
gcuaagaaccaggcauaug

SEQ ID NO: 795554 - RNA, 19 nt, Homo sapiens
  misc_RNA (1)...(19): siRNA sense strand
gagcagcugaggaagcauu

SEQ ID NO: 795555 - RNA, 19 nt, Homo sapiens
  misc_RNA (1)...(19): siRNA sense strand
cagagcagcugaggaagca

SEQ ID NO: 795556 - RNA, 19 nt, Homo sapiens
  misc_RNA (1)...(19): siRNA sense strand
caucaacgcgaacagagaa

SEQ ID NO: 795557 - RNA, 19 nt, Homo sapiens
  misc_RNA (1)...(19): siRNA sense strand
gaagaccugggcagugaga

SEQ ID NO: 795558 - RNA, 19 nt, Homo sapiens
  misc_RNA (1)...(19): siRNA sense strand
uggagccgaugccgacuuu

SEQ ID NO: 795559 - RNA, 19 nt, Homo sapiens
  misc_RNA (1)...(19): siRNA sense strand
ugggagcccugaaggagaa

SEQ ID NO: 795560 - RNA, 19 nt, Homo sapiens
  misc_RNA (1)...(19): siRNA sense strand
ucgcauccauugccgagaa

SEQ ID NO: 795561 - RNA, 19 nt, Homo sapiens
  misc_RNA (1)...(19): siRNA sense strand
cggcaaacgcuucgaaugu

SEQ ID NO: 795562 - RNA, 19 nt, Homo sapiens
  misc_RNA (1)...(19): siRNA sense strand
gaggagcgcgaguacaaau

SEQ ID NO: 795563 - RNA, 19 nt, Homo sapiens
  misc_RNA (1)...(19): siRNA sense strand
aggagaagccuuucaagug

SEQ ID NO: 795564 - RNA, 19 nt, Homo sapiens
  misc_RNA (1)...(19): siRNA sense strand
gugcuuaauuccaccuuag

SEQ ID NO: 795565 - RNA, 19 nt, Homo sapiens
  misc_RNA (1)...(19): siRNA sense strand
ccuuugaucucaccaccaa

SEQ ID NO: 795566 - RNA, 19 nt, Homo sapiens
  misc_RNA (1)...(19): siRNA sense strand
cuuagauucugaggcuuua

SEQ ID NO: 795567 - RNA, 19 nt, Homo sapiens
  misc_RNA (1)...(19): siRNA sense strand
gcauuugaaguuaaagaug

SEQ ID NO: 795568 - RNA, 19 nt, Homo sapiens
  misc_RNA (1)...(19): siRNA sense strand
ccaggaaggcugcaucaca

SEQ ID NO: 795569 - RNA, 19 nt, Homo sapiens
  misc_RNA (1)...(19): siRNA sense strand
cagcugaggaagcauuuga

SEQ ID NO: 795570 - RNA, 19 nt, Homo sapiens
  misc_RNA (1)...(19): siRNA sense strand
aagugacggugacguugua

SEQ ID NO: 795571 - RNA, 19 nt, Homo sapiens
  misc_RNA (1)...(19): siRNA sense strand
gggcuucaacgaguacuuu

SEQ ID NO: 795572 - RNA, 19 nt, Homo sapiens
  misc_RNA (1)...(19): siRNA sense strand
aaggcggucuguuagcuuu

SEQ ID NO: 795573 - RNA, 19 nt, Homo sapiens
  misc_RNA (1)...(19): siRNA sense strand
ggaacauccacaacaagga

SEQ ID NO: 795574 - RNA, 19 nt, Homo sapiens
  misc_RNA (1)...(19): siRNA sense strand
cggaggagcgcgaguacaa

SEQ ID NO: 795575 - RNA, 19 nt, Homo sapiens
  misc_RNA (1)...(19): siRNA sense strand
gcaggcaggcuaagaacca

SEQ ID NO: 795576 - RNA, 19 nt, Homo sapiens
  misc_RNA (1)...(19): siRNA sense strand
gaaggcggucuguuagcuu

SEQ ID NO: 795577 - RNA, 19 nt, Homo sapiens
  misc_RNA (1)...(19): siRNA sense strand
gcaucaacgcgaacagaga

SEQ ID NO: 795578 - RNA, 19 nt, Homo sapiens
  misc_RNA (1)...(19): siRNA sense strand
ucucggaaaucagaaacuu

SEQ ID NO: 795579 - RNA, 19 nt, Homo sapiens
  misc_RNA (1)...(19): siRNA sense strand
cacgagaacgcaccaguga

SEQ ID NO: 795580 - RNA, 19 nt, Homo sapiens
  misc_RNA (1)...(19): siRNA sense strand
ggaugggagcaaauacuga

SEQ ID NO: 795581 - RNA, 19 nt, Homo sapiens
  misc_RNA (1)...(19): siRNA sense strand
ugacggugacguuguaaau

SEQ ID NO: 795582 - RNA, 19 nt, Homo sapiens
  misc_RNA (1)...(19): siRNA sense strand
ggaggagcgcgaguacaaa

SEQ ID NO: 795583 - RNA, 19 nt, Homo sapiens
  misc_RNA (1)...(19): siRNA sense strand
cgaggaagcuagccaaaag

SEQ ID NO: 795584 - RNA, 19 nt, Homo sapiens
  misc_RNA (1)...(19): siRNA sense strand
ggacugcgagcggauguuc

SEQ ID NO: 795585 - RNA, 19 nt, Homo sapiens
  misc_RNA (1)...(19): siRNA sense strand
gggcggacaugcagaucgu

SEQ ID NO: 795586 - RNA, 19 nt, Homo sapiens
  misc_RNA (1)...(19): siRNA sense strand
ccaugugucagaucaguga

SEQ ID NO: 795587 - RNA, 19 nt, Homo sapiens
  misc_RNA (1)...(19): siRNA sense strand
ggaaggcugcaucacaaag

SEQ ID NO: 795588 - RNA, 19 nt, Homo sapiens
  misc_RNA (1)...(19): siRNA sense strand
auagagaccaugacagaga

SEQ ID NO: 795589 - RNA, 19 nt, Homo sapiens
  misc_RNA (1)...(19): siRNA sense strand
ggucaaggccgagccaaag

SEQ ID NO: 795590 - RNA, 19 nt, Homo sapiens
  misc_RNA (1)...(19): siRNA sense strand
ucaaggccaucgcauccau

SEQ ID NO: 795591 - RNA, 19 nt, Homo sapiens
  misc_RNA (1)...(19): siRNA sense strand
ggacuguggccagauguuc

SEQ ID NO: 795592 - RNA, 19 nt, Homo sapiens
  misc_RNA (1)...(19): siRNA sense strand
gagcuuugcagccaugaag

SEQ ID NO: 795593 - RNA, 19 nt, Homo sapiens
  misc_RNA (1)...(19): siRNA sense strand
cuaagaaccaggcauaugc

SEQ ID NO: 795594 - RNA, 19 nt, Homo sapiens
  misc_RNA (1)...(19): siRNA sense strand
uuaauuccaccuuagauuc

SEQ ID NO: 795595 - RNA, 19 nt, Homo sapiens
  misc_RNA (1)...(19): siRNA sense strand
ccgcaagaaccacgucuau

SEQ ID NO: 795596 - RNA, 19 nt, Homo sapiens
  misc_RNA (1)...(19): siRNA sense strand
aggcuaagaaccaggcaua

SEQ ID NO: 795597 - RNA, 19 nt, Homo sapiens
  misc_RNA (1)...(19): siRNA sense strand
cuacgaggaugaggaggau

SEQ ID NO: 795598 - RNA, 19 nt, Homo sapiens
  misc_RNA (1)...(19): siRNA sense strand
cggcaaaggagacagacuu

SEQ ID NO: 795599 - RNA, 19 nt, Homo sapiens
  misc_RNA (1)...(19): siRNA sense strand
accagaaccucaccaugug

SEQ ID NO: 795600 - RNA, 19 nt, Homo sapiens
  misc_RNA (1)...(19): siRNA sense strand
uagauucugaggcuuuaaa

SEQ ID NO: 795601 - RNA, 19 nt, Homo sapiens
  misc_RNA (1)...(19): siRNA sense strand
cgaaggcggucuguuagcu

SEQ ID NO: 795602 - RNA, 19 nt, Homo sapiens
  misc_RNA (1)...(19): siRNA sense strand
ggaggaggaggacgacgau

SEQ ID NO: 795603 - RNA, 19 nt, Homo sapiens
  misc_RNA (1)...(19): siRNA sense strand
ccagaugucagccauagag

SEQ ID NO: 795604 - RNA, 19 nt, Homo sapiens
  misc_RNA (1)...(19): siRNA sense strand
ccuccucccucaacaagca

SEQ ID NO: 795605 - RNA, 19 nt, Homo sapiens
  misc_RNA (1)...(19): siRNA sense strand
ugugcuuaauuccaccuua

SEQ ID NO: 795606 - RNA, 19 nt, Homo sapiens
  misc_RNA (1)...(19): siRNA sense strand
aaccaggcauaugcaauga

SEQ ID NO: 795607 - RNA, 19 nt, Homo sapiens
  misc_RNA (1)...(19): siRNA sense strand
caaggcagcugucagaaga

SEQ ID NO: 795608 - RNA, 19 nt, Homo sapiens
  misc_RNA (1)...(19): siRNA sense strand
gcaggagccucucaguucu

SEQ ID NO: 795609 - RNA, 19 nt, Homo sapiens
  misc_RNA (1)...(19): siRNA sense strand
ucucuuuccucgccacaua

SEQ ID NO: 795610 - RNA, 19 nt, Homo sapiens
  misc_RNA (1)...(19): siRNA sense strand
gugaggcccuggagaagga

SEQ ID NO: 795611 - RNA, 19 nt, Homo sapiens
  misc_RNA (1)...(19): siRNA sense strand
agaaggaggagcuguugua

SEQ ID NO: 795612 - RNA, 19 nt, Homo sapiens
  misc_RNA (1)...(19): siRNA sense strand
ggccuugaguuacauggaa

SEQ ID NO: 795613 - RNA, 19 nt, Homo sapiens
  misc_RNA (1)...(19): siRNA sense strand
ggagaaggaggagcuguug

SEQ ID NO: 795614 - RNA, 19 nt, Homo sapiens
  misc_RNA (1)...(19): siRNA sense strand
ccacugaggucucuuuccu

SEQ ID NO: 795615 - RNA, 19 nt, Homo sapiens
  misc_RNA (1)...(19): siRNA sense strand
uaagcaagaggagacauuu

SEQ ID NO: 795616 - RNA, 19 nt, Homo sapiens
  misc_RNA (1)...(19): siRNA sense strand
ccagcacucugucccaauc

SEQ ID NO: 795617 - RNA, 19 nt, Homo sapiens
  misc_RNA (1)...(19): siRNA sense strand
ugaguuggccaagggaaua

SEQ ID NO: 795618 - RNA, 19 nt, Homo sapiens
  misc_RNA (1)...(19): siRNA sense strand
gcuggccauuugacauaaa

SEQ ID NO: 795619 - RNA, 19 nt, Homo sapiens
  misc_RNA (1)...(19): siRNA sense strand
gugucacgcuggccauuug

SEQ ID NO: 795620 - RNA, 19 nt, Homo sapiens
  misc_RNA (1)...(19): siRNA sense strand
ggagcgagauggagauccu

SEQ ID NO: 795621 - RNA, 19 nt, Homo sapiens
  misc_RNA (1)...(19): siRNA sense strand
gccaagggaauaagcaaga

SEQ ID NO: 795622 - RNA, 19 nt, Homo sapiens
  misc_RNA (1)...(19): siRNA sense strand
cgagaaguuccgaggcuuu

SEQ ID NO: 795623 - RNA, 19 nt, Homo sapiens
  misc_RNA (1)...(19): siRNA sense strand
ugucaaggcagcugucaga

SEQ ID NO: 795624 - RNA, 19 nt, Homo sapiens
  misc_RNA (1)...(19): siRNA sense strand
cagcaggagccucucaguu

SEQ ID NO: 795625 - RNA, 19 nt, Homo sapiens
  misc_RNA (1)...(19): siRNA sense strand
gaaggaggagcuguuguac

SEQ ID NO: 795626 - RNA, 19 nt, Homo sapiens
  misc_RNA (1)...(19): siRNA sense strand
aggagccucucaguucuuu

SEQ ID NO: 795627 - RNA, 19 nt, Homo sapiens
  misc_RNA (1)...(19): siRNA sense strand
acgcuggccauuugacaua

SEQ ID NO: 795628 - RNA, 19 nt, Homo sapiens
  misc_RNA (1)...(19): siRNA sense strand
gagaaguuccgaggcuuuc

SEQ ID NO: 795629 - RNA, 19 nt, Homo sapiens
  misc_RNA (1)...(19): siRNA sense strand
cacgacgccugaagucaca

SEQ ID NO: 795630 - RNA, 19 nt, Homo sapiens
  misc_RNA (1)...(19): siRNA sense strand
gaguuggccaagggaauaa

SEQ ID NO: 795631 - RNA, 19 nt, Homo sapiens
  misc_RNA (1)...(19): siRNA sense strand
gaauaagcaagaggagaca

SEQ ID NO: 795632 - RNA, 19 nt, Homo sapiens
  misc_RNA (1)...(19): siRNA sense strand
ccaagggaauaagcaagag

SEQ ID NO: 795633 - RNA, 19 nt, Homo sapiens
  misc_RNA (1)...(19): siRNA sense strand
agcaggagccucucaguuc

SEQ ID NO: 795634 - RNA, 19 nt, Homo sapiens
  misc_RNA (1)...(19): siRNA sense strand
gugaacaacucaaacuuaa

SEQ ID NO: 795635 - RNA, 19 nt, Homo sapiens
  misc_RNA (1)...(19): siRNA sense strand
gagacaaccugcaggaguu

SEQ ID NO: 795636 - RNA, 19 nt, Homo sapiens
  misc_RNA (1)...(19): siRNA sense strand
ucaagaaccuggcuaguag

SEQ ID NO: 795637 - RNA, 19 nt, Homo sapiens
  misc_RNA (1)...(19): siRNA sense strand
aauggaaguugcucuguua

SEQ ID NO: 795638 - RNA, 19 nt, Homo sapiens
  misc_RNA (1)...(19): siRNA sense strand
gaagugcaguuuggaguga

SEQ ID NO: 795639 - RNA, 19 nt, Homo sapiens
  misc_RNA (1)...(19): siRNA sense strand
gaugcaagcucagguugaa

SEQ ID NO: 795640 - RNA, 19 nt, Homo sapiens
  misc_RNA (1)...(19): siRNA sense strand
gaacaacucaaacuuaaac

SEQ ID NO: 795641 - RNA, 19 nt, Homo sapiens
  misc_RNA (1)...(19): siRNA sense strand
ggcccuggcugcagaguuu

SEQ ID NO: 795642 - RNA, 19 nt, Homo sapiens
  misc_RNA (1)...(19): siRNA sense strand
cgacuucuuucccuucaaa

SEQ ID NO: 795643 - RNA, 19 nt, Homo sapiens
  misc_RNA (1)...(19): siRNA sense strand
ugacugauccacagaauau

SEQ ID NO: 795644 - RNA, 19 nt, Homo sapiens
  misc_RNA (1)...(19): siRNA sense strand
ucaaugacccucuuacaga

SEQ ID NO: 795645 - RNA, 19 nt, Homo sapiens
  misc_RNA (1)...(19): siRNA sense strand
ggaaguugcucuguuaaaa

SEQ ID NO: 795646 - RNA, 19 nt, Homo sapiens
  misc_RNA (1)...(19): siRNA sense strand
ucagcaaguuacagaagua

SEQ ID NO: 795647 - RNA, 19 nt, Homo sapiens
  misc_RNA (1)...(19): siRNA sense strand
caaguggucuguaauaagc

SEQ ID NO: 795648 - RNA, 19 nt, Homo sapiens
  misc_RNA (1)...(19): siRNA sense strand
ccaagaagcaugacugauc

SEQ ID NO: 795649 - RNA, 19 nt, Homo sapiens
  misc_RNA (1)...(19): siRNA sense strand
cagaguauguugccaucuu

SEQ ID NO: 795650 - RNA, 19 nt, Homo sapiens
  misc_RNA (1)...(19): siRNA sense strand
gacaugaagugcaguuugg

SEQ ID NO: 795651 - RNA, 19 nt, Homo sapiens
  misc_RNA (1)...(19): siRNA sense strand
caacaggcacugcagcauu

SEQ ID NO: 795652 - RNA, 19 nt, Homo sapiens
  misc_RNA (1)...(19): siRNA sense strand
ugggaauccuggcuauaua

SEQ ID NO: 795653 - RNA, 19 nt, Homo sapiens
  misc_RNA (1)...(19): siRNA sense strand
uaauggaaguugcucuguu

SEQ ID NO: 795654 - RNA, 19 nt, Homo sapiens
  misc_RNA (1)...(19): siRNA sense strand
ggaccaggauccucaacag

SEQ ID NO: 795655 - RNA, 19 nt, Homo sapiens
  misc_RNA (1)...(19): siRNA sense strand
caaccuagagacuauguga

SEQ ID NO: 795656 - RNA, 19 nt, Homo sapiens
  misc_RNA (1)...(19): siRNA sense strand
gcucauguaucaggaguuc

SEQ ID NO: 795657 - RNA, 19 nt, Homo sapiens
  misc_RNA (1)...(19): siRNA sense strand
gcuauaaacuguacuuccu

SEQ ID NO: 795658 - RNA, 19 nt, Homo sapiens
  misc_RNA (1)...(19): siRNA sense strand
aacaggcacugcagcauuu

SEQ ID NO: 795659 - RNA, 19 nt, Homo sapiens
  misc_RNA (1)...(19): siRNA sense strand
aauccuggcuauauaguug

SEQ ID NO: 795660 - RNA, 19 nt, Homo sapiens
  misc_RNA (1)...(19): siRNA sense strand
acagaaguaucuuugacaa

SEQ ID NO: 795661 - RNA, 19 nt, Homo sapiens
  misc_RNA (1)...(19): siRNA sense strand
aaagcaauccugcagguuu

SEQ ID NO: 795662 - RNA, 19 nt, Homo sapiens
  misc_RNA (1)...(19): siRNA sense strand
ugugaacaacucaaacuua

SEQ ID NO: 795663 - RNA, 19 nt, Homo sapiens
  misc_RNA (1)...(19): siRNA sense strand
ggcucugacugaugauaua

SEQ ID NO: 795664 - RNA, 19 nt, Homo sapiens
  misc_RNA (1)...(19): siRNA sense strand
uaacuucacagucuuaaag

SEQ ID NO: 795665 - RNA, 19 nt, Homo sapiens
  misc_RNA (1)...(19): siRNA sense strand
cagguuuccuagagaguaa

SEQ ID NO: 795666 - RNA, 19 nt, Homo sapiens
  misc_RNA (1)...(19): siRNA sense strand
caacucuugugaacuuugu

SEQ ID NO: 795667 - RNA, 19 nt, Homo sapiens
  misc_RNA (1)...(19): siRNA sense strand
cauuucagcuauaaacugu

SEQ ID NO: 795668 - RNA, 19 nt, Homo sapiens
  misc_RNA (1)...(19): siRNA sense strand
ucaaugcugccucuuacua

SEQ ID NO: 795669 - RNA, 19 nt, Homo sapiens
  misc_RNA (1)...(19): siRNA sense strand
cccaaguggucuguaauaa

SEQ ID NO: 795670 - RNA, 19 nt, Homo sapiens
  misc_RNA (1)...(19): siRNA sense strand
gaaguaucuuugacaacuc

SEQ ID NO: 795671 - RNA, 19 nt, Homo sapiens
  misc_RNA (1)...(19): siRNA sense strand
gcaaguuacagaaguaucu

SEQ ID NO: 795672 - RNA, 19 nt, Homo sapiens
  misc_RNA (1)...(19): siRNA sense strand
cccgcaagcucauguauca

SEQ ID NO: 795673 - RNA, 19 nt, Homo sapiens
  misc_RNA (1)...(19): siRNA sense strand
agaguauguugccaucuuu

SEQ ID NO: 795674 - RNA, 19 nt, Homo sapiens
  misc_RNA (1)...(19): siRNA sense strand
aaugcugccucuuacuaua

SEQ ID NO: 795675 - RNA, 19 nt, Homo sapiens
  misc_RNA (1)...(19): siRNA sense strand
guacaacuugcacucguuu

SEQ ID NO: 795676 - RNA, 19 nt, Homo sapiens
  misc_RNA (1)...(19): siRNA sense strand
caaacucaaucaccaccau

SEQ ID NO: 795677 - RNA, 19 nt, Homo sapiens
  misc_RNA (1)...(19): siRNA sense strand
agaaguaucuuugacaacu

SEQ ID NO: 795678 - RNA, 19 nt, Homo sapiens
  misc_RNA (1)...(19): siRNA sense strand
gcagguuuccuagagagua

SEQ ID NO: 795679 - RNA, 19 nt, Homo sapiens
  misc_RNA (1)...(19): siRNA sense strand
cugcagcauuucagcuaua

SEQ ID NO: 795680 - RNA, 19 nt, Homo sapiens
  misc_RNA (1)...(19): siRNA sense strand
ggaguucgauuccuauacc

SEQ ID NO: 795681 - RNA, 19 nt, Homo sapiens
  misc_RNA (1)...(19): siRNA sense strand
gguauugugggcauaugua

SEQ ID NO: 795682 - RNA, 19 nt, Homo sapiens
  misc_RNA (1)...(19): siRNA sense strand
uaaacuauuuccagaagcu

SEQ ID NO: 795683 - RNA, 19 nt, Homo sapiens
  misc_RNA (1)...(19): siRNA sense strand
uauacaggauucucagcaa

SEQ ID NO: 795684 - RNA, 19 nt, Homo sapiens
  misc_RNA (1)...(19): siRNA sense strand
gcaggagauuuaucagacu

SEQ ID NO: 795685 - RNA, 19 nt, Homo sapiens
  misc_RNA (1)...(19): siRNA sense strand
gaaagcaauccugcagguu

SEQ ID NO: 795686 - RNA, 19 nt, Homo sapiens
  misc_RNA (1)...(19): siRNA sense strand
ggagauuuaucagacucuu

SEQ ID NO: 795687 - RNA, 19 nt, Homo sapiens
  misc_RNA (1)...(19): siRNA sense strand
gagccaggguaauggaagu

SEQ ID NO: 795688 - RNA, 19 nt, Homo sapiens
  misc_RNA (1)...(19): siRNA sense strand
gccaggcgcuuccuuacag

SEQ ID NO: 795689 - RNA, 19 nt, Homo sapiens
  misc_RNA (1)...(19): siRNA sense strand
uacuauaacuucacagucu

SEQ ID NO: 795690 - RNA, 19 nt, Homo sapiens
  misc_RNA (1)...(19): siRNA sense strand
uaauaagcuugcugagaca

SEQ ID NO: 795691 - RNA, 19 nt, Homo sapiens
  misc_RNA (1)...(19): siRNA sense strand
uaucagacucuucauggaa

SEQ ID NO: 795692 - RNA, 19 nt, Homo sapiens
  misc_RNA (1)...(19): siRNA sense strand
ggaaggcccagaccagagu

SEQ ID NO: 795693 - RNA, 19 nt, Homo sapiens
  misc_RNA (1)...(19): siRNA sense strand
ccucaaugcugccucuuac

SEQ ID NO: 795694 - RNA, 19 nt, Homo sapiens
  misc_RNA (1)...(19): siRNA sense strand
gcauucagcagaggaguau

SEQ ID NO: 795695 - RNA, 19 nt, Homo sapiens
  misc_RNA (1)...(19): siRNA sense strand
cuuaaacuauuuccagaag

SEQ ID NO: 795696 - RNA, 19 nt, Homo sapiens
  misc_RNA (1)...(19): siRNA sense strand
cuaauggaaucaggcaguu

SEQ ID NO: 795697 - RNA, 19 nt, Homo sapiens
  misc_RNA (1)...(19): siRNA sense strand
aagcaauccugcagguuuc

SEQ ID NO: 795698 - RNA, 19 nt, Homo sapiens
  misc_RNA (1)...(19): siRNA sense strand
gccagucuauacaggauuc

SEQ ID NO: 795699 - RNA, 19 nt, Homo sapiens
  misc_RNA (1)...(19): siRNA sense strand
gcauuucagcuauaaacug

SEQ ID NO: 795700 - RNA, 19 nt, Homo sapiens
  misc_RNA (1)...(19): siRNA sense strand
ugagccaggcgcuuccuua

SEQ ID NO: 795701 - RNA, 19 nt, Homo sapiens
  misc_RNA (1)...(19): siRNA sense strand
caugacugauccacagaau

SEQ ID NO: 795702 - RNA, 19 nt, Homo sapiens
  misc_RNA (1)...(19): siRNA sense strand
ggaugcaagcucagguuga

SEQ ID NO: 795703 - RNA, 19 nt, Homo sapiens
  misc_RNA (1)...(19): siRNA sense strand
ucuuggcucugacugauga

SEQ ID NO: 795704 - RNA, 19 nt, Homo sapiens
  misc_RNA (1)...(19): siRNA sense strand
caacauuccaaacucaauc

SEQ ID NO: 795705 - RNA, 19 nt, Homo sapiens
  misc_RNA (1)...(19): siRNA sense strand
caaugcugccucuuacuau

SEQ ID NO: 795706 - RNA, 19 nt, Homo sapiens
  misc_RNA (1)...(19): siRNA sense strand
uuacagaaguaucuuugac

SEQ ID NO: 795707 - RNA, 19 nt, Homo sapiens
  misc_RNA (1)...(19): siRNA sense strand
ggucaaugcaaccaacuuc

SEQ ID NO: 795708 - RNA, 19 nt, Homo sapiens
  misc_RNA (1)...(19): siRNA sense strand
uauguugccaucuuuggua

SEQ ID NO: 795709 - RNA, 19 nt, Homo sapiens
  misc_RNA (1)...(19): siRNA sense strand
uggagugaaugcaauaucu

SEQ ID NO: 795710 - RNA, 19 nt, Homo sapiens
  misc_RNA (1)...(19): siRNA sense strand
gaauccuggcuauauaguu

SEQ ID NO: 795711 - RNA, 19 nt, Homo sapiens
  misc_RNA (1)...(19): siRNA sense strand
gugggaauccuggcuauau

SEQ ID NO: 795712 - RNA, 19 nt, Homo sapiens
  misc_RNA (1)...(19): siRNA sense strand
cuucaacauuccaaacuca

SEQ ID NO: 795713 - RNA, 19 nt, Homo sapiens
  misc_RNA (1)...(19): siRNA sense strand
cuauaacuucacagucuua

SEQ ID NO: 795714 - RNA, 19 nt, Homo sapiens
  misc_RNA (1)...(19): siRNA sense strand
guugccaucuuugguaaug

SEQ ID NO: 795715 - RNA, 19 nt, Homo sapiens
  misc_RNA (1)...(19): siRNA sense strand
cagcaggagauuuaucaga

SEQ ID NO: 795716 - RNA, 19 nt, Homo sapiens
  misc_RNA (1)...(19): siRNA sense strand
ccaaguggucuguaauaag

SEQ ID NO: 795717 - RNA, 19 nt, Homo sapiens
  misc_RNA (1)...(19): siRNA sense strand
acaggauucucagcaaguu

SEQ ID NO: 795718 - RNA, 19 nt, Homo sapiens
  misc_RNA (1)...(19): siRNA sense strand
gaaggcccagaccagagua

SEQ ID NO: 795719 - RNA, 19 nt, Homo sapiens
  misc_RNA (1)...(19): siRNA sense strand
gcaagcucagguugaagaa

SEQ ID NO: 795720 - RNA, 19 nt, Homo sapiens
  misc_RNA (1)...(19): siRNA sense strand
gcucugacugaugauauaa

SEQ ID NO: 795721 - RNA, 19 nt, Homo sapiens
  misc_RNA (1)...(19): siRNA sense strand
gacaaaccaaccugacugu

SEQ ID NO: 795722 - RNA, 19 nt, Homo sapiens
  misc_RNA (1)...(19): siRNA sense strand
gggaauccuggcuauauag

SEQ ID NO: 795723 - RNA, 19 nt, Homo sapiens
  misc_RNA (1)...(19): siRNA sense strand
gggaccccauucuuacuua

SEQ ID NO: 795724 - RNA, 19 nt, Homo sapiens
  misc_RNA (1)...(19): siRNA sense strand
agacaugaagugcaguuug

SEQ ID NO: 795725 - RNA, 19 nt, Homo sapiens
  misc_RNA (1)...(19): siRNA sense strand
uucaagaaccuggcuagua

SEQ ID NO: 795726 - RNA, 19 nt, Homo sapiens
  misc_RNA (1)...(19): siRNA sense strand
gcccagaccagaguauguu

SEQ ID NO: 795727 - RNA, 19 nt, Homo sapiens
  misc_RNA (1)...(19): siRNA sense strand
ggagugaaugcaauaucug

SEQ ID NO: 795728 - RNA, 19 nt, Homo sapiens
  misc_RNA (1)...(19): siRNA sense strand
ggaauccuggcuauauagu

SEQ ID NO: 795729 - RNA, 19 nt, Homo sapiens
  misc_RNA (1)...(19): siRNA sense strand
gcaugacugauccacagaa

SEQ ID NO: 795730 - RNA, 19 nt, Homo sapiens
  misc_RNA (1)...(19): siRNA sense strand
ggauucagcccucaaugcu

SEQ ID NO: 795731 - RNA, 19 nt, Homo sapiens
  misc_RNA (1)...(19): siRNA sense strand
acuugcagcaggagauuua

SEQ ID NO: 795732 - RNA, 19 nt, Homo sapiens
  misc_RNA (1)...(19): siRNA sense strand
ugcagcauuucagcuauaa

SEQ ID NO: 795733 - RNA, 19 nt, Homo sapiens
  misc_RNA (1)...(19): siRNA sense strand
acuuggaguucucaaccua

SEQ ID NO: 795734 - RNA, 19 nt, Homo sapiens
  misc_RNA (1)...(19): siRNA sense strand
gaagaaaugugcaaagugu

SEQ ID NO: 795735 - RNA, 19 nt, Homo sapiens
  misc_RNA (1)...(19): siRNA sense strand
ggaaguugcugacucauau

SEQ ID NO: 795736 - RNA, 19 nt, Homo sapiens
  misc_RNA (1)...(19): siRNA sense strand
gaacgacaguacaggaaga

SEQ ID NO: 795737 - RNA, 19 nt, Homo sapiens
  misc_RNA (1)...(19): siRNA sense strand
gcggagaccugaaggcauu

SEQ ID NO: 795738 - RNA, 19 nt, Homo sapiens
  misc_RNA (1)...(19): siRNA sense strand
ccaaagacaugggcaaguu

SEQ ID NO: 795739 - RNA, 19 nt, Homo sapiens
  misc_RNA (1)...(19): siRNA sense strand
ccaaagaaugcuccuguua

SEQ ID NO: 795740 - RNA, 19 nt, Homo sapiens
  misc_RNA (1)...(19): siRNA sense strand
ugcaagagcuggcugaauu

SEQ ID NO: 795741 - RNA, 19 nt, Homo sapiens
  misc_RNA (1)...(19): siRNA sense strand
uuagagaaauugcccauga

SEQ ID NO: 795742 - RNA, 19 nt, Homo sapiens
  misc_RNA (1)...(19): siRNA sense strand
gcacagaaugccaaaguga

SEQ ID NO: 795743 - RNA, 19 nt, Homo sapiens
  misc_RNA (1)...(19): siRNA sense strand
ugacaaccaguucaaauaa

SEQ ID NO: 795744 - RNA, 19 nt, Homo sapiens
  misc_RNA (1)...(19): siRNA sense strand
ccaaacaugcccauaaguu

SEQ ID NO: 795745 - RNA, 19 nt, Homo sapiens
  misc_RNA (1)...(19): siRNA sense strand
aacaagagccuccuaagaa

SEQ ID NO: 795746 - RNA, 19 nt, Homo sapiens
  misc_RNA (1)...(19): siRNA sense strand
gcaaaggcaugagcaagag

SEQ ID NO: 795747 - RNA, 19 nt, Homo sapiens
  misc_RNA (1)...(19): siRNA sense strand
ugacucauaugcacagaau

SEQ ID NO: 795748 - RNA, 19 nt, Homo sapiens
  misc_RNA (1)...(19): siRNA sense strand
aaacaagagccuccuaaga

SEQ ID NO: 795749 - RNA, 19 nt, Homo sapiens
  misc_RNA (1)...(19): siRNA sense strand
gcaagaggcgacugcaaga

SEQ ID NO: 795750 - RNA, 19 nt, Homo sapiens
  misc_RNA (1)...(19): siRNA sense strand
gaagaugaggagacuaugu

SEQ ID NO: 795751 - RNA, 19 nt, Homo sapiens
  misc_RNA (1)...(19): siRNA sense strand
cauuguggauggagcagua

SEQ ID NO: 795752 - RNA, 19 nt, Homo sapiens
  misc_RNA (1)...(19): siRNA sense strand
ggaagaaaugugcaaagug

SEQ ID NO: 795753 - RNA, 19 nt, Homo sapiens
  misc_RNA (1)...(19): siRNA sense strand
gagcaguagucaaguuugg

SEQ ID NO: 795754 - RNA, 19 nt, Homo sapiens
  misc_RNA (1)...(19): siRNA sense strand
gggaaguugcugacucaua

SEQ ID NO: 795755 - RNA, 19 nt, Homo sapiens
  misc_RNA (1)...(19): siRNA sense strand
agagcuggcugaauuggaa

SEQ ID NO: 795756 - RNA, 19 nt, Homo sapiens
  misc_RNA (1)...(19): siRNA sense strand
gauugaggcuagggaaguu

SEQ ID NO: 795757 - RNA, 19 nt, Homo sapiens
  misc_RNA (1)...(19): siRNA sense strand
gcaagagcuggcugaauug

SEQ ID NO: 795758 - RNA, 19 nt, Homo sapiens
  misc_RNA (1)...(19): siRNA sense strand
gccaaagaaugcuccuguu

SEQ ID NO: 795759 - RNA, 19 nt, Homo sapiens
  misc_RNA (1)...(19): siRNA sense strand
acaagagccuccuaagaag

SEQ ID NO: 795760 - RNA, 19 nt, Homo sapiens
  misc_RNA (1)...(19): siRNA sense strand
gaaacaagagccuccuaag

SEQ ID NO: 795761 - RNA, 19 nt, Homo sapiens
  misc_RNA (1)...(19): siRNA sense strand
gauugaugcugccaaacau

SEQ ID NO: 795762 - RNA, 19 nt, Homo sapiens
  misc_RNA (1)...(19): siRNA sense strand
ggaccuugauugacaacca

SEQ ID NO: 795763 - RNA, 19 nt, Homo sapiens
  misc_RNA (1)...(19): siRNA sense strand
cuaagaaggugaugaugac

SEQ ID NO: 795764 - RNA, 19 nt, Homo sapiens
  misc_RNA (1)...(19): siRNA sense strand
gacaguacaggaagaaaug

SEQ ID NO: 795765 - RNA, 19 nt, Homo sapiens
  misc_RNA (1)...(19): siRNA sense strand
cagaagaugaggagacuau

SEQ ID NO: 795766 - RNA, 19 nt, Homo sapiens
  misc_RNA (1)...(19): siRNA sense strand
ggauggagcaguagucaag

SEQ ID NO: 795767 - RNA, 19 nt, Homo sapiens
  misc_RNA (1)...(19): siRNA sense strand
gagaagccccuccauguuu

SEQ ID NO: 795768 - RNA, 19 nt, Homo sapiens
  misc_RNA (1)...(19): siRNA sense strand
uaccauugaugaagaggaa

SEQ ID NO: 795769 - RNA, 19 nt, Homo sapiens
  misc_RNA (1)...(19): siRNA sense strand
caaagaaugcuccuguuac

SEQ ID NO: 795770 - RNA, 19 nt, Homo sapiens
  misc_RNA (1)...(19): siRNA sense strand
aagaugaggagacuaugua

SEQ ID NO: 795771 - RNA, 19 nt, Homo sapiens
  misc_RNA (1)...(19): siRNA sense strand
uagggaaguugcugacuca

SEQ ID NO: 795772 - RNA, 19 nt, Homo sapiens
  misc_RNA (1)...(19): siRNA sense strand
ugaccaaacggaccaaaga

SEQ ID NO: 795773 - RNA, 19 nt, Homo sapiens
  misc_RNA (1)...(19): siRNA sense strand
ccuaagaaggugaugauga

SEQ ID NO: 795774 - RNA, 19 nt, Homo sapiens
  misc_RNA (1)...(19): siRNA sense strand
ugucuaccauugaugaaga

SEQ ID NO: 795775 - RNA, 19 nt, Homo sapiens
  misc_RNA (1)...(19): siRNA sense strand
agaaggugaugaugaccaa

SEQ ID NO: 795776 - RNA, 19 nt, Homo sapiens
  misc_RNA (1)...(19): siRNA sense strand
caaacggaccaaagacaug

SEQ ID NO: 795777 - RNA, 19 nt, Homo sapiens
  misc_RNA (1)...(19): siRNA sense strand
gcccauaaguuuuguaaca

SEQ ID NO: 795778 - RNA, 19 nt, Homo sapiens
  misc_RNA (1)...(19): siRNA sense strand
gaagaggaagaggagauug

SEQ ID NO: 795779 - RNA, 19 nt, Homo sapiens
  misc_RNA (1)...(19): siRNA sense strand
ggaaaacgaacauauauac

SEQ ID NO: 795780 - RNA, 19 nt, Homo sapiens
  misc_RNA (1)...(19): siRNA sense strand
cgacaguacaggaagaaau

SEQ ID NO: 795781 - RNA, 19 nt, Homo sapiens
  misc_RNA (1)...(19): siRNA sense strand
acagaaugccaaagugauu

SEQ ID NO: 795782 - RNA, 19 nt, Homo sapiens
  misc_RNA (1)...(19): siRNA sense strand
agaaacaagagccuccuaa

SEQ ID NO: 795783 - RNA, 19 nt, Homo sapiens
  misc_RNA (1)...(19): siRNA sense strand
acgaacauauauacucaga

SEQ ID NO: 795784 - RNA, 19 nt, Homo sapiens
  misc_RNA (1)...(19): siRNA sense strand
aguagugucucggucagua

SEQ ID NO: 795785 - RNA, 19 nt, Homo sapiens
  misc_RNA (1)...(19): siRNA sense strand
gacaugggcaaguucaguu

SEQ ID NO: 795786 - RNA, 19 nt, Homo sapiens
  misc_RNA (1)...(19): siRNA sense strand
cauguuuacuacuguuugu

SEQ ID NO: 795787 - RNA, 19 nt, Homo sapiens
  misc_RNA (1)...(19): siRNA sense strand
ugugauugaugcugccaaa

SEQ ID NO: 795788 - RNA, 19 nt, Homo sapiens
  misc_RNA (1)...(19): siRNA sense strand
agaagccccuccauguuua

SEQ ID NO: 795789 - RNA, 19 nt, Homo sapiens
  misc_RNA (1)...(19): siRNA sense strand
agaaugcuccuguuaccuu

SEQ ID NO: 795790 - RNA, 19 nt, Homo sapiens
  misc_RNA (1)...(19): siRNA sense strand
aggaagaaaugugcaaagu

SEQ ID NO: 795791 - RNA, 19 nt, Homo sapiens
  misc_RNA (1)...(19): siRNA sense strand
gagcaagaggcgacugcaa

SEQ ID NO: 795792 - RNA, 19 nt, Homo sapiens
  misc_RNA (1)...(19): siRNA sense strand
aaagaaugcuccuguuacc

SEQ ID NO: 795793 - RNA, 19 nt, Homo sapiens
  misc_RNA (1)...(19): siRNA sense strand
ugccaaacaugcccauaag

SEQ ID NO: 795794 - RNA, 19 nt, Homo sapiens
  misc_RNA (1)...(19): siRNA sense strand
caaagacaugggcaaguuc

SEQ ID NO: 795795 - RNA, 19 nt, Homo sapiens
  misc_RNA (1)...(19): siRNA sense strand
gggaaaacgaacauauaua

SEQ ID NO: 795796 - RNA, 19 nt, Homo sapiens
  misc_RNA (1)...(19): siRNA sense strand
ccaaacggaccaaagacau

SEQ ID NO: 795797 - RNA, 19 nt, Homo sapiens
  misc_RNA (1)...(19): siRNA sense strand
gaaguugcugacucauaug

SEQ ID NO: 795798 - RNA, 19 nt, Homo sapiens
  misc_RNA (1)...(19): siRNA sense strand
ggagcaguagucaaguuug

SEQ ID NO: 795799 - RNA, 19 nt, Homo sapiens
  misc_RNA (1)...(19): siRNA sense strand
cgcaaaggcaugagcaaga

SEQ ID NO: 795800 - RNA, 19 nt, Homo sapiens
  misc_RNA (1)...(19): siRNA sense strand
uagagaaauugcccaugag

SEQ ID NO: 795801 - RNA, 19 nt, Homo sapiens
  misc_RNA (1)...(19): siRNA sense strand
caccgugucuaccauugau

SEQ ID NO: 795802 - RNA, 19 nt, Homo sapiens
  misc_RNA (1)...(19): siRNA sense strand
ugaagaggaagaggagauu

SEQ ID NO: 795803 - RNA, 19 nt, Homo sapiens
  misc_RNA (1)...(19): siRNA sense strand
ggaagccaagaaagcgaaa

SEQ ID NO: 795804 - RNA, 19 nt, Homo sapiens
  misc_RNA (1)...(19): siRNA sense strand
aagaggaagaggagauuga

SEQ ID NO: 795805 - RNA, 19 nt, Homo sapiens
  misc_RNA (1)...(19): siRNA sense strand
cugccaaacaugcccauaa

SEQ ID NO: 795806 - RNA, 19 nt, Homo sapiens
  misc_RNA (1)...(19): siRNA sense strand
ugauugaugcugccaaaca

SEQ ID NO: 795807 - RNA, 19 nt, Homo sapiens
  misc_RNA (1)...(19): siRNA sense strand
caagaaagcgaaaaugaag

SEQ ID NO: 795808 - RNA, 19 nt, Homo sapiens
  misc_RNA (1)...(19): siRNA sense strand
ccaagaaagcgaaaaugaa

SEQ ID NO: 795809 - RNA, 19 nt, Homo sapiens
  misc_RNA (1)...(19): siRNA sense strand
cagaaugccaaagugauug

SEQ ID NO: 795810 - RNA, 19 nt, Homo sapiens
  misc_RNA (1)...(19): siRNA sense strand
gacugccgcucuucuacca

SEQ ID NO: 795811 - RNA, 19 nt, Homo sapiens
  misc_RNA (1)...(19): siRNA sense strand
gcgagaagccccuccaugu

SEQ ID NO: 795812 - RNA, 19 nt, Homo sapiens
  misc_RNA (1)...(19): siRNA sense strand
gggaccgggaggaauauga

SEQ ID NO: 795813 - RNA, 19 nt, Homo sapiens
  misc_RNA (1)...(19): siRNA sense strand
gaugaggagacuauguauc

SEQ ID NO: 795814 - RNA, 19 nt, Homo sapiens
  misc_RNA (1)...(19): siRNA sense strand
cacagaagaugaggagacu

SEQ ID NO: 795815 - RNA, 19 nt, Homo sapiens
  misc_RNA (1)...(19): siRNA sense strand
cagaaacaagagccuccua

SEQ ID NO: 795816 - RNA, 19 nt, Homo sapiens
  misc_RNA (1)...(19): siRNA sense strand
gccaagaaagcgaaaauga

SEQ ID NO: 795817 - RNA, 19 nt, Homo sapiens
  misc_RNA (1)...(19): siRNA sense strand
ggcaaguucaguucuguca

SEQ ID NO: 795818 - RNA, 19 nt, Homo sapiens
  misc_RNA (1)...(19): siRNA sense strand
gcauugaacgacaguacag

SEQ ID NO: 795819 - RNA, 19 nt, Homo sapiens
  misc_RNA (1)...(19): siRNA sense strand
caccacaccuggauaauuu

SEQ ID NO: 795820 - RNA, 19 nt, Homo sapiens
  misc_RNA (1)...(19): siRNA sense strand
gcaggaaacucuacuucga

SEQ ID NO: 795821 - RNA, 19 nt, Homo sapiens
  misc_RNA (1)...(19): siRNA sense strand
caaugaaucucacucuuuc

SEQ ID NO: 795822 - RNA, 19 nt, Homo sapiens
  misc_RNA (1)...(19): siRNA sense strand
cuucgacacucaugccuua

SEQ ID NO: 795823 - RNA, 19 nt, Homo sapiens
  misc_RNA (1)...(19): siRNA sense strand
gacaaugaaucucacucuu

SEQ ID NO: 795824 - RNA, 19 nt, Homo sapiens
  misc_RNA (1)...(19): siRNA sense strand
acaaugaaucucacucuuu

SEQ ID NO: 795825 - RNA, 19 nt, Homo sapiens
  misc_RNA (1)...(19): siRNA sense strand
ucaaacugcugaccucaag

SEQ ID NO: 795826 - RNA, 19 nt, Homo sapiens
  misc_RNA (1)...(19): siRNA sense strand
gagcaggaaacucuacuuc

SEQ ID NO: 795827 - RNA, 19 nt, Homo sapiens
  misc_RNA (1)...(19): siRNA sense strand
gccagcggcuucucuucuu

SEQ ID NO: 795828 - RNA, 19 nt, Homo sapiens
  misc_RNA (1)...(19): siRNA sense strand
cugcugaccucaagugauc

SEQ ID NO: 795829 - RNA, 19 nt, Homo sapiens
  misc_RNA (1)...(19): siRNA sense strand
caagugauccacccaccuu

SEQ ID NO: 795830 - RNA, 19 nt, Homo sapiens
  misc_RNA (1)...(19): siRNA sense strand
gcaccaccacaccuggaua

SEQ ID NO: 795831 - RNA, 19 nt, Homo sapiens
  misc_RNA (1)...(19): siRNA sense strand
ccaccacaccuggauaauu

SEQ ID NO: 795832 - RNA, 19 nt, Homo sapiens
  misc_RNA (1)...(19): siRNA sense strand
gaaacucuacuucgacacu

SEQ ID NO: 795833 - RNA, 19 nt, Homo sapiens
  misc_RNA (1)...(19): siRNA sense strand
cugaguagcugggauuaca

SEQ ID NO: 795834 - RNA, 19 nt, Homo sapiens
  misc_RNA (1)...(19): siRNA sense strand
ccagcggcuucucuucuug

SEQ ID NO: 795835 - RNA, 19 nt, Homo sapiens
  misc_RNA (1)...(19): siRNA sense strand
caccaccacaccuggauaa

SEQ ID NO: 795836 - RNA, 19 nt, Homo sapiens
  misc_RNA (1)...(19): siRNA sense strand
uggaagacaaugaaucuca

SEQ ID NO: 795837 - RNA, 19 nt, Homo sapiens
  misc_RNA (1)...(19): siRNA sense strand
ggagcaggaaacucuacuu

SEQ ID NO: 795838 - RNA, 19 nt, Homo sapiens
  misc_RNA (1)...(19): siRNA sense strand
aaacugcugaccucaagug

SEQ ID NO: 795839 - RNA, 19 nt, Homo sapiens
  misc_RNA (1)...(19): siRNA sense strand
gaagacaaugaaucucacu

SEQ ID NO: 795840 - RNA, 19 nt, Homo sapiens
  misc_RNA (1)...(19): siRNA sense strand
gcaaagaagucaccauuua

SEQ ID NO: 795841 - RNA, 19 nt, Homo sapiens
  misc_RNA (1)...(19): siRNA sense strand
gaaguuaccuccaaaucaa

SEQ ID NO: 795842 - RNA, 19 nt, Homo sapiens
  misc_RNA (1)...(19): siRNA sense strand
gaacaacccuuauucuaca

SEQ ID NO: 795843 - RNA, 19 nt, Homo sapiens
  misc_RNA (1)...(19): siRNA sense strand
agucgaagcuucucucuua

SEQ ID NO: 795844 - RNA, 19 nt, Homo sapiens
  misc_RNA (1)...(19): siRNA sense strand
gcacaucucuuauucuaca

SEQ ID NO: 795845 - RNA, 19 nt, Homo sapiens
  misc_RNA (1)...(19): siRNA sense strand
gaaaucagucuuuguugua

SEQ ID NO: 795846 - RNA, 19 nt, Homo sapiens
  misc_RNA (1)...(19): siRNA sense strand
gcgcacaucucuuauucua

SEQ ID NO: 795847 - RNA, 19 nt, Homo sapiens
  misc_RNA (1)...(19): siRNA sense strand
caaggcaccuauaacauuu

SEQ ID NO: 795848 - RNA, 19 nt, Homo sapiens
  misc_RNA (1)...(19): siRNA sense strand
caaaugugaucaccuuauu

SEQ ID NO: 795849 - RNA, 19 nt, Homo sapiens
  misc_RNA (1)...(19): siRNA sense strand
ggacuuagccaucuacuuc

SEQ ID NO: 795850 - RNA, 19 nt, Homo sapiens
  misc_RNA (1)...(19): siRNA sense strand
gagaaacccuaugaaugua

SEQ ID NO: 795851 - RNA, 19 nt, Homo sapiens
  misc_RNA (1)...(19): siRNA sense strand
gagaaacccuaugaaugua

SEQ ID NO: 795852 - RNA, 19 nt, Homo sapiens
  misc_RNA (1)...(19): siRNA sense strand
cgacauaagagaauucaua

SEQ ID NO: 795853 - RNA, 19 nt, Homo sapiens
  misc_RNA (1)...(19): siRNA sense strand
caaugucagucuuucaaua

SEQ ID NO: 795854 - RNA, 19 nt, Homo sapiens
  misc_RNA (1)...(19): siRNA sense strand
gcgaaggccuuaagucaga

SEQ ID NO: 795855 - RNA, 19 nt, Homo sapiens
  misc_RNA (1)...(19): siRNA sense strand
ccaaaucaaugcaacaaau

SEQ ID NO: 795856 - RNA, 19 nt, Homo sapiens
  misc_RNA (1)...(19): siRNA sense strand
gagagaaacccuaugaaug

SEQ ID NO: 795857 - RNA, 19 nt, Homo sapiens
  misc_RNA (1)...(19): siRNA sense strand
gaccaaaugugaucaccuu

SEQ ID NO: 795858 - RNA, 19 nt, Homo sapiens
  misc_RNA (1)...(19): siRNA sense strand
gagagaagccauauacaug

SEQ ID NO: 795859 - RNA, 19 nt, Homo sapiens
  misc_RNA (1)...(19): siRNA sense strand
gaaagcacccuggauggua

SEQ ID NO: 795860 - RNA, 19 nt, Homo sapiens
  misc_RNA (1)...(19): siRNA sense strand
ggaaaagccuucaaucaga

SEQ ID NO: 795861 - RNA, 19 nt, Homo sapiens
  misc_RNA (1)...(19): siRNA sense strand
ggggaaagcuucaaucaaa

SEQ ID NO: 795862 - RNA, 19 nt, Homo sapiens
  misc_RNA (1)...(19): siRNA sense strand
caacaaaucugggcaaagc

SEQ ID NO: 795863 - RNA, 19 nt, Homo sapiens
  misc_RNA (1)...(19): siRNA sense strand
gaagucaccauuuagagaa

SEQ ID NO: 795864 - RNA, 19 nt, Homo sapiens
  misc_RNA (1)...(19): siRNA sense strand
ggagagaaacccuaugaau

SEQ ID NO: 795865 - RNA, 19 nt, Homo sapiens
  misc_RNA (1)...(19): siRNA sense strand
ccaagaaguuaccuccaaa

SEQ ID NO: 795866 - RNA, 19 nt, Homo sapiens
  misc_RNA (1)...(19): siRNA sense strand
aaucaaagaacaacccuua

SEQ ID NO: 795867 - RNA, 19 nt, Homo sapiens
  misc_RNA (1)...(19): siRNA sense strand
cagaaaaugugggaaauua

SEQ ID NO: 795868 - RNA, 19 nt, Homo sapiens
  misc_RNA (1)...(19): siRNA sense strand
ggaagaaaccuuuaaaaug

SEQ ID NO: 795869 - RNA, 19 nt, Homo sapiens
  misc_RNA (1)...(19): siRNA sense strand
gaagccauauacaugcaaa

SEQ ID NO: 795870 - RNA, 19 nt, Homo sapiens
  misc_RNA (1)...(19): siRNA sense strand
ucagaaaguucauacaaag

SEQ ID NO: 795871 - RNA, 19 nt, Homo sapiens
  misc_RNA (1)...(19): siRNA sense strand
ugauaaaugugacaaguuc

SEQ ID NO: 795872 - RNA, 19 nt, Homo sapiens
  misc_RNA (1)...(19): siRNA sense strand
caaagaacaacccuuauuc

SEQ ID NO: 795873 - RNA, 19 nt, Homo sapiens
  misc_RNA (1)...(19): siRNA sense strand
ccaaggcaccuauaacauu

SEQ ID NO: 795874 - RNA, 19 nt, Homo sapiens
  misc_RNA (1)...(19): siRNA sense strand
gaaacccuaugaauguaau

SEQ ID NO: 795875 - RNA, 19 nt, Homo sapiens
  misc_RNA (1)...(19): siRNA sense strand
cagagaaaccguacaaaug

SEQ ID NO: 795876 - RNA, 19 nt, Homo sapiens
  misc_RNA (1)...(19): siRNA sense strand
gagaaaccguacaaaugug

SEQ ID NO: 795877 - RNA, 19 nt, Homo sapiens
  misc_RNA (1)...(19): siRNA sense strand
guaaaugugggaaggcaua

SEQ ID NO: 795878 - RNA, 19 nt, Homo sapiens
  misc_RNA (1)...(19): siRNA sense strand
ggaaagcuucaaucaaaga

SEQ ID NO: 795879 - RNA, 19 nt, Homo sapiens
  misc_RNA (1)...(19): siRNA sense strand
agaaggauuuguaugaaga

SEQ ID NO: 795880 - RNA, 19 nt, Homo sapiens
  misc_RNA (1)...(19): siRNA sense strand
agagaaacccuaugaaugu

SEQ ID NO: 795881 - RNA, 19 nt, Homo sapiens
  misc_RNA (1)...(19): siRNA sense strand
agagaaacccuaugaaugu

SEQ ID NO: 795882 - RNA, 19 nt, Homo sapiens
  misc_RNA (1)...(19): siRNA sense strand
ggagagaagccauauacau

SEQ ID NO: 795883 - RNA, 19 nt, Homo sapiens
  misc_RNA (1)...(19): siRNA sense strand
gagagaaaaucccugaaaa

SEQ ID NO: 795884 - RNA, 19 nt, Homo sapiens
  misc_RNA (1)...(19): siRNA sense strand
ucaaagaacaacccuuauu

SEQ ID NO: 795885 - RNA, 19 nt, Homo sapiens
  misc_RNA (1)...(19): siRNA sense strand
gaaaagccaugaaugcaau

SEQ ID NO: 795886 - RNA, 19 nt, Homo sapiens
  misc_RNA (1)...(19): siRNA sense strand
ucagaaggauuuguaugaa

SEQ ID NO: 795887 - RNA, 19 nt, Homo sapiens
  misc_RNA (1)...(19): siRNA sense strand
gagaauucaugauggaaag

SEQ ID NO: 795888 - RNA, 19 nt, Homo sapiens
  misc_RNA (1)...(19): siRNA sense strand
gaugguagagccaguaaga

SEQ ID NO: 795889 - RNA, 19 nt, Homo sapiens
  misc_RNA (1)...(19): siRNA sense strand
cagcgcacaucucuuauuc

SEQ ID NO: 795890 - RNA, 19 nt, Homo sapiens
  misc_RNA (1)...(19): siRNA sense strand
ccagagaauucacacuuca

SEQ ID NO: 795891 - RNA, 19 nt, Homo sapiens
  misc_RNA (1)...(19): siRNA sense strand
aagcuucucucuuaaacuu

SEQ ID NO: 795892 - RNA, 19 nt, Homo sapiens
  misc_RNA (1)...(19): siRNA sense strand
gaugucauguuggagaauu

SEQ ID NO: 795893 - RNA, 19 nt, Homo sapiens
  misc_RNA (1)...(19): siRNA sense strand
cagagaaacccuaugaaug

SEQ ID NO: 795894 - RNA, 19 nt, Homo sapiens
  misc_RNA (1)...(19): siRNA sense strand
aaaggaaauucuugacugu

SEQ ID NO: 795895 - RNA, 19 nt, Homo sapiens
  misc_RNA (1)...(19): siRNA sense strand
agaaaucagucuuuguugu

SEQ ID NO: 795896 - RNA, 19 nt, Homo sapiens
  misc_RNA (1)...(19): siRNA sense strand
gaauucacacuucagagaa

SEQ ID NO: 795897 - RNA, 19 nt, Homo sapiens
  misc_RNA (1)...(19): siRNA sense strand
agucagcgcacaucucuua

SEQ ID NO: 795898 - RNA, 19 nt, Homo sapiens
  misc_RNA (1)...(19): siRNA sense strand
cagcaaagaagucaccauu

SEQ ID NO: 795899 - RNA, 19 nt, Homo sapiens
  misc_RNA (1)...(19): siRNA sense strand
gaaacccuaugaauguagu

SEQ ID NO: 795900 - RNA, 19 nt, Homo sapiens
  misc_RNA (1)...(19): siRNA sense strand
uaaggaaugugggaagaug

SEQ ID NO: 795901 - RNA, 19 nt, Homo sapiens
  misc_RNA (1)...(19): siRNA sense strand
gaaacuauuugaguguaag

SEQ ID NO: 795902 - RNA, 19 nt, Homo sapiens
  misc_RNA (1)...(19): siRNA sense strand
caaagaagucaccauuuag

SEQ ID NO: 795903 - RNA, 19 nt, Homo sapiens
  misc_RNA (1)...(19): siRNA sense strand
gagaagccauauacaugca

SEQ ID NO: 795904 - RNA, 19 nt, Homo sapiens
  misc_RNA (1)...(19): siRNA sense strand
cauaagagaauucauacug

SEQ ID NO: 795905 - RNA, 19 nt, Homo sapiens
  misc_RNA (1)...(19): siRNA sense strand
caucaaagaauucauacug

SEQ ID NO: 795906 - RNA, 19 nt, Homo sapiens
  misc_RNA (1)...(19): siRNA sense strand
gaaagcuucaaucaaagaa

SEQ ID NO: 795907 - RNA, 19 nt, Homo sapiens
  misc_RNA (1)...(19): siRNA sense strand
caucagaaaguucauacaa

SEQ ID NO: 795908 - RNA, 19 nt, Homo sapiens
  misc_RNA (1)...(19): siRNA sense strand
caacaucagaaaguucaua

SEQ ID NO: 795909 - RNA, 19 nt, Homo sapiens
  misc_RNA (1)...(19): siRNA sense strand
agagaaaccguacaaaugu

SEQ ID NO: 795910 - RNA, 19 nt, Homo sapiens
  misc_RNA (1)...(19): siRNA sense strand
gagagaagccuuuugaaug

SEQ ID NO: 795911 - RNA, 19 nt, Homo sapiens
  misc_RNA (1)...(19): siRNA sense strand
cgacaucagagaagucauu

SEQ ID NO: 795912 - RNA, 19 nt, Homo sapiens
  misc_RNA (1)...(19): siRNA sense strand
ggauuuguaugaagauguc

SEQ ID NO: 795913 - RNA, 19 nt, Homo sapiens
  misc_RNA (1)...(19): siRNA sense strand
gggaagauguuuucuggaa

SEQ ID NO: 795914 - RNA, 19 nt, Homo sapiens
  misc_RNA (1)...(19): siRNA sense strand
aaucggcauucaucccuua

SEQ ID NO: 795915 - RNA, 19 nt, Homo sapiens
  misc_RNA (1)...(19): siRNA sense strand
gggaaagcuucaaucaaag

SEQ ID NO: 795916 - RNA, 19 nt, Homo sapiens
  misc_RNA (1)...(19): siRNA sense strand
gaucucauccauccuacuu

SEQ ID NO: 795917 - RNA, 19 nt, Homo sapiens
  misc_RNA (1)...(19): siRNA sense strand
ucagacagaucucauccau

SEQ ID NO: 795918 - RNA, 19 nt, Homo sapiens
  misc_RNA (1)...(19): siRNA sense strand
gcacaccucgcccaacaug

SEQ ID NO: 795919 - RNA, 19 nt, Homo sapiens
  misc_RNA (1)...(19): siRNA sense strand
gugcacaccucgcccaaca

SEQ ID NO: 795920 - RNA, 19 nt, Homo sapiens
  misc_RNA (1)...(19): siRNA sense strand
gcauucaucccuuauucaa

SEQ ID NO: 795921 - RNA, 19 nt, Homo sapiens
  misc_RNA (1)...(19): siRNA sense strand
gaaaagccuucaaucagau

SEQ ID NO: 795922 - RNA, 19 nt, Homo sapiens
  misc_RNA (1)...(19): siRNA sense strand
caacccuuauucuacauau

SEQ ID NO: 795923 - RNA, 19 nt, Homo sapiens
  misc_RNA (1)...(19): siRNA sense strand
aaagaagucaccauuuaga

SEQ ID NO: 795924 - RNA, 19 nt, Homo sapiens
  misc_RNA (1)...(19): siRNA sense strand
ugaaugcaguaauuguaga

SEQ ID NO: 795925 - RNA, 19 nt, Homo sapiens
  misc_RNA (1)...(19): siRNA sense strand
ucagagaaacccuaugaau

SEQ ID NO: 795926 - RNA, 19 nt, Homo sapiens
  misc_RNA (1)...(19): siRNA sense strand
gaagucauacuggagagaa

SEQ ID NO: 795927 - RNA, 19 nt, Homo sapiens
  misc_RNA (1)...(19): siRNA sense strand
ucagagaaaccguacaaau

SEQ ID NO: 795928 - RNA, 19 nt, Homo sapiens
  misc_RNA (1)...(19): siRNA sense strand
cauccuacuucaucagaga

SEQ ID NO: 795929 - RNA, 19 nt, Homo sapiens
  misc_RNA (1)...(19): siRNA sense strand
caucucuuauucuacauga

SEQ ID NO: 795930 - RNA, 19 nt, Homo sapiens
  misc_RNA (1)...(19): siRNA sense strand
cagaaggauuuguaugaag

SEQ ID NO: 795931 - RNA, 19 nt, Homo sapiens
  misc_RNA (1)...(19): siRNA sense strand
gcaauaaaugugagaaggu

SEQ ID NO: 795932 - RNA, 19 nt, Homo sapiens
  misc_RNA (1)...(19): siRNA sense strand
caaauccaaggcaccuaua

SEQ ID NO: 795933 - RNA, 19 nt, Homo sapiens
  misc_RNA (1)...(19): siRNA sense strand
cuaugaaugugaucagugu

SEQ ID NO: 795934 - RNA, 19 nt, Homo sapiens
  misc_RNA (1)...(19): siRNA sense strand
cggcauucaucccuuauuc

SEQ ID NO: 795935 - RNA, 19 nt, Homo sapiens
  misc_RNA (1)...(19): siRNA sense strand
aaagaguggcugcaacaaa

SEQ ID NO: 795936 - RNA, 19 nt, Homo sapiens
  misc_RNA (1)...(19): siRNA sense strand
gagaaaaucccugaaaaug

SEQ ID NO: 795937 - RNA, 19 nt, Homo sapiens
  misc_RNA (1)...(19): siRNA sense strand
gauggaaaggaaauucuug

SEQ ID NO: 795938 - RNA, 19 nt, Homo sapiens
  misc_RNA (1)...(19): siRNA sense strand
gaaugcaguaauuguagaa

SEQ ID NO: 795939 - RNA, 19 nt, Homo sapiens
  misc_RNA (1)...(19): siRNA sense strand
cgacaucagaauacacauu

SEQ ID NO: 795940 - RNA, 19 nt, Homo sapiens
  misc_RNA (1)...(19): siRNA sense strand
gaaggcaucugcaguaaga

SEQ ID NO: 795941 - RNA, 19 nt, Homo sapiens
  misc_RNA (1)...(19): siRNA sense strand
guaggaagguggucaaaug

SEQ ID NO: 795942 - RNA, 19 nt, Homo sapiens
  misc_RNA (1)...(19): siRNA sense strand
cgacauuccuaucagguua

SEQ ID NO: 795943 - RNA, 19 nt, Homo sapiens
  misc_RNA (1)...(19): siRNA sense strand
ugaagaagcccaagauuga

SEQ ID NO: 795944 - RNA, 19 nt, Homo sapiens
  misc_RNA (1)...(19): siRNA sense strand
ggaagguggucaaauggaa

SEQ ID NO: 795945 - RNA, 19 nt, Homo sapiens
  misc_RNA (1)...(19): siRNA sense strand
gcaggcagcucuccuacga

SEQ ID NO: 795946 - RNA, 19 nt, Homo sapiens
  misc_RNA (1)...(19): siRNA sense strand
gcaguaagaucuaccacau

SEQ ID NO: 795947 - RNA, 19 nt, Homo sapiens
  misc_RNA (1)...(19): siRNA sense strand
ccagguaccuccaaucaga

SEQ ID NO: 795948 - RNA, 19 nt, Homo sapiens
  misc_RNA (1)...(19): siRNA sense strand
ccaagcgccugcucuuuaa

SEQ ID NO: 795949 - RNA, 19 nt, Homo sapiens
  misc_RNA (1)...(19): siRNA sense strand
cgacacagacggcuacuuu

SEQ ID NO: 795950 - RNA, 19 nt, Homo sapiens
  misc_RNA (1)...(19): siRNA sense strand
gccaagcgccugcucuuua

SEQ ID NO: 795951 - RNA, 19 nt, Homo sapiens
  misc_RNA (1)...(19): siRNA sense strand
caacacggcugugcucuuc

SEQ ID NO: 795952 - RNA, 19 nt, Homo sapiens
  misc_RNA (1)...(19): siRNA sense strand
gaccaaugcugucaucaag

SEQ ID NO: 795953 - RNA, 19 nt, Homo sapiens
  misc_RNA (1)...(19): siRNA sense strand
gagcagagccgcuucaaac

SEQ ID NO: 795954 - RNA, 19 nt, Homo sapiens
  misc_RNA (1)...(19): siRNA sense strand
cgugucaccuuccauguuu

SEQ ID NO: 795955 - RNA, 19 nt, Homo sapiens
  misc_RNA (1)...(19): siRNA sense strand
gaauguggaagacaccuuu

SEQ ID NO: 795956 - RNA, 19 nt, Homo sapiens
  misc_RNA (1)...(19): siRNA sense strand
gccauggucucucacuuug

SEQ ID NO: 795957 - RNA, 19 nt, Homo sapiens
  misc_RNA (1)...(19): siRNA sense strand
gaagaagcccaagauugaa

SEQ ID NO: 795958 - RNA, 19 nt, Homo sapiens
  misc_RNA (1)...(19): siRNA sense strand
gugaagaagcccaagauug

SEQ ID NO: 795959 - RNA, 19 nt, Homo sapiens
  misc_RNA (1)...(19): siRNA sense strand
gcaagaaggaggaaaugca

SEQ ID NO: 795960 - RNA, 19 nt, Homo sapiens
  misc_RNA (1)...(19): siRNA sense strand
ggagaaucgucccuacuac

SEQ ID NO: 795961 - RNA, 19 nt, Homo sapiens
  misc_RNA (1)...(19): siRNA sense strand
gcaaggugguagacaaagg

SEQ ID NO: 795962 - RNA, 19 nt, Homo sapiens
  misc_RNA (1)...(19): siRNA sense strand
ucaaauggaauguggaaga

SEQ ID NO: 795963 - RNA, 19 nt, Homo sapiens
  misc_RNA (1)...(19): siRNA sense strand
gaaccagucgugucaccuu

SEQ ID NO: 795964 - RNA, 19 nt, Homo sapiens
  misc_RNA (1)...(19): siRNA sense strand
ucaaacggauccgagagaa

SEQ ID NO: 795965 - RNA, 19 nt, Homo sapiens
  misc_RNA (1)...(19): siRNA sense strand
guggaaggcaucugcagua

SEQ ID NO: 795966 - RNA, 19 nt, Homo sapiens
  misc_RNA (1)...(19): siRNA sense strand
gcguggagaugcacaugga

SEQ ID NO: 795967 - RNA, 19 nt, Homo sapiens
  misc_RNA (1)...(19): siRNA sense strand
cgccugcucuuuaaauaug

SEQ ID NO: 795968 - RNA, 19 nt, Homo sapiens
  misc_RNA (1)...(19): siRNA sense strand
agacuuugcuccacugagu

SEQ ID NO: 795969 - RNA, 19 nt, Homo sapiens
  misc_RNA (1)...(19): siRNA sense strand
gacucaagcuugguggaaa

SEQ ID NO: 795970 - RNA, 19 nt, Homo sapiens
  misc_RNA (1)...(19): siRNA sense strand
uggaaggcaucugcaguaa

SEQ ID NO: 795971 - RNA, 19 nt, Homo sapiens
  misc_RNA (1)...(19): siRNA sense strand
gauccugccugccuuugag

SEQ ID NO: 795972 - RNA, 19 nt, Homo sapiens
  misc_RNA (1)...(19): siRNA sense strand
gcgcaaggugguagacaaa

SEQ ID NO: 795973 - RNA, 19 nt, Homo sapiens
  misc_RNA (1)...(19): siRNA sense strand
aggaggaaaugcacuacaa

SEQ ID NO: 795974 - RNA, 19 nt, Homo sapiens
  misc_RNA (1)...(19): siRNA sense strand
ccaaggaggacuacaugga

SEQ ID NO: 795975 - RNA, 19 nt, Homo sapiens
  misc_RNA (1)...(19): siRNA sense strand
ggucaaauggaauguggaa

SEQ ID NO: 795976 - RNA, 19 nt, Homo sapiens
  misc_RNA (1)...(19): siRNA sense strand
aagcgucccugcugaguca

SEQ ID NO: 795977 - RNA, 19 nt, Homo sapiens
  misc_RNA (1)...(19): siRNA sense strand
acagaacgacccuggcuuu

SEQ ID NO: 795978 - RNA, 19 nt, Homo sapiens
  misc_RNA (1)...(19): siRNA sense strand
guacguccccugaagauaa

SEQ ID NO: 795979 - RNA, 19 nt, Homo sapiens
  misc_RNA (1)...(19): siRNA sense strand
gcaagcuguggcuccuuua

SEQ ID NO: 795980 - RNA, 19 nt, Homo sapiens
  misc_RNA (1)...(19): siRNA sense strand
caaggaggacuacauggau

SEQ ID NO: 795981 - RNA, 19 nt, Homo sapiens
  misc_RNA (1)...(19): siRNA sense strand
caaauggaauguggaagac

SEQ ID NO: 795982 - RNA, 19 nt, Homo sapiens
  misc_RNA (1)...(19): siRNA sense strand
ccagaccaaugcugucauc

SEQ ID NO: 795983 - RNA, 19 nt, Homo sapiens
  misc_RNA (1)...(19): siRNA sense strand
gaagguggucaaauggaau

SEQ ID NO: 795984 - RNA, 19 nt, Homo sapiens
  misc_RNA (1)...(19): siRNA sense strand
ggagcagagccgcuucaaa

SEQ ID NO: 795985 - RNA, 19 nt, Homo sapiens
  misc_RNA (1)...(19): siRNA sense strand
gacgguaccagaugauguu

SEQ ID NO: 795986 - RNA, 19 nt, Homo sapiens
  misc_RNA (1)...(19): siRNA sense strand
cgcuacagcugcauugaug

SEQ ID NO: 795987 - RNA, 19 nt, Homo sapiens
  misc_RNA (1)...(19): siRNA sense strand
gcugagaacaagcccagaa

SEQ ID NO: 795988 - RNA, 19 nt, Homo sapiens
  misc_RNA (1)...(19): siRNA sense strand
gaaaucaugaacgacauuc

SEQ ID NO: 795989 - RNA, 19 nt, Homo sapiens
  misc_RNA (1)...(19): siRNA sense strand
aaucagagccagcccuguu

SEQ ID NO: 795990 - RNA, 19 nt, Homo sapiens
  misc_RNA (1)...(19): siRNA sense strand
ccuacuacuucaaccgauu

SEQ ID NO: 795991 - RNA, 19 nt, Homo sapiens
  misc_RNA (1)...(19): siRNA sense strand
gaaucgucccuacuacuuc

SEQ ID NO: 795992 - RNA, 19 nt, Homo sapiens
  misc_RNA (1)...(19): siRNA sense strand
cuacaaggccguccacaac

SEQ ID NO: 795993 - RNA, 19 nt, Homo sapiens
  misc_RNA (1)...(19): siRNA sense strand
agaaggaggaaaugcacua

SEQ ID NO: 795994 - RNA, 19 nt, Homo sapiens
  misc_RNA (1)...(19): siRNA sense strand
gaucgcugccugugcaugu

SEQ ID NO: 795995 - RNA, 19 nt, Homo sapiens
  misc_RNA (1)...(19): siRNA sense strand
agggagagauggucaaggu

SEQ ID NO: 795996 - RNA, 19 nt, Homo sapiens
  misc_RNA (1)...(19): siRNA sense strand
gggcagcacgaugugauuu

SEQ ID NO: 795997 - RNA, 19 nt, Homo sapiens
  misc_RNA (1)...(19): siRNA sense strand
gagaacaagcccagaaagc

SEQ ID NO: 795998 - RNA, 19 nt, Homo sapiens
  misc_RNA (1)...(19): siRNA sense strand
cuucaaacgccaccaguug

SEQ ID NO: 795999 - RNA, 19 nt, Homo sapiens
  misc_RNA (1)...(19): siRNA sense strand
cagguuaucccgaaucaag

SEQ ID NO: 796000 - RNA, 19 nt, Homo sapiens
  misc_RNA (1)...(19): siRNA sense strand
caaggugguagacaaagga

SEQ ID NO: 796001 - RNA, 19 nt, Homo sapiens
  misc_RNA (1)...(19): siRNA sense strand
aaucgucccuacuacuuca

SEQ ID NO: 796002 - RNA, 19 nt, Homo sapiens
  misc_RNA (1)...(19): siRNA sense strand
gcaacuacuucagcaagcu

SEQ ID NO: 796003 - RNA, 19 nt, Homo sapiens
  misc_RNA (1)...(19): siRNA sense strand
ugaacgacauuccuaucag

SEQ ID NO: 796004 - RNA, 19 nt, Homo sapiens
  misc_RNA (1)...(19): siRNA sense strand
agaugcacauggagaacaa

SEQ ID NO: 796005 - RNA, 19 nt, Homo sapiens
  misc_RNA (1)...(19): siRNA sense strand
aagaagcccaagauugaaa

SEQ ID NO: 796006 - RNA, 19 nt, Homo sapiens
  misc_RNA (1)...(19): siRNA sense strand
ggaggaaaugcacuacaag

SEQ ID NO: 796007 - RNA, 19 nt, Homo sapiens
  misc_RNA (1)...(19): siRNA sense strand
uggaugccauggucucuca

SEQ ID NO: 796008 - RNA, 19 nt, Homo sapiens
  misc_RNA (1)...(19): siRNA sense strand
agcaagcuguggcuccuuu

SEQ ID NO: 796009 - RNA, 19 nt, Homo sapiens
  misc_RNA (1)...(19): siRNA sense strand
agaaucgucccuacuacuu

SEQ ID NO: 796010 - RNA, 19 nt, Homo sapiens
  misc_RNA (1)...(19): siRNA sense strand
gcgccugcucuuuaaauau

SEQ ID NO: 796011 - RNA, 19 nt, Homo sapiens
  misc_RNA (1)...(19): siRNA sense strand
gugaaaucaugaacgacau

SEQ ID NO: 796012 - RNA, 19 nt, Homo sapiens
  misc_RNA (1)...(19): siRNA sense strand
ugaaaucaugaacgacauu

SEQ ID NO: 796013 - RNA, 19 nt, Homo sapiens
  misc_RNA (1)...(19): siRNA sense strand
ggucagccgcaacuacuuc

SEQ ID NO: 796014 - RNA, 19 nt, Homo sapiens
  misc_RNA (1)...(19): siRNA sense strand
agaacaacguggucugcau

SEQ ID NO: 796015 - RNA, 19 nt, Homo sapiens
  misc_RNA (1)...(19): siRNA sense strand
gcagcacgaugugauuucg

SEQ ID NO: 796016 - RNA, 19 nt, Homo sapiens
  misc_RNA (1)...(19): siRNA sense strand
gguuaucccgaaucaaguu

SEQ ID NO: 796017 - RNA, 19 nt, Homo sapiens
  misc_RNA (1)...(19): siRNA sense strand
cagcugcauugaugacucu

SEQ ID NO: 796018 - RNA, 19 nt, Homo sapiens
  misc_RNA (1)...(19): siRNA sense strand
cggcugugcucuuccuaca

SEQ ID NO: 796019 - RNA, 19 nt, Homo sapiens
  misc_RNA (1)...(19): siRNA sense strand
ugaugacucugccuuugag

SEQ ID NO: 796020 - RNA, 19 nt, Homo sapiens
  misc_RNA (1)...(19): siRNA sense strand
gcuccgcucucagcucauc

SEQ ID NO: 796021 - RNA, 19 nt, Homo sapiens
  misc_RNA (1)...(19): siRNA sense strand
uuugagagacugcuugaga

SEQ ID NO: 796022 - RNA, 19 nt, Homo sapiens
  misc_RNA (1)...(19): siRNA sense strand
gagaaucgucccuacuacu

SEQ ID NO: 796023 - RNA, 19 nt, Homo sapiens
  misc_RNA (1)...(19): siRNA sense strand
ggugguagacaaaggaucu

SEQ ID NO: 796024 - RNA, 19 nt, Homo sapiens
  misc_RNA (1)...(19): siRNA sense strand
gcucccagcacaucugcaa

SEQ ID NO: 796025 - RNA, 19 nt, Homo sapiens
  misc_RNA (1)...(19): siRNA sense strand
ugccauggucucucacuuu

SEQ ID NO: 796026 - RNA, 19 nt, Homo sapiens
  misc_RNA (1)...(19): siRNA sense strand
ggaaggcaucugcaguaag

SEQ ID NO: 796027 - RNA, 19 nt, Homo sapiens
  misc_RNA (1)...(19): siRNA sense strand
ggaauguggaagacaccuu

SEQ ID NO: 796028 - RNA, 19 nt, Homo sapiens
  misc_RNA (1)...(19): siRNA sense strand
gcggcaauggugugaagaa

SEQ ID NO: 796029 - RNA, 19 nt, Homo sapiens
  misc_RNA (1)...(19): siRNA sense strand
gacacagacggcuacuuug

SEQ ID NO: 796030 - RNA, 19 nt, Homo sapiens
  misc_RNA (1)...(19): siRNA sense strand
gagaugcacauggagaaca

SEQ ID NO: 796031 - RNA, 19 nt, Homo sapiens
  misc_RNA (1)...(19): siRNA sense strand
agccagcccuguucuccaa

SEQ ID NO: 796032 - RNA, 19 nt, Homo sapiens
  misc_RNA (1)...(19): siRNA sense strand
agcgccugcucuuuaaaua

SEQ ID NO: 796033 - RNA, 19 nt, Homo sapiens
  misc_RNA (1)...(19): siRNA sense strand
acacagacggcuacuuugg

SEQ ID NO: 796034 - RNA, 19 nt, Homo sapiens
  misc_RNA (1)...(19): siRNA sense strand
caaggucagccgcaacuac

SEQ ID NO: 796035 - RNA, 19 nt, Homo sapiens
  misc_RNA (1)...(19): siRNA sense strand
agaccaaugcugucaucaa

SEQ ID NO: 796036 - RNA, 19 nt, Homo sapiens
  misc_RNA (1)...(19): siRNA sense strand
aagcggcaauggugugaag

SEQ ID NO: 796037 - RNA, 19 nt, Homo sapiens
  misc_RNA (1)...(19): siRNA sense strand
cgacgguaccagaugaugu

SEQ ID NO: 796038 - RNA, 19 nt, Homo sapiens
  misc_RNA (1)...(19): siRNA sense strand
ggaagcgucccugcugagu

SEQ ID NO: 796039 - RNA, 19 nt, Homo sapiens
  misc_RNA (1)...(19): siRNA sense strand
gcagagagcuguggucaug

SEQ ID NO: 796040 - RNA, 19 nt, Homo sapiens
  misc_RNA (1)...(19): siRNA sense strand
caagugaucucucugauuc

SEQ ID NO: 796041 - RNA, 19 nt, Homo sapiens
  misc_RNA (1)...(19): siRNA sense strand
gaaauccacccaucacauu

SEQ ID NO: 796042 - RNA, 19 nt, Homo sapiens
  misc_RNA (1)...(19): siRNA sense strand
gaaaugaggacagaagaaa

SEQ ID NO: 796043 - RNA, 19 nt, Homo sapiens
  misc_RNA (1)...(19): siRNA sense strand
ggaaguauaucgauagacu

SEQ ID NO: 796044 - RNA, 19 nt, Homo sapiens
  misc_RNA (1)...(19): siRNA sense strand
gaagaaauugauccaguuu

SEQ ID NO: 796045 - RNA, 19 nt, Homo sapiens
  misc_RNA (1)...(19): siRNA sense strand
ugaagaaauugauccaguu

SEQ ID NO: 796046 - RNA, 19 nt, Homo sapiens
  misc_RNA (1)...(19): siRNA sense strand
gaaaccagcggucacauuc

SEQ ID NO: 796047 - RNA, 19 nt, Homo sapiens
  misc_RNA (1)...(19): siRNA sense strand
gauauggcccugcuucuga

SEQ ID NO: 796048 - RNA, 19 nt, Homo sapiens
  misc_RNA (1)...(19): siRNA sense strand
uuaaagagaaugcugauga

SEQ ID NO: 796049 - RNA, 19 nt, Homo sapiens
  misc_RNA (1)...(19): siRNA sense strand
ggaaaccagcggucacauu

SEQ ID NO: 796050 - RNA, 19 nt, Homo sapiens
  misc_RNA (1)...(19): siRNA sense strand
gcaagugaucucucugauu

SEQ ID NO: 796051 - RNA, 19 nt, Homo sapiens
  misc_RNA (1)...(19): siRNA sense strand
gcagaguaaaucccaagua

SEQ ID NO: 796052 - RNA, 19 nt, Homo sapiens
  misc_RNA (1)...(19): siRNA sense strand
gaggcaaacccuugaaaug

SEQ ID NO: 796053 - RNA, 19 nt, Homo sapiens
  misc_RNA (1)...(19): siRNA sense strand
cagaguaaaucccaaguac

SEQ ID NO: 796054 - RNA, 19 nt, Homo sapiens
  misc_RNA (1)...(19): siRNA sense strand
gcuggcccaucuuggaaua

SEQ ID NO: 796055 - RNA, 19 nt, Homo sapiens
  misc_RNA (1)...(19): siRNA sense strand
gccacuaccucaccaggaa

SEQ ID NO: 796056 - RNA, 19 nt, Homo sapiens
  misc_RNA (1)...(19): siRNA sense strand
gcacaugcacauccuagga

SEQ ID NO: 796057 - RNA, 19 nt, Homo sapiens
  misc_RNA (1)...(19): siRNA sense strand
agaaguaagcuaauugcua

SEQ ID NO: 796058 - RNA, 19 nt, Homo sapiens
  misc_RNA (1)...(19): siRNA sense strand
cccaucacauuaugcauuu

SEQ ID NO: 796059 - RNA, 19 nt, Homo sapiens
  misc_RNA (1)...(19): siRNA sense strand
uaaagagaaugcugaugag

SEQ ID NO: 796060 - RNA, 19 nt, Homo sapiens
  misc_RNA (1)...(19): siRNA sense strand
agaaauugauccaguuuac

SEQ ID NO: 796061 - RNA, 19 nt, Homo sapiens
  misc_RNA (1)...(19): siRNA sense strand
ggcaaacccuugaaaugag

SEQ ID NO: 796062 - RNA, 19 nt, Homo sapiens
  misc_RNA (1)...(19): siRNA sense strand
gaaaagcccugggagaagu

SEQ ID NO: 796063 - RNA, 19 nt, Homo sapiens
  misc_RNA (1)...(19): siRNA sense strand
gggagaaguaagcuaauug

SEQ ID NO: 796064 - RNA, 19 nt, Homo sapiens
  misc_RNA (1)...(19): siRNA sense strand
gaagaaauccacccaucac

SEQ ID NO: 796065 - RNA, 19 nt, Homo sapiens
  misc_RNA (1)...(19): siRNA sense strand
gaaaacaaacggaguaaag

SEQ ID NO: 796066 - RNA, 19 nt, Homo sapiens
  misc_RNA (1)...(19): siRNA sense strand
ccaguuuacuuugaucuuc

SEQ ID NO: 796067 - RNA, 19 nt, Homo sapiens
  misc_RNA (1)...(19): siRNA sense strand
ucacccagccuacugaaga

SEQ ID NO: 796068 - RNA, 19 nt, Homo sapiens
  misc_RNA (1)...(19): siRNA sense strand
aggcaaacccuugaaauga

SEQ ID NO: 796069 - RNA, 19 nt, Homo sapiens
  misc_RNA (1)...(19): siRNA sense strand
uggaauaaagugcaacauu

SEQ ID NO: 796070 - RNA, 19 nt, Homo sapiens
  misc_RNA (1)...(19): siRNA sense strand
cuugggaaguauaucgaua

SEQ ID NO: 796071 - RNA, 19 nt, Homo sapiens
  misc_RNA (1)...(19): siRNA sense strand
cgauagacuuauucagcuu

SEQ ID NO: 796072 - RNA, 19 nt, Homo sapiens
  misc_RNA (1)...(19): siRNA sense strand
ugggagaaguaagcuaauu

SEQ ID NO: 796073 - RNA, 19 nt, Homo sapiens
  misc_RNA (1)...(19): siRNA sense strand
aaauccacccaucacauua

SEQ ID NO: 796074 - RNA, 19 nt, Homo sapiens
  misc_RNA (1)...(19): siRNA sense strand
ugaagaaauccacccauca

SEQ ID NO: 796075 - RNA, 19 nt, Homo sapiens
  misc_RNA (1)...(19): siRNA sense strand
gcaguggaagcagcucuaa

SEQ ID NO: 796076 - RNA, 19 nt, Homo sapiens
  misc_RNA (1)...(19): siRNA sense strand
ugaaaugaggacagaagaa

SEQ ID NO: 796077 - RNA, 19 nt, Homo sapiens
  misc_RNA (1)...(19): siRNA sense strand
caucacauuaugcauuuga

SEQ ID NO: 796078 - RNA, 19 nt, Homo sapiens
  misc_RNA (1)...(19): siRNA sense strand
gaagcaagacgcaaaagga

SEQ ID NO: 796079 - RNA, 19 nt, Homo sapiens
  misc_RNA (1)...(19): siRNA sense strand
caaguaagaguacgaagcu

SEQ ID NO: 796080 - RNA, 19 nt, Homo sapiens
  misc_RNA (1)...(19): siRNA sense strand
cacccagccuacugaagaa

SEQ ID NO: 796081 - RNA, 19 nt, Homo sapiens
  misc_RNA (1)...(19): siRNA sense strand
cgagugggaggacuucuug

SEQ ID NO: 796082 - RNA, 19 nt, Homo sapiens
  misc_RNA (1)...(19): siRNA sense strand
gugcaagugaucucucuga

SEQ ID NO: 796083 - RNA, 19 nt, Homo sapiens
  misc_RNA (1)...(19): siRNA sense strand
acaaacggaguaaagcaaa

SEQ ID NO: 796084 - RNA, 19 nt, Homo sapiens
  misc_RNA (1)...(19): siRNA sense strand
aaacaaacggaguaaagca

SEQ ID NO: 796085 - RNA, 19 nt, Homo sapiens
  misc_RNA (1)...(19): siRNA sense strand
aaagugcaacauucaaaga

SEQ ID NO: 796086 - RNA, 19 nt, Homo sapiens
  misc_RNA (1)...(19): siRNA sense strand
caguuuacuuugaucuuca

SEQ ID NO: 796087 - RNA, 19 nt, Homo sapiens
  misc_RNA (1)...(19): siRNA sense strand
ccucacaccuccagaucuc

SEQ ID NO: 796088 - RNA, 19 nt, Homo sapiens
  misc_RNA (1)...(19): siRNA sense strand
ccugggagaaguaagcuaa

SEQ ID NO: 796089 - RNA, 19 nt, Homo sapiens
  misc_RNA (1)...(19): siRNA sense strand
acaugcacauccuaggaaa

SEQ ID NO: 796090 - RNA, 19 nt, Homo sapiens
  misc_RNA (1)...(19): siRNA sense strand
aagcagcucuaagguggaa

SEQ ID NO: 796091 - RNA, 19 nt, Homo sapiens
  misc_RNA (1)...(19): siRNA sense strand
cugcagcgcugggaucugu

SEQ ID NO: 796092 - RNA, 19 nt, Homo sapiens
  misc_RNA (1)...(19): siRNA sense strand
ggagaaguaagcuaauugc

SEQ ID NO: 796093 - RNA, 19 nt, Homo sapiens
  misc_RNA (1)...(19): siRNA sense strand
gaucuguccggcaguggaa

SEQ ID NO: 796094 - RNA, 19 nt, Homo sapiens
  misc_RNA (1)...(19): siRNA sense strand
uaaagugcaacauucaaag

SEQ ID NO: 796095 - RNA, 19 nt, Homo sapiens
  misc_RNA (1)...(19): siRNA sense strand
uggcccaucuuggaauaaa

SEQ ID NO: 796096 - RNA, 19 nt, Homo sapiens
  misc_RNA (1)...(19): siRNA sense strand
caaacggaguaaagcaaaa

SEQ ID NO: 796097 - RNA, 19 nt, Homo sapiens
  misc_RNA (1)...(19): siRNA sense strand
gaugaggacagugcaagug

SEQ ID NO: 796098 - RNA, 19 nt, Homo sapiens
  misc_RNA (1)...(19): siRNA sense strand
ugggaaguauaucgauaga

SEQ ID NO: 796099 - RNA, 19 nt, Homo sapiens
  misc_RNA (1)...(19): siRNA sense strand
ccugggaccuacgagauau

SEQ ID NO: 796100 - RNA, 19 nt, Homo sapiens
  misc_RNA (1)...(19): siRNA sense strand
gaaauugauccaguuuacu

SEQ ID NO: 796101 - RNA, 19 nt, Homo sapiens
  misc_RNA (1)...(19): siRNA sense strand
uugauccaguuuacuuuga

SEQ ID NO: 796102 - RNA, 19 nt, Homo sapiens
  misc_RNA (1)...(19): siRNA sense strand
ggacagugcaagugaucuc

SEQ ID NO: 796103 - RNA, 19 nt, Homo sapiens
  misc_RNA (1)...(19): siRNA sense strand
gaggacagaagaaaagaaa

SEQ ID NO: 796104 - RNA, 19 nt, Homo sapiens
  misc_RNA (1)...(19): siRNA sense strand
cagaggcaaacccuugaaa

SEQ ID NO: 796105 - RNA, 19 nt, Homo sapiens
  misc_RNA (1)...(19): siRNA sense strand
gaggacagugcaagugauc

SEQ ID NO: 796106 - RNA, 19 nt, Homo sapiens
  misc_RNA (1)...(19): siRNA sense strand
aaccagcggucacauucga

SEQ ID NO: 796107 - RNA, 19 nt, Homo sapiens
  misc_RNA (1)...(19): siRNA sense strand
ugaggacagugcaagugau

SEQ ID NO: 796108 - RNA, 19 nt, Homo sapiens
  misc_RNA (1)...(19): siRNA sense strand
cauuaugcauuugagacuu

SEQ ID NO: 796109 - RNA, 19 nt, Homo sapiens
  misc_RNA (1)...(19): siRNA sense strand
gucaggcccuucccgaaag

SEQ ID NO: 796110 - RNA, 19 nt, Homo sapiens
  misc_RNA (1)...(19): siRNA sense strand
gaaugcugaugaggacagu

SEQ ID NO: 796111 - RNA, 19 nt, Homo sapiens
  misc_RNA (1)...(19): siRNA sense strand
ucaggcccuucccgaaaga

SEQ ID NO: 796112 - RNA, 19 nt, Homo sapiens
  misc_RNA (1)...(19): siRNA sense strand
agaaaucaaguaagaguac

SEQ ID NO: 796113 - RNA, 19 nt, Homo sapiens
  misc_RNA (1)...(19): siRNA sense strand
ccucagggaauaaacuguu

SEQ ID NO: 796114 - RNA, 19 nt, Homo sapiens
  misc_RNA (1)...(19): siRNA sense strand
uauccuaauuuccuuccau

SEQ ID NO: 796115 - RNA, 19 nt, Homo sapiens
  misc_RNA (1)...(19): siRNA sense strand
acucagcagauuccuguaa

SEQ ID NO: 796116 - RNA, 19 nt, Homo sapiens
  misc_RNA (1)...(19): siRNA sense strand
ucacauucgaguucccaaa

SEQ ID NO: 796117 - RNA, 19 nt, Homo sapiens
  misc_RNA (1)...(19): siRNA sense strand
auagacuuauucagcuuga

SEQ ID NO: 796118 - RNA, 19 nt, Homo sapiens
  misc_RNA (1)...(19): siRNA sense strand
cacaugcacauccuaggaa

SEQ ID NO: 796119 - RNA, 19 nt, Homo sapiens
  misc_RNA (1)...(19): siRNA sense strand
agucaggcccuucccgaaa

SEQ ID NO: 796120 - RNA, 19 nt, Homo sapiens
  misc_RNA (1)...(19): siRNA sense strand
gaacagcuuuacagcacua

SEQ ID NO: 796121 - RNA, 19 nt, Homo sapiens
  misc_RNA (1)...(19): siRNA sense strand
ggacagagaacagcuuuac

SEQ ID NO: 796122 - RNA, 19 nt, Homo sapiens
  misc_RNA (1)...(19): siRNA sense strand
gcagagggccaccuucuac

SEQ ID NO: 796123 - RNA, 19 nt, Homo sapiens
  misc_RNA (1)...(19): siRNA sense strand
gaggacagagaacagcuuu

SEQ ID NO: 796124 - RNA, 19 nt, Homo sapiens
  misc_RNA (1)...(19): siRNA sense strand
uuacagcacuauccucagu

SEQ ID NO: 796125 - RNA, 19 nt, Homo sapiens
  misc_RNA (1)...(19): siRNA sense strand
gagcagagggccaccuucu

SEQ ID NO: 796126 - RNA, 19 nt, Homo sapiens
  misc_RNA (1)...(19): siRNA sense strand
uggaguugcugcugagagu

SEQ ID NO: 796127 - RNA, 19 nt, Homo sapiens
  misc_RNA (1)...(19): siRNA sense strand
acagcacuauccucaguca

SEQ ID NO: 796128 - RNA, 19 nt, Homo sapiens
  misc_RNA (1)...(19): siRNA sense strand
acagagaacagcuuuacag

SEQ ID NO: 796129 - RNA, 19 nt, Homo sapiens
  misc_RNA (1)...(19): siRNA sense strand
ccugcagacugaacuccuu

SEQ ID NO: 796130 - RNA, 19 nt, Homo sapiens
  misc_RNA (1)...(19): siRNA sense strand
gaguugcugcugagaguuc

SEQ ID NO: 796131 - RNA, 19 nt, Homo sapiens
  misc_RNA (1)...(19): siRNA sense strand
gcaggagaaucaaugagua

SEQ ID NO: 796132 - RNA, 19 nt, Homo sapiens
  misc_RNA (1)...(19): siRNA sense strand
gaaagugcuucaacaagga

SEQ ID NO: 796133 - RNA, 19 nt, Homo sapiens
  misc_RNA (1)...(19): siRNA sense strand
cagaagcgcugccgaaagu

SEQ ID NO: 796134 - RNA, 19 nt, Homo sapiens
  misc_RNA (1)...(19): siRNA sense strand
gagaaucaaugaguacuuc

SEQ ID NO: 796135 - RNA, 19 nt, Homo sapiens
  misc_RNA (1)...(19): siRNA sense strand
ccaaguauguggcgugugu

SEQ ID NO: 796136 - RNA, 19 nt, Homo sapiens
  misc_RNA (1)...(19): siRNA sense strand
gaccaucacugggcuguug

SEQ ID NO: 796137 - RNA, 19 nt, Homo sapiens
  misc_RNA (1)...(19): siRNA sense strand
ggaaggagcaguguguuau

SEQ ID NO: 796138 - RNA, 19 nt, Homo sapiens
  misc_RNA (1)...(19): siRNA sense strand
gaaggagcaguguguuauu

SEQ ID NO: 796139 - RNA, 19 nt, Homo sapiens
  misc_RNA (1)...(19): siRNA sense strand
acuguuaucuccuugauug

SEQ ID NO: 796140 - RNA, 19 nt, Homo sapiens
  misc_RNA (1)...(19): siRNA sense strand
aggaggagcugacccuuga

SEQ ID NO: 796141 - RNA, 19 nt, Homo sapiens
  misc_RNA (1)...(19): siRNA sense strand
gagaacacucagcagcuua

SEQ ID NO: 796142 - RNA, 19 nt, Homo sapiens
  misc_RNA (1)...(19): siRNA sense strand
gcaugugacugccgacucu

SEQ ID NO: 796143 - RNA, 19 nt, Homo sapiens
  misc_RNA (1)...(19): siRNA sense strand
ggacaguagugugcaacga

SEQ ID NO: 796144 - RNA, 19 nt, Homo sapiens
  misc_RNA (1)...(19): siRNA sense strand
aaggagcaguguguuauuu

SEQ ID NO: 796145 - RNA, 19 nt, Homo sapiens
  misc_RNA (1)...(19): siRNA sense strand
gggagccucugaaacuguu

SEQ ID NO: 796146 - RNA, 19 nt, Homo sapiens
  misc_RNA (1)...(19): siRNA sense strand
cauugagacugaacugaga

SEQ ID NO: 796147 - RNA, 19 nt, Homo sapiens
  misc_RNA (1)...(19): siRNA sense strand
cucagcagcuuaucaaugu

SEQ ID NO: 796148 - RNA, 19 nt, Homo sapiens
  misc_RNA (1)...(19): siRNA sense strand
caaacuuggccuucauuga

SEQ ID NO: 796149 - RNA, 19 nt, Homo sapiens
  misc_RNA (1)...(19): siRNA sense strand
gaaacuguuaucuccuuga

SEQ ID NO: 796150 - RNA, 19 nt, Homo sapiens
  misc_RNA (1)...(19): siRNA sense strand
aaacuuggccuucauugag

SEQ ID NO: 796151 - RNA, 19 nt, Homo sapiens
  misc_RNA (1)...(19): siRNA sense strand
ucaacaaggacuccacuga

SEQ ID NO: 796152 - RNA, 19 nt, Homo sapiens
  misc_RNA (1)...(19): siRNA sense strand
cggaaggagcaguguguua

SEQ ID NO: 796153 - RNA, 19 nt, Homo sapiens
  misc_RNA (1)...(19): siRNA sense strand
aaacuguuaucuccuugau

SEQ ID NO: 796154 - RNA, 19 nt, Homo sapiens
  misc_RNA (1)...(19): siRNA sense strand
cagcaaggccaggacagua

SEQ ID NO: 796155 - RNA, 19 nt, Homo sapiens
  misc_RNA (1)...(19): siRNA sense strand
ggagaaucaaugaguacuu

SEQ ID NO: 796156 - RNA, 19 nt, Homo sapiens
  misc_RNA (1)...(19): siRNA sense strand
guuaucuccuugauuguca

SEQ ID NO: 796157 - RNA, 19 nt, Homo sapiens
  misc_RNA (1)...(19): siRNA sense strand
guacagugcaccaggaagu

SEQ ID NO: 796158 - RNA, 19 nt, Homo sapiens
  misc_RNA (1)...(19): siRNA sense strand
uuaccuacgucaaccuaga

SEQ ID NO: 796159 - RNA, 19 nt, Homo sapiens
  misc_RNA (1)...(19): siRNA sense strand
cugaaacuguuaucuccuu

SEQ ID NO: 796160 - RNA, 19 nt, Homo sapiens
  misc_RNA (1)...(19): siRNA sense strand
gugcaacgacccugacaug

SEQ ID NO: 796161 - RNA, 19 nt, Homo sapiens
  misc_RNA (1)...(19): siRNA sense strand
gcaacgacccugacaugac

SEQ ID NO: 796162 - RNA, 19 nt, Homo sapiens
  misc_RNA (1)...(19): siRNA sense strand
cgaauggugaggucuguga

SEQ ID NO: 796163 - RNA, 19 nt, Homo sapiens
  misc_RNA (1)...(19): siRNA sense strand
ccuggagaccgguaucuuu

SEQ ID NO: 796164 - RNA, 19 nt, Homo sapiens
  misc_RNA (1)...(19): siRNA sense strand
ggaaggcaccccaggcuaa

SEQ ID NO: 796165 - RNA, 19 nt, Homo sapiens
  misc_RNA (1)...(19): siRNA sense strand
acacucagcagcuuaucaa

SEQ ID NO: 796166 - RNA, 19 nt, Homo sapiens
  misc_RNA (1)...(19): siRNA sense strand
accaggaagucuccaguga

SEQ ID NO: 796167 - RNA, 19 nt, Homo sapiens
  misc_RNA (1)...(19): siRNA sense strand
ccaggacaguagugugcaa

SEQ ID NO: 796168 - RNA, 19 nt, Homo sapiens
  misc_RNA (1)...(19): siRNA sense strand
guauguggcgugugucugu

SEQ ID NO: 796169 - RNA, 19 nt, Homo sapiens
  misc_RNA (1)...(19): siRNA sense strand
ucuccuugauugucacuga

SEQ ID NO: 796170 - RNA, 19 nt, Homo sapiens
  misc_RNA (1)...(19): siRNA sense strand
gccagcaucaggucccuuu

SEQ ID NO: 796171 - RNA, 19 nt, Homo sapiens
  misc_RNA (1)...(19): siRNA sense strand
cuacgucaaccuagagaga

SEQ ID NO: 796172 - RNA, 19 nt, Homo sapiens
  misc_RNA (1)...(19): siRNA sense strand
uugcuacgcuguggagcua

SEQ ID NO: 796173 - RNA, 19 nt, Homo sapiens
  misc_RNA (1)...(19): siRNA sense strand
gccgaaagugcuucaacaa

SEQ ID NO: 796174 - RNA, 19 nt, Homo sapiens
  misc_RNA (1)...(19): siRNA sense strand
ccgacucuaugaccugguu

SEQ ID NO: 796175 - RNA, 19 nt, Homo sapiens
  misc_RNA (1)...(19): siRNA sense strand
gaaucaaugaguacuucug

SEQ ID NO: 796176 - RNA, 19 nt, Homo sapiens
  misc_RNA (1)...(19): siRNA sense strand
ggagcaguguguuauuuuc

SEQ ID NO: 796177 - RNA, 19 nt, Homo sapiens
  misc_RNA (1)...(19): siRNA sense strand
gaauggugaggucugugaa

SEQ ID NO: 796178 - RNA, 19 nt, Homo sapiens
  misc_RNA (1)...(19): siRNA sense strand
gcugcagccuccauaucau

SEQ ID NO: 796179 - RNA, 19 nt, Homo sapiens
  misc_RNA (1)...(19): siRNA sense strand
gagacugaacugagaugug

SEQ ID NO: 796180 - RNA, 19 nt, Homo sapiens
  misc_RNA (1)...(19): siRNA sense strand
ggagaccgguaucuuuccu

SEQ ID NO: 796181 - RNA, 19 nt, Homo sapiens
  misc_RNA (1)...(19): siRNA sense strand
ggcaggagaaucaaugagu

SEQ ID NO: 796182 - RNA, 19 nt, Homo sapiens
  misc_RNA (1)...(19): siRNA sense strand
uuucaggccuuuggaguca

SEQ ID NO: 796183 - RNA, 19 nt, Homo sapiens
  misc_RNA (1)...(19): siRNA sense strand
gcagcugcagccuccauau

SEQ ID NO: 796184 - RNA, 19 nt, Homo sapiens
  misc_RNA (1)...(19): siRNA sense strand
ggacuuucaggccuuugga

SEQ ID NO: 796185 - RNA, 19 nt, Homo sapiens
  misc_RNA (1)...(19): siRNA sense strand
ugccgaaagugcuucaaca

SEQ ID NO: 796186 - RNA, 19 nt, Homo sapiens
  misc_RNA (1)...(19): siRNA sense strand
ccugggagccucugaaacu

SEQ ID NO: 796187 - RNA, 19 nt, Homo sapiens
  misc_RNA (1)...(19): siRNA sense strand
caguguggccaucgucauu

SEQ ID NO: 796188 - RNA, 19 nt, Homo sapiens
  misc_RNA (1)...(19): siRNA sense strand
ucaaugugguggugaucag

SEQ ID NO: 796189 - RNA, 19 nt, Homo sapiens
  misc_RNA (1)...(19): siRNA sense strand
gcguguccuugguguggaa

SEQ ID NO: 796190 - RNA, 19 nt, Homo sapiens
  misc_RNA (1)...(19): siRNA sense strand
gcaaggccaggacaguagu

SEQ ID NO: 796191 - RNA, 19 nt, Homo sapiens
  misc_RNA (1)...(19): siRNA sense strand
aacuuggccuucauugaga

SEQ ID NO: 796192 - RNA, 19 nt, Homo sapiens
  misc_RNA (1)...(19): siRNA sense strand
ccacaguuaccuacgucaa

SEQ ID NO: 796193 - RNA, 19 nt, Homo sapiens
  misc_RNA (1)...(19): siRNA sense strand
gcagcaaggccaggacagu

SEQ ID NO: 796194 - RNA, 19 nt, Homo sapiens
  misc_RNA (1)...(19): siRNA sense strand
caaacgaggugaacgauga

SEQ ID NO: 796195 - RNA, 19 nt, Homo sapiens
  misc_RNA (1)...(19): siRNA sense strand
gcaaaugggacgcagaaua

SEQ ID NO: 796196 - RNA, 19 nt, Homo sapiens
  misc_RNA (1)...(19): siRNA sense strand
caaaugggacgcagaauaa

SEQ ID NO: 796197 - RNA, 19 nt, Homo sapiens
  misc_RNA (1)...(19): siRNA sense strand
aaacaagacuuuacucaag

SEQ ID NO: 796198 - RNA, 19 nt, Homo sapiens
  misc_RNA (1)...(19): siRNA sense strand
caacaugccuaaucaacau

SEQ ID NO: 796199 - RNA, 19 nt, Homo sapiens
  misc_RNA (1)...(19): siRNA sense strand
caucggaucuguacuggaa

SEQ ID NO: 796200 - RNA, 19 nt, Homo sapiens
  misc_RNA (1)...(19): siRNA sense strand
acaaagauguccaguuaau

SEQ ID NO: 796201 - RNA, 19 nt, Homo sapiens
  misc_RNA (1)...(19): siRNA sense strand
gaaacaaugcaguaaauca

SEQ ID NO: 796202 - RNA, 19 nt, Homo sapiens
  misc_RNA (1)...(19): siRNA sense strand
caacuaggaagcccagaua

SEQ ID NO: 796203 - RNA, 19 nt, Homo sapiens
  misc_RNA (1)...(19): siRNA sense strand
gcacugaagccacaaacaa

SEQ ID NO: 796204 - RNA, 19 nt, Homo sapiens
  misc_RNA (1)...(19): siRNA sense strand
gaaccagccacacccauuu

SEQ ID NO: 796205 - RNA, 19 nt, Homo sapiens
  misc_RNA (1)...(19): siRNA sense strand
gcacuaagucagaauguca

SEQ ID NO: 796206 - RNA, 19 nt, Homo sapiens
  misc_RNA (1)...(19): siRNA sense strand
ccaccucacuugaauaugg

SEQ ID NO: 796207 - RNA, 19 nt, Homo sapiens
  misc_RNA (1)...(19): siRNA sense strand
ccacacccauuuccucaga

SEQ ID NO: 796208 - RNA, 19 nt, Homo sapiens
  misc_RNA (1)...(19): siRNA sense strand
ggugaacgaugaucaggau

SEQ ID NO: 796209 - RNA, 19 nt, Homo sapiens
  misc_RNA (1)...(19): siRNA sense strand
gcaauaaauccucucuuca

SEQ ID NO: 796210 - RNA, 19 nt, Homo sapiens
  misc_RNA (1)...(19): siRNA sense strand
agaagcaucugcaguaugg

SEQ ID NO: 796211 - RNA, 19 nt, Homo sapiens
  misc_RNA (1)...(19): siRNA sense strand
ccucuuaacugcagaagca

SEQ ID NO: 796212 - RNA, 19 nt, Homo sapiens
  misc_RNA (1)...(19): siRNA sense strand
acagaaugcuagccaaguu

SEQ ID NO: 796213 - RNA, 19 nt, Homo sapiens
  misc_RNA (1)...(19): siRNA sense strand
ucgaaacaaugcaguaaau

SEQ ID NO: 796214 - RNA, 19 nt, Homo sapiens
  misc_RNA (1)...(19): siRNA sense strand
ugaggccucuugucagaaa

SEQ ID NO: 796215 - RNA, 19 nt, Homo sapiens
  misc_RNA (1)...(19): siRNA sense strand
gaaugacugaaacagcuua

SEQ ID NO: 796216 - RNA, 19 nt, Homo sapiens
  misc_RNA (1)...(19): siRNA sense strand
guuaaugcguacuagagaa

SEQ ID NO: 796217 - RNA, 19 nt, Homo sapiens
  misc_RNA (1)...(19): siRNA sense strand
uccaaacucugaccaucua

SEQ ID NO: 796218 - RNA, 19 nt, Homo sapiens
  misc_RNA (1)...(19): siRNA sense strand
guacuggaaugacugaaac

SEQ ID NO: 796219 - RNA, 19 nt, Homo sapiens
  misc_RNA (1)...(19): siRNA sense strand
ggaaccagccacacccauu

SEQ ID NO: 796220 - RNA, 19 nt, Homo sapiens
  misc_RNA (1)...(19): siRNA sense strand
ccacuaccuucgucaaauc

SEQ ID NO: 796221 - RNA, 19 nt, Homo sapiens
  misc_RNA (1)...(19): siRNA sense strand
gcuaauccauuugaugaca

SEQ ID NO: 796222 - RNA, 19 nt, Homo sapiens
  misc_RNA (1)...(19): siRNA sense strand
acaauaacccugcaaaugg

SEQ ID NO: 796223 - RNA, 19 nt, Homo sapiens
  misc_RNA (1)...(19): siRNA sense strand
ucgguaauccaucuuauaa

SEQ ID NO: 796224 - RNA, 19 nt, Homo sapiens
  misc_RNA (1)...(19): siRNA sense strand
gaucuguacuggaaugacu

SEQ ID NO: 796225 - RNA, 19 nt, Homo sapiens
  misc_RNA (1)...(19): siRNA sense strand
guacaaacgaggugaacga

SEQ ID NO: 796226 - RNA, 19 nt, Homo sapiens
  misc_RNA (1)...(19): siRNA sense strand
gugaaucagaguaauauug

SEQ ID NO: 796227 - RNA, 19 nt, Homo sapiens
  misc_RNA (1)...(19): siRNA sense strand
gacaaaauccugcugaaaa

SEQ ID NO: 796228 - RNA, 19 nt, Homo sapiens
  misc_RNA (1)...(19): siRNA sense strand
caaacaauaacccugcaaa

SEQ ID NO: 796229 - RNA, 19 nt, Homo sapiens
  misc_RNA (1)...(19): siRNA sense strand
gaccuucuuucccuccauu

SEQ ID NO: 796230 - RNA, 19 nt, Homo sapiens
  misc_RNA (1)...(19): siRNA sense strand
cuaggaagcccagauaaga

SEQ ID NO: 796231 - RNA, 19 nt, Homo sapiens
  misc_RNA (1)...(19): siRNA sense strand
gcucauccaccucacuuga

SEQ ID NO: 796232 - RNA, 19 nt, Homo sapiens
  misc_RNA (1)...(19): siRNA sense strand
ugugaggccucuugucaga

SEQ ID NO: 796233 - RNA, 19 nt, Homo sapiens
  misc_RNA (1)...(19): siRNA sense strand
acacagugaaucagaguaa

SEQ ID NO: 796234 - RNA, 19 nt, Homo sapiens
  misc_RNA (1)...(19): siRNA sense strand
gcaaauacacagggaccuu

SEQ ID NO: 796235 - RNA, 19 nt, Homo sapiens
  misc_RNA (1)...(19): siRNA sense strand
agcaauaaauccucucuuc

SEQ ID NO: 796236 - RNA, 19 nt, Homo sapiens
  misc_RNA (1)...(19): siRNA sense strand
acagugaaucagaguaaua

SEQ ID NO: 796237 - RNA, 19 nt, Homo sapiens
  misc_RNA (1)...(19): siRNA sense strand
gaugacacagugaaucaga

SEQ ID NO: 796238 - RNA, 19 nt, Homo sapiens
  misc_RNA (1)...(19): siRNA sense strand
aauccucucuucacccaaa

SEQ ID NO: 796239 - RNA, 19 nt, Homo sapiens
  misc_RNA (1)...(19): siRNA sense strand
caugauaauucaaguuucg

SEQ ID NO: 796240 - RNA, 19 nt, Homo sapiens
  misc_RNA (1)...(19): siRNA sense strand
gcuuauggccucuuaacug

SEQ ID NO: 796241 - RNA, 19 nt, Homo sapiens
  misc_RNA (1)...(19): siRNA sense strand
gaauaagccacgacaacca

SEQ ID NO: 796242 - RNA, 19 nt, Homo sapiens
  misc_RNA (1)...(19): siRNA sense strand
caccgaauccaaacucuga

SEQ ID NO: 796243 - RNA, 19 nt, Homo sapiens
  misc_RNA (1)...(19): siRNA sense strand
cuguauggcugacaaagau

SEQ ID NO: 796244 - RNA, 19 nt, Homo sapiens
  misc_RNA (1)...(19): siRNA sense strand
cagaaugccaccucacguu

SEQ ID NO: 796245 - RNA, 19 nt, Homo sapiens
  misc_RNA (1)...(19): siRNA sense strand
guuaggaggaccaggugua

SEQ ID NO: 796246 - RNA, 19 nt, Homo sapiens
  misc_RNA (1)...(19): siRNA sense strand
aggaccagguguacaacua

SEQ ID NO: 796247 - RNA, 19 nt, Homo sapiens
  misc_RNA (1)...(19): siRNA sense strand
guguauccuuguggaauuu

SEQ ID NO: 796248 - RNA, 19 nt, Homo sapiens
  misc_RNA (1)...(19): siRNA sense strand
cugcuaauccauuugauga

SEQ ID NO: 796249 - RNA, 19 nt, Homo sapiens
  misc_RNA (1)...(19): siRNA sense strand
aaacaauaacccugcaaau

SEQ ID NO: 796250 - RNA, 19 nt, Homo sapiens
  misc_RNA (1)...(19): siRNA sense strand
cagaaugcuagccaaguuu

SEQ ID NO: 796251 - RNA, 19 nt, Homo sapiens
  misc_RNA (1)...(19): siRNA sense strand
uuaaucgaccucaugcuuu

SEQ ID NO: 796252 - RNA, 19 nt, Homo sapiens
  misc_RNA (1)...(19): siRNA sense strand
uaaucgaccucaugcuuuu

SEQ ID NO: 796253 - RNA, 19 nt, Homo sapiens
  misc_RNA (1)...(19): siRNA sense strand
cugaagccacaaacaauaa

SEQ ID NO: 796254 - RNA, 19 nt, Homo sapiens
  misc_RNA (1)...(19): siRNA sense strand
aauaaugcacuaagucaga

SEQ ID NO: 796255 - RNA, 19 nt, Homo sapiens
  misc_RNA (1)...(19): siRNA sense strand
ccacaugauaauucaaguu

SEQ ID NO: 796256 - RNA, 19 nt, Homo sapiens
  misc_RNA (1)...(19): siRNA sense strand
auacugugguccuuacuca

SEQ ID NO: 796257 - RNA, 19 nt, Homo sapiens
  misc_RNA (1)...(19): siRNA sense strand
caaagauguccaguuaaug

SEQ ID NO: 796258 - RNA, 19 nt, Homo sapiens
  misc_RNA (1)...(19): siRNA sense strand
ggaaugacugaaacagcuu

SEQ ID NO: 796259 - RNA, 19 nt, Homo sapiens
  misc_RNA (1)...(19): siRNA sense strand
caauaaauccucucuucac

SEQ ID NO: 796260 - RNA, 19 nt, Homo sapiens
  misc_RNA (1)...(19): siRNA sense strand
aacaauaacccugcaaaug

SEQ ID NO: 796261 - RNA, 19 nt, Homo sapiens
  misc_RNA (1)...(19): siRNA sense strand
acugaagccacaaacaaua

SEQ ID NO: 796262 - RNA, 19 nt, Homo sapiens
  misc_RNA (1)...(19): siRNA sense strand
uaggaagcccagauaagaa

SEQ ID NO: 796263 - RNA, 19 nt, Homo sapiens
  misc_RNA (1)...(19): siRNA sense strand
ucauccaccucacuugaau

SEQ ID NO: 796264 - RNA, 19 nt, Homo sapiens
  misc_RNA (1)...(19): siRNA sense strand
acaagacuuuacucaagga

SEQ ID NO: 796265 - RNA, 19 nt, Homo sapiens
  misc_RNA (1)...(19): siRNA sense strand
ccgauuuggcaucuaauuu

SEQ ID NO: 796266 - RNA, 19 nt, Homo sapiens
  misc_RNA (1)...(19): siRNA sense strand
acaaaauccugcugaaaau

SEQ ID NO: 796267 - RNA, 19 nt, Homo sapiens
  misc_RNA (1)...(19): siRNA sense strand
uccauuugaugacaacuau

SEQ ID NO: 796268 - RNA, 19 nt, Homo sapiens
  misc_RNA (1)...(19): siRNA sense strand
ugacugaaacagcuuaugg

SEQ ID NO: 796269 - RNA, 19 nt, Homo sapiens
  misc_RNA (1)...(19): siRNA sense strand
uaugugaggccucuuguca

SEQ ID NO: 796270 - RNA, 19 nt, Homo sapiens
  misc_RNA (1)...(19): siRNA sense strand
uaaucgaaacaaugcagua

SEQ ID NO: 796271 - RNA, 19 nt, Homo sapiens
  misc_RNA (1)...(19): siRNA sense strand
ucuaguggcugcuaaucca

SEQ ID NO: 796272 - RNA, 19 nt, Homo sapiens
  misc_RNA (1)...(19): siRNA sense strand
aaagauguccaguuaaugc

SEQ ID NO: 796273 - RNA, 19 nt, Homo sapiens
  misc_RNA (1)...(19): siRNA sense strand
accaagaggugcagcagau

SEQ ID NO: 796274 - RNA, 19 nt, Homo sapiens
  misc_RNA (1)...(19): siRNA sense strand
auaaugcacuaagucagaa

SEQ ID NO: 796275 - RNA, 19 nt, Homo sapiens
  misc_RNA (1)...(19): siRNA sense strand
cuaauccauuugaugacaa

SEQ ID NO: 796276 - RNA, 19 nt, Homo sapiens
  misc_RNA (1)...(19): siRNA sense strand
gauuuggcaucuaauuuug

SEQ ID NO: 796277 - RNA, 19 nt, Homo sapiens
  misc_RNA (1)...(19): siRNA sense strand
gcagugggcagugaugcuu

SEQ ID NO: 796278 - RNA, 19 nt, Homo sapiens
  misc_RNA (1)...(19): siRNA sense strand
auacacagggaccuucuuu

SEQ ID NO: 796279 - RNA, 19 nt, Homo sapiens
  misc_RNA (1)...(19): siRNA sense strand
aacagcuuauggccucuua

SEQ ID NO: 796280 - RNA, 19 nt, Homo sapiens
  misc_RNA (1)...(19): siRNA sense strand
ggaccagguguacaacuag

SEQ ID NO: 796281 - RNA, 19 nt, Homo sapiens
  misc_RNA (1)...(19): siRNA sense strand
aguguauccuuguggaauu

SEQ ID NO: 796282 - RNA, 19 nt, Homo sapiens
  misc_RNA (1)...(19): siRNA sense strand
cagaauaagccacgacaac

SEQ ID NO: 796283 - RNA, 19 nt, Homo sapiens
  misc_RNA (1)...(19): siRNA sense strand
gggcauggguuuuaaucga

SEQ ID NO: 796284 - RNA, 19 nt, Homo sapiens
  misc_RNA (1)...(19): siRNA sense strand
gcucccgcuuacaaaguuu

SEQ ID NO: 796285 - RNA, 19 nt, Homo sapiens
  misc_RNA (1)...(19): siRNA sense strand
ucaacaugccuaaucaaca

SEQ ID NO: 796286 - RNA, 19 nt, Homo sapiens
  misc_RNA (1)...(19): siRNA sense strand
uuaaugcguacuagagaaa

SEQ ID NO: 796287 - RNA, 19 nt, Homo sapiens
  misc_RNA (1)...(19): siRNA sense strand
gcagaauaagccacgacaa

SEQ ID NO: 796288 - RNA, 19 nt, Homo sapiens
  misc_RNA (1)...(19): siRNA sense strand
aggaagcccagauaagaaa

SEQ ID NO: 796289 - RNA, 19 nt, Homo sapiens
  misc_RNA (1)...(19): siRNA sense strand
cagugaaucagaguaauau

SEQ ID NO: 796290 - RNA, 19 nt, Homo sapiens
  misc_RNA (1)...(19): siRNA sense strand
aaucgaaacaaugcaguaa

SEQ ID NO: 796291 - RNA, 19 nt, Homo sapiens
  misc_RNA (1)...(19): siRNA sense strand
aaacaaugcaguaaaucag

SEQ ID NO: 796292 - RNA, 19 nt, Homo sapiens
  misc_RNA (1)...(19): siRNA sense strand
agugggcagugaugcuuaa

SEQ ID NO: 796293 - RNA, 19 nt, Homo sapiens
  misc_RNA (1)...(19): siRNA sense strand
ccucuugucagaaaugguu

SEQ ID NO: 796294 - RNA, 19 nt, Homo sapiens
  misc_RNA (1)...(19): siRNA sense strand
gagcagagccuguaaacga

SEQ ID NO: 796295 - RNA, 19 nt, Homo sapiens
  misc_RNA (1)...(19): siRNA sense strand
agacagccaucaaggauug

SEQ ID NO: 796296 - RNA, 19 nt, Homo sapiens
  misc_RNA (1)...(19): siRNA sense strand
aaacacaccuagaucaaag

SEQ ID NO: 796297 - RNA, 19 nt, Homo sapiens
  misc_RNA (1)...(19): siRNA sense strand
gcucagauucggccauuaa

SEQ ID NO: 796298 - RNA, 19 nt, Homo sapiens
  misc_RNA (1)...(19): siRNA sense strand
cagagccuguaaacgauua

SEQ ID NO: 796299 - RNA, 19 nt, Homo sapiens
  misc_RNA (1)...(19): siRNA sense strand
aagcagaagacuugaauuu

SEQ ID NO: 796300 - RNA, 19 nt, Homo sapiens
  misc_RNA (1)...(19): siRNA sense strand
cagauucggccauuaauau

SEQ ID NO: 796301 - RNA, 19 nt, Homo sapiens
  misc_RNA (1)...(19): siRNA sense strand
gcagacagccaucaaggau

SEQ ID NO: 796302 - RNA, 19 nt, Homo sapiens
  misc_RNA (1)...(19): siRNA sense strand
ugagggaaaugacucugaa

SEQ ID NO: 796303 - RNA, 19 nt, Homo sapiens
  misc_RNA (1)...(19): siRNA sense strand
gaauuucccacauaaugau

SEQ ID NO: 796304 - RNA, 19 nt, Homo sapiens
  misc_RNA (1)...(19): siRNA sense strand
caaaauuguuucugaagga

SEQ ID NO: 796305 - RNA, 19 nt, Homo sapiens
  misc_RNA (1)...(19): siRNA sense strand
ucagauucggccauuaaua

SEQ ID NO: 796306 - RNA, 19 nt, Homo sapiens
  misc_RNA (1)...(19): siRNA sense strand
gcagugaucccagcaugug

SEQ ID NO: 796307 - RNA, 19 nt, Homo sapiens
  misc_RNA (1)...(19): siRNA sense strand
gaaaacacaccuagaucaa

SEQ ID NO: 796308 - RNA, 19 nt, Homo sapiens
  misc_RNA (1)...(19): siRNA sense strand
gaagcagaagacuugaauu

SEQ ID NO: 796309 - RNA, 19 nt, Homo sapiens
  misc_RNA (1)...(19): siRNA sense strand
gcagagccuguaaacgauu

SEQ ID NO: 796310 - RNA, 19 nt, Homo sapiens
  misc_RNA (1)...(19): siRNA sense strand
gggagacuuugccuucauc

SEQ ID NO: 796311 - RNA, 19 nt, Homo sapiens
  misc_RNA (1)...(19): siRNA sense strand
ggaaaacacaccuagauca

SEQ ID NO: 796312 - RNA, 19 nt, Homo sapiens
  misc_RNA (1)...(19): siRNA sense strand
ugaagcagaagacuugaau

SEQ ID NO: 796313 - RNA, 19 nt, Homo sapiens
  misc_RNA (1)...(19): siRNA sense strand
uagaucaguuggcucagau

SEQ ID NO: 796314 - RNA, 19 nt, Homo sapiens
  misc_RNA (1)...(19): siRNA sense strand
cuagaucaguuggcucaga

SEQ ID NO: 796315 - RNA, 19 nt, Homo sapiens
  misc_RNA (1)...(19): siRNA sense strand
gcgcaaaauuguuucugaa

SEQ ID NO: 796316 - RNA, 19 nt, Homo sapiens
  misc_RNA (1)...(19): siRNA sense strand
gggaaaugacucugaagca

SEQ ID NO: 796317 - RNA, 19 nt, Homo sapiens
  misc_RNA (1)...(19): siRNA sense strand
gaaggagaacuagaucagu

SEQ ID NO: 796318 - RNA, 19 nt, Homo sapiens
  misc_RNA (1)...(19): siRNA sense strand
aacuuucucuucggaauuu

SEQ ID NO: 796319 - RNA, 19 nt, Homo sapiens
  misc_RNA (1)...(19): siRNA sense strand
gaucaguuggcucagauuc

SEQ ID NO: 796320 - RNA, 19 nt, Homo sapiens
  misc_RNA (1)...(19): siRNA sense strand
uaaacgauuaugagggaaa

SEQ ID NO: 796321 - RNA, 19 nt, Homo sapiens
  misc_RNA (1)...(19): siRNA sense strand
aaacgauuaugagggaaau

SEQ ID NO: 796322 - RNA, 19 nt, Homo sapiens
  misc_RNA (1)...(19): siRNA sense strand
gauucggccauuaauauuc

SEQ ID NO: 796323 - RNA, 19 nt, Homo sapiens
  misc_RNA (1)...(19): siRNA sense strand
aaacuuucucuucggaauu

SEQ ID NO: 796324 - RNA, 19 nt, Homo sapiens
  misc_RNA (1)...(19): siRNA sense strand
agacuuugccuucaucaag

SEQ ID NO: 796325 - RNA, 19 nt, Homo sapiens
  misc_RNA (1)...(19): siRNA sense strand
ucagaaaguggcagugauc

SEQ ID NO: 796326 - RNA, 19 nt, Homo sapiens
  misc_RNA (1)...(19): siRNA sense strand
cagggagacuuugccuuca

SEQ ID NO: 796327 - RNA, 19 nt, Homo sapiens
  misc_RNA (1)...(19): siRNA sense strand
cagagaagguaaaacuuuc

SEQ ID NO: 796328 - RNA, 19 nt, Homo sapiens
  misc_RNA (1)...(19): siRNA sense strand
ucagagaagguaaaacuuu

SEQ ID NO: 796329 - RNA, 19 nt, Homo sapiens
  misc_RNA (1)...(19): siRNA sense strand
gaauuucagggagacuuug

SEQ ID NO: 796330 - RNA, 19 nt, Homo sapiens
  misc_RNA (1)...(19): siRNA sense strand
auucggccauuaauauuca

SEQ ID NO: 796331 - RNA, 19 nt, Homo sapiens
  misc_RNA (1)...(19): siRNA sense strand
gguggagcagugaggauga

SEQ ID NO: 796332 - RNA, 19 nt, Homo sapiens
  misc_RNA (1)...(19): siRNA sense strand
agauucggccauuaauauu

SEQ ID NO: 796333 - RNA, 19 nt, Homo sapiens
  misc_RNA (1)...(19): siRNA sense strand
gcaggcagcccaauaaugu

SEQ ID NO: 796334 - RNA, 19 nt, Homo sapiens
  misc_RNA (1)...(19): siRNA sense strand
ccaauaaugugaucagaca

SEQ ID NO: 796335 - RNA, 19 nt, Homo sapiens
  misc_RNA (1)...(19): siRNA sense strand
gcagacagcgggcaggaaa

SEQ ID NO: 796336 - RNA, 19 nt, Homo sapiens
  misc_RNA (1)...(19): siRNA sense strand
caaagugcccauugugauu

SEQ ID NO: 796337 - RNA, 19 nt, Homo sapiens
  misc_RNA (1)...(19): siRNA sense strand
caaaucuccucccaaagug

SEQ ID NO: 796338 - RNA, 19 nt, Homo sapiens
  misc_RNA (1)...(19): siRNA sense strand
ccaaaucuccucccaaagu

SEQ ID NO: 796339 - RNA, 19 nt, Homo sapiens
  misc_RNA (1)...(19): siRNA sense strand
gacagcaggcagcccaaua

SEQ ID NO: 796340 - RNA, 19 nt, Homo sapiens
  misc_RNA (1)...(19): siRNA sense strand
ucaagaggcccaccagcaa

SEQ ID NO: 796341 - RNA, 19 nt, Homo sapiens
  misc_RNA (1)...(19): siRNA sense strand
auccaaaucuccucccaaa

SEQ ID NO: 796342 - RNA, 19 nt, Homo sapiens
  misc_RNA (1)...(19): siRNA sense strand
ccaaagugcccauugugau

SEQ ID NO: 796343 - RNA, 19 nt, Homo sapiens
  misc_RNA (1)...(19): siRNA sense strand
cuucaaacagcgcagauaa

SEQ ID NO: 796344 - RNA, 19 nt, Homo sapiens
  misc_RNA (1)...(19): siRNA sense strand
acagcaggcagcccaauaa

SEQ ID NO: 796345 - RNA, 19 nt, Homo sapiens
  misc_RNA (1)...(19): siRNA sense strand
ggcaggaaauccaaaucuc

SEQ ID NO: 796346 - RNA, 19 nt, Homo sapiens
  misc_RNA (1)...(19): siRNA sense strand
gcccaauaaugugaucaga

SEQ ID NO: 796347 - RNA, 19 nt, Homo sapiens
  misc_RNA (1)...(19): siRNA sense strand
gggcaggaaauccaaaucu

SEQ ID NO: 796348 - RNA, 19 nt, Homo sapiens
  misc_RNA (1)...(19): siRNA sense strand
cagauccgcauccucaaga

SEQ ID NO: 796349 - RNA, 19 nt, Homo sapiens
  misc_RNA (1)...(19): siRNA sense strand
gcagcccaauaaugugauc

SEQ ID NO: 796350 - RNA, 19 nt, Homo sapiens
  misc_RNA (1)...(19): siRNA sense strand
ggucucaaggcuucaaaca

SEQ ID NO: 796351 - RNA, 19 nt, Homo sapiens
  misc_RNA (1)...(19): siRNA sense strand
cccaaagugcccauuguga

SEQ ID NO: 796352 - RNA, 19 nt, Homo sapiens
  misc_RNA (1)...(19): siRNA sense strand
ggcccacccuuccagucaa

SEQ ID NO: 796353 - RNA, 19 nt, Homo sapiens
  misc_RNA (1)...(19): siRNA sense strand
ccgaggaggagcaggagaa

SEQ ID NO: 796354 - RNA, 19 nt, Homo sapiens
  misc_RNA (1)...(19): siRNA sense strand
gcuucaaacagcgcagaua

SEQ ID NO: 796355 - RNA, 19 nt, Homo sapiens
  misc_RNA (1)...(19): siRNA sense strand
ggaaacagcaggugcagaa

SEQ ID NO: 796356 - RNA, 19 nt, Homo sapiens
  misc_RNA (1)...(19): siRNA sense strand
gcagccagguucccaaguu

SEQ ID NO: 796357 - RNA, 19 nt, Homo sapiens
  misc_RNA (1)...(19): siRNA sense strand
acaagugucuaauucauga

SEQ ID NO: 796358 - RNA, 19 nt, Homo sapiens
  misc_RNA (1)...(19): siRNA sense strand
gaaaacccuucuagacaua

SEQ ID NO: 796359 - RNA, 19 nt, Homo sapiens
  misc_RNA (1)...(19): siRNA sense strand
gaccgaaccugacaucaac

SEQ ID NO: 796360 - RNA, 19 nt, Homo sapiens
  misc_RNA (1)...(19): siRNA sense strand
cagaagcucuuucggucuu

SEQ ID NO: 796361 - RNA, 19 nt, Homo sapiens
  misc_RNA (1)...(19): siRNA sense strand
gaccggaccuccaccaucu

SEQ ID NO: 796362 - RNA, 19 nt, Homo sapiens
  misc_RNA (1)...(19): siRNA sense strand
ggauaucgacagcaaagaa

SEQ ID NO: 796363 - RNA, 19 nt, Homo sapiens
  misc_RNA (1)...(19): siRNA sense strand
caugaggcauuuacagaga

SEQ ID NO: 796364 - RNA, 19 nt, Homo sapiens
  misc_RNA (1)...(19): siRNA sense strand
acaacaggcuggagucguu

SEQ ID NO: 796365 - RNA, 19 nt, Homo sapiens
  misc_RNA (1)...(19): siRNA sense strand
aaagauuguugucauggaa

SEQ ID NO: 796366 - RNA, 19 nt, Homo sapiens
  misc_RNA (1)...(19): siRNA sense strand
gauaucgacagcaaagaaa

SEQ ID NO: 796367 - RNA, 19 nt, Homo sapiens
  misc_RNA (1)...(19): siRNA sense strand
gaaccugacaucaacaaca

SEQ ID NO: 796368 - RNA, 19 nt, Homo sapiens
  misc_RNA (1)...(19): siRNA sense strand
ggaaaacccuucuagacau

SEQ ID NO: 796369 - RNA, 19 nt, Homo sapiens
  misc_RNA (1)...(19): siRNA sense strand
cuccagaccugaugaggaa

SEQ ID NO: 796370 - RNA, 19 nt, Homo sapiens
  misc_RNA (1)...(19): siRNA sense strand
gcaguucacacgcgucaug

SEQ ID NO: 796371 - RNA, 19 nt, Homo sapiens
  misc_RNA (1)...(19): siRNA sense strand
gaaacaaggaagacagaac

SEQ ID NO: 796372 - RNA, 19 nt, Homo sapiens
  misc_RNA (1)...(19): siRNA sense strand
ucuaauucaugaggcauuu

SEQ ID NO: 796373 - RNA, 19 nt, Homo sapiens
  misc_RNA (1)...(19): siRNA sense strand
ugaccgaaccugacaucaa

SEQ ID NO: 796374 - RNA, 19 nt, Homo sapiens
  misc_RNA (1)...(19): siRNA sense strand
caucaugaaacaaggaaga

SEQ ID NO: 796375 - RNA, 19 nt, Homo sapiens
  misc_RNA (1)...(19): siRNA sense strand
gaagcucuuucggucuuuc

SEQ ID NO: 796376 - RNA, 19 nt, Homo sapiens
  misc_RNA (1)...(19): siRNA sense strand
gcauuuacagagacacaga

SEQ ID NO: 796377 - RNA, 19 nt, Homo sapiens
  misc_RNA (1)...(19): siRNA sense strand
cagccagguucccaaguuc

SEQ ID NO: 796378 - RNA, 19 nt, Homo sapiens
  misc_RNA (1)...(19): siRNA sense strand
aaucgaggcuuugggcaau

SEQ ID NO: 796379 - RNA, 19 nt, Homo sapiens
  misc_RNA (1)...(19): siRNA sense strand
gagucguugugccucagua

SEQ ID NO: 796380 - RNA, 19 nt, Homo sapiens
  misc_RNA (1)...(19): siRNA sense strand
ccagggagaauuccagcuu

SEQ ID NO: 796381 - RNA, 19 nt, Homo sapiens
  misc_RNA (1)...(19): siRNA sense strand
auuuacagcucauagacaa

SEQ ID NO: 796382 - RNA, 19 nt, Homo sapiens
  misc_RNA (1)...(19): siRNA sense strand
cagcgcaacaccacagcua

SEQ ID NO: 796383 - RNA, 19 nt, Homo sapiens
  misc_RNA (1)...(19): siRNA sense strand
gcaggugcagaagcucuuu

SEQ ID NO: 796384 - RNA, 19 nt, Homo sapiens
  misc_RNA (1)...(19): siRNA sense strand
caggauaucgacagcaaag

SEQ ID NO: 796385 - RNA, 19 nt, Homo sapiens
  misc_RNA (1)...(19): siRNA sense strand
ggagaaaguuugaauauug

SEQ ID NO: 796386 - RNA, 19 nt, Homo sapiens
  misc_RNA (1)...(19): siRNA sense strand
ccacaaggcucaagaguuu

SEQ ID NO: 796387 - RNA, 19 nt, Homo sapiens
  misc_RNA (1)...(19): siRNA sense strand
caagaugccuuuguaguua

SEQ ID NO: 796388 - RNA, 19 nt, Homo sapiens
  misc_RNA (1)...(19): siRNA sense strand
gaagugagcuuggcaguau

SEQ ID NO: 796389 - RNA, 19 nt, Homo sapiens
  misc_RNA (1)...(19): siRNA sense strand
cagaacaacuggaagauaa

SEQ ID NO: 796390 - RNA, 19 nt, Homo sapiens
  misc_RNA (1)...(19): siRNA sense strand
gaaagaagcugugaaucug

SEQ ID NO: 796391 - RNA, 19 nt, Homo sapiens
  misc_RNA (1)...(19): siRNA sense strand
gaagcagacucacaagaaa

SEQ ID NO: 796392 - RNA, 19 nt, Homo sapiens
  misc_RNA (1)...(19): siRNA sense strand
ucaaugaccuggugaagaa

SEQ ID NO: 796393 - RNA, 19 nt, Homo sapiens
  misc_RNA (1)...(19): siRNA sense strand
gaauauugguguuguacaa

SEQ ID NO: 796394 - RNA, 19 nt, Homo sapiens
  misc_RNA (1)...(19): siRNA sense strand
gaagguaccugucuauugc

SEQ ID NO: 796395 - RNA, 19 nt, Homo sapiens
  misc_RNA (1)...(19): siRNA sense strand
gaggucaauuccaugauua

SEQ ID NO: 796396 - RNA, 19 nt, Homo sapiens
  misc_RNA (1)...(19): siRNA sense strand
guacagcuguugaaaugaa

SEQ ID NO: 796397 - RNA, 19 nt, Homo sapiens
  misc_RNA (1)...(19): siRNA sense strand
gcauggcacugcacuguuu

SEQ ID NO: 796398 - RNA, 19 nt, Homo sapiens
  misc_RNA (1)...(19): siRNA sense strand
gaauacagaucacuuaagg

SEQ ID NO: 796399 - RNA, 19 nt, Homo sapiens
  misc_RNA (1)...(19): siRNA sense strand
ggaggucaauuccaugauu

SEQ ID NO: 796400 - RNA, 19 nt, Homo sapiens
  misc_RNA (1)...(19): siRNA sense strand
gcacugcacuguuuaguac

SEQ ID NO: 796401 - RNA, 19 nt, Homo sapiens
  misc_RNA (1)...(19): siRNA sense strand
gcagacaggagaguuauua

SEQ ID NO: 796402 - RNA, 19 nt, Homo sapiens
  misc_RNA (1)...(19): siRNA sense strand
uaagggaaauggaacacua

SEQ ID NO: 796403 - RNA, 19 nt, Homo sapiens
  misc_RNA (1)...(19): siRNA sense strand
ggauuuaggugcuauuaca

SEQ ID NO: 796404 - RNA, 19 nt, Homo sapiens
  misc_RNA (1)...(19): siRNA sense strand
caguucagcuguuuaauga

SEQ ID NO: 796405 - RNA, 19 nt, Homo sapiens
  misc_RNA (1)...(19): siRNA sense strand
gaagaugucguccgaguau

SEQ ID NO: 796406 - RNA, 19 nt, Homo sapiens
  misc_RNA (1)...(19): siRNA sense strand
gaugaauacagaucacuua

SEQ ID NO: 796407 - RNA, 19 nt, Homo sapiens
  misc_RNA (1)...(19): siRNA sense strand
cagaucaccuugcacauga

SEQ ID NO: 796408 - RNA, 19 nt, Homo sapiens
  misc_RNA (1)...(19): siRNA sense strand
gggaugcucucuauacaga

SEQ ID NO: 796409 - RNA, 19 nt, Homo sapiens
  misc_RNA (1)...(19): siRNA sense strand
ccacagggaauggaaauua

SEQ ID NO: 796410 - RNA, 19 nt, Homo sapiens
  misc_RNA (1)...(19): siRNA sense strand
ggaaauggaacacuacuuc

SEQ ID NO: 796411 - RNA, 19 nt, Homo sapiens
  misc_RNA (1)...(19): siRNA sense strand
gugaagaaguacaagcuuu

SEQ ID NO: 796412 - RNA, 19 nt, Homo sapiens
  misc_RNA (1)...(19): siRNA sense strand
caagauagcaacguuaauu

SEQ ID NO: 796413 - RNA, 19 nt, Homo sapiens
  misc_RNA (1)...(19): siRNA sense strand
gagacaagauagcaacguu

SEQ ID NO: 796414 - RNA, 19 nt, Homo sapiens
  misc_RNA (1)...(19): siRNA sense strand
gggcaaacucaaucauuua

SEQ ID NO: 796415 - RNA, 19 nt, Homo sapiens
  misc_RNA (1)...(19): siRNA sense strand
acagaucacuuaagguuga

SEQ ID NO: 796416 - RNA, 19 nt, Homo sapiens
  misc_RNA (1)...(19): siRNA sense strand
uaguacagcuguugaaaug

SEQ ID NO: 796417 - RNA, 19 nt, Homo sapiens
  misc_RNA (1)...(19): siRNA sense strand
ggaagacaaugguguaaaa

SEQ ID NO: 796418 - RNA, 19 nt, Homo sapiens
  misc_RNA (1)...(19): siRNA sense strand
gcacuaagacugguguaaa

SEQ ID NO: 796419 - RNA, 19 nt, Homo sapiens
  misc_RNA (1)...(19): siRNA sense strand
caacguuaauuagcaguuu

SEQ ID NO: 796420 - RNA, 19 nt, Homo sapiens
  misc_RNA (1)...(19): siRNA sense strand
ggaacaagauaugcagaga

SEQ ID NO: 796421 - RNA, 19 nt, Homo sapiens
  misc_RNA (1)...(19): siRNA sense strand
gagaaaguuugaauauugg

SEQ ID NO: 796422 - RNA, 19 nt, Homo sapiens
  misc_RNA (1)...(19): siRNA sense strand
ccaauggacugauccuuca

SEQ ID NO: 796423 - RNA, 19 nt, Homo sapiens
  misc_RNA (1)...(19): siRNA sense strand
aaacacggguggccgauau

SEQ ID NO: 796424 - RNA, 19 nt, Homo sapiens
  misc_RNA (1)...(19): siRNA sense strand
gcagaacaacuggaagaua

SEQ ID NO: 796425 - RNA, 19 nt, Homo sapiens
  misc_RNA (1)...(19): siRNA sense strand
guaccugucuauugcacua

SEQ ID NO: 796426 - RNA, 19 nt, Homo sapiens
  misc_RNA (1)...(19): siRNA sense strand
gaacgaaggcagaacaucu

SEQ ID NO: 796427 - RNA, 19 nt, Homo sapiens
  misc_RNA (1)...(19): siRNA sense strand
guucagcuguuuaaugaug

SEQ ID NO: 796428 - RNA, 19 nt, Homo sapiens
  misc_RNA (1)...(19): siRNA sense strand
gcugaaagacaagcaguua

SEQ ID NO: 796429 - RNA, 19 nt, Homo sapiens
  misc_RNA (1)...(19): siRNA sense strand
auacgggacugcuggauuu

SEQ ID NO: 796430 - RNA, 19 nt, Homo sapiens
  misc_RNA (1)...(19): siRNA sense strand
cacagggaauggaaauuaa

SEQ ID NO: 796431 - RNA, 19 nt, Homo sapiens
  misc_RNA (1)...(19): siRNA sense strand
ugaagaaguuaugaaggua

SEQ ID NO: 796432 - RNA, 19 nt, Homo sapiens
  misc_RNA (1)...(19): siRNA sense strand
gacaagauagcaacguuaa

SEQ ID NO: 796433 - RNA, 19 nt, Homo sapiens
  misc_RNA (1)...(19): siRNA sense strand
ugaugcagauggccacuuu

SEQ ID NO: 796434 - RNA, 19 nt, Homo sapiens
  misc_RNA (1)...(19): siRNA sense strand
guaguuauugguagagaua

SEQ ID NO: 796435 - RNA, 19 nt, Homo sapiens
  misc_RNA (1)...(19): siRNA sense strand
gcagacagaauuguuuauu

SEQ ID NO: 796436 - RNA, 19 nt, Homo sapiens
  misc_RNA (1)...(19): siRNA sense strand
caguggagaugaauacaga

SEQ ID NO: 796437 - RNA, 19 nt, Homo sapiens
  misc_RNA (1)...(19): siRNA sense strand
ugauggagaugcagacaga

SEQ ID NO: 796438 - RNA, 19 nt, Homo sapiens
  misc_RNA (1)...(19): siRNA sense strand
auacagaucuuccaaacag

SEQ ID NO: 796439 - RNA, 19 nt, Homo sapiens
  misc_RNA (1)...(19): siRNA sense strand
ggaaauuaaguccaaugaa

SEQ ID NO: 796440 - RNA, 19 nt, Homo sapiens
  misc_RNA (1)...(19): siRNA sense strand
gaacaacuggaagauaaga

SEQ ID NO: 796441 - RNA, 19 nt, Homo sapiens
  misc_RNA (1)...(19): siRNA sense strand
gaagcuaagggaaauggaa

SEQ ID NO: 796442 - RNA, 19 nt, Homo sapiens
  misc_RNA (1)...(19): siRNA sense strand
gguaacagcgucccacaau

SEQ ID NO: 796443 - RNA, 19 nt, Homo sapiens
  misc_RNA (1)...(19): siRNA sense strand
acagugggaugcucucuau

SEQ ID NO: 796444 - RNA, 19 nt, Homo sapiens
  misc_RNA (1)...(19): siRNA sense strand
aagaaaagcugcuaagaug

SEQ ID NO: 796445 - RNA, 19 nt, Homo sapiens
  misc_RNA (1)...(19): siRNA sense strand
ggagaugcagacagaauug

SEQ ID NO: 796446 - RNA, 19 nt, Homo sapiens
  misc_RNA (1)...(19): siRNA sense strand
agggcaaacucaaucauuu

SEQ ID NO: 796447 - RNA, 19 nt, Homo sapiens
  misc_RNA (1)...(19): siRNA sense strand
ggacugauccuucaauacg

SEQ ID NO: 796448 - RNA, 19 nt, Homo sapiens
  misc_RNA (1)...(19): siRNA sense strand
aggcaacuauagaagguua

SEQ ID NO: 796449 - RNA, 19 nt, Homo sapiens
  misc_RNA (1)...(19): siRNA sense strand
cgagaaagaagcugugaau

SEQ ID NO: 796450 - RNA, 19 nt, Homo sapiens
  misc_RNA (1)...(19): siRNA sense strand
gcagaucaccuugcacaug

SEQ ID NO: 796451 - RNA, 19 nt, Homo sapiens
  misc_RNA (1)...(19): siRNA sense strand
ccaaacagacaacuuaaag

SEQ ID NO: 796452 - RNA, 19 nt, Homo sapiens
  misc_RNA (1)...(19): siRNA sense strand
gagauuggagaaaguuuga

SEQ ID NO: 796453 - RNA, 19 nt, Homo sapiens
  misc_RNA (1)...(19): siRNA sense strand
gaagguuacuaccagaaac

SEQ ID NO: 796454 - RNA, 19 nt, Homo sapiens
  misc_RNA (1)...(19): siRNA sense strand
uguaauagauggugugacu

SEQ ID NO: 796455 - RNA, 19 nt, Homo sapiens
  misc_RNA (1)...(19): siRNA sense strand
ugaagguaccugucuauug

SEQ ID NO: 796456 - RNA, 19 nt, Homo sapiens
  misc_RNA (1)...(19): siRNA sense strand
gaugcagacagaauuguuu

SEQ ID NO: 796457 - RNA, 19 nt, Homo sapiens
  misc_RNA (1)...(19): siRNA sense strand
gaaggcagaacaucuugau

SEQ ID NO: 796458 - RNA, 19 nt, Homo sapiens
  misc_RNA (1)...(19): siRNA sense strand
ggaaaggcaacuauagaag

SEQ ID NO: 796459 - RNA, 19 nt, Homo sapiens
  misc_RNA (1)...(19): siRNA sense strand
ggagauuggagaaaguuug

SEQ ID NO: 796460 - RNA, 19 nt, Homo sapiens
  misc_RNA (1)...(19): siRNA sense strand
agaagcagacucacaagaa

SEQ ID NO: 796461 - RNA, 19 nt, Homo sapiens
  misc_RNA (1)...(19): siRNA sense strand
agaaagaagcugugaaucu

SEQ ID NO: 796462 - RNA, 19 nt, Homo sapiens
  misc_RNA (1)...(19): siRNA sense strand
cugaagggcuugacuguac

SEQ ID NO: 796463 - RNA, 19 nt, Homo sapiens
  misc_RNA (1)...(19): siRNA sense strand
auacagaucacuuaagguu

SEQ ID NO: 796464 - RNA, 19 nt, Homo sapiens
  misc_RNA (1)...(19): siRNA sense strand
gauauggaaaggcaacuau

SEQ ID NO: 796465 - RNA, 19 nt, Homo sapiens
  misc_RNA (1)...(19): siRNA sense strand
gaaacacggguggccgaua

SEQ ID NO: 796466 - RNA, 19 nt, Homo sapiens
  misc_RNA (1)...(19): siRNA sense strand
caaaugcugaggaacaaga

SEQ ID NO: 796467 - RNA, 19 nt, Homo sapiens
  misc_RNA (1)...(19): siRNA sense strand
ccgaguauaugcagaagca

SEQ ID NO: 796468 - RNA, 19 nt, Homo sapiens
  misc_RNA (1)...(19): siRNA sense strand
cuuccaaacagacaacuua

SEQ ID NO: 796469 - RNA, 19 nt, Homo sapiens
  misc_RNA (1)...(19): siRNA sense strand
gaugcucucuauacagauc

SEQ ID NO: 796470 - RNA, 19 nt, Homo sapiens
  misc_RNA (1)...(19): siRNA sense strand
gcuguugaaaugaagauaa

SEQ ID NO: 796471 - RNA, 19 nt, Homo sapiens
  misc_RNA (1)...(19): siRNA sense strand
guaacagcgucccacaauc

SEQ ID NO: 796472 - RNA, 19 nt, Homo sapiens
  misc_RNA (1)...(19): siRNA sense strand
aaaggcaacuauagaaggu

SEQ ID NO: 796473 - RNA, 19 nt, Homo sapiens
  misc_RNA (1)...(19): siRNA sense strand
agagagugcuuauugacau

SEQ ID NO: 796474 - RNA, 19 nt, Homo sapiens
  misc_RNA (1)...(19): siRNA sense strand
gauaugcagagagugcuua

SEQ ID NO: 796475 - RNA, 19 nt, Homo sapiens
  misc_RNA (1)...(19): siRNA sense strand
ucaccaaacaggcuucuug

SEQ ID NO: 796476 - RNA, 19 nt, Homo sapiens
  misc_RNA (1)...(19): siRNA sense strand
gcaaauggaaguucaacac

SEQ ID NO: 796477 - RNA, 19 nt, Homo sapiens
  misc_RNA (1)...(19): siRNA sense strand
ugaggaagacaauggugua

SEQ ID NO: 796478 - RNA, 19 nt, Homo sapiens
  misc_RNA (1)...(19): siRNA sense strand
ggagaguuauuagcacuac

SEQ ID NO: 796479 - RNA, 19 nt, Homo sapiens
  misc_RNA (1)...(19): siRNA sense strand
gacaggagaguuauuagca

SEQ ID NO: 796480 - RNA, 19 nt, Homo sapiens
  misc_RNA (1)...(19): siRNA sense strand
cagcagaacaacuggaaga

SEQ ID NO: 796481 - RNA, 19 nt, Homo sapiens
  misc_RNA (1)...(19): siRNA sense strand
ggcagaacaucuugaucau

SEQ ID NO: 796482 - RNA, 19 nt, Homo sapiens
  misc_RNA (1)...(19): siRNA sense strand
agacaagauagcaacguua

SEQ ID NO: 796483 - RNA, 19 nt, Homo sapiens
  misc_RNA (1)...(19): siRNA sense strand
cauagauggagacaagaua

SEQ ID NO: 796484 - RNA, 19 nt, Homo sapiens
  misc_RNA (1)...(19): siRNA sense strand
gaaacucucuaaggcuuuu

SEQ ID NO: 796485 - RNA, 19 nt, Homo sapiens
  misc_RNA (1)...(19): siRNA sense strand
gaacugagcaauggauuua

SEQ ID NO: 796486 - RNA, 19 nt, Homo sapiens
  misc_RNA (1)...(19): siRNA sense strand
cuucaaagauguagccuua

SEQ ID NO: 796487 - RNA, 19 nt, Homo sapiens
  misc_RNA (1)...(19): siRNA sense strand
gaacaagucuaggccuaaa

SEQ ID NO: 796488 - RNA, 19 nt, Homo sapiens
  misc_RNA (1)...(19): siRNA sense strand
gaaggucaauuucucugaa

SEQ ID NO: 796489 - RNA, 19 nt, Homo sapiens
  misc_RNA (1)...(19): siRNA sense strand
gccaaacgaucucaaagaa

SEQ ID NO: 796490 - RNA, 19 nt, Homo sapiens
  misc_RNA (1)...(19): siRNA sense strand
gagugaagaucuuguaauc

SEQ ID NO: 796491 - RNA, 19 nt, Homo sapiens
  misc_RNA (1)...(19): siRNA sense strand
gaacccggcuagaagaguu

SEQ ID NO: 796492 - RNA, 19 nt, Homo sapiens
  misc_RNA (1)...(19): siRNA sense strand
gcaauggauuuaagaaugg

SEQ ID NO: 796493 - RNA, 19 nt, Homo sapiens
  misc_RNA (1)...(19): siRNA sense strand
ccacaaacugcaagaauaa

SEQ ID NO: 796494 - RNA, 19 nt, Homo sapiens
  misc_RNA (1)...(19): siRNA sense strand
gaaaugaagacgcgaagga

SEQ ID NO: 796495 - RNA, 19 nt, Homo sapiens
  misc_RNA (1)...(19): siRNA sense strand
acaaauugcugaugccuau

SEQ ID NO: 796496 - RNA, 19 nt, Homo sapiens
  misc_RNA (1)...(19): siRNA sense strand
ggaaaccagucaccaucaa

SEQ ID NO: 796497 - RNA, 19 nt, Homo sapiens
  misc_RNA (1)...(19): siRNA sense strand
caaacgaucucaaagaaaa

SEQ ID NO: 796498 - RNA, 19 nt, Homo sapiens
  misc_RNA (1)...(19): siRNA sense strand
caaauauugugaccaugaa

SEQ ID NO: 796499 - RNA, 19 nt, Homo sapiens
  misc_RNA (1)...(19): siRNA sense strand
cccacaaacugcaagaaua

SEQ ID NO: 796500 - RNA, 19 nt, Homo sapiens
  misc_RNA (1)...(19): siRNA sense strand
gaagagacacuuggaacaa

SEQ ID NO: 796501 - RNA, 19 nt, Homo sapiens
  misc_RNA (1)...(19): siRNA sense strand
uaagauacccaagauauga

SEQ ID NO: 796502 - RNA, 19 nt, Homo sapiens
  misc_RNA (1)...(19): siRNA sense strand
aaagucaaguucaccaauu

SEQ ID NO: 796503 - RNA, 19 nt, Homo sapiens
  misc_RNA (1)...(19): siRNA sense strand
ugaagaagaugaucaagac

SEQ ID NO: 796504 - RNA, 19 nt, Homo sapiens
  misc_RNA (1)...(19): siRNA sense strand
gagccguauuucucacuua

SEQ ID NO: 796505 - RNA, 19 nt, Homo sapiens
  misc_RNA (1)...(19): siRNA sense strand
gaagaguuccgguccgauu

SEQ ID NO: 796506 - RNA, 19 nt, Homo sapiens
  misc_RNA (1)...(19): siRNA sense strand
ccacugcuguucaagaguu

SEQ ID NO: 796507 - RNA, 19 nt, Homo sapiens
  misc_RNA (1)...(19): siRNA sense strand
caaacugauuuaagccaaa

SEQ ID NO: 796508 - RNA, 19 nt, Homo sapiens
  misc_RNA (1)...(19): siRNA sense strand
gaaaaggggcaucugcuua

SEQ ID NO: 796509 - RNA, 19 nt, Homo sapiens
  misc_RNA (1)...(19): siRNA sense strand
ggaccaggaugcaaaauga

SEQ ID NO: 796510 - RNA, 19 nt, Homo sapiens
  misc_RNA (1)...(19): siRNA sense strand
gugaagaucuuguaaucag

SEQ ID NO: 796511 - RNA, 19 nt, Homo sapiens
  misc_RNA (1)...(19): siRNA sense strand
gcucuacuuugaucuucua

SEQ ID NO: 796512 - RNA, 19 nt, Homo sapiens
  misc_RNA (1)...(19): siRNA sense strand
ggacagauaaagcuacuca

SEQ ID NO: 796513 - RNA, 19 nt, Homo sapiens
  misc_RNA (1)...(19): siRNA sense strand
ggauugaugggacagauaa

SEQ ID NO: 796514 - RNA, 19 nt, Homo sapiens
  misc_RNA (1)...(19): siRNA sense strand
guaccaaggucaagaugag

SEQ ID NO: 796515 - RNA, 19 nt, Homo sapiens
  misc_RNA (1)...(19): siRNA sense strand
ucaaagauguagccuuagu

SEQ ID NO: 796516 - RNA, 19 nt, Homo sapiens
  misc_RNA (1)...(19): siRNA sense strand
ccagaugaaucaacuuaag

SEQ ID NO: 796517 - RNA, 19 nt, Homo sapiens
  misc_RNA (1)...(19): siRNA sense strand
cuacuuugaucuucuacaa

SEQ ID NO: 796518 - RNA, 19 nt, Homo sapiens
  misc_RNA (1)...(19): siRNA sense strand
gaaagaggaagugagagaa

SEQ ID NO: 796519 - RNA, 19 nt, Homo sapiens
  misc_RNA (1)...(19): siRNA sense strand
gugcuaagcucaggauauc

SEQ ID NO: 796520 - RNA, 19 nt, Homo sapiens
  misc_RNA (1)...(19): siRNA sense strand
acaagaggcuccagugagu

SEQ ID NO: 796521 - RNA, 19 nt, Homo sapiens
  misc_RNA (1)...(19): siRNA sense strand
gauaugaagccaccagugu

SEQ ID NO: 796522 - RNA, 19 nt, Homo sapiens
  misc_RNA (1)...(19): siRNA sense strand
gcugaugccuauucuucuu

SEQ ID NO: 796523 - RNA, 19 nt, Homo sapiens
  misc_RNA (1)...(19): siRNA sense strand
aggagaaacugaagaagau

SEQ ID NO: 796524 - RNA, 19 nt, Homo sapiens
  misc_RNA (1)...(19): siRNA sense strand
agaaaccacugcuguucaa

SEQ ID NO: 796525 - RNA, 19 nt, Homo sapiens
  misc_RNA (1)...(19): siRNA sense strand
cuucacagcucaugauaag

SEQ ID NO: 796526 - RNA, 19 nt, Homo sapiens
  misc_RNA (1)...(19): siRNA sense strand
gaaaucagagcuuggaaac

SEQ ID NO: 796527 - RNA, 19 nt, Homo sapiens
  misc_RNA (1)...(19): siRNA sense strand
cgaaagaggaagugagaga

SEQ ID NO: 796528 - RNA, 19 nt, Homo sapiens
  misc_RNA (1)...(19): siRNA sense strand
ggaacaagucuaggccuaa

SEQ ID NO: 796529 - RNA, 19 nt, Homo sapiens
  misc_RNA (1)...(19): siRNA sense strand
ggaagagacacuuggaaca

SEQ ID NO: 796530 - RNA, 19 nt, Homo sapiens
  misc_RNA (1)...(19): siRNA sense strand
ccucuaagauacccaagau

SEQ ID NO: 796531 - RNA, 19 nt, Homo sapiens
  misc_RNA (1)...(19): siRNA sense strand
gagaaacugaagaagauga

SEQ ID NO: 796532 - RNA, 19 nt, Homo sapiens
  misc_RNA (1)...(19): siRNA sense strand
aaucagagcuuggaaacca

SEQ ID NO: 796533 - RNA, 19 nt, Homo sapiens
  misc_RNA (1)...(19): siRNA sense strand
ugacagcauucugaaauca

SEQ ID NO: 796534 - RNA, 19 nt, Homo sapiens
  misc_RNA (1)...(19): siRNA sense strand
ccaccaguguccaacagaa

SEQ ID NO: 796535 - RNA, 19 nt, Homo sapiens
  misc_RNA (1)...(19): siRNA sense strand
ccagaaugcagcuguggua

SEQ ID NO: 796536 - RNA, 19 nt, Homo sapiens
  misc_RNA (1)...(19): siRNA sense strand
cagauaaagcuacucaaga

SEQ ID NO: 796537 - RNA, 19 nt, Homo sapiens
  misc_RNA (1)...(19): siRNA sense strand
gcucuugccucugggaguu

SEQ ID NO: 796538 - RNA, 19 nt, Homo sapiens
  misc_RNA (1)...(19): siRNA sense strand
gaucaagacagcucucaca

SEQ ID NO: 796539 - RNA, 19 nt, Homo sapiens
  misc_RNA (1)...(19): siRNA sense strand
gaagaaggagaaacugaag

SEQ ID NO: 796540 - RNA, 19 nt, Homo sapiens
  misc_RNA (1)...(19): siRNA sense strand
ggacucucauuccucugaa

SEQ ID NO: 796541 - RNA, 19 nt, Homo sapiens
  misc_RNA (1)...(19): siRNA sense strand
gagcaauggauuuaagaau

SEQ ID NO: 796542 - RNA, 19 nt, Homo sapiens
  misc_RNA (1)...(19): siRNA sense strand
caaacuagagguagaccaa

SEQ ID NO: 796543 - RNA, 19 nt, Homo sapiens
  misc_RNA (1)...(19): siRNA sense strand
ggucucagccugcuaucuu

SEQ ID NO: 796544 - RNA, 19 nt, Homo sapiens
  misc_RNA (1)...(19): siRNA sense strand
gaauaaguaccaaggucaa

SEQ ID NO: 796545 - RNA, 19 nt, Homo sapiens
  misc_RNA (1)...(19): siRNA sense strand
ucuaagauacccaagauau

SEQ ID NO: 796546 - RNA, 19 nt, Homo sapiens
  misc_RNA (1)...(19): siRNA sense strand
gugauacugucaaacuaga

SEQ ID NO: 796547 - RNA, 19 nt, Homo sapiens
  misc_RNA (1)...(19): siRNA sense strand
uaaagcuacucaagacagu

SEQ ID NO: 796548 - RNA, 19 nt, Homo sapiens
  misc_RNA (1)...(19): siRNA sense strand
agauaaagcuacucaagac

SEQ ID NO: 796549 - RNA, 19 nt, Homo sapiens
  misc_RNA (1)...(19): siRNA sense strand
ugagagaaagcgcguacua

SEQ ID NO: 796550 - RNA, 19 nt, Homo sapiens
  misc_RNA (1)...(19): siRNA sense strand
guggcuacuuccucugaua

SEQ ID NO: 796551 - RNA, 19 nt, Homo sapiens
  misc_RNA (1)...(19): siRNA sense strand
gaaaaggagccaaacauuc

SEQ ID NO: 796552 - RNA, 19 nt, Homo sapiens
  misc_RNA (1)...(19): siRNA sense strand
ucaaguucaccaauucuaa

SEQ ID NO: 796553 - RNA, 19 nt, Homo sapiens
  misc_RNA (1)...(19): siRNA sense strand
agcaauggauuuaagaaug

SEQ ID NO: 796554 - RNA, 19 nt, Homo sapiens
  misc_RNA (1)...(19): siRNA sense strand
ggaaaccgaggaaaugaag

SEQ ID NO: 796555 - RNA, 19 nt, Homo sapiens
  misc_RNA (1)...(19): siRNA sense strand
ugaagaaggagaaacugaa

SEQ ID NO: 796556 - RNA, 19 nt, Homo sapiens
  misc_RNA (1)...(19): siRNA sense strand
ccuaaaggaaguugaagaa

SEQ ID NO: 796557 - RNA, 19 nt, Homo sapiens
  misc_RNA (1)...(19): siRNA sense strand
aaacgaacccggcuagaag

SEQ ID NO: 796558 - RNA, 19 nt, Homo sapiens
  misc_RNA (1)...(19): siRNA sense strand
guacaccgcuuugagucau

SEQ ID NO: 796559 - RNA, 19 nt, Homo sapiens
  misc_RNA (1)...(19): siRNA sense strand
gaaugcagcugugguacac

SEQ ID NO: 796560 - RNA, 19 nt, Homo sapiens
  misc_RNA (1)...(19): siRNA sense strand
gaccaagaacugagcaaug

SEQ ID NO: 796561 - RNA, 19 nt, Homo sapiens
  misc_RNA (1)...(19): siRNA sense strand
gcucacugcugcccgagau

SEQ ID NO: 796562 - RNA, 19 nt, Homo sapiens
  misc_RNA (1)...(19): siRNA sense strand
ggaaaaggagccaaacauu

SEQ ID NO: 796563 - RNA, 19 nt, Homo sapiens
  misc_RNA (1)...(19): siRNA sense strand
gagaagcuguggaaaagga

SEQ ID NO: 796564 - RNA, 19 nt, Homo sapiens
  misc_RNA (1)...(19): siRNA sense strand
gcuaagcucaggauaucaa

SEQ ID NO: 796565 - RNA, 19 nt, Homo sapiens
  misc_RNA (1)...(19): siRNA sense strand
ccaaacgaucucaaagaaa

SEQ ID NO: 796566 - RNA, 19 nt, Homo sapiens
  misc_RNA (1)...(19): siRNA sense strand
ccguauuucucacuuaguu

SEQ ID NO: 796567 - RNA, 19 nt, Homo sapiens
  misc_RNA (1)...(19): siRNA sense strand
ccaggaaaccgaggaaaug

SEQ ID NO: 796568 - RNA, 19 nt, Homo sapiens
  misc_RNA (1)...(19): siRNA sense strand
ucauauggacccagacaaa

SEQ ID NO: 796569 - RNA, 19 nt, Homo sapiens
  misc_RNA (1)...(19): siRNA sense strand
gucucagccugcuaucuua

SEQ ID NO: 796570 - RNA, 19 nt, Homo sapiens
  misc_RNA (1)...(19): siRNA sense strand
guagaaaccacugcuguuc

SEQ ID NO: 796571 - RNA, 19 nt, Homo sapiens
  misc_RNA (1)...(19): siRNA sense strand
gauuuaagccaaacgaucu

SEQ ID NO: 796572 - RNA, 19 nt, Homo sapiens
  misc_RNA (1)...(19): siRNA sense strand
guucaccaauucuaacaca

SEQ ID NO: 796573 - RNA, 19 nt, Homo sapiens
  misc_RNA (1)...(19): siRNA sense strand
gguagaaaccacugcuguu

SEQ ID NO: 796574 - RNA, 19 nt, Homo sapiens
  misc_RNA (1)...(19): siRNA sense strand
caucuucccaaacugauuu

SEQ ID NO: 796575 - RNA, 19 nt, Homo sapiens
  misc_RNA (1)...(19): siRNA sense strand
agaaagcgcguacuaccuu

SEQ ID NO: 796576 - RNA, 19 nt, Homo sapiens
  misc_RNA (1)...(19): siRNA sense strand
ggacccagacaaacugaau

SEQ ID NO: 796577 - RNA, 19 nt, Homo sapiens
  misc_RNA (1)...(19): siRNA sense strand
acacccaacuccuacaauc

SEQ ID NO: 796578 - RNA, 19 nt, Homo sapiens
  misc_RNA (1)...(19): siRNA sense strand
aaagaggaagugagagaaa

SEQ ID NO: 796579 - RNA, 19 nt, Homo sapiens
  misc_RNA (1)...(19): siRNA sense strand
agaaggagaaacugaagaa

SEQ ID NO: 796580 - RNA, 19 nt, Homo sapiens
  misc_RNA (1)...(19): siRNA sense strand
gcagucaucacaaagucaa

SEQ ID NO: 796581 - RNA, 19 nt, Homo sapiens
  misc_RNA (1)...(19): siRNA sense strand
ggagccguauuucucacuu

SEQ ID NO: 796582 - RNA, 19 nt, Homo sapiens
  misc_RNA (1)...(19): siRNA sense strand
ggaggaagagacacuugga

SEQ ID NO: 796583 - RNA, 19 nt, Homo sapiens
  misc_RNA (1)...(19): siRNA sense strand
aaccagaugaaucaacuua

SEQ ID NO: 796584 - RNA, 19 nt, Homo sapiens
  misc_RNA (1)...(19): siRNA sense strand
ugaaaucagagcuuggaaa

SEQ ID NO: 796585 - RNA, 19 nt, Homo sapiens
  misc_RNA (1)...(19): siRNA sense strand
gaaagaaguugggcuguaa

SEQ ID NO: 796586 - RNA, 19 nt, Homo sapiens
  misc_RNA (1)...(19): siRNA sense strand
gaacuuggacaguaugaua

SEQ ID NO: 796587 - RNA, 19 nt, Homo sapiens
  misc_RNA (1)...(19): siRNA sense strand
gaaaggagaacuagaugaa

SEQ ID NO: 796588 - RNA, 19 nt, Homo sapiens
  misc_RNA (1)...(19): siRNA sense strand
gauagugacuuugaugauu

SEQ ID NO: 796589 - RNA, 19 nt, Homo sapiens
  misc_RNA (1)...(19): siRNA sense strand
ccaauaaagucaccaacaa

SEQ ID NO: 796590 - RNA, 19 nt, Homo sapiens
  misc_RNA (1)...(19): siRNA sense strand
aaggagaacuagaugaaua

SEQ ID NO: 796591 - RNA, 19 nt, Homo sapiens
  misc_RNA (1)...(19): siRNA sense strand
gaccugaccugaagacgaa

SEQ ID NO: 796592 - RNA, 19 nt, Homo sapiens
  misc_RNA (1)...(19): siRNA sense strand
gaagaaggccacuugaaau

SEQ ID NO: 796593 - RNA, 19 nt, Homo sapiens
  misc_RNA (1)...(19): siRNA sense strand
gaaguugggcuguaaauca

SEQ ID NO: 796594 - RNA, 19 nt, Homo sapiens
  misc_RNA (1)...(19): siRNA sense strand
gauaauguauacccagaga

SEQ ID NO: 796595 - RNA, 19 nt, Homo sapiens
  misc_RNA (1)...(19): siRNA sense strand
gggagccacugcaccaaua

SEQ ID NO: 796596 - RNA, 19 nt, Homo sapiens
  misc_RNA (1)...(19): siRNA sense strand
uaaauagucuccuuugucu

SEQ ID NO: 796597 - RNA, 19 nt, Homo sapiens
  misc_RNA (1)...(19): siRNA sense strand
gauagacagucguguugaa

SEQ ID NO: 796598 - RNA, 19 nt, Homo sapiens
  misc_RNA (1)...(19): siRNA sense strand
gaaggccacuugaaauucu

SEQ ID NO: 796599 - RNA, 19 nt, Homo sapiens
  misc_RNA (1)...(19): siRNA sense strand
ggaugaugauagugacuuu

SEQ ID NO: 796600 - RNA, 19 nt, Homo sapiens
  misc_RNA (1)...(19): siRNA sense strand
caucaucccuugcucuaga

SEQ ID NO: 796601 - RNA, 19 nt, Homo sapiens
  misc_RNA (1)...(19): siRNA sense strand
gaacagacaguauuuccau

SEQ ID NO: 796602 - RNA, 19 nt, Homo sapiens
  misc_RNA (1)...(19): siRNA sense strand
gcgguaagcucuucaucau

SEQ ID NO: 796603 - RNA, 19 nt, Homo sapiens
  misc_RNA (1)...(19): siRNA sense strand
ugaacgcgaucaagaguug

SEQ ID NO: 796604 - RNA, 19 nt, Homo sapiens
  misc_RNA (1)...(19): siRNA sense strand
ugaagagcaugaauugguu

SEQ ID NO: 796605 - RNA, 19 nt, Homo sapiens
  misc_RNA (1)...(19): siRNA sense strand
gaaaagcuauggcaauauc

SEQ ID NO: 796606 - RNA, 19 nt, Homo sapiens
  misc_RNA (1)...(19): siRNA sense strand
agaaagaaguugggcugua

SEQ ID NO: 796607 - RNA, 19 nt, Homo sapiens
  misc_RNA (1)...(19): siRNA sense strand
agaagaaggccacuugaaa

SEQ ID NO: 796608 - RNA, 19 nt, Homo sapiens
  misc_RNA (1)...(19): siRNA sense strand
gcaguggaccuuugggaaa

SEQ ID NO: 796609 - RNA, 19 nt, Homo sapiens
  misc_RNA (1)...(19): siRNA sense strand
uaaugaagagcaugaauug

SEQ ID NO: 796610 - RNA, 19 nt, Homo sapiens
  misc_RNA (1)...(19): siRNA sense strand
aacaauggcuggagguuug

SEQ ID NO: 796611 - RNA, 19 nt, Homo sapiens
  misc_RNA (1)...(19): siRNA sense strand
ugacucagccacuuaagaa

SEQ ID NO: 796612 - RNA, 19 nt, Homo sapiens
  misc_RNA (1)...(19): siRNA sense strand
gcacaccugcuucaugaga

SEQ ID NO: 796613 - RNA, 19 nt, Homo sapiens
  misc_RNA (1)...(19): siRNA sense strand
ugacuacagugacccaaau

SEQ ID NO: 796614 - RNA, 19 nt, Homo sapiens
  misc_RNA (1)...(19): siRNA sense strand
cuaguguuguuaucuguuu

SEQ ID NO: 796615 - RNA, 19 nt, Homo sapiens
  misc_RNA (1)...(19): siRNA sense strand
gagcaugaauugguuuuaa

SEQ ID NO: 796616 - RNA, 19 nt, Homo sapiens
  misc_RNA (1)...(19): siRNA sense strand
agaacuagaugaauauguc

SEQ ID NO: 796617 - RNA, 19 nt, Homo sapiens
  misc_RNA (1)...(19): siRNA sense strand
caaaauugacgaugugaua

SEQ ID NO: 796618 - RNA, 19 nt, Homo sapiens
  misc_RNA (1)...(19): siRNA sense strand
gaagagcaugaauugguuu

SEQ ID NO: 796619 - RNA, 19 nt, Homo sapiens
  misc_RNA (1)...(19): siRNA sense strand
cuuaagaccugaccugaag

SEQ ID NO: 796620 - RNA, 19 nt, Homo sapiens
  misc_RNA (1)...(19): siRNA sense strand
gagccacaguucaaagcaa

SEQ ID NO: 796621 - RNA, 19 nt, Homo sapiens
  misc_RNA (1)...(19): siRNA sense strand
ggaggucucguggugcuua

SEQ ID NO: 796622 - RNA, 19 nt, Homo sapiens
  misc_RNA (1)...(19): siRNA sense strand
ccaugaacuuggacaguau

SEQ ID NO: 796623 - RNA, 19 nt, Homo sapiens
  misc_RNA (1)...(19): siRNA sense strand
ggagguuuguuugccauga

SEQ ID NO: 796624 - RNA, 19 nt, Homo sapiens
  misc_RNA (1)...(19): siRNA sense strand
uguugaagauccagaagaa

SEQ ID NO: 796625 - RNA, 19 nt, Homo sapiens
  misc_RNA (1)...(19): siRNA sense strand
gagguuuguuugccaugaa

SEQ ID NO: 796626 - RNA, 19 nt, Homo sapiens
  misc_RNA (1)...(19): siRNA sense strand
ucacagcaguggcauuugg

SEQ ID NO: 796627 - RNA, 19 nt, Homo sapiens
  misc_RNA (1)...(19): siRNA sense strand
ucugcgaccuggacaguuu

SEQ ID NO: 796628 - RNA, 19 nt, Homo sapiens
  misc_RNA (1)...(19): siRNA sense strand
agacuugggcuaucagaaa

SEQ ID NO: 796629 - RNA, 19 nt, Homo sapiens
  misc_RNA (1)...(19): siRNA sense strand
caacaauggcuggagguuu

SEQ ID NO: 796630 - RNA, 19 nt, Homo sapiens
  misc_RNA (1)...(19): siRNA sense strand
aagaaggccacuugaaauu

SEQ ID NO: 796631 - RNA, 19 nt, Homo sapiens
  misc_RNA (1)...(19): siRNA sense strand
cagacaguauuuccaugaa

SEQ ID NO: 796632 - RNA, 19 nt, Homo sapiens
  misc_RNA (1)...(19): siRNA sense strand
ugagagacuugggcuauca

SEQ ID NO: 796633 - RNA, 19 nt, Homo sapiens
  misc_RNA (1)...(19): siRNA sense strand
gaucuauaaugaagagcau

SEQ ID NO: 796634 - RNA, 19 nt, Homo sapiens
  misc_RNA (1)...(19): siRNA sense strand
guguggaacugagaaagaa

SEQ ID NO: 796635 - RNA, 19 nt, Homo sapiens
  misc_RNA (1)...(19): siRNA sense strand
caaacaaaauugacgaugu

SEQ ID NO: 796636 - RNA, 19 nt, Homo sapiens
  misc_RNA (1)...(19): siRNA sense strand
caauaaagucaccaacaau

SEQ ID NO: 796637 - RNA, 19 nt, Homo sapiens
  misc_RNA (1)...(19): siRNA sense strand
gaugauagugacuuugaug

SEQ ID NO: 796638 - RNA, 19 nt, Homo sapiens
  misc_RNA (1)...(19): siRNA sense strand
uuaaugaacgcgaucaaga

SEQ ID NO: 796639 - RNA, 19 nt, Homo sapiens
  misc_RNA (1)...(19): siRNA sense strand
gucagagacucgcucauca

SEQ ID NO: 796640 - RNA, 19 nt, Homo sapiens
  misc_RNA (1)...(19): siRNA sense strand
uaugauaguggcauggaua

SEQ ID NO: 796641 - RNA, 19 nt, Homo sapiens
  misc_RNA (1)...(19): siRNA sense strand
gacaguauuuccaugaacu

SEQ ID NO: 796642 - RNA, 19 nt, Homo sapiens
  misc_RNA (1)...(19): siRNA sense strand
agacagucguguugaagau

SEQ ID NO: 796643 - RNA, 19 nt, Homo sapiens
  misc_RNA (1)...(19): siRNA sense strand
gccaugaacagacaguauu

SEQ ID NO: 796644 - RNA, 19 nt, Homo sapiens
  misc_RNA (1)...(19): siRNA sense strand
uuaagaaugugcccgucaa

SEQ ID NO: 796645 - RNA, 19 nt, Homo sapiens
  misc_RNA (1)...(19): siRNA sense strand
cagaagaaggccacuugaa

SEQ ID NO: 796646 - RNA, 19 nt, Homo sapiens
  misc_RNA (1)...(19): siRNA sense strand
ccaugacacacaacucuuu

SEQ ID NO: 796647 - RNA, 19 nt, Homo sapiens
  misc_RNA (1)...(19): siRNA sense strand
gcuaucagaaacaugcuuu

SEQ ID NO: 796648 - RNA, 19 nt, Homo sapiens
  misc_RNA (1)...(19): siRNA sense strand
ccaugaacagacaguauuu

SEQ ID NO: 796649 - RNA, 19 nt, Homo sapiens
  misc_RNA (1)...(19): siRNA sense strand
gcaguggcauuuggaaggu

SEQ ID NO: 796650 - RNA, 19 nt, Homo sapiens
  misc_RNA (1)...(19): siRNA sense strand
ucuaucaccuccagaccaa

SEQ ID NO: 796651 - RNA, 19 nt, Homo sapiens
  misc_RNA (1)...(19): siRNA sense strand
uaauguauacccagagaug

SEQ ID NO: 796652 - RNA, 19 nt, Homo sapiens
  misc_RNA (1)...(19): siRNA sense strand
gcuauggcaauaucaguga

SEQ ID NO: 796653 - RNA, 19 nt, Homo sapiens
  misc_RNA (1)...(19): siRNA sense strand
gagaaguccuuguguuccu

SEQ ID NO: 796654 - RNA, 19 nt, Homo sapiens
  misc_RNA (1)...(19): siRNA sense strand
gaggucucguggugcuuaa

SEQ ID NO: 796655 - RNA, 19 nt, Homo sapiens
  misc_RNA (1)...(19): siRNA sense strand
ggagccacugcaccaauaa

SEQ ID NO: 796656 - RNA, 19 nt, Homo sapiens
  misc_RNA (1)...(19): siRNA sense strand
acccagagaugcagauauc

SEQ ID NO: 796657 - RNA, 19 nt, Homo sapiens
  misc_RNA (1)...(19): siRNA sense strand
ugaaaggagaacuagauga

SEQ ID NO: 796658 - RNA, 19 nt, Homo sapiens
  misc_RNA (1)...(19): siRNA sense strand
aauaaagucaccaacaaug

SEQ ID NO: 796659 - RNA, 19 nt, Homo sapiens
  misc_RNA (1)...(19): siRNA sense strand
aaacaaaauugacgaugug

SEQ ID NO: 796660 - RNA, 19 nt, Homo sapiens
  misc_RNA (1)...(19): siRNA sense strand
uuaaauagucuccuuuguc

SEQ ID NO: 796661 - RNA, 19 nt, Homo sapiens
  misc_RNA (1)...(19): siRNA sense strand
acgaaaagcuauggcaaua

SEQ ID NO: 796662 - RNA, 19 nt, Homo sapiens
  misc_RNA (1)...(19): siRNA sense strand
gugauagacagucguguug

SEQ ID NO: 796663 - RNA, 19 nt, Homo sapiens
  misc_RNA (1)...(19): siRNA sense strand
gagaacuagaugaauaugu

SEQ ID NO: 796664 - RNA, 19 nt, Homo sapiens
  misc_RNA (1)...(19): siRNA sense strand
gcuuaaggccugugacuac

SEQ ID NO: 796665 - RNA, 19 nt, Homo sapiens
  misc_RNA (1)...(19): siRNA sense strand
ccacugcaccaauaaaguc

SEQ ID NO: 796666 - RNA, 19 nt, Homo sapiens
  misc_RNA (1)...(19): siRNA sense strand
cuagaugaauauguccaaa

SEQ ID NO: 796667 - RNA, 19 nt, Homo sapiens
  misc_RNA (1)...(19): siRNA sense strand
gcaccaauaaagucaccaa

SEQ ID NO: 796668 - RNA, 19 nt, Homo sapiens
  misc_RNA (1)...(19): siRNA sense strand
acagacaguauuuccauga

SEQ ID NO: 796669 - RNA, 19 nt, Homo sapiens
  misc_RNA (1)...(19): siRNA sense strand
aguggcauuuggaagguua

SEQ ID NO: 796670 - RNA, 19 nt, Homo sapiens
  misc_RNA (1)...(19): siRNA sense strand
agucuccuuugucuagaua

SEQ ID NO: 796671 - RNA, 19 nt, Homo sapiens
  misc_RNA (1)...(19): siRNA sense strand
gagccacugcaccaauaaa

SEQ ID NO: 796672 - RNA, 19 nt, Homo sapiens
  misc_RNA (1)...(19): siRNA sense strand
cagagacucgcucaucaga

SEQ ID NO: 796673 - RNA, 19 nt, Homo sapiens
  misc_RNA (1)...(19): siRNA sense strand
aauagucuccuuugucuag

SEQ ID NO: 796674 - RNA, 19 nt, Homo sapiens
  misc_RNA (1)...(19): siRNA sense strand
caacguggaaggcucuauc

SEQ ID NO: 796675 - RNA, 19 nt, Homo sapiens
  misc_RNA (1)...(19): siRNA sense strand
ccugccagcugcuaguguu

SEQ ID NO: 796676 - RNA, 19 nt, Homo sapiens
  misc_RNA (1)...(19): siRNA sense strand
agccacaguucaaagcaaa

SEQ ID NO: 796677 - RNA, 19 nt, Homo sapiens
  misc_RNA (1)...(19): siRNA sense strand
ccagaagaaggccacuuga

SEQ ID NO: 796678 - RNA, 19 nt, Homo sapiens
  misc_RNA (1)...(19): siRNA sense strand
uagugacuuugaugauuug

SEQ ID NO: 796679 - RNA, 19 nt, Homo sapiens
  misc_RNA (1)...(19): siRNA sense strand
ugucacaguucgguauuuc

SEQ ID NO: 796680 - RNA, 19 nt, Homo sapiens
  misc_RNA (1)...(19): siRNA sense strand
gccagcugcuaguguuguu

SEQ ID NO: 796681 - RNA, 19 nt, Homo sapiens
  misc_RNA (1)...(19): siRNA sense strand
gcucgagccacaguucaaa

SEQ ID NO: 796682 - RNA, 19 nt, Homo sapiens
  misc_RNA (1)...(19): siRNA sense strand
cuucacagcaguggcauuu

SEQ ID NO: 796683 - RNA, 19 nt, Homo sapiens
  misc_RNA (1)...(19): siRNA sense strand
gaaggccaggacaccauga

SEQ ID NO: 796684 - RNA, 19 nt, Homo sapiens
  misc_RNA (1)...(19): siRNA sense strand
guucgguauuucuguuaug

SEQ ID NO: 796685 - RNA, 19 nt, Homo sapiens
  misc_RNA (1)...(19): siRNA sense strand
gagggugccuggaaggaua

SEQ ID NO: 796686 - RNA, 19 nt, Homo sapiens
  misc_RNA (1)...(19): siRNA sense strand
uaagggacauggucaaguu

SEQ ID NO: 796687 - RNA, 19 nt, Homo sapiens
  misc_RNA (1)...(19): siRNA sense strand
gcgagugcauggugaauga

SEQ ID NO: 796688 - RNA, 19 nt, Homo sapiens
  misc_RNA (1)...(19): siRNA sense strand
cagacaaccugcccaacua

SEQ ID NO: 796689 - RNA, 19 nt, Homo sapiens
  misc_RNA (1)...(19): siRNA sense strand
gcauaccggucaaguccua

SEQ ID NO: 796690 - RNA, 19 nt, Homo sapiens
  misc_RNA (1)...(19): siRNA sense strand
gaaacacucguuaucgaaa

SEQ ID NO: 796691 - RNA, 19 nt, Homo sapiens
  misc_RNA (1)...(19): siRNA sense strand
gcaagccacugcccacugu

SEQ ID NO: 796692 - RNA, 19 nt, Homo sapiens
  misc_RNA (1)...(19): siRNA sense strand
aagcaaagccagacucuaa

SEQ ID NO: 796693 - RNA, 19 nt, Homo sapiens
  misc_RNA (1)...(19): siRNA sense strand
gaaaccgggugccucugaa

SEQ ID NO: 796694 - RNA, 19 nt, Homo sapiens
  misc_RNA (1)...(19): siRNA sense strand
uacagaagcuucaguacug

SEQ ID NO: 796695 - RNA, 19 nt, Homo sapiens
  misc_RNA (1)...(19): siRNA sense strand
gacgauagggacaucaaua

SEQ ID NO: 796696 - RNA, 19 nt, Homo sapiens
  misc_RNA (1)...(19): siRNA sense strand
gcuguucccuugacacuuc

SEQ ID NO: 796697 - RNA, 19 nt, Homo sapiens
  misc_RNA (1)...(19): siRNA sense strand
guacaagaccagaaagcaa

SEQ ID NO: 796698 - RNA, 19 nt, Homo sapiens
  misc_RNA (1)...(19): siRNA sense strand
gauagggacaucaauagau

SEQ ID NO: 796699 - RNA, 19 nt, Homo sapiens
  misc_RNA (1)...(19): siRNA sense strand
ccgcagacaacgccaguua

SEQ ID NO: 796700 - RNA, 19 nt, Homo sapiens
  misc_RNA (1)...(19): siRNA sense strand
gagggacacuguggaagga

SEQ ID NO: 796701 - RNA, 19 nt, Homo sapiens
  misc_RNA (1)...(19): siRNA sense strand
ccgaaacacucguuaucga

SEQ ID NO: 796702 - RNA, 19 nt, Homo sapiens
  misc_RNA (1)...(19): siRNA sense strand
gcagacaacgccaguuauc

SEQ ID NO: 796703 - RNA, 19 nt, Homo sapiens
  misc_RNA (1)...(19): siRNA sense strand
gaccauggccgcucuugug

SEQ ID NO: 796704 - RNA, 19 nt, Homo sapiens
  misc_RNA (1)...(19): siRNA sense strand
aaacacucguuaucgaaau

SEQ ID NO: 796705 - RNA, 19 nt, Homo sapiens
  misc_RNA (1)...(19): siRNA sense strand
gcccgaggccuacgucaaa

SEQ ID NO: 796706 - RNA, 19 nt, Homo sapiens
  misc_RNA (1)...(19): siRNA sense strand
cgaaauaagagacaaagag

SEQ ID NO: 796707 - RNA, 19 nt, Homo sapiens
  misc_RNA (1)...(19): siRNA sense strand
ccuggcagcucuucacugu

SEQ ID NO: 796708 - RNA, 19 nt, Homo sapiens
  misc_RNA (1)...(19): siRNA sense strand
ucaguggucucacccuuca

SEQ ID NO: 796709 - RNA, 19 nt, Homo sapiens
  misc_RNA (1)...(19): siRNA sense strand
ggacuccagugagcuagug

SEQ ID NO: 796710 - RNA, 19 nt, Homo sapiens
  misc_RNA (1)...(19): siRNA sense strand
cgaaacacucguuaucgaa

SEQ ID NO: 796711 - RNA, 19 nt, Homo sapiens
  misc_RNA (1)...(19): siRNA sense strand
gagcauggccaguauugag

SEQ ID NO: 796712 - RNA, 19 nt, Homo sapiens
  misc_RNA (1)...(19): siRNA sense strand
gaaagcaaagccagacucu

SEQ ID NO: 796713 - RNA, 19 nt, Homo sapiens
  misc_RNA (1)...(19): siRNA sense strand
gggcccaccuuugguauca

SEQ ID NO: 796714 - RNA, 19 nt, Homo sapiens
  misc_RNA (1)...(19): siRNA sense strand
gcccaccuuugguaucauu

SEQ ID NO: 796715 - RNA, 19 nt, Homo sapiens
  misc_RNA (1)...(19): siRNA sense strand
ccaucugccugucgcugua

SEQ ID NO: 796716 - RNA, 19 nt, Homo sapiens
  misc_RNA (1)...(19): siRNA sense strand
uacaagaccagaaagcaaa

SEQ ID NO: 796717 - RNA, 19 nt, Homo sapiens
  misc_RNA (1)...(19): siRNA sense strand
gagacaaagaggauaguuc

SEQ ID NO: 796718 - RNA, 19 nt, Homo sapiens
  misc_RNA (1)...(19): siRNA sense strand
ugaagaugguggagucuac

SEQ ID NO: 796719 - RNA, 19 nt, Homo sapiens
  misc_RNA (1)...(19): siRNA sense strand
ggagggucaucggcuauca

SEQ ID NO: 796720 - RNA, 19 nt, Homo sapiens
  misc_RNA (1)...(19): siRNA sense strand
cugugcaucuuccucauuu

SEQ ID NO: 796721 - RNA, 19 nt, Homo sapiens
  misc_RNA (1)...(19): siRNA sense strand
aacacucguuaucgaaaua

SEQ ID NO: 796722 - RNA, 19 nt, Homo sapiens
  misc_RNA (1)...(19): siRNA sense strand
gaacaccguggucuucucu

SEQ ID NO: 796723 - RNA, 19 nt, Homo sapiens
  misc_RNA (1)...(19): siRNA sense strand
ccucgagcauggccaguau

SEQ ID NO: 796724 - RNA, 19 nt, Homo sapiens
  misc_RNA (1)...(19): siRNA sense strand
ccaagcugcugcccaaggu

SEQ ID NO: 796725 - RNA, 19 nt, Homo sapiens
  misc_RNA (1)...(19): siRNA sense strand
cgaaaccgggugccucuga

SEQ ID NO: 796726 - RNA, 19 nt, Homo sapiens
  misc_RNA (1)...(19): siRNA sense strand
cccagaugcugcagagcua

SEQ ID NO: 796727 - RNA, 19 nt, Homo sapiens
  misc_RNA (1)...(19): siRNA sense strand
ccucagcuccucaguuuca

SEQ ID NO: 796728 - RNA, 19 nt, Homo sapiens
  misc_RNA (1)...(19): siRNA sense strand
auagggacaucaauagauc

SEQ ID NO: 796729 - RNA, 19 nt, Homo sapiens
  misc_RNA (1)...(19): siRNA sense strand
gcacugaaccccuacuaug

SEQ ID NO: 796730 - RNA, 19 nt, Homo sapiens
  misc_RNA (1)...(19): siRNA sense strand
uaagagacaaagaggauag

SEQ ID NO: 796731 - RNA, 19 nt, Homo sapiens
  misc_RNA (1)...(19): siRNA sense strand
guucaucuccguccugauc

SEQ ID NO: 796732 - RNA, 19 nt, Homo sapiens
  misc_RNA (1)...(19): siRNA sense strand
gcugguguguuucgacaag

SEQ ID NO: 796733 - RNA, 19 nt, Homo sapiens
  misc_RNA (1)...(19): siRNA sense strand
gcgggacccucaucuugca

SEQ ID NO: 796734 - RNA, 19 nt, Homo sapiens
  misc_RNA (1)...(19): siRNA sense strand
aauaagagacaaagaggau

SEQ ID NO: 796735 - RNA, 19 nt, Homo sapiens
  misc_RNA (1)...(19): siRNA sense strand
gguccagggcacugucuuu

SEQ ID NO: 796736 - RNA, 19 nt, Homo sapiens
  misc_RNA (1)...(19): siRNA sense strand
gcaaagccagacucuaagg

SEQ ID NO: 796737 - RNA, 19 nt, Homo sapiens
  misc_RNA (1)...(19): siRNA sense strand
uguacagccugacccaguu

SEQ ID NO: 796738 - RNA, 19 nt, Homo sapiens
  misc_RNA (1)...(19): siRNA sense strand
cgauagggacaucaauaga

SEQ ID NO: 796739 - RNA, 19 nt, Homo sapiens
  misc_RNA (1)...(19): siRNA sense strand
ggucuuggcagugaugaga

SEQ ID NO: 796740 - RNA, 19 nt, Homo sapiens
  misc_RNA (1)...(19): siRNA sense strand
uauaaacacagcaugaagu

SEQ ID NO: 796741 - RNA, 19 nt, Homo sapiens
  misc_RNA (1)...(19): siRNA sense strand
gcccuacugugcagagaca

SEQ ID NO: 796742 - RNA, 19 nt, Homo sapiens
  misc_RNA (1)...(19): siRNA sense strand
auaaacacagcaugaaguu

SEQ ID NO: 796743 - RNA, 19 nt, Homo sapiens
  misc_RNA (1)...(19): siRNA sense strand
cgagaacaccguggucuuc

SEQ ID NO: 796744 - RNA, 19 nt, Homo sapiens
  misc_RNA (1)...(19): siRNA sense strand
ccaccgacuucgcccagau

SEQ ID NO: 796745 - RNA, 19 nt, Homo sapiens
  misc_RNA (1)...(19): siRNA sense strand
ggacggcuuagacgugaug

SEQ ID NO: 796746 - RNA, 19 nt, Homo sapiens
  misc_RNA (1)...(19): siRNA sense strand
uaugggacccugacgauag

SEQ ID NO: 796747 - RNA, 19 nt, Homo sapiens
  misc_RNA (1)...(19): siRNA sense strand
ucuacacgaucaacaccaa

SEQ ID NO: 796748 - RNA, 19 nt, Homo sapiens
  misc_RNA (1)...(19): siRNA sense strand
cuacugaagccgcagacaa

SEQ ID NO: 796749 - RNA, 19 nt, Homo sapiens
  misc_RNA (1)...(19): siRNA sense strand
cagaugcugcagagcuaua

SEQ ID NO: 796750 - RNA, 19 nt, Homo sapiens
  misc_RNA (1)...(19): siRNA sense strand
agacagugcccaccgacuu

SEQ ID NO: 796751 - RNA, 19 nt, Homo sapiens
  misc_RNA (1)...(19): siRNA sense strand
gguacgcccugugcaucuu

SEQ ID NO: 796752 - RNA, 19 nt, Homo sapiens
  misc_RNA (1)...(19): siRNA sense strand
gacgagggacacuguggaa

SEQ ID NO: 796753 - RNA, 19 nt, Homo sapiens
  misc_RNA (1)...(19): siRNA sense strand
guuuguggcugcccucucu

SEQ ID NO: 796754 - RNA, 19 nt, Homo sapiens
  misc_RNA (1)...(19): siRNA sense strand
agcgggugcugcgguauua

SEQ ID NO: 796755 - RNA, 19 nt, Homo sapiens
  misc_RNA (1)...(19): siRNA sense strand
ccccucagcuccucaguuu

SEQ ID NO: 796756 - RNA, 19 nt, Homo sapiens
  misc_RNA (1)...(19): siRNA sense strand
agagccggcugcagacuca

SEQ ID NO: 796757 - RNA, 19 nt, Homo sapiens
  misc_RNA (1)...(19): siRNA sense strand
gacagugcccaccgacuuc

SEQ ID NO: 796758 - RNA, 19 nt, Homo sapiens
  misc_RNA (1)...(19): siRNA sense strand
ccaggagcaucugaucauc

SEQ ID NO: 796759 - RNA, 19 nt, Homo sapiens
  misc_RNA (1)...(19): siRNA sense strand
gaggcagcccagcaacuga

SEQ ID NO: 796760 - RNA, 19 nt, Homo sapiens
  misc_RNA (1)...(19): siRNA sense strand
gcauuccagugcugaagac

SEQ ID NO: 796761 - RNA, 19 nt, Homo sapiens
  misc_RNA (1)...(19): siRNA sense strand
ccagacaaccugcccaacu

SEQ ID NO: 796762 - RNA, 19 nt, Homo sapiens
  misc_RNA (1)...(19): siRNA sense strand
ucacugaggacggcuuaga

SEQ ID NO: 796763 - RNA, 19 nt, Homo sapiens
  misc_RNA (1)...(19): siRNA sense strand
agacgggcacccucacuga

SEQ ID NO: 796764 - RNA, 19 nt, Homo sapiens
  misc_RNA (1)...(19): siRNA sense strand
gggugccucugaaugagau

SEQ ID NO: 796765 - RNA, 19 nt, Homo sapiens
  misc_RNA (1)...(19): siRNA sense strand
gccugucgcuguacaagac

SEQ ID NO: 796766 - RNA, 19 nt, Homo sapiens
  misc_RNA (1)...(19): siRNA sense strand
uugcugcucuuccguugga

SEQ ID NO: 796767 - RNA, 19 nt, Homo sapiens
  misc_RNA (1)...(19): siRNA sense strand
acccaggucuuggcaguga

SEQ ID NO: 796768 - RNA, 19 nt, Homo sapiens
  misc_RNA (1)...(19): siRNA sense strand
ccucugaaugagauuguaa

SEQ ID NO: 796769 - RNA, 19 nt, Homo sapiens
  misc_RNA (1)...(19): siRNA sense strand
gucaugaggaaccuacuga

SEQ ID NO: 796770 - RNA, 19 nt, Homo sapiens
  misc_RNA (1)...(19): siRNA sense strand
cuacagaagcuucaguacu

SEQ ID NO: 796771 - RNA, 19 nt, Homo sapiens
  misc_RNA (1)...(19): siRNA sense strand
ggaccauggccgcucuugu

SEQ ID NO: 796772 - RNA, 19 nt, Homo sapiens
  misc_RNA (1)...(19): siRNA sense strand
ccuuugguaucauugugaa

SEQ ID NO: 796773 - RNA, 19 nt, Homo sapiens
  misc_RNA (1)...(19): siRNA sense strand
agacaacgccaguuaucca

SEQ ID NO: 796774 - RNA, 19 nt, Homo sapiens
  misc_RNA (1)...(19): siRNA sense strand
gaucuaaacuucaugaaca

SEQ ID NO: 796775 - RNA, 19 nt, Homo sapiens
  misc_RNA (1)...(19): siRNA sense strand
ucaccaagcaagauaauua

SEQ ID NO: 796776 - RNA, 19 nt, Homo sapiens
  misc_RNA (1)...(19): siRNA sense strand
caaagcagauagaagugaa

SEQ ID NO: 796777 - RNA, 19 nt, Homo sapiens
  misc_RNA (1)...(19): siRNA sense strand
auaaagcgaucuaaacuuc

SEQ ID NO: 796778 - RNA, 19 nt, Homo sapiens
  misc_RNA (1)...(19): siRNA sense strand
guggcugacuuaaagauaa

SEQ ID NO: 796779 - RNA, 19 nt, Homo sapiens
  misc_RNA (1)...(19): siRNA sense strand
agaggaggcuggauggaaa

SEQ ID NO: 796780 - RNA, 19 nt, Homo sapiens
  misc_RNA (1)...(19): siRNA sense strand
gaaaagaggaggaugagaa

SEQ ID NO: 796781 - RNA, 19 nt, Homo sapiens
  misc_RNA (1)...(19): siRNA sense strand
ggccugacauggaagaaga

SEQ ID NO: 796782 - RNA, 19 nt, Homo sapiens
  misc_RNA (1)...(19): siRNA sense strand
gcagauagaagugaauugu

SEQ ID NO: 796783 - RNA, 19 nt, Homo sapiens
  misc_RNA (1)...(19): siRNA sense strand
gauaaagcgaucuaaacuu

SEQ ID NO: 796784 - RNA, 19 nt, Homo sapiens
  misc_RNA (1)...(19): siRNA sense strand
uauauuacaugcugcaaag

SEQ ID NO: 796785 - RNA, 19 nt, Homo sapiens
  misc_RNA (1)...(19): siRNA sense strand
gcaaagcagauagaaguga

SEQ ID NO: 796786 - RNA, 19 nt, Homo sapiens
  misc_RNA (1)...(19): siRNA sense strand
gagaagaugagcagagcuu

SEQ ID NO: 796787 - RNA, 19 nt, Homo sapiens
  misc_RNA (1)...(19): siRNA sense strand
ugacauggaagaagauaau

SEQ ID NO: 796788 - RNA, 19 nt, Homo sapiens
  misc_RNA (1)...(19): siRNA sense strand
caaaugucaccaagcaaga

SEQ ID NO: 796789 - RNA, 19 nt, Homo sapiens
  misc_RNA (1)...(19): siRNA sense strand
uggcugacuuaaagauaaa

SEQ ID NO: 796790 - RNA, 19 nt, Homo sapiens
  misc_RNA (1)...(19): siRNA sense strand
uuucaaaugucaccaagca

SEQ ID NO: 796791 - RNA, 19 nt, Homo sapiens
  misc_RNA (1)...(19): siRNA sense strand
ugacagauucagaggacua

SEQ ID NO: 796792 - RNA, 19 nt, Homo sapiens
  misc_RNA (1)...(19): siRNA sense strand
aaagcgaucuaaacuucau

SEQ ID NO: 796793 - RNA, 19 nt, Homo sapiens
  misc_RNA (1)...(19): siRNA sense strand
gauuugggccugacaugga

SEQ ID NO: 796794 - RNA, 19 nt, Homo sapiens
  misc_RNA (1)...(19): siRNA sense strand
ggcuuuaccucgucucaca

SEQ ID NO: 796795 - RNA, 19 nt, Homo sapiens
  misc_RNA (1)...(19): siRNA sense strand
gaacaaguuuuagauuugg

SEQ ID NO: 796796 - RNA, 19 nt, Homo sapiens
  misc_RNA (1)...(19): siRNA sense strand
gacauggaagaagauaaua

SEQ ID NO: 796797 - RNA, 19 nt, Homo sapiens
  misc_RNA (1)...(19): siRNA sense strand
ggagaagaguaaaaugcaa

SEQ ID NO: 796798 - RNA, 19 nt, Homo sapiens
  misc_RNA (1)...(19): siRNA sense strand
agaggaggaugagaagaug

SEQ ID NO: 796799 - RNA, 19 nt, Homo sapiens
  misc_RNA (1)...(19): siRNA sense strand
cagauucagaggacuaaga

SEQ ID NO: 796800 - RNA, 19 nt, Homo sapiens
  misc_RNA (1)...(19): siRNA sense strand
caccaagcaagauaauuau

SEQ ID NO: 796801 - RNA, 19 nt, Homo sapiens
  misc_RNA (1)...(19): siRNA sense strand
auucagaggacuaagauga

SEQ ID NO: 796802 - RNA, 19 nt, Homo sapiens
  misc_RNA (1)...(19): siRNA sense strand
gaagaggaggcuggaugga

SEQ ID NO: 796803 - RNA, 19 nt, Homo sapiens
  misc_RNA (1)...(19): siRNA sense strand
gacagauucagaggacuaa

SEQ ID NO: 796804 - RNA, 19 nt, Homo sapiens
  misc_RNA (1)...(19): siRNA sense strand
aagaggaggaugagaagau

SEQ ID NO: 796805 - RNA, 19 nt, Homo sapiens
  misc_RNA (1)...(19): siRNA sense strand
gaggaggaugagaagauga

SEQ ID NO: 796806 - RNA, 19 nt, Homo sapiens
  misc_RNA (1)...(19): siRNA sense strand
aauuguccauuccagaaga

SEQ ID NO: 796807 - RNA, 19 nt, Homo sapiens
  misc_RNA (1)...(19): siRNA sense strand
gagaagaguaaaaugcaaa

SEQ ID NO: 796808 - RNA, 19 nt, Homo sapiens
  misc_RNA (1)...(19): siRNA sense strand
aaugucaccaagcaagaua

SEQ ID NO: 796809 - RNA, 19 nt, Homo sapiens
  misc_RNA (1)...(19): siRNA sense strand
uaaagcgaucuaaacuuca

SEQ ID NO: 796810 - RNA, 19 nt, Homo sapiens
  misc_RNA (1)...(19): siRNA sense strand
ucaaguggcugaaguugug

SEQ ID NO: 796811 - RNA, 19 nt, Homo sapiens
  misc_RNA (1)...(19): siRNA sense strand
gcacgaugcucgcuuacag

SEQ ID NO: 796812 - RNA, 19 nt, Homo sapiens
  misc_RNA (1)...(19): siRNA sense strand
guccagggcuuguuugaca

SEQ ID NO: 796813 - RNA, 19 nt, Homo sapiens
  misc_RNA (1)...(19): siRNA sense strand
gggaggaacagccugagaa

SEQ ID NO: 796814 - RNA, 19 nt, Homo sapiens
  misc_RNA (1)...(19): siRNA sense strand
gaagguggcacugcucugu

SEQ ID NO: 796815 - RNA, 19 nt, Homo sapiens
  misc_RNA (1)...(19): siRNA sense strand
ggccuuccaugugcuguuu

SEQ ID NO: 796816 - RNA, 19 nt, Homo sapiens
  misc_RNA (1)...(19): siRNA sense strand
ccaacugccuggucaucga

SEQ ID NO: 796817 - RNA, 19 nt, Homo sapiens
  misc_RNA (1)...(19): siRNA sense strand
ggaugagccagaugaggaa

SEQ ID NO: 796818 - RNA, 19 nt, Homo sapiens
  misc_RNA (1)...(19): siRNA sense strand
guacaucagggacuugcuu

SEQ ID NO: 796819 - RNA, 19 nt, Homo sapiens
  misc_RNA (1)...(19): siRNA sense strand
ugggcacgaugcucgcuua

SEQ ID NO: 796820 - RNA, 19 nt, Homo sapiens
  misc_RNA (1)...(19): siRNA sense strand
gcugcucagugaugacuuc

SEQ ID NO: 796821 - RNA, 19 nt, Homo sapiens
  misc_RNA (1)...(19): siRNA sense strand
aggaacagccugagaagga

SEQ ID NO: 796822 - RNA, 19 nt, Homo sapiens
  misc_RNA (1)...(19): siRNA sense strand
gcccagaagcuuucagaca

SEQ ID NO: 796823 - RNA, 19 nt, Homo sapiens
  misc_RNA (1)...(19): siRNA sense strand
gcaucaacacccugcaguu

SEQ ID NO: 796824 - RNA, 19 nt, Homo sapiens
  misc_RNA (1)...(19): siRNA sense strand
ugugggaccuggugguguu

SEQ ID NO: 796825 - RNA, 19 nt, Homo sapiens
  misc_RNA (1)...(19): siRNA sense strand
gguacucugugguggagau

SEQ ID NO: 796826 - RNA, 19 nt, Homo sapiens
  misc_RNA (1)...(19): siRNA sense strand
ggaggaacagccugagaag

SEQ ID NO: 796827 - RNA, 19 nt, Homo sapiens
  misc_RNA (1)...(19): siRNA sense strand
agaucgagguggagaagau

SEQ ID NO: 796828 - RNA, 19 nt, Homo sapiens
  misc_RNA (1)...(19): siRNA sense strand
uagccucccugaagaagca

SEQ ID NO: 796829 - RNA, 19 nt, Homo sapiens
  misc_RNA (1)...(19): siRNA sense strand
cggcgcagccuguacauca

SEQ ID NO: 796830 - RNA, 19 nt, Homo sapiens
  misc_RNA (1)...(19): siRNA sense strand
caucaacacccugcaguuc

SEQ ID NO: 796831 - RNA, 19 nt, Homo sapiens
  misc_RNA (1)...(19): siRNA sense strand
caggaggcccagaagcuuu

SEQ ID NO: 796832 - RNA, 19 nt, Homo sapiens
  misc_RNA (1)...(19): siRNA sense strand
cgaggaugauuuccacaac

SEQ ID NO: 796833 - RNA, 19 nt, Homo sapiens
  misc_RNA (1)...(19): siRNA sense strand
ccugcuggguguguccuua

SEQ ID NO: 796834 - RNA, 19 nt, Homo sapiens
  misc_RNA (1)...(19): siRNA sense strand
guccuuagccucccugaag

SEQ ID NO: 796835 - RNA, 19 nt, Homo sapiens
  misc_RNA (1)...(19): siRNA sense strand
gcaggagcgaggucugguu

SEQ ID NO: 796836 - RNA, 19 nt, Homo sapiens
  misc_RNA (1)...(19): siRNA sense strand
caucagggacuugcuuuag

SEQ ID NO: 796837 - RNA, 19 nt, Homo sapiens
  misc_RNA (1)...(19): siRNA sense strand
gaggucugguuccgcuuca

SEQ ID NO: 796838 - RNA, 19 nt, Homo sapiens
  misc_RNA (1)...(19): siRNA sense strand
ggugguccagggcuuguuu

SEQ ID NO: 796839 - RNA, 19 nt, Homo sapiens
  misc_RNA (1)...(19): siRNA sense strand
ucaacgaggguguuuccaa

SEQ ID NO: 796840 - RNA, 19 nt, Homo sapiens
  misc_RNA (1)...(19): siRNA sense strand
gcucaaguggcugaaguug

SEQ ID NO: 796841 - RNA, 19 nt, Homo sapiens
  misc_RNA (1)...(19): siRNA sense strand
gugagaaaacugacaauga

SEQ ID NO: 796842 - RNA, 19 nt, Homo sapiens
  misc_RNA (1)...(19): siRNA sense strand
guacagcacccgugaaaag

SEQ ID NO: 796843 - RNA, 19 nt, Homo sapiens
  misc_RNA (1)...(19): siRNA sense strand
acucugugguggagaugaa

SEQ ID NO: 796844 - RNA, 19 nt, Homo sapiens
  misc_RNA (1)...(19): siRNA sense strand
ugagaaaacugacaaugac

SEQ ID NO: 796845 - RNA, 19 nt, Homo sapiens
  misc_RNA (1)...(19): siRNA sense strand
ccacggagucucagaagcu

SEQ ID NO: 796846 - RNA, 19 nt, Homo sapiens
  misc_RNA (1)...(19): siRNA sense strand
ccucuggguggaugaguuu

SEQ ID NO: 796847 - RNA, 19 nt, Homo sapiens
  misc_RNA (1)...(19): siRNA sense strand
ucaccuaccagacgaagca

SEQ ID NO: 796848 - RNA, 19 nt, Homo sapiens
  misc_RNA (1)...(19): siRNA sense strand
ggaccucgcagagcuuugg

SEQ ID NO: 796849 - RNA, 19 nt, Homo sapiens
  misc_RNA (1)...(19): siRNA sense strand
gaacaaacuucacuaugca

SEQ ID NO: 796850 - RNA, 19 nt, Homo sapiens
  misc_RNA (1)...(19): siRNA sense strand
gcaggaggcugaugaagau

SEQ ID NO: 796851 - RNA, 19 nt, Homo sapiens
  misc_RNA (1)...(19): siRNA sense strand
ggaacaaacuucacuaugc

SEQ ID NO: 796852 - RNA, 19 nt, Homo sapiens
  misc_RNA (1)...(19): siRNA sense strand
gaagauggacguugagcaa

SEQ ID NO: 796853 - RNA, 19 nt, Homo sapiens
  misc_RNA (1)...(19): siRNA sense strand
uagagaagauggacguuga

SEQ ID NO: 796854 - RNA, 19 nt, Homo sapiens
  misc_RNA (1)...(19): siRNA sense strand
gcacuggacaggaauaaga

SEQ ID NO: 796855 - RNA, 19 nt, Homo sapiens
  misc_RNA (1)...(19): siRNA sense strand
ggagaccgaauuauagaaa

SEQ ID NO: 796856 - RNA, 19 nt, Homo sapiens
  misc_RNA (1)...(19): siRNA sense strand
cagaagagcagcuggagaa

SEQ ID NO: 796857 - RNA, 19 nt, Homo sapiens
  misc_RNA (1)...(19): siRNA sense strand
gaagaugaggacacagaaa

SEQ ID NO: 796858 - RNA, 19 nt, Homo sapiens
  misc_RNA (1)...(19): siRNA sense strand
ggguacaggugacagaaga

SEQ ID NO: 796859 - RNA, 19 nt, Homo sapiens
  misc_RNA (1)...(19): siRNA sense strand
ggaguucaccaaguccuua

SEQ ID NO: 796860 - RNA, 19 nt, Homo sapiens
  misc_RNA (1)...(19): siRNA sense strand
ccugggagaccgaauuaua

SEQ ID NO: 796861 - RNA, 19 nt, Homo sapiens
  misc_RNA (1)...(19): siRNA sense strand
aaacuucacuaugcauuuc

SEQ ID NO: 796862 - RNA, 19 nt, Homo sapiens
  misc_RNA (1)...(19): siRNA sense strand
caaacuucacuaugcauuu

SEQ ID NO: 796863 - RNA, 19 nt, Homo sapiens
  misc_RNA (1)...(19): siRNA sense strand
ggagccagcgaguggauuu

SEQ ID NO: 796864 - RNA, 19 nt, Homo sapiens
  misc_RNA (1)...(19): siRNA sense strand
gaaccucucaacagcagaa

SEQ ID NO: 796865 - RNA, 19 nt, Homo sapiens
  misc_RNA (1)...(19): siRNA sense strand
aagagcagcuggagaacau

SEQ ID NO: 796866 - RNA, 19 nt, Homo sapiens
  misc_RNA (1)...(19): siRNA sense strand
gagaccgaauuauagaaag

SEQ ID NO: 796867 - RNA, 19 nt, Homo sapiens
  misc_RNA (1)...(19): siRNA sense strand
ccaaguccuuagagaagau

SEQ ID NO: 796868 - RNA, 19 nt, Homo sapiens
  misc_RNA (1)...(19): siRNA sense strand
gcauccggauccugaagug

SEQ ID NO: 796869 - RNA, 19 nt, Homo sapiens
  misc_RNA (1)...(19): siRNA sense strand
gaagagcagcuggagaaca

SEQ ID NO: 796870 - RNA, 19 nt, Homo sapiens
  misc_RNA (1)...(19): siRNA sense strand
ucaccaaguccuuagagaa

SEQ ID NO: 796871 - RNA, 19 nt, Homo sapiens
  misc_RNA (1)...(19): siRNA sense strand
ucagggucuuggcucauuu

SEQ ID NO: 796872 - RNA, 19 nt, Homo sapiens
  misc_RNA (1)...(19): siRNA sense strand
uagaagaugaggacacaga

SEQ ID NO: 796873 - RNA, 19 nt, Homo sapiens
  misc_RNA (1)...(19): siRNA sense strand
gucagggucuuggcucauu

SEQ ID NO: 796874 - RNA, 19 nt, Homo sapiens
  misc_RNA (1)...(19): siRNA sense strand
uguagaagaugaggacaca

SEQ ID NO: 796875 - RNA, 19 nt, Homo sapiens
  misc_RNA (1)...(19): siRNA sense strand
gacaguauucggcgagaga

SEQ ID NO: 796876 - RNA, 19 nt, Homo sapiens
  misc_RNA (1)...(19): siRNA sense strand
ggacacagaaacccaagac

SEQ ID NO: 796877 - RNA, 19 nt, Homo sapiens
  misc_RNA (1)...(19): siRNA sense strand
caacagcagaaggaacaaa

SEQ ID NO: 796878 - RNA, 19 nt, Homo sapiens
  misc_RNA (1)...(19): siRNA sense strand
cagcagaaggaacaaacuu

SEQ ID NO: 796879 - RNA, 19 nt, Homo sapiens
  misc_RNA (1)...(19): siRNA sense strand
gaagaucuccaggcaugag

SEQ ID NO: 796880 - RNA, 19 nt, Homo sapiens
  misc_RNA (1)...(19): siRNA sense strand
caccaaguccuuagagaag

SEQ ID NO: 796881 - RNA, 19 nt, Homo sapiens
  misc_RNA (1)...(19): siRNA sense strand
gggagaccgaauuauagaa

SEQ ID NO: 796882 - RNA, 19 nt, Homo sapiens
  misc_RNA (1)...(19): siRNA sense strand
gggcacuggacaggaauaa

SEQ ID NO: 796883 - RNA, 19 nt, Homo sapiens
  misc_RNA (1)...(19): siRNA sense strand
ggaagaucuccaggcauga

SEQ ID NO: 796884 - RNA, 19 nt, Homo sapiens
  misc_RNA (1)...(19): siRNA sense strand
ggaauaagaagggcuaccu

SEQ ID NO: 796885 - RNA, 19 nt, Homo sapiens
  misc_RNA (1)...(19): siRNA sense strand
acaaacuucacuaugcauu

SEQ ID NO: 796886 - RNA, 19 nt, Homo sapiens
  misc_RNA (1)...(19): siRNA sense strand
ucagcucuaugaccuggau

SEQ ID NO: 796887 - RNA, 19 nt, Homo sapiens
  misc_RNA (1)...(19): siRNA sense strand
gaaaccauguucaccagua

SEQ ID NO: 796888 - RNA, 19 nt, Homo sapiens
  misc_RNA (1)...(19): siRNA sense strand
gaucaagucuccugcagaa

SEQ ID NO: 796889 - RNA, 19 nt, Homo sapiens
  misc_RNA (1)...(19): siRNA sense strand
gagaacaucuacagcauga

SEQ ID NO: 796890 - RNA, 19 nt, Homo sapiens
  misc_RNA (1)...(19): siRNA sense strand
gacagaagcuuaaagacuu

SEQ ID NO: 796891 - RNA, 19 nt, Homo sapiens
  misc_RNA (1)...(19): siRNA sense strand
ggacucaccucucauccuu

SEQ ID NO: 796892 - RNA, 19 nt, Homo sapiens
  misc_RNA (1)...(19): siRNA sense strand
ccaaagagaugaaugacau

SEQ ID NO: 796893 - RNA, 19 nt, Homo sapiens
  misc_RNA (1)...(19): siRNA sense strand
gcaacgauauucccuauac

SEQ ID NO: 796894 - RNA, 19 nt, Homo sapiens
  misc_RNA (1)...(19): siRNA sense strand
gagcaacgauauucccuau

SEQ ID NO: 796895 - RNA, 19 nt, Homo sapiens
  misc_RNA (1)...(19): siRNA sense strand
ccaagagccugauagcauu

SEQ ID NO: 796896 - RNA, 19 nt, Homo sapiens
  misc_RNA (1)...(19): siRNA sense strand
agacgaacaugguuuggua

SEQ ID NO: 796897 - RNA, 19 nt, Homo sapiens
  misc_RNA (1)...(19): siRNA sense strand
gguaaucggucaaacacuu

SEQ ID NO: 796898 - RNA, 19 nt, Homo sapiens
  misc_RNA (1)...(19): siRNA sense strand
ccuauacgcuagaagaauu

SEQ ID NO: 796899 - RNA, 19 nt, Homo sapiens
  misc_RNA (1)...(19): siRNA sense strand
caagucuccugcagaaauu

SEQ ID NO: 796900 - RNA, 19 nt, Homo sapiens
  misc_RNA (1)...(19): siRNA sense strand
ggacaagcuuggagaacau

SEQ ID NO: 796901 - RNA, 19 nt, Homo sapiens
  misc_RNA (1)...(19): siRNA sense strand
gcaaacaauuaccaucaca

SEQ ID NO: 796902 - RNA, 19 nt, Homo sapiens
  misc_RNA (1)...(19): siRNA sense strand
ggauggagguugugagucu

SEQ ID NO: 796903 - RNA, 19 nt, Homo sapiens
  misc_RNA (1)...(19): siRNA sense strand
gagccucccuggcaaacaa

SEQ ID NO: 796904 - RNA, 19 nt, Homo sapiens
  misc_RNA (1)...(19): siRNA sense strand
cagcuucacucugacuaua

SEQ ID NO: 796905 - RNA, 19 nt, Homo sapiens
  misc_RNA (1)...(19): siRNA sense strand
ggacagaagcuuaaagacu

SEQ ID NO: 796906 - RNA, 19 nt, Homo sapiens
  misc_RNA (1)...(19): siRNA sense strand
ggaugguaaucacaauuga

SEQ ID NO: 796907 - RNA, 19 nt, Homo sapiens
  misc_RNA (1)...(19): siRNA sense strand
auaaucaacucaucaagga

SEQ ID NO: 796908 - RNA, 19 nt, Homo sapiens
  misc_RNA (1)...(19): siRNA sense strand
acaauuaccaucacacaaa

SEQ ID NO: 796909 - RNA, 19 nt, Homo sapiens
  misc_RNA (1)...(19): siRNA sense strand
gaacaugguuugguaugac

SEQ ID NO: 796910 - RNA, 19 nt, Homo sapiens
  misc_RNA (1)...(19): siRNA sense strand
augcacagcuucacucuga

SEQ ID NO: 796911 - RNA, 19 nt, Homo sapiens
  misc_RNA (1)...(19): siRNA sense strand
caggauguauguuguguuc

SEQ ID NO: 796912 - RNA, 19 nt, Homo sapiens
  misc_RNA (1)...(19): siRNA sense strand
cuagagauccaaagagauu

SEQ ID NO: 796913 - RNA, 19 nt, Homo sapiens
  misc_RNA (1)...(19): siRNA sense strand
aaaccauguucaccaguaa

SEQ ID NO: 796914 - RNA, 19 nt, Homo sapiens
  misc_RNA (1)...(19): siRNA sense strand
gggacaagcuuggagaaca

SEQ ID NO: 796915 - RNA, 19 nt, Homo sapiens
  misc_RNA (1)...(19): siRNA sense strand
agacaacaauuuccuguac

SEQ ID NO: 796916 - RNA, 19 nt, Homo sapiens
  misc_RNA (1)...(19): siRNA sense strand
caucacaggcuuucauaga

SEQ ID NO: 796917 - RNA, 19 nt, Homo sapiens
  misc_RNA (1)...(19): siRNA sense strand
cuagaagaauuucaacauc

SEQ ID NO: 796918 - RNA, 19 nt, Homo sapiens
  misc_RNA (1)...(19): siRNA sense strand
cgaacaugguuugguauga

SEQ ID NO: 796919 - RNA, 19 nt, Homo sapiens
  misc_RNA (1)...(19): siRNA sense strand
gggaucaugaagaacauua

SEQ ID NO: 796920 - RNA, 19 nt, Homo sapiens
  misc_RNA (1)...(19): siRNA sense strand
gauuccaaaccgauacuua

SEQ ID NO: 796921 - RNA, 19 nt, Homo sapiens
  misc_RNA (1)...(19): siRNA sense strand
caagcugguucccgcugua

SEQ ID NO: 796922 - RNA, 19 nt, Homo sapiens
  misc_RNA (1)...(19): siRNA sense strand
gacaucacaggcuuucaua

SEQ ID NO: 796923 - RNA, 19 nt, Homo sapiens
  misc_RNA (1)...(19): siRNA sense strand
gacuaucucagguggaaua

SEQ ID NO: 796924 - RNA, 19 nt, Homo sapiens
  misc_RNA (1)...(19): siRNA sense strand
gaaaggaggauuccaaacc

SEQ ID NO: 796925 - RNA, 19 nt, Homo sapiens
  misc_RNA (1)...(19): siRNA sense strand
ggaggauuccaaaccgaua

SEQ ID NO: 796926 - RNA, 19 nt, Homo sapiens
  misc_RNA (1)...(19): siRNA sense strand
gcacuucgcagacacaaac

SEQ ID NO: 796927 - RNA, 19 nt, Homo sapiens
  misc_RNA (1)...(19): siRNA sense strand
uggcacugauggagcaaua

SEQ ID NO: 796928 - RNA, 19 nt, Homo sapiens
  misc_RNA (1)...(19): siRNA sense strand
gauauucccuauacuuucc

SEQ ID NO: 796929 - RNA, 19 nt, Homo sapiens
  misc_RNA (1)...(19): siRNA sense strand
guacguggccagucaaugg

SEQ ID NO: 796930 - RNA, 19 nt, Homo sapiens
  misc_RNA (1)...(19): siRNA sense strand
ggaaauggugcuucuggau

SEQ ID NO: 796931 - RNA, 19 nt, Homo sapiens
  misc_RNA (1)...(19): siRNA sense strand
gcuagaagaauuucaacau

SEQ ID NO: 796932 - RNA, 19 nt, Homo sapiens
  misc_RNA (1)...(19): siRNA sense strand
caauuaccaucacacaaag

SEQ ID NO: 796933 - RNA, 19 nt, Homo sapiens
  misc_RNA (1)...(19): siRNA sense strand
uaucucagguggaauaugc

SEQ ID NO: 796934 - RNA, 19 nt, Homo sapiens
  misc_RNA (1)...(19): siRNA sense strand
gaauugaggaugauguagu

SEQ ID NO: 796935 - RNA, 19 nt, Homo sapiens
  misc_RNA (1)...(19): siRNA sense strand
gggaugguaaucacaauug

SEQ ID NO: 796936 - RNA, 19 nt, Homo sapiens
  misc_RNA (1)...(19): siRNA sense strand
ccagaaaggaggauuccaa

SEQ ID NO: 796937 - RNA, 19 nt, Homo sapiens
  misc_RNA (1)...(19): siRNA sense strand
cugcagaaauugaacgaau

SEQ ID NO: 796938 - RNA, 19 nt, Homo sapiens
  misc_RNA (1)...(19): siRNA sense strand
acaauuuccuguaccuaug

SEQ ID NO: 796939 - RNA, 19 nt, Homo sapiens
  misc_RNA (1)...(19): siRNA sense strand
ucaagucuccugcagaaau

SEQ ID NO: 796940 - RNA, 19 nt, Homo sapiens
  misc_RNA (1)...(19): siRNA sense strand
acucaggacucaccucuca

SEQ ID NO: 796941 - RNA, 19 nt, Homo sapiens
  misc_RNA (1)...(19): siRNA sense strand
gagucuuccugcuauguga

SEQ ID NO: 796942 - RNA, 19 nt, Homo sapiens
  misc_RNA (1)...(19): siRNA sense strand
guaaucggucaaacacuuu

SEQ ID NO: 796943 - RNA, 19 nt, Homo sapiens
  misc_RNA (1)...(19): siRNA sense strand
cagaaaggaggauuccaaa

SEQ ID NO: 796944 - RNA, 19 nt, Homo sapiens
  misc_RNA (1)...(19): siRNA sense strand
uucaacaucuucuaccaaa

SEQ ID NO: 796945 - RNA, 19 nt, Homo sapiens
  misc_RNA (1)...(19): siRNA sense strand
ggucuugguguacgaauug

SEQ ID NO: 796946 - RNA, 19 nt, Homo sapiens
  misc_RNA (1)...(19): siRNA sense strand
gcucguggcgcagacauuu

SEQ ID NO: 796947 - RNA, 19 nt, Homo sapiens
  misc_RNA (1)...(19): siRNA sense strand
aagccuuucuuuaugcuaa

SEQ ID NO: 796948 - RNA, 19 nt, Homo sapiens
  misc_RNA (1)...(19): siRNA sense strand
ccaccaagacaacaauuuc

SEQ ID NO: 796949 - RNA, 19 nt, Homo sapiens
  misc_RNA (1)...(19): siRNA sense strand
cugggaagcugacaucaca

SEQ ID NO: 796950 - RNA, 19 nt, Homo sapiens
  misc_RNA (1)...(19): siRNA sense strand
gcuucacucugacuauaug

SEQ ID NO: 796951 - RNA, 19 nt, Homo sapiens
  misc_RNA (1)...(19): siRNA sense strand
acagaagcuuaaagacuug

SEQ ID NO: 796952 - RNA, 19 nt, Homo sapiens
  misc_RNA (1)...(19): siRNA sense strand
ucuccaacccuacauacua

SEQ ID NO: 796953 - RNA, 19 nt, Homo sapiens
  misc_RNA (1)...(19): siRNA sense strand
auacuguccucaucauguu

SEQ ID NO: 796954 - RNA, 19 nt, Homo sapiens
  misc_RNA (1)...(19): siRNA sense strand
gaaaauacuguccucauca

SEQ ID NO: 796955 - RNA, 19 nt, Homo sapiens
  misc_RNA (1)...(19): siRNA sense strand
cuacaugagcaacgauauu

SEQ ID NO: 796956 - RNA, 19 nt, Homo sapiens
  misc_RNA (1)...(19): siRNA sense strand
ggauguauguuguguucac

SEQ ID NO: 796957 - RNA, 19 nt, Homo sapiens
  misc_RNA (1)...(19): siRNA sense strand
ugauaggacagaagcuuaa

SEQ ID NO: 796958 - RNA, 19 nt, Homo sapiens
  misc_RNA (1)...(19): siRNA sense strand
ggaucaugaagaacauuaa

SEQ ID NO: 796959 - RNA, 19 nt, Homo sapiens
  misc_RNA (1)...(19): siRNA sense strand
ccuauacuuuccaccaaga

SEQ ID NO: 796960 - RNA, 19 nt, Homo sapiens
  misc_RNA (1)...(19): siRNA sense strand
guguacgaauugaggauga

SEQ ID NO: 796961 - RNA, 19 nt, Homo sapiens
  misc_RNA (1)...(19): siRNA sense strand
ggaaaauaaugccuucaag

SEQ ID NO: 796962 - RNA, 19 nt, Homo sapiens
  misc_RNA (1)...(19): siRNA sense strand
uaggacagaagcuuaaaga

SEQ ID NO: 796963 - RNA, 19 nt, Homo sapiens
  misc_RNA (1)...(19): siRNA sense strand
ggaguagacgaagccuaua

SEQ ID NO: 796964 - RNA, 19 nt, Homo sapiens
  misc_RNA (1)...(19): siRNA sense strand
gcugagacgaacaugguuu

SEQ ID NO: 796965 - RNA, 19 nt, Homo sapiens
  misc_RNA (1)...(19): siRNA sense strand
cauccuuucugcagacugu

SEQ ID NO: 796966 - RNA, 19 nt, Homo sapiens
  misc_RNA (1)...(19): siRNA sense strand
cuucaaggcugcucgaaaa

SEQ ID NO: 796967 - RNA, 19 nt, Homo sapiens
  misc_RNA (1)...(19): siRNA sense strand
ucaugaagaacauuaagga

SEQ ID NO: 796968 - RNA, 19 nt, Homo sapiens
  misc_RNA (1)...(19): siRNA sense strand
gauaggacagaagcuuaaa

SEQ ID NO: 796969 - RNA, 19 nt, Homo sapiens
  misc_RNA (1)...(19): siRNA sense strand
ugaagccguucuagagauc

SEQ ID NO: 796970 - RNA, 19 nt, Homo sapiens
  misc_RNA (1)...(19): siRNA sense strand
gaucccagucgagaacuuu

SEQ ID NO: 796971 - RNA, 19 nt, Homo sapiens
  misc_RNA (1)...(19): siRNA sense strand
aaaugaaagcugagacgaa

SEQ ID NO: 796972 - RNA, 19 nt, Homo sapiens
  misc_RNA (1)...(19): siRNA sense strand
gaauuucaacaucuucuac

SEQ ID NO: 796973 - RNA, 19 nt, Homo sapiens
  misc_RNA (1)...(19): siRNA sense strand
cacaaacuaaugucucuga

SEQ ID NO: 796974 - RNA, 19 nt, Homo sapiens
  misc_RNA (1)...(19): siRNA sense strand
aauugaggaugauguagug

SEQ ID NO: 796975 - RNA, 19 nt, Homo sapiens
  misc_RNA (1)...(19): siRNA sense strand
gaucaugaagaacauuaag

SEQ ID NO: 796976 - RNA, 19 nt, Homo sapiens
  misc_RNA (1)...(19): siRNA sense strand
caagagcaagaacaagguu

SEQ ID NO: 796977 - RNA, 19 nt, Homo sapiens
  misc_RNA (1)...(19): siRNA sense strand
gcccucacaugcacagcuu

SEQ ID NO: 796978 - RNA, 19 nt, Homo sapiens
  misc_RNA (1)...(19): siRNA sense strand
ugauagcauucuuguccuu

SEQ ID NO: 796979 - RNA, 19 nt, Homo sapiens
  misc_RNA (1)...(19): siRNA sense strand
uccagaggaugacaaagau

SEQ ID NO: 796980 - RNA, 19 nt, Homo sapiens
  misc_RNA (1)...(19): siRNA sense strand
cgaaaauacuguccucauc

SEQ ID NO: 796981 - RNA, 19 nt, Homo sapiens
  misc_RNA (1)...(19): siRNA sense strand
ucgcagacacaaacuaaug

SEQ ID NO: 796982 - RNA, 19 nt, Homo sapiens
  misc_RNA (1)...(19): siRNA sense strand
guugugagucuuccugcua

SEQ ID NO: 796983 - RNA, 19 nt, Homo sapiens
  misc_RNA (1)...(19): siRNA sense strand
ugugguggcuggugguaau

SEQ ID NO: 796984 - RNA, 19 nt, Homo sapiens
  misc_RNA (1)...(19): siRNA sense strand
ccaaagccaagagcaagaa

SEQ ID NO: 796985 - RNA, 19 nt, Homo sapiens
  misc_RNA (1)...(19): siRNA sense strand
cgaagccuauacgcuagaa

SEQ ID NO: 796986 - RNA, 19 nt, Homo sapiens
  misc_RNA (1)...(19): siRNA sense strand
aaacaauuaccaucacaca

SEQ ID NO: 796987 - RNA, 19 nt, Homo sapiens
  misc_RNA (1)...(19): siRNA sense strand
ugacacagauuucauuucu

SEQ ID NO: 796988 - RNA, 19 nt, Homo sapiens
  misc_RNA (1)...(19): siRNA sense strand
ucucuucuguggcuuauug

SEQ ID NO: 796989 - RNA, 19 nt, Homo sapiens
  misc_RNA (1)...(19): siRNA sense strand
cauuucugauugcggaauu

SEQ ID NO: 796990 - RNA, 19 nt, Homo sapiens
  misc_RNA (1)...(19): siRNA sense strand
gaauuuuacucucaaacca

SEQ ID NO: 796991 - RNA, 19 nt, Homo sapiens
  misc_RNA (1)...(19): siRNA sense strand
gucccuuguuuccggauuu

SEQ ID NO: 796992 - RNA, 19 nt, Homo sapiens
  misc_RNA (1)...(19): siRNA sense strand
ccaggccugacacagauuu

SEQ ID NO: 796993 - RNA, 19 nt, Homo sapiens
  misc_RNA (1)...(19): siRNA sense strand
ccugacacagauuucauuu

SEQ ID NO: 796994 - RNA, 19 nt, Homo sapiens
  misc_RNA (1)...(19): siRNA sense strand
gaagaaauccgaaacauaa

SEQ ID NO: 796995 - RNA, 19 nt, Homo sapiens
  misc_RNA (1)...(19): siRNA sense strand
ggacaaaucugcucagugu

SEQ ID NO: 796996 - RNA, 19 nt, Homo sapiens
  misc_RNA (1)...(19): siRNA sense strand
ggaagacgcugaccgaauu

SEQ ID NO: 796997 - RNA, 19 nt, Homo sapiens
  misc_RNA (1)...(19): siRNA sense strand
gaaagugacccucguuaua

SEQ ID NO: 796998 - RNA, 19 nt, Homo sapiens
  misc_RNA (1)...(19): siRNA sense strand
gaucugaaauuguugcuaa

SEQ ID NO: 796999 - RNA, 19 nt, Homo sapiens
  misc_RNA (1)...(19): siRNA sense strand
gaacgucaauucaucagaa

SEQ ID NO: 797000 - RNA, 19 nt, Homo sapiens
  misc_RNA (1)...(19): siRNA sense strand
gaagagagcaucaaaggaa

SEQ ID NO: 797001 - RNA, 19 nt, Homo sapiens
  misc_RNA (1)...(19): siRNA sense strand
caacuaaucugucaauaca

SEQ ID NO: 797002 - RNA, 19 nt, Homo sapiens
  misc_RNA (1)...(19): siRNA sense strand
gaaguggaaugggaaguua

SEQ ID NO: 797003 - RNA, 19 nt, Homo sapiens
  misc_RNA (1)...(19): siRNA sense strand
cgacagaacuaacagaaga

SEQ ID NO: 797004 - RNA, 19 nt, Homo sapiens
  misc_RNA (1)...(19): siRNA sense strand
gaggagaaaucaugaaaca

SEQ ID NO: 797005 - RNA, 19 nt, Homo sapiens
  misc_RNA (1)...(19): siRNA sense strand
agaaacauaugcaguguaa

SEQ ID NO: 797006 - RNA, 19 nt, Homo sapiens
  misc_RNA (1)...(19): siRNA sense strand
ugaaggagauacagauaaa

SEQ ID NO: 797007 - RNA, 19 nt, Homo sapiens
  misc_RNA (1)...(19): siRNA sense strand
gcacagauaccaguaguaa

SEQ ID NO: 797008 - RNA, 19 nt, Homo sapiens
  misc_RNA (1)...(19): siRNA sense strand
gagcuuugaucaugaagaa

SEQ ID NO: 797009 - RNA, 19 nt, Homo sapiens
  misc_RNA (1)...(19): siRNA sense strand
gcagacaagcuauuacuuu

SEQ ID NO: 797010 - RNA, 19 nt, Homo sapiens
  misc_RNA (1)...(19): siRNA sense strand
uaauagcucuggugaauuc

SEQ ID NO: 797011 - RNA, 19 nt, Homo sapiens
  misc_RNA (1)...(19): siRNA sense strand
gagaauggccuacagaaug

SEQ ID NO: 797012 - RNA, 19 nt, Homo sapiens
  misc_RNA (1)...(19): siRNA sense strand
gacaagcuauuacuuugaa

SEQ ID NO: 797013 - RNA, 19 nt, Homo sapiens
  misc_RNA (1)...(19): siRNA sense strand
guagaggacaguuguauuu

SEQ ID NO: 797014 - RNA, 19 nt, Homo sapiens
  misc_RNA (1)...(19): siRNA sense strand
gaccugcacugucuaaaug

SEQ ID NO: 797015 - RNA, 19 nt, Homo sapiens
  misc_RNA (1)...(19): siRNA sense strand
gaauugugaugacaguaaa

SEQ ID NO: 797016 - RNA, 19 nt, Homo sapiens
  misc_RNA (1)...(19): siRNA sense strand
uaacagaagagaaagcaua

SEQ ID NO: 797017 - RNA, 19 nt, Homo sapiens
  misc_RNA (1)...(19): siRNA sense strand
gaauaaggaggauaaaguu

SEQ ID NO: 797018 - RNA, 19 nt, Homo sapiens
  misc_RNA (1)...(19): siRNA sense strand
ugaaacaacuaaucuguca

SEQ ID NO: 797019 - RNA, 19 nt, Homo sapiens
  misc_RNA (1)...(19): siRNA sense strand
caauuggacuuaacauguu

SEQ ID NO: 797020 - RNA, 19 nt, Homo sapiens
  misc_RNA (1)...(19): siRNA sense strand
ccagugaaauggagaguug

SEQ ID NO: 797021 - RNA, 19 nt, Homo sapiens
  misc_RNA (1)...(19): siRNA sense strand
ugaaauacuuggugcuuga

SEQ ID NO: 797022 - RNA, 19 nt, Homo sapiens
  misc_RNA (1)...(19): siRNA sense strand
gaucagagucuaagagaga

SEQ ID NO: 797023 - RNA, 19 nt, Homo sapiens
  misc_RNA (1)...(19): siRNA sense strand
guuaauagagccuguaauu

SEQ ID NO: 797024 - RNA, 19 nt, Homo sapiens
  misc_RNA (1)...(19): siRNA sense strand
guaaaaugcuugaagauga

SEQ ID NO: 797025 - RNA, 19 nt, Homo sapiens
  misc_RNA (1)...(19): siRNA sense strand
cgaaacaagucugaaaguu

SEQ ID NO: 797026 - RNA, 19 nt, Homo sapiens
  misc_RNA (1)...(19): siRNA sense strand
ugacugugguguauaugua

SEQ ID NO: 797027 - RNA, 19 nt, Homo sapiens
  misc_RNA (1)...(19): siRNA sense strand
gaaauaggacaguggcauu

SEQ ID NO: 797028 - RNA, 19 nt, Homo sapiens
  misc_RNA (1)...(19): siRNA sense strand
cagacaagcuauuacuuug

SEQ ID NO: 797029 - RNA, 19 nt, Homo sapiens
  misc_RNA (1)...(19): siRNA sense strand
gaagaaagugaaggagaua

SEQ ID NO: 797030 - RNA, 19 nt, Homo sapiens
  misc_RNA (1)...(19): siRNA sense strand
agaauggccuacagaauga

SEQ ID NO: 797031 - RNA, 19 nt, Homo sapiens
  misc_RNA (1)...(19): siRNA sense strand
ccucugaucuaacuaaaug

SEQ ID NO: 797032 - RNA, 19 nt, Homo sapiens
  misc_RNA (1)...(19): siRNA sense strand
caaagaaauugcagacaag

SEQ ID NO: 797033 - RNA, 19 nt, Homo sapiens
  misc_RNA (1)...(19): siRNA sense strand
gaaauuaagaggaaaguac

SEQ ID NO: 797034 - RNA, 19 nt, Homo sapiens
  misc_RNA (1)...(19): siRNA sense strand
gagaagaaauccgaaacau

SEQ ID NO: 797035 - RNA, 19 nt, Homo sapiens
  misc_RNA (1)...(19): siRNA sense strand
gcaucucuguuaccaauga

SEQ ID NO: 797036 - RNA, 19 nt, Homo sapiens
  misc_RNA (1)...(19): siRNA sense strand
gcuaauggcagacuuguug

SEQ ID NO: 797037 - RNA, 19 nt, Homo sapiens
  misc_RNA (1)...(19): siRNA sense strand
ggacagaagucacaaaaca

SEQ ID NO: 797038 - RNA, 19 nt, Homo sapiens
  misc_RNA (1)...(19): siRNA sense strand
gaaugauuguaaaggagua

SEQ ID NO: 797039 - RNA, 19 nt, Homo sapiens
  misc_RNA (1)...(19): siRNA sense strand
gaggacaguuguauuucuu

SEQ ID NO: 797040 - RNA, 19 nt, Homo sapiens
  misc_RNA (1)...(19): siRNA sense strand
acaguuacauugccaagaa

SEQ ID NO: 797041 - RNA, 19 nt, Homo sapiens
  misc_RNA (1)...(19): siRNA sense strand
uauaaacgccuuaaucaga

SEQ ID NO: 797042 - RNA, 19 nt, Homo sapiens
  misc_RNA (1)...(19): siRNA sense strand
uaagagagauggagguuuu

SEQ ID NO: 797043 - RNA, 19 nt, Homo sapiens
  misc_RNA (1)...(19): siRNA sense strand
ccaagguguugaacguaua

SEQ ID NO: 797044 - RNA, 19 nt, Homo sapiens
  misc_RNA (1)...(19): siRNA sense strand
aaagugacccucguuauaa

SEQ ID NO: 797045 - RNA, 19 nt, Homo sapiens
  misc_RNA (1)...(19): siRNA sense strand
gcauagcuguaauugauuc

SEQ ID NO: 797046 - RNA, 19 nt, Homo sapiens
  misc_RNA (1)...(19): siRNA sense strand
gcauccaacugcaaaugaa

SEQ ID NO: 797047 - RNA, 19 nt, Homo sapiens
  misc_RNA (1)...(19): siRNA sense strand
ucacaaacuugaaagaaag

SEQ ID NO: 797048 - RNA, 19 nt, Homo sapiens
  misc_RNA (1)...(19): siRNA sense strand
ugagucuacuggaccauua

SEQ ID NO: 797049 - RNA, 19 nt, Homo sapiens
  misc_RNA (1)...(19): siRNA sense strand
caaguggagccugaaauua

SEQ ID NO: 797050 - RNA, 19 nt, Homo sapiens
  misc_RNA (1)...(19): siRNA sense strand
uugcauagcuguaauugau

SEQ ID NO: 797051 - RNA, 19 nt, Homo sapiens
  misc_RNA (1)...(19): siRNA sense strand
guacaagaaccuaugaaga

SEQ ID NO: 797052 - RNA, 19 nt, Homo sapiens
  misc_RNA (1)...(19): siRNA sense strand
gcaauucuauuaucaacac

SEQ ID NO: 797053 - RNA, 19 nt, Homo sapiens
  misc_RNA (1)...(19): siRNA sense strand
uagaggauuugcaaagaaa

SEQ ID NO: 797054 - RNA, 19 nt, Homo sapiens
  misc_RNA (1)...(19): siRNA sense strand
gaggaaaguacaacagaaa

SEQ ID NO: 797055 - RNA, 19 nt, Homo sapiens
  misc_RNA (1)...(19): siRNA sense strand
gaagaugaggauucugaaa

SEQ ID NO: 797056 - RNA, 19 nt, Homo sapiens
  misc_RNA (1)...(19): siRNA sense strand
gaagaucagagcaaagaga

SEQ ID NO: 797057 - RNA, 19 nt, Homo sapiens
  misc_RNA (1)...(19): siRNA sense strand
gaaauccgaaacauaauuc

SEQ ID NO: 797058 - RNA, 19 nt, Homo sapiens
  misc_RNA (1)...(19): siRNA sense strand
gagaggagaaaucaugaaa

SEQ ID NO: 797059 - RNA, 19 nt, Homo sapiens
  misc_RNA (1)...(19): siRNA sense strand
ggauaaaguuuggaaugau

SEQ ID NO: 797060 - RNA, 19 nt, Homo sapiens
  misc_RNA (1)...(19): siRNA sense strand
gaagcagcacuaaaugaaa

SEQ ID NO: 797061 - RNA, 19 nt, Homo sapiens
  misc_RNA (1)...(19): siRNA sense strand
gaaaagguuccaauugaua

SEQ ID NO: 797062 - RNA, 19 nt, Homo sapiens
  misc_RNA (1)...(19): siRNA sense strand
gaaaggcaacccaauugga

SEQ ID NO: 797063 - RNA, 19 nt, Homo sapiens
  misc_RNA (1)...(19): siRNA sense strand
ccuacagaaugaaaguuua

SEQ ID NO: 797064 - RNA, 19 nt, Homo sapiens
  misc_RNA (1)...(19): siRNA sense strand
gaaucuacaucccagaaag

SEQ ID NO: 797065 - RNA, 19 nt, Homo sapiens
  misc_RNA (1)...(19): siRNA sense strand
gcuauuacuuugaaugagu

SEQ ID NO: 797066 - RNA, 19 nt, Homo sapiens
  misc_RNA (1)...(19): siRNA sense strand
ggagaaaucaugaaacaac

SEQ ID NO: 797067 - RNA, 19 nt, Homo sapiens
  misc_RNA (1)...(19): siRNA sense strand
gaaaauucccuuugaagaa

SEQ ID NO: 797068 - RNA, 19 nt, Homo sapiens
  misc_RNA (1)...(19): siRNA sense strand
caacacaccucugaaacgu

SEQ ID NO: 797069 - RNA, 19 nt, Homo sapiens
  misc_RNA (1)...(19): siRNA sense strand
guauauguauugcaguaug

SEQ ID NO: 797070 - RNA, 19 nt, Homo sapiens
  misc_RNA (1)...(19): siRNA sense strand
guguauauguauugcagua

SEQ ID NO: 797071 - RNA, 19 nt, Homo sapiens
  misc_RNA (1)...(19): siRNA sense strand
gaagggcucuaauccaaaa

SEQ ID NO: 797072 - RNA, 19 nt, Homo sapiens
  misc_RNA (1)...(19): siRNA sense strand
ggucaaauguugucaaaau

SEQ ID NO: 797073 - RNA, 19 nt, Homo sapiens
  misc_RNA (1)...(19): siRNA sense strand
uaaaucauacugcgaguga

SEQ ID NO: 797074 - RNA, 19 nt, Homo sapiens
  misc_RNA (1)...(19): siRNA sense strand
gaagaaagugacccucguu

SEQ ID NO: 797075 - RNA, 19 nt, Homo sapiens
  misc_RNA (1)...(19): siRNA sense strand
auacagaaauguucaacug

SEQ ID NO: 797076 - RNA, 19 nt, Homo sapiens
  misc_RNA (1)...(19): siRNA sense strand
ccagaugcuuuagcuuuaa

SEQ ID NO: 797077 - RNA, 19 nt, Homo sapiens
  misc_RNA (1)...(19): siRNA sense strand
uccagaugcuuuagcuuua

SEQ ID NO: 797078 - RNA, 19 nt, Homo sapiens
  misc_RNA (1)...(19): siRNA sense strand
cagaaacggcacuguagua

SEQ ID NO: 797079 - RNA, 19 nt, Homo sapiens
  misc_RNA (1)...(19): siRNA sense strand
agaagaaauccgaaacaua

SEQ ID NO: 797080 - RNA, 19 nt, Homo sapiens
  misc_RNA (1)...(19): siRNA sense strand
ugaacuaccuaugaauuug

SEQ ID NO: 797081 - RNA, 19 nt, Homo sapiens
  misc_RNA (1)...(19): siRNA sense strand
uaaagccuacuaucuguaa

SEQ ID NO: 797082 - RNA, 19 nt, Homo sapiens
  misc_RNA (1)...(19): siRNA sense strand
gaagcaaacaagaauuuca

SEQ ID NO: 797083 - RNA, 19 nt, Homo sapiens
  misc_RNA (1)...(19): siRNA sense strand
caacuuagaagcaaacaag

SEQ ID NO: 797084 - RNA, 19 nt, Homo sapiens
  misc_RNA (1)...(19): siRNA sense strand
gcaaaugaauaaggaggau

SEQ ID NO: 797085 - RNA, 19 nt, Homo sapiens
  misc_RNA (1)...(19): siRNA sense strand
caagauacagcuagacgaa

SEQ ID NO: 797086 - RNA, 19 nt, Homo sapiens
  misc_RNA (1)...(19): siRNA sense strand
uaacccauuuagaggauuu

SEQ ID NO: 797087 - RNA, 19 nt, Homo sapiens
  misc_RNA (1)...(19): siRNA sense strand
aagaugaacucgucgacuu

SEQ ID NO: 797088 - RNA, 19 nt, Homo sapiens
  misc_RNA (1)...(19): siRNA sense strand
gcaaacaagaauuucaguu

SEQ ID NO: 797089 - RNA, 19 nt, Homo sapiens
  misc_RNA (1)...(19): siRNA sense strand
gaggauaaaguuuggaaug

SEQ ID NO: 797090 - RNA, 19 nt, Homo sapiens
  misc_RNA (1)...(19): siRNA sense strand
ggagauacagauaaagaug

SEQ ID NO: 797091 - RNA, 19 nt, Homo sapiens
  misc_RNA (1)...(19): siRNA sense strand
uuaagaacgucaauucauc

SEQ ID NO: 797092 - RNA, 19 nt, Homo sapiens
  misc_RNA (1)...(19): siRNA sense strand
ccaagccuguaauuaagaa

SEQ ID NO: 797093 - RNA, 19 nt, Homo sapiens
  misc_RNA (1)...(19): siRNA sense strand
ccagaaaguugcugauagg

SEQ ID NO: 797094 - RNA, 19 nt, Homo sapiens
  misc_RNA (1)...(19): siRNA sense strand
gaagaaauguuagcacuuu

SEQ ID NO: 797095 - RNA, 19 nt, Homo sapiens
  misc_RNA (1)...(19): siRNA sense strand
gaacaucauucccucagua

SEQ ID NO: 797096 - RNA, 19 nt, Homo sapiens
  misc_RNA (1)...(19): siRNA sense strand
aaacagagcucguaacaau

SEQ ID NO: 797097 - RNA, 19 nt, Homo sapiens
  misc_RNA (1)...(19): siRNA sense strand
gcaaauaacuuggguguuc

SEQ ID NO: 797098 - RNA, 19 nt, Homo sapiens
  misc_RNA (1)...(19): siRNA sense strand
gaaaguagaagaagaagaa

SEQ ID NO: 797099 - RNA, 19 nt, Homo sapiens
  misc_RNA (1)...(19): siRNA sense strand
ggagaaagcaugaauuuau

SEQ ID NO: 797100 - RNA, 19 nt, Homo sapiens
  misc_RNA (1)...(19): siRNA sense strand
gaaagagccuauuccagaa

SEQ ID NO: 797101 - RNA, 19 nt, Homo sapiens
  misc_RNA (1)...(19): siRNA sense strand
gaagagagcgugugaugaa

SEQ ID NO: 797102 - RNA, 19 nt, Homo sapiens
  misc_RNA (1)...(19): siRNA sense strand
caagauaccuucagaccuu

SEQ ID NO: 797103 - RNA, 19 nt, Homo sapiens
  misc_RNA (1)...(19): siRNA sense strand
gcagagaaaugcauagauc

SEQ ID NO: 797104 - RNA, 19 nt, Homo sapiens
  misc_RNA (1)...(19): siRNA sense strand
gaagugguauuacaaagau

SEQ ID NO: 797105 - RNA, 19 nt, Homo sapiens
  misc_RNA (1)...(19): siRNA sense strand
cuuaugagguccaugauua

SEQ ID NO: 797106 - RNA, 19 nt, Homo sapiens
  misc_RNA (1)...(19): siRNA sense strand
gaaguagaaucuccuuaug

SEQ ID NO: 797107 - RNA, 19 nt, Homo sapiens
  misc_RNA (1)...(19): siRNA sense strand
gagcauuccuuucucuaaa

SEQ ID NO: 797108 - RNA, 19 nt, Homo sapiens
  misc_RNA (1)...(19): siRNA sense strand
aagaaggucucaaacauuu

SEQ ID NO: 797109 - RNA, 19 nt, Homo sapiens
  misc_RNA (1)...(19): siRNA sense strand
ccacagaaccugaugauga

SEQ ID NO: 797110 - RNA, 19 nt, Homo sapiens
  misc_RNA (1)...(19): siRNA sense strand
gaagaaggucucaaacauu

SEQ ID NO: 797111 - RNA, 19 nt, Homo sapiens
  misc_RNA (1)...(19): siRNA sense strand
gaagcaggaagaauuguua

SEQ ID NO: 797112 - RNA, 19 nt, Homo sapiens
  misc_RNA (1)...(19): siRNA sense strand
ggaguaaugcugacacuaa

SEQ ID NO: 797113 - RNA, 19 nt, Homo sapiens
  misc_RNA (1)...(19): siRNA sense strand
ccuaggaauucaacaaaua

SEQ ID NO: 797114 - RNA, 19 nt, Homo sapiens
  misc_RNA (1)...(19): siRNA sense strand
ggagauggcagaaugguuu

SEQ ID NO: 797115 - RNA, 19 nt, Homo sapiens
  misc_RNA (1)...(19): siRNA sense strand
gaauuuauacgcucagaaa

SEQ ID NO: 797116 - RNA, 19 nt, Homo sapiens
  misc_RNA (1)...(19): siRNA sense strand
gagaagagaggcagaaaug

SEQ ID NO: 797117 - RNA, 19 nt, Homo sapiens
  misc_RNA (1)...(19): siRNA sense strand
cagcauugccgaaguauaa

SEQ ID NO: 797118 - RNA, 19 nt, Homo sapiens
  misc_RNA (1)...(19): siRNA sense strand
gaguaaugcugacacuaaa

SEQ ID NO: 797119 - RNA, 19 nt, Homo sapiens
  misc_RNA (1)...(19): siRNA sense strand
gagcagaucccaguuuauu

SEQ ID NO: 797120 - RNA, 19 nt, Homo sapiens
  misc_RNA (1)...(19): siRNA sense strand
cggcagagaagaaauguua

SEQ ID NO: 797121 - RNA, 19 nt, Homo sapiens
  misc_RNA (1)...(19): siRNA sense strand
gaagaagaacggaagagaa

SEQ ID NO: 797122 - RNA, 19 nt, Homo sapiens
  misc_RNA (1)...(19): siRNA sense strand
gcagauuccuucagauaca

SEQ ID NO: 797123 - RNA, 19 nt, Homo sapiens
  misc_RNA (1)...(19): siRNA sense strand
uaagaaagaaggagagaaa

SEQ ID NO: 797124 - RNA, 19 nt, Homo sapiens
  misc_RNA (1)...(19): siRNA sense strand
gaaaacagauagaguagga

SEQ ID NO: 797125 - RNA, 19 nt, Homo sapiens
  misc_RNA (1)...(19): siRNA sense strand
ugaagaaggucucaaacau

SEQ ID NO: 797126 - RNA, 19 nt, Homo sapiens
  misc_RNA (1)...(19): siRNA sense strand
gaggaaagaugaaccaaaa

SEQ ID NO: 797127 - RNA, 19 nt, Homo sapiens
  misc_RNA (1)...(19): siRNA sense strand
caaagaacccgauaagaca

SEQ ID NO: 797128 - RNA, 19 nt, Homo sapiens
  misc_RNA (1)...(19): siRNA sense strand
ccgagcagaucccaguuua

SEQ ID NO: 797129 - RNA, 19 nt, Homo sapiens
  misc_RNA (1)...(19): siRNA sense strand
gaagacaacaggaggaaau

SEQ ID NO: 797130 - RNA, 19 nt, Homo sapiens
  misc_RNA (1)...(19): siRNA sense strand
gcaagaacucacagccuua

SEQ ID NO: 797131 - RNA, 19 nt, Homo sapiens
  misc_RNA (1)...(19): siRNA sense strand
ugacucaucuggagcauuc

SEQ ID NO: 797132 - RNA, 19 nt, Homo sapiens
  misc_RNA (1)...(19): siRNA sense strand
gacguuggaugacuacuga

SEQ ID NO: 797133 - RNA, 19 nt, Homo sapiens
  misc_RNA (1)...(19): siRNA sense strand
gcaguggugugaacagaug

SEQ ID NO: 797134 - RNA, 19 nt, Homo sapiens
  misc_RNA (1)...(19): siRNA sense strand
gaagagaggagaagagaag

SEQ ID NO: 797135 - RNA, 19 nt, Homo sapiens
  misc_RNA (1)...(19): siRNA sense strand
cacagaaccugaugaugaa

SEQ ID NO: 797136 - RNA, 19 nt, Homo sapiens
  misc_RNA (1)...(19): siRNA sense strand
ucaggaagcaucacaguuu

SEQ ID NO: 797137 - RNA, 19 nt, Homo sapiens
  misc_RNA (1)...(19): siRNA sense strand
gaccuagucaguaguauuu

SEQ ID NO: 797138 - RNA, 19 nt, Homo sapiens
  misc_RNA (1)...(19): siRNA sense strand
gauacagccucuccucuuc

SEQ ID NO: 797139 - RNA, 19 nt, Homo sapiens
  misc_RNA (1)...(19): siRNA sense strand
caacaucaguagggagaaa

SEQ ID NO: 797140 - RNA, 19 nt, Homo sapiens
  misc_RNA (1)...(19): siRNA sense strand
gcaggaagaagaaaggaaa

SEQ ID NO: 797141 - RNA, 19 nt, Homo sapiens
  misc_RNA (1)...(19): siRNA sense strand
gcagaaagcagcacugucu

SEQ ID NO: 797142 - RNA, 19 nt, Homo sapiens
  misc_RNA (1)...(19): siRNA sense strand
caucacaguuugagaggaa

SEQ ID NO: 797143 - RNA, 19 nt, Homo sapiens
  misc_RNA (1)...(19): siRNA sense strand
ggaacgacgucggagguuu

SEQ ID NO: 797144 - RNA, 19 nt, Homo sapiens
  misc_RNA (1)...(19): siRNA sense strand
gaaaauuggcgcaucuuua

SEQ ID NO: 797145 - RNA, 19 nt, Homo sapiens
  misc_RNA (1)...(19): siRNA sense strand
gcagaagugguauuacaaa

SEQ ID NO: 797146 - RNA, 19 nt, Homo sapiens
  misc_RNA (1)...(19): siRNA sense strand
guaaauaaagcccaagaug

SEQ ID NO: 797147 - RNA, 19 nt, Homo sapiens
  misc_RNA (1)...(19): siRNA sense strand
cugcaaagcuagagcaaga

SEQ ID NO: 797148 - RNA, 19 nt, Homo sapiens
  misc_RNA (1)...(19): siRNA sense strand
gaagaauuguuacgcaaac

SEQ ID NO: 797149 - RNA, 19 nt, Homo sapiens
  misc_RNA (1)...(19): siRNA sense strand
gagaagagaagaggaagaa

SEQ ID NO: 797150 - RNA, 19 nt, Homo sapiens
  misc_RNA (1)...(19): siRNA sense strand
ccaaggaguuugccaagca

SEQ ID NO: 797151 - RNA, 19 nt, Homo sapiens
  misc_RNA (1)...(19): siRNA sense strand
gaacgacgucggagguuug

SEQ ID NO: 797152 - RNA, 19 nt, Homo sapiens
  misc_RNA (1)...(19): siRNA sense strand
caacgccagucucaguaaa

SEQ ID NO: 797153 - RNA, 19 nt, Homo sapiens
  misc_RNA (1)...(19): siRNA sense strand
gaagagaagaggaagaaag

SEQ ID NO: 797154 - RNA, 19 nt, Homo sapiens
  misc_RNA (1)...(19): siRNA sense strand
gaagaacuccgaagacaac

SEQ ID NO: 797155 - RNA, 19 nt, Homo sapiens
  misc_RNA (1)...(19): siRNA sense strand
agaggaugcugaagaagaa

SEQ ID NO: 797156 - RNA, 19 nt, Homo sapiens
  misc_RNA (1)...(19): siRNA sense strand
gcagaucccaguuuauuag

SEQ ID NO: 797157 - RNA, 19 nt, Homo sapiens
  misc_RNA (1)...(19): siRNA sense strand
ccaagacagugcacuagau

SEQ ID NO: 797158 - RNA, 19 nt, Homo sapiens
  misc_RNA (1)...(19): siRNA sense strand
aaauaaagcccaagaugga

SEQ ID NO: 797159 - RNA, 19 nt, Homo sapiens
  misc_RNA (1)...(19): siRNA sense strand
ggaagaauuguuacgcaaa

SEQ ID NO: 797160 - RNA, 19 nt, Homo sapiens
  misc_RNA (1)...(19): siRNA sense strand
gcgagaagaggaagaaaga

SEQ ID NO: 797161 - RNA, 19 nt, Homo sapiens
  misc_RNA (1)...(19): siRNA sense strand
gcaggaagaacuccgaaga

SEQ ID NO: 797162 - RNA, 19 nt, Homo sapiens
  misc_RNA (1)...(19): siRNA sense strand
gaaagaggcaggaagaacu

SEQ ID NO: 797163 - RNA, 19 nt, Homo sapiens
  misc_RNA (1)...(19): siRNA sense strand
gaagagaggcagaaaugag

SEQ ID NO: 797164 - RNA, 19 nt, Homo sapiens
  misc_RNA (1)...(19): siRNA sense strand
ggaaggugguaguguaugg

SEQ ID NO: 797165 - RNA, 19 nt, Homo sapiens
  misc_RNA (1)...(19): siRNA sense strand
gaacuugcccgaaggaaac

SEQ ID NO: 797166 - RNA, 19 nt, Homo sapiens
  misc_RNA (1)...(19): siRNA sense strand
ucgcagagcugggaggaaa

SEQ ID NO: 797167 - RNA, 19 nt, Homo sapiens
  misc_RNA (1)...(19): siRNA sense strand
ucaguaguauuuggaguaa

SEQ ID NO: 797168 - RNA, 19 nt, Homo sapiens
  misc_RNA (1)...(19): siRNA sense strand
caaagauccucagggagaa

SEQ ID NO: 797169 - RNA, 19 nt, Homo sapiens
  misc_RNA (1)...(19): siRNA sense strand
guacagaaagagccuauuc

SEQ ID NO: 797170 - RNA, 19 nt, Homo sapiens
  misc_RNA (1)...(19): siRNA sense strand
ggagcauuccuuucucuaa

SEQ ID NO: 797171 - RNA, 19 nt, Homo sapiens
  misc_RNA (1)...(19): siRNA sense strand
gcagugggagcauagauga

SEQ ID NO: 797172 - RNA, 19 nt, Homo sapiens
  misc_RNA (1)...(19): siRNA sense strand
gauguagggagaccaaauu

SEQ ID NO: 797173 - RNA, 19 nt, Homo sapiens
  misc_RNA (1)...(19): siRNA sense strand
gaagcucuuucagggagua

SEQ ID NO: 797174 - RNA, 19 nt, Homo sapiens
  misc_RNA (1)...(19): siRNA sense strand
ggaagaagaacggaagaga

SEQ ID NO: 797175 - RNA, 19 nt, Homo sapiens
  misc_RNA (1)...(19): siRNA sense strand
gaagaggaagagcgaaaga

SEQ ID NO: 797176 - RNA, 19 nt, Homo sapiens
  misc_RNA (1)...(19): siRNA sense strand
acaacaauaugcacagguu

SEQ ID NO: 797177 - RNA, 19 nt, Homo sapiens
  misc_RNA (1)...(19): siRNA sense strand
caaugcagaagugguauua

SEQ ID NO: 797178 - RNA, 19 nt, Homo sapiens
  misc_RNA (1)...(19): siRNA sense strand
ccaaagaacccgauaagac

SEQ ID NO: 797179 - RNA, 19 nt, Homo sapiens
  misc_RNA (1)...(19): siRNA sense strand
acaacaagauaccuucaga

SEQ ID NO: 797180 - RNA, 19 nt, Homo sapiens
  misc_RNA (1)...(19): siRNA sense strand
gggagaaagcaugaauuua

SEQ ID NO: 797181 - RNA, 19 nt, Homo sapiens
  misc_RNA (1)...(19): siRNA sense strand
ugaggaagguggaccaaca

SEQ ID NO: 797182 - RNA, 19 nt, Homo sapiens
  misc_RNA (1)...(19): siRNA sense strand
aagaagaacggaagagaaa

SEQ ID NO: 797183 - RNA, 19 nt, Homo sapiens
  misc_RNA (1)...(19): siRNA sense strand
ugucuaaccggcagaauaa

SEQ ID NO: 797184 - RNA, 19 nt, Homo sapiens
  misc_RNA (1)...(19): siRNA sense strand
ggaagaggccaggcaaaug

SEQ ID NO: 797185 - RNA, 19 nt, Homo sapiens
  misc_RNA (1)...(19): siRNA sense strand
ggccagcaguccaauacaa

SEQ ID NO: 797186 - RNA, 19 nt, Homo sapiens
  misc_RNA (1)...(19): siRNA sense strand
gggcaguguuuccacagaa

SEQ ID NO: 797187 - RNA, 19 nt, Homo sapiens
  misc_RNA (1)...(19): siRNA sense strand
gaagaugguccgagcagau

SEQ ID NO: 797188 - RNA, 19 nt, Homo sapiens
  misc_RNA (1)...(19): siRNA sense strand
uacacuccauucaguauuu

SEQ ID NO: 797189 - RNA, 19 nt, Homo sapiens
  misc_RNA (1)...(19): siRNA sense strand
caacagcuggcgcagauga

SEQ ID NO: 797190 - RNA, 19 nt, Homo sapiens
  misc_RNA (1)...(19): siRNA sense strand
aaagacagcagcaagaaga

SEQ ID NO: 797191 - RNA, 19 nt, Homo sapiens
  misc_RNA (1)...(19): siRNA sense strand
ggaagaacuccgaagacaa

SEQ ID NO: 797192 - RNA, 19 nt, Homo sapiens
  misc_RNA (1)...(19): siRNA sense strand
gcaguuggcacuucuucuu

SEQ ID NO: 797193 - RNA, 19 nt, Homo sapiens
  misc_RNA (1)...(19): siRNA sense strand
acagugcacuagaugauga

SEQ ID NO: 797194 - RNA, 19 nt, Homo sapiens
  misc_RNA (1)...(19): siRNA sense strand
gcugauagcuuauuggaua

SEQ ID NO: 797195 - RNA, 19 nt, Homo sapiens
  misc_RNA (1)...(19): siRNA sense strand
gaaaugaagucucaguauu

SEQ ID NO: 797196 - RNA, 19 nt, Homo sapiens
  misc_RNA (1)...(19): siRNA sense strand
ccauaaaccucaaagauuu

SEQ ID NO: 797197 - RNA, 19 nt, Homo sapiens
  misc_RNA (1)...(19): siRNA sense strand
ggagaaagguacagugauu

SEQ ID NO: 797198 - RNA, 19 nt, Homo sapiens
  misc_RNA (1)...(19): siRNA sense strand
ggaggaagauaaagauaaa

SEQ ID NO: 797199 - RNA, 19 nt, Homo sapiens
  misc_RNA (1)...(19): siRNA sense strand
gaugauagaugaacucaau

SEQ ID NO: 797200 - RNA, 19 nt, Homo sapiens
  misc_RNA (1)...(19): siRNA sense strand
gaacugguaugcuuaaaca

SEQ ID NO: 797201 - RNA, 19 nt, Homo sapiens
  misc_RNA (1)...(19): siRNA sense strand
uaaaugagaugucgaagga

SEQ ID NO: 797202 - RNA, 19 nt, Homo sapiens
  misc_RNA (1)...(19): siRNA sense strand
ggaugaagauguccagaaa

SEQ ID NO: 797203 - RNA, 19 nt, Homo sapiens
  misc_RNA (1)...(19): siRNA sense strand
ggaagaacuugcagaaaug

SEQ ID NO: 797204 - RNA, 19 nt, Homo sapiens
  misc_RNA (1)...(19): siRNA sense strand
cgaaggaagucaccaaauu

SEQ ID NO: 797205 - RNA, 19 nt, Homo sapiens
  misc_RNA (1)...(19): siRNA sense strand
ggaaauaaaugugcuaaag

SEQ ID NO: 797206 - RNA, 19 nt, Homo sapiens
  misc_RNA (1)...(19): siRNA sense strand
ggaaaucucuagaggaugu

SEQ ID NO: 797207 - RNA, 19 nt, Homo sapiens
  misc_RNA (1)...(19): siRNA sense strand
uagcaaagcuggagaaaca

SEQ ID NO: 797208 - RNA, 19 nt, Homo sapiens
  misc_RNA (1)...(19): siRNA sense strand
gaaacucggucuugucuca

SEQ ID NO: 797209 - RNA, 19 nt, Homo sapiens
  misc_RNA (1)...(19): siRNA sense strand
caaaagagauggaagaaaa

SEQ ID NO: 797210 - RNA, 19 nt, Homo sapiens
  misc_RNA (1)...(19): siRNA sense strand
aggcugagcuggaggauua

SEQ ID NO: 797211 - RNA, 19 nt, Homo sapiens
  misc_RNA (1)...(19): siRNA sense strand
ugaauaggaugauagauga

SEQ ID NO: 797212 - RNA, 19 nt, Homo sapiens
  misc_RNA (1)...(19): siRNA sense strand
gaggaaaucucuagaggau

SEQ ID NO: 797213 - RNA, 19 nt, Homo sapiens
  misc_RNA (1)...(19): siRNA sense strand
uaaagaaacucagagcaaa

SEQ ID NO: 797214 - RNA, 19 nt, Homo sapiens
  misc_RNA (1)...(19): siRNA sense strand
ccaagaagcccaagaagaa

SEQ ID NO: 797215 - RNA, 19 nt, Homo sapiens
  misc_RNA (1)...(19): siRNA sense strand
cugaaagcauggauaauua

SEQ ID NO: 797216 - RNA, 19 nt, Homo sapiens
  misc_RNA (1)...(19): siRNA sense strand
ggaggcugcuucagucuaa

SEQ ID NO: 797217 - RNA, 19 nt, Homo sapiens
  misc_RNA (1)...(19): siRNA sense strand
gggcagaacugguaugcuu

SEQ ID NO: 797218 - RNA, 19 nt, Homo sapiens
  misc_RNA (1)...(19): siRNA sense strand
ggucuugucucaccugaaa

SEQ ID NO: 797219 - RNA, 19 nt, Homo sapiens
  misc_RNA (1)...(19): siRNA sense strand
gaagguccauucagagguu

SEQ ID NO: 797220 - RNA, 19 nt, Homo sapiens
  misc_RNA (1)...(19): siRNA sense strand
ugaaagaaguccuuagugu

SEQ ID NO: 797221 - RNA, 19 nt, Homo sapiens
  misc_RNA (1)...(19): siRNA sense strand
gaagaugcacugucugaaa

SEQ ID NO: 797222 - RNA, 19 nt, Homo sapiens
  misc_RNA (1)...(19): siRNA sense strand
gaccaagucucuaaaauaa

SEQ ID NO: 797223 - RNA, 19 nt, Homo sapiens
  misc_RNA (1)...(19): siRNA sense strand
ugucacagcuguacaaaga

SEQ ID NO: 797224 - RNA, 19 nt, Homo sapiens
  misc_RNA (1)...(19): siRNA sense strand
gaaggaagucaccaaauug

SEQ ID NO: 797225 - RNA, 19 nt, Homo sapiens
  misc_RNA (1)...(19): siRNA sense strand
gaccucagccagaaacuua

SEQ ID NO: 797226 - RNA, 19 nt, Homo sapiens
  misc_RNA (1)...(19): siRNA sense strand
ggagaaacaacucuuagaa

SEQ ID NO: 797227 - RNA, 19 nt, Homo sapiens
  misc_RNA (1)...(19): siRNA sense strand
ucccuuaccuuacacaaua

SEQ ID NO: 797228 - RNA, 19 nt, Homo sapiens
  misc_RNA (1)...(19): siRNA sense strand
guacugaagcaaauccuua

SEQ ID NO: 797229 - RNA, 19 nt, Homo sapiens
  misc_RNA (1)...(19): siRNA sense strand
gaagagaaagcugcuauga

SEQ ID NO: 797230 - RNA, 19 nt, Homo sapiens
  misc_RNA (1)...(19): siRNA sense strand
gcagaaugcauuagaagaa

SEQ ID NO: 797231 - RNA, 19 nt, Homo sapiens
  misc_RNA (1)...(19): siRNA sense strand
ggaaaacagcuuuacauua

SEQ ID NO: 797232 - RNA, 19 nt, Homo sapiens
  misc_RNA (1)...(19): siRNA sense strand
gaauaaggagaaagcauuu

SEQ ID NO: 797233 - RNA, 19 nt, Homo sapiens
  misc_RNA (1)...(19): siRNA sense strand
aaacaacacugagauuuca

SEQ ID NO: 797234 - RNA, 19 nt, Homo sapiens
  misc_RNA (1)...(19): siRNA sense strand
gcucagggcugccuucaag

SEQ ID NO: 797235 - RNA, 19 nt, Homo sapiens
  misc_RNA (1)...(19): siRNA sense strand
ucaaacagcuccagaacca

SEQ ID NO: 797236 - RNA, 19 nt, Homo sapiens
  misc_RNA (1)...(19): siRNA sense strand
ccaaagagcaagaaguaaa

SEQ ID NO: 797237 - RNA, 19 nt, Homo sapiens
  misc_RNA (1)...(19): siRNA sense strand
ucaaagccuucuauuauca

SEQ ID NO: 797238 - RNA, 19 nt, Homo sapiens
  misc_RNA (1)...(19): siRNA sense strand
ggucauaucaguuuacaga

SEQ ID NO: 797239 - RNA, 19 nt, Homo sapiens
  misc_RNA (1)...(19): siRNA sense strand
uggaagaacugcucucaug

SEQ ID NO: 797240 - RNA, 19 nt, Homo sapiens
  misc_RNA (1)...(19): siRNA sense strand
gcaaauccuuaccaugugu

SEQ ID NO: 797241 - RNA, 19 nt, Homo sapiens
  misc_RNA (1)...(19): siRNA sense strand
ggacacagcgccuuacauc

SEQ ID NO: 797242 - RNA, 19 nt, Homo sapiens
  misc_RNA (1)...(19): siRNA sense strand
guaaaugaacuucugcaaa

SEQ ID NO: 797243 - RNA, 19 nt, Homo sapiens
  misc_RNA (1)...(19): siRNA sense strand
uacaggugcugauagcuua

SEQ ID NO: 797244 - RNA, 19 nt, Homo sapiens
  misc_RNA (1)...(19): siRNA sense strand
ccagcaagcucaggaagaa

SEQ ID NO: 797245 - RNA, 19 nt, Homo sapiens
  misc_RNA (1)...(19): siRNA sense strand
gcaaauacgaggaggcuau

SEQ ID NO: 797246 - RNA, 19 nt, Homo sapiens
  misc_RNA (1)...(19): siRNA sense strand
gaucuucucucucuauugc

SEQ ID NO: 797247 - RNA, 19 nt, Homo sapiens
  misc_RNA (1)...(19): siRNA sense strand
ggauauaaguucugaagcu

SEQ ID NO: 797248 - RNA, 19 nt, Homo sapiens
  misc_RNA (1)...(19): siRNA sense strand
gagaaagguacagugauua

SEQ ID NO: 797249 - RNA, 19 nt, Homo sapiens
  misc_RNA (1)...(19): siRNA sense strand
ggaagagugacaccaauga

SEQ ID NO: 797250 - RNA, 19 nt, Homo sapiens
  misc_RNA (1)...(19): siRNA sense strand
agagaaagcugcuaugacu

SEQ ID NO: 797251 - RNA, 19 nt, Homo sapiens
  misc_RNA (1)...(19): siRNA sense strand
ugucacagcugaauauauc

SEQ ID NO: 797252 - RNA, 19 nt, Homo sapiens
  misc_RNA (1)...(19): siRNA sense strand
ugaaagaagccaugaauag

SEQ ID NO: 797253 - RNA, 19 nt, Homo sapiens
  misc_RNA (1)...(19): siRNA sense strand
ccaacaagaucuucucucu

SEQ ID NO: 797254 - RNA, 19 nt, Homo sapiens
  misc_RNA (1)...(19): siRNA sense strand
aggaagaacuugcagaaau

SEQ ID NO: 797255 - RNA, 19 nt, Homo sapiens
  misc_RNA (1)...(19): siRNA sense strand
aagagaagguccauucaga

SEQ ID NO: 797256 - RNA, 19 nt, Homo sapiens
  misc_RNA (1)...(19): siRNA sense strand
cagaaugcauuagaagaaa

SEQ ID NO: 797257 - RNA, 19 nt, Homo sapiens
  misc_RNA (1)...(19): siRNA sense strand
gaacagccaccaugaaugc

SEQ ID NO: 797258 - RNA, 19 nt, Homo sapiens
  misc_RNA (1)...(19): siRNA sense strand
agaaaguacugaagcaaau

SEQ ID NO: 797259 - RNA, 19 nt, Homo sapiens
  misc_RNA (1)...(19): siRNA sense strand
cauaucaguuuacagaaug

SEQ ID NO: 797260 - RNA, 19 nt, Homo sapiens
  misc_RNA (1)...(19): siRNA sense strand
uaaaggaaucugugaaaga

SEQ ID NO: 797261 - RNA, 19 nt, Homo sapiens
  misc_RNA (1)...(19): siRNA sense strand
gaacauuugcaagugauaa

SEQ ID NO: 797262 - RNA, 19 nt, Homo sapiens
  misc_RNA (1)...(19): siRNA sense strand
ucauauugcucuguuauug

SEQ ID NO: 797263 - RNA, 19 nt, Homo sapiens
  misc_RNA (1)...(19): siRNA sense strand
gaacaaaaguggaagaacu

SEQ ID NO: 797264 - RNA, 19 nt, Homo sapiens
  misc_RNA (1)...(19): siRNA sense strand
gaagauguccagaaaguac

SEQ ID NO: 797265 - RNA, 19 nt, Homo sapiens
  misc_RNA (1)...(19): siRNA sense strand
gagaaacugaugcaauuga

SEQ ID NO: 797266 - RNA, 19 nt, Homo sapiens
  misc_RNA (1)...(19): siRNA sense strand
gcagaacugguaugcuuaa

SEQ ID NO: 797267 - RNA, 19 nt, Homo sapiens
  misc_RNA (1)...(19): siRNA sense strand
ccaucugucuuaauacauu

SEQ ID NO: 797268 - RNA, 19 nt, Homo sapiens
  misc_RNA (1)...(19): siRNA sense strand
uaaauuacaggccaaauca

SEQ ID NO: 797269 - RNA, 19 nt, Homo sapiens
  misc_RNA (1)...(19): siRNA sense strand
aaacaaagacagacuaagu

SEQ ID NO: 797270 - RNA, 19 nt, Homo sapiens
  misc_RNA (1)...(19): siRNA sense strand
ggaaaggaaucgguauuuu

SEQ ID NO: 797271 - RNA, 19 nt, Homo sapiens
  misc_RNA (1)...(19): siRNA sense strand
gaaagagaagguccauuca

SEQ ID NO: 797272 - RNA, 19 nt, Homo sapiens
  misc_RNA (1)...(19): siRNA sense strand
gaauggagaugcggagaag

SEQ ID NO: 797273 - RNA, 19 nt, Homo sapiens
  misc_RNA (1)...(19): siRNA sense strand
gaugugacagcccaagaua

SEQ ID NO: 797274 - RNA, 19 nt, Homo sapiens
  misc_RNA (1)...(19): siRNA sense strand
ccaagaagaaaucaugaaa

SEQ ID NO: 797275 - RNA, 19 nt, Homo sapiens
  misc_RNA (1)...(19): siRNA sense strand
guagagagggagaaaggua

SEQ ID NO: 797276 - RNA, 19 nt, Homo sapiens
  misc_RNA (1)...(19): siRNA sense strand
gccagaaacuuaaagaaac

SEQ ID NO: 797277 - RNA, 19 nt, Homo sapiens
  misc_RNA (1)...(19): siRNA sense strand
uaaauccacuacugacaau

SEQ ID NO: 797278 - RNA, 19 nt, Homo sapiens
  misc_RNA (1)...(19): siRNA sense strand
ggaauucaaagccuucuau

SEQ ID NO: 797279 - RNA, 19 nt, Homo sapiens
  misc_RNA (1)...(19): siRNA sense strand
ucaacaagcucauccaaaa

SEQ ID NO: 797280 - RNA, 19 nt, Homo sapiens
  misc_RNA (1)...(19): siRNA sense strand
gcaucgaaauuaaaggaau

SEQ ID NO: 797281 - RNA, 19 nt, Homo sapiens
  misc_RNA (1)...(19): siRNA sense strand
uaaagcagagcaugagaaa

SEQ ID NO: 797282 - RNA, 19 nt, Homo sapiens
  misc_RNA (1)...(19): siRNA sense strand
gaaagaagccaugaauagg

SEQ ID NO: 797283 - RNA, 19 nt, Homo sapiens
  misc_RNA (1)...(19): siRNA sense strand
gcuguggaagccuuaauua

SEQ ID NO: 797284 - RNA, 19 nt, Homo sapiens
  misc_RNA (1)...(19): siRNA sense strand
ccagauggaugaagauguc

SEQ ID NO: 797285 - RNA, 19 nt, Homo sapiens
  misc_RNA (1)...(19): siRNA sense strand
cgaggaggcuaugaaagaa

SEQ ID NO: 797286 - RNA, 19 nt, Homo sapiens
  misc_RNA (1)...(19): siRNA sense strand
gaccuaaaccuuguagauu

SEQ ID NO: 797287 - RNA, 19 nt, Homo sapiens
  misc_RNA (1)...(19): siRNA sense strand
gugcagaccuaaaccuugu

SEQ ID NO: 797288 - RNA, 19 nt, Homo sapiens
  misc_RNA (1)...(19): siRNA sense strand
gggaaaggaaucgguauuu

SEQ ID NO: 797289 - RNA, 19 nt, Homo sapiens
  misc_RNA (1)...(19): siRNA sense strand
augagaaacugaugcaauu

SEQ ID NO: 797290 - RNA, 19 nt, Homo sapiens
  misc_RNA (1)...(19): siRNA sense strand
ugaauaaggagaaagcauu

SEQ ID NO: 797291 - RNA, 19 nt, Homo sapiens
  misc_RNA (1)...(19): siRNA sense strand
gaagaacuugcagaaauga

SEQ ID NO: 797292 - RNA, 19 nt, Homo sapiens
  misc_RNA (1)...(19): siRNA sense strand
guaccucggucuuccuaug

SEQ ID NO: 797293 - RNA, 19 nt, Homo sapiens
  misc_RNA (1)...(19): siRNA sense strand
ccaaugaguggaacaagaa

SEQ ID NO: 797294 - RNA, 19 nt, Homo sapiens
  misc_RNA (1)...(19): siRNA sense strand
gagaugaagucuuugaaua

SEQ ID NO: 797295 - RNA, 19 nt, Homo sapiens
  misc_RNA (1)...(19): siRNA sense strand
gacagagaguuucauaaua

SEQ ID NO: 797296 - RNA, 19 nt, Homo sapiens
  misc_RNA (1)...(19): siRNA sense strand
uuaaagaccuuacuguuug

SEQ ID NO: 797297 - RNA, 19 nt, Homo sapiens
  misc_RNA (1)...(19): siRNA sense strand
gagcaacucagaaaugaua

SEQ ID NO: 797298 - RNA, 19 nt, Homo sapiens
  misc_RNA (1)...(19): siRNA sense strand
gagaugggccaaugaaauu

SEQ ID NO: 797299 - RNA, 19 nt, Homo sapiens
  misc_RNA (1)...(19): siRNA sense strand
gcacaggcaagcugaagua

SEQ ID NO: 797300 - RNA, 19 nt, Homo sapiens
  misc_RNA (1)...(19): siRNA sense strand
ggagaagccuguaaauggu

SEQ ID NO: 797301 - RNA, 19 nt, Homo sapiens
  misc_RNA (1)...(19): siRNA sense strand
ucacuaggcucaucgacuu

SEQ ID NO: 797302 - RNA, 19 nt, Homo sapiens
  misc_RNA (1)...(19): siRNA sense strand
ugaaggaaaugccgaugaa

SEQ ID NO: 797303 - RNA, 19 nt, Homo sapiens
  misc_RNA (1)...(19): siRNA sense strand
gaaaugauaacaagagaca

SEQ ID NO: 797304 - RNA, 19 nt, Homo sapiens
  misc_RNA (1)...(19): siRNA sense strand
gcucaucgacuucuucauu

SEQ ID NO: 797305 - RNA, 19 nt, Homo sapiens
  misc_RNA (1)...(19): siRNA sense strand
gaagacagaccgacagauc

SEQ ID NO: 797306 - RNA, 19 nt, Homo sapiens
  misc_RNA (1)...(19): siRNA sense strand
gaugaagucuuugaauaca

SEQ ID NO: 797307 - RNA, 19 nt, Homo sapiens
  misc_RNA (1)...(19): siRNA sense strand
gcuggaagcucuuugacau

SEQ ID NO: 797308 - RNA, 19 nt, Homo sapiens
  misc_RNA (1)...(19): siRNA sense strand
gaacagaaacaucaaacag

SEQ ID NO: 797309 - RNA, 19 nt, Homo sapiens
  misc_RNA (1)...(19): siRNA sense strand
aggaagagauugacagaga

SEQ ID NO: 797310 - RNA, 19 nt, Homo sapiens
  misc_RNA (1)...(19): siRNA sense strand
gaaaugccgaugaagaaga

SEQ ID NO: 797311 - RNA, 19 nt, Homo sapiens
  misc_RNA (1)...(19): siRNA sense strand
cagaggaggucuugguuuc

SEQ ID NO: 797312 - RNA, 19 nt, Homo sapiens
  misc_RNA (1)...(19): siRNA sense strand
ugacagagaguuucauaau

SEQ ID NO: 797313 - RNA, 19 nt, Homo sapiens
  misc_RNA (1)...(19): siRNA sense strand
gccgggaguuugcggauuu

SEQ ID NO: 797314 - RNA, 19 nt, Homo sapiens
  misc_RNA (1)...(19): siRNA sense strand
cagaaaugauaacaagaga

SEQ ID NO: 797315 - RNA, 19 nt, Homo sapiens
  misc_RNA (1)...(19): siRNA sense strand
ccaaugaaauuugagaaag

SEQ ID NO: 797316 - RNA, 19 nt, Homo sapiens
  misc_RNA (1)...(19): siRNA sense strand
gcucaagcccucaguuaga

SEQ ID NO: 797317 - RNA, 19 nt, Homo sapiens
  misc_RNA (1)...(19): siRNA sense strand
aaccugggcugaagaaaga

SEQ ID NO: 797318 - RNA, 19 nt, Homo sapiens
  misc_RNA (1)...(19): siRNA sense strand
gaagcucuuugacauccuu

SEQ ID NO: 797319 - RNA, 19 nt, Homo sapiens
  misc_RNA (1)...(19): siRNA sense strand
gcagaggaggucuugguuu

SEQ ID NO: 797320 - RNA, 19 nt, Homo sapiens
  misc_RNA (1)...(19): siRNA sense strand
gaagauaaacuugagaaac

SEQ ID NO: 797321 - RNA, 19 nt, Homo sapiens
  misc_RNA (1)...(19): siRNA sense strand
gcaaaugcacaauucaaca

SEQ ID NO: 797322 - RNA, 19 nt, Homo sapiens
  misc_RNA (1)...(19): siRNA sense strand
caggauacaagaucucuaa

SEQ ID NO: 797323 - RNA, 19 nt, Homo sapiens
  misc_RNA (1)...(19): siRNA sense strand
gcugaagaaagaagauuaa

SEQ ID NO: 797324 - RNA, 19 nt, Homo sapiens
  misc_RNA (1)...(19): siRNA sense strand
caaaugcacaauucaacaa

SEQ ID NO: 797325 - RNA, 19 nt, Homo sapiens
  misc_RNA (1)...(19): siRNA sense strand
gcgguugguucugccuuua

SEQ ID NO: 797326 - RNA, 19 nt, Homo sapiens
  misc_RNA (1)...(19): siRNA sense strand
ucaguuagacccuuugaga

SEQ ID NO: 797327 - RNA, 19 nt, Homo sapiens
  misc_RNA (1)...(19): siRNA sense strand
gauaacaagagacaaguag

SEQ ID NO: 797328 - RNA, 19 nt, Homo sapiens
  misc_RNA (1)...(19): siRNA sense strand
uaggaaagacaacaaaguu

SEQ ID NO: 797329 - RNA, 19 nt, Homo sapiens
  misc_RNA (1)...(19): siRNA sense strand
uaaagaccuuacuguuugu

SEQ ID NO: 797330 - RNA, 19 nt, Homo sapiens
  misc_RNA (1)...(19): siRNA sense strand
gcugaaguacacaaaguuu

SEQ ID NO: 797331 - RNA, 19 nt, Homo sapiens
  misc_RNA (1)...(19): siRNA sense strand
acucagaaaugauaacaag

SEQ ID NO: 797332 - RNA, 19 nt, Homo sapiens
  misc_RNA (1)...(19): siRNA sense strand
caccguagcccuugccaaa

SEQ ID NO: 797333 - RNA, 19 nt, Homo sapiens
  misc_RNA (1)...(19): siRNA sense strand
caaggaagagauugacaga

SEQ ID NO: 797334 - RNA, 19 nt, Homo sapiens
  misc_RNA (1)...(19): siRNA sense strand
cgagaugggccaaugaaau

SEQ ID NO: 797335 - RNA, 19 nt, Homo sapiens
  misc_RNA (1)...(19): siRNA sense strand
accgacagaucguccaaua

SEQ ID NO: 797336 - RNA, 19 nt, Homo sapiens
  misc_RNA (1)...(19): siRNA sense strand
gcaguuuggugcuguuggu

SEQ ID NO: 797337 - RNA, 19 nt, Homo sapiens
  misc_RNA (1)...(19): siRNA sense strand
gcaagcugaaguacacaaa

SEQ ID NO: 797338 - RNA, 19 nt, Homo sapiens
  misc_RNA (1)...(19): siRNA sense strand
gaccgccucagcccacuua

SEQ ID NO: 797339 - RNA, 19 nt, Homo sapiens
  misc_RNA (1)...(19): siRNA sense strand
gaaucccacuucguccaaa

SEQ ID NO: 797340 - RNA, 19 nt, Homo sapiens
  misc_RNA (1)...(19): siRNA sense strand
gccaaugaaauuugagaaa

SEQ ID NO: 797341 - RNA, 19 nt, Homo sapiens
  misc_RNA (1)...(19): siRNA sense strand
cauuaaagaccuuacuguu

SEQ ID NO: 797342 - RNA, 19 nt, Homo sapiens
  misc_RNA (1)...(19): siRNA sense strand
ugacauccuuuggaacaga

SEQ ID NO: 797343 - RNA, 19 nt, Homo sapiens
  misc_RNA (1)...(19): siRNA sense strand
aauaccaccucgagaugaa

SEQ ID NO: 797344 - RNA, 19 nt, Homo sapiens
  misc_RNA (1)...(19): siRNA sense strand
gaauauaggaaagacaaca

SEQ ID NO: 797345 - RNA, 19 nt, Homo sapiens
  misc_RNA (1)...(19): siRNA sense strand
gcccucaguuagacccuuu

SEQ ID NO: 797346 - RNA, 19 nt, Homo sapiens
  misc_RNA (1)...(19): siRNA sense strand
ggaacagaaacaucaaaca

SEQ ID NO: 797347 - RNA, 19 nt, Homo sapiens
  misc_RNA (1)...(19): siRNA sense strand
gacauccuuuggaacagaa

SEQ ID NO: 797348 - RNA, 19 nt, Homo sapiens
  misc_RNA (1)...(19): siRNA sense strand
ggcugaagaaagaagauua

SEQ ID NO: 797349 - RNA, 19 nt, Homo sapiens
  misc_RNA (1)...(19): siRNA sense strand
ccaaaacagugaaggaaau

SEQ ID NO: 797350 - RNA, 19 nt, Homo sapiens
  misc_RNA (1)...(19): siRNA sense strand
gaagagauugacagagagu

SEQ ID NO: 797351 - RNA, 19 nt, Homo sapiens
  misc_RNA (1)...(19): siRNA sense strand
aucaaacagugguaccuua

SEQ ID NO: 797352 - RNA, 19 nt, Homo sapiens
  misc_RNA (1)...(19): siRNA sense strand
gaaacaucaaacaguggua

SEQ ID NO: 797353 - RNA, 19 nt, Homo sapiens
  misc_RNA (1)...(19): siRNA sense strand
aagcugaaguacacaaagu

SEQ ID NO: 797354 - RNA, 19 nt, Homo sapiens
  misc_RNA (1)...(19): siRNA sense strand
ccucaagacccagcuauug

SEQ ID NO: 797355 - RNA, 19 nt, Homo sapiens
  misc_RNA (1)...(19): siRNA sense strand
gaugaagaagauccacuug

SEQ ID NO: 797356 - RNA, 19 nt, Homo sapiens
  misc_RNA (1)...(19): siRNA sense strand
aaaugccgaugaagaagau

SEQ ID NO: 797357 - RNA, 19 nt, Homo sapiens
  misc_RNA (1)...(19): siRNA sense strand
gccuguaaauggugaagau

SEQ ID NO: 797358 - RNA, 19 nt, Homo sapiens
  misc_RNA (1)...(19): siRNA sense strand
ccaauaccaccucgagaug

SEQ ID NO: 797359 - RNA, 19 nt, Homo sapiens
  misc_RNA (1)...(19): siRNA sense strand
gaugggccaaugaaauuug

SEQ ID NO: 797360 - RNA, 19 nt, Homo sapiens
  misc_RNA (1)...(19): siRNA sense strand
ucaagacccagcuauuguu

SEQ ID NO: 797361 - RNA, 19 nt, Homo sapiens
  misc_RNA (1)...(19): siRNA sense strand
caaaguagugcgguugguu

SEQ ID NO: 797362 - RNA, 19 nt, Homo sapiens
  misc_RNA (1)...(19): siRNA sense strand
ggaaucccacuucguccaa

SEQ ID NO: 797363 - RNA, 19 nt, Homo sapiens
  misc_RNA (1)...(19): siRNA sense strand
gcugaaacauuuggaaucc

SEQ ID NO: 797364 - RNA, 19 nt, Homo sapiens
  misc_RNA (1)...(19): siRNA sense strand
aggagaagccuguaaaugg

SEQ ID NO: 797365 - RNA, 19 nt, Homo sapiens
  misc_RNA (1)...(19): siRNA sense strand
ucgcucaagcccucaguua

SEQ ID NO: 797366 - RNA, 19 nt, Homo sapiens
  misc_RNA (1)...(19): siRNA sense strand
aguccgaguuccuuaguug

SEQ ID NO: 797367 - RNA, 19 nt, Homo sapiens
  misc_RNA (1)...(19): siRNA sense strand
aggaaaugccgaugaagaa

SEQ ID NO: 797368 - RNA, 19 nt, Homo sapiens
  misc_RNA (1)...(19): siRNA sense strand
gaaguacacaaaguuucaa

SEQ ID NO: 797369 - RNA, 19 nt, Homo sapiens
  misc_RNA (1)...(19): siRNA sense strand
uccaguccauggguucuua

SEQ ID NO: 797370 - RNA, 19 nt, Homo sapiens
  misc_RNA (1)...(19): siRNA sense strand
gaagauuaaaugcugaaac

SEQ ID NO: 797371 - RNA, 19 nt, Homo sapiens
  misc_RNA (1)...(19): siRNA sense strand
caaccugggcugaagaaag

SEQ ID NO: 797372 - RNA, 19 nt, Homo sapiens
  misc_RNA (1)...(19): siRNA sense strand
caggcaagcugaaguacac

SEQ ID NO: 797373 - RNA, 19 nt, Homo sapiens
  misc_RNA (1)...(19): siRNA sense strand
gcagcaagaucagccucau

SEQ ID NO: 797374 - RNA, 19 nt, Homo sapiens
  misc_RNA (1)...(19): siRNA sense strand
cgagaugaagucuuugaau

SEQ ID NO: 797375 - RNA, 19 nt, Homo sapiens
  misc_RNA (1)...(19): siRNA sense strand
guucaguccgaguuccuua

SEQ ID NO: 797376 - RNA, 19 nt, Homo sapiens
  misc_RNA (1)...(19): siRNA sense strand
gugaaggaaaugccgauga

SEQ ID NO: 797377 - RNA, 19 nt, Homo sapiens
  misc_RNA (1)...(19): siRNA sense strand
agagauugacagagaguuu

SEQ ID NO: 797378 - RNA, 19 nt, Homo sapiens
  misc_RNA (1)...(19): siRNA sense strand
ucagaaaugauaacaagag

SEQ ID NO: 797379 - RNA, 19 nt, Homo sapiens
  misc_RNA (1)...(19): siRNA sense strand
caauaccaccucgagauga

SEQ ID NO: 797380 - RNA, 19 nt, Homo sapiens
  misc_RNA (1)...(19): siRNA sense strand
aguuagacccuuugagaaa

SEQ ID NO: 797381 - RNA, 19 nt, Homo sapiens
  misc_RNA (1)...(19): siRNA sense strand
ucuuugacauccuuuggaa

SEQ ID NO: 797382 - RNA, 19 nt, Homo sapiens
  misc_RNA (1)...(19): siRNA sense strand
gcaggaugcccacauacag

SEQ ID NO: 797383 - RNA, 19 nt, Homo sapiens
  misc_RNA (1)...(19): siRNA sense strand
ggaaaugccgaugaagaag

SEQ ID NO: 797384 - RNA, 19 nt, Homo sapiens
  misc_RNA (1)...(19): siRNA sense strand
ccguagcccuugccaaagu

SEQ ID NO: 797385 - RNA, 19 nt, Homo sapiens
  misc_RNA (1)...(19): siRNA sense strand
caacucagaaaugauaaca

SEQ ID NO: 797386 - RNA, 19 nt, Homo sapiens
  misc_RNA (1)...(19): siRNA sense strand
aaggaaaugccgaugaaga

SEQ ID NO: 797387 - RNA, 19 nt, Homo sapiens
  misc_RNA (1)...(19): siRNA sense strand
ugauaacaagagacaagua

SEQ ID NO: 797388 - RNA, 19 nt, Homo sapiens
  misc_RNA (1)...(19): siRNA sense strand
caagacccagcuauuguuc

SEQ ID NO: 797389 - RNA, 19 nt, Homo sapiens
  misc_RNA (1)...(19): siRNA sense strand
ggauuucgcgguggauuca

SEQ ID NO: 797390 - RNA, 19 nt, Homo sapiens
  misc_RNA (1)...(19): siRNA sense strand
gcgagaugggccaaugaaa

SEQ ID NO: 797391 - RNA, 19 nt, Homo sapiens
  misc_RNA (1)...(19): siRNA sense strand
aaaccacaguguucuuugc

SEQ ID NO: 797392 - RNA, 19 nt, Homo sapiens
  misc_RNA (1)...(19): siRNA sense strand
gagauugacagagaguuuc

SEQ ID NO: 797393 - RNA, 19 nt, Homo sapiens
  misc_RNA (1)...(19): siRNA sense strand
ccgugggagugacauuaaa

SEQ ID NO: 797394 - RNA, 19 nt, Homo sapiens
  misc_RNA (1)...(19): siRNA sense strand
gcaguuagcccaucaaaua

SEQ ID NO: 797395 - RNA, 19 nt, Homo sapiens
  misc_RNA (1)...(19): siRNA sense strand
gaaccugucucuccagaua

SEQ ID NO: 797396 - RNA, 19 nt, Homo sapiens
  misc_RNA (1)...(19): siRNA sense strand
gaaggaaacuuacggugaa

SEQ ID NO: 797397 - RNA, 19 nt, Homo sapiens
  misc_RNA (1)...(19): siRNA sense strand
ucacagaucucuauagcua

SEQ ID NO: 797398 - RNA, 19 nt, Homo sapiens
  misc_RNA (1)...(19): siRNA sense strand
ccaaggauccgaugaguua

SEQ ID NO: 797399 - RNA, 19 nt, Homo sapiens
  misc_RNA (1)...(19): siRNA sense strand
gaagcaaggucgcuggauu

SEQ ID NO: 797400 - RNA, 19 nt, Homo sapiens
  misc_RNA (1)...(19): siRNA sense strand
gcacugauuuggauaagga

SEQ ID NO: 797401 - RNA, 19 nt, Homo sapiens
  misc_RNA (1)...(19): siRNA sense strand
agaagaauguggauuauga

SEQ ID NO: 797402 - RNA, 19 nt, Homo sapiens
  misc_RNA (1)...(19): siRNA sense strand
gaacuucuguguaauuucu

SEQ ID NO: 797403 - RNA, 19 nt, Homo sapiens
  misc_RNA (1)...(19): siRNA sense strand
gagcugcacuucauauuuc

SEQ ID NO: 797404 - RNA, 19 nt, Homo sapiens
  misc_RNA (1)...(19): siRNA sense strand
gaucucaugccaauauuua

SEQ ID NO: 797405 - RNA, 19 nt, Homo sapiens
  misc_RNA (1)...(19): siRNA sense strand
gcucaacucucauaacugu

SEQ ID NO: 797406 - RNA, 19 nt, Homo sapiens
  misc_RNA (1)...(19): siRNA sense strand
gaaaucaacccgacugaga

SEQ ID NO: 797407 - RNA, 19 nt, Homo sapiens
  misc_RNA (1)...(19): siRNA sense strand
ggaagaggauugcuuuaag

SEQ ID NO: 797408 - RNA, 19 nt, Homo sapiens
  misc_RNA (1)...(19): siRNA sense strand
ucacugugcuccuggguua

SEQ ID NO: 797409 - RNA, 19 nt, Homo sapiens
  misc_RNA (1)...(19): siRNA sense strand
gcucucacaugaaguuuaa

SEQ ID NO: 797410 - RNA, 19 nt, Homo sapiens
  misc_RNA (1)...(19): siRNA sense strand
caacaaggcucgcaaagac

SEQ ID NO: 797411 - RNA, 19 nt, Homo sapiens
  misc_RNA (1)...(19): siRNA sense strand
gagaagcacucuugacuac

SEQ ID NO: 797412 - RNA, 19 nt, Homo sapiens
  misc_RNA (1)...(19): siRNA sense strand
gcagugaucagaaaugaaa

SEQ ID NO: 797413 - RNA, 19 nt, Homo sapiens
  misc_RNA (1)...(19): siRNA sense strand
gcucaaguccauuaauaua

SEQ ID NO: 797414 - RNA, 19 nt, Homo sapiens
  misc_RNA (1)...(19): siRNA sense strand
caaaggcggucuccaagga

SEQ ID NO: 797415 - RNA, 19 nt, Homo sapiens
  misc_RNA (1)...(19): siRNA sense strand
caaagacccugauggaaca

SEQ ID NO: 797416 - RNA, 19 nt, Homo sapiens
  misc_RNA (1)...(19): siRNA sense strand
cauaaacgcuccaucaaag

SEQ ID NO: 797417 - RNA, 19 nt, Homo sapiens
  misc_RNA (1)...(19): siRNA sense strand
ugacaucugcccuucauua

SEQ ID NO: 797418 - RNA, 19 nt, Homo sapiens
  misc_RNA (1)...(19): siRNA sense strand
gaaaguuccuugcaaccau

SEQ ID NO: 797419 - RNA, 19 nt, Homo sapiens
  misc_RNA (1)...(19): siRNA sense strand
ggaaagaguuacgccaaau

SEQ ID NO: 797420 - RNA, 19 nt, Homo sapiens
  misc_RNA (1)...(19): siRNA sense strand
gaggaaagguagaaguugu

SEQ ID NO: 797421 - RNA, 19 nt, Homo sapiens
  misc_RNA (1)...(19): siRNA sense strand
gugagaagaauguggauua

SEQ ID NO: 797422 - RNA, 19 nt, Homo sapiens
  misc_RNA (1)...(19): siRNA sense strand
gaagaggauugcuuuaagg

SEQ ID NO: 797423 - RNA, 19 nt, Homo sapiens
  misc_RNA (1)...(19): siRNA sense strand
gcacccucauguugaauaa

SEQ ID NO: 797424 - RNA, 19 nt, Homo sapiens
  misc_RNA (1)...(19): siRNA sense strand
ggaauaucauugucuaugg

SEQ ID NO: 797425 - RNA, 19 nt, Homo sapiens
  misc_RNA (1)...(19): siRNA sense strand
gcauaaacgcuccaucaaa

SEQ ID NO: 797426 - RNA, 19 nt, Homo sapiens
  misc_RNA (1)...(19): siRNA sense strand
ugaaguugcagaacaaaua

SEQ ID NO: 797427 - RNA, 19 nt, Homo sapiens
  misc_RNA (1)...(19): siRNA sense strand
cagaaucacaggauguuua

SEQ ID NO: 797428 - RNA, 19 nt, Homo sapiens
  misc_RNA (1)...(19): siRNA sense strand
aaacuaacauuggaaccua

SEQ ID NO: 797429 - RNA, 19 nt, Homo sapiens
  misc_RNA (1)...(19): siRNA sense strand
gaaucaugcuguugugugu

SEQ ID NO: 797430 - RNA, 19 nt, Homo sapiens
  misc_RNA (1)...(19): siRNA sense strand
gaaaccaucacgugccuuu

SEQ ID NO: 797431 - RNA, 19 nt, Homo sapiens
  misc_RNA (1)...(19): siRNA sense strand
ggacuuacuuccgaauuca

SEQ ID NO: 797432 - RNA, 19 nt, Homo sapiens
  misc_RNA (1)...(19): siRNA sense strand
gaacagaaucacaggaugu

SEQ ID NO: 797433 - RNA, 19 nt, Homo sapiens
  misc_RNA (1)...(19): siRNA sense strand
caucugcccuucauuacuu

SEQ ID NO: 797434 - RNA, 19 nt, Homo sapiens
  misc_RNA (1)...(19): siRNA sense strand
uaauagaggcccaagauga

SEQ ID NO: 797435 - RNA, 19 nt, Homo sapiens
  misc_RNA (1)...(19): siRNA sense strand
gcuaccaccugcccaugua

SEQ ID NO: 797436 - RNA, 19 nt, Homo sapiens
  misc_RNA (1)...(19): siRNA sense strand
ucaaauagaagaugaggaa

SEQ ID NO: 797437 - RNA, 19 nt, Homo sapiens
  misc_RNA (1)...(19): siRNA sense strand
cacaggauguuuauuguau

SEQ ID NO: 797438 - RNA, 19 nt, Homo sapiens
  misc_RNA (1)...(19): siRNA sense strand
gauccugcguuuaggcuuu

SEQ ID NO: 797439 - RNA, 19 nt, Homo sapiens
  misc_RNA (1)...(19): siRNA sense strand
ggaaucaccacaagaccua

SEQ ID NO: 797440 - RNA, 19 nt, Homo sapiens
  misc_RNA (1)...(19): siRNA sense strand
gaauguggauuaugaaacg

SEQ ID NO: 797441 - RNA, 19 nt, Homo sapiens
  misc_RNA (1)...(19): siRNA sense strand
uugacuaccugcacuauaa

SEQ ID NO: 797442 - RNA, 19 nt, Homo sapiens
  misc_RNA (1)...(19): siRNA sense strand
agaguuacgccaaaucuua

SEQ ID NO: 797443 - RNA, 19 nt, Homo sapiens
  misc_RNA (1)...(19): siRNA sense strand
guauugcagugaucagaaa

SEQ ID NO: 797444 - RNA, 19 nt, Homo sapiens
  misc_RNA (1)...(19): siRNA sense strand
guacaagggagccaagauu

SEQ ID NO: 797445 - RNA, 19 nt, Homo sapiens
  misc_RNA (1)...(19): siRNA sense strand
gcacuacaccaaguucuuu

SEQ ID NO: 797446 - RNA, 19 nt, Homo sapiens
  misc_RNA (1)...(19): siRNA sense strand
gaaaacauccagggaaaua

SEQ ID NO: 797447 - RNA, 19 nt, Homo sapiens
  misc_RNA (1)...(19): siRNA sense strand
uaaagauuaugcacugaug

SEQ ID NO: 797448 - RNA, 19 nt, Homo sapiens
  misc_RNA (1)...(19): siRNA sense strand
ggacuuagaccguuacaac

SEQ ID NO: 797449 - RNA, 19 nt, Homo sapiens
  misc_RNA (1)...(19): siRNA sense strand
ggauugcucaaguccauua

SEQ ID NO: 797450 - RNA, 19 nt, Homo sapiens
  misc_RNA (1)...(19): siRNA sense strand
augcaugucuuguguauga

SEQ ID NO: 797451 - RNA, 19 nt, Homo sapiens
  misc_RNA (1)...(19): siRNA sense strand
uugcucaaguccauuaaua

SEQ ID NO: 797452 - RNA, 19 nt, Homo sapiens
  misc_RNA (1)...(19): siRNA sense strand
caacuacauccgcuuguuu

SEQ ID NO: 797453 - RNA, 19 nt, Homo sapiens
  misc_RNA (1)...(19): siRNA sense strand
aaauggcacagccuaauua

SEQ ID NO: 797454 - RNA, 19 nt, Homo sapiens
  misc_RNA (1)...(19): siRNA sense strand
ucaccugcaucaacaacua

SEQ ID NO: 797455 - RNA, 19 nt, Homo sapiens
  misc_RNA (1)...(19): siRNA sense strand
cuacagaggcugauauuag

SEQ ID NO: 797456 - RNA, 19 nt, Homo sapiens
  misc_RNA (1)...(19): siRNA sense strand
caauauuuaugcgcuauga

SEQ ID NO: 797457 - RNA, 19 nt, Homo sapiens
  misc_RNA (1)...(19): siRNA sense strand
caaggucgcuggauuuuau

SEQ ID NO: 797458 - RNA, 19 nt, Homo sapiens
  misc_RNA (1)...(19): siRNA sense strand
gaugagaaauaugaagcaa

SEQ ID NO: 797459 - RNA, 19 nt, Homo sapiens
  misc_RNA (1)...(19): siRNA sense strand
caaauggcacagccuaauu

SEQ ID NO: 797460 - RNA, 19 nt, Homo sapiens
  misc_RNA (1)...(19): siRNA sense strand
cuacaucucuuugauccaa

SEQ ID NO: 797461 - RNA, 19 nt, Homo sapiens
  misc_RNA (1)...(19): siRNA sense strand
ccaaauucuccaauagaua

SEQ ID NO: 797462 - RNA, 19 nt, Homo sapiens
  misc_RNA (1)...(19): siRNA sense strand
cagaacaaauaguugguau

SEQ ID NO: 797463 - RNA, 19 nt, Homo sapiens
  misc_RNA (1)...(19): siRNA sense strand
gguagaaguuguucauugc

SEQ ID NO: 797464 - RNA, 19 nt, Homo sapiens
  misc_RNA (1)...(19): siRNA sense strand
ucaccaaauucuccaauag

SEQ ID NO: 797465 - RNA, 19 nt, Homo sapiens
  misc_RNA (1)...(19): siRNA sense strand
gaagaauguggauuaugaa

SEQ ID NO: 797466 - RNA, 19 nt, Homo sapiens
  misc_RNA (1)...(19): siRNA sense strand
ggcccaagaugaagagaau

SEQ ID NO: 797467 - RNA, 19 nt, Homo sapiens
  misc_RNA (1)...(19): siRNA sense strand
gggacuuacuuccgaauuc

SEQ ID NO: 797468 - RNA, 19 nt, Homo sapiens
  misc_RNA (1)...(19): siRNA sense strand
gcaggcauuuguagcugaa

SEQ ID NO: 797469 - RNA, 19 nt, Homo sapiens
  misc_RNA (1)...(19): siRNA sense strand
ggauacuccugguguggaa

SEQ ID NO: 797470 - RNA, 19 nt, Homo sapiens
  misc_RNA (1)...(19): siRNA sense strand
ugaagagaaucaugcuguu

SEQ ID NO: 797471 - RNA, 19 nt, Homo sapiens
  misc_RNA (1)...(19): siRNA sense strand
gcacaccccugaauacguu

SEQ ID NO: 797472 - RNA, 19 nt, Homo sapiens
  misc_RNA (1)...(19): siRNA sense strand
cgaggaagaggauugcuuu

SEQ ID NO: 797473 - RNA, 19 nt, Homo sapiens
  misc_RNA (1)...(19): siRNA sense strand
gaugaguuaugcuuuaaac

SEQ ID NO: 797474 - RNA, 19 nt, Homo sapiens
  misc_RNA (1)...(19): siRNA sense strand
gauugucuauccucuggaa

SEQ ID NO: 797475 - RNA, 19 nt, Homo sapiens
  misc_RNA (1)...(19): siRNA sense strand
gaagagaaucaugcuguug

SEQ ID NO: 797476 - RNA, 19 nt, Homo sapiens
  misc_RNA (1)...(19): siRNA sense strand
ggaagaccaugacgaucuc

SEQ ID NO: 797477 - RNA, 19 nt, Homo sapiens
  misc_RNA (1)...(19): siRNA sense strand
gcaaagccaggguggaaga

SEQ ID NO: 797478 - RNA, 19 nt, Homo sapiens
  misc_RNA (1)...(19): siRNA sense strand
gacgaucucaugccaauau

SEQ ID NO: 797479 - RNA, 19 nt, Homo sapiens
  misc_RNA (1)...(19): siRNA sense strand
gaagcacucuugacuaccu

SEQ ID NO: 797480 - RNA, 19 nt, Homo sapiens
  misc_RNA (1)...(19): siRNA sense strand
ugaggaauccaucuacaaa

SEQ ID NO: 797481 - RNA, 19 nt, Homo sapiens
  misc_RNA (1)...(19): siRNA sense strand
aauagaagaugaggaaauc

SEQ ID NO: 797482 - RNA, 19 nt, Homo sapiens
  misc_RNA (1)...(19): siRNA sense strand
acagucgacuugugauuga

SEQ ID NO: 797483 - RNA, 19 nt, Homo sapiens
  misc_RNA (1)...(19): siRNA sense strand
ugagaagaauguggauuau

SEQ ID NO: 797484 - RNA, 19 nt, Homo sapiens
  misc_RNA (1)...(19): siRNA sense strand
gcagaacaaauaguuggua

SEQ ID NO: 797485 - RNA, 19 nt, Homo sapiens
  misc_RNA (1)...(19): siRNA sense strand
ggaaauauugccagagaag

SEQ ID NO: 797486 - RNA, 19 nt, Homo sapiens
  misc_RNA (1)...(19): siRNA sense strand
aaacauccagggaaauauu

SEQ ID NO: 797487 - RNA, 19 nt, Homo sapiens
  misc_RNA (1)...(19): siRNA sense strand
gcucaagagugaacaugca

SEQ ID NO: 797488 - RNA, 19 nt, Homo sapiens
  misc_RNA (1)...(19): siRNA sense strand
caucaaaggcggucuccaa

SEQ ID NO: 797489 - RNA, 19 nt, Homo sapiens
  misc_RNA (1)...(19): siRNA sense strand
guuagcccaucaaauagaa

SEQ ID NO: 797490 - RNA, 19 nt, Homo sapiens
  misc_RNA (1)...(19): siRNA sense strand
caaauucuccaauagauac

SEQ ID NO: 797491 - RNA, 19 nt, Homo sapiens
  misc_RNA (1)...(19): siRNA sense strand
uuaaggcacugauuuggau

SEQ ID NO: 797492 - RNA, 19 nt, Homo sapiens
  misc_RNA (1)...(19): siRNA sense strand
gaggaagaggauugcuuua

SEQ ID NO: 797493 - RNA, 19 nt, Homo sapiens
  misc_RNA (1)...(19): siRNA sense strand
gaaagaguuacgccaaauc

SEQ ID NO: 797494 - RNA, 19 nt, Homo sapiens
  misc_RNA (1)...(19): siRNA sense strand
ggaggaggcuggugagaug

SEQ ID NO: 797495 - RNA, 19 nt, Homo sapiens
  misc_RNA (1)...(19): siRNA sense strand
ccaggaaguuggccaauca

SEQ ID NO: 797496 - RNA, 19 nt, Homo sapiens
  misc_RNA (1)...(19): siRNA sense strand
gaaguuggccaaucagaag

SEQ ID NO: 797497 - RNA, 19 nt, Homo sapiens
  misc_RNA (1)...(19): siRNA sense strand
agaagcagcugcagaagag

SEQ ID NO: 797498 - RNA, 19 nt, Homo sapiens
  misc_RNA (1)...(19): siRNA sense strand
cagaagcgguucagugagu

SEQ ID NO: 797499 - RNA, 19 nt, Homo sapiens
  misc_RNA (1)...(19): siRNA sense strand
ggaaguuggccaaucagaa

SEQ ID NO: 797500 - RNA, 19 nt, Homo sapiens
  misc_RNA (1)...(19): siRNA sense strand
ggaagucggccaggaaguu

SEQ ID NO: 797501 - RNA, 19 nt, Homo sapiens
  misc_RNA (1)...(19): siRNA sense strand
ccagaaugguaauguguag

SEQ ID NO: 797502 - RNA, 19 nt, Homo sapiens
  misc_RNA (1)...(19): siRNA sense strand
gaagucggccaggaaguug

SEQ ID NO: 797503 - RNA, 19 nt, Homo sapiens
  misc_RNA (1)...(19): siRNA sense strand
gugaguuuaugaggcaaua

SEQ ID NO: 797504 - RNA, 19 nt, Homo sapiens
  misc_RNA (1)...(19): siRNA sense strand
cagagggacugucucacau

SEQ ID NO: 797505 - RNA, 19 nt, Homo sapiens
  misc_RNA (1)...(19): siRNA sense strand
cuggugagauggagcagaa

SEQ ID NO: 797506 - RNA, 19 nt, Homo sapiens
  misc_RNA (1)...(19): siRNA sense strand
gaagcgguucagugaguuu

SEQ ID NO: 797507 - RNA, 19 nt, Homo sapiens
  misc_RNA (1)...(19): siRNA sense strand
cagaagcagcugcagaaga

SEQ ID NO: 797508 - RNA, 19 nt, Homo sapiens
  misc_RNA (1)...(19): siRNA sense strand
gcgguucagugaguuuaug

SEQ ID NO: 797509 - RNA, 19 nt, Homo sapiens
  misc_RNA (1)...(19): siRNA sense strand
ucagagggacugucucaca

SEQ ID NO: 797510 - RNA, 19 nt, Homo sapiens
  misc_RNA (1)...(19): siRNA sense strand
ccaguguguucagcaguug

SEQ ID NO: 797511 - RNA, 19 nt, Homo sapiens
  misc_RNA (1)...(19): siRNA sense strand
uccaguguguucagcaguu

SEQ ID NO: 797512 - RNA, 19 nt, Homo sapiens
  misc_RNA (1)...(19): siRNA sense strand
gaucguggcugguuuguua

SEQ ID NO: 797513 - RNA, 19 nt, Homo sapiens
  misc_RNA (1)...(19): siRNA sense strand
agaaagagauucaggauua

SEQ ID NO: 797514 - RNA, 19 nt, Homo sapiens
  misc_RNA (1)...(19): siRNA sense strand
gaaagaagauuuagaaggu

SEQ ID NO: 797515 - RNA, 19 nt, Homo sapiens
  misc_RNA (1)...(19): siRNA sense strand
gugcaucucuucacaauua

SEQ ID NO: 797516 - RNA, 19 nt, Homo sapiens
  misc_RNA (1)...(19): siRNA sense strand
ggaauucaguucuuugaua

SEQ ID NO: 797517 - RNA, 19 nt, Homo sapiens
  misc_RNA (1)...(19): siRNA sense strand
ggaaagagcauaagcuaaa

SEQ ID NO: 797518 - RNA, 19 nt, Homo sapiens
  misc_RNA (1)...(19): siRNA sense strand
ggauaaagcucuucuggau

SEQ ID NO: 797519 - RNA, 19 nt, Homo sapiens
  misc_RNA (1)...(19): siRNA sense strand
gaaccuaacugugucagaa

SEQ ID NO: 797520 - RNA, 19 nt, Homo sapiens
  misc_RNA (1)...(19): siRNA sense strand
gcaauugaaucucucuuug

SEQ ID NO: 797521 - RNA, 19 nt, Homo sapiens
  misc_RNA (1)...(19): siRNA sense strand
gaacaguaguugcguuugu

SEQ ID NO: 797522 - RNA, 19 nt, Homo sapiens
  misc_RNA (1)...(19): siRNA sense strand
ggaggaaccuucugauuac

SEQ ID NO: 797523 - RNA, 19 nt, Homo sapiens
  misc_RNA (1)...(19): siRNA sense strand
gcuauugucucucccauga

SEQ ID NO: 797524 - RNA, 19 nt, Homo sapiens
  misc_RNA (1)...(19): siRNA sense strand
gaagggcacuauagagaug

SEQ ID NO: 797525 - RNA, 19 nt, Homo sapiens
  misc_RNA (1)...(19): siRNA sense strand
ggucaucgaacacuauuua

SEQ ID NO: 797526 - RNA, 19 nt, Homo sapiens
  misc_RNA (1)...(19): siRNA sense strand
ucacagaacuggaugagau

SEQ ID NO: 797527 - RNA, 19 nt, Homo sapiens
  misc_RNA (1)...(19): siRNA sense strand
ucacagaggguacaguuua

SEQ ID NO: 797528 - RNA, 19 nt, Homo sapiens
  misc_RNA (1)...(19): siRNA sense strand
caaucaacaugcauaauga

SEQ ID NO: 797529 - RNA, 19 nt, Homo sapiens
  misc_RNA (1)...(19): siRNA sense strand
gauuacagcugucaucauc

SEQ ID NO: 797530 - RNA, 19 nt, Homo sapiens
  misc_RNA (1)...(19): siRNA sense strand
gaauucaguucuuugauag

SEQ ID NO: 797531 - RNA, 19 nt, Homo sapiens
  misc_RNA (1)...(19): siRNA sense strand
gauaaggagucaagcuuuc

SEQ ID NO: 797532 - RNA, 19 nt, Homo sapiens
  misc_RNA (1)...(19): siRNA sense strand
gauguugccuauaaagcua

SEQ ID NO: 797533 - RNA, 19 nt, Homo sapiens
  misc_RNA (1)...(19): siRNA sense strand
gagaaaugaugaagaagca

SEQ ID NO: 797534 - RNA, 19 nt, Homo sapiens
  misc_RNA (1)...(19): siRNA sense strand
gaagauuccugcuguacca

SEQ ID NO: 797535 - RNA, 19 nt, Homo sapiens
  misc_RNA (1)...(19): siRNA sense strand
caaagaauaugggcuguca

SEQ ID NO: 797536 - RNA, 19 nt, Homo sapiens
  misc_RNA (1)...(19): siRNA sense strand
gacagccucuuaccauauu

SEQ ID NO: 797537 - RNA, 19 nt, Homo sapiens
  misc_RNA (1)...(19): siRNA sense strand
uggaggaaccuucugauua

SEQ ID NO: 797538 - RNA, 19 nt, Homo sapiens
  misc_RNA (1)...(19): siRNA sense strand
guucaagacuagcagauau

SEQ ID NO: 797539 - RNA, 19 nt, Homo sapiens
  misc_RNA (1)...(19): siRNA sense strand
caucgaacacuauuuauug

SEQ ID NO: 797540 - RNA, 19 nt, Homo sapiens
  misc_RNA (1)...(19): siRNA sense strand
acaauucuguguaugguuu

SEQ ID NO: 797541 - RNA, 19 nt, Homo sapiens
  misc_RNA (1)...(19): siRNA sense strand
gcguauaagugcaauugaa

SEQ ID NO: 797542 - RNA, 19 nt, Homo sapiens
  misc_RNA (1)...(19): siRNA sense strand
gauccaagcauucgaauag

SEQ ID NO: 797543 - RNA, 19 nt, Homo sapiens
  misc_RNA (1)...(19): siRNA sense strand
caggucagcugaaugaaga

SEQ ID NO: 797544 - RNA, 19 nt, Homo sapiens
  misc_RNA (1)...(19): siRNA sense strand
gcacagcuuguuugaauug

SEQ ID NO: 797545 - RNA, 19 nt, Homo sapiens
  misc_RNA (1)...(19): siRNA sense strand
gaaagagauucaggauuag

SEQ ID NO: 797546 - RNA, 19 nt, Homo sapiens
  misc_RNA (1)...(19): siRNA sense strand
uaaagggaauucaguucuu

SEQ ID NO: 797547 - RNA, 19 nt, Homo sapiens
  misc_RNA (1)...(19): siRNA sense strand
ccaguauucugaaguuuau

SEQ ID NO: 797548 - RNA, 19 nt, Homo sapiens
  misc_RNA (1)...(19): siRNA sense strand
ggacugcaacucuauguau

SEQ ID NO: 797549 - RNA, 19 nt, Homo sapiens
  misc_RNA (1)...(19): siRNA sense strand
ggacaugcaugccaacacu

SEQ ID NO: 797550 - RNA, 19 nt, Homo sapiens
  misc_RNA (1)...(19): siRNA sense strand
gccgauaacucaaaagaua

SEQ ID NO: 797551 - RNA, 19 nt, Homo sapiens
  misc_RNA (1)...(19): siRNA sense strand
gaaagagcauaagcuaaag

SEQ ID NO: 797552 - RNA, 19 nt, Homo sapiens
  misc_RNA (1)...(19): siRNA sense strand
uggaacugcugacacaaua

SEQ ID NO: 797553 - RNA, 19 nt, Homo sapiens
  misc_RNA (1)...(19): siRNA sense strand
gggaaagggucaacaguac

SEQ ID NO: 797554 - RNA, 19 nt, Homo sapiens
  misc_RNA (1)...(19): siRNA sense strand
ugaagaagauguggaagau

SEQ ID NO: 797555 - RNA, 19 nt, Homo sapiens
  misc_RNA (1)...(19): siRNA sense strand
gagcauaagcuaaagaaag

SEQ ID NO: 797556 - RNA, 19 nt, Homo sapiens
  misc_RNA (1)...(19): siRNA sense strand
aaugacagaugagguauuu

SEQ ID NO: 797557 - RNA, 19 nt, Homo sapiens
  misc_RNA (1)...(19): siRNA sense strand
ggucauaaacacagaaaga

SEQ ID NO: 797558 - RNA, 19 nt, Homo sapiens
  misc_RNA (1)...(19): siRNA sense strand
gaacaaugugugcuaccua

SEQ ID NO: 797559 - RNA, 19 nt, Homo sapiens
  misc_RNA (1)...(19): siRNA sense strand
ugacuuugcugucuuucuu

SEQ ID NO: 797560 - RNA, 19 nt, Homo sapiens
  misc_RNA (1)...(19): siRNA sense strand
ccaggugguugaaguuuga

SEQ ID NO: 797561 - RNA, 19 nt, Homo sapiens
  misc_RNA (1)...(19): siRNA sense strand
uacgagaaaugaugaagaa

SEQ ID NO: 797562 - RNA, 19 nt, Homo sapiens
  misc_RNA (1)...(19): siRNA sense strand
aaagagagacagagaaaga

SEQ ID NO: 797563 - RNA, 19 nt, Homo sapiens
  misc_RNA (1)...(19): siRNA sense strand
ggagaacaacccaaauuuc

SEQ ID NO: 797564 - RNA, 19 nt, Homo sapiens
  misc_RNA (1)...(19): siRNA sense strand
caacaugcauaaugaucug

SEQ ID NO: 797565 - RNA, 19 nt, Homo sapiens
  misc_RNA (1)...(19): siRNA sense strand
ggacagccucuuaccauau

SEQ ID NO: 797566 - RNA, 19 nt, Homo sapiens
  misc_RNA (1)...(19): siRNA sense strand
gcaacugaagggcguauaa

SEQ ID NO: 797567 - RNA, 19 nt, Homo sapiens
  misc_RNA (1)...(19): siRNA sense strand
gaaacagucagaaccaaau

SEQ ID NO: 797568 - RNA, 19 nt, Homo sapiens
  misc_RNA (1)...(19): siRNA sense strand
ugaaacagcaucaucauca

SEQ ID NO: 797569 - RNA, 19 nt, Homo sapiens
  misc_RNA (1)...(19): siRNA sense strand
ugccaacacuuuagaagaa

SEQ ID NO: 797570 - RNA, 19 nt, Homo sapiens
  misc_RNA (1)...(19): siRNA sense strand
gguaccaucuggaccuauu

SEQ ID NO: 797571 - RNA, 19 nt, Homo sapiens
  misc_RNA (1)...(19): siRNA sense strand
gcucugcuuuguacuauuc

SEQ ID NO: 797572 - RNA, 19 nt, Homo sapiens
  misc_RNA (1)...(19): siRNA sense strand
cuacaaguaccaaguguuu

SEQ ID NO: 797573 - RNA, 19 nt, Homo sapiens
  misc_RNA (1)...(19): siRNA sense strand
ugaagcaucgaacaucuua

SEQ ID NO: 797574 - RNA, 19 nt, Homo sapiens
  misc_RNA (1)...(19): siRNA sense strand
gguugaaguuugaagaaga

SEQ ID NO: 797575 - RNA, 19 nt, Homo sapiens
  misc_RNA (1)...(19): siRNA sense strand
gaagaagcaguuguggaua

SEQ ID NO: 797576 - RNA, 19 nt, Homo sapiens
  misc_RNA (1)...(19): siRNA sense strand
ucaguucuuugauaggaua

SEQ ID NO: 797577 - RNA, 19 nt, Homo sapiens
  misc_RNA (1)...(19): siRNA sense strand
cuaguucccuugucugcua

SEQ ID NO: 797578 - RNA, 19 nt, Homo sapiens
  misc_RNA (1)...(19): siRNA sense strand
ggucaacaguaccaugaga

SEQ ID NO: 797579 - RNA, 19 nt, Homo sapiens
  misc_RNA (1)...(19): siRNA sense strand
agaagaaauugcagauaug

SEQ ID NO: 797580 - RNA, 19 nt, Homo sapiens
  misc_RNA (1)...(19): siRNA sense strand
ccaacaggauucccauugu

SEQ ID NO: 797581 - RNA, 19 nt, Homo sapiens
  misc_RNA (1)...(19): siRNA sense strand
ugaccaguauucugaaguu

SEQ ID NO: 797582 - RNA, 19 nt, Homo sapiens
  misc_RNA (1)...(19): siRNA sense strand
ccaaucaacaugcauaaug

SEQ ID NO: 797583 - RNA, 19 nt, Homo sapiens
  misc_RNA (1)...(19): siRNA sense strand
uaaagaucguaaugacuug

SEQ ID NO: 797584 - RNA, 19 nt, Homo sapiens
  misc_RNA (1)...(19): siRNA sense strand
gaaacagccaggugguuga

SEQ ID NO: 797585 - RNA, 19 nt, Homo sapiens
  misc_RNA (1)...(19): siRNA sense strand
gaaacuggaauaugcugaa

SEQ ID NO: 797586 - RNA, 19 nt, Homo sapiens
  misc_RNA (1)...(19): siRNA sense strand
gagugacuuugcugucuuu

SEQ ID NO: 797587 - RNA, 19 nt, Homo sapiens
  misc_RNA (1)...(19): siRNA sense strand
ugagguauuucaugauguu

SEQ ID NO: 797588 - RNA, 19 nt, Homo sapiens
  misc_RNA (1)...(19): siRNA sense strand
cagguugucuccagcugua

SEQ ID NO: 797589 - RNA, 19 nt, Homo sapiens
  misc_RNA (1)...(19): siRNA sense strand
gaacuguguugcuggacau

SEQ ID NO: 797590 - RNA, 19 nt, Homo sapiens
  misc_RNA (1)...(19): siRNA sense strand
uugcacagcuuguuugaau

SEQ ID NO: 797591 - RNA, 19 nt, Homo sapiens
  misc_RNA (1)...(19): siRNA sense strand
uucaugauguugccuauaa

SEQ ID NO: 797592 - RNA, 19 nt, Homo sapiens
  misc_RNA (1)...(19): siRNA sense strand
ggaagaugagggcacagua

SEQ ID NO: 797593 - RNA, 19 nt, Homo sapiens
  misc_RNA (1)...(19): siRNA sense strand
uuacugggcuuaugauuuu

SEQ ID NO: 797594 - RNA, 19 nt, Homo sapiens
  misc_RNA (1)...(19): siRNA sense strand
gaaggucaucgaacacuau

SEQ ID NO: 797595 - RNA, 19 nt, Homo sapiens
  misc_RNA (1)...(19): siRNA sense strand
gcugucauaccuaucuuua

SEQ ID NO: 797596 - RNA, 19 nt, Homo sapiens
  misc_RNA (1)...(19): siRNA sense strand
cuaaagaucguaaugacuu

SEQ ID NO: 797597 - RNA, 19 nt, Homo sapiens
  misc_RNA (1)...(19): siRNA sense strand
gaaacagcaucaucaucag

SEQ ID NO: 797598 - RNA, 19 nt, Homo sapiens
  misc_RNA (1)...(19): siRNA sense strand
ugaacucagugaagcauau

SEQ ID NO: 797599 - RNA, 19 nt, Homo sapiens
  misc_RNA (1)...(19): siRNA sense strand
uuuaagagcuagcauugga

SEQ ID NO: 797600 - RNA, 19 nt, Homo sapiens
  misc_RNA (1)...(19): siRNA sense strand
ugucauaccuaucuuuaag

SEQ ID NO: 797601 - RNA, 19 nt, Homo sapiens
  misc_RNA (1)...(19): siRNA sense strand
gagaaagagauucaggauu

SEQ ID NO: 797602 - RNA, 19 nt, Homo sapiens
  misc_RNA (1)...(19): siRNA sense strand
ggagggaauccaauauuuc

SEQ ID NO: 797603 - RNA, 19 nt, Homo sapiens
  misc_RNA (1)...(19): siRNA sense strand
gagcuagcauuggacuuug

SEQ ID NO: 797604 - RNA, 19 nt, Homo sapiens
  misc_RNA (1)...(19): siRNA sense strand
aagaaaagcuccauacuuc

SEQ ID NO: 797605 - RNA, 19 nt, Homo sapiens
  misc_RNA (1)...(19): siRNA sense strand
gcaagguugaucugcauuu

SEQ ID NO: 797606 - RNA, 19 nt, Homo sapiens
  misc_RNA (1)...(19): siRNA sense strand
guucguuccuuugcugaua

SEQ ID NO: 797607 - RNA, 19 nt, Homo sapiens
  misc_RNA (1)...(19): siRNA sense strand
ucagcugaaugaagaugua

SEQ ID NO: 797608 - RNA, 19 nt, Homo sapiens
  misc_RNA (1)...(19): siRNA sense strand
acacauuccucaugaccuu

SEQ ID NO: 797609 - RNA, 19 nt, Homo sapiens
  misc_RNA (1)...(19): siRNA sense strand
agaaagagagacagagaaa

SEQ ID NO: 797610 - RNA, 19 nt, Homo sapiens
  misc_RNA (1)...(19): siRNA sense strand
uaagugcaauugaaucucu

SEQ ID NO: 797611 - RNA, 19 nt, Homo sapiens
  misc_RNA (1)...(19): siRNA sense strand
caggaaagagcauaagcua

SEQ ID NO: 797612 - RNA, 19 nt, Homo sapiens
  misc_RNA (1)...(19): siRNA sense strand
ggaaacaccugagagcuua

SEQ ID NO: 797613 - RNA, 19 nt, Homo sapiens
  misc_RNA (1)...(19): siRNA sense strand
ggaaguuguuauuguggua

SEQ ID NO: 797614 - RNA, 19 nt, Homo sapiens
  misc_RNA (1)...(19): siRNA sense strand
ccgcagcccuuuccuaugu

SEQ ID NO: 797615 - RNA, 19 nt, Homo sapiens
  misc_RNA (1)...(19): siRNA sense strand
gaauugaugagcugucuug

SEQ ID NO: 797616 - RNA, 19 nt, Homo sapiens
  misc_RNA (1)...(19): siRNA sense strand
gaucugccgguucauuaua

SEQ ID NO: 797617 - RNA, 19 nt, Homo sapiens
  misc_RNA (1)...(19): siRNA sense strand
cagaucugccgguucauua

SEQ ID NO: 797618 - RNA, 19 nt, Homo sapiens
  misc_RNA (1)...(19): siRNA sense strand
uugaugagcugucuugauc

SEQ ID NO: 797619 - RNA, 19 nt, Homo sapiens
  misc_RNA (1)...(19): siRNA sense strand
gcaccugacucuaauaccu

SEQ ID NO: 797620 - RNA, 19 nt, Homo sapiens
  misc_RNA (1)...(19): siRNA sense strand
caacuucucaggccucaga

SEQ ID NO: 797621 - RNA, 19 nt, Homo sapiens
  misc_RNA (1)...(19): siRNA sense strand
cagcgucacuggaaguugu

SEQ ID NO: 797622 - RNA, 19 nt, Homo sapiens
  misc_RNA (1)...(19): siRNA sense strand
gcaguccucuccagaucug

SEQ ID NO: 797623 - RNA, 19 nt, Homo sapiens
  misc_RNA (1)...(19): siRNA sense strand
gaugagcugucuugaucuc

SEQ ID NO: 797624 - RNA, 19 nt, Homo sapiens
  misc_RNA (1)...(19): siRNA sense strand
gagggcagcgucacuggaa

SEQ ID NO: 797625 - RNA, 19 nt, Homo sapiens
  misc_RNA (1)...(19): siRNA sense strand
gaaguuguuauugugguaa

SEQ ID NO: 797626 - RNA, 19 nt, Homo sapiens
  misc_RNA (1)...(19): siRNA sense strand
gcucacucgucccaaugaa

SEQ ID NO: 797627 - RNA, 19 nt, Homo sapiens
  misc_RNA (1)...(19): siRNA sense strand
caugaaucgucuccggaaa

SEQ ID NO: 797628 - RNA, 19 nt, Homo sapiens
  misc_RNA (1)...(19): siRNA sense strand
ugaaucgucuccggaaaca

SEQ ID NO: 797629 - RNA, 19 nt, Homo sapiens
  misc_RNA (1)...(19): siRNA sense strand
cuccagaucugccgguuca

SEQ ID NO: 797630 - RNA, 19 nt, Homo sapiens
  misc_RNA (1)...(19): siRNA sense strand
cacuggaaguuguuauugu

SEQ ID NO: 797631 - RNA, 19 nt, Homo sapiens
  misc_RNA (1)...(19): siRNA sense strand
uaccaucggugucuauacu

SEQ ID NO: 797632 - RNA, 19 nt, Homo sapiens
  misc_RNA (1)...(19): siRNA sense strand
ccgcaguccucuccagauc

SEQ ID NO: 797633 - RNA, 19 nt, Homo sapiens
  misc_RNA (1)...(19): siRNA sense strand
cggaaacaccugagagcuu

SEQ ID NO: 797634 - RNA, 19 nt, Homo sapiens
  misc_RNA (1)...(19): siRNA sense strand
caccgcagcccuuuccuau

SEQ ID NO: 797635 - RNA, 19 nt, Homo sapiens
  misc_RNA (1)...(19): siRNA sense strand
gagcucacucgucccaaug

SEQ ID NO: 797636 - RNA, 19 nt, Homo sapiens
  misc_RNA (1)...(19): siRNA sense strand
ucacuggaaguuguuauug

SEQ ID NO: 797637 - RNA, 19 nt, Homo sapiens
  misc_RNA (1)...(19): siRNA sense strand
acuggaaguuguuauugug

SEQ ID NO: 797638 - RNA, 19 nt, Homo sapiens
  misc_RNA (1)...(19): siRNA sense strand
ccagaucugccgguucauu

SEQ ID NO: 797639 - RNA, 19 nt, Homo sapiens
  misc_RNA (1)...(19): siRNA sense strand
gagcuuaccaucggugucu

SEQ ID NO: 797640 - RNA, 19 nt, Homo sapiens
  misc_RNA (1)...(19): siRNA sense strand
ucugccgguucauuauaua

SEQ ID NO: 797641 - RNA, 19 nt, Homo sapiens
  misc_RNA (1)...(19): siRNA sense strand
cccauggguucaggaauug

SEQ ID NO: 797642 - RNA, 19 nt, Homo sapiens
  misc_RNA (1)...(19): siRNA sense strand
cgccaucgguucaguucau

SEQ ID NO: 797643 - RNA, 19 nt, Homo sapiens
  misc_RNA (1)...(19): siRNA sense strand
agagcucacucgucccaau

SEQ ID NO: 797644 - RNA, 19 nt, Homo sapiens
  misc_RNA (1)...(19): siRNA sense strand
uguggcaccugacucuaau

SEQ ID NO: 797645 - RNA, 19 nt, Homo sapiens
  misc_RNA (1)...(19): siRNA sense strand
ccaccagaagcauuuacuu

SEQ ID NO: 797646 - RNA, 19 nt, Homo sapiens
  misc_RNA (1)...(19): siRNA sense strand
caaguacccugauagaguu

SEQ ID NO: 797647 - RNA, 19 nt, Homo sapiens
  misc_RNA (1)...(19): siRNA sense strand
ggagcgaauucacuugauu

SEQ ID NO: 797648 - RNA, 19 nt, Homo sapiens
  misc_RNA (1)...(19): siRNA sense strand
ugacaucgauagagacaug

SEQ ID NO: 797649 - RNA, 19 nt, Homo sapiens
  misc_RNA (1)...(19): siRNA sense strand
ugucucagcugaagaaugu

SEQ ID NO: 797650 - RNA, 19 nt, Homo sapiens
  misc_RNA (1)...(19): siRNA sense strand
uccagugucuccagaauaa

SEQ ID NO: 797651 - RNA, 19 nt, Homo sapiens
  misc_RNA (1)...(19): siRNA sense strand
auaaguuccuggccagaua

SEQ ID NO: 797652 - RNA, 19 nt, Homo sapiens
  misc_RNA (1)...(19): siRNA sense strand
ucaaagccguggcaucugu

SEQ ID NO: 797653 - RNA, 19 nt, Homo sapiens
  misc_RNA (1)...(19): siRNA sense strand
uccgacaccuggauagaua

SEQ ID NO: 797654 - RNA, 19 nt, Homo sapiens
  misc_RNA (1)...(19): siRNA sense strand
ggagaucugcgacucaguu

SEQ ID NO: 797655 - RNA, 19 nt, Homo sapiens
  misc_RNA (1)...(19): siRNA sense strand
cuuugaagaugauaccaua

SEQ ID NO: 797656 - RNA, 19 nt, Homo sapiens
  misc_RNA (1)...(19): siRNA sense strand
uccgagacauggagauuaa

SEQ ID NO: 797657 - RNA, 19 nt, Homo sapiens
  misc_RNA (1)...(19): siRNA sense strand
ucaaguacccugauagagu

SEQ ID NO: 797658 - RNA, 19 nt, Homo sapiens
  misc_RNA (1)...(19): siRNA sense strand
aaagaugugccuaucacua

SEQ ID NO: 797659 - RNA, 19 nt, Homo sapiens
  misc_RNA (1)...(19): siRNA sense strand
ggucaaagccguggcaucu

SEQ ID NO: 797660 - RNA, 19 nt, Homo sapiens
  misc_RNA (1)...(19): siRNA sense strand
gaucugcgacucaguugau

SEQ ID NO: 797661 - RNA, 19 nt, Homo sapiens
  misc_RNA (1)...(19): siRNA sense strand
guacccugauagaguuaaa

SEQ ID NO: 797662 - RNA, 19 nt, Homo sapiens
  misc_RNA (1)...(19): siRNA sense strand
gaaaagaugugccuaucac

SEQ ID NO: 797663 - RNA, 19 nt, Homo sapiens
  misc_RNA (1)...(19): siRNA sense strand
gggcugaggaugaguuugu

SEQ ID NO: 797664 - RNA, 19 nt, Homo sapiens
  misc_RNA (1)...(19): siRNA sense strand
cguggcaucuguccuagga

SEQ ID NO: 797665 - RNA, 19 nt, Homo sapiens
  misc_RNA (1)...(19): siRNA sense strand
gcccuaugcuggagcgaau

SEQ ID NO: 797666 - RNA, 19 nt, Homo sapiens
  misc_RNA (1)...(19): siRNA sense strand
guuccuggccagauaugua

SEQ ID NO: 797667 - RNA, 19 nt, Homo sapiens
  misc_RNA (1)...(19): siRNA sense strand
gaugugccuaucacuauga

SEQ ID NO: 797668 - RNA, 19 nt, Homo sapiens
  misc_RNA (1)...(19): siRNA sense strand
ggccacuucuuacucaauc

SEQ ID NO: 797669 - RNA, 19 nt, Homo sapiens
  misc_RNA (1)...(19): siRNA sense strand
gaggaugaguuugugacau

SEQ ID NO: 797670 - RNA, 19 nt, Homo sapiens
  misc_RNA (1)...(19): siRNA sense strand
gcacaccuucgaucugcuu

SEQ ID NO: 797671 - RNA, 19 nt, Homo sapiens
  misc_RNA (1)...(19): siRNA sense strand
aagaugugccuaucacuau

SEQ ID NO: 797672 - RNA, 19 nt, Homo sapiens
  misc_RNA (1)...(19): siRNA sense strand
gggcacaguuugggaggau

SEQ ID NO: 797673 - RNA, 19 nt, Homo sapiens
  misc_RNA (1)...(19): siRNA sense strand
gaagcucaaggccagcauu

SEQ ID NO: 797674 - RNA, 19 nt, Homo sapiens
  misc_RNA (1)...(19): siRNA sense strand
gcacacugcacaccuucga

SEQ ID NO: 797675 - RNA, 19 nt, Homo sapiens
  misc_RNA (1)...(19): siRNA sense strand
gaaucccaguggugagaca

SEQ ID NO: 797676 - RNA, 19 nt, Homo sapiens
  misc_RNA (1)...(19): siRNA sense strand
ccacugcaacgcacagaau

SEQ ID NO: 797677 - RNA, 19 nt, Homo sapiens
  misc_RNA (1)...(19): siRNA sense strand
uuugugacaucgauagaga

SEQ ID NO: 797678 - RNA, 19 nt, Homo sapiens
  misc_RNA (1)...(19): siRNA sense strand
ccaggauccuccagugucu

SEQ ID NO: 797679 - RNA, 19 nt, Homo sapiens
  misc_RNA (1)...(19): siRNA sense strand
gcacaguuugggaggauuc

SEQ ID NO: 797680 - RNA, 19 nt, Homo sapiens
  misc_RNA (1)...(19): siRNA sense strand
ggaggagaucugcgacuca

SEQ ID NO: 797681 - RNA, 19 nt, Homo sapiens
  misc_RNA (1)...(19): siRNA sense strand
ccaugucucagcugaagaa

SEQ ID NO: 797682 - RNA, 19 nt, Homo sapiens
  misc_RNA (1)...(19): siRNA sense strand
uccauuggcuguucuucga

SEQ ID NO: 797683 - RNA, 19 nt, Homo sapiens
  misc_RNA (1)...(19): siRNA sense strand
ccuggccacuucuuacuca

SEQ ID NO: 797684 - RNA, 19 nt, Homo sapiens
  misc_RNA (1)...(19): siRNA sense strand
ggugagacagcauucaaag

SEQ ID NO: 797685 - RNA, 19 nt, Homo sapiens
  misc_RNA (1)...(19): siRNA sense strand
gagaucugcgacucaguug

SEQ ID NO: 797686 - RNA, 19 nt, Homo sapiens
  misc_RNA (1)...(19): siRNA sense strand
gauuccuggccacuucuua

SEQ ID NO: 797687 - RNA, 19 nt, Homo sapiens
  misc_RNA (1)...(19): siRNA sense strand
guccgagacauggagauua

SEQ ID NO: 797688 - RNA, 19 nt, Homo sapiens
  misc_RNA (1)...(19): siRNA sense strand
ucccaaaccagaauaagau

SEQ ID NO: 797689 - RNA, 19 nt, Homo sapiens
  misc_RNA (1)...(19): siRNA sense strand
ccuaggacguuccaaucca

SEQ ID NO: 797690 - RNA, 19 nt, Homo sapiens
  misc_RNA (1)...(19): siRNA sense strand
agaugugccuaucacuaug

SEQ ID NO: 797691 - RNA, 19 nt, Homo sapiens
  misc_RNA (1)...(19): siRNA sense strand
cagaaucccaguggugaga

SEQ ID NO: 797692 - RNA, 19 nt, Homo sapiens
  misc_RNA (1)...(19): siRNA sense strand
ccuccagugucuccagaau

SEQ ID NO: 797693 - RNA, 19 nt, Homo sapiens
  misc_RNA (1)...(19): siRNA sense strand
gccgcacacugcacaccuu

SEQ ID NO: 797694 - RNA, 19 nt, Homo sapiens
  misc_RNA (1)...(19): siRNA sense strand
guuugcagacuucuuugaa

SEQ ID NO: 797695 - RNA, 19 nt, Homo sapiens
  misc_RNA (1)...(19): siRNA sense strand
cuaggacguuccaauccau

SEQ ID NO: 797696 - RNA, 19 nt, Homo sapiens
  misc_RNA (1)...(19): siRNA sense strand
gauaagaaguccaagaaca

SEQ ID NO: 797697 - RNA, 19 nt, Homo sapiens
  misc_RNA (1)...(19): siRNA sense strand
gaacaaacgaggagucuug

SEQ ID NO: 797698 - RNA, 19 nt, Homo sapiens
  misc_RNA (1)...(19): siRNA sense strand
ucaaugaacucugcaagga

SEQ ID NO: 797699 - RNA, 19 nt, Homo sapiens
  misc_RNA (1)...(19): siRNA sense strand
uuacaucaccugcuucaaa

SEQ ID NO: 797700 - RNA, 19 nt, Homo sapiens
  misc_RNA (1)...(19): siRNA sense strand
aagcaugccaccaauauaa

SEQ ID NO: 797701 - RNA, 19 nt, Homo sapiens
  misc_RNA (1)...(19): siRNA sense strand
caggacagcccacagauga

SEQ ID NO: 797702 - RNA, 19 nt, Homo sapiens
  misc_RNA (1)...(19): siRNA sense strand
ugacgcugcuguuugagaa

SEQ ID NO: 797703 - RNA, 19 nt, Homo sapiens
  misc_RNA (1)...(19): siRNA sense strand
ugugucagguggagccuua

SEQ ID NO: 797704 - RNA, 19 nt, Homo sapiens
  misc_RNA (1)...(19): siRNA sense strand
ccaagcaugccaccaauau

SEQ ID NO: 797705 - RNA, 19 nt, Homo sapiens
  misc_RNA (1)...(19): siRNA sense strand
caagcaugccaccaauaua

SEQ ID NO: 797706 - RNA, 19 nt, Homo sapiens
  misc_RNA (1)...(19): siRNA sense strand
guauacaggcacccucuuu

SEQ ID NO: 797707 - RNA, 19 nt, Homo sapiens
  misc_RNA (1)...(19): siRNA sense strand
ccaauauaaugcguucuug

SEQ ID NO: 797708 - RNA, 19 nt, Homo sapiens
  misc_RNA (1)...(19): siRNA sense strand
gagcacaaacccuucuuca

SEQ ID NO: 797709 - RNA, 19 nt, Homo sapiens
  misc_RNA (1)...(19): siRNA sense strand
ggacaaugaggauaagaag

SEQ ID NO: 797710 - RNA, 19 nt, Homo sapiens
  misc_RNA (1)...(19): siRNA sense strand
cuucagcgaugacccagaa

SEQ ID NO: 797711 - RNA, 19 nt, Homo sapiens
  misc_RNA (1)...(19): siRNA sense strand
ggagaaagucaaugaacuc

SEQ ID NO: 797712 - RNA, 19 nt, Homo sapiens
  misc_RNA (1)...(19): siRNA sense strand
uaagaaguccaagaacaaa

SEQ ID NO: 797713 - RNA, 19 nt, Homo sapiens
  misc_RNA (1)...(19): siRNA sense strand
ccaucaaccuucacucaca

SEQ ID NO: 797714 - RNA, 19 nt, Homo sapiens
  misc_RNA (1)...(19): siRNA sense strand
uggacaaucugauggugaa

SEQ ID NO: 797715 - RNA, 19 nt, Homo sapiens
  misc_RNA (1)...(19): siRNA sense strand
ucaccucccuccuggacaa

SEQ ID NO: 797716 - RNA, 19 nt, Homo sapiens
  misc_RNA (1)...(19): siRNA sense strand
caucaccuccgccagcuuu

SEQ ID NO: 797717 - RNA, 19 nt, Homo sapiens
  misc_RNA (1)...(19): siRNA sense strand
gaggauaagaaguccaaga

SEQ ID NO: 797718 - RNA, 19 nt, Homo sapiens
  misc_RNA (1)...(19): siRNA sense strand
gcaggaacaggagcacaaa

SEQ ID NO: 797719 - RNA, 19 nt, Homo sapiens
  misc_RNA (1)...(19): siRNA sense strand
gcccaagcaugccaccaau

SEQ ID NO: 797720 - RNA, 19 nt, Homo sapiens
  misc_RNA (1)...(19): siRNA sense strand
ccaaccagcccuccaucaa

SEQ ID NO: 797721 - RNA, 19 nt, Homo sapiens
  misc_RNA (1)...(19): siRNA sense strand
gcaugccaccaauauaaug

SEQ ID NO: 797722 - RNA, 19 nt, Homo sapiens
  misc_RNA (1)...(19): siRNA sense strand
ccagggagccauccagauc

SEQ ID NO: 797723 - RNA, 19 nt, Homo sapiens
  misc_RNA (1)...(19): siRNA sense strand
acaaugaggauaagaaguc

SEQ ID NO: 797724 - RNA, 19 nt, Homo sapiens
  misc_RNA (1)...(19): siRNA sense strand
auaagaaguccaagaacaa

SEQ ID NO: 797725 - RNA, 19 nt, Homo sapiens
  misc_RNA (1)...(19): siRNA sense strand
aggauaagaaguccaagaa

SEQ ID NO: 797726 - RNA, 19 nt, Homo sapiens
  misc_RNA (1)...(19): siRNA sense strand
uggagaaagucaaugaacu

SEQ ID NO: 797727 - RNA, 19 nt, Homo sapiens
  misc_RNA (1)...(19): siRNA sense strand
uccugacgcugcuguuuga

SEQ ID NO: 797728 - RNA, 19 nt, Homo sapiens
  misc_RNA (1)...(19): siRNA sense strand
ugcuggagcuggagaaagu

SEQ ID NO: 797729 - RNA, 19 nt, Homo sapiens
  misc_RNA (1)...(19): siRNA sense strand
auccagaacacacagguua

SEQ ID NO: 797730 - RNA, 19 nt, Homo sapiens
  misc_RNA (1)...(19): siRNA sense strand
ggcaacaucgccaugacaa

SEQ ID NO: 797731 - RNA, 19 nt, Homo sapiens
  misc_RNA (1)...(19): siRNA sense strand
ugacaagcgagcuguauac

SEQ ID NO: 797732 - RNA, 19 nt, Homo sapiens
  misc_RNA (1)...(19): siRNA sense strand
ccucccuccuggacaauga

SEQ ID NO: 797733 - RNA, 19 nt, Homo sapiens
  misc_RNA (1)...(19): siRNA sense strand
uacaucaccugcuucaaaa

SEQ ID NO: 797734 - RNA, 19 nt, Homo sapiens
  misc_RNA (1)...(19): siRNA sense strand
caaccagcccuccaucaac

SEQ ID NO: 797735 - RNA, 19 nt, Homo sapiens
  misc_RNA (1)...(19): siRNA sense strand
ggagcacaaacccuucuuc

SEQ ID NO: 797736 - RNA, 19 nt, Homo sapiens
  misc_RNA (1)...(19): siRNA sense strand
gauccagaacacacagguu

SEQ ID NO: 797737 - RNA, 19 nt, Homo sapiens
  misc_RNA (1)...(19): siRNA sense strand
gagaaagucaaugaacucu

SEQ ID NO: 797738 - RNA, 19 nt, Homo sapiens
  misc_RNA (1)...(19): siRNA sense strand
ggagcuggagaaagucaau

SEQ ID NO: 797739 - RNA, 19 nt, Homo sapiens
  misc_RNA (1)...(19): siRNA sense strand
gaaguccaagaacaaacga

SEQ ID NO: 797740 - RNA, 19 nt, Homo sapiens
  misc_RNA (1)...(19): siRNA sense strand
gcuggagaaagucaaugaa

SEQ ID NO: 797741 - RNA, 19 nt, Homo sapiens
  misc_RNA (1)...(19): siRNA sense strand
ggauaagaaguccaagaac

SEQ ID NO: 797742 - RNA, 19 nt, Homo sapiens
  misc_RNA (1)...(19): siRNA sense strand
cugacaagcgagcuguaua

SEQ ID NO: 797743 - RNA, 19 nt, Homo sapiens
  misc_RNA (1)...(19): siRNA sense strand
gagccauccagauccagaa

SEQ ID NO: 797744 - RNA, 19 nt, Homo sapiens
  misc_RNA (1)...(19): siRNA sense strand
gcugacaagcgagcuguau

SEQ ID NO: 797745 - RNA, 19 nt, Homo sapiens
  misc_RNA (1)...(19): siRNA sense strand
ccaggacagcccacagaug

SEQ ID NO: 797746 - RNA, 19 nt, Homo sapiens
  misc_RNA (1)...(19): siRNA sense strand
gcuccugacgcugcuguuu

SEQ ID NO: 797747 - RNA, 19 nt, Homo sapiens
  misc_RNA (1)...(19): siRNA sense strand
gaaacagagucaaauguaa

SEQ ID NO: 797748 - RNA, 19 nt, Homo sapiens
  misc_RNA (1)...(19): siRNA sense strand
gaaccguccucaaaugaaa

SEQ ID NO: 797749 - RNA, 19 nt, Homo sapiens
  misc_RNA (1)...(19): siRNA sense strand
gaacucuggacuuaacuua

SEQ ID NO: 797750 - RNA, 19 nt, Homo sapiens
  misc_RNA (1)...(19): siRNA sense strand
gaagagaugggaaaccaaa

SEQ ID NO: 797751 - RNA, 19 nt, Homo sapiens
  misc_RNA (1)...(19): siRNA sense strand
gcaaagaagagaugggaaa

SEQ ID NO: 797752 - RNA, 19 nt, Homo sapiens
  misc_RNA (1)...(19): siRNA sense strand
ggagaacucuggacuuaac

SEQ ID NO: 797753 - RNA, 19 nt, Homo sapiens
  misc_RNA (1)...(19): siRNA sense strand
caaaugaaacccaguggaa

SEQ ID NO: 797754 - RNA, 19 nt, Homo sapiens
  misc_RNA (1)...(19): siRNA sense strand
ugaaacagagucaaaugua

SEQ ID NO: 797755 - RNA, 19 nt, Homo sapiens
  misc_RNA (1)...(19): siRNA sense strand
guggaggaguggaauauug

SEQ ID NO: 797756 - RNA, 19 nt, Homo sapiens
  misc_RNA (1)...(19): siRNA sense strand
aaaaggagguugaaaauuc

SEQ ID NO: 797757 - RNA, 19 nt, Homo sapiens
  misc_RNA (1)...(19): siRNA sense strand
uuggagaacucuggacuua

SEQ ID NO: 797758 - RNA, 19 nt, Homo sapiens
  misc_RNA (1)...(19): siRNA sense strand
gaagaaaacgcuccagaaa

SEQ ID NO: 797759 - RNA, 19 nt, Homo sapiens
  misc_RNA (1)...(19): siRNA sense strand
uggagucaaugauagauuu

SEQ ID NO: 797760 - RNA, 19 nt, Homo sapiens
  misc_RNA (1)...(19): siRNA sense strand
gauuugacccgccuguuaa

SEQ ID NO: 797761 - RNA, 19 nt, Homo sapiens
  misc_RNA (1)...(19): siRNA sense strand
guaaaugccuaugaagagu

SEQ ID NO: 797762 - RNA, 19 nt, Homo sapiens
  misc_RNA (1)...(19): siRNA sense strand
ucauagauuucucaacaga

SEQ ID NO: 797763 - RNA, 19 nt, Homo sapiens
  misc_RNA (1)...(19): siRNA sense strand
aaacugaaacagagucaaa

SEQ ID NO: 797764 - RNA, 19 nt, Homo sapiens
  misc_RNA (1)...(19): siRNA sense strand
caaauguaaaugccuauga

SEQ ID NO: 797765 - RNA, 19 nt, Homo sapiens
  misc_RNA (1)...(19): siRNA sense strand
ggaguggaauauugagaag

SEQ ID NO: 797766 - RNA, 19 nt, Homo sapiens
  misc_RNA (1)...(19): siRNA sense strand
gaagauaaagaggaugaga

SEQ ID NO: 797767 - RNA, 19 nt, Homo sapiens
  misc_RNA (1)...(19): siRNA sense strand
agaguguccuucuggaauu

SEQ ID NO: 797768 - RNA, 19 nt, Homo sapiens
  misc_RNA (1)...(19): siRNA sense strand
agauuugacccgccuguua

SEQ ID NO: 797769 - RNA, 19 nt, Homo sapiens
  misc_RNA (1)...(19): siRNA sense strand
acaggaagauaaagaggau

SEQ ID NO: 797770 - RNA, 19 nt, Homo sapiens
  misc_RNA (1)...(19): siRNA sense strand
agaaaacgcuccagaaaag

SEQ ID NO: 797771 - RNA, 19 nt, Homo sapiens
  misc_RNA (1)...(19): siRNA sense strand
auagauuucucaacagaug

SEQ ID NO: 797772 - RNA, 19 nt, Homo sapiens
  misc_RNA (1)...(19): siRNA sense strand
gaagcuacguuggagaacu

SEQ ID NO: 797773 - RNA, 19 nt, Homo sapiens
  misc_RNA (1)...(19): siRNA sense strand
ugagaaggcugaggaacuc

SEQ ID NO: 797774 - RNA, 19 nt, Homo sapiens
  misc_RNA (1)...(19): siRNA sense strand
gagaagucaggccuugaaa

SEQ ID NO: 797775 - RNA, 19 nt, Homo sapiens
  misc_RNA (1)...(19): siRNA sense strand
ccuccuggccuaaaugaaa

SEQ ID NO: 797776 - RNA, 19 nt, Homo sapiens
  misc_RNA (1)...(19): siRNA sense strand
auagugaaccguccucaaa

SEQ ID NO: 797777 - RNA, 19 nt, Homo sapiens
  misc_RNA (1)...(19): siRNA sense strand
aagcacaaccucaagauuc

SEQ ID NO: 797778 - RNA, 19 nt, Homo sapiens
  misc_RNA (1)...(19): siRNA sense strand
gugaaccguccucaaauga

SEQ ID NO: 797779 - RNA, 19 nt, Homo sapiens
  misc_RNA (1)...(19): siRNA sense strand
gaaaagcacaaccucaaga

SEQ ID NO: 797780 - RNA, 19 nt, Homo sapiens
  misc_RNA (1)...(19): siRNA sense strand
aagaagagaugggaaacca

SEQ ID NO: 797781 - RNA, 19 nt, Homo sapiens
  misc_RNA (1)...(19): siRNA sense strand
ggaacucagcaaccagcua

SEQ ID NO: 797782 - RNA, 19 nt, Homo sapiens
  misc_RNA (1)...(19): siRNA sense strand
cucgagagcuugguguaaa

SEQ ID NO: 797783 - RNA, 19 nt, Homo sapiens
  misc_RNA (1)...(19): siRNA sense strand
acucuggacuuaacuuaca

SEQ ID NO: 797784 - RNA, 19 nt, Homo sapiens
  misc_RNA (1)...(19): siRNA sense strand
ugagaagucaggccuugaa

SEQ ID NO: 797785 - RNA, 19 nt, Homo sapiens
  misc_RNA (1)...(19): siRNA sense strand
agugaaccguccucaaaug

SEQ ID NO: 797786 - RNA, 19 nt, Homo sapiens
  misc_RNA (1)...(19): siRNA sense strand
gcuaccuccuggccuaaau

SEQ ID NO: 797787 - RNA, 19 nt, Homo sapiens
  misc_RNA (1)...(19): siRNA sense strand
gacuuaacuuacaggaaga

SEQ ID NO: 797788 - RNA, 19 nt, Homo sapiens
  misc_RNA (1)...(19): siRNA sense strand
cuucuggaauucccauaga

SEQ ID NO: 797789 - RNA, 19 nt, Homo sapiens
  misc_RNA (1)...(19): siRNA sense strand
ggagucaaugauagauuug

SEQ ID NO: 797790 - RNA, 19 nt, Homo sapiens
  misc_RNA (1)...(19): siRNA sense strand
ucuggaauucccauagaua

SEQ ID NO: 797791 - RNA, 19 nt, Homo sapiens
  misc_RNA (1)...(19): siRNA sense strand
aaaugaaacccaguggaaa

SEQ ID NO: 797792 - RNA, 19 nt, Homo sapiens
  misc_RNA (1)...(19): siRNA sense strand
gucaaacucggaagaugaa

SEQ ID NO: 797793 - RNA, 19 nt, Homo sapiens
  misc_RNA (1)...(19): siRNA sense strand
gaagucaggccuugaaaag

SEQ ID NO: 797794 - RNA, 19 nt, Homo sapiens
  misc_RNA (1)...(19): siRNA sense strand
agcacaaccucaagauuca

SEQ ID NO: 797795 - RNA, 19 nt, Homo sapiens
  misc_RNA (1)...(19): siRNA sense strand
aaaugccuaugaagagugu

SEQ ID NO: 797796 - RNA, 19 nt, Homo sapiens
  misc_RNA (1)...(19): siRNA sense strand
agucaaacucggaagauga

SEQ ID NO: 797797 - RNA, 19 nt, Homo sapiens
  misc_RNA (1)...(19): siRNA sense strand
aaagcacaaccucaagauu

SEQ ID NO: 797798 - RNA, 19 nt, Homo sapiens
  misc_RNA (1)...(19): siRNA sense strand
gaguguccuucuggaauuc

SEQ ID NO: 797799 - RNA, 19 nt, Homo sapiens
  misc_RNA (1)...(19): siRNA sense strand
uguaaaugccuaugaagag

SEQ ID NO: 797800 - RNA, 19 nt, Homo sapiens
  misc_RNA (1)...(19): siRNA sense strand
aaagcaacaugggauacau

SEQ ID NO: 797801 - RNA, 19 nt, Homo sapiens
  misc_RNA (1)...(19): siRNA sense strand
gaggaguggaauauugaga

SEQ ID NO: 797802 - RNA, 19 nt, Homo sapiens
  misc_RNA (1)...(19): siRNA sense strand
uggaggaguggaauauuga

SEQ ID NO: 797803 - RNA, 19 nt, Homo sapiens
  misc_RNA (1)...(19): siRNA sense strand
ugaaccguccucaaaugaa

SEQ ID NO: 797804 - RNA, 19 nt, Homo sapiens
  misc_RNA (1)...(19): siRNA sense strand
gcuguggaggaguggaaua

SEQ ID NO: 797805 - RNA, 19 nt, Homo sapiens
  misc_RNA (1)...(19): siRNA sense strand
aagaugaagcuacguugga

SEQ ID NO: 797806 - RNA, 19 nt, Homo sapiens
  misc_RNA (1)...(19): siRNA sense strand
auaaagaggaugagagcau

SEQ ID NO: 797807 - RNA, 19 nt, Homo sapiens
  misc_RNA (1)...(19): siRNA sense strand
ccaaaagcaacaugggaua

SEQ ID NO: 797808 - RNA, 19 nt, Homo sapiens
  misc_RNA (1)...(19): siRNA sense strand
gaaggaaacucaaauucuu

SEQ ID NO: 797809 - RNA, 19 nt, Homo sapiens
  misc_RNA (1)...(19): siRNA sense strand
cagcagagcuuuaacaaau

SEQ ID NO: 797810 - RNA, 19 nt, Homo sapiens
  misc_RNA (1)...(19): siRNA sense strand
ggaauucacuucuggaugu

SEQ ID NO: 797811 - RNA, 19 nt, Homo sapiens
  misc_RNA (1)...(19): siRNA sense strand
gcagagcuuuaacaaauuu

SEQ ID NO: 797812 - RNA, 19 nt, Homo sapiens
  misc_RNA (1)...(19): siRNA sense strand
aauaguagcuucucuguug

SEQ ID NO: 797813 - RNA, 19 nt, Homo sapiens
  misc_RNA (1)...(19): siRNA sense strand
caacagauaagcuuucuuu

SEQ ID NO: 797814 - RNA, 19 nt, Homo sapiens
  misc_RNA (1)...(19): siRNA sense strand
uagcagaacuggaaggaaa

SEQ ID NO: 797815 - RNA, 19 nt, Homo sapiens
  misc_RNA (1)...(19): siRNA sense strand
gaaagcaccuagugauucu

SEQ ID NO: 797816 - RNA, 19 nt, Homo sapiens
  misc_RNA (1)...(19): siRNA sense strand
gggauuauaugcuucaguu

SEQ ID NO: 797817 - RNA, 19 nt, Homo sapiens
  misc_RNA (1)...(19): siRNA sense strand
gaagaucucuaugccaaau

SEQ ID NO: 797818 - RNA, 19 nt, Homo sapiens
  misc_RNA (1)...(19): siRNA sense strand
ucaccaagagcuacaauua

SEQ ID NO: 797819 - RNA, 19 nt, Homo sapiens
  misc_RNA (1)...(19): siRNA sense strand
ggacaccggugcuaugcaa

SEQ ID NO: 797820 - RNA, 19 nt, Homo sapiens
  misc_RNA (1)...(19): siRNA sense strand
caaccugacuggaaacaga

SEQ ID NO: 797821 - RNA, 19 nt, Homo sapiens
  misc_RNA (1)...(19): siRNA sense strand
ggaaauagcaacagauaag

SEQ ID NO: 797822 - RNA, 19 nt, Homo sapiens
  misc_RNA (1)...(19): siRNA sense strand
agaagacgcuggagaucua

SEQ ID NO: 797823 - RNA, 19 nt, Homo sapiens
  misc_RNA (1)...(19): siRNA sense strand
ggaagacuguacugggaaa

SEQ ID NO: 797824 - RNA, 19 nt, Homo sapiens
  misc_RNA (1)...(19): siRNA sense strand
ggaaacagaauauacaauc

SEQ ID NO: 797825 - RNA, 19 nt, Homo sapiens
  misc_RNA (1)...(19): siRNA sense strand
gacaucaccucuucacugu

SEQ ID NO: 797826 - RNA, 19 nt, Homo sapiens
  misc_RNA (1)...(19): siRNA sense strand
gcuaugguauuaugggauu

SEQ ID NO: 797827 - RNA, 19 nt, Homo sapiens
  misc_RNA (1)...(19): siRNA sense strand
ccagagacaauacaacuaa

SEQ ID NO: 797828 - RNA, 19 nt, Homo sapiens
  misc_RNA (1)...(19): siRNA sense strand
cagagacaaugaucaaaug

SEQ ID NO: 797829 - RNA, 19 nt, Homo sapiens
  misc_RNA (1)...(19): siRNA sense strand
caggagaacuggagcuaga

SEQ ID NO: 797830 - RNA, 19 nt, Homo sapiens
  misc_RNA (1)...(19): siRNA sense strand
cuauaucgcucaccagaga

SEQ ID NO: 797831 - RNA, 19 nt, Homo sapiens
  misc_RNA (1)...(19): siRNA sense strand
ggaaggaaacucaaauucu

SEQ ID NO: 797832 - RNA, 19 nt, Homo sapiens
  misc_RNA (1)...(19): siRNA sense strand
caucaccucuucacuguca

SEQ ID NO: 797833 - RNA, 19 nt, Homo sapiens
  misc_RNA (1)...(19): siRNA sense strand
agaucucuaugccaaauua

SEQ ID NO: 797834 - RNA, 19 nt, Homo sapiens
  misc_RNA (1)...(19): siRNA sense strand
gaaguugugcacagauauu

SEQ ID NO: 797835 - RNA, 19 nt, Homo sapiens
  misc_RNA (1)...(19): siRNA sense strand
ugacguguauguacucaug

SEQ ID NO: 797836 - RNA, 19 nt, Homo sapiens
  misc_RNA (1)...(19): siRNA sense strand
gaacugguggucuucaaug

SEQ ID NO: 797837 - RNA, 19 nt, Homo sapiens
  misc_RNA (1)...(19): siRNA sense strand
aaacaccagugaccauaga

SEQ ID NO: 797838 - RNA, 19 nt, Homo sapiens
  misc_RNA (1)...(19): siRNA sense strand
agacauaacaguagcagaa

SEQ ID NO: 797839 - RNA, 19 nt, Homo sapiens
  misc_RNA (1)...(19): siRNA sense strand
cauggaguauucagagaaa

SEQ ID NO: 797840 - RNA, 19 nt, Homo sapiens
  misc_RNA (1)...(19): siRNA sense strand
ugugaaauguguuuacuuc

SEQ ID NO: 797841 - RNA, 19 nt, Homo sapiens
  misc_RNA (1)...(19): siRNA sense strand
caacagcacagaaaguuca

SEQ ID NO: 797842 - RNA, 19 nt, Homo sapiens
  misc_RNA (1)...(19): siRNA sense strand
gcaggcaacagcacagaaa

SEQ ID NO: 797843 - RNA, 19 nt, Homo sapiens
  misc_RNA (1)...(19): siRNA sense strand
uaaagaagacgcuggagau

SEQ ID NO: 797844 - RNA, 19 nt, Homo sapiens
  misc_RNA (1)...(19): siRNA sense strand
uuacgucaaccucuucuua

SEQ ID NO: 797845 - RNA, 19 nt, Homo sapiens
  misc_RNA (1)...(19): siRNA sense strand
gaucaaauggacuagagaa

SEQ ID NO: 797846 - RNA, 19 nt, Homo sapiens
  misc_RNA (1)...(19): siRNA sense strand
ggucuucaaugacaaaguc

SEQ ID NO: 797847 - RNA, 19 nt, Homo sapiens
  misc_RNA (1)...(19): siRNA sense strand
gaaacagaauauacaaucc

SEQ ID NO: 797848 - RNA, 19 nt, Homo sapiens
  misc_RNA (1)...(19): siRNA sense strand
caucuuaccuggugugacu

SEQ ID NO: 797849 - RNA, 19 nt, Homo sapiens
  misc_RNA (1)...(19): siRNA sense strand
gagcuacaauuacgucaac

SEQ ID NO: 797850 - RNA, 19 nt, Homo sapiens
  misc_RNA (1)...(19): siRNA sense strand
acaauuacgucaaccucuu

SEQ ID NO: 797851 - RNA, 19 nt, Homo sapiens
  misc_RNA (1)...(19): siRNA sense strand
cagagacaauacaacuaaa

SEQ ID NO: 797852 - RNA, 19 nt, Homo sapiens
  misc_RNA (1)...(19): siRNA sense strand
cagcuuugguacuuuguga

SEQ ID NO: 797853 - RNA, 19 nt, Homo sapiens
  misc_RNA (1)...(19): siRNA sense strand
caucauguuugaagagcuu

SEQ ID NO: 797854 - RNA, 19 nt, Homo sapiens
  misc_RNA (1)...(19): siRNA sense strand
gguauuaugggauuauaug

SEQ ID NO: 797855 - RNA, 19 nt, Homo sapiens
  misc_RNA (1)...(19): siRNA sense strand
cacaaugagugcccaacaa

SEQ ID NO: 797856 - RNA, 19 nt, Homo sapiens
  misc_RNA (1)...(19): siRNA sense strand
gaauucacuucuggauguu

SEQ ID NO: 797857 - RNA, 19 nt, Homo sapiens
  misc_RNA (1)...(19): siRNA sense strand
gaauauacaauccgaacuc

SEQ ID NO: 797858 - RNA, 19 nt, Homo sapiens
  misc_RNA (1)...(19): siRNA sense strand
cugcagacaucaccucuuc

SEQ ID NO: 797859 - RNA, 19 nt, Homo sapiens
  misc_RNA (1)...(19): siRNA sense strand
gaacuggaaggaaacucaa

SEQ ID NO: 797860 - RNA, 19 nt, Homo sapiens
  misc_RNA (1)...(19): siRNA sense strand
gauuauaugcuucaguugu

SEQ ID NO: 797861 - RNA, 19 nt, Homo sapiens
  misc_RNA (1)...(19): siRNA sense strand
gaggacaucuaugcucaca

SEQ ID NO: 797862 - RNA, 19 nt, Homo sapiens
  misc_RNA (1)...(19): siRNA sense strand
ccagagacaaugaucaaau

SEQ ID NO: 797863 - RNA, 19 nt, Homo sapiens
  misc_RNA (1)...(19): siRNA sense strand
gugaaagcaccuagugauu

SEQ ID NO: 797864 - RNA, 19 nt, Homo sapiens
  misc_RNA (1)...(19): siRNA sense strand
aaucggaaauagcaacaga

SEQ ID NO: 797865 - RNA, 19 nt, Homo sapiens
  misc_RNA (1)...(19): siRNA sense strand
aaagaagacauaacaguag

SEQ ID NO: 797866 - RNA, 19 nt, Homo sapiens
  misc_RNA (1)...(19): siRNA sense strand
ccaggucauucuuguguuc

SEQ ID NO: 797867 - RNA, 19 nt, Homo sapiens
  misc_RNA (1)...(19): siRNA sense strand
acaaugaucaaauggacua

SEQ ID NO: 797868 - RNA, 19 nt, Homo sapiens
  misc_RNA (1)...(19): siRNA sense strand
uugaaguugugcacagaua

SEQ ID NO: 797869 - RNA, 19 nt, Homo sapiens
  misc_RNA (1)...(19): siRNA sense strand
caccggugcuaugcaauuu

SEQ ID NO: 797870 - RNA, 19 nt, Homo sapiens
  misc_RNA (1)...(19): siRNA sense strand
gcccagcuuugguacuuug

SEQ ID NO: 797871 - RNA, 19 nt, Homo sapiens
  misc_RNA (1)...(19): siRNA sense strand
ucgaaagaauaucgcuaaa

SEQ ID NO: 797872 - RNA, 19 nt, Homo sapiens
  misc_RNA (1)...(19): siRNA sense strand
ugaaagcaccuagugauuc

SEQ ID NO: 797873 - RNA, 19 nt, Homo sapiens
  misc_RNA (1)...(19): siRNA sense strand
ggagaagccuauuuucaca

SEQ ID NO: 797874 - RNA, 19 nt, Homo sapiens
  misc_RNA (1)...(19): siRNA sense strand
gauucuaacucaaaaccua

SEQ ID NO: 797875 - RNA, 19 nt, Homo sapiens
  misc_RNA (1)...(19): siRNA sense strand
ucggaaauagcaacagaua

SEQ ID NO: 797876 - RNA, 19 nt, Homo sapiens
  misc_RNA (1)...(19): siRNA sense strand
cgccgugacugacguguau

SEQ ID NO: 797877 - RNA, 19 nt, Homo sapiens
  misc_RNA (1)...(19): siRNA sense strand
gaacuggagcuagaagaag

SEQ ID NO: 797878 - RNA, 19 nt, Homo sapiens
  misc_RNA (1)...(19): siRNA sense strand
ugacugacguguauguacu

SEQ ID NO: 797879 - RNA, 19 nt, Homo sapiens
  misc_RNA (1)...(19): siRNA sense strand
uauacaauccgaacucuca

SEQ ID NO: 797880 - RNA, 19 nt, Homo sapiens
  misc_RNA (1)...(19): siRNA sense strand
acaaugagugcccaacaaa

SEQ ID NO: 797881 - RNA, 19 nt, Homo sapiens
  misc_RNA (1)...(19): siRNA sense strand
ggaaaagcuucaagaacau

SEQ ID NO: 797882 - RNA, 19 nt, Homo sapiens
  misc_RNA (1)...(19): siRNA sense strand
cuggcuggcuaugguauua

SEQ ID NO: 797883 - RNA, 19 nt, Homo sapiens
  misc_RNA (1)...(19): siRNA sense strand
guucucaaccugacuggaa

SEQ ID NO: 797884 - RNA, 19 nt, Homo sapiens
  misc_RNA (1)...(19): siRNA sense strand
cuagugauucuaacucaaa

SEQ ID NO: 797885 - RNA, 19 nt, Homo sapiens
  misc_RNA (1)...(19): siRNA sense strand
ggcaacagcacagaaaguu

SEQ ID NO: 797886 - RNA, 19 nt, Homo sapiens
  misc_RNA (1)...(19): siRNA sense strand
gaguauucagagaaacuua

SEQ ID NO: 797887 - RNA, 19 nt, Homo sapiens
  misc_RNA (1)...(19): siRNA sense strand
gguacuuugugaaaugugu

SEQ ID NO: 797888 - RNA, 19 nt, Homo sapiens
  misc_RNA (1)...(19): siRNA sense strand
ugaugguccucauucaguu

SEQ ID NO: 797889 - RNA, 19 nt, Homo sapiens
  misc_RNA (1)...(19): siRNA sense strand
gagacaaugaucaaaugga

SEQ ID NO: 797890 - RNA, 19 nt, Homo sapiens
  misc_RNA (1)...(19): siRNA sense strand
caucauugucuucggcuuu

SEQ ID NO: 797891 - RNA, 19 nt, Homo sapiens
  misc_RNA (1)...(19): siRNA sense strand
ggacggacacaacuuugag

SEQ ID NO: 797892 - RNA, 19 nt, Homo sapiens
  misc_RNA (1)...(19): siRNA sense strand
ugacuggaaacagaauaua

SEQ ID NO: 797893 - RNA, 19 nt, Homo sapiens
  misc_RNA (1)...(19): siRNA sense strand
gcaacagcacagaaaguuc

SEQ ID NO: 797894 - RNA, 19 nt, Homo sapiens
  misc_RNA (1)...(19): siRNA sense strand
gaucuaugugcccaucaaa

SEQ ID NO: 797895 - RNA, 19 nt, Homo sapiens
  misc_RNA (1)...(19): siRNA sense strand
gaugguccucauucaguuu

SEQ ID NO: 797896 - RNA, 19 nt, Homo sapiens
  misc_RNA (1)...(19): siRNA sense strand
gaucgaauuuugaaguugu

SEQ ID NO: 797897 - RNA, 19 nt, Homo sapiens
  misc_RNA (1)...(19): siRNA sense strand
acuguggacuucaucauca

SEQ ID NO: 797898 - RNA, 19 nt, Homo sapiens
  misc_RNA (1)...(19): siRNA sense strand
caccagagacaaugaucaa

SEQ ID NO: 797899 - RNA, 19 nt, Homo sapiens
  misc_RNA (1)...(19): siRNA sense strand
ggaacugguggucuucaau

SEQ ID NO: 797900 - RNA, 19 nt, Homo sapiens
  misc_RNA (1)...(19): siRNA sense strand
ccagcagagcuuuaacaaa

SEQ ID NO: 797901 - RNA, 19 nt, Homo sapiens
  misc_RNA (1)...(19): siRNA sense strand
aacuggagcuagaagaaga

SEQ ID NO: 797902 - RNA, 19 nt, Homo sapiens
  misc_RNA (1)...(19): siRNA sense strand
gagaacuggagcuagaaga

SEQ ID NO: 797903 - RNA, 19 nt, Homo sapiens
  misc_RNA (1)...(19): siRNA sense strand
gacaggagaacuggagcua

SEQ ID NO: 797904 - RNA, 19 nt, Homo sapiens
  misc_RNA (1)...(19): siRNA sense strand
ugggaaauuuguccgugaa

SEQ ID NO: 797905 - RNA, 19 nt, Homo sapiens
  misc_RNA (1)...(19): siRNA sense strand
ucaguuguccuugugauug

SEQ ID NO: 797906 - RNA, 19 nt, Homo sapiens
  misc_RNA (1)...(19): siRNA sense strand
guuccuggcuggcuauggu

SEQ ID NO: 797907 - RNA, 19 nt, Homo sapiens
  misc_RNA (1)...(19): siRNA sense strand
ccaauaguagcuucucugu

SEQ ID NO: 797908 - RNA, 19 nt, Homo sapiens
  misc_RNA (1)...(19): siRNA sense strand
gaaggaagauaaccacaua

SEQ ID NO: 797909 - RNA, 19 nt, Homo sapiens
  misc_RNA (1)...(19): siRNA sense strand
gaagauaaccacauauuug

SEQ ID NO: 797910 - RNA, 19 nt, Homo sapiens
  misc_RNA (1)...(19): siRNA sense strand
gcagauacuuucagguuga

SEQ ID NO: 797911 - RNA, 19 nt, Homo sapiens
  misc_RNA (1)...(19): siRNA sense strand
ggagaaugaugauuggaaa

SEQ ID NO: 797912 - RNA, 19 nt, Homo sapiens
  misc_RNA (1)...(19): siRNA sense strand
cuaaagagcaacagaauaa

SEQ ID NO: 797913 - RNA, 19 nt, Homo sapiens
  misc_RNA (1)...(19): siRNA sense strand
gaaaagagauagaaacuca

SEQ ID NO: 797914 - RNA, 19 nt, Homo sapiens
  misc_RNA (1)...(19): siRNA sense strand
gugcaaggauggcagauuu

SEQ ID NO: 797915 - RNA, 19 nt, Homo sapiens
  misc_RNA (1)...(19): siRNA sense strand
gaacaacguuugggaaagu

SEQ ID NO: 797916 - RNA, 19 nt, Homo sapiens
  misc_RNA (1)...(19): siRNA sense strand
cagaaggaaucaaagagua

SEQ ID NO: 797917 - RNA, 19 nt, Homo sapiens
  misc_RNA (1)...(19): siRNA sense strand
ccagccaguugaugaauua

SEQ ID NO: 797918 - RNA, 19 nt, Homo sapiens
  misc_RNA (1)...(19): siRNA sense strand
gacugaaugugucaaauuu

SEQ ID NO: 797919 - RNA, 19 nt, Homo sapiens
  misc_RNA (1)...(19): siRNA sense strand
aaacuuaagcucacacaua

SEQ ID NO: 797920 - RNA, 19 nt, Homo sapiens
  misc_RNA (1)...(19): siRNA sense strand
ggaagauaaccacauauuu

SEQ ID NO: 797921 - RNA, 19 nt, Homo sapiens
  misc_RNA (1)...(19): siRNA sense strand
gguuugagauacauaauga

SEQ ID NO: 797922 - RNA, 19 nt, Homo sapiens
  misc_RNA (1)...(19): siRNA sense strand
ugacuaugcuguccugaaa

SEQ ID NO: 797923 - RNA, 19 nt, Homo sapiens
  misc_RNA (1)...(19): siRNA sense strand
ccaagagccacaacuaaua

SEQ ID NO: 797924 - RNA, 19 nt, Homo sapiens
  misc_RNA (1)...(19): siRNA sense strand
guacauaaaccuuggaaug

SEQ ID NO: 797925 - RNA, 19 nt, Homo sapiens
  misc_RNA (1)...(19): siRNA sense strand
cagaauaauugcaguacuu

SEQ ID NO: 797926 - RNA, 19 nt, Homo sapiens
  misc_RNA (1)...(19): siRNA sense strand
gaauccauccuccuugaua

SEQ ID NO: 797927 - RNA, 19 nt, Homo sapiens
  misc_RNA (1)...(19): siRNA sense strand
gcagauuucuuuccuuucu

SEQ ID NO: 797928 - RNA, 19 nt, Homo sapiens
  misc_RNA (1)...(19): siRNA sense strand
gcacagaaggaaucaaaga

SEQ ID NO: 797929 - RNA, 19 nt, Homo sapiens
  misc_RNA (1)...(19): siRNA sense strand
ugacucaguuggguacuua

SEQ ID NO: 797930 - RNA, 19 nt, Homo sapiens
  misc_RNA (1)...(19): siRNA sense strand
gaaagcacccagccaguug

SEQ ID NO: 797931 - RNA, 19 nt, Homo sapiens
  misc_RNA (1)...(19): siRNA sense strand
guaagcagaaggaagauaa

SEQ ID NO: 797932 - RNA, 19 nt, Homo sapiens
  misc_RNA (1)...(19): siRNA sense strand
caaggaaacaaacuacuuu

SEQ ID NO: 797933 - RNA, 19 nt, Homo sapiens
  misc_RNA (1)...(19): siRNA sense strand
ggacaaagcaucgacugaa

SEQ ID NO: 797934 - RNA, 19 nt, Homo sapiens
  misc_RNA (1)...(19): siRNA sense strand
ggagaaaccaagauaugaa

SEQ ID NO: 797935 - RNA, 19 nt, Homo sapiens
  misc_RNA (1)...(19): siRNA sense strand
gaauagagccaaguaagug

SEQ ID NO: 797936 - RNA, 19 nt, Homo sapiens
  misc_RNA (1)...(19): siRNA sense strand
cuuaguggguugauacaua

SEQ ID NO: 797937 - RNA, 19 nt, Homo sapiens
  misc_RNA (1)...(19): siRNA sense strand
gacaaagcaucgacugaau

SEQ ID NO: 797938 - RNA, 19 nt, Homo sapiens
  misc_RNA (1)...(19): siRNA sense strand
gagaaaccaagauaugaaa

SEQ ID NO: 797939 - RNA, 19 nt, Homo sapiens
  misc_RNA (1)...(19): siRNA sense strand
gcugcuggcuuugcuuaua

SEQ ID NO: 797940 - RNA, 19 nt, Homo sapiens
  misc_RNA (1)...(19): siRNA sense strand
gaaggaaaauggacaacaa

SEQ ID NO: 797941 - RNA, 19 nt, Homo sapiens
  misc_RNA (1)...(19): siRNA sense strand
gaacaaaucguggcucagu

SEQ ID NO: 797942 - RNA, 19 nt, Homo sapiens
  misc_RNA (1)...(19): siRNA sense strand
ggaaucaaagaguacauaa

SEQ ID NO: 797943 - RNA, 19 nt, Homo sapiens
  misc_RNA (1)...(19): siRNA sense strand
guacuucucuaaugaggau

SEQ ID NO: 797944 - RNA, 19 nt, Homo sapiens
  misc_RNA (1)...(19): siRNA sense strand
acaaguaccuauggaacua

SEQ ID NO: 797945 - RNA, 19 nt, Homo sapiens
  misc_RNA (1)...(19): siRNA sense strand
guccauauguauacucaaa

SEQ ID NO: 797946 - RNA, 19 nt, Homo sapiens
  misc_RNA (1)...(19): siRNA sense strand
caacagaauaauugcagua

SEQ ID NO: 797947 - RNA, 19 nt, Homo sapiens
  misc_RNA (1)...(19): siRNA sense strand
gcacccagccaguugauga

SEQ ID NO: 797948 - RNA, 19 nt, Homo sapiens
  misc_RNA (1)...(19): siRNA sense strand
uggcagauuucuuuccuuu

SEQ ID NO: 797949 - RNA, 19 nt, Homo sapiens
  misc_RNA (1)...(19): siRNA sense strand
gccaguugaugaauuagaa

SEQ ID NO: 797950 - RNA, 19 nt, Homo sapiens
  misc_RNA (1)...(19): siRNA sense strand
gcucaaagauuccauucac

SEQ ID NO: 797951 - RNA, 19 nt, Homo sapiens
  misc_RNA (1)...(19): siRNA sense strand
ccauauguauacucaaaga

SEQ ID NO: 797952 - RNA, 19 nt, Homo sapiens
  misc_RNA (1)...(19): siRNA sense strand
aaaguaagcagaaggaaga

SEQ ID NO: 797953 - RNA, 19 nt, Homo sapiens
  misc_RNA (1)...(19): siRNA sense strand
ggaauagagccaaguaagu

SEQ ID NO: 797954 - RNA, 19 nt, Homo sapiens
  misc_RNA (1)...(19): siRNA sense strand
gaugagugaugaggacuug

SEQ ID NO: 797955 - RNA, 19 nt, Homo sapiens
  misc_RNA (1)...(19): siRNA sense strand
acacauagugagaauagua

SEQ ID NO: 797956 - RNA, 19 nt, Homo sapiens
  misc_RNA (1)...(19): siRNA sense strand
ggugacauuugguuaugaa

SEQ ID NO: 797957 - RNA, 19 nt, Homo sapiens
  misc_RNA (1)...(19): siRNA sense strand
uguaauagauagcauugug

SEQ ID NO: 797958 - RNA, 19 nt, Homo sapiens
  misc_RNA (1)...(19): siRNA sense strand
gauuggaaacucauugaaa

SEQ ID NO: 797959 - RNA, 19 nt, Homo sapiens
  misc_RNA (1)...(19): siRNA sense strand
uaagugggcaaccauaauu

SEQ ID NO: 797960 - RNA, 19 nt, Homo sapiens
  misc_RNA (1)...(19): siRNA sense strand
ucagcaggauguagaaaug

SEQ ID NO: 797961 - RNA, 19 nt, Homo sapiens
  misc_RNA (1)...(19): siRNA sense strand
uaaaucagcaggauguaga

SEQ ID NO: 797962 - RNA, 19 nt, Homo sapiens
  misc_RNA (1)...(19): siRNA sense strand
ggacaacaaguaccuaugg

SEQ ID NO: 797963 - RNA, 19 nt, Homo sapiens
  misc_RNA (1)...(19): siRNA sense strand
cgacugaaugugucaaauu

SEQ ID NO: 797964 - RNA, 19 nt, Homo sapiens
  misc_RNA (1)...(19): siRNA sense strand
guagaaaugaugagugaug

SEQ ID NO: 797965 - RNA, 19 nt, Homo sapiens
  misc_RNA (1)...(19): siRNA sense strand
guaccuauggaacuauaua

SEQ ID NO: 797966 - RNA, 19 nt, Homo sapiens
  misc_RNA (1)...(19): siRNA sense strand
uaaugaggauggagucuag

SEQ ID NO: 797967 - RNA, 19 nt, Homo sapiens
  misc_RNA (1)...(19): siRNA sense strand
ugagauacauaaugaagag

SEQ ID NO: 797968 - RNA, 19 nt, Homo sapiens
  misc_RNA (1)...(19): siRNA sense strand
ggaagcacucagucaauga

SEQ ID NO: 797969 - RNA, 19 nt, Homo sapiens
  misc_RNA (1)...(19): siRNA sense strand
uagaaaugaugagugauga

SEQ ID NO: 797970 - RNA, 19 nt, Homo sapiens
  misc_RNA (1)...(19): siRNA sense strand
gaagcacucagucaaugaa

SEQ ID NO: 797971 - RNA, 19 nt, Homo sapiens
  misc_RNA (1)...(19): siRNA sense strand
gcuuauauauggcucucaa

SEQ ID NO: 797972 - RNA, 19 nt, Homo sapiens
  misc_RNA (1)...(19): siRNA sense strand
gacaacaaguaccuaugga

SEQ ID NO: 797973 - RNA, 19 nt, Homo sapiens
  misc_RNA (1)...(19): siRNA sense strand
gccagguggucauuacauu

SEQ ID NO: 797974 - RNA, 19 nt, Homo sapiens
  misc_RNA (1)...(19): siRNA sense strand
ucaccaaggccaagaaaug

SEQ ID NO: 797975 - RNA, 19 nt, Homo sapiens
  misc_RNA (1)...(19): siRNA sense strand
augaagagcuugacuaugc

SEQ ID NO: 797976 - RNA, 19 nt, Homo sapiens
  misc_RNA (1)...(19): siRNA sense strand
caaagauuccauucaccua

SEQ ID NO: 797977 - RNA, 19 nt, Homo sapiens
  misc_RNA (1)...(19): siRNA sense strand
cugaugugauuaccuauga

SEQ ID NO: 797978 - RNA, 19 nt, Homo sapiens
  misc_RNA (1)...(19): siRNA sense strand
cuauggaacuauauaaugg

SEQ ID NO: 797979 - RNA, 19 nt, Homo sapiens
  misc_RNA (1)...(19): siRNA sense strand
gacauuugguuaugaagag

SEQ ID NO: 797980 - RNA, 19 nt, Homo sapiens
  misc_RNA (1)...(19): siRNA sense strand
aaggauggcagauuucuuu

SEQ ID NO: 797981 - RNA, 19 nt, Homo sapiens
  misc_RNA (1)...(19): siRNA sense strand
caaagcaucgacugaaugu

SEQ ID NO: 797982 - RNA, 19 nt, Homo sapiens
  misc_RNA (1)...(19): siRNA sense strand
uaaugaagagcuugacuau

SEQ ID NO: 797983 - RNA, 19 nt, Homo sapiens
  misc_RNA (1)...(19): siRNA sense strand
ugcaguacuucucuaauga

SEQ ID NO: 797984 - RNA, 19 nt, Homo sapiens
  misc_RNA (1)...(19): siRNA sense strand
cagaaaguccagaguaugu

SEQ ID NO: 797985 - RNA, 19 nt, Homo sapiens
  misc_RNA (1)...(19): siRNA sense strand
uuaguggguugauacauau

SEQ ID NO: 797986 - RNA, 19 nt, Homo sapiens
  misc_RNA (1)...(19): siRNA sense strand
uaagggugacauuugguua

SEQ ID NO: 797987 - RNA, 19 nt, Homo sapiens
  misc_RNA (1)...(19): siRNA sense strand
gauuaccuaugacacugaa

SEQ ID NO: 797988 - RNA, 19 nt, Homo sapiens
  misc_RNA (1)...(19): siRNA sense strand
gcagaaaguccagaguaug

SEQ ID NO: 797989 - RNA, 19 nt, Homo sapiens
  misc_RNA (1)...(19): siRNA sense strand
ggaaaauggacaacaagua

SEQ ID NO: 797990 - RNA, 19 nt, Homo sapiens
  misc_RNA (1)...(19): siRNA sense strand
gauacauaaugaagagcuu

SEQ ID NO: 797991 - RNA, 19 nt, Homo sapiens
  misc_RNA (1)...(19): siRNA sense strand
cggaagcacucagucaaug

SEQ ID NO: 797992 - RNA, 19 nt, Homo sapiens
  misc_RNA (1)...(19): siRNA sense strand
caugcaugcugcuggcuuu

SEQ ID NO: 797993 - RNA, 19 nt, Homo sapiens
  misc_RNA (1)...(19): siRNA sense strand
gacccaagagccacaacua

SEQ ID NO: 797994 - RNA, 19 nt, Homo sapiens
  misc_RNA (1)...(19): siRNA sense strand
caggagaaaccaagauaug

SEQ ID NO: 797995 - RNA, 19 nt, Homo sapiens
  misc_RNA (1)...(19): siRNA sense strand
uugcaguacuucucuaaug

SEQ ID NO: 797996 - RNA, 19 nt, Homo sapiens
  misc_RNA (1)...(19): siRNA sense strand
ggucagcgagcaaagaaau

SEQ ID NO: 797997 - RNA, 19 nt, Homo sapiens
  misc_RNA (1)...(19): siRNA sense strand
uacccaggcucaaagauuc

SEQ ID NO: 797998 - RNA, 19 nt, Homo sapiens
  misc_RNA (1)...(19): siRNA sense strand
guagugaaacuucuuguac

SEQ ID NO: 797999 - RNA, 19 nt, Homo sapiens
  misc_RNA (1)...(19): siRNA sense strand
aaagauuccauucaccuaa

SEQ ID NO: 798000 - RNA, 19 nt, Homo sapiens
  misc_RNA (1)...(19): siRNA sense strand
caaaggagaaaccaucaag

SEQ ID NO: 798001 - RNA, 19 nt, Homo sapiens
  misc_RNA (1)...(19): siRNA sense strand
accaugguaugaagaagua

SEQ ID NO: 798002 - RNA, 19 nt, Homo sapiens
  misc_RNA (1)...(19): siRNA sense strand
aagcagaaaguccagagua

SEQ ID NO: 798003 - RNA, 19 nt, Homo sapiens
  misc_RNA (1)...(19): siRNA sense strand
ggguugauacauauuauug

SEQ ID NO: 798004 - RNA, 19 nt, Homo sapiens
  misc_RNA (1)...(19): siRNA sense strand
guaagugggcaaccauaau

SEQ ID NO: 798005 - RNA, 19 nt, Homo sapiens
  misc_RNA (1)...(19): siRNA sense strand
uagaacaacguuugggaaa

SEQ ID NO: 798006 - RNA, 19 nt, Homo sapiens
  misc_RNA (1)...(19): siRNA sense strand
ggggaaacauuauuugaau

SEQ ID NO: 798007 - RNA, 19 nt, Homo sapiens
  misc_RNA (1)...(19): siRNA sense strand
aagagcaacagaauaauug

SEQ ID NO: 798008 - RNA, 19 nt, Homo sapiens
  misc_RNA (1)...(19): siRNA sense strand
gaaggaagauaaccacaua

SEQ ID NO: 798009 - RNA, 19 nt, Homo sapiens
  misc_RNA (1)...(19): siRNA sense strand
gaagauaaccacauauuug

SEQ ID NO: 798010 - RNA, 19 nt, Homo sapiens
  misc_RNA (1)...(19): siRNA sense strand
gcagauacuuucagguuga

SEQ ID NO: 798011 - RNA, 19 nt, Homo sapiens
  misc_RNA (1)...(19): siRNA sense strand
ggagaaugaugauuggaaa

SEQ ID NO: 798012 - RNA, 19 nt, Homo sapiens
  misc_RNA (1)...(19): siRNA sense strand
cuaaagagcaacagaauaa

SEQ ID NO: 798013 - RNA, 19 nt, Homo sapiens
  misc_RNA (1)...(19): siRNA sense strand
gaaaagagauagaaacuca

SEQ ID NO: 798014 - RNA, 19 nt, Homo sapiens
  misc_RNA (1)...(19): siRNA sense strand
gugcaaggauggcagauuu

SEQ ID NO: 798015 - RNA, 19 nt, Homo sapiens
  misc_RNA (1)...(19): siRNA sense strand
gaacaacguuugggaaagu

SEQ ID NO: 798016 - RNA, 19 nt, Homo sapiens
  misc_RNA (1)...(19): siRNA sense strand
cagaaggaaucaaagagua

SEQ ID NO: 798017 - RNA, 19 nt, Homo sapiens
  misc_RNA (1)...(19): siRNA sense strand
ccagccaguugaugaauua

SEQ ID NO: 798018 - RNA, 19 nt, Homo sapiens
  misc_RNA (1)...(19): siRNA sense strand
gacugaaugugucaaauuu

SEQ ID NO: 798019 - RNA, 19 nt, Homo sapiens
  misc_RNA (1)...(19): siRNA sense strand
aaacuuaagcucacacaua

SEQ ID NO: 798020 - RNA, 19 nt, Homo sapiens
  misc_RNA (1)...(19): siRNA sense strand
ggaagauaaccacauauuu

SEQ ID NO: 798021 - RNA, 19 nt, Homo sapiens
  misc_RNA (1)...(19): siRNA sense strand
gguuugagauacauaauga

SEQ ID NO: 798022 - RNA, 19 nt, Homo sapiens
  misc_RNA (1)...(19): siRNA sense strand
ugacuaugcuguccugaaa

SEQ ID NO: 798023 - RNA, 19 nt, Homo sapiens
  misc_RNA (1)...(19): siRNA sense strand
ccaagagccacaacuaaua

SEQ ID NO: 798024 - RNA, 19 nt, Homo sapiens
  misc_RNA (1)...(19): siRNA sense strand
guacauaaaccuuggaaug

SEQ ID NO: 798025 - RNA, 19 nt, Homo sapiens
  misc_RNA (1)...(19): siRNA sense strand
cagaauaauugcaguacuu

SEQ ID NO: 798026 - RNA, 19 nt, Homo sapiens
  misc_RNA (1)...(19): siRNA sense strand
gaauccauccuccuugaua

SEQ ID NO: 798027 - RNA, 19 nt, Homo sapiens
  misc_RNA (1)...(19): siRNA sense strand
gcagauuucuuuccuuucu

SEQ ID NO: 798028 - RNA, 19 nt, Homo sapiens
  misc_RNA (1)...(19): siRNA sense strand
gcacagaaggaaucaaaga

SEQ ID NO: 798029 - RNA, 19 nt, Homo sapiens
  misc_RNA (1)...(19): siRNA sense strand
ugacucaguuggguacuua

SEQ ID NO: 798030 - RNA, 19 nt, Homo sapiens
  misc_RNA (1)...(19): siRNA sense strand
gaaagcacccagccaguug

SEQ ID NO: 798031 - RNA, 19 nt, Homo sapiens
  misc_RNA (1)...(19): siRNA sense strand
guaagcagaaggaagauaa

SEQ ID NO: 798032 - RNA, 19 nt, Homo sapiens
  misc_RNA (1)...(19): siRNA sense strand
caaggaaacaaacuacuuu

SEQ ID NO: 798033 - RNA, 19 nt, Homo sapiens
  misc_RNA (1)...(19): siRNA sense strand
ggacaaagcaucgacugaa

SEQ ID NO: 798034 - RNA, 19 nt, Homo sapiens
  misc_RNA (1)...(19): siRNA sense strand
ggagaaaccaagauaugaa

SEQ ID NO: 798035 - RNA, 19 nt, Homo sapiens
  misc_RNA (1)...(19): siRNA sense strand
gaauagagccaaguaagug

SEQ ID NO: 798036 - RNA, 19 nt, Homo sapiens
  misc_RNA (1)...(19): siRNA sense strand
cuuaguggguugauacaua

SEQ ID NO: 798037 - RNA, 19 nt, Homo sapiens
  misc_RNA (1)...(19): siRNA sense strand
gacaaagcaucgacugaau

SEQ ID NO: 798038 - RNA, 19 nt, Homo sapiens
  misc_RNA (1)...(19): siRNA sense strand
gagaaaccaagauaugaaa

SEQ ID NO: 798039 - RNA, 19 nt, Homo sapiens
  misc_RNA (1)...(19): siRNA sense strand
gcugcuggcuuugcuuaua

SEQ ID NO: 798040 - RNA, 19 nt, Homo sapiens
  misc_RNA (1)...(19): siRNA sense strand
gaaggaaaauggacaacaa

SEQ ID NO: 798041 - RNA, 19 nt, Homo sapiens
  misc_RNA (1)...(19): siRNA sense strand
gaacaaaucguggcucagu

SEQ ID NO: 798042 - RNA, 19 nt, Homo sapiens
  misc_RNA (1)...(19): siRNA sense strand
ggaaucaaagaguacauaa

SEQ ID NO: 798043 - RNA, 19 nt, Homo sapiens
  misc_RNA (1)...(19): siRNA sense strand
guacuucucuaaugaggau

SEQ ID NO: 798044 - RNA, 19 nt, Homo sapiens
  misc_RNA (1)...(19): siRNA sense strand
acaaguaccuauggaacua

SEQ ID NO: 798045 - RNA, 19 nt, Homo sapiens
  misc_RNA (1)...(19): siRNA sense strand
guccauauguauacucaaa

SEQ ID NO: 798046 - RNA, 19 nt, Homo sapiens
  misc_RNA (1)...(19): siRNA sense strand
caacagaauaauugcagua

SEQ ID NO: 798047 - RNA, 19 nt, Homo sapiens
  misc_RNA (1)...(19): siRNA sense strand
gcacccagccaguugauga

SEQ ID NO: 798048 - RNA, 19 nt, Homo sapiens
  misc_RNA (1)...(19): siRNA sense strand
uggcagauuucuuuccuuu

SEQ ID NO: 798049 - RNA, 19 nt, Homo sapiens
  misc_RNA (1)...(19): siRNA sense strand
gccaguugaugaauuagaa

SEQ ID NO: 798050 - RNA, 19 nt, Homo sapiens
  misc_RNA (1)...(19): siRNA sense strand
gcucaaagauuccauucac

SEQ ID NO: 798051 - RNA, 19 nt, Homo sapiens
  misc_RNA (1)...(19): siRNA sense strand
ccauauguauacucaaaga

SEQ ID NO: 798052 - RNA, 19 nt, Homo sapiens
  misc_RNA (1)...(19): siRNA sense strand
aaaguaagcagaaggaaga

SEQ ID NO: 798053 - RNA, 19 nt, Homo sapiens
  misc_RNA (1)...(19): siRNA sense strand
ggaauagagccaaguaagu

SEQ ID NO: 798054 - RNA, 19 nt, Homo sapiens
  misc_RNA (1)...(19): siRNA sense strand
gaugagugaugaggacuug

SEQ ID NO: 798055 - RNA, 19 nt, Homo sapiens
  misc_RNA (1)...(19): siRNA sense strand
acacauagugagaauagua

SEQ ID NO: 798056 - RNA, 19 nt, Homo sapiens
  misc_RNA (1)...(19): siRNA sense strand
ggugacauuugguuaugaa

SEQ ID NO: 798057 - RNA, 19 nt, Homo sapiens
  misc_RNA (1)...(19): siRNA sense strand
uguaauagauagcauugug

SEQ ID NO: 798058 - RNA, 19 nt, Homo sapiens
  misc_RNA (1)...(19): siRNA sense strand
gauuggaaacucauugaaa

SEQ ID NO: 798059 - RNA, 19 nt, Homo sapiens
  misc_RNA (1)...(19): siRNA sense strand
uaagugggcaaccauaauu

SEQ ID NO: 798060 - RNA, 19 nt, Homo sapiens
  misc_RNA (1)...(19): siRNA sense strand
ucagcaggauguagaaaug

SEQ ID NO: 798061 - RNA, 19 nt, Homo sapiens
  misc_RNA (1)...(19): siRNA sense strand
uaaaucagcaggauguaga

SEQ ID NO: 798062 - RNA, 19 nt, Homo sapiens
  misc_RNA (1)...(19): siRNA sense strand
ggacaacaaguaccuaugg

SEQ ID NO: 798063 - RNA, 19 nt, Homo sapiens
  misc_RNA (1)...(19): siRNA sense strand
cgacugaaugugucaaauu

SEQ ID NO: 798064 - RNA, 19 nt, Homo sapiens
  misc_RNA (1)...(19): siRNA sense strand
guagaaaugaugagugaug

SEQ ID NO: 798065 - RNA, 19 nt, Homo sapiens
  misc_RNA (1)...(19): siRNA sense strand
guaccuauggaacuauaua

SEQ ID NO: 798066 - RNA, 19 nt, Homo sapiens
  misc_RNA (1)...(19): siRNA sense strand
uaaugaggauggagucuag

SEQ ID NO: 798067 - RNA, 19 nt, Homo sapiens
  misc_RNA (1)...(19): siRNA sense strand
ugagauacauaaugaagag

SEQ ID NO: 798068 - RNA, 19 nt, Homo sapiens
  misc_RNA (1)...(19): siRNA sense strand
ggaagcacucagucaauga

SEQ ID NO: 798069 - RNA, 19 nt, Homo sapiens
  misc_RNA (1)...(19): siRNA sense strand
uagaaaugaugagugauga

SEQ ID NO: 798070 - RNA, 19 nt, Homo sapiens
  misc_RNA (1)...(19): siRNA sense strand
gaagcacucagucaaugaa

SEQ ID NO: 798071 - RNA, 19 nt, Homo sapiens
  misc_RNA (1)...(19): siRNA sense strand
gcuuauauauggcucucaa

SEQ ID NO: 798072 - RNA, 19 nt, Homo sapiens
  misc_RNA (1)...(19): siRNA sense strand
gacaacaaguaccuaugga

SEQ ID NO: 798073 - RNA, 19 nt, Homo sapiens
  misc_RNA (1)...(19): siRNA sense strand
gccagguggucauuacauu

SEQ ID NO: 798074 - RNA, 19 nt, Homo sapiens
  misc_RNA (1)...(19): siRNA sense strand
ucaccaaggccaagaaaug

SEQ ID NO: 798075 - RNA, 19 nt, Homo sapiens
  misc_RNA (1)...(19): siRNA sense strand
augaagagcuugacuaugc

SEQ ID NO: 798076 - RNA, 19 nt, Homo sapiens
  misc_RNA (1)...(19): siRNA sense strand
caaagauuccauucaccua

SEQ ID NO: 798077 - RNA, 19 nt, Homo sapiens
  misc_RNA (1)...(19): siRNA sense strand
cugaugugauuaccuauga

SEQ ID NO: 798078 - RNA, 19 nt, Homo sapiens
  misc_RNA (1)...(19): siRNA sense strand
cuauggaacuauauaaugg

SEQ ID NO: 798079 - RNA, 19 nt, Homo sapiens
  misc_RNA (1)...(19): siRNA sense strand
gacauuugguuaugaagag

SEQ ID NO: 798080 - RNA, 19 nt, Homo sapiens
  misc_RNA (1)...(19): siRNA sense strand
aaggauggcagauuucuuu

SEQ ID NO: 798081 - RNA, 19 nt, Homo sapiens
  misc_RNA (1)...(19): siRNA sense strand
caaagcaucgacugaaugu

SEQ ID NO: 798082 - RNA, 19 nt, Homo sapiens
  misc_RNA (1)...(19): siRNA sense strand
uaaugaagagcuugacuau

SEQ ID NO: 798083 - RNA, 19 nt, Homo sapiens
  misc_RNA (1)...(19): siRNA sense strand
ugcaguacuucucuaauga

SEQ ID NO: 798084 - RNA, 19 nt, Homo sapiens
  misc_RNA (1)...(19): siRNA sense strand
cagaaaguccagaguaugu

SEQ ID NO: 798085 - RNA, 19 nt, Homo sapiens
  misc_RNA (1)...(19): siRNA sense strand
uuaguggguugauacauau

SEQ ID NO: 798086 - RNA, 19 nt, Homo sapiens
  misc_RNA (1)...(19): siRNA sense strand
uaagggugacauuugguua

SEQ ID NO: 798087 - RNA, 19 nt, Homo sapiens
  misc_RNA (1)...(19): siRNA sense strand
gauuaccuaugacacugaa

SEQ ID NO: 798088 - RNA, 19 nt, Homo sapiens
  misc_RNA (1)...(19): siRNA sense strand
gcagaaaguccagaguaug

SEQ ID NO: 798089 - RNA, 19 nt, Homo sapiens
  misc_RNA (1)...(19): siRNA sense strand
ggaaaauggacaacaagua

SEQ ID NO: 798090 - RNA, 19 nt, Homo sapiens
  misc_RNA (1)...(19): siRNA sense strand
gauacauaaugaagagcuu

SEQ ID NO: 798091 - RNA, 19 nt, Homo sapiens
  misc_RNA (1)...(19): siRNA sense strand
cggaagcacucagucaaug

SEQ ID NO: 798092 - RNA, 19 nt, Homo sapiens
  misc_RNA (1)...(19): siRNA sense strand
caugcaugcugcuggcuuu

SEQ ID NO: 798093 - RNA, 19 nt, Homo sapiens
  misc_RNA (1)...(19): siRNA sense strand
gacccaagagccacaacua

SEQ ID NO: 798094 - RNA, 19 nt, Homo sapiens
  misc_RNA (1)...(19): siRNA sense strand
caggagaaaccaagauaug

SEQ ID NO: 798095 - RNA, 19 nt, Homo sapiens
  misc_RNA (1)...(19): siRNA sense strand
uugcaguacuucucuaaug

SEQ ID NO: 798096 - RNA, 19 nt, Homo sapiens
  misc_RNA (1)...(19): siRNA sense strand
ggucagcgagcaaagaaau

SEQ ID NO: 798097 - RNA, 19 nt, Homo sapiens
  misc_RNA (1)...(19): siRNA sense strand
uacccaggcucaaagauuc

SEQ ID NO: 798098 - RNA, 19 nt, Homo sapiens
  misc_RNA (1)...(19): siRNA sense strand
guagugaaacuucuuguac

SEQ ID NO: 798099 - RNA, 19 nt, Homo sapiens
  misc_RNA (1)...(19): siRNA sense strand
aaagauuccauucaccuaa

SEQ ID NO: 798100 - RNA, 19 nt, Homo sapiens
  misc_RNA (1)...(19): siRNA sense strand
caaaggagaaaccaucaag

SEQ ID NO: 798101 - RNA, 19 nt, Homo sapiens
  misc_RNA (1)...(19): siRNA sense strand
accaugguaugaagaagua

SEQ ID NO: 798102 - RNA, 19 nt, Homo sapiens
  misc_RNA (1)...(19): siRNA sense strand
aagcagaaaguccagagua

SEQ ID NO: 798103 - RNA, 19 nt, Homo sapiens
  misc_RNA (1)...(19): siRNA sense strand
ggguugauacauauuauug

SEQ ID NO: 798104 - RNA, 19 nt, Homo sapiens
  misc_RNA (1)...(19): siRNA sense strand
guaagugggcaaccauaau

SEQ ID NO: 798105 - RNA, 19 nt, Homo sapiens
  misc_RNA (1)...(19): siRNA sense strand
uagaacaacguuugggaaa

SEQ ID NO: 798106 - RNA, 19 nt, Homo sapiens
  misc_RNA (1)...(19): siRNA sense strand
ggggaaacauuauuugaau

SEQ ID NO: 798107 - RNA, 19 nt, Homo sapiens
  misc_RNA (1)...(19): siRNA sense strand
aagagcaacagaauaauug

SEQ ID NO: 798108 - RNA, 19 nt, Homo sapiens
  misc_RNA (1)...(19): siRNA sense strand
gaaccuaccuggcagauau

SEQ ID NO: 798109 - RNA, 19 nt, Homo sapiens
  misc_RNA (1)...(19): siRNA sense strand
gaacagagacuccgagaug

SEQ ID NO: 798110 - RNA, 19 nt, Homo sapiens
  misc_RNA (1)...(19): siRNA sense strand
ggacagacauggccuuugu

SEQ ID NO: 798111 - RNA, 19 nt, Homo sapiens
  misc_RNA (1)...(19): siRNA sense strand
gagagaagcuacagccauu

SEQ ID NO: 798112 - RNA, 19 nt, Homo sapiens
  misc_RNA (1)...(19): siRNA sense strand
ggacaugaguguguacuau

SEQ ID NO: 798113 - RNA, 19 nt, Homo sapiens
  misc_RNA (1)...(19): siRNA sense strand
gcuccuaacucugcccuaa

SEQ ID NO: 798114 - RNA, 19 nt, Homo sapiens
  misc_RNA (1)...(19): siRNA sense strand
ggaaggaagaggaagaaga

SEQ ID NO: 798115 - RNA, 19 nt, Homo sapiens
  misc_RNA (1)...(19): siRNA sense strand
gcucuggccugguguuuua

SEQ ID NO: 798116 - RNA, 19 nt, Homo sapiens
  misc_RNA (1)...(19): siRNA sense strand
aggaagagcuuguguguac

SEQ ID NO: 798117 - RNA, 19 nt, Homo sapiens
  misc_RNA (1)...(19): siRNA sense strand
gaaggaagaggaagaagag

SEQ ID NO: 798118 - RNA, 19 nt, Homo sapiens
  misc_RNA (1)...(19): siRNA sense strand
gcaggccgcuccuaacucu

SEQ ID NO: 798119 - RNA, 19 nt, Homo sapiens
  misc_RNA (1)...(19): siRNA sense strand
ccgagacucuguccaaaug

SEQ ID NO: 798120 - RNA, 19 nt, Homo sapiens
  misc_RNA (1)...(19): siRNA sense strand
cagcuucucucucagacuu

SEQ ID NO: 798121 - RNA, 19 nt, Homo sapiens
  misc_RNA (1)...(19): siRNA sense strand
gcaugaaguuucggacaga

SEQ ID NO: 798122 - RNA, 19 nt, Homo sapiens
  misc_RNA (1)...(19): siRNA sense strand
agcagagggugaagaaaua

SEQ ID NO: 798123 - RNA, 19 nt, Homo sapiens
  misc_RNA (1)...(19): siRNA sense strand
gcaggaagagcuugugugu

SEQ ID NO: 798124 - RNA, 19 nt, Homo sapiens
  misc_RNA (1)...(19): siRNA sense strand
guggagagccugaggaaga

SEQ ID NO: 798125 - RNA, 19 nt, Homo sapiens
  misc_RNA (1)...(19): siRNA sense strand
ccaaaugcgucuagaacag

SEQ ID NO: 798126 - RNA, 19 nt, Homo sapiens
  misc_RNA (1)...(19): siRNA sense strand
gagaagcuacagccauuug

SEQ ID NO: 798127 - RNA, 19 nt, Homo sapiens
  misc_RNA (1)...(19): siRNA sense strand
gcucaucuccaccaucuau

SEQ ID NO: 798128 - RNA, 19 nt, Homo sapiens
  misc_RNA (1)...(19): siRNA sense strand
gggcucaucuccaccaucu

SEQ ID NO: 798129 - RNA, 19 nt, Homo sapiens
  misc_RNA (1)...(19): siRNA sense strand
gccgguggcuggauucuca

SEQ ID NO: 798130 - RNA, 19 nt, Homo sapiens
  misc_RNA (1)...(19): siRNA sense strand
acaugaguguguacuauga

SEQ ID NO: 798131 - RNA, 19 nt, Homo sapiens
  misc_RNA (1)...(19): siRNA sense strand
gcaaugugccuuuugagua

SEQ ID NO: 798132 - RNA, 19 nt, Homo sapiens
  misc_RNA (1)...(19): siRNA sense strand
gaagaaauaccccaaggaa

SEQ ID NO: 798133 - RNA, 19 nt, Homo sapiens
  misc_RNA (1)...(19): siRNA sense strand
gcgguggcuuccucuguuu

SEQ ID NO: 798134 - RNA, 19 nt, Homo sapiens
  misc_RNA (1)...(19): siRNA sense strand
cagcagagggugaagaaau

SEQ ID NO: 798135 - RNA, 19 nt, Homo sapiens
  misc_RNA (1)...(19): siRNA sense strand
agaaggagauuuugaugaa

SEQ ID NO: 798136 - RNA, 19 nt, Homo sapiens
  misc_RNA (1)...(19): siRNA sense strand
gaggaggaggcgacaguuu

SEQ ID NO: 798137 - RNA, 19 nt, Homo sapiens
  misc_RNA (1)...(19): siRNA sense strand
ggaagaggaagaagagucu

SEQ ID NO: 798138 - RNA, 19 nt, Homo sapiens
  misc_RNA (1)...(19): siRNA sense strand
cugaggcccuggauaguga

SEQ ID NO: 798139 - RNA, 19 nt, Homo sapiens
  misc_RNA (1)...(19): siRNA sense strand
ggaggaagaaggagauuuu

SEQ ID NO: 798140 - RNA, 19 nt, Homo sapiens
  misc_RNA (1)...(19): siRNA sense strand
aggaggaggcgacaguuua

SEQ ID NO: 798141 - RNA, 19 nt, Homo sapiens
  misc_RNA (1)...(19): siRNA sense strand
ggaagauggcucugugauc

SEQ ID NO: 798142 - RNA, 19 nt, Homo sapiens
  misc_RNA (1)...(19): siRNA sense strand
ggcgguggcuuccucuguu

SEQ ID NO: 798143 - RNA, 19 nt, Homo sapiens
  misc_RNA (1)...(19): siRNA sense strand
guuggaaggcagagaauga

SEQ ID NO: 798144 - RNA, 19 nt, Homo sapiens
  misc_RNA (1)...(19): siRNA sense strand
uccuaacucugcccuaauu

SEQ ID NO: 798145 - RNA, 19 nt, Homo sapiens
  misc_RNA (1)...(19): siRNA sense strand
caaugugccuuuugaguau

SEQ ID NO: 798146 - RNA, 19 nt, Homo sapiens
  misc_RNA (1)...(19): siRNA sense strand
ggaaugggaacggcaugaa

SEQ ID NO: 798147 - RNA, 19 nt, Homo sapiens
  misc_RNA (1)...(19): siRNA sense strand
caaaugcgucuagaacaga

SEQ ID NO: 798148 - RNA, 19 nt, Homo sapiens
  misc_RNA (1)...(19): siRNA sense strand
gcccgagacucuguccaaa

SEQ ID NO: 798149 - RNA, 19 nt, Homo sapiens
  misc_RNA (1)...(19): siRNA sense strand
gaacagacagccgaugacu

SEQ ID NO: 798150 - RNA, 19 nt, Homo sapiens
  misc_RNA (1)...(19): siRNA sense strand
ggaagagcuuguguguaca

SEQ ID NO: 798151 - RNA, 19 nt, Homo sapiens
  misc_RNA (1)...(19): siRNA sense strand
gaacccaccagugcugaug

SEQ ID NO: 798152 - RNA, 19 nt, Homo sapiens
  misc_RNA (1)...(19): siRNA sense strand
acuccgagauggacaggaa

SEQ ID NO: 798153 - RNA, 19 nt, Homo sapiens
  misc_RNA (1)...(19): siRNA sense strand
uggagagccugaggaagaa

SEQ ID NO: 798154 - RNA, 19 nt, Homo sapiens
  misc_RNA (1)...(19): siRNA sense strand
ggaaccuaccuggcagaua

SEQ ID NO: 798155 - RNA, 19 nt, Homo sapiens
  misc_RNA (1)...(19): siRNA sense strand
ggauagugauggccaacac

SEQ ID NO: 798156 - RNA, 19 nt, Homo sapiens
  misc_RNA (1)...(19): siRNA sense strand
gcaggaggaagaaggagau

SEQ ID NO: 798157 - RNA, 19 nt, Homo sapiens
  misc_RNA (1)...(19): siRNA sense strand
acucgagacucuacuccaa

SEQ ID NO: 798158 - RNA, 19 nt, Homo sapiens
  misc_RNA (1)...(19): siRNA sense strand
cagagaugguggagacaag

SEQ ID NO: 798159 - RNA, 19 nt, Homo sapiens
  misc_RNA (1)...(19): siRNA sense strand
gacaugaguguguacuaug

SEQ ID NO: 798160 - RNA, 19 nt, Homo sapiens
  misc_RNA (1)...(19): siRNA sense strand
uggcugaccugaagcaacu

SEQ ID NO: 798161 - RNA, 19 nt, Homo sapiens
  misc_RNA (1)...(19): siRNA sense strand
gaaugggaacggcaugaag

SEQ ID NO: 798162 - RNA, 19 nt, Homo sapiens
  misc_RNA (1)...(19): siRNA sense strand
ggaggaggcgacaguuuac

SEQ ID NO: 798163 - RNA, 19 nt, Homo sapiens
  misc_RNA (1)...(19): siRNA sense strand
gaguguguacuaugacaga

SEQ ID NO: 798164 - RNA, 19 nt, Homo sapiens
  misc_RNA (1)...(19): siRNA sense strand
cacccuggcugaccugaag

SEQ ID NO: 798165 - RNA, 19 nt, Homo sapiens
  misc_RNA (1)...(19): siRNA sense strand
caaggaugcccgagacucu

SEQ ID NO: 798166 - RNA, 19 nt, Homo sapiens
  misc_RNA (1)...(19): siRNA sense strand
gaagaaggagauuuugaug

SEQ ID NO: 798167 - RNA, 19 nt, Homo sapiens
  misc_RNA (1)...(19): siRNA sense strand
ggaagaaggagauuuugau

SEQ ID NO: 798168 - RNA, 19 nt, Homo sapiens
  misc_RNA (1)...(19): siRNA sense strand
gagcaggaagagcuugugu

SEQ ID NO: 798169 - RNA, 19 nt, Homo sapiens
  misc_RNA (1)...(19): siRNA sense strand
gaagagcuuguguguacag

SEQ ID NO: 798170 - RNA, 19 nt, Homo sapiens
  misc_RNA (1)...(19): siRNA sense strand
guugcgcucggcccauuua

SEQ ID NO: 798171 - RNA, 19 nt, Homo sapiens
  misc_RNA (1)...(19): siRNA sense strand
ucgagacucuacuccaauc

SEQ ID NO: 798172 - RNA, 19 nt, Homo sapiens
  misc_RNA (1)...(19): siRNA sense strand
guacagcagagggugaaga

SEQ ID NO: 798173 - RNA, 19 nt, Homo sapiens
  misc_RNA (1)...(19): siRNA sense strand
acagacauggccuuuguga

SEQ ID NO: 798174 - RNA, 19 nt, Homo sapiens
  misc_RNA (1)...(19): siRNA sense strand
ccaccagcaugaaguuucg

SEQ ID NO: 798175 - RNA, 19 nt, Homo sapiens
  misc_RNA (1)...(19): siRNA sense strand
agauggcucugugaucgaa

SEQ ID NO: 798176 - RNA, 19 nt, Homo sapiens
  misc_RNA (1)...(19): siRNA sense strand
cagaugcaagcguggauug

SEQ ID NO: 798177 - RNA, 19 nt, Homo sapiens
  misc_RNA (1)...(19): siRNA sense strand
gcauugggcggaaggugau

SEQ ID NO: 798178 - RNA, 19 nt, Homo sapiens
  misc_RNA (1)...(19): siRNA sense strand
ggaggaggaggcgacaguu

SEQ ID NO: 798179 - RNA, 19 nt, Homo sapiens
  misc_RNA (1)...(19): siRNA sense strand
gaaguuucggacagacaug

SEQ ID NO: 798180 - RNA, 19 nt, Homo sapiens
  misc_RNA (1)...(19): siRNA sense strand
gagaugguggagacaagga

SEQ ID NO: 798181 - RNA, 19 nt, Homo sapiens
  misc_RNA (1)...(19): siRNA sense strand
guguugcgcucggcccauu

SEQ ID NO: 798182 - RNA, 19 nt, Homo sapiens
  misc_RNA (1)...(19): siRNA sense strand
agggccagcuucucucuca

SEQ ID NO: 798183 - RNA, 19 nt, Homo sapiens
  misc_RNA (1)...(19): siRNA sense strand
aaccagagcuucagaaaua

SEQ ID NO: 798184 - RNA, 19 nt, Homo sapiens
  misc_RNA (1)...(19): siRNA sense strand
gaaaguguguccagcuuaa

SEQ ID NO: 798185 - RNA, 19 nt, Homo sapiens
  misc_RNA (1)...(19): siRNA sense strand
aaaggaagcugcuaucuug

SEQ ID NO: 798186 - RNA, 19 nt, Homo sapiens
  misc_RNA (1)...(19): siRNA sense strand
agacagaccugcugccuaa

SEQ ID NO: 798187 - RNA, 19 nt, Homo sapiens
  misc_RNA (1)...(19): siRNA sense strand
ggaagaagaaugacagaaa

SEQ ID NO: 798188 - RNA, 19 nt, Homo sapiens
  misc_RNA (1)...(19): siRNA sense strand
ggacugagcaggugauuau

SEQ ID NO: 798189 - RNA, 19 nt, Homo sapiens
  misc_RNA (1)...(19): siRNA sense strand
gaagaagaaugacagaaag

SEQ ID NO: 798190 - RNA, 19 nt, Homo sapiens
  misc_RNA (1)...(19): siRNA sense strand
caggagagcuucugccauu

SEQ ID NO: 798191 - RNA, 19 nt, Homo sapiens
  misc_RNA (1)...(19): siRNA sense strand
gcaagagggcugcaccuua

SEQ ID NO: 798192 - RNA, 19 nt, Homo sapiens
  misc_RNA (1)...(19): siRNA sense strand
ggagaggccugcacacuca

SEQ ID NO: 798193 - RNA, 19 nt, Homo sapiens
  misc_RNA (1)...(19): siRNA sense strand
caucagagcuggaguuugg

SEQ ID NO: 798194 - RNA, 19 nt, Homo sapiens
  misc_RNA (1)...(19): siRNA sense strand
caagagggcugcaccuuag

SEQ ID NO: 798195 - RNA, 19 nt, Homo sapiens
  misc_RNA (1)...(19): siRNA sense strand
agaaagaggugaaugaagu

SEQ ID NO: 798196 - RNA, 19 nt, Homo sapiens
  misc_RNA (1)...(19): siRNA sense strand
ggacucugcuccagugaug

SEQ ID NO: 798197 - RNA, 19 nt, Homo sapiens
  misc_RNA (1)...(19): siRNA sense strand
acacaaagaugacgugaag

SEQ ID NO: 798198 - RNA, 19 nt, Homo sapiens
  misc_RNA (1)...(19): siRNA sense strand
cgacaacugugaagaaagu

SEQ ID NO: 798199 - RNA, 19 nt, Homo sapiens
  misc_RNA (1)...(19): siRNA sense strand
gaagauggaaccuuguuau

SEQ ID NO: 798200 - RNA, 19 nt, Homo sapiens
  misc_RNA (1)...(19): siRNA sense strand
ugaaggcgcucagaaaguu

SEQ ID NO: 798201 - RNA, 19 nt, Homo sapiens
  misc_RNA (1)...(19): siRNA sense strand
gauggaaccuuguuauacu

SEQ ID NO: 798202 - RNA, 19 nt, Homo sapiens
  misc_RNA (1)...(19): siRNA sense strand
ggagaagggucacuauggu

SEQ ID NO: 798203 - RNA, 19 nt, Homo sapiens
  misc_RNA (1)...(19): siRNA sense strand
ccaauaugauucacguuga

SEQ ID NO: 798204 - RNA, 19 nt, Homo sapiens
  misc_RNA (1)...(19): siRNA sense strand
gcaucaaguuucagaagga

SEQ ID NO: 798205 - RNA, 19 nt, Homo sapiens
  misc_RNA (1)...(19): siRNA sense strand
gaugaaacucugaaaguga

SEQ ID NO: 798206 - RNA, 19 nt, Homo sapiens
  misc_RNA (1)...(19): siRNA sense strand
ugaguaaccuggugaugga

SEQ ID NO: 798207 - RNA, 19 nt, Homo sapiens
  misc_RNA (1)...(19): siRNA sense strand
ccagugagcucgggauuca

SEQ ID NO: 798208 - RNA, 19 nt, Homo sapiens
  misc_RNA (1)...(19): siRNA sense strand
gaaauccagauccugagua

SEQ ID NO: 798209 - RNA, 19 nt, Homo sapiens
  misc_RNA (1)...(19): siRNA sense strand
ucaaguuucagaaggauua

SEQ ID NO: 798210 - RNA, 19 nt, Homo sapiens
  misc_RNA (1)...(19): siRNA sense strand
caucuagaccggcuuauga

SEQ ID NO: 798211 - RNA, 19 nt, Homo sapiens
  misc_RNA (1)...(19): siRNA sense strand
ccaagaaaaugaagaagaa

SEQ ID NO: 798212 - RNA, 19 nt, Homo sapiens
  misc_RNA (1)...(19): siRNA sense strand
aaauccagauccugaguaa

SEQ ID NO: 798213 - RNA, 19 nt, Homo sapiens
  misc_RNA (1)...(19): siRNA sense strand
gaaccuuguuauacuaaag

SEQ ID NO: 798214 - RNA, 19 nt, Homo sapiens
  misc_RNA (1)...(19): siRNA sense strand
gcaggugauuauuucaaga

SEQ ID NO: 798215 - RNA, 19 nt, Homo sapiens
  misc_RNA (1)...(19): siRNA sense strand
ucccagagcugcccucaga

SEQ ID NO: 798216 - RNA, 19 nt, Homo sapiens
  misc_RNA (1)...(19): siRNA sense strand
ugaaugaagucagccagaa

SEQ ID NO: 798217 - RNA, 19 nt, Homo sapiens
  misc_RNA (1)...(19): siRNA sense strand
caagguagcccguauucau

SEQ ID NO: 798218 - RNA, 19 nt, Homo sapiens
  misc_RNA (1)...(19): siRNA sense strand
gagccagguuucugaggaa

SEQ ID NO: 798219 - RNA, 19 nt, Homo sapiens
  misc_RNA (1)...(19): siRNA sense strand
ggaagcugcuaucuugaag

SEQ ID NO: 798220 - RNA, 19 nt, Homo sapiens
  misc_RNA (1)...(19): siRNA sense strand
ugacauggaucagauugug

SEQ ID NO: 798221 - RNA, 19 nt, Homo sapiens
  misc_RNA (1)...(19): siRNA sense strand
uuuagaagcugugcaauuc

SEQ ID NO: 798222 - RNA, 19 nt, Homo sapiens
  misc_RNA (1)...(19): siRNA sense strand
gacccucaguaacgaagua

SEQ ID NO: 798223 - RNA, 19 nt, Homo sapiens
  misc_RNA (1)...(19): siRNA sense strand
ggaaccuuguuauacuaaa

SEQ ID NO: 798224 - RNA, 19 nt, Homo sapiens
  misc_RNA (1)...(19): siRNA sense strand
gagcaucuagaccggcuua

SEQ ID NO: 798225 - RNA, 19 nt, Homo sapiens
  misc_RNA (1)...(19): siRNA sense strand
gcacuggcguccacaugca

SEQ ID NO: 798226 - RNA, 19 nt, Homo sapiens
  misc_RNA (1)...(19): siRNA sense strand
caaaccagagcuucagaaa

SEQ ID NO: 798227 - RNA, 19 nt, Homo sapiens
  misc_RNA (1)...(19): siRNA sense strand
gaagagaugggagggcaaa

SEQ ID NO: 798228 - RNA, 19 nt, Homo sapiens
  misc_RNA (1)...(19): siRNA sense strand
gggcaaguguaccgaggaa

SEQ ID NO: 798229 - RNA, 19 nt, Homo sapiens
  misc_RNA (1)...(19): siRNA sense strand
uaaaggaagcugcuaucuu

SEQ ID NO: 798230 - RNA, 19 nt, Homo sapiens
  misc_RNA (1)...(19): siRNA sense strand
ggacacagaacuacaugca

SEQ ID NO: 798231 - RNA, 19 nt, Homo sapiens
  misc_RNA (1)...(19): siRNA sense strand
ugaugaaacucugaaagug

SEQ ID NO: 798232 - RNA, 19 nt, Homo sapiens
  misc_RNA (1)...(19): siRNA sense strand
gaacuuccagaccaccaaa

SEQ ID NO: 798233 - RNA, 19 nt, Homo sapiens
  misc_RNA (1)...(19): siRNA sense strand
gugaaaguguguccagcuu

SEQ ID NO: 798234 - RNA, 19 nt, Homo sapiens
  misc_RNA (1)...(19): siRNA sense strand
gaaauacgagcaguucauc

SEQ ID NO: 798235 - RNA, 19 nt, Homo sapiens
  misc_RNA (1)...(19): siRNA sense strand
gcagcaccauccgaaagaa

SEQ ID NO: 798236 - RNA, 19 nt, Homo sapiens
  misc_RNA (1)...(19): siRNA sense strand
caagagccgcuucagauuc

SEQ ID NO: 798237 - RNA, 19 nt, Homo sapiens
  misc_RNA (1)...(19): siRNA sense strand
uacaucagauccugcuuga

SEQ ID NO: 798238 - RNA, 19 nt, Homo sapiens
  misc_RNA (1)...(19): siRNA sense strand
gcaaaccagagcuucagaa

SEQ ID NO: 798239 - RNA, 19 nt, Homo sapiens
  misc_RNA (1)...(19): siRNA sense strand
ugcaggagcuaauggagaa

SEQ ID NO: 798240 - RNA, 19 nt, Homo sapiens
  misc_RNA (1)...(19): siRNA sense strand
acauugaucuggugguuca

SEQ ID NO: 798241 - RNA, 19 nt, Homo sapiens
  misc_RNA (1)...(19): siRNA sense strand
cagcuuaacagaucuaaag

SEQ ID NO: 798242 - RNA, 19 nt, Homo sapiens
  misc_RNA (1)...(19): siRNA sense strand
caagaggcacuaguucaaa

SEQ ID NO: 798243 - RNA, 19 nt, Homo sapiens
  misc_RNA (1)...(19): siRNA sense strand
gaaacucugaaagugauaa

SEQ ID NO: 798244 - RNA, 19 nt, Homo sapiens
  misc_RNA (1)...(19): siRNA sense strand
gaucaagguagcccguauu

SEQ ID NO: 798245 - RNA, 19 nt, Homo sapiens
  misc_RNA (1)...(19): siRNA sense strand
gcacacucacugcccauga

SEQ ID NO: 798246 - RNA, 19 nt, Homo sapiens
  misc_RNA (1)...(19): siRNA sense strand
gauggaagaagauacgaau

SEQ ID NO: 798247 - RNA, 19 nt, Homo sapiens
  misc_RNA (1)...(19): siRNA sense strand
gagaagggucacuaugguu

SEQ ID NO: 798248 - RNA, 19 nt, Homo sapiens
  misc_RNA (1)...(19): siRNA sense strand
gagcaggugauuauuucaa

SEQ ID NO: 798249 - RNA, 19 nt, Homo sapiens
  misc_RNA (1)...(19): siRNA sense strand
aagauggaaccuuguuaua

SEQ ID NO: 798250 - RNA, 19 nt, Homo sapiens
  misc_RNA (1)...(19): siRNA sense strand
ugaaaguguguccagcuua

SEQ ID NO: 798251 - RNA, 19 nt, Homo sapiens
  misc_RNA (1)...(19): siRNA sense strand
gaggagauuuuacaucaga

SEQ ID NO: 798252 - RNA, 19 nt, Homo sapiens
  misc_RNA (1)...(19): siRNA sense strand
uugcagaucauaccaauau

SEQ ID NO: 798253 - RNA, 19 nt, Homo sapiens
  misc_RNA (1)...(19): siRNA sense strand
ucaagagccgcuucagauu

SEQ ID NO: 798254 - RNA, 19 nt, Homo sapiens
  misc_RNA (1)...(19): siRNA sense strand
gaaagaggugaaugaaguc

SEQ ID NO: 798255 - RNA, 19 nt, Homo sapiens
  misc_RNA (1)...(19): siRNA sense strand
gaagagccagaacccauca

SEQ ID NO: 798256 - RNA, 19 nt, Homo sapiens
  misc_RNA (1)...(19): siRNA sense strand
cugagcaggugauuauuuc

SEQ ID NO: 798257 - RNA, 19 nt, Homo sapiens
  misc_RNA (1)...(19): siRNA sense strand
ggcacuaguucaaaucaca

SEQ ID NO: 798258 - RNA, 19 nt, Homo sapiens
  misc_RNA (1)...(19): siRNA sense strand
ugaagauggaaccuuguua

SEQ ID NO: 798259 - RNA, 19 nt, Homo sapiens
  misc_RNA (1)...(19): siRNA sense strand
ucaagaggcacuaguucaa

SEQ ID NO: 798260 - RNA, 19 nt, Homo sapiens
  misc_RNA (1)...(19): siRNA sense strand
acaaagaugacgugaagga

SEQ ID NO: 798261 - RNA, 19 nt, Homo sapiens
  misc_RNA (1)...(19): siRNA sense strand
gaccugcugccuaagauga

SEQ ID NO: 798262 - RNA, 19 nt, Homo sapiens
  misc_RNA (1)...(19): siRNA sense strand
acaaagggccuggaaggaa

SEQ ID NO: 798263 - RNA, 19 nt, Homo sapiens
  misc_RNA (1)...(19): siRNA sense strand
caggaguucuggguaguga

SEQ ID NO: 798264 - RNA, 19 nt, Homo sapiens
  misc_RNA (1)...(19): siRNA sense strand
aagaggcacuaguucaaau

SEQ ID NO: 798265 - RNA, 19 nt, Homo sapiens
  misc_RNA (1)...(19): siRNA sense strand
uagaccggcuuaugaaucu

SEQ ID NO: 798266 - RNA, 19 nt, Homo sapiens
  misc_RNA (1)...(19): siRNA sense strand
gagcucaugggaccaguga

SEQ ID NO: 798267 - RNA, 19 nt, Homo sapiens
  misc_RNA (1)...(19): siRNA sense strand
gaucagauugugaacucaa

SEQ ID NO: 798268 - RNA, 19 nt, Homo sapiens
  misc_RNA (1)...(19): siRNA sense strand
gagaaagaggugaaugaag

SEQ ID NO: 798269 - RNA, 19 nt, Homo sapiens
  misc_RNA (1)...(19): siRNA sense strand
ggaaguaccaguggacucu

SEQ ID NO: 798270 - RNA, 19 nt, Homo sapiens
  misc_RNA (1)...(19): siRNA sense strand
aaaucacacuucccacugu

SEQ ID NO: 798271 - RNA, 19 nt, Homo sapiens
  misc_RNA (1)...(19): siRNA sense strand
cacacucacugcccaugaa

SEQ ID NO: 798272 - RNA, 19 nt, Homo sapiens
  misc_RNA (1)...(19): siRNA sense strand
aaaugaagaagaagaggaa

SEQ ID NO: 798273 - RNA, 19 nt, Homo sapiens
  misc_RNA (1)...(19): siRNA sense strand
ggaguucuggguagugaga

SEQ ID NO: 798274 - RNA, 19 nt, Homo sapiens
  misc_RNA (1)...(19): siRNA sense strand
aaaugucuaugaggagauu

SEQ ID NO: 798275 - RNA, 19 nt, Homo sapiens
  misc_RNA (1)...(19): siRNA sense strand
ugagaaagaggugaaugaa

SEQ ID NO: 798276 - RNA, 19 nt, Homo sapiens
  misc_RNA (1)...(19): siRNA sense strand
ccagguuucugaggaacaa

SEQ ID NO: 798277 - RNA, 19 nt, Homo sapiens
  misc_RNA (1)...(19): siRNA sense strand
caacugugaagaaagugaa

SEQ ID NO: 798278 - RNA, 19 nt, Homo sapiens
  misc_RNA (1)...(19): siRNA sense strand
gagagcuucugccauucug

SEQ ID NO: 798279 - RNA, 19 nt, Homo sapiens
  misc_RNA (1)...(19): siRNA sense strand
gaacuacaugcaggagcua

SEQ ID NO: 798280 - RNA, 19 nt, Homo sapiens
  misc_RNA (1)...(19): siRNA sense strand
cuugaagaaacacaacuua

SEQ ID NO: 798281 - RNA, 19 nt, Homo sapiens
  misc_RNA (1)...(19): siRNA sense strand
cccgacaacugugaagaaa

SEQ ID NO: 798282 - RNA, 19 nt, Homo sapiens
  misc_RNA (1)...(19): siRNA sense strand
ggagucagaggaagagaag

SEQ ID NO: 798283 - RNA, 19 nt, Homo sapiens
  misc_RNA (1)...(19): siRNA sense strand
aaccagagcuucagaaaua

SEQ ID NO: 798284 - RNA, 19 nt, Homo sapiens
  misc_RNA (1)...(19): siRNA sense strand
gaaaguguguccagcuuaa

SEQ ID NO: 798285 - RNA, 19 nt, Homo sapiens
  misc_RNA (1)...(19): siRNA sense strand
aaaggaagcugcuaucuug

SEQ ID NO: 798286 - RNA, 19 nt, Homo sapiens
  misc_RNA (1)...(19): siRNA sense strand
agacagaccugcugccuaa

SEQ ID NO: 798287 - RNA, 19 nt, Homo sapiens
  misc_RNA (1)...(19): siRNA sense strand
gagauacguuguaguuaaa

SEQ ID NO: 798288 - RNA, 19 nt, Homo sapiens
  misc_RNA (1)...(19): siRNA sense strand
ggaagaagaaugacagaaa

SEQ ID NO: 798289 - RNA, 19 nt, Homo sapiens
  misc_RNA (1)...(19): siRNA sense strand
ggacugagcaggugauuau

SEQ ID NO: 798290 - RNA, 19 nt, Homo sapiens
  misc_RNA (1)...(19): siRNA sense strand
gaagaagaaugacagaaag

SEQ ID NO: 798291 - RNA, 19 nt, Homo sapiens
  misc_RNA (1)...(19): siRNA sense strand
aagcagagcuaucacaauu

SEQ ID NO: 798292 - RNA, 19 nt, Homo sapiens
  misc_RNA (1)...(19): siRNA sense strand
gcaagagggcugcaccuua

SEQ ID NO: 798293 - RNA, 19 nt, Homo sapiens
  misc_RNA (1)...(19): siRNA sense strand
caggagagcuucugccauu

SEQ ID NO: 798294 - RNA, 19 nt, Homo sapiens
  misc_RNA (1)...(19): siRNA sense strand
ggagaacacucagcccuuu

SEQ ID NO: 798295 - RNA, 19 nt, Homo sapiens
  misc_RNA (1)...(19): siRNA sense strand
ggagaggccugcacacuca

SEQ ID NO: 798296 - RNA, 19 nt, Homo sapiens
  misc_RNA (1)...(19): siRNA sense strand
ggagagauacguuguaguu

SEQ ID NO: 798297 - RNA, 19 nt, Homo sapiens
  misc_RNA (1)...(19): siRNA sense strand
caucagagcuggaguuugg

SEQ ID NO: 798298 - RNA, 19 nt, Homo sapiens
  misc_RNA (1)...(19): siRNA sense strand
ugaagcagaugacauuuga

SEQ ID NO: 798299 - RNA, 19 nt, Homo sapiens
  misc_RNA (1)...(19): siRNA sense strand
agagauacguuguaguuaa

SEQ ID NO: 798300 - RNA, 19 nt, Homo sapiens
  misc_RNA (1)...(19): siRNA sense strand
ggagagcuaugagaauaaa

SEQ ID NO: 798301 - RNA, 19 nt, Homo sapiens
  misc_RNA (1)...(19): siRNA sense strand
guggagagcuaugagaaua

SEQ ID NO: 798302 - RNA, 19 nt, Homo sapiens
  misc_RNA (1)...(19): siRNA sense strand
caagagggcugcaccuuag

SEQ ID NO: 798303 - RNA, 19 nt, Homo sapiens
  misc_RNA (1)...(19): siRNA sense strand
gaacagcaaagagauuuaa

SEQ ID NO: 798304 - RNA, 19 nt, Homo sapiens
  misc_RNA (1)...(19): siRNA sense strand
agaaagaggugaaugaagu

SEQ ID NO: 798305 - RNA, 19 nt, Homo sapiens
  misc_RNA (1)...(19): siRNA sense strand
ucaggcaucucaaucauga

SEQ ID NO: 798306 - RNA, 19 nt, Homo sapiens
  misc_RNA (1)...(19): siRNA sense strand
acacaaagaugacgugaag

SEQ ID NO: 798307 - RNA, 19 nt, Homo sapiens
  misc_RNA (1)...(19): siRNA sense strand
cgacaacugugaagaaagu

SEQ ID NO: 798308 - RNA, 19 nt, Homo sapiens
  misc_RNA (1)...(19): siRNA sense strand
ggacucugcuccagugaug

SEQ ID NO: 798309 - RNA, 19 nt, Homo sapiens
  misc_RNA (1)...(19): siRNA sense strand
uaaagaggccuaucagaga

SEQ ID NO: 798310 - RNA, 19 nt, Homo sapiens
  misc_RNA (1)...(19): siRNA sense strand
gaagauggaaccuuguuau

SEQ ID NO: 798311 - RNA, 19 nt, Homo sapiens
  misc_RNA (1)...(19): siRNA sense strand
gcuccuaaaugucgaauuc

SEQ ID NO: 798312 - RNA, 19 nt, Homo sapiens
  misc_RNA (1)...(19): siRNA sense strand
ccaaggaauucccagugua

SEQ ID NO: 798313 - RNA, 19 nt, Homo sapiens
  misc_RNA (1)...(19): siRNA sense strand
ugaaggcgcucagaaaguu

SEQ ID NO: 798314 - RNA, 19 nt, Homo sapiens
  misc_RNA (1)...(19): siRNA sense strand
ggagaagggucacuauggu

SEQ ID NO: 798315 - RNA, 19 nt, Homo sapiens
  misc_RNA (1)...(19): siRNA sense strand
ccaauaugauucacguuga

SEQ ID NO: 798316 - RNA, 19 nt, Homo sapiens
  misc_RNA (1)...(19): siRNA sense strand
gauggaaccuuguuauacu

SEQ ID NO: 798317 - RNA, 19 nt, Homo sapiens
  misc_RNA (1)...(19): siRNA sense strand
gcaaucacgugcgcacuga

SEQ ID NO: 798318 - RNA, 19 nt, Homo sapiens
  misc_RNA (1)...(19): siRNA sense strand
gcagagcuaucacaauuuu

SEQ ID NO: 798319 - RNA, 19 nt, Homo sapiens
  misc_RNA (1)...(19): siRNA sense strand
ccucagaagaugaauauaa

SEQ ID NO: 798320 - RNA, 19 nt, Homo sapiens
  misc_RNA (1)...(19): siRNA sense strand
gaugaaacucugaaaguga

SEQ ID NO: 798321 - RNA, 19 nt, Homo sapiens
  misc_RNA (1)...(19): siRNA sense strand
gcaucaaguuucagaagga

SEQ ID NO: 798322 - RNA, 19 nt, Homo sapiens
  misc_RNA (1)...(19): siRNA sense strand
gaaggagagauacguugua

SEQ ID NO: 798323 - RNA, 19 nt, Homo sapiens
  misc_RNA (1)...(19): siRNA sense strand
ccagugagcucgggauuca

SEQ ID NO: 798324 - RNA, 19 nt, Homo sapiens
  misc_RNA (1)...(19): siRNA sense strand
ugaguaaccuggugaugga

SEQ ID NO: 798325 - RNA, 19 nt, Homo sapiens
  misc_RNA (1)...(19): siRNA sense strand
gaaauccagauccugagua

SEQ ID NO: 798326 - RNA, 19 nt, Homo sapiens
  misc_RNA (1)...(19): siRNA sense strand
ucaaguuucagaaggauua

SEQ ID NO: 798327 - RNA, 19 nt, Homo sapiens
  misc_RNA (1)...(19): siRNA sense strand
aaauccagauccugaguaa

SEQ ID NO: 798328 - RNA, 19 nt, Homo sapiens
  misc_RNA (1)...(19): siRNA sense strand
ccaagaaaaugaagaagaa

SEQ ID NO: 798329 - RNA, 19 nt, Homo sapiens
  misc_RNA (1)...(19): siRNA sense strand
gaaccuuguuauacuaaag

SEQ ID NO: 798330 - RNA, 19 nt, Homo sapiens
  misc_RNA (1)...(19): siRNA sense strand
caucuagaccggcuuauga

SEQ ID NO: 798331 - RNA, 19 nt, Homo sapiens
  misc_RNA (1)...(19): siRNA sense strand
gcaggugauuauuucaaga

SEQ ID NO: 798332 - RNA, 19 nt, Homo sapiens
  misc_RNA (1)...(19): siRNA sense strand
ucccagagcugcccucaga

SEQ ID NO: 798333 - RNA, 19 nt, Homo sapiens
  misc_RNA (1)...(19): siRNA sense strand
gagagauacguuguaguua

SEQ ID NO: 798334 - RNA, 19 nt, Homo sapiens
  misc_RNA (1)...(19): siRNA sense strand
caagguagcccguauucau

SEQ ID NO: 798335 - RNA, 19 nt, Homo sapiens
  misc_RNA (1)...(19): siRNA sense strand
gagccagguuucugaggaa

SEQ ID NO: 798336 - RNA, 19 nt, Homo sapiens
  misc_RNA (1)...(19): siRNA sense strand
ggaagcugcuaucuugaag

SEQ ID NO: 798337 - RNA, 19 nt, Homo sapiens
  misc_RNA (1)...(19): siRNA sense strand
ugaaugaagucagccagaa

SEQ ID NO: 798338 - RNA, 19 nt, Homo sapiens
  misc_RNA (1)...(19): siRNA sense strand
uuuagaagcugugcaauuc

SEQ ID NO: 798339 - RNA, 19 nt, Homo sapiens
  misc_RNA (1)...(19): siRNA sense strand
gacccucaguaacgaagua

SEQ ID NO: 798340 - RNA, 19 nt, Homo sapiens
  misc_RNA (1)...(19): siRNA sense strand
ggaaccuuguuauacuaaa

SEQ ID NO: 798341 - RNA, 19 nt, Homo sapiens
  misc_RNA (1)...(19): siRNA sense strand
ugacauggaucagauugug

SEQ ID NO: 798342 - RNA, 19 nt, Homo sapiens
  misc_RNA (1)...(19): siRNA sense strand
gagcaucuagaccggcuua

SEQ ID NO: 798343 - RNA, 19 nt, Homo sapiens
  misc_RNA (1)...(19): siRNA sense strand
gcacuggcguccacaugca

SEQ ID NO: 798344 - RNA, 19 nt, Homo sapiens
  misc_RNA (1)...(19): siRNA sense strand
gaagaccaagccaccauug

SEQ ID NO: 798345 - RNA, 19 nt, Homo sapiens
  misc_RNA (1)...(19): siRNA sense strand
gaagagaugggagggcaaa

SEQ ID NO: 798346 - RNA, 19 nt, Homo sapiens
  misc_RNA (1)...(19): siRNA sense strand
gggcaaguguaccgaggaa

SEQ ID NO: 798347 - RNA, 19 nt, Homo sapiens
  misc_RNA (1)...(19): siRNA sense strand
uaaaggaagcugcuaucuu

SEQ ID NO: 798348 - RNA, 19 nt, Homo sapiens
  misc_RNA (1)...(19): siRNA sense strand
caaaccagagcuucagaaa

SEQ ID NO: 798349 - RNA, 19 nt, Homo sapiens
  misc_RNA (1)...(19): siRNA sense strand
uuagugcccuccugaguga

SEQ ID NO: 798350 - RNA, 19 nt, Homo sapiens
  misc_RNA (1)...(19): siRNA sense strand
gguguuaaccucagaagau

SEQ ID NO: 798351 - RNA, 19 nt, Homo sapiens
  misc_RNA (1)...(19): siRNA sense strand
ggacacagaacuacaugca

SEQ ID NO: 798352 - RNA, 19 nt, Homo sapiens
  misc_RNA (1)...(19): siRNA sense strand
agaaguggaaggagagaua

SEQ ID NO: 798353 - RNA, 19 nt, Homo sapiens
  misc_RNA (1)...(19): siRNA sense strand
aaacuucagucccuacuac

SEQ ID NO: 798354 - RNA, 19 nt, Homo sapiens
  misc_RNA (1)...(19): siRNA sense strand
ugaugaaacucugaaagug

SEQ ID NO: 798355 - RNA, 19 nt, Homo sapiens
  misc_RNA (1)...(19): siRNA sense strand
aaacugaggcugccaucaa

SEQ ID NO: 798356 - RNA, 19 nt, Homo sapiens
  misc_RNA (1)...(19): siRNA sense strand
ccucuugccuccagugaga

SEQ ID NO: 798357 - RNA, 19 nt, Homo sapiens
  misc_RNA (1)...(19): siRNA sense strand
ggaaggagagauacguugu

SEQ ID NO: 798358 - RNA, 19 nt, Homo sapiens
  misc_RNA (1)...(19): siRNA sense strand
gugaaaguguguccagcuu

SEQ ID NO: 798359 - RNA, 19 nt, Homo sapiens
  misc_RNA (1)...(19): siRNA sense strand
guagaacagcaaagagauu

SEQ ID NO: 798360 - RNA, 19 nt, Homo sapiens
  misc_RNA (1)...(19): siRNA sense strand
gaaauacgagcaguucauc

SEQ ID NO: 798361 - RNA, 19 nt, Homo sapiens
  misc_RNA (1)...(19): siRNA sense strand
aaagagauuuaacgucaca

SEQ ID NO: 798362 - RNA, 19 nt, Homo sapiens
  misc_RNA (1)...(19): siRNA sense strand
gcagcaccauccgaaagaa

SEQ ID NO: 798363 - RNA, 19 nt, Homo sapiens
  misc_RNA (1)...(19): siRNA sense strand
gaacuuccagaccaccaaa

SEQ ID NO: 798364 - RNA, 19 nt, Homo sapiens
  misc_RNA (1)...(19): siRNA sense strand
caagagccgcuucagauuc

SEQ ID NO: 798365 - RNA, 19 nt, Homo sapiens
  misc_RNA (1)...(19): siRNA sense strand
uacaucagauccugcuuga

SEQ ID NO: 798366 - RNA, 19 nt, Homo sapiens
  misc_RNA (1)...(19): siRNA sense strand
gcaaaccagagcuucagaa

SEQ ID NO: 798367 - RNA, 19 nt, Homo sapiens
  misc_RNA (1)...(19): siRNA sense strand
ugcaggagcuaauggagaa

SEQ ID NO: 798368 - RNA, 19 nt, Homo sapiens
  misc_RNA (1)...(19): siRNA sense strand
cugaagacauaaagaagug

SEQ ID NO: 798369 - RNA, 19 nt, Homo sapiens
  misc_RNA (1)...(19): siRNA sense strand
agauuuaacgucacaguuu

SEQ ID NO: 798370 - RNA, 19 nt, Homo sapiens
  misc_RNA (1)...(19): siRNA sense strand
cagcuuaacagaucuaaag

SEQ ID NO: 798371 - RNA, 19 nt, Homo sapiens
  misc_RNA (1)...(19): siRNA sense strand
caagaggcacuaguucaaa

SEQ ID NO: 798372 - RNA, 19 nt, Homo sapiens
  misc_RNA (1)...(19): siRNA sense strand
acauugaucuggugguuca

SEQ ID NO: 798373 - RNA, 19 nt, Homo sapiens
  misc_RNA (1)...(19): siRNA sense strand
gaagcagagcuaucacaau

SEQ ID NO: 798374 - RNA, 19 nt, Homo sapiens
  misc_RNA (1)...(19): siRNA sense strand
gaccagaagagguuuagug

SEQ ID NO: 798375 - RNA, 19 nt, Homo sapiens
  misc_RNA (1)...(19): siRNA sense strand
gaauaaagaggccuaucag

SEQ ID NO: 798376 - RNA, 19 nt, Homo sapiens
  misc_RNA (1)...(19): siRNA sense strand
gaucaagguagcccguauu

SEQ ID NO: 798377 - RNA, 19 nt, Homo sapiens
  misc_RNA (1)...(19): siRNA sense strand
gcacacucacugcccauga

SEQ ID NO: 798378 - RNA, 19 nt, Homo sapiens
  misc_RNA (1)...(19): siRNA sense strand
gauggaagaagauacgaau

SEQ ID NO: 798379 - RNA, 19 nt, Homo sapiens
  misc_RNA (1)...(19): siRNA sense strand
gagcaggugauuauuucaa

SEQ ID NO: 798380 - RNA, 19 nt, Homo sapiens
  misc_RNA (1)...(19): siRNA sense strand
gaaacucugaaagugauaa

SEQ ID NO: 798381 - RNA, 19 nt, Homo sapiens
  misc_RNA (1)...(19): siRNA sense strand
gagaagggucacuaugguu

SEQ ID NO: 798382 - RNA, 19 nt, Homo sapiens
  misc_RNA (1)...(19): siRNA sense strand
ugaaguagaacagcaaaga

SEQ ID NO: 798383 - RNA, 19 nt, Homo sapiens
  misc_RNA (1)...(19): siRNA sense strand
gaacagggccaguauggaa

SEQ ID NO: 798384 - RNA, 19 nt, Homo sapiens
  misc_RNA (1)...(19): siRNA sense strand
ccacgcagcacuacuauga

SEQ ID NO: 798385 - RNA, 19 nt, Homo sapiens
  misc_RNA (1)...(19): siRNA sense strand
ggaccaacaucaacaugca

SEQ ID NO: 798386 - RNA, 19 nt, Homo sapiens
  misc_RNA (1)...(19): siRNA sense strand
agaagaugcuggacgagaa

SEQ ID NO: 798387 - RNA, 19 nt, Homo sapiens
  misc_RNA (1)...(19): siRNA sense strand
cagcaaaccauccagaaga

SEQ ID NO: 798388 - RNA, 19 nt, Homo sapiens
  misc_RNA (1)...(19): siRNA sense strand
gcuaugaacagggccagua

SEQ ID NO: 798389 - RNA, 19 nt, Homo sapiens
  misc_RNA (1)...(19): siRNA sense strand
cgacggccauggcgauuac

SEQ ID NO: 798390 - RNA, 19 nt, Homo sapiens
  misc_RNA (1)...(19): siRNA sense strand
gcagcaaaccauccagaag

SEQ ID NO: 798391 - RNA, 19 nt, Homo sapiens
  misc_RNA (1)...(19): siRNA sense strand
gggccaguauggaaauuac

SEQ ID NO: 798392 - RNA, 19 nt, Homo sapiens
  misc_RNA (1)...(19): siRNA sense strand
caacccagucuccaugaug

SEQ ID NO: 798393 - RNA, 19 nt, Homo sapiens
  misc_RNA (1)...(19): siRNA sense strand
ugguauaccuggccacgau

SEQ ID NO: 798394 - RNA, 19 nt, Homo sapiens
  misc_RNA (1)...(19): siRNA sense strand
gcacgcaguaccagcagau

SEQ ID NO: 798395 - RNA, 19 nt, Homo sapiens
  misc_RNA (1)...(19): siRNA sense strand
gccaggaggaguacuaugg

SEQ ID NO: 798396 - RNA, 19 nt, Homo sapiens
  misc_RNA (1)...(19): siRNA sense strand
ccaugggccagcaguacua

SEQ ID NO: 798397 - RNA, 19 nt, Homo sapiens
  misc_RNA (1)...(19): siRNA sense strand
cgagaaccaccaccugauc

SEQ ID NO: 798398 - RNA, 19 nt, Homo sapiens
  misc_RNA (1)...(19): siRNA sense strand
gaagaugcuggacgagaac

SEQ ID NO: 798399 - RNA, 19 nt, Homo sapiens
  misc_RNA (1)...(19): siRNA sense strand
agcaaaccauccagaagau

SEQ ID NO: 798400 - RNA, 19 nt, Homo sapiens
  misc_RNA (1)...(19): siRNA sense strand
uaccagcagucauccuaca

SEQ ID NO: 798401 - RNA, 19 nt, Homo sapiens
  misc_RNA (1)...(19): siRNA sense strand
ccaacccagucuccaugau

SEQ ID NO: 798402 - RNA, 19 nt, Homo sapiens
  misc_RNA (1)...(19): siRNA sense strand
acaucaacaugcaguccaa

SEQ ID NO: 798403 - RNA, 19 nt, Homo sapiens
  misc_RNA (1)...(19): siRNA sense strand
ccuaccagcagucauccua

SEQ ID NO: 798404 - RNA, 19 nt, Homo sapiens
  misc_RNA (1)...(19): siRNA sense strand
gaacagggccaguauggaa

SEQ ID NO: 798405 - RNA, 19 nt, Homo sapiens
  misc_RNA (1)...(19): siRNA sense strand
ccacgcagcacuacuauga

SEQ ID NO: 798406 - RNA, 19 nt, Homo sapiens
  misc_RNA (1)...(19): siRNA sense strand
ggaccaacaucaacaugca

SEQ ID NO: 798407 - RNA, 19 nt, Homo sapiens
  misc_RNA (1)...(19): siRNA sense strand
agaagaugcuggacgagaa

SEQ ID NO: 798408 - RNA, 19 nt, Homo sapiens
  misc_RNA (1)...(19): siRNA sense strand
cagcaaaccauccagaaga

SEQ ID NO: 798409 - RNA, 19 nt, Homo sapiens
  misc_RNA (1)...(19): siRNA sense strand
gcuaugaacagggccagua

SEQ ID NO: 798410 - RNA, 19 nt, Homo sapiens
  misc_RNA (1)...(19): siRNA sense strand
cgacggccauggcgauuac

SEQ ID NO: 798411 - RNA, 19 nt, Homo sapiens
  misc_RNA (1)...(19): siRNA sense strand
gcagcaaaccauccagaag

SEQ ID NO: 798412 - RNA, 19 nt, Homo sapiens
  misc_RNA (1)...(19): siRNA sense strand
gggccaguauggaaauuac

SEQ ID NO: 798413 - RNA, 19 nt, Homo sapiens
  misc_RNA (1)...(19): siRNA sense strand
caacccagucuccaugaug

SEQ ID NO: 798414 - RNA, 19 nt, Homo sapiens
  misc_RNA (1)...(19): siRNA sense strand
ugguauaccuggccacgau

SEQ ID NO: 798415 - RNA, 19 nt, Homo sapiens
  misc_RNA (1)...(19): siRNA sense strand
gcacgcaguaccagcagau

SEQ ID NO: 798416 - RNA, 19 nt, Homo sapiens
  misc_RNA (1)...(19): siRNA sense strand
gccaggaggaguacuaugg

SEQ ID NO: 798417 - RNA, 19 nt, Homo sapiens
  misc_RNA (1)...(19): siRNA sense strand
ccaugggccagcaguacua

SEQ ID NO: 798418 - RNA, 19 nt, Homo sapiens
  misc_RNA (1)...(19): siRNA sense strand
cgagaaccaccaccugauc

SEQ ID NO: 798419 - RNA, 19 nt, Homo sapiens
  misc_RNA (1)...(19): siRNA sense strand
gaagaugcuggacgagaac

SEQ ID NO: 798420 - RNA, 19 nt, Homo sapiens
  misc_RNA (1)...(19): siRNA sense strand
agcaaaccauccagaagau

SEQ ID NO: 798421 - RNA, 19 nt, Homo sapiens
  misc_RNA (1)...(19): siRNA sense strand
uaccagcagucauccuaca

SEQ ID NO: 798422 - RNA, 19 nt, Homo sapiens
  misc_RNA (1)...(19): siRNA sense strand
ccaacccagucuccaugau

SEQ ID NO: 798423 - RNA, 19 nt, Homo sapiens
  misc_RNA (1)...(19): siRNA sense strand
acaucaacaugcaguccaa

SEQ ID NO: 798424 - RNA, 19 nt, Homo sapiens
  misc_RNA (1)...(19): siRNA sense strand
ccuaccagcagucauccua

SEQ ID NO: 798425 - RNA, 19 nt, Homo sapiens
  misc_RNA (1)...(19): siRNA sense strand
gaaaugaacccuucgaaug

SEQ ID NO: 798426 - RNA, 19 nt, Homo sapiens
  misc_RNA (1)...(19): siRNA sense strand
ccagaaagcugccagaaau

SEQ ID NO: 798427 - RNA, 19 nt, Homo sapiens
  misc_RNA (1)...(19): siRNA sense strand
caacagcacuucugaccaa

SEQ ID NO: 798428 - RNA, 19 nt, Homo sapiens
  misc_RNA (1)...(19): siRNA sense strand
gaacaagcauaaggagaaa

SEQ ID NO: 798429 - RNA, 19 nt, Homo sapiens
  misc_RNA (1)...(19): siRNA sense strand
gaacaggaauuuucuauca

SEQ ID NO: 798430 - RNA, 19 nt, Homo sapiens
  misc_RNA (1)...(19): siRNA sense strand
ccacaaagcgggcuaagaa

SEQ ID NO: 798431 - RNA, 19 nt, Homo sapiens
  misc_RNA (1)...(19): siRNA sense strand
gaaagcauuugacaauaca

SEQ ID NO: 798432 - RNA, 19 nt, Homo sapiens
  misc_RNA (1)...(19): siRNA sense strand
ccagugaccucaaaggauu

SEQ ID NO: 798433 - RNA, 19 nt, Homo sapiens
  misc_RNA (1)...(19): siRNA sense strand
ugaaguaguuaacaggaua

SEQ ID NO: 798434 - RNA, 19 nt, Homo sapiens
  misc_RNA (1)...(19): siRNA sense strand
ggucaagaaugcccagaaa

SEQ ID NO: 798435 - RNA, 19 nt, Homo sapiens
  misc_RNA (1)...(19): siRNA sense strand
agacagcagugcauaguaa

SEQ ID NO: 798436 - RNA, 19 nt, Homo sapiens
  misc_RNA (1)...(19): siRNA sense strand
gaggagcuaugaaggcuuu

SEQ ID NO: 798437 - RNA, 19 nt, Homo sapiens
  misc_RNA (1)...(19): siRNA sense strand
gagauuggcucccuaaagg

SEQ ID NO: 798438 - RNA, 19 nt, Homo sapiens
  misc_RNA (1)...(19): siRNA sense strand
guaguuaacaggauacuuu

SEQ ID NO: 798439 - RNA, 19 nt, Homo sapiens
  misc_RNA (1)...(19): siRNA sense strand
cagaaagcauuugacaaua

SEQ ID NO: 798440 - RNA, 19 nt, Homo sapiens
  misc_RNA (1)...(19): siRNA sense strand
ugaagacacucaagaggaa

SEQ ID NO: 798441 - RNA, 19 nt, Homo sapiens
  misc_RNA (1)...(19): siRNA sense strand
ggaaaugcugagaaaguua

SEQ ID NO: 798442 - RNA, 19 nt, Homo sapiens
  misc_RNA (1)...(19): siRNA sense strand
ggaagcagcccacccaguu

SEQ ID NO: 798443 - RNA, 19 nt, Homo sapiens
  misc_RNA (1)...(19): siRNA sense strand
aaucagaucuuguccuguu

SEQ ID NO: 798444 - RNA, 19 nt, Homo sapiens
  misc_RNA (1)...(19): siRNA sense strand
ggcaggagaugguuuggaa

SEQ ID NO: 798445 - RNA, 19 nt, Homo sapiens
  misc_RNA (1)...(19): siRNA sense strand
aaacugggcaagcagauua

SEQ ID NO: 798446 - RNA, 19 nt, Homo sapiens
  misc_RNA (1)...(19): siRNA sense strand
ccagaaagcauuugacaau

SEQ ID NO: 798447 - RNA, 19 nt, Homo sapiens
  misc_RNA (1)...(19): siRNA sense strand
gaaagaagccacuccaaaa

SEQ ID NO: 798448 - RNA, 19 nt, Homo sapiens
  misc_RNA (1)...(19): siRNA sense strand
ucaauaagaugaagacacu

SEQ ID NO: 798449 - RNA, 19 nt, Homo sapiens
  misc_RNA (1)...(19): siRNA sense strand
gcgaugaccuccaguuucu

SEQ ID NO: 798450 - RNA, 19 nt, Homo sapiens
  misc_RNA (1)...(19): siRNA sense strand
ccaaugacaccaugacaaa

SEQ ID NO: 798451 - RNA, 19 nt, Homo sapiens
  misc_RNA (1)...(19): siRNA sense strand
auucaacucuccauuauga

SEQ ID NO: 798452 - RNA, 19 nt, Homo sapiens
  misc_RNA (1)...(19): siRNA sense strand
gaagaagccagccgcaguu

SEQ ID NO: 798453 - RNA, 19 nt, Homo sapiens
  misc_RNA (1)...(19): siRNA sense strand
gaaaugcugagaaaguuau

SEQ ID NO: 798454 - RNA, 19 nt, Homo sapiens
  misc_RNA (1)...(19): siRNA sense strand
gaagguuauuccgcagaua

SEQ ID NO: 798455 - RNA, 19 nt, Homo sapiens
  misc_RNA (1)...(19): siRNA sense strand
caugagcagugaaguaguu

SEQ ID NO: 798456 - RNA, 19 nt, Homo sapiens
  misc_RNA (1)...(19): siRNA sense strand
aaaugaacccuucgaauga

SEQ ID NO: 798457 - RNA, 19 nt, Homo sapiens
  misc_RNA (1)...(19): siRNA sense strand
aaacgaagguggacuugca

SEQ ID NO: 798458 - RNA, 19 nt, Homo sapiens
  misc_RNA (1)...(19): siRNA sense strand
gaaaagaucaugccagaga

SEQ ID NO: 798459 - RNA, 19 nt, Homo sapiens
  misc_RNA (1)...(19): siRNA sense strand
gaauccauaucccagcauu

SEQ ID NO: 798460 - RNA, 19 nt, Homo sapiens
  misc_RNA (1)...(19): siRNA sense strand
gugagaagaacaagcauaa

SEQ ID NO: 798461 - RNA, 19 nt, Homo sapiens
  misc_RNA (1)...(19): siRNA sense strand
gagggaagucugaagcuaa

SEQ ID NO: 798462 - RNA, 19 nt, Homo sapiens
  misc_RNA (1)...(19): siRNA sense strand
uggaaugccuuacacauca

SEQ ID NO: 798463 - RNA, 19 nt, Homo sapiens
  misc_RNA (1)...(19): siRNA sense strand
gaaguuggcccagcuagug

SEQ ID NO: 798464 - RNA, 19 nt, Homo sapiens
  misc_RNA (1)...(19): siRNA sense strand
ugugaucacuccagucaaa

SEQ ID NO: 798465 - RNA, 19 nt, Homo sapiens
  misc_RNA (1)...(19): siRNA sense strand
caaccaaccauaagaggaa

SEQ ID NO: 798466 - RNA, 19 nt, Homo sapiens
  misc_RNA (1)...(19): siRNA sense strand
ucugaacccucccaaggua

SEQ ID NO: 798467 - RNA, 19 nt, Homo sapiens
  misc_RNA (1)...(19): siRNA sense strand
aaacacaaacacaagcaua

SEQ ID NO: 798468 - RNA, 19 nt, Homo sapiens
  misc_RNA (1)...(19): siRNA sense strand
gcagugaaguaguuaacag

SEQ ID NO: 798469 - RNA, 19 nt, Homo sapiens
  misc_RNA (1)...(19): siRNA sense strand
gcaucgaccugcccagcaa

SEQ ID NO: 798470 - RNA, 19 nt, Homo sapiens
  misc_RNA (1)...(19): siRNA sense strand
ccaagcggcugcagagaca

SEQ ID NO: 798471 - RNA, 19 nt, Homo sapiens
  misc_RNA (1)...(19): siRNA sense strand
ggagaggacaaacccauga

SEQ ID NO: 798472 - RNA, 19 nt, Homo sapiens
  misc_RNA (1)...(19): siRNA sense strand
gcaaaggcccaggguaaga

SEQ ID NO: 798473 - RNA, 19 nt, Homo sapiens
  misc_RNA (1)...(19): siRNA sense strand
ggaaugccuuacacaucaa

SEQ ID NO: 798474 - RNA, 19 nt, Homo sapiens
  misc_RNA (1)...(19): siRNA sense strand
cagcagccauugaaagcaa

SEQ ID NO: 798475 - RNA, 19 nt, Homo sapiens
  misc_RNA (1)...(19): siRNA sense strand
gaaagcgacgacgcaauuu

SEQ ID NO: 798476 - RNA, 19 nt, Homo sapiens
  misc_RNA (1)...(19): siRNA sense strand
acauucaacucuccauuau

SEQ ID NO: 798477 - RNA, 19 nt, Homo sapiens
  misc_RNA (1)...(19): siRNA sense strand
ucaagaagccaaagcacaa

SEQ ID NO: 798478 - RNA, 19 nt, Homo sapiens
  misc_RNA (1)...(19): siRNA sense strand
agaaagcgacgacgcaauu

SEQ ID NO: 798479 - RNA, 19 nt, Homo sapiens
  misc_RNA (1)...(19): siRNA sense strand
gagaugguuuggaagaaca

SEQ ID NO: 798480 - RNA, 19 nt, Homo sapiens
  misc_RNA (1)...(19): siRNA sense strand
agaaagcauuugacaauac

SEQ ID NO: 798481 - RNA, 19 nt, Homo sapiens
  misc_RNA (1)...(19): siRNA sense strand
agaaagaagccacuccaaa

SEQ ID NO: 798482 - RNA, 19 nt, Homo sapiens
  misc_RNA (1)...(19): siRNA sense strand
ggaaagaggaaacacaaac

SEQ ID NO: 798483 - RNA, 19 nt, Homo sapiens
  misc_RNA (1)...(19): siRNA sense strand
ccaagauccuguccaccaa

SEQ ID NO: 798484 - RNA, 19 nt, Homo sapiens
  misc_RNA (1)...(19): siRNA sense strand
ucagugcucuuccaaccaa

SEQ ID NO: 798485 - RNA, 19 nt, Homo sapiens
  misc_RNA (1)...(19): siRNA sense strand
uaagucagaccauaccaaa

SEQ ID NO: 798486 - RNA, 19 nt, Homo sapiens
  misc_RNA (1)...(19): siRNA sense strand
gggaacacguggagucagu

SEQ ID NO: 798487 - RNA, 19 nt, Homo sapiens
  misc_RNA (1)...(19): siRNA sense strand
gagaagaacaagcauaagg

SEQ ID NO: 798488 - RNA, 19 nt, Homo sapiens
  misc_RNA (1)...(19): siRNA sense strand
ucaccaaguuccaaguguu

SEQ ID NO: 798489 - RNA, 19 nt, Homo sapiens
  misc_RNA (1)...(19): siRNA sense strand
uggaggagcuaaucaccaa

SEQ ID NO: 798490 - RNA, 19 nt, Homo sapiens
  misc_RNA (1)...(19): siRNA sense strand
gcaaaagcaucucauugug

SEQ ID NO: 798491 - RNA, 19 nt, Homo sapiens
  misc_RNA (1)...(19): siRNA sense strand
uggaaaugcugagaaaguu

SEQ ID NO: 798492 - RNA, 19 nt, Homo sapiens
  misc_RNA (1)...(19): siRNA sense strand
gaacacguggagucaguug

SEQ ID NO: 798493 - RNA, 19 nt, Homo sapiens
  misc_RNA (1)...(19): siRNA sense strand
uaaagauucagaccacaaa

SEQ ID NO: 798494 - RNA, 19 nt, Homo sapiens
  misc_RNA (1)...(19): siRNA sense strand
gcagcuaugcacccacuuu

SEQ ID NO: 798495 - RNA, 19 nt, Homo sapiens
  misc_RNA (1)...(19): siRNA sense strand
gauccaaccaaccauaaga

SEQ ID NO: 798496 - RNA, 19 nt, Homo sapiens
  misc_RNA (1)...(19): siRNA sense strand
ugugauaagucagaccaua

SEQ ID NO: 798497 - RNA, 19 nt, Homo sapiens
  misc_RNA (1)...(19): siRNA sense strand
ggaagucugaagcuaaaga

SEQ ID NO: 798498 - RNA, 19 nt, Homo sapiens
  misc_RNA (1)...(19): siRNA sense strand
ggacacaggccaaggaaaa

SEQ ID NO: 798499 - RNA, 19 nt, Homo sapiens
  misc_RNA (1)...(19): siRNA sense strand
caccucaguuccacacaaa

SEQ ID NO: 798500 - RNA, 19 nt, Homo sapiens
  misc_RNA (1)...(19): siRNA sense strand
ucaaagaagaagcguggua

SEQ ID NO: 798501 - RNA, 19 nt, Homo sapiens
  misc_RNA (1)...(19): siRNA sense strand
gcacaagaggaaacggaaa

SEQ ID NO: 798502 - RNA, 19 nt, Homo sapiens
  misc_RNA (1)...(19): siRNA sense strand
ccagaaauccagcauccaa

SEQ ID NO: 798503 - RNA, 19 nt, Homo sapiens
  misc_RNA (1)...(19): siRNA sense strand
agaacaagcauaaggagaa

SEQ ID NO: 798504 - RNA, 19 nt, Homo sapiens
  misc_RNA (1)...(19): siRNA sense strand
gcauaaagccaagcaugga

SEQ ID NO: 798505 - RNA, 19 nt, Homo sapiens
  misc_RNA (1)...(19): siRNA sense strand
ccaaaucuccagcccauca

SEQ ID NO: 798506 - RNA, 19 nt, Homo sapiens
  misc_RNA (1)...(19): siRNA sense strand
ggccaccucugauaaacug

SEQ ID NO: 798507 - RNA, 19 nt, Homo sapiens
  misc_RNA (1)...(19): siRNA sense strand
guuauggccaccucugaua

SEQ ID NO: 798508 - RNA, 19 nt, Homo sapiens
  misc_RNA (1)...(19): siRNA sense strand
gagaguuuccuggcacuaa

SEQ ID NO: 798509 - RNA, 19 nt, Homo sapiens
  misc_RNA (1)...(19): siRNA sense strand
cggaagaugugcaacuaca

SEQ ID NO: 798510 - RNA, 19 nt, Homo sapiens
  misc_RNA (1)...(19): siRNA sense strand
ccaccaugaugaccaggaa

SEQ ID NO: 798511 - RNA, 19 nt, Homo sapiens
  misc_RNA (1)...(19): siRNA sense strand
cgaaggagguacucuuuug

SEQ ID NO: 798512 - RNA, 19 nt, Homo sapiens
  misc_RNA (1)...(19): siRNA sense strand
aaagcgacgacgcaauuua

SEQ ID NO: 798513 - RNA, 19 nt, Homo sapiens
  misc_RNA (1)...(19): siRNA sense strand
ucaagucauguccggauua

SEQ ID NO: 798514 - RNA, 19 nt, Homo sapiens
  misc_RNA (1)...(19): siRNA sense strand
ggagaugguuuggaagaac

SEQ ID NO: 798515 - RNA, 19 nt, Homo sapiens
  misc_RNA (1)...(19): siRNA sense strand
ccaguggucggcuccauaa

SEQ ID NO: 798516 - RNA, 19 nt, Homo sapiens
  misc_RNA (1)...(19): siRNA sense strand
ggacaacccggaggccauu

SEQ ID NO: 798517 - RNA, 19 nt, Homo sapiens
  misc_RNA (1)...(19): siRNA sense strand
ccuugaaacugguggaaau

SEQ ID NO: 798518 - RNA, 19 nt, Homo sapiens
  misc_RNA (1)...(19): siRNA sense strand
gcccguggcuuccuuugca

SEQ ID NO: 798519 - RNA, 19 nt, Homo sapiens
  misc_RNA (1)...(19): siRNA sense strand
gcggaaagaggaaacacaa

SEQ ID NO: 798520 - RNA, 19 nt, Homo sapiens
  misc_RNA (1)...(19): siRNA sense strand
ucguaggacuucagacuug

SEQ ID NO: 798521 - RNA, 19 nt, Homo sapiens
  misc_RNA (1)...(19): siRNA sense strand
ggaguuacaccuucuacca

SEQ ID NO: 798522 - RNA, 19 nt, Homo sapiens
  misc_RNA (1)...(19): siRNA sense strand
gagguacucuuuugauuuc

SEQ ID NO: 798523 - RNA, 19 nt, Homo sapiens
  misc_RNA (1)...(19): siRNA sense strand
gaaauggguggcaggagau

SEQ ID NO: 798524 - RNA, 19 nt, Homo sapiens
  misc_RNA (1)...(19): siRNA sense strand
agggaagucugaagcuaaa

SEQ ID NO: 798525 - RNA, 19 nt, Homo sapiens
  misc_RNA (1)...(19): siRNA sense strand
gaaagaagcccuugggaua

SEQ ID NO: 798526 - RNA, 19 nt, Homo sapiens
  misc_RNA (1)...(19): siRNA sense strand
gaaauaagcuaugcaauca

SEQ ID NO: 798527 - RNA, 19 nt, Homo sapiens
  misc_RNA (1)...(19): siRNA sense strand
gcaaaggaauguauacaaa

SEQ ID NO: 798528 - RNA, 19 nt, Homo sapiens
  misc_RNA (1)...(19): siRNA sense strand
gaagcuagcuaaagaaguu

SEQ ID NO: 798529 - RNA, 19 nt, Homo sapiens
  misc_RNA (1)...(19): siRNA sense strand
gaaggcaucucuacuaaga

SEQ ID NO: 798530 - RNA, 19 nt, Homo sapiens
  misc_RNA (1)...(19): siRNA sense strand
gcacaucuuugcacucuuu

SEQ ID NO: 798531 - RNA, 19 nt, Homo sapiens
  misc_RNA (1)...(19): siRNA sense strand
gcagaugguucagcaauuu

SEQ ID NO: 798532 - RNA, 19 nt, Homo sapiens
  misc_RNA (1)...(19): siRNA sense strand
guauaaagaugaugaggaa

SEQ ID NO: 798533 - RNA, 19 nt, Homo sapiens
  misc_RNA (1)...(19): siRNA sense strand
gcagucagguucacaagaa

SEQ ID NO: 798534 - RNA, 19 nt, Homo sapiens
  misc_RNA (1)...(19): siRNA sense strand
caaaggaggccaacacuaa

SEQ ID NO: 798535 - RNA, 19 nt, Homo sapiens
  misc_RNA (1)...(19): siRNA sense strand
gaaacagauuguaaaguug

SEQ ID NO: 798536 - RNA, 19 nt, Homo sapiens
  misc_RNA (1)...(19): siRNA sense strand
gagaaaugauuaugcaguu

SEQ ID NO: 798537 - RNA, 19 nt, Homo sapiens
  misc_RNA (1)...(19): siRNA sense strand
ccacacguguuaaaucuaa

SEQ ID NO: 798538 - RNA, 19 nt, Homo sapiens
  misc_RNA (1)...(19): siRNA sense strand
ggacauagaugggaagaag

SEQ ID NO: 798539 - RNA, 19 nt, Homo sapiens
  misc_RNA (1)...(19): siRNA sense strand
cauagaacaugaaguagaa

SEQ ID NO: 798540 - RNA, 19 nt, Homo sapiens
  misc_RNA (1)...(19): siRNA sense strand
gaagacccaucaaggaaga

SEQ ID NO: 798541 - RNA, 19 nt, Homo sapiens
  misc_RNA (1)...(19): siRNA sense strand
caacaaagcugaaaaugau

SEQ ID NO: 798542 - RNA, 19 nt, Homo sapiens
  misc_RNA (1)...(19): siRNA sense strand
gaaagcuuguccugguaua

SEQ ID NO: 798543 - RNA, 19 nt, Homo sapiens
  misc_RNA (1)...(19): siRNA sense strand
gaccagguauugcuauuga

SEQ ID NO: 798544 - RNA, 19 nt, Homo sapiens
  misc_RNA (1)...(19): siRNA sense strand
caacaaauguauccgagau

SEQ ID NO: 798545 - RNA, 19 nt, Homo sapiens
  misc_RNA (1)...(19): siRNA sense strand
ggagaucagccaccagaua

SEQ ID NO: 798546 - RNA, 19 nt, Homo sapiens
  misc_RNA (1)...(19): siRNA sense strand
cggaaaggauuguugcuaa

SEQ ID NO: 798547 - RNA, 19 nt, Homo sapiens
  misc_RNA (1)...(19): siRNA sense strand
gaaguucgccuugagauug

SEQ ID NO: 798548 - RNA, 19 nt, Homo sapiens
  misc_RNA (1)...(19): siRNA sense strand
uaaaggcauuuccuccaua

SEQ ID NO: 798549 - RNA, 19 nt, Homo sapiens
  misc_RNA (1)...(19): siRNA sense strand
gaguguggaucugguaaua

SEQ ID NO: 798550 - RNA, 19 nt, Homo sapiens
  misc_RNA (1)...(19): siRNA sense strand
gaagacaaaggaccaggua

SEQ ID NO: 798551 - RNA, 19 nt, Homo sapiens
  misc_RNA (1)...(19): siRNA sense strand
agggagaacugucugauuu

SEQ ID NO: 798552 - RNA, 19 nt, Homo sapiens
  misc_RNA (1)...(19): siRNA sense strand
gggaugagaugcuucgaau

SEQ ID NO: 798553 - RNA, 19 nt, Homo sapiens
  misc_RNA (1)...(19): siRNA sense strand
gagaaagaauugcgaagag

SEQ ID NO: 798554 - RNA, 19 nt, Homo sapiens
  misc_RNA (1)...(19): siRNA sense strand
ggaguucaaugagaaagaa

SEQ ID NO: 798555 - RNA, 19 nt, Homo sapiens
  misc_RNA (1)...(19): siRNA sense strand
ucaaguagauacccuggaa

SEQ ID NO: 798556 - RNA, 19 nt, Homo sapiens
  misc_RNA (1)...(19): siRNA sense strand
gaagagaaauaagcuaugc

SEQ ID NO: 798557 - RNA, 19 nt, Homo sapiens
  misc_RNA (1)...(19): siRNA sense strand
gaauuaaucaacacuguga

SEQ ID NO: 798558 - RNA, 19 nt, Homo sapiens
  misc_RNA (1)...(19): siRNA sense strand
gaaagaauugcgaagagaa

SEQ ID NO: 798559 - RNA, 19 nt, Homo sapiens
  misc_RNA (1)...(19): siRNA sense strand
caaagacuaucgcuuccuu

SEQ ID NO: 798560 - RNA, 19 nt, Homo sapiens
  misc_RNA (1)...(19): siRNA sense strand
ucaccaaacuggaccuuau

SEQ ID NO: 798561 - RNA, 19 nt, Homo sapiens
  misc_RNA (1)...(19): siRNA sense strand
caaggaagaccaaagcauu

SEQ ID NO: 798562 - RNA, 19 nt, Homo sapiens
  misc_RNA (1)...(19): siRNA sense strand
gacaguugcucuccauaga

SEQ ID NO: 798563 - RNA, 19 nt, Homo sapiens
  misc_RNA (1)...(19): siRNA sense strand
gaugagaugcuucgaaugu

SEQ ID NO: 798564 - RNA, 19 nt, Homo sapiens
  misc_RNA (1)...(19): siRNA sense strand
gaauugcgaagagaaauaa

SEQ ID NO: 798565 - RNA, 19 nt, Homo sapiens
  misc_RNA (1)...(19): siRNA sense strand
ggagaacugucugauuuua

SEQ ID NO: 798566 - RNA, 19 nt, Homo sapiens
  misc_RNA (1)...(19): siRNA sense strand
uggaaggcaucucuacuaa

SEQ ID NO: 798567 - RNA, 19 nt, Homo sapiens
  misc_RNA (1)...(19): siRNA sense strand
gagaucagccaccagauau

SEQ ID NO: 798568 - RNA, 19 nt, Homo sapiens
  misc_RNA (1)...(19): siRNA sense strand
acuagaauccucccuguua

SEQ ID NO: 798569 - RNA, 19 nt, Homo sapiens
  misc_RNA (1)...(19): siRNA sense strand
ucagagaaaugauuaugca

SEQ ID NO: 798570 - RNA, 19 nt, Homo sapiens
  misc_RNA (1)...(19): siRNA sense strand
uagcacaguuguauucuuc

SEQ ID NO: 798571 - RNA, 19 nt, Homo sapiens
  misc_RNA (1)...(19): siRNA sense strand
caacauuggcaucaugaaa

SEQ ID NO: 798572 - RNA, 19 nt, Homo sapiens
  misc_RNA (1)...(19): siRNA sense strand
gauuguugcuaaccacauu

SEQ ID NO: 798573 - RNA, 19 nt, Homo sapiens
  misc_RNA (1)...(19): siRNA sense strand
gggauacccuaccaaacuu

SEQ ID NO: 798574 - RNA, 19 nt, Homo sapiens
  misc_RNA (1)...(19): siRNA sense strand
acauaucgcugaccgaaug

SEQ ID NO: 798575 - RNA, 19 nt, Homo sapiens
  misc_RNA (1)...(19): siRNA sense strand
acacugaucuugcaaacuc

SEQ ID NO: 798576 - RNA, 19 nt, Homo sapiens
  misc_RNA (1)...(19): siRNA sense strand
gaaaugauuaugcaguuca

SEQ ID NO: 798577 - RNA, 19 nt, Homo sapiens
  misc_RNA (1)...(19): siRNA sense strand
ggauacugguucguccuua

SEQ ID NO: 798578 - RNA, 19 nt, Homo sapiens
  misc_RNA (1)...(19): siRNA sense strand
uaaugcaccuuaugaucaa

SEQ ID NO: 798579 - RNA, 19 nt, Homo sapiens
  misc_RNA (1)...(19): siRNA sense strand
cuaccaaacuucaggaaca

SEQ ID NO: 798580 - RNA, 19 nt, Homo sapiens
  misc_RNA (1)...(19): siRNA sense strand
gagaagggaagacaaagga

SEQ ID NO: 798581 - RNA, 19 nt, Homo sapiens
  misc_RNA (1)...(19): siRNA sense strand
gaaacggaaaggauuguug

SEQ ID NO: 798582 - RNA, 19 nt, Homo sapiens
  misc_RNA (1)...(19): siRNA sense strand
gaagaguguggaucuggua

SEQ ID NO: 798583 - RNA, 19 nt, Homo sapiens
  misc_RNA (1)...(19): siRNA sense strand
caacuuaccaaccacauuc

SEQ ID NO: 798584 - RNA, 19 nt, Homo sapiens
  misc_RNA (1)...(19): siRNA sense strand
uaguaaagauggaguucaa

SEQ ID NO: 798585 - RNA, 19 nt, Homo sapiens
  misc_RNA (1)...(19): siRNA sense strand
cuccauacccauuaauuua

SEQ ID NO: 798586 - RNA, 19 nt, Homo sapiens
  misc_RNA (1)...(19): siRNA sense strand
ugagaugcuucgaauguau

SEQ ID NO: 798587 - RNA, 19 nt, Homo sapiens
  misc_RNA (1)...(19): siRNA sense strand
ggucuauccugacaaaucu

SEQ ID NO: 798588 - RNA, 19 nt, Homo sapiens
  misc_RNA (1)...(19): siRNA sense strand
gcaaaggaaagaaauuuac

SEQ ID NO: 798589 - RNA, 19 nt, Homo sapiens
  misc_RNA (1)...(19): siRNA sense strand
ucaagucucuuacaucaac

SEQ ID NO: 798590 - RNA, 19 nt, Homo sapiens
  misc_RNA (1)...(19): siRNA sense strand
ggaaaggauuguugcuaac

SEQ ID NO: 798591 - RNA, 19 nt, Homo sapiens
  misc_RNA (1)...(19): siRNA sense strand
uaaagauggaguucaauga

SEQ ID NO: 798592 - RNA, 19 nt, Homo sapiens
  misc_RNA (1)...(19): siRNA sense strand
uaucagaucagagaaauga

SEQ ID NO: 798593 - RNA, 19 nt, Homo sapiens
  misc_RNA (1)...(19): siRNA sense strand
gacaaaggaccagguauug

SEQ ID NO: 798594 - RNA, 19 nt, Homo sapiens
  misc_RNA (1)...(19): siRNA sense strand
gaacggaugccagggaugu

SEQ ID NO: 798595 - RNA, 19 nt, Homo sapiens
  misc_RNA (1)...(19): siRNA sense strand
ccaacucgucccacuauaa

SEQ ID NO: 798596 - RNA, 19 nt, Homo sapiens
  misc_RNA (1)...(19): siRNA sense strand
guaaagauggaguucaaug

SEQ ID NO: 798597 - RNA, 19 nt, Homo sapiens
  misc_RNA (1)...(19): siRNA sense strand
cagaagacccaucaaggaa

SEQ ID NO: 798598 - RNA, 19 nt, Homo sapiens
  misc_RNA (1)...(19): siRNA sense strand
ccagaagacccaucaagga

SEQ ID NO: 798599 - RNA, 19 nt, Homo sapiens
  misc_RNA (1)...(19): siRNA sense strand
aaagaagcccuugggauaa

SEQ ID NO: 798600 - RNA, 19 nt, Homo sapiens
  misc_RNA (1)...(19): siRNA sense strand
ugacuggaaugaauaaagg

SEQ ID NO: 798601 - RNA, 19 nt, Homo sapiens
  misc_RNA (1)...(19): siRNA sense strand
gagaauggacaagcagaaa

SEQ ID NO: 798602 - RNA, 19 nt, Homo sapiens
  misc_RNA (1)...(19): siRNA sense strand
cggaaagcuuguccuggua

SEQ ID NO: 798603 - RNA, 19 nt, Homo sapiens
  misc_RNA (1)...(19): siRNA sense strand
cagcaacauuggcaucaug

SEQ ID NO: 798604 - RNA, 19 nt, Homo sapiens
  misc_RNA (1)...(19): siRNA sense strand
gcgaagagaaauaagcuau

SEQ ID NO: 798605 - RNA, 19 nt, Homo sapiens
  misc_RNA (1)...(19): siRNA sense strand
agaaagaauugcgaagaga

SEQ ID NO: 798606 - RNA, 19 nt, Homo sapiens
  misc_RNA (1)...(19): siRNA sense strand
caugaacgcuuuccuuuug

SEQ ID NO: 798607 - RNA, 19 nt, Homo sapiens
  misc_RNA (1)...(19): siRNA sense strand
gagaaccauuggaguuauc

SEQ ID NO: 798608 - RNA, 19 nt, Homo sapiens
  misc_RNA (1)...(19): siRNA sense strand
caacacugaucuugcaaac

SEQ ID NO: 798609 - RNA, 19 nt, Homo sapiens
  misc_RNA (1)...(19): siRNA sense strand
uaaagugccugugggagau

SEQ ID NO: 798610 - RNA, 19 nt, Homo sapiens
  misc_RNA (1)...(19): siRNA sense strand
caacucgucccacuauaau

SEQ ID NO: 798611 - RNA, 19 nt, Homo sapiens
  misc_RNA (1)...(19): siRNA sense strand
gaauguaucaagcacugaa

SEQ ID NO: 798612 - RNA, 19 nt, Homo sapiens
  misc_RNA (1)...(19): siRNA sense strand
aaauguauccgagaucuaa

SEQ ID NO: 798613 - RNA, 19 nt, Homo sapiens
  misc_RNA (1)...(19): siRNA sense strand
agacaaaggaccagguauu

SEQ ID NO: 798614 - RNA, 19 nt, Homo sapiens
  misc_RNA (1)...(19): siRNA sense strand
gucaagaaacagauuguaa

SEQ ID NO: 798615 - RNA, 19 nt, Homo sapiens
  misc_RNA (1)...(19): siRNA sense strand
agaaauaagcuaugcaauc

SEQ ID NO: 798616 - RNA, 19 nt, Homo sapiens
  misc_RNA (1)...(19): siRNA sense strand
gcuguggacuuugagaaga

SEQ ID NO: 798617 - RNA, 19 nt, Homo sapiens
  misc_RNA (1)...(19): siRNA sense strand
guauugcuauugauugaca

SEQ ID NO: 798618 - RNA, 19 nt, Homo sapiens
  misc_RNA (1)...(19): siRNA sense strand
gugaagaaguguaccaaaa

SEQ ID NO: 798619 - RNA, 19 nt, Homo sapiens
  misc_RNA (1)...(19): siRNA sense strand
gaagccagaaggacauaga

SEQ ID NO: 798620 - RNA, 19 nt, Homo sapiens
  misc_RNA (1)...(19): siRNA sense strand
cgaggaaacggaaaggauu

SEQ ID NO: 798621 - RNA, 19 nt, Homo sapiens
  misc_RNA (1)...(19): siRNA sense strand
caagaaacagauuguaaag

SEQ ID NO: 798622 - RNA, 19 nt, Homo sapiens
  misc_RNA (1)...(19): siRNA sense strand
cuccagacauggcauuuga

SEQ ID NO: 798623 - RNA, 19 nt, Homo sapiens
  misc_RNA (1)...(19): siRNA sense strand
agauggaguucaaugagaa

SEQ ID NO: 798624 - RNA, 19 nt, Homo sapiens
  misc_RNA (1)...(19): siRNA sense strand
ggacaguugcucuccauag

SEQ ID NO: 798625 - RNA, 19 nt, Homo sapiens
  misc_RNA (1)...(19): siRNA sense strand
aaacaaagauccggaguua

SEQ ID NO: 798626 - RNA, 19 nt, Homo sapiens
  misc_RNA (1)...(19): siRNA sense strand
aaacgagacucaucuguua

SEQ ID NO: 798627 - RNA, 19 nt, Homo sapiens
  misc_RNA (1)...(19): siRNA sense strand
ggagaaagauguagcacuu

SEQ ID NO: 798628 - RNA, 19 nt, Homo sapiens
  misc_RNA (1)...(19): siRNA sense strand
ggacaggacucgcaugaug

SEQ ID NO: 798629 - RNA, 19 nt, Homo sapiens
  misc_RNA (1)...(19): siRNA sense strand
ugacagagauagagaugua

SEQ ID NO: 798630 - RNA, 19 nt, Homo sapiens
  misc_RNA (1)...(19): siRNA sense strand
gagaagcacuuaccaaugg

SEQ ID NO: 798631 - RNA, 19 nt, Homo sapiens
  misc_RNA (1)...(19): siRNA sense strand
gcuuaagccucaacaguuu

SEQ ID NO: 798632 - RNA, 19 nt, Homo sapiens
  misc_RNA (1)...(19): siRNA sense strand
gggcucaucugaacacuga

SEQ ID NO: 798633 - RNA, 19 nt, Homo sapiens
  misc_RNA (1)...(19): siRNA sense strand
agaaagauguagcacuuaa

SEQ ID NO: 798634 - RNA, 19 nt, Homo sapiens
  misc_RNA (1)...(19): siRNA sense strand
agaaacagaugcagucaga

SEQ ID NO: 798635 - RNA, 19 nt, Homo sapiens
  misc_RNA (1)...(19): siRNA sense strand
agacucaucuguuaguaaa

SEQ ID NO: 798636 - RNA, 19 nt, Homo sapiens
  misc_RNA (1)...(19): siRNA sense strand
gaacagauccgggcucauc

SEQ ID NO: 798637 - RNA, 19 nt, Homo sapiens
  misc_RNA (1)...(19): siRNA sense strand
gggaaaggcucagugauag

SEQ ID NO: 798638 - RNA, 19 nt, Homo sapiens
  misc_RNA (1)...(19): siRNA sense strand
gccagcaccucccauguuu

SEQ ID NO: 798639 - RNA, 19 nt, Homo sapiens
  misc_RNA (1)...(19): siRNA sense strand
gauaucgggucuagagaga

SEQ ID NO: 798640 - RNA, 19 nt, Homo sapiens
  misc_RNA (1)...(19): siRNA sense strand
ccacacacuuuacuccaaa

SEQ ID NO: 798641 - RNA, 19 nt, Homo sapiens
  misc_RNA (1)...(19): siRNA sense strand
gaagaaacgagaagcacuu

SEQ ID NO: 798642 - RNA, 19 nt, Homo sapiens
  misc_RNA (1)...(19): siRNA sense strand
gaaaggcucagugauaguu

SEQ ID NO: 798643 - RNA, 19 nt, Homo sapiens
  misc_RNA (1)...(19): siRNA sense strand
ccacccagcugcuccauca

SEQ ID NO: 798644 - RNA, 19 nt, Homo sapiens
  misc_RNA (1)...(19): siRNA sense strand
gagauagagauguagauaa

SEQ ID NO: 798645 - RNA, 19 nt, Homo sapiens
  misc_RNA (1)...(19): siRNA sense strand
cacauaagcuggacuuugg

SEQ ID NO: 798646 - RNA, 19 nt, Homo sapiens
  misc_RNA (1)...(19): siRNA sense strand
ccagggaaguggugugcua

SEQ ID NO: 798647 - RNA, 19 nt, Homo sapiens
  misc_RNA (1)...(19): siRNA sense strand
uugaagcgcuggagaaaga

SEQ ID NO: 798648 - RNA, 19 nt, Homo sapiens
  misc_RNA (1)...(19): siRNA sense strand
gcacggccuucaacuuugu

SEQ ID NO: 798649 - RNA, 19 nt, Homo sapiens
  misc_RNA (1)...(19): siRNA sense strand
cagaagaggacaucauuga

SEQ ID NO: 798650 - RNA, 19 nt, Homo sapiens
  misc_RNA (1)...(19): siRNA sense strand
guugacagauccuuucaga

SEQ ID NO: 798651 - RNA, 19 nt, Homo sapiens
  misc_RNA (1)...(19): siRNA sense strand
gaaguggugugcuaugcau

SEQ ID NO: 798652 - RNA, 19 nt, Homo sapiens
  misc_RNA (1)...(19): siRNA sense strand
ccaaagagagggagagaga

SEQ ID NO: 798653 - RNA, 19 nt, Homo sapiens
  misc_RNA (1)...(19): siRNA sense strand
cgggaaaggcucagugaua

SEQ ID NO: 798654 - RNA, 19 nt, Homo sapiens
  misc_RNA (1)...(19): siRNA sense strand
ggagaaggacaaacccaaa

SEQ ID NO: 798655 - RNA, 19 nt, Homo sapiens
  misc_RNA (1)...(19): siRNA sense strand
gacagucccacacacuuua

SEQ ID NO: 798656 - RNA, 19 nt, Homo sapiens
  misc_RNA (1)...(19): siRNA sense strand
caaauacccuacaaaaguu

SEQ ID NO: 798657 - RNA, 19 nt, Homo sapiens
  misc_RNA (1)...(19): siRNA sense strand
gagggauccuuaccgagaa

SEQ ID NO: 798658 - RNA, 19 nt, Homo sapiens
  misc_RNA (1)...(19): siRNA sense strand
gcuccgaggucaaggugaa

SEQ ID NO: 798659 - RNA, 19 nt, Homo sapiens
  misc_RNA (1)...(19): siRNA sense strand
gagaaagauguagcacuua

SEQ ID NO: 798660 - RNA, 19 nt, Homo sapiens
  misc_RNA (1)...(19): siRNA sense strand
guaaagaugacaaagaaag

SEQ ID NO: 798661 - RNA, 19 nt, Homo sapiens
  misc_RNA (1)...(19): siRNA sense strand
gcagggacagugacaguga

SEQ ID NO: 798662 - RNA, 19 nt, Homo sapiens
  misc_RNA (1)...(19): siRNA sense strand
gaacggacuccucaacaag

SEQ ID NO: 798663 - RNA, 19 nt, Homo sapiens
  misc_RNA (1)...(19): siRNA sense strand
gauccgggcucaucugaac

SEQ ID NO: 798664 - RNA, 19 nt, Homo sapiens
  misc_RNA (1)...(19): siRNA sense strand
gaaagucaagaaacagaug

SEQ ID NO: 798665 - RNA, 19 nt, Homo sapiens
  misc_RNA (1)...(19): siRNA sense strand
caagauaucgggucuagag

SEQ ID NO: 798666 - RNA, 19 nt, Homo sapiens
  misc_RNA (1)...(19): siRNA sense strand
gaagacauccaacccuauc

SEQ ID NO: 798667 - RNA, 19 nt, Homo sapiens
  misc_RNA (1)...(19): siRNA sense strand
caacccugcugcccaccua

SEQ ID NO: 798668 - RNA, 19 nt, Homo sapiens
  misc_RNA (1)...(19): siRNA sense strand
cacaucgccuggcagauuu

SEQ ID NO: 798669 - RNA, 19 nt, Homo sapiens
  misc_RNA (1)...(19): siRNA sense strand
ucacaucgccuggcagauu

SEQ ID NO: 798670 - RNA, 19 nt, Homo sapiens
  misc_RNA (1)...(19): siRNA sense strand
gacccgagguugacagauc

SEQ ID NO: 798671 - RNA, 19 nt, Homo sapiens
  misc_RNA (1)...(19): siRNA sense strand
gagagaagccaggagaaga

SEQ ID NO: 798672 - RNA, 19 nt, Homo sapiens
  misc_RNA (1)...(19): siRNA sense strand
uaaacgagacucaucuguu

SEQ ID NO: 798673 - RNA, 19 nt, Homo sapiens
  misc_RNA (1)...(19): siRNA sense strand
ucagaccuauguuaaggaa

SEQ ID NO: 798674 - RNA, 19 nt, Homo sapiens
  misc_RNA (1)...(19): siRNA sense strand
gagaagagccaggacuguu

SEQ ID NO: 798675 - RNA, 19 nt, Homo sapiens
  misc_RNA (1)...(19): siRNA sense strand
ccaauggcuuguccuuuca

SEQ ID NO: 798676 - RNA, 19 nt, Homo sapiens
  misc_RNA (1)...(19): siRNA sense strand
gggaaagcgucgagaagag

SEQ ID NO: 798677 - RNA, 19 nt, Homo sapiens
  misc_RNA (1)...(19): siRNA sense strand
caacagcaguagcuuaagc

SEQ ID NO: 798678 - RNA, 19 nt, Homo sapiens
  misc_RNA (1)...(19): siRNA sense strand
gaaagugccaguggagaau

SEQ ID NO: 798679 - RNA, 19 nt, Homo sapiens
  misc_RNA (1)...(19): siRNA sense strand
agaacggacuccucaacaa

SEQ ID NO: 798680 - RNA, 19 nt, Homo sapiens
  misc_RNA (1)...(19): siRNA sense strand
ggaaagcgucgagaagaga

SEQ ID NO: 798681 - RNA, 19 nt, Homo sapiens
  misc_RNA (1)...(19): siRNA sense strand
caacagaaagucaagaaac

SEQ ID NO: 798682 - RNA, 19 nt, Homo sapiens
  misc_RNA (1)...(19): siRNA sense strand
gcacuuacucagagcaaga

SEQ ID NO: 798683 - RNA, 19 nt, Homo sapiens
  misc_RNA (1)...(19): siRNA sense strand
ucaggaacguguggagaaa

SEQ ID NO: 798684 - RNA, 19 nt, Homo sapiens
  misc_RNA (1)...(19): siRNA sense strand
ggacagugacagugaaagu

SEQ ID NO: 798685 - RNA, 19 nt, Homo sapiens
  misc_RNA (1)...(19): siRNA sense strand
gagacucaucuguuaguaa

SEQ ID NO: 798686 - RNA, 19 nt, Homo sapiens
  misc_RNA (1)...(19): siRNA sense strand
gcuggacuuuggacugaaa

SEQ ID NO: 798687 - RNA, 19 nt, Homo sapiens
  misc_RNA (1)...(19): siRNA sense strand
uacaacagcaguagcuuaa

SEQ ID NO: 798688 - RNA, 19 nt, Homo sapiens
  misc_RNA (1)...(19): siRNA sense strand
gugaaugcccugggacaua

SEQ ID NO: 798689 - RNA, 19 nt, Homo sapiens
  misc_RNA (1)...(19): siRNA sense strand
ucaaagaagagcagacuca

SEQ ID NO: 798690 - RNA, 19 nt, Homo sapiens
  misc_RNA (1)...(19): siRNA sense strand
gaagagcuccgaggucaag

SEQ ID NO: 798691 - RNA, 19 nt, Homo sapiens
  misc_RNA (1)...(19): siRNA sense strand
gcagaagaggacaucauug

SEQ ID NO: 798692 - RNA, 19 nt, Homo sapiens
  misc_RNA (1)...(19): siRNA sense strand
ccacauaagcuggacuuug

SEQ ID NO: 798693 - RNA, 19 nt, Homo sapiens
  misc_RNA (1)...(19): siRNA sense strand
acagauccuuucagaccua

SEQ ID NO: 798694 - RNA, 19 nt, Homo sapiens
  misc_RNA (1)...(19): siRNA sense strand
ggcacagucucuuccauuc

SEQ ID NO: 798695 - RNA, 19 nt, Homo sapiens
  misc_RNA (1)...(19): siRNA sense strand
ggcagaagaggacaucauu

SEQ ID NO: 798696 - RNA, 19 nt, Homo sapiens
  misc_RNA (1)...(19): siRNA sense strand
gauccggaguuagguguug

SEQ ID NO: 798697 - RNA, 19 nt, Homo sapiens
  misc_RNA (1)...(19): siRNA sense strand
gaaaaugaccgcaaucucu

SEQ ID NO: 798698 - RNA, 19 nt, Homo sapiens
  misc_RNA (1)...(19): siRNA sense strand
cgagacucaucuguuagua

SEQ ID NO: 798699 - RNA, 19 nt, Homo sapiens
  misc_RNA (1)...(19): siRNA sense strand
uggcacggccuucaacuuu

SEQ ID NO: 798700 - RNA, 19 nt, Homo sapiens
  misc_RNA (1)...(19): siRNA sense strand
aacagaaagucaagaaaca

SEQ ID NO: 798701 - RNA, 19 nt, Homo sapiens
  misc_RNA (1)...(19): siRNA sense strand
cagcaccucccauguuuga

SEQ ID NO: 798702 - RNA, 19 nt, Homo sapiens
  misc_RNA (1)...(19): siRNA sense strand
gcuuguccuuucauucaaa

SEQ ID NO: 798703 - RNA, 19 nt, Homo sapiens
  misc_RNA (1)...(19): siRNA sense strand
gcagucagacccacauaag

SEQ ID NO: 798704 - RNA, 19 nt, Homo sapiens
  misc_RNA (1)...(19): siRNA sense strand
cuacaaaaguugacccauu

SEQ ID NO: 798705 - RNA, 19 nt, Homo sapiens
  misc_RNA (1)...(19): siRNA sense strand
gagccaggacuguugcaaa

SEQ ID NO: 798706 - RNA, 19 nt, Homo sapiens
  misc_RNA (1)...(19): siRNA sense strand
aagcuggacuuuggacuga

SEQ ID NO: 798707 - RNA, 19 nt, Homo sapiens
  misc_RNA (1)...(19): siRNA sense strand
cccacacgcugaaggauau

SEQ ID NO: 798708 - RNA, 19 nt, Homo sapiens
  misc_RNA (1)...(19): siRNA sense strand
gacaggacucgcaugauga

SEQ ID NO: 798709 - RNA, 19 nt, Homo sapiens
  misc_RNA (1)...(19): siRNA sense strand
uuaaucggccgucuacauu

SEQ ID NO: 798710 - RNA, 19 nt, Homo sapiens
  misc_RNA (1)...(19): siRNA sense strand
ggcacggccuucaacuuug

SEQ ID NO: 798711 - RNA, 19 nt, Homo sapiens
  misc_RNA (1)...(19): siRNA sense strand
cuacagcucagaucgagaa

SEQ ID NO: 798712 - RNA, 19 nt, Homo sapiens
  misc_RNA (1)...(19): siRNA sense strand
accgagaacuugacauuca

SEQ ID NO: 798713 - RNA, 19 nt, Homo sapiens
  misc_RNA (1)...(19): siRNA sense strand
cagcuccacugaacagauc

SEQ ID NO: 798714 - RNA, 19 nt, Homo sapiens
  misc_RNA (1)...(19): siRNA sense strand
agagauagagauguagaua

SEQ ID NO: 798715 - RNA, 19 nt, Homo sapiens
  misc_RNA (1)...(19): siRNA sense strand
ggugugcuaugcauguuca

SEQ ID NO: 798716 - RNA, 19 nt, Homo sapiens
  misc_RNA (1)...(19): siRNA sense strand
cgagaagcacuuaccaaug

SEQ ID NO: 798717 - RNA, 19 nt, Homo sapiens
  misc_RNA (1)...(19): siRNA sense strand
ugaaagugccaguggagaa

SEQ ID NO: 798718 - RNA, 19 nt, Homo sapiens
  misc_RNA (1)...(19): siRNA sense strand
accaauggcuuguccuuuc

SEQ ID NO: 798719 - RNA, 19 nt, Homo sapiens
  misc_RNA (1)...(19): siRNA sense strand
gauuugccaugaccagcuu

SEQ ID NO: 798720 - RNA, 19 nt, Homo sapiens
  misc_RNA (1)...(19): siRNA sense strand
gcacgcuaccagaacauga

SEQ ID NO: 798721 - RNA, 19 nt, Homo sapiens
  misc_RNA (1)...(19): siRNA sense strand
acaaagauccggaguuagg

SEQ ID NO: 798722 - RNA, 19 nt, Homo sapiens
  misc_RNA (1)...(19): siRNA sense strand
ccaggacuguugcaaagag

SEQ ID NO: 798723 - RNA, 19 nt, Homo sapiens
  misc_RNA (1)...(19): siRNA sense strand
acucaucuguuaguaaaga

SEQ ID NO: 798724 - RNA, 19 nt, Homo sapiens
  misc_RNA (1)...(19): siRNA sense strand
gcacuccagcgaagacuca

SEQ ID NO: 798725 - RNA, 19 nt, Homo sapiens
  misc_RNA (1)...(19): siRNA sense strand
gaagagagccggaggaaga

SEQ ID NO: 798726 - RNA, 19 nt, Homo sapiens
  misc_RNA (1)...(19): siRNA sense strand
gcacagauaccuucacuug

SEQ ID NO: 798727 - RNA, 19 nt, Homo sapiens
  misc_RNA (1)...(19): siRNA sense strand
gaaaacgacuucugauuug

SEQ ID NO: 798728 - RNA, 19 nt, Homo sapiens
  misc_RNA (1)...(19): siRNA sense strand
ggaacaagcugagggacaa

SEQ ID NO: 798729 - RNA, 19 nt, Homo sapiens
  misc_RNA (1)...(19): siRNA sense strand
gaagacaaagguuaagaaa

SEQ ID NO: 798730 - RNA, 19 nt, Homo sapiens
  misc_RNA (1)...(19): siRNA sense strand
gcaauugccuagacuccuu

SEQ ID NO: 798731 - RNA, 19 nt, Homo sapiens
  misc_RNA (1)...(19): siRNA sense strand
gaaaauggcagaaaugaaa

SEQ ID NO: 798732 - RNA, 19 nt, Homo sapiens
  misc_RNA (1)...(19): siRNA sense strand
agaccaagcuccacgaaga

SEQ ID NO: 798733 - RNA, 19 nt, Homo sapiens
  misc_RNA (1)...(19): siRNA sense strand
ccacaggaccucaagauug

SEQ ID NO: 798734 - RNA, 19 nt, Homo sapiens
  misc_RNA (1)...(19): siRNA sense strand
gaaggaucacucucagaua

SEQ ID NO: 798735 - RNA, 19 nt, Homo sapiens
  misc_RNA (1)...(19): siRNA sense strand
ccaccagucugcagauuug

SEQ ID NO: 798736 - RNA, 19 nt, Homo sapiens
  misc_RNA (1)...(19): siRNA sense strand
cgagaucccugcagagcuu

SEQ ID NO: 798737 - RNA, 19 nt, Homo sapiens
  misc_RNA (1)...(19): siRNA sense strand
ggaaggaucacucucagau

SEQ ID NO: 798738 - RNA, 19 nt, Homo sapiens
  misc_RNA (1)...(19): siRNA sense strand
ugucauggaugcccucauu

SEQ ID NO: 798739 - RNA, 19 nt, Homo sapiens
  misc_RNA (1)...(19): siRNA sense strand
cacaggaccucaagauugu

SEQ ID NO: 798740 - RNA, 19 nt, Homo sapiens
  misc_RNA (1)...(19): siRNA sense strand
ugucgggccugcacagaua

SEQ ID NO: 798741 - RNA, 19 nt, Homo sapiens
  misc_RNA (1)...(19): siRNA sense strand
ggaagaggagggagaggaa

SEQ ID NO: 798742 - RNA, 19 nt, Homo sapiens
  misc_RNA (1)...(19): siRNA sense strand
gagcagaggaagcagaaga

SEQ ID NO: 798743 - RNA, 19 nt, Homo sapiens
  misc_RNA (1)...(19): siRNA sense strand
gaaaauuacccgugucuug

SEQ ID NO: 798744 - RNA, 19 nt, Homo sapiens
  misc_RNA (1)...(19): siRNA sense strand
gugagaagacaaagguuaa

SEQ ID NO: 798745 - RNA, 19 nt, Homo sapiens
  misc_RNA (1)...(19): siRNA sense strand
ccaauaaccaacagugaga

SEQ ID NO: 798746 - RNA, 19 nt, Homo sapiens
  misc_RNA (1)...(19): siRNA sense strand
gacaagcgccuggagaaga

SEQ ID NO: 798747 - RNA, 19 nt, Homo sapiens
  misc_RNA (1)...(19): siRNA sense strand
aaauaaagaggaaggauca

SEQ ID NO: 798748 - RNA, 19 nt, Homo sapiens
  misc_RNA (1)...(19): siRNA sense strand
acagauaccuucacuugcu

SEQ ID NO: 798749 - RNA, 19 nt, Homo sapiens
  misc_RNA (1)...(19): siRNA sense strand
agaagaagcggcagagugu

SEQ ID NO: 798750 - RNA, 19 nt, Homo sapiens
  misc_RNA (1)...(19): siRNA sense strand
gagaagacaaagguuaaga

SEQ ID NO: 798751 - RNA, 19 nt, Homo sapiens
  misc_RNA (1)...(19): siRNA sense strand
caccuggccucgcucaaga

SEQ ID NO: 798752 - RNA, 19 nt, Homo sapiens
  misc_RNA (1)...(19): siRNA sense strand
cguuggaccucucgaacaa

SEQ ID NO: 798753 - RNA, 19 nt, Homo sapiens
  misc_RNA (1)...(19): siRNA sense strand
agacaaagguuaagaaaac

SEQ ID NO: 798754 - RNA, 19 nt, Homo sapiens
  misc_RNA (1)...(19): siRNA sense strand
gggacaagcgccuggagaa

SEQ ID NO: 798755 - RNA, 19 nt, Homo sapiens
  misc_RNA (1)...(19): siRNA sense strand
acaagcgccuggagaagau

SEQ ID NO: 798756 - RNA, 19 nt, Homo sapiens
  misc_RNA (1)...(19): siRNA sense strand
aaggaucacucucagauac

SEQ ID NO: 798757 - RNA, 19 nt, Homo sapiens
  misc_RNA (1)...(19): siRNA sense strand
ugacaacugccuccgagaa

SEQ ID NO: 798758 - RNA, 19 nt, Homo sapiens
  misc_RNA (1)...(19): siRNA sense strand
uggaugcccucauucugaa

SEQ ID NO: 798759 - RNA, 19 nt, Homo sapiens
  misc_RNA (1)...(19): siRNA sense strand
ugcagacggugaugugauu

SEQ ID NO: 798760 - RNA, 19 nt, Homo sapiens
  misc_RNA (1)...(19): siRNA sense strand
cgagcuccgugccgucaaa

SEQ ID NO: 798761 - RNA, 19 nt, Homo sapiens
  misc_RNA (1)...(19): siRNA sense strand
gaaaaccccguaccucuga

SEQ ID NO: 798762 - RNA, 19 nt, Homo sapiens
  misc_RNA (1)...(19): siRNA sense strand
gcucaaggagaucaauuuc

SEQ ID NO: 798763 - RNA, 19 nt, Homo sapiens
  misc_RNA (1)...(19): siRNA sense strand
gugauuuccuucccaccaa

SEQ ID NO: 798764 - RNA, 19 nt, Homo sapiens
  misc_RNA (1)...(19): siRNA sense strand
uggccucgcucaagacguu

SEQ ID NO: 798765 - RNA, 19 nt, Homo sapiens
  misc_RNA (1)...(19): siRNA sense strand
aacgacuucugauuuguuu

SEQ ID NO: 798766 - RNA, 19 nt, Homo sapiens
  misc_RNA (1)...(19): siRNA sense strand
uaacaagugccaccagucu

SEQ ID NO: 798767 - RNA, 19 nt, Homo sapiens
  misc_RNA (1)...(19): siRNA sense strand
ggaucacucucagauacug

SEQ ID NO: 798768 - RNA, 19 nt, Homo sapiens
  misc_RNA (1)...(19): siRNA sense strand
ugaagccgaugcagucucu

SEQ ID NO: 798769 - RNA, 19 nt, Homo sapiens
  misc_RNA (1)...(19): siRNA sense strand
ggauggaaaugaaaauuac

SEQ ID NO: 798770 - RNA, 19 nt, Homo sapiens
  misc_RNA (1)...(19): siRNA sense strand
ugcagucucuggacaacuu

SEQ ID NO: 798771 - RNA, 19 nt, Homo sapiens
  misc_RNA (1)...(19): siRNA sense strand
aaacgacuucugauuuguu

SEQ ID NO: 798772 - RNA, 19 nt, Homo sapiens
  misc_RNA (1)...(19): siRNA sense strand
agaagacaaagguuaagaa

SEQ ID NO: 798773 - RNA, 19 nt, Homo sapiens
  misc_RNA (1)...(19): siRNA sense strand
agugagaagacaaagguua

SEQ ID NO: 798774 - RNA, 19 nt, Homo sapiens
  misc_RNA (1)...(19): siRNA sense strand
gagcaggacgugggagaug

SEQ ID NO: 798775 - RNA, 19 nt, Homo sapiens
  misc_RNA (1)...(19): siRNA sense strand
uugcaaggaugucauggau

SEQ ID NO: 798776 - RNA, 19 nt, Homo sapiens
  misc_RNA (1)...(19): siRNA sense strand
ggaugcagacggugaugug

SEQ ID NO: 798777 - RNA, 19 nt, Homo sapiens
  misc_RNA (1)...(19): siRNA sense strand
gcagaccaagcuccacgaa

SEQ ID NO: 798778 - RNA, 19 nt, Homo sapiens
  misc_RNA (1)...(19): siRNA sense strand
ccagaucccacaacgaauc

SEQ ID NO: 798779 - RNA, 19 nt, Homo sapiens
  misc_RNA (1)...(19): siRNA sense strand
ccaacagugagaagacaaa

SEQ ID NO: 798780 - RNA, 19 nt, Homo sapiens
  misc_RNA (1)...(19): siRNA sense strand
ggacaagcgccuggagaag

SEQ ID NO: 798781 - RNA, 19 nt, Homo sapiens
  misc_RNA (1)...(19): siRNA sense strand
gccagggaaugcacucaag

SEQ ID NO: 798782 - RNA, 19 nt, Homo sapiens
  misc_RNA (1)...(19): siRNA sense strand
acaaccagcugagcgagau

SEQ ID NO: 798783 - RNA, 19 nt, Homo sapiens
  misc_RNA (1)...(19): siRNA sense strand
gauuuccuucccaccaaua

SEQ ID NO: 798784 - RNA, 19 nt, Homo sapiens
  misc_RNA (1)...(19): siRNA sense strand
gaccaagcuccacgaagau

SEQ ID NO: 798785 - RNA, 19 nt, Homo sapiens
  misc_RNA (1)...(19): siRNA sense strand
gccaccagucugcagauuu

SEQ ID NO: 798786 - RNA, 19 nt, Homo sapiens
  misc_RNA (1)...(19): siRNA sense strand
caccaauaaccaacaguga

SEQ ID NO: 798787 - RNA, 19 nt, Homo sapiens
  misc_RNA (1)...(19): siRNA sense strand
caaccucaccggcaauugc

SEQ ID NO: 798788 - RNA, 19 nt, Homo sapiens
  misc_RNA (1)...(19): siRNA sense strand
acggugaugugauuuccuu

SEQ ID NO: 798789 - RNA, 19 nt, Homo sapiens
  misc_RNA (1)...(19): siRNA sense strand
gcagacggugaugugauuu

SEQ ID NO: 798790 - RNA, 19 nt, Homo sapiens
  misc_RNA (1)...(19): siRNA sense strand
cuugcuggauggaaaugaa

SEQ ID NO: 798791 - RNA, 19 nt, Homo sapiens
  misc_RNA (1)...(19): siRNA sense strand
uuccagaucccacaacgaa

SEQ ID NO: 798792 - RNA, 19 nt, Homo sapiens
  misc_RNA (1)...(19): siRNA sense strand
caacuuccagaucccacaa

SEQ ID NO: 798793 - RNA, 19 nt, Homo sapiens
  misc_RNA (1)...(19): siRNA sense strand
gaacuggcggcugcugaca

SEQ ID NO: 798794 - RNA, 19 nt, Homo sapiens
  misc_RNA (1)...(19): siRNA sense strand
guccugcacgucucugaaa

SEQ ID NO: 798795 - RNA, 19 nt, Homo sapiens
  misc_RNA (1)...(19): siRNA sense strand
gaugcagucucuggacaac

SEQ ID NO: 798796 - RNA, 19 nt, Homo sapiens
  misc_RNA (1)...(19): siRNA sense strand
gagcaaaccugucacuauu

SEQ ID NO: 798797 - RNA, 19 nt, Homo sapiens
  misc_RNA (1)...(19): siRNA sense strand
gaggaacagugguaagaaa

SEQ ID NO: 798798 - RNA, 19 nt, Homo sapiens
  misc_RNA (1)...(19): siRNA sense strand
gcacaaagcacagaaggaa

SEQ ID NO: 798799 - RNA, 19 nt, Homo sapiens
  misc_RNA (1)...(19): siRNA sense strand
ggaagcaguucaaguccaa

SEQ ID NO: 798800 - RNA, 19 nt, Homo sapiens
  misc_RNA (1)...(19): siRNA sense strand
ggucaaagcugaggacaag

SEQ ID NO: 798801 - RNA, 19 nt, Homo sapiens
  misc_RNA (1)...(19): siRNA sense strand
gcacagaaggaaacagaaa

SEQ ID NO: 798802 - RNA, 19 nt, Homo sapiens
  misc_RNA (1)...(19): siRNA sense strand
agaaugaagugaaggagaa

SEQ ID NO: 798803 - RNA, 19 nt, Homo sapiens
  misc_RNA (1)...(19): siRNA sense strand
gcaaaccugucacuauugg

SEQ ID NO: 798804 - RNA, 19 nt, Homo sapiens
  misc_RNA (1)...(19): siRNA sense strand
gaaaggccacgucaacugu

SEQ ID NO: 798805 - RNA, 19 nt, Homo sapiens
  misc_RNA (1)...(19): siRNA sense strand
ggugaaguguccaaacuca

SEQ ID NO: 798806 - RNA, 19 nt, Homo sapiens
  misc_RNA (1)...(19): siRNA sense strand
ggagugagcaaaccuguca

SEQ ID NO: 798807 - RNA, 19 nt, Homo sapiens
  misc_RNA (1)...(19): siRNA sense strand
gcucaaaggccuggucaaa

SEQ ID NO: 798808 - RNA, 19 nt, Homo sapiens
  misc_RNA (1)...(19): siRNA sense strand
ucaaauaccacauccugaa

SEQ ID NO: 798809 - RNA, 19 nt, Homo sapiens
  misc_RNA (1)...(19): siRNA sense strand
agacccagcuggagaaaca

SEQ ID NO: 798810 - RNA, 19 nt, Homo sapiens
  misc_RNA (1)...(19): siRNA sense strand
ggagaaaggccacgucaac

SEQ ID NO: 798811 - RNA, 19 nt, Homo sapiens
  misc_RNA (1)...(19): siRNA sense strand
ucaaaggccuggucaaagc

SEQ ID NO: 798812 - RNA, 19 nt, Homo sapiens
  misc_RNA (1)...(19): siRNA sense strand
ggaagaaugaagugaagga

SEQ ID NO: 798813 - RNA, 19 nt, Homo sapiens
  misc_RNA (1)...(19): siRNA sense strand
ggccucaacuaccacacua

SEQ ID NO: 798814 - RNA, 19 nt, Homo sapiens
  misc_RNA (1)...(19): siRNA sense strand
cuagaggcauggaagaaug

SEQ ID NO: 798815 - RNA, 19 nt, Homo sapiens
  misc_RNA (1)...(19): siRNA sense strand
caagacagaagggaagaaa

SEQ ID NO: 798816 - RNA, 19 nt, Homo sapiens
  misc_RNA (1)...(19): siRNA sense strand
gcaucuacgggcucaagua

SEQ ID NO: 798817 - RNA, 19 nt, Homo sapiens
  misc_RNA (1)...(19): siRNA sense strand
ggacaaggcccgaguucac

SEQ ID NO: 798818 - RNA, 19 nt, Homo sapiens
  misc_RNA (1)...(19): siRNA sense strand
ugagcaaaccugucacuau

SEQ ID NO: 798819 - RNA, 19 nt, Homo sapiens
  misc_RNA (1)...(19): siRNA sense strand
ggaggugugucagaagcuu

SEQ ID NO: 798820 - RNA, 19 nt, Homo sapiens
  misc_RNA (1)...(19): siRNA sense strand
ggaggaacagugguaagaa

SEQ ID NO: 798821 - RNA, 19 nt, Homo sapiens
  misc_RNA (1)...(19): siRNA sense strand
cuggacaccugcccaauuc

SEQ ID NO: 798822 - RNA, 19 nt, Homo sapiens
  misc_RNA (1)...(19): siRNA sense strand
agaaacaccggaucuggaa

SEQ ID NO: 798823 - RNA, 19 nt, Homo sapiens
  misc_RNA (1)...(19): siRNA sense strand
gcaaggcgccugaaaagug

SEQ ID NO: 798824 - RNA, 19 nt, Homo sapiens
  misc_RNA (1)...(19): siRNA sense strand
gcagagggccauccaugag

SEQ ID NO: 798825 - RNA, 19 nt, Homo sapiens
  misc_RNA (1)...(19): siRNA sense strand
gggaggaacagugguaaga

SEQ ID NO: 798826 - RNA, 19 nt, Homo sapiens
  misc_RNA (1)...(19): siRNA sense strand
cgaguucaccgcuccaaga

SEQ ID NO: 798827 - RNA, 19 nt, Homo sapiens
  misc_RNA (1)...(19): siRNA sense strand
ggaaggauggcagccgaaa

SEQ ID NO: 798828 - RNA, 19 nt, Homo sapiens
  misc_RNA (1)...(19): siRNA sense strand
acccguaccugucaccaaa

SEQ ID NO: 798829 - RNA, 19 nt, Homo sapiens
  misc_RNA (1)...(19): siRNA sense strand
gaaugaagugaaggagaaa

SEQ ID NO: 798830 - RNA, 19 nt, Homo sapiens
  misc_RNA (1)...(19): siRNA sense strand
ggcagagggccauccauga

SEQ ID NO: 798831 - RNA, 19 nt, Homo sapiens
  misc_RNA (1)...(19): siRNA sense strand
caaggcgccugaaaaguga

SEQ ID NO: 798832 - RNA, 19 nt, Homo sapiens
  misc_RNA (1)...(19): siRNA sense strand
ggugucagcaaacccauug

SEQ ID NO: 798833 - RNA, 19 nt, Homo sapiens
  misc_RNA (1)...(19): siRNA sense strand
cgaaaggagguccgacuuc

SEQ ID NO: 798834 - RNA, 19 nt, Homo sapiens
  misc_RNA (1)...(19): siRNA sense strand
acauggaggugugucagaa

SEQ ID NO: 798835 - RNA, 19 nt, Homo sapiens
  misc_RNA (1)...(19): siRNA sense strand
gaguucaccgcuccaagaa

SEQ ID NO: 798836 - RNA, 19 nt, Homo sapiens
  misc_RNA (1)...(19): siRNA sense strand
ucaccaaacccaucacagu

SEQ ID NO: 798837 - RNA, 19 nt, Homo sapiens
  misc_RNA (1)...(19): siRNA sense strand
acacacaccgcccugcaaa

SEQ ID NO: 798838 - RNA, 19 nt, Homo sapiens
  misc_RNA (1)...(19): siRNA sense strand
ggaaguccagccagugaca

SEQ ID NO: 798839 - RNA, 19 nt, Homo sapiens
  misc_RNA (1)...(19): siRNA sense strand
ugaagacccacgcagagaa

SEQ ID NO: 798840 - RNA, 19 nt, Homo sapiens
  misc_RNA (1)...(19): siRNA sense strand
ggagcagccauccaucuca

SEQ ID NO: 798841 - RNA, 19 nt, Homo sapiens
  misc_RNA (1)...(19): siRNA sense strand
ggagguccgacuuccaaug

SEQ ID NO: 798842 - RNA, 19 nt, Homo sapiens
  misc_RNA (1)...(19): siRNA sense strand
ccgaaggaguucaguucug

SEQ ID NO: 798843 - RNA, 19 nt, Homo sapiens
  misc_RNA (1)...(19): siRNA sense strand
cauggaagaaugaagugaa

SEQ ID NO: 798844 - RNA, 19 nt, Homo sapiens
  misc_RNA (1)...(19): siRNA sense strand
gcaaacccauuggcaucag

SEQ ID NO: 798845 - RNA, 19 nt, Homo sapiens
  misc_RNA (1)...(19): siRNA sense strand
caaauaccacauccugaag

SEQ ID NO: 798846 - RNA, 19 nt, Homo sapiens
  misc_RNA (1)...(19): siRNA sense strand
acagucagcaggcccauug

SEQ ID NO: 798847 - RNA, 19 nt, Homo sapiens
  misc_RNA (1)...(19): siRNA sense strand
acagucagcaggcccauug

SEQ ID NO: 798848 - RNA, 19 nt, Homo sapiens
  misc_RNA (1)...(19): siRNA sense strand
caaagcuugugacaguuac

SEQ ID NO: 798849 - RNA, 19 nt, Homo sapiens
  misc_RNA (1)...(19): siRNA sense strand
ggccaugccggucaccaaa

SEQ ID NO: 798850 - RNA, 19 nt, Homo sapiens
  misc_RNA (1)...(19): siRNA sense strand
gaagacccacgcagagaac

SEQ ID NO: 798851 - RNA, 19 nt, Homo sapiens
  misc_RNA (1)...(19): siRNA sense strand
guaccgcugucugcugugu

SEQ ID NO: 798852 - RNA, 19 nt, Homo sapiens
  misc_RNA (1)...(19): siRNA sense strand
gaugaacgacuggaaggau

SEQ ID NO: 798853 - RNA, 19 nt, Homo sapiens
  misc_RNA (1)...(19): siRNA sense strand
gcuagaggcauggaagaau

SEQ ID NO: 798854 - RNA, 19 nt, Homo sapiens
  misc_RNA (1)...(19): siRNA sense strand
aaacagaaaacacccaaaa

SEQ ID NO: 798855 - RNA, 19 nt, Homo sapiens
  misc_RNA (1)...(19): siRNA sense strand
ccugucaccaaacccauua

SEQ ID NO: 798856 - RNA, 19 nt, Homo sapiens
  misc_RNA (1)...(19): siRNA sense strand
cuaagacccagcuggagaa

SEQ ID NO: 798857 - RNA, 19 nt, Homo sapiens
  misc_RNA (1)...(19): siRNA sense strand
cugaggagcccacagacaa

SEQ ID NO: 798858 - RNA, 19 nt, Homo sapiens
  misc_RNA (1)...(19): siRNA sense strand
aagcacagaaggaaacaga

SEQ ID NO: 798859 - RNA, 19 nt, Homo sapiens
  misc_RNA (1)...(19): siRNA sense strand
ucagcaagccggugacagu

SEQ ID NO: 798860 - RNA, 19 nt, Homo sapiens
  misc_RNA (1)...(19): siRNA sense strand
cgacuggaaggaugaguuc

SEQ ID NO: 798861 - RNA, 19 nt, Homo sapiens
  misc_RNA (1)...(19): siRNA sense strand
gaggacaaggcccgaguuc

SEQ ID NO: 798862 - RNA, 19 nt, Homo sapiens
  misc_RNA (1)...(19): siRNA sense strand
acagggaggaacaguggua

SEQ ID NO: 798863 - RNA, 19 nt, Homo sapiens
  misc_RNA (1)...(19): siRNA sense strand
caucucgccagcugcagua

SEQ ID NO: 798864 - RNA, 19 nt, Homo sapiens
  misc_RNA (1)...(19): siRNA sense strand
agaaaggccacgucaacug

SEQ ID NO: 798865 - RNA, 19 nt, Homo sapiens
  misc_RNA (1)...(19): siRNA sense strand
gagaaaggccacgucaacu

SEQ ID NO: 798866 - RNA, 19 nt, Homo sapiens
  misc_RNA (1)...(19): siRNA sense strand
ccaaggcuggccacgacua

SEQ ID NO: 798867 - RNA, 19 nt, Homo sapiens
  misc_RNA (1)...(19): siRNA sense strand
gccggaagcaguucaaguc

SEQ ID NO: 798868 - RNA, 19 nt, Homo sapiens
  misc_RNA (1)...(19): siRNA sense strand
gggcauggaggcacugaag

SEQ ID NO: 798869 - RNA, 19 nt, Homo sapiens
  misc_RNA (1)...(19): siRNA sense strand
ucuacgggcucaaguacca

SEQ ID NO: 798870 - RNA, 19 nt, Homo sapiens
  misc_RNA (1)...(19): siRNA sense strand
ccuccaggaugcagagaca

SEQ ID NO: 798871 - RNA, 19 nt, Homo sapiens
  misc_RNA (1)...(19): siRNA sense strand
auuccucucucccugauga

SEQ ID NO: 798872 - RNA, 19 nt, Homo sapiens
  misc_RNA (1)...(19): siRNA sense strand
ugagaguggcgucaaauac

SEQ ID NO: 798873 - RNA, 19 nt, Homo sapiens
  misc_RNA (1)...(19): siRNA sense strand
cugagaguggcgucaaaua

SEQ ID NO: 798874 - RNA, 19 nt, Homo sapiens
  misc_RNA (1)...(19): siRNA sense strand
ccgcacggcucaacuacac

SEQ ID NO: 798875 - RNA, 19 nt, Homo sapiens
  misc_RNA (1)...(19): siRNA sense strand
ggcaagacguaccgaucca

SEQ ID NO: 798876 - RNA, 19 nt, Homo sapiens
  misc_RNA (1)...(19): siRNA sense strand
gaaggauggcagccgaaag

SEQ ID NO: 798877 - RNA, 19 nt, Homo sapiens
  misc_RNA (1)...(19): siRNA sense strand
gaacagugguaagaaaagg

SEQ ID NO: 798878 - RNA, 19 nt, Homo sapiens
  misc_RNA (1)...(19): siRNA sense strand
gcaggcccauugcuaucag

SEQ ID NO: 798879 - RNA, 19 nt, Homo sapiens
  misc_RNA (1)...(19): siRNA sense strand
cugcaugacccaccgaaga

SEQ ID NO: 798880 - RNA, 19 nt, Homo sapiens
  misc_RNA (1)...(19): siRNA sense strand
gcauggaagaaugaaguga

SEQ ID NO: 798881 - RNA, 19 nt, Homo sapiens
  misc_RNA (1)...(19): siRNA sense strand
ggacaccugcccaauucca

SEQ ID NO: 798882 - RNA, 19 nt, Homo sapiens
  misc_RNA (1)...(19): siRNA sense strand
ccuggacaccugcccaauu

SEQ ID NO: 798883 - RNA, 19 nt, Homo sapiens
  misc_RNA (1)...(19): siRNA sense strand
gcuugugacaguuacgaaa

SEQ ID NO: 798884 - RNA, 19 nt, Homo sapiens
  misc_RNA (1)...(19): siRNA sense strand
gagcgcacaaagcacagaa

SEQ ID NO: 798885 - RNA, 19 nt, Homo sapiens
  misc_RNA (1)...(19): siRNA sense strand
acaggagccaggacucauu

SEQ ID NO: 798886 - RNA, 19 nt, Homo sapiens
  misc_RNA (1)...(19): siRNA sense strand
aaauaccacauccugaaga

SEQ ID NO: 798887 - RNA, 19 nt, Homo sapiens
  misc_RNA (1)...(19): siRNA sense strand
ugaacgacuggaaggauga

SEQ ID NO: 798888 - RNA, 19 nt, Homo sapiens
  misc_RNA (1)...(19): siRNA sense strand
cccaacgacugcugugaag

SEQ ID NO: 798889 - RNA, 19 nt, Homo sapiens
  misc_RNA (1)...(19): siRNA sense strand
agaccgcacggcucaacua

SEQ ID NO: 798890 - RNA, 19 nt, Homo sapiens
  misc_RNA (1)...(19): siRNA sense strand
gcuucaggaugcacucaag

SEQ ID NO: 798891 - RNA, 19 nt, Homo sapiens
  misc_RNA (1)...(19): siRNA sense strand
uagaggcauggaagaauga

SEQ ID NO: 798892 - RNA, 19 nt, Homo sapiens
  misc_RNA (1)...(19): siRNA sense strand
ccaagaaggaaaagaagaa

SEQ ID NO: 798893 - RNA, 19 nt, Homo sapiens
  misc_RNA (1)...(19): siRNA sense strand
caggagccaggacucauug

SEQ ID NO: 798894 - RNA, 19 nt, Homo sapiens
  misc_RNA (1)...(19): siRNA sense strand
agaguggcgucaaauacca

SEQ ID NO: 798895 - RNA, 19 nt, Homo sapiens
  misc_RNA (1)...(19): siRNA sense strand
guccgaaggaguucaguuc

SEQ ID NO: 798896 - RNA, 19 nt, Homo sapiens
  misc_RNA (1)...(19): siRNA sense strand
gauguucccuuucaaguua

SEQ ID NO: 798897 - RNA, 19 nt, Homo sapiens
  misc_RNA (1)...(19): siRNA sense strand
gaccuaagcuaucagaaua

SEQ ID NO: 798898 - RNA, 19 nt, Homo sapiens
  misc_RNA (1)...(19): siRNA sense strand
ccaaauugcuuccuucuuu

SEQ ID NO: 798899 - RNA, 19 nt, Homo sapiens
  misc_RNA (1)...(19): siRNA sense strand
ggaaagguaugugaugauu

SEQ ID NO: 798900 - RNA, 19 nt, Homo sapiens
  misc_RNA (1)...(19): siRNA sense strand
aaucaaaccuguacaaguu

SEQ ID NO: 798901 - RNA, 19 nt, Homo sapiens
  misc_RNA (1)...(19): siRNA sense strand
aaacauugcuucuuacaga

SEQ ID NO: 798902 - RNA, 19 nt, Homo sapiens
  misc_RNA (1)...(19): siRNA sense strand
caaacugggugauaacaaa

SEQ ID NO: 798903 - RNA, 19 nt, Homo sapiens
  misc_RNA (1)...(19): siRNA sense strand
gguagaaggugaaacuuug

SEQ ID NO: 798904 - RNA, 19 nt, Homo sapiens
  misc_RNA (1)...(19): siRNA sense strand
gcauaugucuggaaagaau

SEQ ID NO: 798905 - RNA, 19 nt, Homo sapiens
  misc_RNA (1)...(19): siRNA sense strand
gaggccagcucauauacua

SEQ ID NO: 798906 - RNA, 19 nt, Homo sapiens
  misc_RNA (1)...(19): siRNA sense strand
agaagaagcuauuagaaga

SEQ ID NO: 798907 - RNA, 19 nt, Homo sapiens
  misc_RNA (1)...(19): siRNA sense strand
gaacaacuacccaagcaaa

SEQ ID NO: 798908 - RNA, 19 nt, Homo sapiens
  misc_RNA (1)...(19): siRNA sense strand
caaagcauaugucuggaaa

SEQ ID NO: 798909 - RNA, 19 nt, Homo sapiens
  misc_RNA (1)...(19): siRNA sense strand
acuaaacccucaccacuua

SEQ ID NO: 798910 - RNA, 19 nt, Homo sapiens
  misc_RNA (1)...(19): siRNA sense strand
agaaaggaguugagaauga

SEQ ID NO: 798911 - RNA, 19 nt, Homo sapiens
  misc_RNA (1)...(19): siRNA sense strand
gaaucagucuuacucuauu

SEQ ID NO: 798912 - RNA, 19 nt, Homo sapiens
  misc_RNA (1)...(19): siRNA sense strand
ggaauuagaagaagcuauu

SEQ ID NO: 798913 - RNA, 19 nt, Homo sapiens
  misc_RNA (1)...(19): siRNA sense strand
cagaagauguggaauuaga

SEQ ID NO: 798914 - RNA, 19 nt, Homo sapiens
  misc_RNA (1)...(19): siRNA sense strand
gaauuuauauccacagaag

SEQ ID NO: 798915 - RNA, 19 nt, Homo sapiens
  misc_RNA (1)...(19): siRNA sense strand
gagccuagcaccucuuaua

SEQ ID NO: 798916 - RNA, 19 nt, Homo sapiens
  misc_RNA (1)...(19): siRNA sense strand
uaugaugugugccuuguua

SEQ ID NO: 798917 - RNA, 19 nt, Homo sapiens
  misc_RNA (1)...(19): siRNA sense strand
gugaagauauguuugauuc

SEQ ID NO: 798918 - RNA, 19 nt, Homo sapiens
  misc_RNA (1)...(19): siRNA sense strand
caaacacaauggguuauaa

SEQ ID NO: 798919 - RNA, 19 nt, Homo sapiens
  misc_RNA (1)...(19): siRNA sense strand
gcucauggguuacaagaau

SEQ ID NO: 798920 - RNA, 19 nt, Homo sapiens
  misc_RNA (1)...(19): siRNA sense strand
caauaucuuucccaucuuu

SEQ ID NO: 798921 - RNA, 19 nt, Homo sapiens
  misc_RNA (1)...(19): siRNA sense strand
gaaaagaugcugcugauuu

SEQ ID NO: 798922 - RNA, 19 nt, Homo sapiens
  misc_RNA (1)...(19): siRNA sense strand
gcagaugucuccaaaucau

SEQ ID NO: 798923 - RNA, 19 nt, Homo sapiens
  misc_RNA (1)...(19): siRNA sense strand
gaaaggaggaguguucaaa

SEQ ID NO: 798924 - RNA, 19 nt, Homo sapiens
  misc_RNA (1)...(19): siRNA sense strand
gccacaaguuucauagaua

SEQ ID NO: 798925 - RNA, 19 nt, Homo sapiens
  misc_RNA (1)...(19): siRNA sense strand
ugacuugcauuuauuguug

SEQ ID NO: 798926 - RNA, 19 nt, Homo sapiens
  misc_RNA (1)...(19): siRNA sense strand
ccgcucaacuguaagauuu

SEQ ID NO: 798927 - RNA, 19 nt, Homo sapiens
  misc_RNA (1)...(19): siRNA sense strand
cacaauggguuauaaaugu

SEQ ID NO: 798928 - RNA, 19 nt, Homo sapiens
  misc_RNA (1)...(19): siRNA sense strand
caacaacaauauagagauc

SEQ ID NO: 798929 - RNA, 19 nt, Homo sapiens
  misc_RNA (1)...(19): siRNA sense strand
gaggaguguucaaagcaua

SEQ ID NO: 798930 - RNA, 19 nt, Homo sapiens
  misc_RNA (1)...(19): siRNA sense strand
caaagaaugugacagugau

SEQ ID NO: 798931 - RNA, 19 nt, Homo sapiens
  misc_RNA (1)...(19): siRNA sense strand
gaaacaggcaauaaacuau

SEQ ID NO: 798932 - RNA, 19 nt, Homo sapiens
  misc_RNA (1)...(19): siRNA sense strand
gaagaugauuuuccaguaa

SEQ ID NO: 798933 - RNA, 19 nt, Homo sapiens
  misc_RNA (1)...(19): siRNA sense strand
ggucagcagugaugaugaa

SEQ ID NO: 798934 - RNA, 19 nt, Homo sapiens
  misc_RNA (1)...(19): siRNA sense strand
ggagaaaggaguugagaau

SEQ ID NO: 798935 - RNA, 19 nt, Homo sapiens
  misc_RNA (1)...(19): siRNA sense strand
gcacagcagcauuuccaua

SEQ ID NO: 798936 - RNA, 19 nt, Homo sapiens
  misc_RNA (1)...(19): siRNA sense strand
gaagagcauuacccagguu

SEQ ID NO: 798937 - RNA, 19 nt, Homo sapiens
  misc_RNA (1)...(19): siRNA sense strand
ugacagugaugauaacaug

SEQ ID NO: 798938 - RNA, 19 nt, Homo sapiens
  misc_RNA (1)...(19): siRNA sense strand
ggagcuagagaaucaauuu

SEQ ID NO: 798939 - RNA, 19 nt, Homo sapiens
  misc_RNA (1)...(19): siRNA sense strand
aaagguaugugaugauuca

SEQ ID NO: 798940 - RNA, 19 nt, Homo sapiens
  misc_RNA (1)...(19): siRNA sense strand
gcagaaaggaggaguguuc

SEQ ID NO: 798941 - RNA, 19 nt, Homo sapiens
  misc_RNA (1)...(19): siRNA sense strand
uaaccgacaugaacacuca

SEQ ID NO: 798942 - RNA, 19 nt, Homo sapiens
  misc_RNA (1)...(19): siRNA sense strand
uagcagaugucuccaaauc

SEQ ID NO: 798943 - RNA, 19 nt, Homo sapiens
  misc_RNA (1)...(19): siRNA sense strand
aagcauuucugagucauua

SEQ ID NO: 798944 - RNA, 19 nt, Homo sapiens
  misc_RNA (1)...(19): siRNA sense strand
gaaacauuguaccgacauu

SEQ ID NO: 798945 - RNA, 19 nt, Homo sapiens
  misc_RNA (1)...(19): siRNA sense strand
aaacagcacugcaugucuu

SEQ ID NO: 798946 - RNA, 19 nt, Homo sapiens
  misc_RNA (1)...(19): siRNA sense strand
caucagcuauuacuguuau

SEQ ID NO: 798947 - RNA, 19 nt, Homo sapiens
  misc_RNA (1)...(19): siRNA sense strand
gcaaacacaauggguuaua

SEQ ID NO: 798948 - RNA, 19 nt, Homo sapiens
  misc_RNA (1)...(19): siRNA sense strand
ggucggagauaauagaauc

SEQ ID NO: 798949 - RNA, 19 nt, Homo sapiens
  misc_RNA (1)...(19): siRNA sense strand
gaagaagcuauuagaagaa

SEQ ID NO: 798950 - RNA, 19 nt, Homo sapiens
  misc_RNA (1)...(19): siRNA sense strand
ggagaagaauuuauaucca

SEQ ID NO: 798951 - RNA, 19 nt, Homo sapiens
  misc_RNA (1)...(19): siRNA sense strand
ggagcucacugcccauuuc

SEQ ID NO: 798952 - RNA, 19 nt, Homo sapiens
  misc_RNA (1)...(19): siRNA sense strand
ccuaagcuaucagaauaua

SEQ ID NO: 798953 - RNA, 19 nt, Homo sapiens
  misc_RNA (1)...(19): siRNA sense strand
gaaagaagagaagaauaga

SEQ ID NO: 798954 - RNA, 19 nt, Homo sapiens
  misc_RNA (1)...(19): siRNA sense strand
gaggaaacaccaauuggaa

SEQ ID NO: 798955 - RNA, 19 nt, Homo sapiens
  misc_RNA (1)...(19): siRNA sense strand
ugaaacaggcaauaaacua

SEQ ID NO: 798956 - RNA, 19 nt, Homo sapiens
  misc_RNA (1)...(19): siRNA sense strand
guaccgacauugccaagau

SEQ ID NO: 798957 - RNA, 19 nt, Homo sapiens
  misc_RNA (1)...(19): siRNA sense strand
cagcaaacacaauggguua

SEQ ID NO: 798958 - RNA, 19 nt, Homo sapiens
  misc_RNA (1)...(19): siRNA sense strand
aaaccaacuuuauguccua

SEQ ID NO: 798959 - RNA, 19 nt, Homo sapiens
  misc_RNA (1)...(19): siRNA sense strand
gagcuagagaaucaauuua

SEQ ID NO: 798960 - RNA, 19 nt, Homo sapiens
  misc_RNA (1)...(19): siRNA sense strand
cagcagcauuuccauagaa

SEQ ID NO: 798961 - RNA, 19 nt, Homo sapiens
  misc_RNA (1)...(19): siRNA sense strand
ggcaacagcacagaauuua

SEQ ID NO: 798962 - RNA, 19 nt, Homo sapiens
  misc_RNA (1)...(19): siRNA sense strand
uauagcagaugucuccaaa

SEQ ID NO: 798963 - RNA, 19 nt, Homo sapiens
  misc_RNA (1)...(19): siRNA sense strand
aagaugagcaugacaauga

SEQ ID NO: 798964 - RNA, 19 nt, Homo sapiens
  misc_RNA (1)...(19): siRNA sense strand
gaugaaaccagcacccaaa

SEQ ID NO: 798965 - RNA, 19 nt, Homo sapiens
  misc_RNA (1)...(19): siRNA sense strand
gaagacgacauucaguuug

SEQ ID NO: 798966 - RNA, 19 nt, Homo sapiens
  misc_RNA (1)...(19): siRNA sense strand
gaaccaugucuauuaaaga

SEQ ID NO: 798967 - RNA, 19 nt, Homo sapiens
  misc_RNA (1)...(19): siRNA sense strand
gaaaggaguugagaaugac

SEQ ID NO: 798968 - RNA, 19 nt, Homo sapiens
  misc_RNA (1)...(19): siRNA sense strand
gaacacucauauccaucaa

SEQ ID NO: 798969 - RNA, 19 nt, Homo sapiens
  misc_RNA (1)...(19): siRNA sense strand
gcuuugugaucuuaucuuu

SEQ ID NO: 798970 - RNA, 19 nt, Homo sapiens
  misc_RNA (1)...(19): siRNA sense strand
gcaagccacaaguuucaua

SEQ ID NO: 798971 - RNA, 19 nt, Homo sapiens
  misc_RNA (1)...(19): siRNA sense strand
ugagauggaugagguagaa

SEQ ID NO: 798972 - RNA, 19 nt, Homo sapiens
  misc_RNA (1)...(19): siRNA sense strand
acaaggaguuugacaaugg

SEQ ID NO: 798973 - RNA, 19 nt, Homo sapiens
  misc_RNA (1)...(19): siRNA sense strand
gaaugugacagugaugaua

SEQ ID NO: 798974 - RNA, 19 nt, Homo sapiens
  misc_RNA (1)...(19): siRNA sense strand
gcaccaaagcauuucauga

SEQ ID NO: 798975 - RNA, 19 nt, Homo sapiens
  misc_RNA (1)...(19): siRNA sense strand
gagcagcaguauguaauca

SEQ ID NO: 798976 - RNA, 19 nt, Homo sapiens
  misc_RNA (1)...(19): siRNA sense strand
uaacaaggaguuugacaau

SEQ ID NO: 798977 - RNA, 19 nt, Homo sapiens
  misc_RNA (1)...(19): siRNA sense strand
gaauuuaaccgacaugaac

SEQ ID NO: 798978 - RNA, 19 nt, Homo sapiens
  misc_RNA (1)...(19): siRNA sense strand
ggucauucguuuacacaug

SEQ ID NO: 798979 - RNA, 19 nt, Homo sapiens
  misc_RNA (1)...(19): siRNA sense strand
gcagaauucaggacacaaa

SEQ ID NO: 798980 - RNA, 19 nt, Homo sapiens
  misc_RNA (1)...(19): siRNA sense strand
caauauagagaucaccuuu

SEQ ID NO: 798981 - RNA, 19 nt, Homo sapiens
  misc_RNA (1)...(19): siRNA sense strand
caaugggcaccuucucuua

SEQ ID NO: 798982 - RNA, 19 nt, Homo sapiens
  misc_RNA (1)...(19): siRNA sense strand
gcuagagaaucaauuuaag

SEQ ID NO: 798983 - RNA, 19 nt, Homo sapiens
  misc_RNA (1)...(19): siRNA sense strand
agaaugaccuaagcuauca

SEQ ID NO: 798984 - RNA, 19 nt, Homo sapiens
  misc_RNA (1)...(19): siRNA sense strand
gcaacagcacagaauuuaa

SEQ ID NO: 798985 - RNA, 19 nt, Homo sapiens
  misc_RNA (1)...(19): siRNA sense strand
ccacaaguuucauagauac

SEQ ID NO: 798986 - RNA, 19 nt, Homo sapiens
  misc_RNA (1)...(19): siRNA sense strand
gaguuaacaaggaaagaua

SEQ ID NO: 798987 - RNA, 19 nt, Homo sapiens
  misc_RNA (1)...(19): siRNA sense strand
acacaaaguccgagucauu

SEQ ID NO: 798988 - RNA, 19 nt, Homo sapiens
  misc_RNA (1)...(19): siRNA sense strand
ucgaaaugcuggaccugua

SEQ ID NO: 798989 - RNA, 19 nt, Homo sapiens
  misc_RNA (1)...(19): siRNA sense strand
aagcauaugucuggaaaga

SEQ ID NO: 798990 - RNA, 19 nt, Homo sapiens
  misc_RNA (1)...(19): siRNA sense strand
gauaugaugugugccuugu

SEQ ID NO: 798991 - RNA, 19 nt, Homo sapiens
  misc_RNA (1)...(19): siRNA sense strand
ggagaaacagcagaaagaa

SEQ ID NO: 798992 - RNA, 19 nt, Homo sapiens
  misc_RNA (1)...(19): siRNA sense strand
ggaggaaacaccaauugga

SEQ ID NO: 798993 - RNA, 19 nt, Homo sapiens
  misc_RNA (1)...(19): siRNA sense strand
agaaacagcagaaagaaga

SEQ ID NO: 798994 - RNA, 19 nt, Homo sapiens
  misc_RNA (1)...(19): siRNA sense strand
gagaaugaccuaagcuauc

SEQ ID NO: 798995 - RNA, 19 nt, Homo sapiens
  misc_RNA (1)...(19): siRNA sense strand
gggcacauuuaaauaacuu

SEQ ID NO: 798996 - RNA, 19 nt, Homo sapiens
  misc_RNA (1)...(19): siRNA sense strand
guaaugagcuguccauauu

SEQ ID NO: 798997 - RNA, 19 nt, Homo sapiens
  misc_RNA (1)...(19): siRNA sense strand
gaacagcaccuucaguaua

SEQ ID NO: 798998 - RNA, 19 nt, Homo sapiens
  misc_RNA (1)...(19): siRNA sense strand
gaagaugccuccuccagaa

SEQ ID NO: 798999 - RNA, 19 nt, Homo sapiens
  misc_RNA (1)...(19): siRNA sense strand
gcaaugagcuuguaaugag

SEQ ID NO: 799000 - RNA, 19 nt, Homo sapiens
  misc_RNA (1)...(19): siRNA sense strand
gaagagauguacaacaaug

SEQ ID NO: 799001 - RNA, 19 nt, Homo sapiens
  misc_RNA (1)...(19): siRNA sense strand
gagcacagcuugauaccaa

SEQ ID NO: 799002 - RNA, 19 nt, Homo sapiens
  misc_RNA (1)...(19): siRNA sense strand
gcaccuagauagagugaaa

SEQ ID NO: 799003 - RNA, 19 nt, Homo sapiens
  misc_RNA (1)...(19): siRNA sense strand
gcaauacucucuccagcaa

SEQ ID NO: 799004 - RNA, 19 nt, Homo sapiens
  misc_RNA (1)...(19): siRNA sense strand
gacgagagcauuuacaaua

SEQ ID NO: 799005 - RNA, 19 nt, Homo sapiens
  misc_RNA (1)...(19): siRNA sense strand
ccagauggcuuacaguuau

SEQ ID NO: 799006 - RNA, 19 nt, Homo sapiens
  misc_RNA (1)...(19): siRNA sense strand
gcacagcuccagugaagua

SEQ ID NO: 799007 - RNA, 19 nt, Homo sapiens
  misc_RNA (1)...(19): siRNA sense strand
gaagauaaccgaucagaag

SEQ ID NO: 799008 - RNA, 19 nt, Homo sapiens
  misc_RNA (1)...(19): siRNA sense strand
gcacagaggaccugaauuc

SEQ ID NO: 799009 - RNA, 19 nt, Homo sapiens
  misc_RNA (1)...(19): siRNA sense strand
gagaacagcaccuucagua

SEQ ID NO: 799010 - RNA, 19 nt, Homo sapiens
  misc_RNA (1)...(19): siRNA sense strand
ugaagguucucaccauaua

SEQ ID NO: 799011 - RNA, 19 nt, Homo sapiens
  misc_RNA (1)...(19): siRNA sense strand
gaaagugauuaaugcagaa

SEQ ID NO: 799012 - RNA, 19 nt, Homo sapiens
  misc_RNA (1)...(19): siRNA sense strand
guacaacuaccgaauaauu

SEQ ID NO: 799013 - RNA, 19 nt, Homo sapiens
  misc_RNA (1)...(19): siRNA sense strand
gguagcacaucuucaauug

SEQ ID NO: 799014 - RNA, 19 nt, Homo sapiens
  misc_RNA (1)...(19): siRNA sense strand
aagaagagauguacaacaa

SEQ ID NO: 799015 - RNA, 19 nt, Homo sapiens
  misc_RNA (1)...(19): siRNA sense strand
gcauugacaccaccucuua

SEQ ID NO: 799016 - RNA, 19 nt, Homo sapiens
  misc_RNA (1)...(19): siRNA sense strand
gaacgaggagaauguguuu

SEQ ID NO: 799017 - RNA, 19 nt, Homo sapiens
  misc_RNA (1)...(19): siRNA sense strand
gaucaaagagauugucaaa

SEQ ID NO: 799018 - RNA, 19 nt, Homo sapiens
  misc_RNA (1)...(19): siRNA sense strand
gaaauagaaaccucaaguu

SEQ ID NO: 799019 - RNA, 19 nt, Homo sapiens
  misc_RNA (1)...(19): siRNA sense strand
gggaagauuugaagaagga

SEQ ID NO: 799020 - RNA, 19 nt, Homo sapiens
  misc_RNA (1)...(19): siRNA sense strand
ggagaugacucugcgaaga

SEQ ID NO: 799021 - RNA, 19 nt, Homo sapiens
  misc_RNA (1)...(19): siRNA sense strand
gaacucuccuagcaacuug

SEQ ID NO: 799022 - RNA, 19 nt, Homo sapiens
  misc_RNA (1)...(19): siRNA sense strand
gcacaucuucaauugauaa

SEQ ID NO: 799023 - RNA, 19 nt, Homo sapiens
  misc_RNA (1)...(19): siRNA sense strand
cggacaagcugaagaaguu

SEQ ID NO: 799024 - RNA, 19 nt, Homo sapiens
  misc_RNA (1)...(19): siRNA sense strand
caaccaagcucagugacuu

SEQ ID NO: 799025 - RNA, 19 nt, Homo sapiens
  misc_RNA (1)...(19): siRNA sense strand
uuaaagggcuacaaagaug

SEQ ID NO: 799026 - RNA, 19 nt, Homo sapiens
  misc_RNA (1)...(19): siRNA sense strand
aaacaagggcauucugaua

SEQ ID NO: 799027 - RNA, 19 nt, Homo sapiens
  misc_RNA (1)...(19): siRNA sense strand
ggugaagguugucaucauu

SEQ ID NO: 799028 - RNA, 19 nt, Homo sapiens
  misc_RNA (1)...(19): siRNA sense strand
cagcuuggcuuccauguca

SEQ ID NO: 799029 - RNA, 19 nt, Homo sapiens
  misc_RNA (1)...(19): siRNA sense strand
gaaaguaggcaucauguac

SEQ ID NO: 799030 - RNA, 19 nt, Homo sapiens
  misc_RNA (1)...(19): siRNA sense strand
ggaccugaauuccaaagga

SEQ ID NO: 799031 - RNA, 19 nt, Homo sapiens
  misc_RNA (1)...(19): siRNA sense strand
ggauagcuuugaugaaugu

SEQ ID NO: 799032 - RNA, 19 nt, Homo sapiens
  misc_RNA (1)...(19): siRNA sense strand
cagaggaccugaauuccaa

SEQ ID NO: 799033 - RNA, 19 nt, Homo sapiens
  misc_RNA (1)...(19): siRNA sense strand
guggauagcuuugaugaau

SEQ ID NO: 799034 - RNA, 19 nt, Homo sapiens
  misc_RNA (1)...(19): siRNA sense strand
aacagcaccuucaguauaa

SEQ ID NO: 799035 - RNA, 19 nt, Homo sapiens
  misc_RNA (1)...(19): siRNA sense strand
gaagucaucagaucuugaa

SEQ ID NO: 799036 - RNA, 19 nt, Homo sapiens
  misc_RNA (1)...(19): siRNA sense strand
aaagauacaucguggaaca

SEQ ID NO: 799037 - RNA, 19 nt, Homo sapiens
  misc_RNA (1)...(19): siRNA sense strand
ggaguucaccuaaagaaga

SEQ ID NO: 799038 - RNA, 19 nt, Homo sapiens
  misc_RNA (1)...(19): siRNA sense strand
gaacuagacugccuuuuag

SEQ ID NO: 799039 - RNA, 19 nt, Homo sapiens
  misc_RNA (1)...(19): siRNA sense strand
caacaaggccauggaacua

SEQ ID NO: 799040 - RNA, 19 nt, Homo sapiens
  misc_RNA (1)...(19): siRNA sense strand
cucagugacuuucucauua

SEQ ID NO: 799041 - RNA, 19 nt, Homo sapiens
  misc_RNA (1)...(19): siRNA sense strand
ucagagcgauggcaaugaa

SEQ ID NO: 799042 - RNA, 19 nt, Homo sapiens
  misc_RNA (1)...(19): siRNA sense strand
gaacacccagucagauauu

SEQ ID NO: 799043 - RNA, 19 nt, Homo sapiens
  misc_RNA (1)...(19): siRNA sense strand
gaagguguuucauacgaau

SEQ ID NO: 799044 - RNA, 19 nt, Homo sapiens
  misc_RNA (1)...(19): siRNA sense strand
gaacuaccagcagaaagua

SEQ ID NO: 799045 - RNA, 19 nt, Homo sapiens
  misc_RNA (1)...(19): siRNA sense strand
ggaacuagacugccuuuua

SEQ ID NO: 799046 - RNA, 19 nt, Homo sapiens
  misc_RNA (1)...(19): siRNA sense strand
agacaaagcucaccuucag

SEQ ID NO: 799047 - RNA, 19 nt, Homo sapiens
  misc_RNA (1)...(19): siRNA sense strand
ggaaauagaaaccucaagu

SEQ ID NO: 799048 - RNA, 19 nt, Homo sapiens
  misc_RNA (1)...(19): siRNA sense strand
ccagagaugugccuuccuu

SEQ ID NO: 799049 - RNA, 19 nt, Homo sapiens
  misc_RNA (1)...(19): siRNA sense strand
guacacaacauacaaagau

SEQ ID NO: 799050 - RNA, 19 nt, Homo sapiens
  misc_RNA (1)...(19): siRNA sense strand
agaauuccuucaacuauug

SEQ ID NO: 799051 - RNA, 19 nt, Homo sapiens
  misc_RNA (1)...(19): siRNA sense strand
gcacugaagaagagaugua

SEQ ID NO: 799052 - RNA, 19 nt, Homo sapiens
  misc_RNA (1)...(19): siRNA sense strand
uagcacaucuucaauugau

SEQ ID NO: 799053 - RNA, 19 nt, Homo sapiens
  misc_RNA (1)...(19): siRNA sense strand
cagcgaagcaacagugaua

SEQ ID NO: 799054 - RNA, 19 nt, Homo sapiens
  misc_RNA (1)...(19): siRNA sense strand
gagcgauggcaaugaaaua

SEQ ID NO: 799055 - RNA, 19 nt, Homo sapiens
  misc_RNA (1)...(19): siRNA sense strand
gaacucaacagcuauaacu

SEQ ID NO: 799056 - RNA, 19 nt, Homo sapiens
  misc_RNA (1)...(19): siRNA sense strand
gcgaagaaaugggcuagga

SEQ ID NO: 799057 - RNA, 19 nt, Homo sapiens
  misc_RNA (1)...(19): siRNA sense strand
gaaggaacacuggaacuau

SEQ ID NO: 799058 - RNA, 19 nt, Homo sapiens
  misc_RNA (1)...(19): siRNA sense strand
caacagcuauaacuaucug

SEQ ID NO: 799059 - RNA, 19 nt, Homo sapiens
  misc_RNA (1)...(19): siRNA sense strand
ggacagagcacugaagaag

SEQ ID NO: 799060 - RNA, 19 nt, Homo sapiens
  misc_RNA (1)...(19): siRNA sense strand
gaaaauggaucuccguaca

SEQ ID NO: 799061 - RNA, 19 nt, Homo sapiens
  misc_RNA (1)...(19): siRNA sense strand
gaaaagcucuucgcagaau

SEQ ID NO: 799062 - RNA, 19 nt, Homo sapiens
  misc_RNA (1)...(19): siRNA sense strand
cagaacacccagucagaua

SEQ ID NO: 799063 - RNA, 19 nt, Homo sapiens
  misc_RNA (1)...(19): siRNA sense strand
gaguucggcucaaaggauu

SEQ ID NO: 799064 - RNA, 19 nt, Homo sapiens
  misc_RNA (1)...(19): siRNA sense strand
gcagaaaguaggcaucaug

SEQ ID NO: 799065 - RNA, 19 nt, Homo sapiens
  misc_RNA (1)...(19): siRNA sense strand
auacaagacuggaccauca

SEQ ID NO: 799066 - RNA, 19 nt, Homo sapiens
  misc_RNA (1)...(19): siRNA sense strand
gggaacaucuggagaaagc

SEQ ID NO: 799067 - RNA, 19 nt, Homo sapiens
  misc_RNA (1)...(19): siRNA sense strand
agaaagagccgccaacauc

SEQ ID NO: 799068 - RNA, 19 nt, Homo sapiens
  misc_RNA (1)...(19): siRNA sense strand
cggaggaguugcucugaaa

SEQ ID NO: 799069 - RNA, 19 nt, Homo sapiens
  misc_RNA (1)...(19): siRNA sense strand
ccguacaacuaccgaauaa

SEQ ID NO: 799070 - RNA, 19 nt, Homo sapiens
  misc_RNA (1)...(19): siRNA sense strand
agagagaaccucaggcuuu

SEQ ID NO: 799071 - RNA, 19 nt, Homo sapiens
  misc_RNA (1)...(19): siRNA sense strand
ggaagcggcacauuggaaa

SEQ ID NO: 799072 - RNA, 19 nt, Homo sapiens
  misc_RNA (1)...(19): siRNA sense strand
aauccgaacucaacagcua

SEQ ID NO: 799073 - RNA, 19 nt, Homo sapiens
  misc_RNA (1)...(19): siRNA sense strand
gcaaagaagugaggauagc

SEQ ID NO: 799074 - RNA, 19 nt, Homo sapiens
  misc_RNA (1)...(19): siRNA sense strand
gcaugccagugauggagua

SEQ ID NO: 799075 - RNA, 19 nt, Homo sapiens
  misc_RNA (1)...(19): siRNA sense strand
ucaaagagauugucaaaag

SEQ ID NO: 799076 - RNA, 19 nt, Homo sapiens
  misc_RNA (1)...(19): siRNA sense strand
ugccaaaggugaagaacuu

SEQ ID NO: 799077 - RNA, 19 nt, Homo sapiens
  misc_RNA (1)...(19): siRNA sense strand
gaggccuucuuacaccuua

SEQ ID NO: 799078 - RNA, 19 nt, Homo sapiens
  misc_RNA (1)...(19): siRNA sense strand
ccaagucgcucccguugag

SEQ ID NO: 799079 - RNA, 19 nt, Homo sapiens
  misc_RNA (1)...(19): siRNA sense strand
gagaugacucugcgaagaa

SEQ ID NO: 799080 - RNA, 19 nt, Homo sapiens
  misc_RNA (1)...(19): siRNA sense strand
gcucauaaaucggagaagu

SEQ ID NO: 799081 - RNA, 19 nt, Homo sapiens
  misc_RNA (1)...(19): siRNA sense strand
ggaauaugguagcacaucu

SEQ ID NO: 799082 - RNA, 19 nt, Homo sapiens
  misc_RNA (1)...(19): siRNA sense strand
cagauggcuuacaguuaua

SEQ ID NO: 799083 - RNA, 19 nt, Homo sapiens
  misc_RNA (1)...(19): siRNA sense strand
aaaggccucuugccacuga

SEQ ID NO: 799084 - RNA, 19 nt, Homo sapiens
  misc_RNA (1)...(19): siRNA sense strand
acgccuagcuggcaaagaa

SEQ ID NO: 799085 - RNA, 19 nt, Homo sapiens
  misc_RNA (1)...(19): siRNA sense strand
gaugaucgaccuccugaga

SEQ ID NO: 799086 - RNA, 19 nt, Homo sapiens
  misc_RNA (1)...(19): siRNA sense strand
gaagaagagauguacaaca

SEQ ID NO: 799087 - RNA, 19 nt, Homo sapiens
  misc_RNA (1)...(19): siRNA sense strand
aaggaacacuggaacuauu

SEQ ID NO: 799088 - RNA, 19 nt, Homo sapiens
  misc_RNA (1)...(19): siRNA sense strand
gcucagugacuuucucauu

SEQ ID NO: 799089 - RNA, 19 nt, Homo sapiens
  misc_RNA (1)...(19): siRNA sense strand
cauaaacuccgugggauuu

SEQ ID NO: 799090 - RNA, 19 nt, Homo sapiens
  misc_RNA (1)...(19): siRNA sense strand
gcacagaauccgaacucaa

SEQ ID NO: 799091 - RNA, 19 nt, Homo sapiens
  misc_RNA (1)...(19): siRNA sense strand
aaauagaaaccucaaguug

SEQ ID NO: 799092 - RNA, 19 nt, Homo sapiens
  misc_RNA (1)...(19): siRNA sense strand
aggaauaccugaaagaucu

SEQ ID NO: 799093 - RNA, 19 nt, Homo sapiens
  misc_RNA (1)...(19): siRNA sense strand
gcccagccuuugaagaauu

SEQ ID NO: 799094 - RNA, 19 nt, Homo sapiens
  misc_RNA (1)...(19): siRNA sense strand
ggaccagggagaugauaaa

SEQ ID NO: 799095 - RNA, 19 nt, Homo sapiens
  misc_RNA (1)...(19): siRNA sense strand
ugaaugaggcaauuaugaa

SEQ ID NO: 799096 - RNA, 19 nt, Homo sapiens
  misc_RNA (1)...(19): siRNA sense strand
ggaagaagguucaggaguu

SEQ ID NO: 799097 - RNA, 19 nt, Homo sapiens
  misc_RNA (1)...(19): siRNA sense strand
ggaaagaccugcccuacga

SEQ ID NO: 799098 - RNA, 19 nt, Homo sapiens
  misc_RNA (1)...(19): siRNA sense strand
ggaggcagcugaagaguga

SEQ ID NO: 799099 - RNA, 19 nt, Homo sapiens
  misc_RNA (1)...(19): siRNA sense strand
gcaacuaccuggagaugaa

SEQ ID NO: 799100 - RNA, 19 nt, Homo sapiens
  misc_RNA (1)...(19): siRNA sense strand
gaagaagguucaggaguuu

SEQ ID NO: 799101 - RNA, 19 nt, Homo sapiens
  misc_RNA (1)...(19): siRNA sense strand
ccaagaggcugcucaagaa

SEQ ID NO: 799102 - RNA, 19 nt, Homo sapiens
  misc_RNA (1)...(19): siRNA sense strand
gcaagcaggucaacuacaa

SEQ ID NO: 799103 - RNA, 19 nt, Homo sapiens
  misc_RNA (1)...(19): siRNA sense strand
gaacaaccaguccaaguuu

SEQ ID NO: 799104 - RNA, 19 nt, Homo sapiens
  misc_RNA (1)...(19): siRNA sense strand
gcucaaggcugacguguuc

SEQ ID NO: 799105 - RNA, 19 nt, Homo sapiens
  misc_RNA (1)...(19): siRNA sense strand
gaaagaacgacauggauga

SEQ ID NO: 799106 - RNA, 19 nt, Homo sapiens
  misc_RNA (1)...(19): siRNA sense strand
aggaugagcucucugauaa

SEQ ID NO: 799107 - RNA, 19 nt, Homo sapiens
  misc_RNA (1)...(19): siRNA sense strand
uuaaacagcuacaagauug

SEQ ID NO: 799108 - RNA, 19 nt, Homo sapiens
  misc_RNA (1)...(19): siRNA sense strand
gcuacaagauugauuacaa

SEQ ID NO: 799109 - RNA, 19 nt, Homo sapiens
  misc_RNA (1)...(19): siRNA sense strand
acaagaaggugaugaucua

SEQ ID NO: 799110 - RNA, 19 nt, Homo sapiens
  misc_RNA (1)...(19): siRNA sense strand
ggaagaaggaggacaagaa

SEQ ID NO: 799111 - RNA, 19 nt, Homo sapiens
  misc_RNA (1)...(19): siRNA sense strand
gaucaaaggcuccaaagau

SEQ ID NO: 799112 - RNA, 19 nt, Homo sapiens
  misc_RNA (1)...(19): siRNA sense strand
ccgaggagauggagaauga

SEQ ID NO: 799113 - RNA, 19 nt, Homo sapiens
  misc_RNA (1)...(19): siRNA sense strand
agacagaccaccaggauua

SEQ ID NO: 799114 - RNA, 19 nt, Homo sapiens
  misc_RNA (1)...(19): siRNA sense strand
ccaagaagcucaaggaaaa

SEQ ID NO: 799115 - RNA, 19 nt, Homo sapiens
  misc_RNA (1)...(19): siRNA sense strand
guacgaaggcuacaaguau

SEQ ID NO: 799116 - RNA, 19 nt, Homo sapiens
  misc_RNA (1)...(19): siRNA sense strand
gaagaaguacuacaaguuc

SEQ ID NO: 799117 - RNA, 19 nt, Homo sapiens
  misc_RNA (1)...(19): siRNA sense strand
agaagaaacucaaggacaa

SEQ ID NO: 799118 - RNA, 19 nt, Homo sapiens
  misc_RNA (1)...(19): siRNA sense strand
ggcaggacauccagaauga

SEQ ID NO: 799119 - RNA, 19 nt, Homo sapiens
  misc_RNA (1)...(19): siRNA sense strand
ugaagaaacugcgggauga

SEQ ID NO: 799120 - RNA, 19 nt, Homo sapiens
  misc_RNA (1)...(19): siRNA sense strand
uaaugaugauggaugcuua

SEQ ID NO: 799121 - RNA, 19 nt, Homo sapiens
  misc_RNA (1)...(19): siRNA sense strand
gagagagaguucuuuguca

SEQ ID NO: 799122 - RNA, 19 nt, Homo sapiens
  misc_RNA (1)...(19): siRNA sense strand
gaugauggaugcuuaaagg

SEQ ID NO: 799123 - RNA, 19 nt, Homo sapiens
  misc_RNA (1)...(19): siRNA sense strand
gaugaggacuuugaagaga

SEQ ID NO: 799124 - RNA, 19 nt, Homo sapiens
  misc_RNA (1)...(19): siRNA sense strand
aagaagguauuccguauga

SEQ ID NO: 799125 - RNA, 19 nt, Homo sapiens
  misc_RNA (1)...(19): siRNA sense strand
gaaauucaaguucauguuc

SEQ ID NO: 799126 - RNA, 19 nt, Homo sapiens
  misc_RNA (1)...(19): siRNA sense strand
ggaugaggaugaggacuuu

SEQ ID NO: 799127 - RNA, 19 nt, Homo sapiens
  misc_RNA (1)...(19): siRNA sense strand
uacagaagaugcugaagaa

SEQ ID NO: 799128 - RNA, 19 nt, Homo sapiens
  misc_RNA (1)...(19): siRNA sense strand
gaaagaagugcagaucaaa

SEQ ID NO: 799129 - RNA, 19 nt, Homo sapiens
  misc_RNA (1)...(19): siRNA sense strand
agaaagaagugcagaucaa

SEQ ID NO: 799130 - RNA, 19 nt, Homo sapiens
  misc_RNA (1)...(19): siRNA sense strand
aaagggcccuaccugguua

SEQ ID NO: 799131 - RNA, 19 nt, Homo sapiens
  misc_RNA (1)...(19): siRNA sense strand
gauaaccagucagaauauu

SEQ ID NO: 799132 - RNA, 19 nt, Homo sapiens
  misc_RNA (1)...(19): siRNA sense strand
gaagcucccuggucaaguc

SEQ ID NO: 799133 - RNA, 19 nt, Homo sapiens
  misc_RNA (1)...(19): siRNA sense strand
aagaggaucuggaagagaa

SEQ ID NO: 799134 - RNA, 19 nt, Homo sapiens
  misc_RNA (1)...(19): siRNA sense strand
gaaggacgacgacgaugaa

SEQ ID NO: 799135 - RNA, 19 nt, Homo sapiens
  misc_RNA (1)...(19): siRNA sense strand
gcaagaagaagaggauuga

SEQ ID NO: 799136 - RNA, 19 nt, Homo sapiens
  misc_RNA (1)...(19): siRNA sense strand
gaaugaagaggaucuggaa

SEQ ID NO: 799137 - RNA, 19 nt, Homo sapiens
  misc_RNA (1)...(19): siRNA sense strand
gagaaggagcccauugaaa

SEQ ID NO: 799138 - RNA, 19 nt, Homo sapiens
  misc_RNA (1)...(19): siRNA sense strand
cggaggaacucuucaagga

SEQ ID NO: 799139 - RNA, 19 nt, Homo sapiens
  misc_RNA (1)...(19): siRNA sense strand
gcaagacggugcagaccau

SEQ ID NO: 799140 - RNA, 19 nt, Homo sapiens
  misc_RNA (1)...(19): siRNA sense strand
ggaugaggaugauaaugau

SEQ ID NO: 799141 - RNA, 19 nt, Homo sapiens
  misc_RNA (1)...(19): siRNA sense strand
gaagaggauugaugauggu

SEQ ID NO: 799142 - RNA, 19 nt, Homo sapiens
  misc_RNA (1)...(19): siRNA sense strand
ggaacaagccugccaaugc

SEQ ID NO: 799143 - RNA, 19 nt, Homo sapiens
  misc_RNA (1)...(19): siRNA sense strand
gagcaggcguuggucauug

SEQ ID NO: 799144 - RNA, 19 nt, Homo sapiens
  misc_RNA (1)...(19): siRNA sense strand
uacagaacaugaacgagua

SEQ ID NO: 799145 - RNA, 19 nt, Homo sapiens
  misc_RNA (1)...(19): siRNA sense strand
cagaguggaugaugauuca

SEQ ID NO: 799146 - RNA, 19 nt, Homo sapiens
  misc_RNA (1)...(19): siRNA sense strand
gaagaucaaaggcuccaaa

SEQ ID NO: 799147 - RNA, 19 nt, Homo sapiens
  misc_RNA (1)...(19): siRNA sense strand
aaccauagcuuugacaaga

SEQ ID NO: 799148 - RNA, 19 nt, Homo sapiens
  misc_RNA (1)...(19): siRNA sense strand
cgggagggauugucaacua

SEQ ID NO: 799149 - RNA, 19 nt, Homo sapiens
  misc_RNA (1)...(19): siRNA sense strand
uaucgcaacuaccaaagaa

SEQ ID NO: 799150 - RNA, 19 nt, Homo sapiens
  misc_RNA (1)...(19): siRNA sense strand
gaugugcacuaccugauca

SEQ ID NO: 799151 - RNA, 19 nt, Homo sapiens
  misc_RNA (1)...(19): siRNA sense strand
gaacgcgaguuugagaugu

SEQ ID NO: 799152 - RNA, 19 nt, Homo sapiens
  misc_RNA (1)...(19): siRNA sense strand
gaaggaguuuagagccuau

SEQ ID NO: 799153 - RNA, 19 nt, Homo sapiens
  misc_RNA (1)...(19): siRNA sense strand
acacggagcuacagaacau

SEQ ID NO: 799154 - RNA, 19 nt, Homo sapiens
  misc_RNA (1)...(19): siRNA sense strand
gaagaaagaagugcagauc

SEQ ID NO: 799155 - RNA, 19 nt, Homo sapiens
  misc_RNA (1)...(19): siRNA sense strand
gaaggagcccauugaaaca

SEQ ID NO: 799156 - RNA, 19 nt, Homo sapiens
  misc_RNA (1)...(19): siRNA sense strand
gaagaaggaggacaagaag

SEQ ID NO: 799157 - RNA, 19 nt, Homo sapiens
  misc_RNA (1)...(19): siRNA sense strand
gaugagcuaucagagaaug

SEQ ID NO: 799158 - RNA, 19 nt, Homo sapiens
  misc_RNA (1)...(19): siRNA sense strand
ggagaaggagcccauugaa

SEQ ID NO: 799159 - RNA, 19 nt, Homo sapiens
  misc_RNA (1)...(19): siRNA sense strand
gaagagcgagaaggaguuu

SEQ ID NO: 799160 - RNA, 19 nt, Homo sapiens
  misc_RNA (1)...(19): siRNA sense strand
cagaagaaguacuacaagu

SEQ ID NO: 799161 - RNA, 19 nt, Homo sapiens
  misc_RNA (1)...(19): siRNA sense strand
caaagggcccuaccugguu

SEQ ID NO: 799162 - RNA, 19 nt, Homo sapiens
  misc_RNA (1)...(19): siRNA sense strand
agaagaagaggauugauga

SEQ ID NO: 799163 - RNA, 19 nt, Homo sapiens
  misc_RNA (1)...(19): siRNA sense strand
ggaagcggaagaagaaaga

SEQ ID NO: 799164 - RNA, 19 nt, Homo sapiens
  misc_RNA (1)...(19): siRNA sense strand
gcucugaggaugaggauga

SEQ ID NO: 799165 - RNA, 19 nt, Homo sapiens
  misc_RNA (1)...(19): siRNA sense strand
cgagaugucagaagaagaa

SEQ ID NO: 799166 - RNA, 19 nt, Homo sapiens
  misc_RNA (1)...(19): siRNA sense strand
caccgaauccugaaccaua

SEQ ID NO: 799167 - RNA, 19 nt, Homo sapiens
  misc_RNA (1)...(19): siRNA sense strand
gaaaggcuccucgagugaa

SEQ ID NO: 799168 - RNA, 19 nt, Homo sapiens
  misc_RNA (1)...(19): siRNA sense strand
gaagaagguauuccguaug

SEQ ID NO: 799169 - RNA, 19 nt, Homo sapiens
  misc_RNA (1)...(19): siRNA sense strand
ggaaauucaaguucauguu

SEQ ID NO: 799170 - RNA, 19 nt, Homo sapiens
  misc_RNA (1)...(19): siRNA sense strand
ugagccagaugcagaagaa

SEQ ID NO: 799171 - RNA, 19 nt, Homo sapiens
  misc_RNA (1)...(19): siRNA sense strand
agagagaguucuuugucaa

SEQ ID NO: 799172 - RNA, 19 nt, Homo sapiens
  misc_RNA (1)...(19): siRNA sense strand
gaaccaggacgcuacagau

SEQ ID NO: 799173 - RNA, 19 nt, Homo sapiens
  misc_RNA (1)...(19): siRNA sense strand
gaagguauuccguaugaag

SEQ ID NO: 799174 - RNA, 19 nt, Homo sapiens
  misc_RNA (1)...(19): siRNA sense strand
ggacgacgacgaugaagag

SEQ ID NO: 799175 - RNA, 19 nt, Homo sapiens
  misc_RNA (1)...(19): siRNA sense strand
gcgagaagaggaagaacaa

SEQ ID NO: 799176 - RNA, 19 nt, Homo sapiens
  misc_RNA (1)...(19): siRNA sense strand
ggaggaggacgaccacaug

SEQ ID NO: 799177 - RNA, 19 nt, Homo sapiens
  misc_RNA (1)...(19): siRNA sense strand
ccaaugccguccugcacaa

SEQ ID NO: 799178 - RNA, 19 nt, Homo sapiens
  misc_RNA (1)...(19): siRNA sense strand
gaacucaggccagaugaca

SEQ ID NO: 799179 - RNA, 19 nt, Homo sapiens
  misc_RNA (1)...(19): siRNA sense strand
gagccuaugugucccucuu

SEQ ID NO: 799180 - RNA, 19 nt, Homo sapiens
  misc_RNA (1)...(19): siRNA sense strand
gaagaagaaacccaagaag

SEQ ID NO: 799181 - RNA, 19 nt, Homo sapiens
  misc_RNA (1)...(19): siRNA sense strand
caggaugagcucucugaua

SEQ ID NO: 799182 - RNA, 19 nt, Homo sapiens
  misc_RNA (1)...(19): siRNA sense strand
agaagaugcugaagaaacu

SEQ ID NO: 799183 - RNA, 19 nt, Homo sapiens
  misc_RNA (1)...(19): siRNA sense strand
ggaggaguuugcugacauc

SEQ ID NO: 799184 - RNA, 19 nt, Homo sapiens
  misc_RNA (1)...(19): siRNA sense strand
gcaccugggagaucgauga

SEQ ID NO: 799185 - RNA, 19 nt, Homo sapiens
  misc_RNA (1)...(19): siRNA sense strand
ccaagaagaacccgaagau

SEQ ID NO: 799186 - RNA, 19 nt, Homo sapiens
  misc_RNA (1)...(19): siRNA sense strand
ggcccuaugugaccgauau

SEQ ID NO: 799187 - RNA, 19 nt, Homo sapiens
  misc_RNA (1)...(19): siRNA sense strand
gauguacagcaacaacuuu

SEQ ID NO: 799188 - RNA, 19 nt, Homo sapiens
  misc_RNA (1)...(19): siRNA sense strand
cuacaagauugauuacaag

SEQ ID NO: 799189 - RNA, 19 nt, Homo sapiens
  misc_RNA (1)...(19): siRNA sense strand
ggagugggaagaagguauu

SEQ ID NO: 799190 - RNA, 19 nt, Homo sapiens
  misc_RNA (1)...(19): siRNA sense strand
gcaacuaccaaagaaagaa

SEQ ID NO: 799191 - RNA, 19 nt, Homo sapiens
  misc_RNA (1)...(19): siRNA sense strand
ggugauguaucgcaacuac

SEQ ID NO: 799192 - RNA, 19 nt, Homo sapiens
  misc_RNA (1)...(19): siRNA sense strand
gagaguucuuugucaagug

SEQ ID NO: 799193 - RNA, 19 nt, Homo sapiens
  misc_RNA (1)...(19): siRNA sense strand
gcaacaagaggaagaaagg

SEQ ID NO: 799194 - RNA, 19 nt, Homo sapiens
  misc_RNA (1)...(19): siRNA sense strand
ggagugaggaagaagauca

SEQ ID NO: 799195 - RNA, 19 nt, Homo sapiens
  misc_RNA (1)...(19): siRNA sense strand
guaaagggaagcggaagaa

SEQ ID NO: 799196 - RNA, 19 nt, Homo sapiens
  misc_RNA (1)...(19): siRNA sense strand
caucaggucucccuuaaua

SEQ ID NO: 799197 - RNA, 19 nt, Homo sapiens
  misc_RNA (1)...(19): siRNA sense strand
gcaaagcuuucacuuguuu

SEQ ID NO: 799198 - RNA, 19 nt, Homo sapiens
  misc_RNA (1)...(19): siRNA sense strand
ggaaacuccuacuggauua

SEQ ID NO: 799199 - RNA, 19 nt, Homo sapiens
  misc_RNA (1)...(19): siRNA sense strand
ggaaagaccaggauauuga

SEQ ID NO: 799200 - RNA, 19 nt, Homo sapiens
  misc_RNA (1)...(19): siRNA sense strand
uaaagaagauuguccaugu

SEQ ID NO: 799201 - RNA, 19 nt, Homo sapiens
  misc_RNA (1)...(19): siRNA sense strand
ccacauaaaugcaaagaau

SEQ ID NO: 799202 - RNA, 19 nt, Homo sapiens
  misc_RNA (1)...(19): siRNA sense strand
agagaaaccuuaugaaugu

SEQ ID NO: 799203 - RNA, 19 nt, Homo sapiens
  misc_RNA (1)...(19): siRNA sense strand
gaacagaaaccaaaugagu

SEQ ID NO: 799204 - RNA, 19 nt, Homo sapiens
  misc_RNA (1)...(19): siRNA sense strand
ucaagaaccuggccuguau

SEQ ID NO: 799205 - RNA, 19 nt, Homo sapiens
  misc_RNA (1)...(19): siRNA sense strand
gagaaacccuaugaaugua

SEQ ID NO: 799206 - RNA, 19 nt, Homo sapiens
  misc_RNA (1)...(19): siRNA sense strand
cgaaaggacucauaguaga

SEQ ID NO: 799207 - RNA, 19 nt, Homo sapiens
  misc_RNA (1)...(19): siRNA sense strand
gagagaaacccuacaaaug

SEQ ID NO: 799208 - RNA, 19 nt, Homo sapiens
  misc_RNA (1)...(19): siRNA sense strand
gagagaagccacauaaaug

SEQ ID NO: 799209 - RNA, 19 nt, Homo sapiens
  misc_RNA (1)...(19): siRNA sense strand
caaaugagugucacgaaua

SEQ ID NO: 799210 - RNA, 19 nt, Homo sapiens
  misc_RNA (1)...(19): siRNA sense strand
gguaaagccuucaauucuu

SEQ ID NO: 799211 - RNA, 19 nt, Homo sapiens
  misc_RNA (1)...(19): siRNA sense strand
gagagaaaccuuaugaaug

SEQ ID NO: 799212 - RNA, 19 nt, Homo sapiens
  misc_RNA (1)...(19): siRNA sense strand
gggaagaaaucuaagaagu

SEQ ID NO: 799213 - RNA, 19 nt, Homo sapiens
  misc_RNA (1)...(19): siRNA sense strand
ggagagaagccacauaaau

SEQ ID NO: 799214 - RNA, 19 nt, Homo sapiens
  misc_RNA (1)...(19): siRNA sense strand
gagagaaacccuaugaaug

SEQ ID NO: 799215 - RNA, 19 nt, Homo sapiens
  misc_RNA (1)...(19): siRNA sense strand
gaaacccuaugaaugcaaa

SEQ ID NO: 799216 - RNA, 19 nt, Homo sapiens
  misc_RNA (1)...(19): siRNA sense strand
gagagaaacccuaugaaug

SEQ ID NO: 799217 - RNA, 19 nt, Homo sapiens
  misc_RNA (1)...(19): siRNA sense strand
guaaagccuucaauucuuc

SEQ ID NO: 799218 - RNA, 19 nt, Homo sapiens
  misc_RNA (1)...(19): siRNA sense strand
caaguuaccuucaguugca

SEQ ID NO: 799219 - RNA, 19 nt, Homo sapiens
  misc_RNA (1)...(19): siRNA sense strand
ggagagaaaccuuaugaau

SEQ ID NO: 799220 - RNA, 19 nt, Homo sapiens
  misc_RNA (1)...(19): siRNA sense strand
gaaagaacccauacuagag

SEQ ID NO: 799221 - RNA, 19 nt, Homo sapiens
  misc_RNA (1)...(19): siRNA sense strand
uggcaaagccuucgcauuu

SEQ ID NO: 799222 - RNA, 19 nt, Homo sapiens
  misc_RNA (1)...(19): siRNA sense strand
gaauguaaacaauguggua

SEQ ID NO: 799223 - RNA, 19 nt, Homo sapiens
  misc_RNA (1)...(19): siRNA sense strand
uaaauucccugaaaguaca

SEQ ID NO: 799224 - RNA, 19 nt, Homo sapiens
  misc_RNA (1)...(19): siRNA sense strand
uggcaaagcuuucacuugu

SEQ ID NO: 799225 - RNA, 19 nt, Homo sapiens
  misc_RNA (1)...(19): siRNA sense strand
gacaaagcaucaagacuca

SEQ ID NO: 799226 - RNA, 19 nt, Homo sapiens
  misc_RNA (1)...(19): siRNA sense strand
ggagagaaacccuacaaau

SEQ ID NO: 799227 - RNA, 19 nt, Homo sapiens
  misc_RNA (1)...(19): siRNA sense strand
ggagagaaacccuaugaau

SEQ ID NO: 799228 - RNA, 19 nt, Homo sapiens
  misc_RNA (1)...(19): siRNA sense strand
ggaauuccagucucaguuu

SEQ ID NO: 799229 - RNA, 19 nt, Homo sapiens
  misc_RNA (1)...(19): siRNA sense strand
ugaaagaacccauacuaga

SEQ ID NO: 799230 - RNA, 19 nt, Homo sapiens
  misc_RNA (1)...(19): siRNA sense strand
gaaagaccaggauauugaa

SEQ ID NO: 799231 - RNA, 19 nt, Homo sapiens
  misc_RNA (1)...(19): siRNA sense strand
ggagagacacccuaugaau

SEQ ID NO: 799232 - RNA, 19 nt, Homo sapiens
  misc_RNA (1)...(19): siRNA sense strand
gaagccacauaaaugcaaa

SEQ ID NO: 799233 - RNA, 19 nt, Homo sapiens
  misc_RNA (1)...(19): siRNA sense strand
gaagcacucugugaaaaua

SEQ ID NO: 799234 - RNA, 19 nt, Homo sapiens
  misc_RNA (1)...(19): siRNA sense strand
gcaaagccuucgcauuucu

SEQ ID NO: 799235 - RNA, 19 nt, Homo sapiens
  misc_RNA (1)...(19): siRNA sense strand
ccaaaugagugucacgaau

SEQ ID NO: 799236 - RNA, 19 nt, Homo sapiens
  misc_RNA (1)...(19): siRNA sense strand
ggauguggcugugaacuuc

SEQ ID NO: 799237 - RNA, 19 nt, Homo sapiens
  misc_RNA (1)...(19): siRNA sense strand
guggucgggucuucauuua

SEQ ID NO: 799238 - RNA, 19 nt, Homo sapiens
  misc_RNA (1)...(19): siRNA sense strand
cgagaaaacuuacgaaugu

SEQ ID NO: 799239 - RNA, 19 nt, Homo sapiens
  misc_RNA (1)...(19): siRNA sense strand
uaagaaguccuaugguuga

SEQ ID NO: 799240 - RNA, 19 nt, Homo sapiens
  misc_RNA (1)...(19): siRNA sense strand
ucuaagaaguccuaugguu

SEQ ID NO: 799241 - RNA, 19 nt, Homo sapiens
  misc_RNA (1)...(19): siRNA sense strand
cgaaagaacucauuuugga

SEQ ID NO: 799242 - RNA, 19 nt, Homo sapiens
  misc_RNA (1)...(19): siRNA sense strand
gggaaagccuucaguuguc

SEQ ID NO: 799243 - RNA, 19 nt, Homo sapiens
  misc_RNA (1)...(19): siRNA sense strand
gagaaaccuuaugaaugua

SEQ ID NO: 799244 - RNA, 19 nt, Homo sapiens
  misc_RNA (1)...(19): siRNA sense strand
gcaucaagacucaaacuga

SEQ ID NO: 799245 - RNA, 19 nt, Homo sapiens
  misc_RNA (1)...(19): siRNA sense strand
gaacaggagggucugaugu

SEQ ID NO: 799246 - RNA, 19 nt, Homo sapiens
  misc_RNA (1)...(19): siRNA sense strand
gcagaacagugaacaccau

SEQ ID NO: 799247 - RNA, 19 nt, Homo sapiens
  misc_RNA (1)...(19): siRNA sense strand
gaauguaaagaauguggua

SEQ ID NO: 799248 - RNA, 19 nt, Homo sapiens
  misc_RNA (1)...(19): siRNA sense strand
agagaaacccuacaaaugu

SEQ ID NO: 799249 - RNA, 19 nt, Homo sapiens
  misc_RNA (1)...(19): siRNA sense strand
agagaaacccuaugaaugu

SEQ ID NO: 799250 - RNA, 19 nt, Homo sapiens
  misc_RNA (1)...(19): siRNA sense strand
ggagugggcuuugcuggau

SEQ ID NO: 799251 - RNA, 19 nt, Homo sapiens
  misc_RNA (1)...(19): siRNA sense strand
caugaaagaacccauacua

SEQ ID NO: 799252 - RNA, 19 nt, Homo sapiens
  misc_RNA (1)...(19): siRNA sense strand
gggaaggcauucagauauc

SEQ ID NO: 799253 - RNA, 19 nt, Homo sapiens
  misc_RNA (1)...(19): siRNA sense strand
gagagacacccuaugaaug

SEQ ID NO: 799254 - RNA, 19 nt, Homo sapiens
  misc_RNA (1)...(19): siRNA sense strand
agaggaauaucuacagaga

SEQ ID NO: 799255 - RNA, 19 nt, Homo sapiens
  misc_RNA (1)...(19): siRNA sense strand
gugguaaagccuucaguua

SEQ ID NO: 799256 - RNA, 19 nt, Homo sapiens
  misc_RNA (1)...(19): siRNA sense strand
ucacgaauauggagagaag

SEQ ID NO: 799257 - RNA, 19 nt, Homo sapiens
  misc_RNA (1)...(19): siRNA sense strand
ggaagaaaucuaagaaguc

SEQ ID NO: 799258 - RNA, 19 nt, Homo sapiens
  misc_RNA (1)...(19): siRNA sense strand
aaaugagugucacgaauau

SEQ ID NO: 799259 - RNA, 19 nt, Homo sapiens
  misc_RNA (1)...(19): siRNA sense strand
acaccggaguucaaccuua

SEQ ID NO: 799260 - RNA, 19 nt, Homo sapiens
  misc_RNA (1)...(19): siRNA sense strand
gagacacccuaugaaugua

SEQ ID NO: 799261 - RNA, 19 nt, Homo sapiens
  misc_RNA (1)...(19): siRNA sense strand
ccagaggaauaucuacaga

SEQ ID NO: 799262 - RNA, 19 nt, Homo sapiens
  misc_RNA (1)...(19): siRNA sense strand
gaacagugaacaccaugga

SEQ ID NO: 799263 - RNA, 19 nt, Homo sapiens
  misc_RNA (1)...(19): siRNA sense strand
guucaaccuuauacaugua

SEQ ID NO: 799264 - RNA, 19 nt, Homo sapiens
  misc_RNA (1)...(19): siRNA sense strand
caaagcaucaagacucaaa

SEQ ID NO: 799265 - RNA, 19 nt, Homo sapiens
  misc_RNA (1)...(19): siRNA sense strand
acucgcagcuccaguauuc

SEQ ID NO: 799266 - RNA, 19 nt, Homo sapiens
  misc_RNA (1)...(19): siRNA sense strand
gcaaguggucgucuaguca

SEQ ID NO: 799267 - RNA, 19 nt, Homo sapiens
  misc_RNA (1)...(19): siRNA sense strand
gaaacccuaugaauguaag

SEQ ID NO: 799268 - RNA, 19 nt, Homo sapiens
  misc_RNA (1)...(19): siRNA sense strand
gaauuccagucucaguuuc

SEQ ID NO: 799269 - RNA, 19 nt, Homo sapiens
  misc_RNA (1)...(19): siRNA sense strand
cacgaaaggacucauagua

SEQ ID NO: 799270 - RNA, 19 nt, Homo sapiens
  misc_RNA (1)...(19): siRNA sense strand
aaaucacacuggagagaaa

SEQ ID NO: 799271 - RNA, 19 nt, Homo sapiens
  misc_RNA (1)...(19): siRNA sense strand
gaucucacacugaacagaa

SEQ ID NO: 799272 - RNA, 19 nt, Homo sapiens
  misc_RNA (1)...(19): siRNA sense strand
agagaaaccuuuuguaugu

SEQ ID NO: 799273 - RNA, 19 nt, Homo sapiens
  misc_RNA (1)...(19): siRNA sense strand
ggaaggcauucagauaucu

SEQ ID NO: 799274 - RNA, 19 nt, Homo sapiens
  misc_RNA (1)...(19): siRNA sense strand
ggcaaagccuucgcauuuc

SEQ ID NO: 799275 - RNA, 19 nt, Homo sapiens
  misc_RNA (1)...(19): siRNA sense strand
ggcaaagcuuucacuuguu

SEQ ID NO: 799276 - RNA, 19 nt, Homo sapiens
  misc_RNA (1)...(19): siRNA sense strand
ggagugaaaccaugugagu

SEQ ID NO: 799277 - RNA, 19 nt, Homo sapiens
  misc_RNA (1)...(19): siRNA sense strand
ggucgggucuucauuuacu

SEQ ID NO: 799278 - RNA, 19 nt, Homo sapiens
  misc_RNA (1)...(19): siRNA sense strand
gagaaacccuaugaaugca

SEQ ID NO: 799279 - RNA, 19 nt, Homo sapiens
  misc_RNA (1)...(19): siRNA sense strand
ccaugugacugcagugugu

SEQ ID NO: 799280 - RNA, 19 nt, Homo sapiens
  misc_RNA (1)...(19): siRNA sense strand
gugaaaccaugugagugua

SEQ ID NO: 799281 - RNA, 19 nt, Homo sapiens
  misc_RNA (1)...(19): siRNA sense strand
cuagagagaaacccuauga

SEQ ID NO: 799282 - RNA, 19 nt, Homo sapiens
  misc_RNA (1)...(19): siRNA sense strand
acacugaacagaaaccaaa

SEQ ID NO: 799283 - RNA, 19 nt, Homo sapiens
  misc_RNA (1)...(19): siRNA sense strand
caccggaguucaaccuuau

SEQ ID NO: 799284 - RNA, 19 nt, Homo sapiens
  misc_RNA (1)...(19): siRNA sense strand
aaagaagauuguccaugug

SEQ ID NO: 799285 - RNA, 19 nt, Homo sapiens
  misc_RNA (1)...(19): siRNA sense strand
gaaaccaugugaguguaag

SEQ ID NO: 799286 - RNA, 19 nt, Homo sapiens
  misc_RNA (1)...(19): siRNA sense strand
aaagaacccauacuagaga

SEQ ID NO: 799287 - RNA, 19 nt, Homo sapiens
  misc_RNA (1)...(19): siRNA sense strand
gaguucaaccuuauacaug

SEQ ID NO: 799288 - RNA, 19 nt, Homo sapiens
  misc_RNA (1)...(19): siRNA sense strand
ggagagaaaccuuuuguau

SEQ ID NO: 799289 - RNA, 19 nt, Homo sapiens
  misc_RNA (1)...(19): siRNA sense strand
gacucacacuggagagaaa

SEQ ID NO: 799290 - RNA, 19 nt, Homo sapiens
  misc_RNA (1)...(19): siRNA sense strand
gugggaaggcauucagaua

SEQ ID NO: 799291 - RNA, 19 nt, Homo sapiens
  misc_RNA (1)...(19): siRNA sense strand
agagacacccuaugaaugu

SEQ ID NO: 799292 - RNA, 19 nt, Homo sapiens
  misc_RNA (1)...(19): siRNA sense strand
ucgaacccaugaaagaauu

SEQ ID NO: 799293 - RNA, 19 nt, Homo sapiens
  misc_RNA (1)...(19): siRNA sense strand
uuccugaucuuaauacgaa

SEQ ID NO: 799294 - RNA, 19 nt, Homo sapiens
  misc_RNA (1)...(19): siRNA sense strand
gaacccauacuagagagaa

SEQ ID NO: 799295 - RNA, 19 nt, Homo sapiens
  misc_RNA (1)...(19): siRNA sense strand
ggucuucauuuacuucagu

SEQ ID NO: 799296 - RNA, 19 nt, Homo sapiens
  misc_RNA (1)...(19): siRNA sense strand
gaacaaauguggaaacuga

SEQ ID NO: 799297 - RNA, 19 nt, Homo sapiens
  misc_RNA (1)...(19): siRNA sense strand
ggauaaagcuacaggagaa

SEQ ID NO: 799298 - RNA, 19 nt, Homo sapiens
  misc_RNA (1)...(19): siRNA sense strand
ggacuuacuuucaugaguu

SEQ ID NO: 799299 - RNA, 19 nt, Homo sapiens
  misc_RNA (1)...(19): siRNA sense strand
ggagauauauuugagagaa

SEQ ID NO: 799300 - RNA, 19 nt, Homo sapiens
  misc_RNA (1)...(19): siRNA sense strand
caaauacugcucagaaaua

SEQ ID NO: 799301 - RNA, 19 nt, Homo sapiens
  misc_RNA (1)...(19): siRNA sense strand
gauaaugaauccagagguu

SEQ ID NO: 799302 - RNA, 19 nt, Homo sapiens
  misc_RNA (1)...(19): siRNA sense strand
gaacaaguacagaaugaaa

SEQ ID NO: 799303 - RNA, 19 nt, Homo sapiens
  misc_RNA (1)...(19): siRNA sense strand
caauugagguggucacuga

SEQ ID NO: 799304 - RNA, 19 nt, Homo sapiens
  misc_RNA (1)...(19): siRNA sense strand
gaaccaagguggccaaacu

SEQ ID NO: 799305 - RNA, 19 nt, Homo sapiens
  misc_RNA (1)...(19): siRNA sense strand
gaaaugaacacugcaaaga

SEQ ID NO: 799306 - RNA, 19 nt, Homo sapiens
  misc_RNA (1)...(19): siRNA sense strand
gggauacgauggccaauau

SEQ ID NO: 799307 - RNA, 19 nt, Homo sapiens
  misc_RNA (1)...(19): siRNA sense strand
uaacagccuuucuagauga

SEQ ID NO: 799308 - RNA, 19 nt, Homo sapiens
  misc_RNA (1)...(19): siRNA sense strand
gauacgauggccaauauua

SEQ ID NO: 799309 - RNA, 19 nt, Homo sapiens
  misc_RNA (1)...(19): siRNA sense strand
gagcaaaguugaucagucu

SEQ ID NO: 799310 - RNA, 19 nt, Homo sapiens
  misc_RNA (1)...(19): siRNA sense strand
ggaaauggcuuuuaauaca

SEQ ID NO: 799311 - RNA, 19 nt, Homo sapiens
  misc_RNA (1)...(19): siRNA sense strand
guacgaugcuguuggaaug

SEQ ID NO: 799312 - RNA, 19 nt, Homo sapiens
  misc_RNA (1)...(19): siRNA sense strand
gcagaacgagaguuuauuu

SEQ ID NO: 799313 - RNA, 19 nt, Homo sapiens
  misc_RNA (1)...(19): siRNA sense strand
gcauguauccucugacaaa

SEQ ID NO: 799314 - RNA, 19 nt, Homo sapiens
  misc_RNA (1)...(19): siRNA sense strand
guugaucagucucuucaua

SEQ ID NO: 799315 - RNA, 19 nt, Homo sapiens
  misc_RNA (1)...(19): siRNA sense strand
gaacgagaguuuauuuuga

SEQ ID NO: 799316 - RNA, 19 nt, Homo sapiens
  misc_RNA (1)...(19): siRNA sense strand
caugagaggagauauauuu

SEQ ID NO: 799317 - RNA, 19 nt, Homo sapiens
  misc_RNA (1)...(19): siRNA sense strand
guaacagccuuucuagaug

SEQ ID NO: 799318 - RNA, 19 nt, Homo sapiens
  misc_RNA (1)...(19): siRNA sense strand
ggaucuauauuacuacaug

SEQ ID NO: 799319 - RNA, 19 nt, Homo sapiens
  misc_RNA (1)...(19): siRNA sense strand
caagugaauaugccaaaua

SEQ ID NO: 799320 - RNA, 19 nt, Homo sapiens
  misc_RNA (1)...(19): siRNA sense strand
ucagaaauauuaggaguug

SEQ ID NO: 799321 - RNA, 19 nt, Homo sapiens
  misc_RNA (1)...(19): siRNA sense strand
gcagaaauguuuuaagaug

SEQ ID NO: 799322 - RNA, 19 nt, Homo sapiens
  misc_RNA (1)...(19): siRNA sense strand
gccaaauacugcucagaaa

SEQ ID NO: 799323 - RNA, 19 nt, Homo sapiens
  misc_RNA (1)...(19): siRNA sense strand
uguggaaacugacuuugua

SEQ ID NO: 799324 - RNA, 19 nt, Homo sapiens
  misc_RNA (1)...(19): siRNA sense strand
ugagugagcuauguauuga

SEQ ID NO: 799325 - RNA, 19 nt, Homo sapiens
  misc_RNA (1)...(19): siRNA sense strand
gagcaugagaggagauaua

SEQ ID NO: 799326 - RNA, 19 nt, Homo sapiens
  misc_RNA (1)...(19): siRNA sense strand
gagaggagauauauuugag

SEQ ID NO: 799327 - RNA, 19 nt, Homo sapiens
  misc_RNA (1)...(19): siRNA sense strand
gacagaugaugacaaguau

SEQ ID NO: 799328 - RNA, 19 nt, Homo sapiens
  misc_RNA (1)...(19): siRNA sense strand
ccugggaucuauauuacua

SEQ ID NO: 799329 - RNA, 19 nt, Homo sapiens
  misc_RNA (1)...(19): siRNA sense strand
gaaauguuguaucccugaa

SEQ ID NO: 799330 - RNA, 19 nt, Homo sapiens
  misc_RNA (1)...(19): siRNA sense strand
cagaugaugacaaguauaa

SEQ ID NO: 799331 - RNA, 19 nt, Homo sapiens
  misc_RNA (1)...(19): siRNA sense strand
gaaguacgagcagcaagua

SEQ ID NO: 799332 - RNA, 19 nt, Homo sapiens
  misc_RNA (1)...(19): siRNA sense strand
agacagaugaugacaagua

SEQ ID NO: 799333 - RNA, 19 nt, Homo sapiens
  misc_RNA (1)...(19): siRNA sense strand
aaagacagaugaugacaag

SEQ ID NO: 799334 - RNA, 19 nt, Homo sapiens
  misc_RNA (1)...(19): siRNA sense strand
acagaaaccuaauccugaa

SEQ ID NO: 799335 - RNA, 19 nt, Homo sapiens
  misc_RNA (1)...(19): siRNA sense strand
gaaaggaccaugcuagacu

SEQ ID NO: 799336 - RNA, 19 nt, Homo sapiens
  misc_RNA (1)...(19): siRNA sense strand
ggauggaaauggcuuuuaa

SEQ ID NO: 799337 - RNA, 19 nt, Homo sapiens
  misc_RNA (1)...(19): siRNA sense strand
gaggaaaacaccauaauuu

SEQ ID NO: 799338 - RNA, 19 nt, Homo sapiens
  misc_RNA (1)...(19): siRNA sense strand
caggcaaugucuuccuaua

SEQ ID NO: 799339 - RNA, 19 nt, Homo sapiens
  misc_RNA (1)...(19): siRNA sense strand
ggaaugaaauacagaaacc

SEQ ID NO: 799340 - RNA, 19 nt, Homo sapiens
  misc_RNA (1)...(19): siRNA sense strand
ccagcuaccuuuggacauu

SEQ ID NO: 799341 - RNA, 19 nt, Homo sapiens
  misc_RNA (1)...(19): siRNA sense strand
ugacagaugcucauguuug

SEQ ID NO: 799342 - RNA, 19 nt, Homo sapiens
  misc_RNA (1)...(19): siRNA sense strand
uggccaaacuacucgguua

SEQ ID NO: 799343 - RNA, 19 nt, Homo sapiens
  misc_RNA (1)...(19): siRNA sense strand
ggacaugcuccacaauuuc

SEQ ID NO: 799344 - RNA, 19 nt, Homo sapiens
  misc_RNA (1)...(19): siRNA sense strand
gaaggaaaauacaaucaug

SEQ ID NO: 799345 - RNA, 19 nt, Homo sapiens
  misc_RNA (1)...(19): siRNA sense strand
gagaauuguucauuuacag

SEQ ID NO: 799346 - RNA, 19 nt, Homo sapiens
  misc_RNA (1)...(19): siRNA sense strand
gaaauacagaaaccuaauc

SEQ ID NO: 799347 - RNA, 19 nt, Homo sapiens
  misc_RNA (1)...(19): siRNA sense strand
gcaagugaauaugccaaau

SEQ ID NO: 799348 - RNA, 19 nt, Homo sapiens
  misc_RNA (1)...(19): siRNA sense strand
ggugaggacuuacuuucau

SEQ ID NO: 799349 - RNA, 19 nt, Homo sapiens
  misc_RNA (1)...(19): siRNA sense strand
gacagaugcucauguuugg

SEQ ID NO: 799350 - RNA, 19 nt, Homo sapiens
  misc_RNA (1)...(19): siRNA sense strand
gaagcagaacgagaguuua

SEQ ID NO: 799351 - RNA, 19 nt, Homo sapiens
  misc_RNA (1)...(19): siRNA sense strand
aaagauggaagcccuauug

SEQ ID NO: 799352 - RNA, 19 nt, Homo sapiens
  misc_RNA (1)...(19): siRNA sense strand
gaacaccuaccaggaguug

SEQ ID NO: 799353 - RNA, 19 nt, Homo sapiens
  misc_RNA (1)...(19): siRNA sense strand
gauauugagaugagcauga

SEQ ID NO: 799354 - RNA, 19 nt, Homo sapiens
  misc_RNA (1)...(19): siRNA sense strand
ggagaaguauugggacagu

SEQ ID NO: 799355 - RNA, 19 nt, Homo sapiens
  misc_RNA (1)...(19): siRNA sense strand
guuggugguuccaggauuu

SEQ ID NO: 799356 - RNA, 19 nt, Homo sapiens
  misc_RNA (1)...(19): siRNA sense strand
ccaucuuccugaacaagua

SEQ ID NO: 799357 - RNA, 19 nt, Homo sapiens
  misc_RNA (1)...(19): siRNA sense strand
acuggcagauguagaagua

SEQ ID NO: 799358 - RNA, 19 nt, Homo sapiens
  misc_RNA (1)...(19): siRNA sense strand
gacuuacuuucaugaguuu

SEQ ID NO: 799359 - RNA, 19 nt, Homo sapiens
  misc_RNA (1)...(19): siRNA sense strand
gcaaugucuuccuauacug

SEQ ID NO: 799360 - RNA, 19 nt, Homo sapiens
  misc_RNA (1)...(19): siRNA sense strand
ugaagcagaacgagaguuu

SEQ ID NO: 799361 - RNA, 19 nt, Homo sapiens
  misc_RNA (1)...(19): siRNA sense strand
cguaacagccuuucuagau

SEQ ID NO: 799362 - RNA, 19 nt, Homo sapiens
  misc_RNA (1)...(19): siRNA sense strand
ggaugauaccuuccuugua

SEQ ID NO: 799363 - RNA, 19 nt, Homo sapiens
  misc_RNA (1)...(19): siRNA sense strand
cagcauguauccucugaca

SEQ ID NO: 799364 - RNA, 19 nt, Homo sapiens
  misc_RNA (1)...(19): siRNA sense strand
gguguacgaugcuguugga

SEQ ID NO: 799365 - RNA, 19 nt, Homo sapiens
  misc_RNA (1)...(19): siRNA sense strand
ggauaucuuuggagugaag

SEQ ID NO: 799366 - RNA, 19 nt, Homo sapiens
  misc_RNA (1)...(19): siRNA sense strand
ggcaaugucuuccuauacu

SEQ ID NO: 799367 - RNA, 19 nt, Homo sapiens
  misc_RNA (1)...(19): siRNA sense strand
caucagauuugugcacaga

SEQ ID NO: 799368 - RNA, 19 nt, Homo sapiens
  misc_RNA (1)...(19): siRNA sense strand
agacagggguuuugaauau

SEQ ID NO: 799369 - RNA, 19 nt, Homo sapiens
  misc_RNA (1)...(19): siRNA sense strand
ccaaacuacucgguuauag

SEQ ID NO: 799370 - RNA, 19 nt, Homo sapiens
  misc_RNA (1)...(19): siRNA sense strand
cugaacaaguacagaauga

SEQ ID NO: 799371 - RNA, 19 nt, Homo sapiens
  misc_RNA (1)...(19): siRNA sense strand
uguauccucugacaaagaa

SEQ ID NO: 799372 - RNA, 19 nt, Homo sapiens
  misc_RNA (1)...(19): siRNA sense strand
uggcagauguagaaguaaa

SEQ ID NO: 799373 - RNA, 19 nt, Homo sapiens
  misc_RNA (1)...(19): siRNA sense strand
cagccuuucuagaugauuu

SEQ ID NO: 799374 - RNA, 19 nt, Homo sapiens
  misc_RNA (1)...(19): siRNA sense strand
gcuggaugcugcaagugaa

SEQ ID NO: 799375 - RNA, 19 nt, Homo sapiens
  misc_RNA (1)...(19): siRNA sense strand
gccagacgauacuuggaaa

SEQ ID NO: 799376 - RNA, 19 nt, Homo sapiens
  misc_RNA (1)...(19): siRNA sense strand
gaaugagugagcuauguau

SEQ ID NO: 799377 - RNA, 19 nt, Homo sapiens
  misc_RNA (1)...(19): siRNA sense strand
cagaaugacguuaggaaga

SEQ ID NO: 799378 - RNA, 19 nt, Homo sapiens
  misc_RNA (1)...(19): siRNA sense strand
gagcacaagccgcguaaca

SEQ ID NO: 799379 - RNA, 19 nt, Homo sapiens
  misc_RNA (1)...(19): siRNA sense strand
gaaugacguuaggaagaga

SEQ ID NO: 799380 - RNA, 19 nt, Homo sapiens
  misc_RNA (1)...(19): siRNA sense strand
ucuuuggagugaaguauuu

SEQ ID NO: 799381 - RNA, 19 nt, Homo sapiens
  misc_RNA (1)...(19): siRNA sense strand
acgacgaggugaggacuua

SEQ ID NO: 799382 - RNA, 19 nt, Homo sapiens
  misc_RNA (1)...(19): siRNA sense strand
uaaagcuacaggagaagua

SEQ ID NO: 799383 - RNA, 19 nt, Homo sapiens
  misc_RNA (1)...(19): siRNA sense strand
ugauuuaagccagaaguua

SEQ ID NO: 799384 - RNA, 19 nt, Homo sapiens
  misc_RNA (1)...(19): siRNA sense strand
agugagcuauguauugauu

SEQ ID NO: 799385 - RNA, 19 nt, Homo sapiens
  misc_RNA (1)...(19): siRNA sense strand
gaaguauuuuccauggaua

SEQ ID NO: 799386 - RNA, 19 nt, Homo sapiens
  misc_RNA (1)...(19): siRNA sense strand
ccaaauacugcucagaaau

SEQ ID NO: 799387 - RNA, 19 nt, Homo sapiens
  misc_RNA (1)...(19): siRNA sense strand
gugaauaugccaaauacug

SEQ ID NO: 799388 - RNA, 19 nt, Homo sapiens
  misc_RNA (1)...(19): siRNA sense strand
ggaaacugacuuuguagag

SEQ ID NO: 799389 - RNA, 19 nt, Homo sapiens
  misc_RNA (1)...(19): siRNA sense strand
gaaggauggaaauggcuuu

SEQ ID NO: 799390 - RNA, 19 nt, Homo sapiens
  misc_RNA (1)...(19): siRNA sense strand
ugacuucguccuugaaaug

SEQ ID NO: 799391 - RNA, 19 nt, Homo sapiens
  misc_RNA (1)...(19): siRNA sense strand
cagcuaccuuuggacauuu

SEQ ID NO: 799392 - RNA, 19 nt, Homo sapiens
  misc_RNA (1)...(19): siRNA sense strand
caaauaugccagcuaccuu

SEQ ID NO: 799393 - RNA, 19 nt, Homo sapiens
  misc_RNA (1)...(19): siRNA sense strand
gcuacuccaggcacaaaua

SEQ ID NO: 799394 - RNA, 19 nt, Homo sapiens
  misc_RNA (1)...(19): siRNA sense strand
caaaguugaucagucucuu

SEQ ID NO: 799395 - RNA, 19 nt, Homo sapiens
  misc_RNA (1)...(19): siRNA sense strand
guagaggugccaucgcaaa

SEQ ID NO: 799396 - RNA, 19 nt, Homo sapiens
  misc_RNA (1)...(19): siRNA sense strand
gggaagagacggaggauau

SEQ ID NO: 799397 - RNA, 19 nt, Homo sapiens
  misc_RNA (1)...(19): siRNA sense strand
ggaggagagucgcuaccua

SEQ ID NO: 799398 - RNA, 19 nt, Homo sapiens
  misc_RNA (1)...(19): siRNA sense strand
gaagaaggaguacgugaug

SEQ ID NO: 799399 - RNA, 19 nt, Homo sapiens
  misc_RNA (1)...(19): siRNA sense strand
uuaaucgacugaagaagaa

SEQ ID NO: 799400 - RNA, 19 nt, Homo sapiens
  misc_RNA (1)...(19): siRNA sense strand
gaaaagaggcggagaaagu

SEQ ID NO: 799401 - RNA, 19 nt, Homo sapiens
  misc_RNA (1)...(19): siRNA sense strand
ggauauggacuuucugucu

SEQ ID NO: 799402 - RNA, 19 nt, Homo sapiens
  misc_RNA (1)...(19): siRNA sense strand
gacggaggauauggacuuu

SEQ ID NO: 799403 - RNA, 19 nt, Homo sapiens
  misc_RNA (1)...(19): siRNA sense strand
ucucugaccugcugcaaag

SEQ ID NO: 799404 - RNA, 19 nt, Homo sapiens
  misc_RNA (1)...(19): siRNA sense strand
cuaccuacgggcagucuua

SEQ ID NO: 799405 - RNA, 19 nt, Homo sapiens
  misc_RNA (1)...(19): siRNA sense strand
gacugaagaagaaggagua

SEQ ID NO: 799406 - RNA, 19 nt, Homo sapiens
  misc_RNA (1)...(19): siRNA sense strand
cgucuucucuuaaaaugua

SEQ ID NO: 799407 - RNA, 19 nt, Homo sapiens
  misc_RNA (1)...(19): siRNA sense strand
ggaagagacggaggauaug

SEQ ID NO: 799408 - RNA, 19 nt, Homo sapiens
  misc_RNA (1)...(19): siRNA sense strand
cggaggauauggacuuucu

SEQ ID NO: 799409 - RNA, 19 nt, Homo sapiens
  misc_RNA (1)...(19): siRNA sense strand
aaaugcagcgcuucucuga

SEQ ID NO: 799410 - RNA, 19 nt, Homo sapiens
  misc_RNA (1)...(19): siRNA sense strand
gaggauauggacuuucugu

SEQ ID NO: 799411 - RNA, 19 nt, Homo sapiens
  misc_RNA (1)...(19): siRNA sense strand
cuuaaucgacugaagaaga

SEQ ID NO: 799412 - RNA, 19 nt, Homo sapiens
  misc_RNA (1)...(19): siRNA sense strand
gaagagacggaggauaugg

SEQ ID NO: 799413 - RNA, 19 nt, Homo sapiens
  misc_RNA (1)...(19): siRNA sense strand
gaccaccucgcucuucaga

SEQ ID NO: 799414 - RNA, 19 nt, Homo sapiens
  misc_RNA (1)...(19): siRNA sense strand
agacggaggauauggacuu

SEQ ID NO: 799415 - RNA, 19 nt, Homo sapiens
  misc_RNA (1)...(19): siRNA sense strand
ugaagaagaaggaguacgu

SEQ ID NO: 799416 - RNA, 19 nt, Homo sapiens
  misc_RNA (1)...(19): siRNA sense strand
ggcuggaacuggcggaucu

SEQ ID NO: 799417 - RNA, 19 nt, Homo sapiens
  misc_RNA (1)...(19): siRNA sense strand
gcagcgguaacgacaacaa

SEQ ID NO: 799418 - RNA, 19 nt, Homo sapiens
  misc_RNA (1)...(19): siRNA sense strand
gacaguggcagcgccgaaa

SEQ ID NO: 799419 - RNA, 19 nt, Homo sapiens
  misc_RNA (1)...(19): siRNA sense strand
agaagaaggaguacgugau

SEQ ID NO: 799420 - RNA, 19 nt, Homo sapiens
  misc_RNA (1)...(19): siRNA sense strand
gaggaaggcuuaauagaua

SEQ ID NO: 799421 - RNA, 19 nt, Homo sapiens
  misc_RNA (1)...(19): siRNA sense strand
gagauaaccuaauuacuga

SEQ ID NO: 799422 - RNA, 19 nt, Homo sapiens
  misc_RNA (1)...(19): siRNA sense strand
ccagagagcugcauacaug

SEQ ID NO: 799423 - RNA, 19 nt, Homo sapiens
  misc_RNA (1)...(19): siRNA sense strand
ugaaauuacuugccuauga

SEQ ID NO: 799424 - RNA, 19 nt, Homo sapiens
  misc_RNA (1)...(19): siRNA sense strand
gaaauuacuugccuaugau

SEQ ID NO: 799425 - RNA, 19 nt, Homo sapiens
  misc_RNA (1)...(19): siRNA sense strand
ggagauaaccuaauuacug

SEQ ID NO: 799426 - RNA, 19 nt, Homo sapiens
  misc_RNA (1)...(19): siRNA sense strand
ggaaggaaaugaaauuacu

SEQ ID NO: 799427 - RNA, 19 nt, Homo sapiens
  misc_RNA (1)...(19): siRNA sense strand
gcaaguauuccagacauua

SEQ ID NO: 799428 - RNA, 19 nt, Homo sapiens
  misc_RNA (1)...(19): siRNA sense strand
guauuuagguauccugauu

SEQ ID NO: 799429 - RNA, 19 nt, Homo sapiens
  misc_RNA (1)...(19): siRNA sense strand
ugacauaaaugacaagagu

SEQ ID NO: 799430 - RNA, 19 nt, Homo sapiens
  misc_RNA (1)...(19): siRNA sense strand
ucaaaagucucaagcaaua

SEQ ID NO: 799431 - RNA, 19 nt, Homo sapiens
  misc_RNA (1)...(19): siRNA sense strand
gaaaauagcacacacacaa

SEQ ID NO: 799432 - RNA, 19 nt, Homo sapiens
  misc_RNA (1)...(19): siRNA sense strand
gcaucaggcugcgucauuu

SEQ ID NO: 799433 - RNA, 19 nt, Homo sapiens
  misc_RNA (1)...(19): siRNA sense strand
gacaagaguauaacggaua

SEQ ID NO: 799434 - RNA, 19 nt, Homo sapiens
  misc_RNA (1)...(19): siRNA sense strand
agcauuaccuccagauaua

SEQ ID NO: 799435 - RNA, 19 nt, Homo sapiens
  misc_RNA (1)...(19): siRNA sense strand
guuauugaauccugagaaa

SEQ ID NO: 799436 - RNA, 19 nt, Homo sapiens
  misc_RNA (1)...(19): siRNA sense strand
ccaugaagaugcaggagaa

SEQ ID NO: 799437 - RNA, 19 nt, Homo sapiens
  misc_RNA (1)...(19): siRNA sense strand
ggacugagguuauuuuaca

SEQ ID NO: 799438 - RNA, 19 nt, Homo sapiens
  misc_RNA (1)...(19): siRNA sense strand
gagaagcuggucccaagua

SEQ ID NO: 799439 - RNA, 19 nt, Homo sapiens
  misc_RNA (1)...(19): siRNA sense strand
caaguggaauucauguguu

SEQ ID NO: 799440 - RNA, 19 nt, Homo sapiens
  misc_RNA (1)...(19): siRNA sense strand
gaccuggccuuucauuauc

SEQ ID NO: 799441 - RNA, 19 nt, Homo sapiens
  misc_RNA (1)...(19): siRNA sense strand
ggagagggcuuuucuuauc

SEQ ID NO: 799442 - RNA, 19 nt, Homo sapiens
  misc_RNA (1)...(19): siRNA sense strand
ugaaaugugucucucauac

SEQ ID NO: 799443 - RNA, 19 nt, Homo sapiens
  misc_RNA (1)...(19): siRNA sense strand
cacaauggauauaaggaaa

SEQ ID NO: 799444 - RNA, 19 nt, Homo sapiens
  misc_RNA (1)...(19): siRNA sense strand
cuagaaguccauuaugaua

SEQ ID NO: 799445 - RNA, 19 nt, Homo sapiens
  misc_RNA (1)...(19): siRNA sense strand
aaugugagauguuccaaga

SEQ ID NO: 799446 - RNA, 19 nt, Homo sapiens
  misc_RNA (1)...(19): siRNA sense strand
uccaucaacuugcuuguuu

SEQ ID NO: 799447 - RNA, 19 nt, Homo sapiens
  misc_RNA (1)...(19): siRNA sense strand
agaaagacccuauaaagca

SEQ ID NO: 799448 - RNA, 19 nt, Homo sapiens
  misc_RNA (1)...(19): siRNA sense strand
aaauagcacacacacaaua

SEQ ID NO: 799449 - RNA, 19 nt, Homo sapiens
  misc_RNA (1)...(19): siRNA sense strand
caaguaccaugacuccaau

SEQ ID NO: 799450 - RNA, 19 nt, Homo sapiens
  misc_RNA (1)...(19): siRNA sense strand
cgaccuggccuuucauuau

SEQ ID NO: 799451 - RNA, 19 nt, Homo sapiens
  misc_RNA (1)...(19): siRNA sense strand
caccaagaguuugcgguua

SEQ ID NO: 799452 - RNA, 19 nt, Homo sapiens
  misc_RNA (1)...(19): siRNA sense strand
ucuagaauaugccauggaa

SEQ ID NO: 799453 - RNA, 19 nt, Homo sapiens
  misc_RNA (1)...(19): siRNA sense strand
gagggucacugcacuuugg

SEQ ID NO: 799454 - RNA, 19 nt, Homo sapiens
  misc_RNA (1)...(19): siRNA sense strand
ugccaaauguuuaagauuc

SEQ ID NO: 799455 - RNA, 19 nt, Homo sapiens
  misc_RNA (1)...(19): siRNA sense strand
aaacuagugugcuaucuac

SEQ ID NO: 799456 - RNA, 19 nt, Homo sapiens
  misc_RNA (1)...(19): siRNA sense strand
gcaaauagagaguugaaaa

SEQ ID NO: 799457 - RNA, 19 nt, Homo sapiens
  misc_RNA (1)...(19): siRNA sense strand
cauuagauccgcauuaugu

SEQ ID NO: 799458 - RNA, 19 nt, Homo sapiens
  misc_RNA (1)...(19): siRNA sense strand
uggaugcuaugaauaaguu

SEQ ID NO: 799459 - RNA, 19 nt, Homo sapiens
  misc_RNA (1)...(19): siRNA sense strand
ugugcuaucuacagccuua

SEQ ID NO: 799460 - RNA, 19 nt, Homo sapiens
  misc_RNA (1)...(19): siRNA sense strand
gaaaagggaaggaaaugaa

SEQ ID NO: 799461 - RNA, 19 nt, Homo sapiens
  misc_RNA (1)...(19): siRNA sense strand
uaaccuaauuacugagugu

SEQ ID NO: 799462 - RNA, 19 nt, Homo sapiens
  misc_RNA (1)...(19): siRNA sense strand
ccaaguaccaugacuccaa

SEQ ID NO: 799463 - RNA, 19 nt, Homo sapiens
  misc_RNA (1)...(19): siRNA sense strand
aaagauagagcugagauga

SEQ ID NO: 799464 - RNA, 19 nt, Homo sapiens
  misc_RNA (1)...(19): siRNA sense strand
ugaggaaggcuuaauagau

SEQ ID NO: 799465 - RNA, 19 nt, Homo sapiens
  misc_RNA (1)...(19): siRNA sense strand
uaagauuccuguguuccaa

SEQ ID NO: 799466 - RNA, 19 nt, Homo sapiens
  misc_RNA (1)...(19): siRNA sense strand
gaaagauagagcugagaug

SEQ ID NO: 799467 - RNA, 19 nt, Homo sapiens
  misc_RNA (1)...(19): siRNA sense strand
accaggagauaaccuaauu

SEQ ID NO: 799468 - RNA, 19 nt, Homo sapiens
  misc_RNA (1)...(19): siRNA sense strand
ugggugagccucuuccaua

SEQ ID NO: 799469 - RNA, 19 nt, Homo sapiens
  misc_RNA (1)...(19): siRNA sense strand
ccaagaguuugcgguuauu

SEQ ID NO: 799470 - RNA, 19 nt, Homo sapiens
  misc_RNA (1)...(19): siRNA sense strand
caccaggagugaaaugugu

SEQ ID NO: 799471 - RNA, 19 nt, Homo sapiens
  misc_RNA (1)...(19): siRNA sense strand
uccuagaaguccauuauga

SEQ ID NO: 799472 - RNA, 19 nt, Homo sapiens
  misc_RNA (1)...(19): siRNA sense strand
ugagaaaacuagugugcua

SEQ ID NO: 799473 - RNA, 19 nt, Homo sapiens
  misc_RNA (1)...(19): siRNA sense strand
gcacgucuucuuccucuuc

SEQ ID NO: 799474 - RNA, 19 nt, Homo sapiens
  misc_RNA (1)...(19): siRNA sense strand
cagcauuaccuccagauau

SEQ ID NO: 799475 - RNA, 19 nt, Homo sapiens
  misc_RNA (1)...(19): siRNA sense strand
gaauaugccauggaaaaua

SEQ ID NO: 799476 - RNA, 19 nt, Homo sapiens
  misc_RNA (1)...(19): siRNA sense strand
gaucugggccuaccaccau

SEQ ID NO: 799477 - RNA, 19 nt, Homo sapiens
  misc_RNA (1)...(19): siRNA sense strand
gagagcugcauacauguga

SEQ ID NO: 799478 - RNA, 19 nt, Homo sapiens
  misc_RNA (1)...(19): siRNA sense strand
aaaccuuucuuucauggau

SEQ ID NO: 799479 - RNA, 19 nt, Homo sapiens
  misc_RNA (1)...(19): siRNA sense strand
aaaugcaaauagagaguug

SEQ ID NO: 799480 - RNA, 19 nt, Homo sapiens
  misc_RNA (1)...(19): siRNA sense strand
uagcacacacacaauaauu

SEQ ID NO: 799481 - RNA, 19 nt, Homo sapiens
  misc_RNA (1)...(19): siRNA sense strand
gcuccuagaaguccauuau

SEQ ID NO: 799482 - RNA, 19 nt, Homo sapiens
  misc_RNA (1)...(19): siRNA sense strand
caagaaaagcaucauguaa

SEQ ID NO: 799483 - RNA, 19 nt, Homo sapiens
  misc_RNA (1)...(19): siRNA sense strand
aaguggaauucauguguuu

SEQ ID NO: 799484 - RNA, 19 nt, Homo sapiens
  misc_RNA (1)...(19): siRNA sense strand
uaucuacagccuuaccaua

SEQ ID NO: 799485 - RNA, 19 nt, Homo sapiens
  misc_RNA (1)...(19): siRNA sense strand
gcugaguggucgauucaag

SEQ ID NO: 799486 - RNA, 19 nt, Homo sapiens
  misc_RNA (1)...(19): siRNA sense strand
caaguauuccagacauuau

SEQ ID NO: 799487 - RNA, 19 nt, Homo sapiens
  misc_RNA (1)...(19): siRNA sense strand
ccaggagauaaccuaauua

SEQ ID NO: 799488 - RNA, 19 nt, Homo sapiens
  misc_RNA (1)...(19): siRNA sense strand
ccaaguggaauucaugugu

SEQ ID NO: 799489 - RNA, 19 nt, Homo sapiens
  misc_RNA (1)...(19): siRNA sense strand
aggaaggcuuaauagauaa

SEQ ID NO: 799490 - RNA, 19 nt, Homo sapiens
  misc_RNA (1)...(19): siRNA sense strand
uaaucccacuuaugaggaa

SEQ ID NO: 799491 - RNA, 19 nt, Homo sapiens
  misc_RNA (1)...(19): siRNA sense strand
ggugccaaauguuuaagau

SEQ ID NO: 799492 - RNA, 19 nt, Homo sapiens
  misc_RNA (1)...(19): siRNA sense strand
cuacagccuuaccauacuu

SEQ ID NO: 799493 - RNA, 19 nt, Homo sapiens
  misc_RNA (1)...(19): siRNA sense strand
ugugagauguuccaagaca

SEQ ID NO: 799494 - RNA, 19 nt, Homo sapiens
  misc_RNA (1)...(19): siRNA sense strand
gugcaaguauuccagacau

SEQ ID NO: 799495 - RNA, 19 nt, Homo sapiens
  misc_RNA (1)...(19): siRNA sense strand
aaaggaagaacaaacaauc

SEQ ID NO: 799496 - RNA, 19 nt, Homo sapiens
  misc_RNA (1)...(19): siRNA sense strand
ugccugaguuccagucuga

SEQ ID NO: 799497 - RNA, 19 nt, Homo sapiens
  misc_RNA (1)...(19): siRNA sense strand
auagauaauucuggacuga

SEQ ID NO: 799498 - RNA, 19 nt, Homo sapiens
  misc_RNA (1)...(19): siRNA sense strand
acaagaguauaacggauag

SEQ ID NO: 799499 - RNA, 19 nt, Homo sapiens
  misc_RNA (1)...(19): siRNA sense strand
cuaagcaccaggagugaaa

SEQ ID NO: 799500 - RNA, 19 nt, Homo sapiens
  misc_RNA (1)...(19): siRNA sense strand
gacauaaaugacaagagua

SEQ ID NO: 799501 - RNA, 19 nt, Homo sapiens
  misc_RNA (1)...(19): siRNA sense strand
gucacgaccuggccuuuca

SEQ ID NO: 799502 - RNA, 19 nt, Homo sapiens
  misc_RNA (1)...(19): siRNA sense strand
uguuuaagauuccuguguu

SEQ ID NO: 799503 - RNA, 19 nt, Homo sapiens
  misc_RNA (1)...(19): siRNA sense strand
gugaaaugugucucucaua

SEQ ID NO: 799504 - RNA, 19 nt, Homo sapiens
  misc_RNA (1)...(19): siRNA sense strand
gcuacaacacgaaagauag

SEQ ID NO: 799505 - RNA, 19 nt, Homo sapiens
  misc_RNA (1)...(19): siRNA sense strand
uccauuagauccgcauuau

SEQ ID NO: 799506 - RNA, 19 nt, Homo sapiens
  misc_RNA (1)...(19): siRNA sense strand
aaagguugagccagugaua

SEQ ID NO: 799507 - RNA, 19 nt, Homo sapiens
  misc_RNA (1)...(19): siRNA sense strand
gcaccaggagugaaaugug

SEQ ID NO: 799508 - RNA, 19 nt, Homo sapiens
  misc_RNA (1)...(19): siRNA sense strand
agauagagcugagaugacu

SEQ ID NO: 799509 - RNA, 19 nt, Homo sapiens
  misc_RNA (1)...(19): siRNA sense strand
cuacaacacgaaagauaga

SEQ ID NO: 799510 - RNA, 19 nt, Homo sapiens
  misc_RNA (1)...(19): siRNA sense strand
aauagcacacacacaauaa

SEQ ID NO: 799511 - RNA, 19 nt, Homo sapiens
  misc_RNA (1)...(19): siRNA sense strand
ggcaucaggcugcgucauu

SEQ ID NO: 799512 - RNA, 19 nt, Homo sapiens
  misc_RNA (1)...(19): siRNA sense strand
gagguuauuuuacacaaug

SEQ ID NO: 799513 - RNA, 19 nt, Homo sapiens
  misc_RNA (1)...(19): siRNA sense strand
uuaugaggaaggcuuaaua

SEQ ID NO: 799514 - RNA, 19 nt, Homo sapiens
  misc_RNA (1)...(19): siRNA sense strand
auacagagaggccaugaga

SEQ ID NO: 799515 - RNA, 19 nt, Homo sapiens
  misc_RNA (1)...(19): siRNA sense strand
gcagcaacaacuuuaacga

SEQ ID NO: 799516 - RNA, 19 nt, Homo sapiens
  misc_RNA (1)...(19): siRNA sense strand
ccaucaacuugcuuguuug

SEQ ID NO: 799517 - RNA, 19 nt, Homo sapiens
  misc_RNA (1)...(19): siRNA sense strand
guccucagccugccaguga

SEQ ID NO: 799518 - RNA, 19 nt, Homo sapiens
  misc_RNA (1)...(19): siRNA sense strand
cgcauuaugugcuccuaga

SEQ ID NO: 799519 - RNA, 19 nt, Homo sapiens
  misc_RNA (1)...(19): siRNA sense strand
accaagaguuugcgguuau

SEQ ID NO: 799520 - RNA, 19 nt, Homo sapiens
  misc_RNA (1)...(19): siRNA sense strand
caaggaagaucaccaauua

SEQ ID NO: 799521 - RNA, 19 nt, Homo sapiens
  misc_RNA (1)...(19): siRNA sense strand
caacaaagauuaucagaga

SEQ ID NO: 799522 - RNA, 19 nt, Homo sapiens
  misc_RNA (1)...(19): siRNA sense strand
gaagauagcagaugaauug

SEQ ID NO: 799523 - RNA, 19 nt, Homo sapiens
  misc_RNA (1)...(19): siRNA sense strand
gaaacucagucaucuuuaa

SEQ ID NO: 799524 - RNA, 19 nt, Homo sapiens
  misc_RNA (1)...(19): siRNA sense strand
gaacaucguuauacucuga

SEQ ID NO: 799525 - RNA, 19 nt, Homo sapiens
  misc_RNA (1)...(19): siRNA sense strand
caaauacccuccugaagaa

SEQ ID NO: 799526 - RNA, 19 nt, Homo sapiens
  misc_RNA (1)...(19): siRNA sense strand
gagagucccuuucauauuc

SEQ ID NO: 799527 - RNA, 19 nt, Homo sapiens
  misc_RNA (1)...(19): siRNA sense strand
uaccaaaccugaaacauuu

SEQ ID NO: 799528 - RNA, 19 nt, Homo sapiens
  misc_RNA (1)...(19): siRNA sense strand
cgacagcacccucuuaaua

SEQ ID NO: 799529 - RNA, 19 nt, Homo sapiens
  misc_RNA (1)...(19): siRNA sense strand
aaacagauauucacaagga

SEQ ID NO: 799530 - RNA, 19 nt, Homo sapiens
  misc_RNA (1)...(19): siRNA sense strand
uaaacgagcuugucgaugu

SEQ ID NO: 799531 - RNA, 19 nt, Homo sapiens
  misc_RNA (1)...(19): siRNA sense strand
gaaccuguuucaccaguuu

SEQ ID NO: 799532 - RNA, 19 nt, Homo sapiens
  misc_RNA (1)...(19): siRNA sense strand
gaacagaggaguacaguag

SEQ ID NO: 799533 - RNA, 19 nt, Homo sapiens
  misc_RNA (1)...(19): siRNA sense strand
gcagaacaccaaacuuaua

SEQ ID NO: 799534 - RNA, 19 nt, Homo sapiens
  misc_RNA (1)...(19): siRNA sense strand
guacaguaguggacaauga

SEQ ID NO: 799535 - RNA, 19 nt, Homo sapiens
  misc_RNA (1)...(19): siRNA sense strand
gaaggaggacaguuauaua

SEQ ID NO: 799536 - RNA, 19 nt, Homo sapiens
  misc_RNA (1)...(19): siRNA sense strand
acagagaguuguucaauug

SEQ ID NO: 799537 - RNA, 19 nt, Homo sapiens
  misc_RNA (1)...(19): siRNA sense strand
ccagaaaugucuuuggauu

SEQ ID NO: 799538 - RNA, 19 nt, Homo sapiens
  misc_RNA (1)...(19): siRNA sense strand
acaauuaccuugacccaaa

SEQ ID NO: 799539 - RNA, 19 nt, Homo sapiens
  misc_RNA (1)...(19): siRNA sense strand
gaacagcuacucaucaaau

SEQ ID NO: 799540 - RNA, 19 nt, Homo sapiens
  misc_RNA (1)...(19): siRNA sense strand
guaggaaggaggacaguua

SEQ ID NO: 799541 - RNA, 19 nt, Homo sapiens
  misc_RNA (1)...(19): siRNA sense strand
gcagaaacuucagcaaaug

SEQ ID NO: 799542 - RNA, 19 nt, Homo sapiens
  misc_RNA (1)...(19): siRNA sense strand
gaaaguauuccuaucaugu

SEQ ID NO: 799543 - RNA, 19 nt, Homo sapiens
  misc_RNA (1)...(19): siRNA sense strand
aaagagcaguguaaagaaa

SEQ ID NO: 799544 - RNA, 19 nt, Homo sapiens
  misc_RNA (1)...(19): siRNA sense strand
guaagucaaucuccuacaa

SEQ ID NO: 799545 - RNA, 19 nt, Homo sapiens
  misc_RNA (1)...(19): siRNA sense strand
gacagcacccucuuaauaa

SEQ ID NO: 799546 - RNA, 19 nt, Homo sapiens
  misc_RNA (1)...(19): siRNA sense strand
uaauggaagugaaggagua

SEQ ID NO: 799547 - RNA, 19 nt, Homo sapiens
  misc_RNA (1)...(19): siRNA sense strand
cagcucaaaugaugucuuu

SEQ ID NO: 799548 - RNA, 19 nt, Homo sapiens
  misc_RNA (1)...(19): siRNA sense strand
aaacaguucuccuuacaga

SEQ ID NO: 799549 - RNA, 19 nt, Homo sapiens
  misc_RNA (1)...(19): siRNA sense strand
ggagaaccacugauuuaaa

SEQ ID NO: 799550 - RNA, 19 nt, Homo sapiens
  misc_RNA (1)...(19): siRNA sense strand
gaagugaaggaguaaguaa

SEQ ID NO: 799551 - RNA, 19 nt, Homo sapiens
  misc_RNA (1)...(19): siRNA sense strand
gagaauaaucuuaguccua

SEQ ID NO: 799552 - RNA, 19 nt, Homo sapiens
  misc_RNA (1)...(19): siRNA sense strand
ggacaaugaugcagauuuu

SEQ ID NO: 799553 - RNA, 19 nt, Homo sapiens
  misc_RNA (1)...(19): siRNA sense strand
gaggaagggccacuuaauu

SEQ ID NO: 799554 - RNA, 19 nt, Homo sapiens
  misc_RNA (1)...(19): siRNA sense strand
ucaaauacccuccugaaga

SEQ ID NO: 799555 - RNA, 19 nt, Homo sapiens
  misc_RNA (1)...(19): siRNA sense strand
gaagaaaucacaggcuauu

SEQ ID NO: 799556 - RNA, 19 nt, Homo sapiens
  misc_RNA (1)...(19): siRNA sense strand
gagaaccacugauuuaaaa

SEQ ID NO: 799557 - RNA, 19 nt, Homo sapiens
  misc_RNA (1)...(19): siRNA sense strand
caaacuacuuuccagcaaa

SEQ ID NO: 799558 - RNA, 19 nt, Homo sapiens
  misc_RNA (1)...(19): siRNA sense strand
gaaaggcaggcuauagaaa

SEQ ID NO: 799559 - RNA, 19 nt, Homo sapiens
  misc_RNA (1)...(19): siRNA sense strand
ggaaggaggacaguuauau

SEQ ID NO: 799560 - RNA, 19 nt, Homo sapiens
  misc_RNA (1)...(19): siRNA sense strand
ggcagaagauagcagauga

SEQ ID NO: 799561 - RNA, 19 nt, Homo sapiens
  misc_RNA (1)...(19): siRNA sense strand
ucaauugccugagaucgua

SEQ ID NO: 799562 - RNA, 19 nt, Homo sapiens
  misc_RNA (1)...(19): siRNA sense strand
gaugggaacacuaaacaaa

SEQ ID NO: 799563 - RNA, 19 nt, Homo sapiens
  misc_RNA (1)...(19): siRNA sense strand
ggagagucccuuucauauu

SEQ ID NO: 799564 - RNA, 19 nt, Homo sapiens
  misc_RNA (1)...(19): siRNA sense strand
gaggcaagacucaauauug

SEQ ID NO: 799565 - RNA, 19 nt, Homo sapiens
  misc_RNA (1)...(19): siRNA sense strand
caaaugcaacuguuaguga

SEQ ID NO: 799566 - RNA, 19 nt, Homo sapiens
  misc_RNA (1)...(19): siRNA sense strand
ggauuguccuccagaaaug

SEQ ID NO: 799567 - RNA, 19 nt, Homo sapiens
  misc_RNA (1)...(19): siRNA sense strand
uacaaauccuggugaaauu

SEQ ID NO: 799568 - RNA, 19 nt, Homo sapiens
  misc_RNA (1)...(19): siRNA sense strand
ucagagacauucuuagaca

SEQ ID NO: 799569 - RNA, 19 nt, Homo sapiens
  misc_RNA (1)...(19): siRNA sense strand
guauauggaugaagaugau

SEQ ID NO: 799570 - RNA, 19 nt, Homo sapiens
  misc_RNA (1)...(19): siRNA sense strand
gaugauaccaaaccugaaa

SEQ ID NO: 799571 - RNA, 19 nt, Homo sapiens
  misc_RNA (1)...(19): siRNA sense strand
gauaagaggacgcuugugu

SEQ ID NO: 799572 - RNA, 19 nt, Homo sapiens
  misc_RNA (1)...(19): siRNA sense strand
agacauacuagaagaguua

SEQ ID NO: 799573 - RNA, 19 nt, Homo sapiens
  misc_RNA (1)...(19): siRNA sense strand
uaucagagacuauuacaga

SEQ ID NO: 799574 - RNA, 19 nt, Homo sapiens
  misc_RNA (1)...(19): siRNA sense strand
gaucguaugggaccaauau

SEQ ID NO: 799575 - RNA, 19 nt, Homo sapiens
  misc_RNA (1)...(19): siRNA sense strand
guuguggacuguugaagaa

SEQ ID NO: 799576 - RNA, 19 nt, Homo sapiens
  misc_RNA (1)...(19): siRNA sense strand
gaucaccaauuagaaccua

SEQ ID NO: 799577 - RNA, 19 nt, Homo sapiens
  misc_RNA (1)...(19): siRNA sense strand
gaugaugaccgaucuuguu

SEQ ID NO: 799578 - RNA, 19 nt, Homo sapiens
  misc_RNA (1)...(19): siRNA sense strand
gaccagagccugugccaau

SEQ ID NO: 799579 - RNA, 19 nt, Homo sapiens
  misc_RNA (1)...(19): siRNA sense strand
ggucagagacauucuuaga

SEQ ID NO: 799580 - RNA, 19 nt, Homo sapiens
  misc_RNA (1)...(19): siRNA sense strand
ugaaacauuuaaccaguug

SEQ ID NO: 799581 - RNA, 19 nt, Homo sapiens
  misc_RNA (1)...(19): siRNA sense strand
ccagagagaagcacugaaa

SEQ ID NO: 799582 - RNA, 19 nt, Homo sapiens
  misc_RNA (1)...(19): siRNA sense strand
ggaagaugaugauccugau

SEQ ID NO: 799583 - RNA, 19 nt, Homo sapiens
  misc_RNA (1)...(19): siRNA sense strand
gcacauuacagaagaggaa

SEQ ID NO: 799584 - RNA, 19 nt, Homo sapiens
  misc_RNA (1)...(19): siRNA sense strand
gcucaaaugaugucuuuau

SEQ ID NO: 799585 - RNA, 19 nt, Homo sapiens
  misc_RNA (1)...(19): siRNA sense strand
gcagaguacccgagaauca

SEQ ID NO: 799586 - RNA, 19 nt, Homo sapiens
  misc_RNA (1)...(19): siRNA sense strand
ggaagaucaccaauuagaa

SEQ ID NO: 799587 - RNA, 19 nt, Homo sapiens
  misc_RNA (1)...(19): siRNA sense strand
guauaggaauuuaccugaa

SEQ ID NO: 799588 - RNA, 19 nt, Homo sapiens
  misc_RNA (1)...(19): siRNA sense strand
aggcagaacaccaaacuua

SEQ ID NO: 799589 - RNA, 19 nt, Homo sapiens
  misc_RNA (1)...(19): siRNA sense strand
uauaaacugugaugacugu

SEQ ID NO: 799590 - RNA, 19 nt, Homo sapiens
  misc_RNA (1)...(19): siRNA sense strand
gguagaacuuuaaggaauc

SEQ ID NO: 799591 - RNA, 19 nt, Homo sapiens
  misc_RNA (1)...(19): siRNA sense strand
ccaaagagagugccaguca

SEQ ID NO: 799592 - RNA, 19 nt, Homo sapiens
  misc_RNA (1)...(19): siRNA sense strand
ugauaacuguggcauagaa

SEQ ID NO: 799593 - RNA, 19 nt, Homo sapiens
  misc_RNA (1)...(19): siRNA sense strand
ggacgcuugugugaugaua

SEQ ID NO: 799594 - RNA, 19 nt, Homo sapiens
  misc_RNA (1)...(19): siRNA sense strand
agaggacgcuugugugaug

SEQ ID NO: 799595 - RNA, 19 nt, Homo sapiens
  misc_RNA (1)...(19): siRNA sense strand
caaagauuaucagagacua

SEQ ID NO: 799596 - RNA, 19 nt, Homo sapiens
  misc_RNA (1)...(19): siRNA sense strand
ucauaaagcuaacuaaagc

SEQ ID NO: 799597 - RNA, 19 nt, Homo sapiens
  misc_RNA (1)...(19): siRNA sense strand
ggaagugaaggaguaagua

SEQ ID NO: 799598 - RNA, 19 nt, Homo sapiens
  misc_RNA (1)...(19): siRNA sense strand
ccaaacuacuuuccagcaa

SEQ ID NO: 799599 - RNA, 19 nt, Homo sapiens
  misc_RNA (1)...(19): siRNA sense strand
gaagaucaccaauuagaac

SEQ ID NO: 799600 - RNA, 19 nt, Homo sapiens
  misc_RNA (1)...(19): siRNA sense strand
gcaaaugcaagcugaaagu

SEQ ID NO: 799601 - RNA, 19 nt, Homo sapiens
  misc_RNA (1)...(19): siRNA sense strand
ugggagaaccacugauuua

SEQ ID NO: 799602 - RNA, 19 nt, Homo sapiens
  misc_RNA (1)...(19): siRNA sense strand
ggauuucugugauucuugu

SEQ ID NO: 799603 - RNA, 19 nt, Homo sapiens
  misc_RNA (1)...(19): siRNA sense strand
cgaaaguauuccuaucaug

SEQ ID NO: 799604 - RNA, 19 nt, Homo sapiens
  misc_RNA (1)...(19): siRNA sense strand
gcagaugaauugggcaaca

SEQ ID NO: 799605 - RNA, 19 nt, Homo sapiens
  misc_RNA (1)...(19): siRNA sense strand
uaagaggacgcuuguguga

SEQ ID NO: 799606 - RNA, 19 nt, Homo sapiens
  misc_RNA (1)...(19): siRNA sense strand
ggaggacaguuauauagac

SEQ ID NO: 799607 - RNA, 19 nt, Homo sapiens
  misc_RNA (1)...(19): siRNA sense strand
ugauucagcuguuauaaac

SEQ ID NO: 799608 - RNA, 19 nt, Homo sapiens
  misc_RNA (1)...(19): siRNA sense strand
gggagaaccacugauuuaa

SEQ ID NO: 799609 - RNA, 19 nt, Homo sapiens
  misc_RNA (1)...(19): siRNA sense strand
uagaagaguuaagcuaguu

SEQ ID NO: 799610 - RNA, 19 nt, Homo sapiens
  misc_RNA (1)...(19): siRNA sense strand
cacagagaguuguucaauu

SEQ ID NO: 799611 - RNA, 19 nt, Homo sapiens
  misc_RNA (1)...(19): siRNA sense strand
gacaauuugaggagaauaa

SEQ ID NO: 799612 - RNA, 19 nt, Homo sapiens
  misc_RNA (1)...(19): siRNA sense strand
ucaagaacaucguuauacu

SEQ ID NO: 799613 - RNA, 19 nt, Homo sapiens
  misc_RNA (1)...(19): siRNA sense strand
caauguuccuugauaguag

SEQ ID NO: 799614 - RNA, 19 nt, Homo sapiens
  misc_RNA (1)...(19): siRNA sense strand
ggaguacaguaguggacaa

SEQ ID NO: 799615 - RNA, 19 nt, Homo sapiens
  misc_RNA (1)...(19): siRNA sense strand
gacgacagcacccucuuaa

SEQ ID NO: 799616 - RNA, 19 nt, Homo sapiens
  misc_RNA (1)...(19): siRNA sense strand
uaucagaaccucaagaaca

SEQ ID NO: 799617 - RNA, 19 nt, Homo sapiens
  misc_RNA (1)...(19): siRNA sense strand
ggacaguuauauagaccau

SEQ ID NO: 799618 - RNA, 19 nt, Homo sapiens
  misc_RNA (1)...(19): siRNA sense strand
ucucgacgcuggcagaaga

SEQ ID NO: 799619 - RNA, 19 nt, Homo sapiens
  misc_RNA (1)...(19): siRNA sense strand
cagaagaggaagaugauga

SEQ ID NO: 799620 - RNA, 19 nt, Homo sapiens
  misc_RNA (1)...(19): siRNA sense strand
gaaacaagaucaagucugu

SEQ ID NO: 799621 - RNA, 19 nt, Homo sapiens
  misc_RNA (1)...(19): siRNA sense strand
gaaguguaccucaauaaua

SEQ ID NO: 799622 - RNA, 19 nt, Homo sapiens
  misc_RNA (1)...(19): siRNA sense strand
gaacaggauucggcugaua

SEQ ID NO: 799623 - RNA, 19 nt, Homo sapiens
  misc_RNA (1)...(19): siRNA sense strand
ggaagaagagugaagagua

SEQ ID NO: 799624 - RNA, 19 nt, Homo sapiens
  misc_RNA (1)...(19): siRNA sense strand
gaagaagagugaagaguac

SEQ ID NO: 799625 - RNA, 19 nt, Homo sapiens
  misc_RNA (1)...(19): siRNA sense strand
ggaaagcgauugagaaagc

SEQ ID NO: 799626 - RNA, 19 nt, Homo sapiens
  misc_RNA (1)...(19): siRNA sense strand
gccagaagcugcaugaguu

SEQ ID NO: 799627 - RNA, 19 nt, Homo sapiens
  misc_RNA (1)...(19): siRNA sense strand
guaggcaucuucaccauug

SEQ ID NO: 799628 - RNA, 19 nt, Homo sapiens
  misc_RNA (1)...(19): siRNA sense strand
gaucugaguuugaacaaca

SEQ ID NO: 799629 - RNA, 19 nt, Homo sapiens
  misc_RNA (1)...(19): siRNA sense strand
gaagaaagacaaugaaguc

SEQ ID NO: 799630 - RNA, 19 nt, Homo sapiens
  misc_RNA (1)...(19): siRNA sense strand
acaccgaaguggacuguua

SEQ ID NO: 799631 - RNA, 19 nt, Homo sapiens
  misc_RNA (1)...(19): siRNA sense strand
caagcuaccucucuucuca

SEQ ID NO: 799632 - RNA, 19 nt, Homo sapiens
  misc_RNA (1)...(19): siRNA sense strand
ucagaucuguccaguuuga

SEQ ID NO: 799633 - RNA, 19 nt, Homo sapiens
  misc_RNA (1)...(19): siRNA sense strand
ccacacggaccgccuauaa

SEQ ID NO: 799634 - RNA, 19 nt, Homo sapiens
  misc_RNA (1)...(19): siRNA sense strand
caccagauguuccaagcua

SEQ ID NO: 799635 - RNA, 19 nt, Homo sapiens
  misc_RNA (1)...(19): siRNA sense strand
uuaaagagcuccauaucag

SEQ ID NO: 799636 - RNA, 19 nt, Homo sapiens
  misc_RNA (1)...(19): siRNA sense strand
gaaacaacaucagcaaacu

SEQ ID NO: 799637 - RNA, 19 nt, Homo sapiens
  misc_RNA (1)...(19): siRNA sense strand
aaaccugaguuacaacaaa

SEQ ID NO: 799638 - RNA, 19 nt, Homo sapiens
  misc_RNA (1)...(19): siRNA sense strand
caggaaguguaccucaaua

SEQ ID NO: 799639 - RNA, 19 nt, Homo sapiens
  misc_RNA (1)...(19): siRNA sense strand
ugacacaacuggaccucaa

SEQ ID NO: 799640 - RNA, 19 nt, Homo sapiens
  misc_RNA (1)...(19): siRNA sense strand
ggaaguguaccucaauaau

SEQ ID NO: 799641 - RNA, 19 nt, Homo sapiens
  misc_RNA (1)...(19): siRNA sense strand
gcugacggcugugaagaaa

SEQ ID NO: 799642 - RNA, 19 nt, Homo sapiens
  misc_RNA (1)...(19): siRNA sense strand
cgauauaccugugagaugu

SEQ ID NO: 799643 - RNA, 19 nt, Homo sapiens
  misc_RNA (1)...(19): siRNA sense strand
gcaaggacauccgguuuac

SEQ ID NO: 799644 - RNA, 19 nt, Homo sapiens
  misc_RNA (1)...(19): siRNA sense strand
cagccugcaucuucauuaa

SEQ ID NO: 799645 - RNA, 19 nt, Homo sapiens
  misc_RNA (1)...(19): siRNA sense strand
uguaagagcauucaagcua

SEQ ID NO: 799646 - RNA, 19 nt, Homo sapiens
  misc_RNA (1)...(19): siRNA sense strand
ucuuggaucuggaccauaa

SEQ ID NO: 799647 - RNA, 19 nt, Homo sapiens
  misc_RNA (1)...(19): siRNA sense strand
acaaugaaguccugaccaa

SEQ ID NO: 799648 - RNA, 19 nt, Homo sapiens
  misc_RNA (1)...(19): siRNA sense strand
ggacaccugggccacauaa

SEQ ID NO: 799649 - RNA, 19 nt, Homo sapiens
  misc_RNA (1)...(19): siRNA sense strand
gaucaagucuguggcuaag

SEQ ID NO: 799650 - RNA, 19 nt, Homo sapiens
  misc_RNA (1)...(19): siRNA sense strand
ggaagaaagacaaugaagu

SEQ ID NO: 799651 - RNA, 19 nt, Homo sapiens
  misc_RNA (1)...(19): siRNA sense strand
ggcaaggacauccgguuua

SEQ ID NO: 799652 - RNA, 19 nt, Homo sapiens
  misc_RNA (1)...(19): siRNA sense strand
caagagcauucuccacauc

SEQ ID NO: 799653 - RNA, 19 nt, Homo sapiens
  misc_RNA (1)...(19): siRNA sense strand
ggaagaccgugugguaucu

SEQ ID NO: 799654 - RNA, 19 nt, Homo sapiens
  misc_RNA (1)...(19): siRNA sense strand
guacuugcuuguuuccaau

SEQ ID NO: 799655 - RNA, 19 nt, Homo sapiens
  misc_RNA (1)...(19): siRNA sense strand
gagcgacgcaugcauguca

SEQ ID NO: 799656 - RNA, 19 nt, Homo sapiens
  misc_RNA (1)...(19): siRNA sense strand
ugagagcaauggugugugu

SEQ ID NO: 799657 - RNA, 19 nt, Homo sapiens
  misc_RNA (1)...(19): siRNA sense strand
cgagauuucgggcacaaua

SEQ ID NO: 799658 - RNA, 19 nt, Homo sapiens
  misc_RNA (1)...(19): siRNA sense strand
guggaaagcgauugagaaa

SEQ ID NO: 799659 - RNA, 19 nt, Homo sapiens
  misc_RNA (1)...(19): siRNA sense strand
gaucaucacccagccagaa

SEQ ID NO: 799660 - RNA, 19 nt, Homo sapiens
  misc_RNA (1)...(19): siRNA sense strand
gccuaaaccugaguuacaa

SEQ ID NO: 799661 - RNA, 19 nt, Homo sapiens
  misc_RNA (1)...(19): siRNA sense strand
gcuacagccugcaucuuca

SEQ ID NO: 799662 - RNA, 19 nt, Homo sapiens
  misc_RNA (1)...(19): siRNA sense strand
ggagugaccaagagcauuc

SEQ ID NO: 799663 - RNA, 19 nt, Homo sapiens
  misc_RNA (1)...(19): siRNA sense strand
caucacaugucgucucucu

SEQ ID NO: 799664 - RNA, 19 nt, Homo sapiens
  misc_RNA (1)...(19): siRNA sense strand
gggcaaggacauccgguuu

SEQ ID NO: 799665 - RNA, 19 nt, Homo sapiens
  misc_RNA (1)...(19): siRNA sense strand
guacaacagccugguagaa

SEQ ID NO: 799666 - RNA, 19 nt, Homo sapiens
  misc_RNA (1)...(19): siRNA sense strand
ggaguacaacagccuggua

SEQ ID NO: 799667 - RNA, 19 nt, Homo sapiens
  misc_RNA (1)...(19): siRNA sense strand
ugaacaacaucacggaagu

SEQ ID NO: 799668 - RNA, 19 nt, Homo sapiens
  misc_RNA (1)...(19): siRNA sense strand
ggccuaccuuuccuuagaa

SEQ ID NO: 799669 - RNA, 19 nt, Homo sapiens
  misc_RNA (1)...(19): siRNA sense strand
ccgguucuauuucagcuaa

SEQ ID NO: 799670 - RNA, 19 nt, Homo sapiens
  misc_RNA (1)...(19): siRNA sense strand
uuagaaguguuagaucuga

SEQ ID NO: 799671 - RNA, 19 nt, Homo sapiens
  misc_RNA (1)...(19): siRNA sense strand
ccugggcgcugcuucauca

SEQ ID NO: 799672 - RNA, 19 nt, Homo sapiens
  misc_RNA (1)...(19): siRNA sense strand
ccaguaaccacgauagaau

SEQ ID NO: 799673 - RNA, 19 nt, Homo sapiens
  misc_RNA (1)...(19): siRNA sense strand
ucacccagcuuccuguaag

SEQ ID NO: 799674 - RNA, 19 nt, Homo sapiens
  misc_RNA (1)...(19): siRNA sense strand
ccaagagcauucuccacau

SEQ ID NO: 799675 - RNA, 19 nt, Homo sapiens
  misc_RNA (1)...(19): siRNA sense strand
ucaagucuguggcuaagag

SEQ ID NO: 799676 - RNA, 19 nt, Homo sapiens
  misc_RNA (1)...(19): siRNA sense strand
ccaguuugaugccuuugug

SEQ ID NO: 799677 - RNA, 19 nt, Homo sapiens
  misc_RNA (1)...(19): siRNA sense strand
guuccaagcuaccucucuu

SEQ ID NO: 799678 - RNA, 19 nt, Homo sapiens
  misc_RNA (1)...(19): siRNA sense strand
caaaacgccccacgacaua

SEQ ID NO: 799679 - RNA, 19 nt, Homo sapiens
  misc_RNA (1)...(19): siRNA sense strand
uguuagaucugaguuugaa

SEQ ID NO: 799680 - RNA, 19 nt, Homo sapiens
  misc_RNA (1)...(19): siRNA sense strand
cacuuuggcuccaccuauu

SEQ ID NO: 799681 - RNA, 19 nt, Homo sapiens
  misc_RNA (1)...(19): siRNA sense strand
ugucaucaccaaccacuuu

SEQ ID NO: 799682 - RNA, 19 nt, Homo sapiens
  misc_RNA (1)...(19): siRNA sense strand
caagcugacucuguuugga

SEQ ID NO: 799683 - RNA, 19 nt, Homo sapiens
  misc_RNA (1)...(19): siRNA sense strand
aggccuaccuuuccuuaga

SEQ ID NO: 799684 - RNA, 19 nt, Homo sapiens
  misc_RNA (1)...(19): siRNA sense strand
ucacaaagagccguggaaa

SEQ ID NO: 799685 - RNA, 19 nt, Homo sapiens
  misc_RNA (1)...(19): siRNA sense strand
gaacgugguggcagaggau

SEQ ID NO: 799686 - RNA, 19 nt, Homo sapiens
  misc_RNA (1)...(19): siRNA sense strand
gagauugacccugcugguu

SEQ ID NO: 799687 - RNA, 19 nt, Homo sapiens
  misc_RNA (1)...(19): siRNA sense strand
gcgaaacaacaucagcaaa

SEQ ID NO: 799688 - RNA, 19 nt, Homo sapiens
  misc_RNA (1)...(19): siRNA sense strand
ggaacaggauucggcugau

SEQ ID NO: 799689 - RNA, 19 nt, Homo sapiens
  misc_RNA (1)...(19): siRNA sense strand
gaacaacaucacggaagug

SEQ ID NO: 799690 - RNA, 19 nt, Homo sapiens
  misc_RNA (1)...(19): siRNA sense strand
gugaauguguugccaucau

SEQ ID NO: 799691 - RNA, 19 nt, Homo sapiens
  misc_RNA (1)...(19): siRNA sense strand
acaacagccugguagaagu

SEQ ID NO: 799692 - RNA, 19 nt, Homo sapiens
  misc_RNA (1)...(19): siRNA sense strand
aaacaguggcccuccaaug

SEQ ID NO: 799693 - RNA, 19 nt, Homo sapiens
  misc_RNA (1)...(19): siRNA sense strand
gcagacauggagaacuuug

SEQ ID NO: 799694 - RNA, 19 nt, Homo sapiens
  misc_RNA (1)...(19): siRNA sense strand
augcagacauggagaacuu

SEQ ID NO: 799695 - RNA, 19 nt, Homo sapiens
  misc_RNA (1)...(19): siRNA sense strand
agauugacccugcugguuu

SEQ ID NO: 799696 - RNA, 19 nt, Homo sapiens
  misc_RNA (1)...(19): siRNA sense strand
ggaguugggagcauuugau

SEQ ID NO: 799697 - RNA, 19 nt, Homo sapiens
  misc_RNA (1)...(19): siRNA sense strand
ggcuccaccuauucacaua

SEQ ID NO: 799698 - RNA, 19 nt, Homo sapiens
  misc_RNA (1)...(19): siRNA sense strand
gaccuuugccuggaagaaa

SEQ ID NO: 799699 - RNA, 19 nt, Homo sapiens
  misc_RNA (1)...(19): siRNA sense strand
caacagccugguagaagug

SEQ ID NO: 799700 - RNA, 19 nt, Homo sapiens
  misc_RNA (1)...(19): siRNA sense strand
cgaaacaacaucagcaaac

SEQ ID NO: 799701 - RNA, 19 nt, Homo sapiens
  misc_RNA (1)...(19): siRNA sense strand
gaucacccagcuuccugua

SEQ ID NO: 799702 - RNA, 19 nt, Homo sapiens
  misc_RNA (1)...(19): siRNA sense strand
ccuuagaaguguuagaucu

SEQ ID NO: 799703 - RNA, 19 nt, Homo sapiens
  misc_RNA (1)...(19): siRNA sense strand
cuccuucucuggcugcuuu

SEQ ID NO: 799704 - RNA, 19 nt, Homo sapiens
  misc_RNA (1)...(19): siRNA sense strand
ggucugcguaucacaaaga

SEQ ID NO: 799705 - RNA, 19 nt, Homo sapiens
  misc_RNA (1)...(19): siRNA sense strand
ggaccacgguaggcaucuu

SEQ ID NO: 799706 - RNA, 19 nt, Homo sapiens
  misc_RNA (1)...(19): siRNA sense strand
cacccaaacccucagauug

SEQ ID NO: 799707 - RNA, 19 nt, Homo sapiens
  misc_RNA (1)...(19): siRNA sense strand
cagaaaccaccauggcuau

SEQ ID NO: 799708 - RNA, 19 nt, Homo sapiens
  misc_RNA (1)...(19): siRNA sense strand
caugucgucucucucuuuc

SEQ ID NO: 799709 - RNA, 19 nt, Homo sapiens
  misc_RNA (1)...(19): siRNA sense strand
gggaagugauggaguacac

SEQ ID NO: 799710 - RNA, 19 nt, Homo sapiens
  misc_RNA (1)...(19): siRNA sense strand
gauucuuccuggacuuuag

SEQ ID NO: 799711 - RNA, 19 nt, Homo sapiens
  misc_RNA (1)...(19): siRNA sense strand
gacccuuucugaccgacaa

SEQ ID NO: 799712 - RNA, 19 nt, Homo sapiens
  misc_RNA (1)...(19): siRNA sense strand
uaccagaccaggaagaaga

SEQ ID NO: 799713 - RNA, 19 nt, Homo sapiens
  misc_RNA (1)...(19): siRNA sense strand
ugugguaucugugggagaa

SEQ ID NO: 799714 - RNA, 19 nt, Homo sapiens
  misc_RNA (1)...(19): siRNA sense strand
acacggaccgccuauaaag

SEQ ID NO: 799715 - RNA, 19 nt, Homo sapiens
  misc_RNA (1)...(19): siRNA sense strand
gaaagcgauugagaaagcu

SEQ ID NO: 799716 - RNA, 19 nt, Homo sapiens
  misc_RNA (1)...(19): siRNA sense strand
gauugacccugcugguuuu

SEQ ID NO: 799717 - RNA, 19 nt, Homo sapiens
  misc_RNA (1)...(19): siRNA sense strand
cacggucgcugcuaacucu

SEQ ID NO: 799718 - RNA, 19 nt, Homo sapiens
  misc_RNA (1)...(19): siRNA sense strand
ggauucuuccuggacuuua

SEQ ID NO: 799719 - RNA, 19 nt, Homo sapiens
  misc_RNA (1)...(19): siRNA sense strand
ggacuuuagcaagguugua

SEQ ID NO: 799720 - RNA, 19 nt, Homo sapiens
  misc_RNA (1)...(19): siRNA sense strand
uaucugcacucuaggaaga

SEQ ID NO: 799721 - RNA, 19 nt, Homo sapiens
  misc_RNA (1)...(19): siRNA sense strand
caagcuaccuccaccagau

SEQ ID NO: 799722 - RNA, 19 nt, Homo sapiens
  misc_RNA (1)...(19): siRNA sense strand
gcagauccaaggccuguuu

SEQ ID NO: 799723 - RNA, 19 nt, Homo sapiens
  misc_RNA (1)...(19): siRNA sense strand
ucaagaggcugcgcaggaa

SEQ ID NO: 799724 - RNA, 19 nt, Homo sapiens
  misc_RNA (1)...(19): siRNA sense strand
cagccucgguggucaguga

SEQ ID NO: 799725 - RNA, 19 nt, Homo sapiens
  misc_RNA (1)...(19): siRNA sense strand
ccacagagugccacagaga

SEQ ID NO: 799726 - RNA, 19 nt, Homo sapiens
  misc_RNA (1)...(19): siRNA sense strand
gaggaacgggcacagauca

SEQ ID NO: 799727 - RNA, 19 nt, Homo sapiens
  misc_RNA (1)...(19): siRNA sense strand
gcacuggccaacccacaga

SEQ ID NO: 799728 - RNA, 19 nt, Homo sapiens
  misc_RNA (1)...(19): siRNA sense strand
gauccaaggccuguuucaa

SEQ ID NO: 799729 - RNA, 19 nt, Homo sapiens
  misc_RNA (1)...(19): siRNA sense strand
cgccggaacuggaggaagu

SEQ ID NO: 799730 - RNA, 19 nt, Homo sapiens
  misc_RNA (1)...(19): siRNA sense strand
cagagacagccuccaguga

SEQ ID NO: 799731 - RNA, 19 nt, Homo sapiens
  misc_RNA (1)...(19): siRNA sense strand
ggaacgggcacagaucauc

SEQ ID NO: 799732 - RNA, 19 nt, Homo sapiens
  misc_RNA (1)...(19): siRNA sense strand
guacaaaugucaugugugu

SEQ ID NO: 799733 - RNA, 19 nt, Homo sapiens
  misc_RNA (1)...(19): siRNA sense strand
gaagaauucuccugcuugu

SEQ ID NO: 799734 - RNA, 19 nt, Homo sapiens
  misc_RNA (1)...(19): siRNA sense strand
gcaagagauugucuacuau

SEQ ID NO: 799735 - RNA, 19 nt, Homo sapiens
  misc_RNA (1)...(19): siRNA sense strand
gcaagaagcaccaguucaa

SEQ ID NO: 799736 - RNA, 19 nt, Homo sapiens
  misc_RNA (1)...(19): siRNA sense strand
ggaaaagcuucaaggaaua

SEQ ID NO: 799737 - RNA, 19 nt, Homo sapiens
  misc_RNA (1)...(19): siRNA sense strand
caacaauaccaaguucuua

SEQ ID NO: 799738 - RNA, 19 nt, Homo sapiens
  misc_RNA (1)...(19): siRNA sense strand
agcaagagauugucuacua

SEQ ID NO: 799739 - RNA, 19 nt, Homo sapiens
  misc_RNA (1)...(19): siRNA sense strand
cgacaauccugagugguuu

SEQ ID NO: 799740 - RNA, 19 nt, Homo sapiens
  misc_RNA (1)...(19): siRNA sense strand
ccagagauccagaugguuu

SEQ ID NO: 799741 - RNA, 19 nt, Homo sapiens
  misc_RNA (1)...(19): siRNA sense strand
gacuacagcugcaagaauc

SEQ ID NO: 799742 - RNA, 19 nt, Homo sapiens
  misc_RNA (1)...(19): siRNA sense strand
gcagggcauuauucuagaa

SEQ ID NO: 799743 - RNA, 19 nt, Homo sapiens
  misc_RNA (1)...(19): siRNA sense strand
gagcaccuccgcagccaua

SEQ ID NO: 799744 - RNA, 19 nt, Homo sapiens
  misc_RNA (1)...(19): siRNA sense strand
ggaacgucaucccugauau

SEQ ID NO: 799745 - RNA, 19 nt, Homo sapiens
  misc_RNA (1)...(19): siRNA sense strand
gaacaugaagauggcuaua

SEQ ID NO: 799746 - RNA, 19 nt, Homo sapiens
  misc_RNA (1)...(19): siRNA sense strand
guacaaggaacaugaagau

SEQ ID NO: 799747 - RNA, 19 nt, Homo sapiens
  misc_RNA (1)...(19): siRNA sense strand
ugauaucccugaccacuuc

SEQ ID NO: 799748 - RNA, 19 nt, Homo sapiens
  misc_RNA (1)...(19): siRNA sense strand
gagaauuccuucgacaauc

SEQ ID NO: 799749 - RNA, 19 nt, Homo sapiens
  misc_RNA (1)...(19): siRNA sense strand
acaugaagauggcuauaug

SEQ ID NO: 799750 - RNA, 19 nt, Homo sapiens
  misc_RNA (1)...(19): siRNA sense strand
ccaagagauuugccacaga

SEQ ID NO: 799751 - RNA, 19 nt, Homo sapiens
  misc_RNA (1)...(19): siRNA sense strand
acaaaugucauguguguga

SEQ ID NO: 799752 - RNA, 19 nt, Homo sapiens
  misc_RNA (1)...(19): siRNA sense strand
caagucccauuaccgcaaa

SEQ ID NO: 799753 - RNA, 19 nt, Homo sapiens
  misc_RNA (1)...(19): siRNA sense strand
gagccaagguacaaauguc

SEQ ID NO: 799754 - RNA, 19 nt, Homo sapiens
  misc_RNA (1)...(19): siRNA sense strand
cacaugcgcuuucgucaca

SEQ ID NO: 799755 - RNA, 19 nt, Homo sapiens
  misc_RNA (1)...(19): siRNA sense strand
gggcauuauucuagaaaca

SEQ ID NO: 799756 - RNA, 19 nt, Homo sapiens
  misc_RNA (1)...(19): siRNA sense strand
gaacgucaucccugauauc

SEQ ID NO: 799757 - RNA, 19 nt, Homo sapiens
  misc_RNA (1)...(19): siRNA sense strand
ucuacuaugugcugucuga

SEQ ID NO: 799758 - RNA, 19 nt, Homo sapiens
  misc_RNA (1)...(19): siRNA sense strand
gcauuauucuagaaacagu

SEQ ID NO: 799759 - RNA, 19 nt, Homo sapiens
  misc_RNA (1)...(19): siRNA sense strand
ggaggaggaggaagaggaa

SEQ ID NO: 799760 - RNA, 19 nt, Homo sapiens
  misc_RNA (1)...(19): siRNA sense strand
gcucaaccauggaaaaguu

SEQ ID NO: 799761 - RNA, 19 nt, Homo sapiens
  misc_RNA (1)...(19): siRNA sense strand
gcucuaucaagucccauua

SEQ ID NO: 799762 - RNA, 19 nt, Homo sapiens
  misc_RNA (1)...(19): siRNA sense strand
auaccaaguucuuagauca

SEQ ID NO: 799763 - RNA, 19 nt, Homo sapiens
  misc_RNA (1)...(19): siRNA sense strand
gcaggaauguggcuuuugu

SEQ ID NO: 799764 - RNA, 19 nt, Homo sapiens
  misc_RNA (1)...(19): siRNA sense strand
caagagauugucuacuaug

SEQ ID NO: 799765 - RNA, 19 nt, Homo sapiens
  misc_RNA (1)...(19): siRNA sense strand
uuauugaccuccagaagca

SEQ ID NO: 799766 - RNA, 19 nt, Homo sapiens
  misc_RNA (1)...(19): siRNA sense strand
uuugagaacugcaccuuca

SEQ ID NO: 799767 - RNA, 19 nt, Homo sapiens
  misc_RNA (1)...(19): siRNA sense strand
ggaccgcaguaaacuucga

SEQ ID NO: 799768 - RNA, 19 nt, Homo sapiens
  misc_RNA (1)...(19): siRNA sense strand
uggaaaagcuucaaggaau

SEQ ID NO: 799769 - RNA, 19 nt, Homo sapiens
  misc_RNA (1)...(19): siRNA sense strand
ccaacaauaccaaguucuu

SEQ ID NO: 799770 - RNA, 19 nt, Homo sapiens
  misc_RNA (1)...(19): siRNA sense strand
ggaugacccacuugaggaa

SEQ ID NO: 799771 - RNA, 19 nt, Homo sapiens
  misc_RNA (1)...(19): siRNA sense strand
gcccaaggccagcaagaga

SEQ ID NO: 799772 - RNA, 19 nt, Homo sapiens
  misc_RNA (1)...(19): siRNA sense strand
agaggaggaugacccacuu

SEQ ID NO: 799773 - RNA, 19 nt, Homo sapiens
  misc_RNA (1)...(19): siRNA sense strand
ugggagcacugugagaauu

SEQ ID NO: 799774 - RNA, 19 nt, Homo sapiens
  misc_RNA (1)...(19): siRNA sense strand
gaauguggcuuuuguucuc

SEQ ID NO: 799775 - RNA, 19 nt, Homo sapiens
  misc_RNA (1)...(19): siRNA sense strand
aagagauugucuacuaugu

SEQ ID NO: 799776 - RNA, 19 nt, Homo sapiens
  misc_RNA (1)...(19): siRNA sense strand
cggaacgucaucccugaua

SEQ ID NO: 799777 - RNA, 19 nt, Homo sapiens
  misc_RNA (1)...(19): siRNA sense strand
cauccgccaugucuacuuc

SEQ ID NO: 799778 - RNA, 19 nt, Homo sapiens
  misc_RNA (1)...(19): siRNA sense strand
ggcuguaccugcaccuuca

SEQ ID NO: 799779 - RNA, 19 nt, Homo sapiens
  misc_RNA (1)...(19): siRNA sense strand
ccaaggccagcaagagauu

SEQ ID NO: 799780 - RNA, 19 nt, Homo sapiens
  misc_RNA (1)...(19): siRNA sense strand
auaagugcccucuguguga

SEQ ID NO: 799781 - RNA, 19 nt, Homo sapiens
  misc_RNA (1)...(19): siRNA sense strand
ugagaauuccuucgacaau

SEQ ID NO: 799782 - RNA, 19 nt, Homo sapiens
  misc_RNA (1)...(19): siRNA sense strand
gagacucugagccaaggua

SEQ ID NO: 799783 - RNA, 19 nt, Homo sapiens
  misc_RNA (1)...(19): siRNA sense strand
cgaucccucugcucuauca

SEQ ID NO: 799784 - RNA, 19 nt, Homo sapiens
  misc_RNA (1)...(19): siRNA sense strand
aaaugugacuguugugacu

SEQ ID NO: 799785 - RNA, 19 nt, Homo sapiens
  misc_RNA (1)...(19): siRNA sense strand
ggugcuguguggcuggaaa

SEQ ID NO: 799786 - RNA, 19 nt, Homo sapiens
  misc_RNA (1)...(19): siRNA sense strand
ggaacaugaagauggcuau

SEQ ID NO: 799787 - RNA, 19 nt, Homo sapiens
  misc_RNA (1)...(19): siRNA sense strand
gcagccauacccaggagaa

SEQ ID NO: 799788 - RNA, 19 nt, Homo sapiens
  misc_RNA (1)...(19): siRNA sense strand
ggagccaggacguaaggaa

SEQ ID NO: 799789 - RNA, 19 nt, Homo sapiens
  misc_RNA (1)...(19): siRNA sense strand
ccgcaaaguacaugaagga

SEQ ID NO: 799790 - RNA, 19 nt, Homo sapiens
  misc_RNA (1)...(19): siRNA sense strand
ugacuacagcugcaagaau

SEQ ID NO: 799791 - RNA, 19 nt, Homo sapiens
  misc_RNA (1)...(19): siRNA sense strand
gguacaaggaacaugaaga

SEQ ID NO: 799792 - RNA, 19 nt, Homo sapiens
  misc_RNA (1)...(19): siRNA sense strand
ucugugcugugaauacgaa

SEQ ID NO: 799793 - RNA, 19 nt, Homo sapiens
  misc_RNA (1)...(19): siRNA sense strand
caaggaccgcaguaaacuu

SEQ ID NO: 799794 - RNA, 19 nt, Homo sapiens
  misc_RNA (1)...(19): siRNA sense strand
ucauccacguggugaauca

SEQ ID NO: 799795 - RNA, 19 nt, Homo sapiens
  misc_RNA (1)...(19): siRNA sense strand
agaagcaccaguucaagug

SEQ ID NO: 799796 - RNA, 19 nt, Homo sapiens
  misc_RNA (1)...(19): siRNA sense strand
uuuguucucuggacaguuc

SEQ ID NO: 799797 - RNA, 19 nt, Homo sapiens
  misc_RNA (1)...(19): siRNA sense strand
cuuuaaaugugacuguugu

SEQ ID NO: 799798 - RNA, 19 nt, Homo sapiens
  misc_RNA (1)...(19): siRNA sense strand
gaccucauccgccaugucu

SEQ ID NO: 799799 - RNA, 19 nt, Homo sapiens
  misc_RNA (1)...(19): siRNA sense strand
gacguaaggaagaggaaga

SEQ ID NO: 799800 - RNA, 19 nt, Homo sapiens
  misc_RNA (1)...(19): siRNA sense strand
ggaagaggaagaggaggau

SEQ ID NO: 799801 - RNA, 19 nt, Homo sapiens
  misc_RNA (1)...(19): siRNA sense strand
aauaccaaguucuuagauc

SEQ ID NO: 799802 - RNA, 19 nt, Homo sapiens
  misc_RNA (1)...(19): siRNA sense strand
cuucaaggaccgcaguaaa

SEQ ID NO: 799803 - RNA, 19 nt, Homo sapiens
  misc_RNA (1)...(19): siRNA sense strand
acaauaccaaguucuuaga

SEQ ID NO: 799804 - RNA, 19 nt, Homo sapiens
  misc_RNA (1)...(19): siRNA sense strand
cugcagggcauuauucuag

SEQ ID NO: 799805 - RNA, 19 nt, Homo sapiens
  misc_RNA (1)...(19): siRNA sense strand
ucaugugugugacaaaugc

SEQ ID NO: 799806 - RNA, 19 nt, Homo sapiens
  misc_RNA (1)...(19): siRNA sense strand
ucacuguuccaagagauuu

SEQ ID NO: 799807 - RNA, 19 nt, Homo sapiens
  misc_RNA (1)...(19): siRNA sense strand
gaccacuuccugugucugu

SEQ ID NO: 799808 - RNA, 19 nt, Homo sapiens
  misc_RNA (1)...(19): siRNA sense strand
ugacccacuugaggaagaa

SEQ ID NO: 799809 - RNA, 19 nt, Homo sapiens
  misc_RNA (1)...(19): siRNA sense strand
aagaggaagaggaggauga

SEQ ID NO: 799810 - RNA, 19 nt, Homo sapiens
  misc_RNA (1)...(19): siRNA sense strand
ucgacaauccugagugguu

SEQ ID NO: 799811 - RNA, 19 nt, Homo sapiens
  misc_RNA (1)...(19): siRNA sense strand
ugccaacaauaccaaguuc

SEQ ID NO: 799812 - RNA, 19 nt, Homo sapiens
  misc_RNA (1)...(19): siRNA sense strand
agccagagauccagauggu

SEQ ID NO: 799813 - RNA, 19 nt, Homo sapiens
  misc_RNA (1)...(19): siRNA sense strand
cccgaucccucugcucuau

SEQ ID NO: 799814 - RNA, 19 nt, Homo sapiens
  misc_RNA (1)...(19): siRNA sense strand
gcaaccacaugcgcuuucg

SEQ ID NO: 799815 - RNA, 19 nt, Homo sapiens
  misc_RNA (1)...(19): siRNA sense strand
caauaccaaguucuuagau

SEQ ID NO: 799816 - RNA, 19 nt, Homo sapiens
  misc_RNA (1)...(19): siRNA sense strand
gugagaauuccuucgacaa

SEQ ID NO: 799817 - RNA, 19 nt, Homo sapiens
  misc_RNA (1)...(19): siRNA sense strand
caagaagcaccaguucaag

SEQ ID NO: 799818 - RNA, 19 nt, Homo sapiens
  misc_RNA (1)...(19): siRNA sense strand
uuaaaugugacuguuguga

SEQ ID NO: 799819 - RNA, 19 nt, Homo sapiens
  misc_RNA (1)...(19): siRNA sense strand
gggagcacugugagaauuc

SEQ ID NO: 799820 - RNA, 19 nt, Homo sapiens
  misc_RNA (1)...(19): siRNA sense strand
ccaagguacaaaugucaug

SEQ ID NO: 799821 - RNA, 19 nt, Homo sapiens
  misc_RNA (1)...(19): siRNA sense strand
gcuauugcgggaccacaug

SEQ ID NO: 799822 - RNA, 19 nt, Homo sapiens
  misc_RNA (1)...(19): siRNA sense strand
guacaaaugucaugugugu

SEQ ID NO: 799823 - RNA, 19 nt, Homo sapiens
  misc_RNA (1)...(19): siRNA sense strand
gaagaauucuccugcuugu

SEQ ID NO: 799824 - RNA, 19 nt, Homo sapiens
  misc_RNA (1)...(19): siRNA sense strand
gcaagagauugucuacuau

SEQ ID NO: 799825 - RNA, 19 nt, Homo sapiens
  misc_RNA (1)...(19): siRNA sense strand
gcaagaagcaccaguucaa

SEQ ID NO: 799826 - RNA, 19 nt, Homo sapiens
  misc_RNA (1)...(19): siRNA sense strand
ggaaaagcuucaaggaaua

SEQ ID NO: 799827 - RNA, 19 nt, Homo sapiens
  misc_RNA (1)...(19): siRNA sense strand
caacaauaccaaguucuua

SEQ ID NO: 799828 - RNA, 19 nt, Homo sapiens
  misc_RNA (1)...(19): siRNA sense strand
agcaagagauugucuacua

SEQ ID NO: 799829 - RNA, 19 nt, Homo sapiens
  misc_RNA (1)...(19): siRNA sense strand
cgacaauccugagugguuu

SEQ ID NO: 799830 - RNA, 19 nt, Homo sapiens
  misc_RNA (1)...(19): siRNA sense strand
ccagagauccagaugguuu

SEQ ID NO: 799831 - RNA, 19 nt, Homo sapiens
  misc_RNA (1)...(19): siRNA sense strand
gacuacagcugcaagaauc

SEQ ID NO: 799832 - RNA, 19 nt, Homo sapiens
  misc_RNA (1)...(19): siRNA sense strand
gcagggcauuauucuagaa

SEQ ID NO: 799833 - RNA, 19 nt, Homo sapiens
  misc_RNA (1)...(19): siRNA sense strand
gagcaccuccgcagccaua

SEQ ID NO: 799834 - RNA, 19 nt, Homo sapiens
  misc_RNA (1)...(19): siRNA sense strand
ggaacgucaucccugauau

SEQ ID NO: 799835 - RNA, 19 nt, Homo sapiens
  misc_RNA (1)...(19): siRNA sense strand
gaacaugaagauggcuaua

SEQ ID NO: 799836 - RNA, 19 nt, Homo sapiens
  misc_RNA (1)...(19): siRNA sense strand
guacaaggaacaugaagau

SEQ ID NO: 799837 - RNA, 19 nt, Homo sapiens
  misc_RNA (1)...(19): siRNA sense strand
ugauaucccugaccacuuc

SEQ ID NO: 799838 - RNA, 19 nt, Homo sapiens
  misc_RNA (1)...(19): siRNA sense strand
gagaauuccuucgacaauc

SEQ ID NO: 799839 - RNA, 19 nt, Homo sapiens
  misc_RNA (1)...(19): siRNA sense strand
acaugaagauggcuauaug

SEQ ID NO: 799840 - RNA, 19 nt, Homo sapiens
  misc_RNA (1)...(19): siRNA sense strand
ccaagagauuugccacaga

SEQ ID NO: 799841 - RNA, 19 nt, Homo sapiens
  misc_RNA (1)...(19): siRNA sense strand
acaaaugucauguguguga

SEQ ID NO: 799842 - RNA, 19 nt, Homo sapiens
  misc_RNA (1)...(19): siRNA sense strand
caagucccauuaccgcaaa

SEQ ID NO: 799843 - RNA, 19 nt, Homo sapiens
  misc_RNA (1)...(19): siRNA sense strand
gagccaagguacaaauguc

SEQ ID NO: 799844 - RNA, 19 nt, Homo sapiens
  misc_RNA (1)...(19): siRNA sense strand
cacaugcgcuuucgucaca

SEQ ID NO: 799845 - RNA, 19 nt, Homo sapiens
  misc_RNA (1)...(19): siRNA sense strand
gggcauuauucuagaaaca

SEQ ID NO: 799846 - RNA, 19 nt, Homo sapiens
  misc_RNA (1)...(19): siRNA sense strand
gaacgucaucccugauauc

SEQ ID NO: 799847 - RNA, 19 nt, Homo sapiens
  misc_RNA (1)...(19): siRNA sense strand
ucuacuaugugcugucuga

SEQ ID NO: 799848 - RNA, 19 nt, Homo sapiens
  misc_RNA (1)...(19): siRNA sense strand
gcauuauucuagaaacagu

SEQ ID NO: 799849 - RNA, 19 nt, Homo sapiens
  misc_RNA (1)...(19): siRNA sense strand
ggaggaggaggaagaggaa

SEQ ID NO: 799850 - RNA, 19 nt, Homo sapiens
  misc_RNA (1)...(19): siRNA sense strand
gcucaaccauggaaaaguu

SEQ ID NO: 799851 - RNA, 19 nt, Homo sapiens
  misc_RNA (1)...(19): siRNA sense strand
gcucuaucaagucccauua

SEQ ID NO: 799852 - RNA, 19 nt, Homo sapiens
  misc_RNA (1)...(19): siRNA sense strand
auaccaaguucuuagauca

SEQ ID NO: 799853 - RNA, 19 nt, Homo sapiens
  misc_RNA (1)...(19): siRNA sense strand
gcaggaauguggcuuuugu

SEQ ID NO: 799854 - RNA, 19 nt, Homo sapiens
  misc_RNA (1)...(19): siRNA sense strand
caagagauugucuacuaug

SEQ ID NO: 799855 - RNA, 19 nt, Homo sapiens
  misc_RNA (1)...(19): siRNA sense strand
uuauugaccuccagaagca

SEQ ID NO: 799856 - RNA, 19 nt, Homo sapiens
  misc_RNA (1)...(19): siRNA sense strand
uuugagaacugcaccuuca

SEQ ID NO: 799857 - RNA, 19 nt, Homo sapiens
  misc_RNA (1)...(19): siRNA sense strand
ggaccgcaguaaacuucga

SEQ ID NO: 799858 - RNA, 19 nt, Homo sapiens
  misc_RNA (1)...(19): siRNA sense strand
uggaaaagcuucaaggaau

SEQ ID NO: 799859 - RNA, 19 nt, Homo sapiens
  misc_RNA (1)...(19): siRNA sense strand
ccaacaauaccaaguucuu

SEQ ID NO: 799860 - RNA, 19 nt, Homo sapiens
  misc_RNA (1)...(19): siRNA sense strand
ggaugacccacuugaggaa

SEQ ID NO: 799861 - RNA, 19 nt, Homo sapiens
  misc_RNA (1)...(19): siRNA sense strand
gcccaaggccagcaagaga

SEQ ID NO: 799862 - RNA, 19 nt, Homo sapiens
  misc_RNA (1)...(19): siRNA sense strand
agaggaggaugacccacuu

SEQ ID NO: 799863 - RNA, 19 nt, Homo sapiens
  misc_RNA (1)...(19): siRNA sense strand
ugggagcacugugagaauu

SEQ ID NO: 799864 - RNA, 19 nt, Homo sapiens
  misc_RNA (1)...(19): siRNA sense strand
gaauguggcuuuuguucuc

SEQ ID NO: 799865 - RNA, 19 nt, Homo sapiens
  misc_RNA (1)...(19): siRNA sense strand
aagagauugucuacuaugu

SEQ ID NO: 799866 - RNA, 19 nt, Homo sapiens
  misc_RNA (1)...(19): siRNA sense strand
cggaacgucaucccugaua

SEQ ID NO: 799867 - RNA, 19 nt, Homo sapiens
  misc_RNA (1)...(19): siRNA sense strand
cauccgccaugucuacuuc

SEQ ID NO: 799868 - RNA, 19 nt, Homo sapiens
  misc_RNA (1)...(19): siRNA sense strand
ggcuguaccugcaccuuca

SEQ ID NO: 799869 - RNA, 19 nt, Homo sapiens
  misc_RNA (1)...(19): siRNA sense strand
ccaaggccagcaagagauu

SEQ ID NO: 799870 - RNA, 19 nt, Homo sapiens
  misc_RNA (1)...(19): siRNA sense strand
auaagugcccucuguguga

SEQ ID NO: 799871 - RNA, 19 nt, Homo sapiens
  misc_RNA (1)...(19): siRNA sense strand
ugagaauuccuucgacaau

SEQ ID NO: 799872 - RNA, 19 nt, Homo sapiens
  misc_RNA (1)...(19): siRNA sense strand
gagacucugagccaaggua

SEQ ID NO: 799873 - RNA, 19 nt, Homo sapiens
  misc_RNA (1)...(19): siRNA sense strand
cgaucccucugcucuauca

SEQ ID NO: 799874 - RNA, 19 nt, Homo sapiens
  misc_RNA (1)...(19): siRNA sense strand
aaaugugacuguugugacu

SEQ ID NO: 799875 - RNA, 19 nt, Homo sapiens
  misc_RNA (1)...(19): siRNA sense strand
ggugcuguguggcuggaaa

SEQ ID NO: 799876 - RNA, 19 nt, Homo sapiens
  misc_RNA (1)...(19): siRNA sense strand
ggaacaugaagauggcuau

SEQ ID NO: 799877 - RNA, 19 nt, Homo sapiens
  misc_RNA (1)...(19): siRNA sense strand
gcagccauacccaggagaa

SEQ ID NO: 799878 - RNA, 19 nt, Homo sapiens
  misc_RNA (1)...(19): siRNA sense strand
ggagccaggacguaaggaa

SEQ ID NO: 799879 - RNA, 19 nt, Homo sapiens
  misc_RNA (1)...(19): siRNA sense strand
ccgcaaaguacaugaagga

SEQ ID NO: 799880 - RNA, 19 nt, Homo sapiens
  misc_RNA (1)...(19): siRNA sense strand
ugacuacagcugcaagaau

SEQ ID NO: 799881 - RNA, 19 nt, Homo sapiens
  misc_RNA (1)...(19): siRNA sense strand
gguacaaggaacaugaaga

SEQ ID NO: 799882 - RNA, 19 nt, Homo sapiens
  misc_RNA (1)...(19): siRNA sense strand
ucugugcugugaauacgaa

SEQ ID NO: 799883 - RNA, 19 nt, Homo sapiens
  misc_RNA (1)...(19): siRNA sense strand
caaggaccgcaguaaacuu

SEQ ID NO: 799884 - RNA, 19 nt, Homo sapiens
  misc_RNA (1)...(19): siRNA sense strand
ucauccacguggugaauca

SEQ ID NO: 799885 - RNA, 19 nt, Homo sapiens
  misc_RNA (1)...(19): siRNA sense strand
agaagcaccaguucaagug

SEQ ID NO: 799886 - RNA, 19 nt, Homo sapiens
  misc_RNA (1)...(19): siRNA sense strand
uuuguucucuggacaguuc

SEQ ID NO: 799887 - RNA, 19 nt, Homo sapiens
  misc_RNA (1)...(19): siRNA sense strand
cuuuaaaugugacuguugu

SEQ ID NO: 799888 - RNA, 19 nt, Homo sapiens
  misc_RNA (1)...(19): siRNA sense strand
gaccucauccgccaugucu

SEQ ID NO: 799889 - RNA, 19 nt, Homo sapiens
  misc_RNA (1)...(19): siRNA sense strand
gacguaaggaagaggaaga

SEQ ID NO: 799890 - RNA, 19 nt, Homo sapiens
  misc_RNA (1)...(19): siRNA sense strand
ggaagaggaagaggaggau

SEQ ID NO: 799891 - RNA, 19 nt, Homo sapiens
  misc_RNA (1)...(19): siRNA sense strand
aauaccaaguucuuagauc

SEQ ID NO: 799892 - RNA, 19 nt, Homo sapiens
  misc_RNA (1)...(19): siRNA sense strand
cuucaaggaccgcaguaaa

SEQ ID NO: 799893 - RNA, 19 nt, Homo sapiens
  misc_RNA (1)...(19): siRNA sense strand
acaauaccaaguucuuaga

SEQ ID NO: 799894 - RNA, 19 nt, Homo sapiens
  misc_RNA (1)...(19): siRNA sense strand
cugcagggcauuauucuag

SEQ ID NO: 799895 - RNA, 19 nt, Homo sapiens
  misc_RNA (1)...(19): siRNA sense strand
ucaugugugugacaaaugc

SEQ ID NO: 799896 - RNA, 19 nt, Homo sapiens
  misc_RNA (1)...(19): siRNA sense strand
ucacuguuccaagagauuu

SEQ ID NO: 799897 - RNA, 19 nt, Homo sapiens
  misc_RNA (1)...(19): siRNA sense strand
gaccacuuccugugucugu

SEQ ID NO: 799898 - RNA, 19 nt, Homo sapiens
  misc_RNA (1)...(19): siRNA sense strand
ugacccacuugaggaagaa

SEQ ID NO: 799899 - RNA, 19 nt, Homo sapiens
  misc_RNA (1)...(19): siRNA sense strand
aagaggaagaggaggauga

SEQ ID NO: 799900 - RNA, 19 nt, Homo sapiens
  misc_RNA (1)...(19): siRNA sense strand
ucgacaauccugagugguu

SEQ ID NO: 799901 - RNA, 19 nt, Homo sapiens
  misc_RNA (1)...(19): siRNA sense strand
ugccaacaauaccaaguuc

SEQ ID NO: 799902 - RNA, 19 nt, Homo sapiens
  misc_RNA (1)...(19): siRNA sense strand
agccagagauccagauggu

SEQ ID NO: 799903 - RNA, 19 nt, Homo sapiens
  misc_RNA (1)...(19): siRNA sense strand
cccgaucccucugcucuau

SEQ ID NO: 799904 - RNA, 19 nt, Homo sapiens
  misc_RNA (1)...(19): siRNA sense strand
gcaaccacaugcgcuuucg

SEQ ID NO: 799905 - RNA, 19 nt, Homo sapiens
  misc_RNA (1)...(19): siRNA sense strand
caauaccaaguucuuagau

SEQ ID NO: 799906 - RNA, 19 nt, Homo sapiens
  misc_RNA (1)...(19): siRNA sense strand
gugagaauuccuucgacaa

SEQ ID NO: 799907 - RNA, 19 nt, Homo sapiens
  misc_RNA (1)...(19): siRNA sense strand
caagaagcaccaguucaag

SEQ ID NO: 799908 - RNA, 19 nt, Homo sapiens
  misc_RNA (1)...(19): siRNA sense strand
uuaaaugugacuguuguga

SEQ ID NO: 799909 - RNA, 19 nt, Homo sapiens
  misc_RNA (1)...(19): siRNA sense strand
gggagcacugugagaauuc

SEQ ID NO: 799910 - RNA, 19 nt, Homo sapiens
  misc_RNA (1)...(19): siRNA sense strand
ccaagguacaaaugucaug

SEQ ID NO: 799911 - RNA, 19 nt, Homo sapiens
  misc_RNA (1)...(19): siRNA sense strand
gcuauugcgggaccacaug

SEQ ID NO: 799912 - RNA, 19 nt, Homo sapiens
  misc_RNA (1)...(19): siRNA sense strand
gaaacucucugggaaauug

SEQ ID NO: 799913 - RNA, 19 nt, Homo sapiens
  misc_RNA (1)...(19): siRNA sense strand
gggaaagacuacuauuauu

SEQ ID NO: 799914 - RNA, 19 nt, Homo sapiens
  misc_RNA (1)...(19): siRNA sense strand
ggaaagacuacuauuauuc

SEQ ID NO: 799915 - RNA, 19 nt, Homo sapiens
  misc_RNA (1)...(19): siRNA sense strand
gaaaugagacagaagaucu

SEQ ID NO: 799916 - RNA, 19 nt, Homo sapiens
  misc_RNA (1)...(19): siRNA sense strand
aaccuuagcuuuggaauau

SEQ ID NO: 799917 - RNA, 19 nt, Homo sapiens
  misc_RNA (1)...(19): siRNA sense strand
guagacaaagugauaauga

SEQ ID NO: 799918 - RNA, 19 nt, Homo sapiens
  misc_RNA (1)...(19): siRNA sense strand
gagcugaaauugcagaaaa

SEQ ID NO: 799919 - RNA, 19 nt, Homo sapiens
  misc_RNA (1)...(19): siRNA sense strand
caaaagauaucgcucacuu

SEQ ID NO: 799920 - RNA, 19 nt, Homo sapiens
  misc_RNA (1)...(19): siRNA sense strand
ccauguagacaaagugaua

SEQ ID NO: 799921 - RNA, 19 nt, Homo sapiens
  misc_RNA (1)...(19): siRNA sense strand
gggaauuaauggaagugaa

SEQ ID NO: 799922 - RNA, 19 nt, Homo sapiens
  misc_RNA (1)...(19): siRNA sense strand
gaaccucuuuauuggacuu

SEQ ID NO: 799923 - RNA, 19 nt, Homo sapiens
  misc_RNA (1)...(19): siRNA sense strand
ugauggagcugaaauugca

SEQ ID NO: 799924 - RNA, 19 nt, Homo sapiens
  misc_RNA (1)...(19): siRNA sense strand
gugaaacucucugggaaau

SEQ ID NO: 799925 - RNA, 19 nt, Homo sapiens
  misc_RNA (1)...(19): siRNA sense strand
caaccuuagcuuuggaaua

SEQ ID NO: 799926 - RNA, 19 nt, Homo sapiens
  misc_RNA (1)...(19): siRNA sense strand
ggaauuaauggaagugaag

SEQ ID NO: 799927 - RNA, 19 nt, Homo sapiens
  misc_RNA (1)...(19): siRNA sense strand
ugaaggugauggagcugaa

SEQ ID NO: 799928 - RNA, 19 nt, Homo sapiens
  misc_RNA (1)...(19): siRNA sense strand
gaaagacaaaugcuaaagc

SEQ ID NO: 799929 - RNA, 19 nt, Homo sapiens
  misc_RNA (1)...(19): siRNA sense strand
gggaaagacaaaugcuaaa

SEQ ID NO: 799930 - RNA, 19 nt, Homo sapiens
  misc_RNA (1)...(19): siRNA sense strand
ggaaagacaaaugcuaaag

SEQ ID NO: 799931 - RNA, 19 nt, Homo sapiens
  misc_RNA (1)...(19): siRNA sense strand
uaauggaagugaaggugau

SEQ ID NO: 799932 - RNA, 19 nt, Homo sapiens
  misc_RNA (1)...(19): siRNA sense strand
uuaaucagcauacccauca

SEQ ID NO: 799933 - RNA, 19 nt, Homo sapiens
  misc_RNA (1)...(19): siRNA sense strand
ugggaaagacaaaugcuaa

SEQ ID NO: 799934 - RNA, 19 nt, Homo sapiens
  misc_RNA (1)...(19): siRNA sense strand
uaaugaaacugggaaagac

SEQ ID NO: 799935 - RNA, 19 nt, Homo sapiens
  misc_RNA (1)...(19): siRNA sense strand
ggugauggagcugaaauug

SEQ ID NO: 799936 - RNA, 19 nt, Homo sapiens
  misc_RNA (1)...(19): siRNA sense strand
aaacugggaaagacaaaug

SEQ ID NO: 799937 - RNA, 19 nt, Homo sapiens
  misc_RNA (1)...(19): siRNA sense strand
ugcaaaagcugaaguggaa

SEQ ID NO: 799938 - RNA, 19 nt, Homo sapiens
  misc_RNA (1)...(19): siRNA sense strand
ggggaaagacuacuauuau

SEQ ID NO: 799939 - RNA, 19 nt, Homo sapiens
  misc_RNA (1)...(19): siRNA sense strand
gcacaacacaccaaaagau

SEQ ID NO: 799940 - RNA, 19 nt, Homo sapiens
  misc_RNA (1)...(19): siRNA sense strand
gaaggugauggagcugaaa

SEQ ID NO: 799941 - RNA, 19 nt, Homo sapiens
  misc_RNA (1)...(19): siRNA sense strand
gaaacugggaaagacaaau

SEQ ID NO: 799942 - RNA, 19 nt, Homo sapiens
  misc_RNA (1)...(19): siRNA sense strand
uuacggacguuuucucuug

SEQ ID NO: 799943 - RNA, 19 nt, Homo sapiens
  misc_RNA (1)...(19): siRNA sense strand
caaaaccaaccuuagcuuu

SEQ ID NO: 799944 - RNA, 19 nt, Homo sapiens
  misc_RNA (1)...(19): siRNA sense strand
aaagccauguagacaaagu

SEQ ID NO: 799945 - RNA, 19 nt, Homo sapiens
  misc_RNA (1)...(19): siRNA sense strand
auaaugaaacugggaaaga

SEQ ID NO: 799946 - RNA, 19 nt, Homo sapiens
  misc_RNA (1)...(19): siRNA sense strand
gacaaagugauaaugaaac

SEQ ID NO: 799947 - RNA, 19 nt, Homo sapiens
  misc_RNA (1)...(19): siRNA sense strand
gauaaugaaacugggaaag

SEQ ID NO: 799948 - RNA, 19 nt, Homo sapiens
  misc_RNA (1)...(19): siRNA sense strand
ggagcugaaauugcagaaa

SEQ ID NO: 799949 - RNA, 19 nt, Homo sapiens
  misc_RNA (1)...(19): siRNA sense strand
ccucuuuauuggacuuaau

SEQ ID NO: 799950 - RNA, 19 nt, Homo sapiens
  misc_RNA (1)...(19): siRNA sense strand
ccuuagcuuuggaauauac

SEQ ID NO: 799951 - RNA, 19 nt, Homo sapiens
  misc_RNA (1)...(19): siRNA sense strand
uuucuucauuggcaguaaa

SEQ ID NO: 799952 - RNA, 19 nt, Homo sapiens
  misc_RNA (1)...(19): siRNA sense strand
ugaaacugggaaagacaaa

SEQ ID NO: 799953 - RNA, 19 nt, Homo sapiens
  misc_RNA (1)...(19): siRNA sense strand
cauguagacaaagugauaa

SEQ ID NO: 799954 - RNA, 19 nt, Homo sapiens
  misc_RNA (1)...(19): siRNA sense strand
gaaacucucugggaaauug

SEQ ID NO: 799955 - RNA, 19 nt, Homo sapiens
  misc_RNA (1)...(19): siRNA sense strand
gggaaagacuacuauuauu

SEQ ID NO: 799956 - RNA, 19 nt, Homo sapiens
  misc_RNA (1)...(19): siRNA sense strand
ggaaagacuacuauuauuc

SEQ ID NO: 799957 - RNA, 19 nt, Homo sapiens
  misc_RNA (1)...(19): siRNA sense strand
gaaaugagacagaagaucu

SEQ ID NO: 799958 - RNA, 19 nt, Homo sapiens
  misc_RNA (1)...(19): siRNA sense strand
aaccuuagcuuuggaauau

SEQ ID NO: 799959 - RNA, 19 nt, Homo sapiens
  misc_RNA (1)...(19): siRNA sense strand
guagacaaagugauaauga

SEQ ID NO: 799960 - RNA, 19 nt, Homo sapiens
  misc_RNA (1)...(19): siRNA sense strand
gagcugaaauugcagaaaa

SEQ ID NO: 799961 - RNA, 19 nt, Homo sapiens
  misc_RNA (1)...(19): siRNA sense strand
caaaagauaucgcucacuu

SEQ ID NO: 799962 - RNA, 19 nt, Homo sapiens
  misc_RNA (1)...(19): siRNA sense strand
ccauguagacaaagugaua

SEQ ID NO: 799963 - RNA, 19 nt, Homo sapiens
  misc_RNA (1)...(19): siRNA sense strand
gggaauuaauggaagugaa

SEQ ID NO: 799964 - RNA, 19 nt, Homo sapiens
  misc_RNA (1)...(19): siRNA sense strand
gaaccucuuuauuggacuu

SEQ ID NO: 799965 - RNA, 19 nt, Homo sapiens
  misc_RNA (1)...(19): siRNA sense strand
ugauggagcugaaauugca

SEQ ID NO: 799966 - RNA, 19 nt, Homo sapiens
  misc_RNA (1)...(19): siRNA sense strand
gugaaacucucugggaaau

SEQ ID NO: 799967 - RNA, 19 nt, Homo sapiens
  misc_RNA (1)...(19): siRNA sense strand
caaccuuagcuuuggaaua

SEQ ID NO: 799968 - RNA, 19 nt, Homo sapiens
  misc_RNA (1)...(19): siRNA sense strand
ggaauuaauggaagugaag

SEQ ID NO: 799969 - RNA, 19 nt, Homo sapiens
  misc_RNA (1)...(19): siRNA sense strand
ugaaggugauggagcugaa

SEQ ID NO: 799970 - RNA, 19 nt, Homo sapiens
  misc_RNA (1)...(19): siRNA sense strand
gaaagacaaaugcuaaagc

SEQ ID NO: 799971 - RNA, 19 nt, Homo sapiens
  misc_RNA (1)...(19): siRNA sense strand
gggaaagacaaaugcuaaa

SEQ ID NO: 799972 - RNA, 19 nt, Homo sapiens
  misc_RNA (1)...(19): siRNA sense strand
ggaaagacaaaugcuaaag

SEQ ID NO: 799973 - RNA, 19 nt, Homo sapiens
  misc_RNA (1)...(19): siRNA sense strand
uaauggaagugaaggugau

SEQ ID NO: 799974 - RNA, 19 nt, Homo sapiens
  misc_RNA (1)...(19): siRNA sense strand
uuaaucagcauacccauca

SEQ ID NO: 799975 - RNA, 19 nt, Homo sapiens
  misc_RNA (1)...(19): siRNA sense strand
ugggaaagacaaaugcuaa

SEQ ID NO: 799976 - RNA, 19 nt, Homo sapiens
  misc_RNA (1)...(19): siRNA sense strand
uaaugaaacugggaaagac

SEQ ID NO: 799977 - RNA, 19 nt, Homo sapiens
  misc_RNA (1)...(19): siRNA sense strand
ggugauggagcugaaauug

SEQ ID NO: 799978 - RNA, 19 nt, Homo sapiens
  misc_RNA (1)...(19): siRNA sense strand
aaacugggaaagacaaaug

SEQ ID NO: 799979 - RNA, 19 nt, Homo sapiens
  misc_RNA (1)...(19): siRNA sense strand
ugcaaaagcugaaguggaa

SEQ ID NO: 799980 - RNA, 19 nt, Homo sapiens
  misc_RNA (1)...(19): siRNA sense strand
ggggaaagacuacuauuau

SEQ ID NO: 799981 - RNA, 19 nt, Homo sapiens
  misc_RNA (1)...(19): siRNA sense strand
gcacaacacaccaaaagau

SEQ ID NO: 799982 - RNA, 19 nt, Homo sapiens
  misc_RNA (1)...(19): siRNA sense strand
gaaggugauggagcugaaa

SEQ ID NO: 799983 - RNA, 19 nt, Homo sapiens
  misc_RNA (1)...(19): siRNA sense strand
gaaacugggaaagacaaau

SEQ ID NO: 799984 - RNA, 19 nt, Homo sapiens
  misc_RNA (1)...(19): siRNA sense strand
uuacggacguuuucucuug

SEQ ID NO: 799985 - RNA, 19 nt, Homo sapiens
  misc_RNA (1)...(19): siRNA sense strand
caaaaccaaccuuagcuuu

SEQ ID NO: 799986 - RNA, 19 nt, Homo sapiens
  misc_RNA (1)...(19): siRNA sense strand
aaagccauguagacaaagu

SEQ ID NO: 799987 - RNA, 19 nt, Homo sapiens
  misc_RNA (1)...(19): siRNA sense strand
auaaugaaacugggaaaga

SEQ ID NO: 799988 - RNA, 19 nt, Homo sapiens
  misc_RNA (1)...(19): siRNA sense strand
gacaaagugauaaugaaac

SEQ ID NO: 799989 - RNA, 19 nt, Homo sapiens
  misc_RNA (1)...(19): siRNA sense strand
gauaaugaaacugggaaag

SEQ ID NO: 799990 - RNA, 19 nt, Homo sapiens
  misc_RNA (1)...(19): siRNA sense strand
ggagcugaaauugcagaaa

SEQ ID NO: 799991 - RNA, 19 nt, Homo sapiens
  misc_RNA (1)...(19): siRNA sense strand
ccucuuuauuggacuuaau

SEQ ID NO: 799992 - RNA, 19 nt, Homo sapiens
  misc_RNA (1)...(19): siRNA sense strand
ccuuagcuuuggaauauac

SEQ ID NO: 799993 - RNA, 19 nt, Homo sapiens
  misc_RNA (1)...(19): siRNA sense strand
uuucuucauuggcaguaaa

SEQ ID NO: 799994 - RNA, 19 nt, Homo sapiens
  misc_RNA (1)...(19): siRNA sense strand
ugaaacugggaaagacaaa

SEQ ID NO: 799995 - RNA, 19 nt, Homo sapiens
  misc_RNA (1)...(19): siRNA sense strand
cauguagacaaagugauaa

SEQ ID NO: 799996 - RNA, 19 nt, Homo sapiens
  misc_RNA (1)...(19): siRNA sense strand
gggcggagaugcagucuua

SEQ ID NO: 799997 - RNA, 19 nt, Homo sapiens
  misc_RNA (1)...(19): siRNA sense strand
caaaggacauugcaucaga

SEQ ID NO: 799998 - RNA, 19 nt, Homo sapiens
  misc_RNA (1)...(19): siRNA sense strand
gaacacaaaggcaagaaga

SEQ ID NO: 799999 - RNA, 19 nt, Homo sapiens
  misc_RNA (1)...(19): siRNA sense strand
gcaccagcaucccguauuc

SEQ ID NO: 800000 - RNA, 19 nt, Homo sapiens
  misc_RNA (1)...(19): siRNA sense strand
ucagagaacuccauuucca

SEQ ID NO: 800001 - RNA, 19 nt, Homo sapiens
  misc_RNA (1)...(19): siRNA sense strand
gaggagaggaggaagaaga

SEQ ID NO: 800002 - RNA, 19 nt, Homo sapiens
  misc_RNA (1)...(19): siRNA sense strand
caucagagaacuccauuuc

SEQ ID NO: 800003 - RNA, 19 nt, Homo sapiens
  misc_RNA (1)...(19): siRNA sense strand
ccaaguccagcacaagaua

SEQ ID NO: 800004 - RNA, 19 nt, Homo sapiens
  misc_RNA (1)...(19): siRNA sense strand
ugacacugcuccacuaugc

SEQ ID NO: 800005 - RNA, 19 nt, Homo sapiens
  misc_RNA (1)...(19): siRNA sense strand
ggacauugcaucagagaac

SEQ ID NO: 800006 - RNA, 19 nt, Homo sapiens
  misc_RNA (1)...(19): siRNA sense strand
acaugacacugcuccacua

SEQ ID NO: 800007 - RNA, 19 nt, Homo sapiens
  misc_RNA (1)...(19): siRNA sense strand
gugcaucaagugacaauga

SEQ ID NO: 800008 - RNA, 19 nt, Homo sapiens
  misc_RNA (1)...(19): siRNA sense strand
caggcaaucucaugcuuag

SEQ ID NO: 800009 - RNA, 19 nt, Homo sapiens
  misc_RNA (1)...(19): siRNA sense strand
ccaggcaaucucaugcuua

SEQ ID NO: 800010 - RNA, 19 nt, Homo sapiens
  misc_RNA (1)...(19): siRNA sense strand
agaacuccauuuccagguu

SEQ ID NO: 800011 - RNA, 19 nt, Homo sapiens
  misc_RNA (1)...(19): siRNA sense strand
gcacaagauagacgucauc

SEQ ID NO: 800012 - RNA, 19 nt, Homo sapiens
  misc_RNA (1)...(19): siRNA sense strand
ucacgcuacccaacuauga

SEQ ID NO: 800013 - RNA, 19 nt, Homo sapiens
  misc_RNA (1)...(19): siRNA sense strand
gcaaaggccgcagggaaca

SEQ ID NO: 800014 - RNA, 19 nt, Homo sapiens
  misc_RNA (1)...(19): siRNA sense strand
ccuaaggacuacgcuuuca

SEQ ID NO: 800015 - RNA, 19 nt, Homo sapiens
  misc_RNA (1)...(19): siRNA sense strand
cacaaaggcaagaagaaga

SEQ ID NO: 800016 - RNA, 19 nt, Homo sapiens
  misc_RNA (1)...(19): siRNA sense strand
aagaggaggaggaggauga

SEQ ID NO: 800017 - RNA, 19 nt, Homo sapiens
  misc_RNA (1)...(19): siRNA sense strand
gagguggucccagauccua

SEQ ID NO: 800018 - RNA, 19 nt, Homo sapiens
  misc_RNA (1)...(19): siRNA sense strand
gcaugauggcucugucuuc

SEQ ID NO: 800019 - RNA, 19 nt, Homo sapiens
  misc_RNA (1)...(19): siRNA sense strand
gcuccacuaugcgugcaaa

SEQ ID NO: 800020 - RNA, 19 nt, Homo sapiens
  misc_RNA (1)...(19): siRNA sense strand
gacaaugacgcagcccaaa

SEQ ID NO: 800021 - RNA, 19 nt, Homo sapiens
  misc_RNA (1)...(19): siRNA sense strand
gugacgggcugaccgacau

SEQ ID NO: 800022 - RNA, 19 nt, Homo sapiens
  misc_RNA (1)...(19): siRNA sense strand
ugacaacgucccaggcaau

SEQ ID NO: 800023 - RNA, 19 nt, Homo sapiens
  misc_RNA (1)...(19): siRNA sense strand
gcugaggaaucgaaaagga

SEQ ID NO: 800024 - RNA, 19 nt, Homo sapiens
  misc_RNA (1)...(19): siRNA sense strand
gguguccgguacuucacuu

SEQ ID NO: 800025 - RNA, 19 nt, Homo sapiens
  misc_RNA (1)...(19): siRNA sense strand
uuacugguauggcauugag

SEQ ID NO: 800026 - RNA, 19 nt, Homo sapiens
  misc_RNA (1)...(19): siRNA sense strand
ggaacacaaaggcaagaag

SEQ ID NO: 800027 - RNA, 19 nt, Homo sapiens
  misc_RNA (1)...(19): siRNA sense strand
gcaagcaugauggcucugu

SEQ ID NO: 800028 - RNA, 19 nt, Homo sapiens
  misc_RNA (1)...(19): siRNA sense strand
gauagacgucaucggcaau

SEQ ID NO: 800029 - RNA, 19 nt, Homo sapiens
  misc_RNA (1)...(19): siRNA sense strand
cagauccuauggacauguc

SEQ ID NO: 800030 - RNA, 19 nt, Homo sapiens
  misc_RNA (1)...(19): siRNA sense strand
cuacgggaagacagacuuu

SEQ ID NO: 800031 - RNA, 19 nt, Homo sapiens
  misc_RNA (1)...(19): siRNA sense strand
gcaucagagaacuccauuu

SEQ ID NO: 800032 - RNA, 19 nt, Homo sapiens
  misc_RNA (1)...(19): siRNA sense strand
gacauugcaucagagaacu

SEQ ID NO: 800033 - RNA, 19 nt, Homo sapiens
  misc_RNA (1)...(19): siRNA sense strand
caacgucccaggcaaucuc

SEQ ID NO: 800034 - RNA, 19 nt, Homo sapiens
  misc_RNA (1)...(19): siRNA sense strand
acacaaaggcaagaagaag

SEQ ID NO: 800035 - RNA, 19 nt, Homo sapiens
  misc_RNA (1)...(19): siRNA sense strand
gcuauuaccucaucccuuu

SEQ ID NO: 800036 - RNA, 19 nt, Homo sapiens
  misc_RNA (1)...(19): siRNA sense strand
ggaaucgacuuaccaaaga

SEQ ID NO: 800037 - RNA, 19 nt, Homo sapiens
  misc_RNA (1)...(19): siRNA sense strand
ccauuugccuggaugaaua

SEQ ID NO: 800038 - RNA, 19 nt, Homo sapiens
  misc_RNA (1)...(19): siRNA sense strand
ggacgaagaccaagaggaa

SEQ ID NO: 800039 - RNA, 19 nt, Homo sapiens
  misc_RNA (1)...(19): siRNA sense strand
ugaaacagauuccuacaca

SEQ ID NO: 800040 - RNA, 19 nt, Homo sapiens
  misc_RNA (1)...(19): siRNA sense strand
ggaccacccugccucagaa

SEQ ID NO: 800041 - RNA, 19 nt, Homo sapiens
  misc_RNA (1)...(19): siRNA sense strand
gaucccgucuguauuuauu

SEQ ID NO: 800042 - RNA, 19 nt, Homo sapiens
  misc_RNA (1)...(19): siRNA sense strand
caugggagcaguaaugaua

SEQ ID NO: 800043 - RNA, 19 nt, Homo sapiens
  misc_RNA (1)...(19): siRNA sense strand
guaaugauagcucguugua

SEQ ID NO: 800044 - RNA, 19 nt, Homo sapiens
  misc_RNA (1)...(19): siRNA sense strand
guaccugcgugcccucuuu

SEQ ID NO: 800045 - RNA, 19 nt, Homo sapiens
  misc_RNA (1)...(19): siRNA sense strand
ccaaagagcaacugaaaca

SEQ ID NO: 800046 - RNA, 19 nt, Homo sapiens
  misc_RNA (1)...(19): siRNA sense strand
gucaaugggucagucuuua

SEQ ID NO: 800047 - RNA, 19 nt, Homo sapiens
  misc_RNA (1)...(19): siRNA sense strand
uaugaugucugugccauuu

SEQ ID NO: 800048 - RNA, 19 nt, Homo sapiens
  misc_RNA (1)...(19): siRNA sense strand
caacugaaacagauuccua

SEQ ID NO: 800049 - RNA, 19 nt, Homo sapiens
  misc_RNA (1)...(19): siRNA sense strand
caaugugaauuccaaugaa

SEQ ID NO: 800050 - RNA, 19 nt, Homo sapiens
  misc_RNA (1)...(19): siRNA sense strand
gcaagaggagggugaugaa

SEQ ID NO: 800051 - RNA, 19 nt, Homo sapiens
  misc_RNA (1)...(19): siRNA sense strand
gaaacagauuccuacacau

SEQ ID NO: 800052 - RNA, 19 nt, Homo sapiens
  misc_RNA (1)...(19): siRNA sense strand
aaacagauuccuacacaug

SEQ ID NO: 800053 - RNA, 19 nt, Homo sapiens
  misc_RNA (1)...(19): siRNA sense strand
gaagggagaccaguaugau

SEQ ID NO: 800054 - RNA, 19 nt, Homo sapiens
  misc_RNA (1)...(19): siRNA sense strand
ggucaaugggucagucuuu

SEQ ID NO: 800055 - RNA, 19 nt, Homo sapiens
  misc_RNA (1)...(19): siRNA sense strand
cggaagaccugccccauuu

SEQ ID NO: 800056 - RNA, 19 nt, Homo sapiens
  misc_RNA (1)...(19): siRNA sense strand
gaauuccaaugaacuucug

SEQ ID NO: 800057 - RNA, 19 nt, Homo sapiens
  misc_RNA (1)...(19): siRNA sense strand
aagauucgacugcaacuuu

SEQ ID NO: 800058 - RNA, 19 nt, Homo sapiens
  misc_RNA (1)...(19): siRNA sense strand
uaccaaagagcaacugaaa

SEQ ID NO: 800059 - RNA, 19 nt, Homo sapiens
  misc_RNA (1)...(19): siRNA sense strand
caaugggucagucuuuauu

SEQ ID NO: 800060 - RNA, 19 nt, Homo sapiens
  misc_RNA (1)...(19): siRNA sense strand
aagagcaacugaaacagau

SEQ ID NO: 800061 - RNA, 19 nt, Homo sapiens
  misc_RNA (1)...(19): siRNA sense strand
gguccuaaaugcccagaag

SEQ ID NO: 800062 - RNA, 19 nt, Homo sapiens
  misc_RNA (1)...(19): siRNA sense strand
aaagagcaacugaaacaga

SEQ ID NO: 800063 - RNA, 19 nt, Homo sapiens
  misc_RNA (1)...(19): siRNA sense strand
gguguggaauagugaggaa

SEQ ID NO: 800064 - RNA, 19 nt, Homo sapiens
  misc_RNA (1)...(19): siRNA sense strand
acaaugugaauuccaauga

SEQ ID NO: 800065 - RNA, 19 nt, Homo sapiens
  misc_RNA (1)...(19): siRNA sense strand
caccuccuuugguuccuua

SEQ ID NO: 800066 - RNA, 19 nt, Homo sapiens
  misc_RNA (1)...(19): siRNA sense strand
gaaucgacuuaccaaagag

SEQ ID NO: 800067 - RNA, 19 nt, Homo sapiens
  misc_RNA (1)...(19): siRNA sense strand
gcaguaaugauagcucguu

SEQ ID NO: 800068 - RNA, 19 nt, Homo sapiens
  misc_RNA (1)...(19): siRNA sense strand
gagcaacugaaacagauuc

SEQ ID NO: 800069 - RNA, 19 nt, Homo sapiens
  misc_RNA (1)...(19): siRNA sense strand
uggaucccgucuguauuua

SEQ ID NO: 800070 - RNA, 19 nt, Homo sapiens
  misc_RNA (1)...(19): siRNA sense strand
ucagaagggagaccaguau

SEQ ID NO: 800071 - RNA, 19 nt, Homo sapiens
  misc_RNA (1)...(19): siRNA sense strand
ggccaugggagcaguaaug

SEQ ID NO: 800072 - RNA, 19 nt, Homo sapiens
  misc_RNA (1)...(19): siRNA sense strand
cuacacaugacuaucagaa

SEQ ID NO: 800073 - RNA, 19 nt, Homo sapiens
  misc_RNA (1)...(19): siRNA sense strand
cuggaucccgucuguauuu

SEQ ID NO: 800074 - RNA, 19 nt, Homo sapiens
  misc_RNA (1)...(19): siRNA sense strand
ggcaagaggagggugauga

SEQ ID NO: 800075 - RNA, 19 nt, Homo sapiens
  misc_RNA (1)...(19): siRNA sense strand
agauucgacugcaacuuug

SEQ ID NO: 800076 - RNA, 19 nt, Homo sapiens
  misc_RNA (1)...(19): siRNA sense strand
agaagggagaccaguauga

SEQ ID NO: 800077 - RNA, 19 nt, Homo sapiens
  misc_RNA (1)...(19): siRNA sense strand
uggauauggugccgcugua

SEQ ID NO: 800078 - RNA, 19 nt, Homo sapiens
  misc_RNA (1)...(19): siRNA sense strand
ucaaugggucagucuuuau

SEQ ID NO: 800079 - RNA, 19 nt, Homo sapiens
  misc_RNA (1)...(19): siRNA sense strand
gaagaccaagaggaagaaa

SEQ ID NO: 800080 - RNA, 19 nt, Homo sapiens
  misc_RNA (1)...(19): siRNA sense strand
gaaauccagcagcagaucu

SEQ ID NO: 800081 - RNA, 19 nt, Homo sapiens
  misc_RNA (1)...(19): siRNA sense strand
ggaaauccagcagcagauc

SEQ ID NO: 800082 - RNA, 19 nt, Homo sapiens
  misc_RNA (1)...(19): siRNA sense strand
gaagauucgacugcaacuu

SEQ ID NO: 800083 - RNA, 19 nt, Homo sapiens
  misc_RNA (1)...(19): siRNA sense strand
ccaagaggaagaaacucaa

SEQ ID NO: 800084 - RNA, 19 nt, Homo sapiens
  misc_RNA (1)...(19): siRNA sense strand
ggacuuugcagaccuucca

SEQ ID NO: 800085 - RNA, 19 nt, Homo sapiens
  misc_RNA (1)...(19): siRNA sense strand
cggaaucgacuuaccaaag

SEQ ID NO: 800086 - RNA, 19 nt, Homo sapiens
  misc_RNA (1)...(19): siRNA sense strand
cuucccaccuccuuugguu

SEQ ID NO: 800087 - RNA, 19 nt, Homo sapiens
  misc_RNA (1)...(19): siRNA sense strand
ggaauagugaggaaaucca

SEQ ID NO: 800088 - RNA, 19 nt, Homo sapiens
  misc_RNA (1)...(19): siRNA sense strand
gggacaagcugcggguacu

SEQ ID NO: 800089 - RNA, 19 nt, Homo sapiens
  misc_RNA (1)...(19): siRNA sense strand
gccaugggagcaguaauga

SEQ ID NO: 800090 - RNA, 19 nt, Homo sapiens
  misc_RNA (1)...(19): siRNA sense strand
gauauggugccgcuguagu

SEQ ID NO: 800091 - RNA, 19 nt, Homo sapiens
  misc_RNA (1)...(19): siRNA sense strand
cauggacuuugcagaccuu

SEQ ID NO: 800092 - RNA, 19 nt, Homo sapiens
  misc_RNA (1)...(19): siRNA sense strand
gaccuuccagcucuguuug

SEQ ID NO: 800093 - RNA, 19 nt, Homo sapiens
  misc_RNA (1)...(19): siRNA sense strand
cgaagaccaagaggaagaa

SEQ ID NO: 800094 - RNA, 19 nt, Homo sapiens
  misc_RNA (1)...(19): siRNA sense strand
aaacggcuccagcggaauc

SEQ ID NO: 800095 - RNA, 19 nt, Homo sapiens
  misc_RNA (1)...(19): siRNA sense strand
caagaggaagaaacucaag

SEQ ID NO: 800096 - RNA, 19 nt, Homo sapiens
  misc_RNA (1)...(19): siRNA sense strand
auauggugccgcuguagua

SEQ ID NO: 800097 - RNA, 19 nt, Homo sapiens
  misc_RNA (1)...(19): siRNA sense strand
gaacuuggcuauagucuug

SEQ ID NO: 800098 - RNA, 19 nt, Homo sapiens
  misc_RNA (1)...(19): siRNA sense strand
gagaagcuauggaugauaa

SEQ ID NO: 800099 - RNA, 19 nt, Homo sapiens
  misc_RNA (1)...(19): siRNA sense strand
gaccgaagauugccguuua

SEQ ID NO: 800100 - RNA, 19 nt, Homo sapiens
  misc_RNA (1)...(19): siRNA sense strand
gaaagauaguucuguggua

SEQ ID NO: 800101 - RNA, 19 nt, Homo sapiens
  misc_RNA (1)...(19): siRNA sense strand
ugacuaacaucguuucuaa

SEQ ID NO: 800102 - RNA, 19 nt, Homo sapiens
  misc_RNA (1)...(19): siRNA sense strand
gcgaauacuuucagaguuu

SEQ ID NO: 800103 - RNA, 19 nt, Homo sapiens
  misc_RNA (1)...(19): siRNA sense strand
gaagauugccguuuaagaa

SEQ ID NO: 800104 - RNA, 19 nt, Homo sapiens
  misc_RNA (1)...(19): siRNA sense strand
gaaaagaaaugcaguguug

SEQ ID NO: 800105 - RNA, 19 nt, Homo sapiens
  misc_RNA (1)...(19): siRNA sense strand
caaagucucuugagcauuc

SEQ ID NO: 800106 - RNA, 19 nt, Homo sapiens
  misc_RNA (1)...(19): siRNA sense strand
gaaaacaguucucaaaaga

SEQ ID NO: 800107 - RNA, 19 nt, Homo sapiens
  misc_RNA (1)...(19): siRNA sense strand
aaagaaagcugauugacau

SEQ ID NO: 800108 - RNA, 19 nt, Homo sapiens
  misc_RNA (1)...(19): siRNA sense strand
gaaacuuguuguacuauuc

SEQ ID NO: 800109 - RNA, 19 nt, Homo sapiens
  misc_RNA (1)...(19): siRNA sense strand
gcacgggucuccuguguca

SEQ ID NO: 800110 - RNA, 19 nt, Homo sapiens
  misc_RNA (1)...(19): siRNA sense strand
gagacucccuaucuauuaa

SEQ ID NO: 800111 - RNA, 19 nt, Homo sapiens
  misc_RNA (1)...(19): siRNA sense strand
ucucagaagucaucuuuaa

SEQ ID NO: 800112 - RNA, 19 nt, Homo sapiens
  misc_RNA (1)...(19): siRNA sense strand
agaaggcccugaucauuaa

SEQ ID NO: 800113 - RNA, 19 nt, Homo sapiens
  misc_RNA (1)...(19): siRNA sense strand
caacguguccuaauagaaa

SEQ ID NO: 800114 - RNA, 19 nt, Homo sapiens
  misc_RNA (1)...(19): siRNA sense strand
ggucuucaccgucauguua

SEQ ID NO: 800115 - RNA, 19 nt, Homo sapiens
  misc_RNA (1)...(19): siRNA sense strand
ugacaggccucaagugcua

SEQ ID NO: 800116 - RNA, 19 nt, Homo sapiens
  misc_RNA (1)...(19): siRNA sense strand
caauagaaccacuucauaa

SEQ ID NO: 800117 - RNA, 19 nt, Homo sapiens
  misc_RNA (1)...(19): siRNA sense strand
aaagagaagugucauuguu

SEQ ID NO: 800118 - RNA, 19 nt, Homo sapiens
  misc_RNA (1)...(19): siRNA sense strand
caaaggaaauggucaaggu

SEQ ID NO: 800119 - RNA, 19 nt, Homo sapiens
  misc_RNA (1)...(19): siRNA sense strand
ggaggaggcugaagaagag

SEQ ID NO: 800120 - RNA, 19 nt, Homo sapiens
  misc_RNA (1)...(19): siRNA sense strand
gauagaaacuuguuguacu

SEQ ID NO: 800121 - RNA, 19 nt, Homo sapiens
  misc_RNA (1)...(19): siRNA sense strand
ggauuuccuuucugacuaa

SEQ ID NO: 800122 - RNA, 19 nt, Homo sapiens
  misc_RNA (1)...(19): siRNA sense strand
gaagugucauuguuuguca

SEQ ID NO: 800123 - RNA, 19 nt, Homo sapiens
  misc_RNA (1)...(19): siRNA sense strand
gaaacgaagcgcaaggaaa

SEQ ID NO: 800124 - RNA, 19 nt, Homo sapiens
  misc_RNA (1)...(19): siRNA sense strand
gaaagcugauugacauagu

SEQ ID NO: 800125 - RNA, 19 nt, Homo sapiens
  misc_RNA (1)...(19): siRNA sense strand
gaauaaagacgaauuuggu

SEQ ID NO: 800126 - RNA, 19 nt, Homo sapiens
  misc_RNA (1)...(19): siRNA sense strand
ccaauagaaccacuucaua

SEQ ID NO: 800127 - RNA, 19 nt, Homo sapiens
  misc_RNA (1)...(19): siRNA sense strand
gagagcaagugugaguaua

SEQ ID NO: 800128 - RNA, 19 nt, Homo sapiens
  misc_RNA (1)...(19): siRNA sense strand
aagaaggcccugaucauua

SEQ ID NO: 800129 - RNA, 19 nt, Homo sapiens
  misc_RNA (1)...(19): siRNA sense strand
ugacugaggugcgcauaaa

SEQ ID NO: 800130 - RNA, 19 nt, Homo sapiens
  misc_RNA (1)...(19): siRNA sense strand
caucuucgguguccaguga

SEQ ID NO: 800131 - RNA, 19 nt, Homo sapiens
  misc_RNA (1)...(19): siRNA sense strand
cgaauacuuucagaguuua

SEQ ID NO: 800132 - RNA, 19 nt, Homo sapiens
  misc_RNA (1)...(19): siRNA sense strand
gaagauagaaacuuguugu

SEQ ID NO: 800133 - RNA, 19 nt, Homo sapiens
  misc_RNA (1)...(19): siRNA sense strand
gggauuuccuuucugacua

SEQ ID NO: 800134 - RNA, 19 nt, Homo sapiens
  misc_RNA (1)...(19): siRNA sense strand
guuuguagcucaucagaga

SEQ ID NO: 800135 - RNA, 19 nt, Homo sapiens
  misc_RNA (1)...(19): siRNA sense strand
gacaacguguucagugauu

SEQ ID NO: 800136 - RNA, 19 nt, Homo sapiens
  misc_RNA (1)...(19): siRNA sense strand
gaaaagaguuggccgaaag

SEQ ID NO: 800137 - RNA, 19 nt, Homo sapiens
  misc_RNA (1)...(19): siRNA sense strand
uaagcucucuucucuccua

SEQ ID NO: 800138 - RNA, 19 nt, Homo sapiens
  misc_RNA (1)...(19): siRNA sense strand
gaaaaugagucacaaacug

SEQ ID NO: 800139 - RNA, 19 nt, Homo sapiens
  misc_RNA (1)...(19): siRNA sense strand
gcaagugugaguauaagaa

SEQ ID NO: 800140 - RNA, 19 nt, Homo sapiens
  misc_RNA (1)...(19): siRNA sense strand
gagcacgggucuccugugu

SEQ ID NO: 800141 - RNA, 19 nt, Homo sapiens
  misc_RNA (1)...(19): siRNA sense strand
ggaauguguugugugcuuu

SEQ ID NO: 800142 - RNA, 19 nt, Homo sapiens
  misc_RNA (1)...(19): siRNA sense strand
gggaauguguugugugcuu

SEQ ID NO: 800143 - RNA, 19 nt, Homo sapiens
  misc_RNA (1)...(19): siRNA sense strand
ggaaucggcacauaaggaa

SEQ ID NO: 800144 - RNA, 19 nt, Homo sapiens
  misc_RNA (1)...(19): siRNA sense strand
agacgaauuuggugaguug

SEQ ID NO: 800145 - RNA, 19 nt, Homo sapiens
  misc_RNA (1)...(19): siRNA sense strand
aaagauaguucugugguau

SEQ ID NO: 800146 - RNA, 19 nt, Homo sapiens
  misc_RNA (1)...(19): siRNA sense strand
gcacagcaagucaucaaga

SEQ ID NO: 800147 - RNA, 19 nt, Homo sapiens
  misc_RNA (1)...(19): siRNA sense strand
uaagaaggcccugaucauu

SEQ ID NO: 800148 - RNA, 19 nt, Homo sapiens
  misc_RNA (1)...(19): siRNA sense strand
ugagagagagagaaauuaa

SEQ ID NO: 800149 - RNA, 19 nt, Homo sapiens
  misc_RNA (1)...(19): siRNA sense strand
caaagaaagcugauugaca

SEQ ID NO: 800150 - RNA, 19 nt, Homo sapiens
  misc_RNA (1)...(19): siRNA sense strand
gaaacuaacaaaggaaaug

SEQ ID NO: 800151 - RNA, 19 nt, Homo sapiens
  misc_RNA (1)...(19): siRNA sense strand
gcuauagucuugggauuuc

SEQ ID NO: 800152 - RNA, 19 nt, Homo sapiens
  misc_RNA (1)...(19): siRNA sense strand
cgaacaaacacacaauuga

SEQ ID NO: 800153 - RNA, 19 nt, Homo sapiens
  misc_RNA (1)...(19): siRNA sense strand
ucagaggaaucggcacaua

SEQ ID NO: 800154 - RNA, 19 nt, Homo sapiens
  misc_RNA (1)...(19): siRNA sense strand
gcccuacgcuugugacauc

SEQ ID NO: 800155 - RNA, 19 nt, Homo sapiens
  misc_RNA (1)...(19): siRNA sense strand
cgcuuucucucucaauuua

SEQ ID NO: 800156 - RNA, 19 nt, Homo sapiens
  misc_RNA (1)...(19): siRNA sense strand
uuuccaacguguccuaaua

SEQ ID NO: 800157 - RNA, 19 nt, Homo sapiens
  misc_RNA (1)...(19): siRNA sense strand
gccaaaggagcuuacauuu

SEQ ID NO: 800158 - RNA, 19 nt, Homo sapiens
  misc_RNA (1)...(19): siRNA sense strand
cuugagaucucgagccaaa

SEQ ID NO: 800159 - RNA, 19 nt, Homo sapiens
  misc_RNA (1)...(19): siRNA sense strand
agagacucccuaucuauua

SEQ ID NO: 800160 - RNA, 19 nt, Homo sapiens
  misc_RNA (1)...(19): siRNA sense strand
gaugauaaaccagguguga

SEQ ID NO: 800161 - RNA, 19 nt, Homo sapiens
  misc_RNA (1)...(19): siRNA sense strand
uagaaucaguuuggugaaa

SEQ ID NO: 800162 - RNA, 19 nt, Homo sapiens
  misc_RNA (1)...(19): siRNA sense strand
agagaagugucauuguuug

SEQ ID NO: 800163 - RNA, 19 nt, Homo sapiens
  misc_RNA (1)...(19): siRNA sense strand
ucaaaggacagcuguguga

SEQ ID NO: 800164 - RNA, 19 nt, Homo sapiens
  misc_RNA (1)...(19): siRNA sense strand
gaauguguugugugcuuua

SEQ ID NO: 800165 - RNA, 19 nt, Homo sapiens
  misc_RNA (1)...(19): siRNA sense strand
caucagagacucccuaucu

SEQ ID NO: 800166 - RNA, 19 nt, Homo sapiens
  misc_RNA (1)...(19): siRNA sense strand
ucaaggccaauaccaauaa

SEQ ID NO: 800167 - RNA, 19 nt, Homo sapiens
  misc_RNA (1)...(19): siRNA sense strand
gagcaagugugaguauaag

SEQ ID NO: 800168 - RNA, 19 nt, Homo sapiens
  misc_RNA (1)...(19): siRNA sense strand
cuucaaagccucugcaaga

SEQ ID NO: 800169 - RNA, 19 nt, Homo sapiens
  misc_RNA (1)...(19): siRNA sense strand
gugaugugcugcugauugu

SEQ ID NO: 800170 - RNA, 19 nt, Homo sapiens
  misc_RNA (1)...(19): siRNA sense strand
acagagaagcuauggauga

SEQ ID NO: 800171 - RNA, 19 nt, Homo sapiens
  misc_RNA (1)...(19): siRNA sense strand
gugaaaccauuuauuuguc

SEQ ID NO: 800172 - RNA, 19 nt, Homo sapiens
  misc_RNA (1)...(19): siRNA sense strand
aaacauugccuuaagaucu

SEQ ID NO: 800173 - RNA, 19 nt, Homo sapiens
  misc_RNA (1)...(19): siRNA sense strand
gauugccguuuaagaaguu

SEQ ID NO: 800174 - RNA, 19 nt, Homo sapiens
  misc_RNA (1)...(19): siRNA sense strand
cagagaagcuauggaugau

SEQ ID NO: 800175 - RNA, 19 nt, Homo sapiens
  misc_RNA (1)...(19): siRNA sense strand
caacaaaguaaaccacauc

SEQ ID NO: 800176 - RNA, 19 nt, Homo sapiens
  misc_RNA (1)...(19): siRNA sense strand
uaacaaaggaaauggucaa

SEQ ID NO: 800177 - RNA, 19 nt, Homo sapiens
  misc_RNA (1)...(19): siRNA sense strand
ggacauucaagacugcauu

SEQ ID NO: 800178 - RNA, 19 nt, Homo sapiens
  misc_RNA (1)...(19): siRNA sense strand
cagaggaaucggcacauaa

SEQ ID NO: 800179 - RNA, 19 nt, Homo sapiens
  misc_RNA (1)...(19): siRNA sense strand
uaucucagaagucaucuuu

SEQ ID NO: 800180 - RNA, 19 nt, Homo sapiens
  misc_RNA (1)...(19): siRNA sense strand
aaaguuaggcuuagugauc

SEQ ID NO: 800181 - RNA, 19 nt, Homo sapiens
  misc_RNA (1)...(19): siRNA sense strand
gaaauggucaaggugaaga

SEQ ID NO: 800182 - RNA, 19 nt, Homo sapiens
  misc_RNA (1)...(19): siRNA sense strand
gaugugcugcugauuguug

SEQ ID NO: 800183 - RNA, 19 nt, Homo sapiens
  misc_RNA (1)...(19): siRNA sense strand
gcaccagguugaaguccau

SEQ ID NO: 800184 - RNA, 19 nt, Homo sapiens
  misc_RNA (1)...(19): siRNA sense strand
agagagagagaaauuaaga

SEQ ID NO: 800185 - RNA, 19 nt, Homo sapiens
  misc_RNA (1)...(19): siRNA sense strand
caacacggcauagugaaga

SEQ ID NO: 800186 - RNA, 19 nt, Homo sapiens
  misc_RNA (1)...(19): siRNA sense strand
ggucuccugugucagaaga

SEQ ID NO: 800187 - RNA, 19 nt, Homo sapiens
  misc_RNA (1)...(19): siRNA sense strand
gaugaaaacaguucucaaa

SEQ ID NO: 800188 - RNA, 19 nt, Homo sapiens
  misc_RNA (1)...(19): siRNA sense strand
agaagcggguccuagcaaa

SEQ ID NO: 800189 - RNA, 19 nt, Homo sapiens
  misc_RNA (1)...(19): siRNA sense strand
cgcccgagcugaagcaaga

SEQ ID NO: 800190 - RNA, 19 nt, Homo sapiens
  misc_RNA (1)...(19): siRNA sense strand
acaagagguuucacaccaa

SEQ ID NO: 800191 - RNA, 19 nt, Homo sapiens
  misc_RNA (1)...(19): siRNA sense strand
ugagcagacucccagcaaa

SEQ ID NO: 800192 - RNA, 19 nt, Homo sapiens
  misc_RNA (1)...(19): siRNA sense strand
cagagacucccuaucuauu

SEQ ID NO: 800193 - RNA, 19 nt, Homo sapiens
  misc_RNA (1)...(19): siRNA sense strand
aaacuguauuucagcuuga

SEQ ID NO: 800194 - RNA, 19 nt, Homo sapiens
  misc_RNA (1)...(19): siRNA sense strand
agaaccacuucauaauuug

SEQ ID NO: 800195 - RNA, 19 nt, Homo sapiens
  misc_RNA (1)...(19): siRNA sense strand
cgagaagugugggaagaug

SEQ ID NO: 800196 - RNA, 19 nt, Homo sapiens
  misc_RNA (1)...(19): siRNA sense strand
gagagagagaaauuaagaa

SEQ ID NO: 800197 - RNA, 19 nt, Homo sapiens
  misc_RNA (1)...(19): siRNA sense strand
ggaccgaacuuuccacugu

SEQ ID NO: 800198 - RNA, 19 nt, Homo sapiens
  misc_RNA (1)...(19): siRNA sense strand
ccaaggagcugcccaaguc

SEQ ID NO: 800199 - RNA, 19 nt, Homo sapiens
  misc_RNA (1)...(19): siRNA sense strand
gcacauaacaaagguacua

SEQ ID NO: 800200 - RNA, 19 nt, Homo sapiens
  misc_RNA (1)...(19): siRNA sense strand
guacuaagcacaagacaau

SEQ ID NO: 800201 - RNA, 19 nt, Homo sapiens
  misc_RNA (1)...(19): siRNA sense strand
caaauccgcuucaauucuc

SEQ ID NO: 800202 - RNA, 19 nt, Homo sapiens
  misc_RNA (1)...(19): siRNA sense strand
ugugagaucugcaauguca

SEQ ID NO: 800203 - RNA, 19 nt, Homo sapiens
  misc_RNA (1)...(19): siRNA sense strand
gcacggacccauccucuuc

SEQ ID NO: 800204 - RNA, 19 nt, Homo sapiens
  misc_RNA (1)...(19): siRNA sense strand
cuacugagccgucacaaga

SEQ ID NO: 800205 - RNA, 19 nt, Homo sapiens
  misc_RNA (1)...(19): siRNA sense strand
ugucaaauccgcuucaauu

SEQ ID NO: 800206 - RNA, 19 nt, Homo sapiens
  misc_RNA (1)...(19): siRNA sense strand
gaggcgcacuacaaaggua

SEQ ID NO: 800207 - RNA, 19 nt, Homo sapiens
  misc_RNA (1)...(19): siRNA sense strand
gcaaggaagaggaggagaa

SEQ ID NO: 800208 - RNA, 19 nt, Homo sapiens
  misc_RNA (1)...(19): siRNA sense strand
uguaauaucugucaaaucc

SEQ ID NO: 800209 - RNA, 19 nt, Homo sapiens
  misc_RNA (1)...(19): siRNA sense strand
ccaagcggcugcucuacug

SEQ ID NO: 800210 - RNA, 19 nt, Homo sapiens
  misc_RNA (1)...(19): siRNA sense strand
ggagacuggucagggugua

SEQ ID NO: 800211 - RNA, 19 nt, Homo sapiens
  misc_RNA (1)...(19): siRNA sense strand
caaggaagaggaggagaaa

SEQ ID NO: 800212 - RNA, 19 nt, Homo sapiens
  misc_RNA (1)...(19): siRNA sense strand
cccgucauuuccuguaaua

SEQ ID NO: 800213 - RNA, 19 nt, Homo sapiens
  misc_RNA (1)...(19): siRNA sense strand
gcuugaggcacauaacaaa

SEQ ID NO: 800214 - RNA, 19 nt, Homo sapiens
  misc_RNA (1)...(19): siRNA sense strand
caacugaaacagcacaucu

SEQ ID NO: 800215 - RNA, 19 nt, Homo sapiens
  misc_RNA (1)...(19): siRNA sense strand
ccauggacccugugcagaa

SEQ ID NO: 800216 - RNA, 19 nt, Homo sapiens
  misc_RNA (1)...(19): siRNA sense strand
acucggagguccaacugaa

SEQ ID NO: 800217 - RNA, 19 nt, Homo sapiens
  misc_RNA (1)...(19): siRNA sense strand
gcaacuacagcaccaugga

SEQ ID NO: 800218 - RNA, 19 nt, Homo sapiens
  misc_RNA (1)...(19): siRNA sense strand
gucauuuccuguaauaucu

SEQ ID NO: 800219 - RNA, 19 nt, Homo sapiens
  misc_RNA (1)...(19): siRNA sense strand
acaaagguacuaagcacaa

SEQ ID NO: 800220 - RNA, 19 nt, Homo sapiens
  misc_RNA (1)...(19): siRNA sense strand
caaagguacuaagcacaag

SEQ ID NO: 800221 - RNA, 19 nt, Homo sapiens
  misc_RNA (1)...(19): siRNA sense strand
ggcccgucauuuccuguaa

SEQ ID NO: 800222 - RNA, 19 nt, Homo sapiens
  misc_RNA (1)...(19): siRNA sense strand
ccuguaauaucugucaaau

SEQ ID NO: 800223 - RNA, 19 nt, Homo sapiens
  misc_RNA (1)...(19): siRNA sense strand
ucaaauccgcuucaauucu

SEQ ID NO: 800224 - RNA, 19 nt, Homo sapiens
  misc_RNA (1)...(19): siRNA sense strand
gcauugaggcugccaagac

SEQ ID NO: 800225 - RNA, 19 nt, Homo sapiens
  misc_RNA (1)...(19): siRNA sense strand
ucacucacccucugcuuca

SEQ ID NO: 800226 - RNA, 19 nt, Homo sapiens
  misc_RNA (1)...(19): siRNA sense strand
gcacgcugacuuucuccaa

SEQ ID NO: 800227 - RNA, 19 nt, Homo sapiens
  misc_RNA (1)...(19): siRNA sense strand
gcaagguggcugugaacuc

SEQ ID NO: 800228 - RNA, 19 nt, Homo sapiens
  misc_RNA (1)...(19): siRNA sense strand
gaacuuuccacugugagau

SEQ ID NO: 800229 - RNA, 19 nt, Homo sapiens
  misc_RNA (1)...(19): siRNA sense strand
acugugagaucugcaaugu

SEQ ID NO: 800230 - RNA, 19 nt, Homo sapiens
  misc_RNA (1)...(19): siRNA sense strand
cacuggaccucaagcagau

SEQ ID NO: 800231 - RNA, 19 nt, Homo sapiens
  misc_RNA (1)...(19): siRNA sense strand
ugaggcacauaacaaaggu

SEQ ID NO: 800232 - RNA, 19 nt, Homo sapiens
  misc_RNA (1)...(19): siRNA sense strand
cgucauuuccuguaauauc

SEQ ID NO: 800233 - RNA, 19 nt, Homo sapiens
  misc_RNA (1)...(19): siRNA sense strand
gcccgucauuuccuguaau

SEQ ID NO: 800234 - RNA, 19 nt, Homo sapiens
  misc_RNA (1)...(19): siRNA sense strand
caacucggagguccaacug

SEQ ID NO: 800235 - RNA, 19 nt, Homo sapiens
  misc_RNA (1)...(19): siRNA sense strand
ugugcaagguggcugugaa

SEQ ID NO: 800236 - RNA, 19 nt, Homo sapiens
  misc_RNA (1)...(19): siRNA sense strand
gucaaauccgcuucaauuc

SEQ ID NO: 800237 - RNA, 19 nt, Homo sapiens
  misc_RNA (1)...(19): siRNA sense strand
gguacuaagcacaagacaa

SEQ ID NO: 800238 - RNA, 19 nt, Homo sapiens
  misc_RNA (1)...(19): siRNA sense strand
gaacucccugucccagcuu

SEQ ID NO: 800239 - RNA, 19 nt, Homo sapiens
  misc_RNA (1)...(19): siRNA sense strand
aagcccaacccacuacuga

SEQ ID NO: 800240 - RNA, 19 nt, Homo sapiens
  misc_RNA (1)...(19): siRNA sense strand
gggaagagcugcugaguuu

SEQ ID NO: 800241 - RNA, 19 nt, Homo sapiens
  misc_RNA (1)...(19): siRNA sense strand
gcucaaggcugcacaguug

SEQ ID NO: 800242 - RNA, 19 nt, Homo sapiens
  misc_RNA (1)...(19): siRNA sense strand
gagaacacguuugugguua

SEQ ID NO: 800243 - RNA, 19 nt, Homo sapiens
  misc_RNA (1)...(19): siRNA sense strand
gaagguccauccgaguaua

SEQ ID NO: 800244 - RNA, 19 nt, Homo sapiens
  misc_RNA (1)...(19): siRNA sense strand
ccugggaccucauuccuua

SEQ ID NO: 800245 - RNA, 19 nt, Homo sapiens
  misc_RNA (1)...(19): siRNA sense strand
gaagucgccuggaguucuu

SEQ ID NO: 800246 - RNA, 19 nt, Homo sapiens
  misc_RNA (1)...(19): siRNA sense strand
gaagagcugcugaguuuca

SEQ ID NO: 800247 - RNA, 19 nt, Homo sapiens
  misc_RNA (1)...(19): siRNA sense strand
cacaugaccugucccuuga

SEQ ID NO: 800248 - RNA, 19 nt, Homo sapiens
  misc_RNA (1)...(19): siRNA sense strand
ggagaacacguuugugguu

SEQ ID NO: 800249 - RNA, 19 nt, Homo sapiens
  misc_RNA (1)...(19): siRNA sense strand
aaagauggacucaccguuu

SEQ ID NO: 800250 - RNA, 19 nt, Homo sapiens
  misc_RNA (1)...(19): siRNA sense strand
gcggagauuucgccacaug

SEQ ID NO: 800251 - RNA, 19 nt, Homo sapiens
  misc_RNA (1)...(19): siRNA sense strand
ccagugauguuguccuugu

SEQ ID NO: 800252 - RNA, 19 nt, Homo sapiens
  misc_RNA (1)...(19): siRNA sense strand
gagcuguccugccugaauc

SEQ ID NO: 800253 - RNA, 19 nt, Homo sapiens
  misc_RNA (1)...(19): siRNA sense strand
gcugggcccuucucgauca

SEQ ID NO: 800254 - RNA, 19 nt, Homo sapiens
  misc_RNA (1)...(19): siRNA sense strand
gaacacguuugugguuaag

SEQ ID NO: 800255 - RNA, 19 nt, Homo sapiens
  misc_RNA (1)...(19): siRNA sense strand
agaacacguuugugguuaa

SEQ ID NO: 800256 - RNA, 19 nt, Homo sapiens
  misc_RNA (1)...(19): siRNA sense strand
gaauacguccucaccuuca

SEQ ID NO: 800257 - RNA, 19 nt, Homo sapiens
  misc_RNA (1)...(19): siRNA sense strand
ggaaacagcaacuccaacu

SEQ ID NO: 800258 - RNA, 19 nt, Homo sapiens
  misc_RNA (1)...(19): siRNA sense strand
ggaccucauuccuuacaag

SEQ ID NO: 800259 - RNA, 19 nt, Homo sapiens
  misc_RNA (1)...(19): siRNA sense strand
ggaagguccauccgaguau

SEQ ID NO: 800260 - RNA, 19 nt, Homo sapiens
  misc_RNA (1)...(19): siRNA sense strand
gaggaagucgccuggaguu

SEQ ID NO: 800261 - RNA, 19 nt, Homo sapiens
  misc_RNA (1)...(19): siRNA sense strand
ggagcgagugacuguguaa

SEQ ID NO: 800262 - RNA, 19 nt, Homo sapiens
  misc_RNA (1)...(19): siRNA sense strand
ggagcuguccugccugaau

SEQ ID NO: 800263 - RNA, 19 nt, Homo sapiens
  misc_RNA (1)...(19): siRNA sense strand
ggacccagcgagagcaaug

SEQ ID NO: 800264 - RNA, 19 nt, Homo sapiens
  misc_RNA (1)...(19): siRNA sense strand
caugaccugucccuugaga

SEQ ID NO: 800265 - RNA, 19 nt, Homo sapiens
  misc_RNA (1)...(19): siRNA sense strand
ggagaaggaggaggaggaa

SEQ ID NO: 800266 - RNA, 19 nt, Homo sapiens
  misc_RNA (1)...(19): siRNA sense strand
ggaagucgccuggaguucu

SEQ ID NO: 800267 - RNA, 19 nt, Homo sapiens
  misc_RNA (1)...(19): siRNA sense strand
ccaagcaccugcguuuguc

SEQ ID NO: 800268 - RNA, 19 nt, Homo sapiens
  misc_RNA (1)...(19): siRNA sense strand
gccaagcaccugcguuugu

SEQ ID NO: 800269 - RNA, 19 nt, Homo sapiens
  misc_RNA (1)...(19): siRNA sense strand
ccaagccgaagcucaagaa

SEQ ID NO: 800270 - RNA, 19 nt, Homo sapiens
  misc_RNA (1)...(19): siRNA sense strand
uuacaagggagaacacaga

SEQ ID NO: 800271 - RNA, 19 nt, Homo sapiens
  misc_RNA (1)...(19): siRNA sense strand
ucacagacguccggacaac

SEQ ID NO: 800272 - RNA, 19 nt, Homo sapiens
  misc_RNA (1)...(19): siRNA sense strand
gaaacagcaacuccaacuc

SEQ ID NO: 800273 - RNA, 19 nt, Homo sapiens
  misc_RNA (1)...(19): siRNA sense strand
gaaggaggaggaggaaguc

SEQ ID NO: 800274 - RNA, 19 nt, Homo sapiens
  misc_RNA (1)...(19): siRNA sense strand
cggagcgagugacugugua

SEQ ID NO: 800275 - RNA, 19 nt, Homo sapiens
  misc_RNA (1)...(19): siRNA sense strand
ccauugccgccucccauuu

SEQ ID NO: 800276 - RNA, 19 nt, Homo sapiens
  misc_RNA (1)...(19): siRNA sense strand
ggcugcggcucuggacuuu

SEQ ID NO: 800277 - RNA, 19 nt, Homo sapiens
  misc_RNA (1)...(19): siRNA sense strand
acacguuugugguuaaggu

SEQ ID NO: 800278 - RNA, 19 nt, Homo sapiens
  misc_RNA (1)...(19): siRNA sense strand
gugcugggcccuucucgau

SEQ ID NO: 800279 - RNA, 19 nt, Homo sapiens
  misc_RNA (1)...(19): siRNA sense strand
gaugcucucucggcucaag

SEQ ID NO: 800280 - RNA, 19 nt, Homo sapiens
  misc_RNA (1)...(19): siRNA sense strand
aagauggacucaccguuuu

SEQ ID NO: 800281 - RNA, 19 nt, Homo sapiens
  misc_RNA (1)...(19): siRNA sense strand
gcccuucucgaucaucuga

SEQ ID NO: 800282 - RNA, 19 nt, Homo sapiens
  misc_RNA (1)...(19): siRNA sense strand
agaaggaggaggaggaagu

SEQ ID NO: 800283 - RNA, 19 nt, Homo sapiens
  misc_RNA (1)...(19): siRNA sense strand
gagcccuggugcggagauu

SEQ ID NO: 800284 - RNA, 19 nt, Homo sapiens
  misc_RNA (1)...(19): siRNA sense strand
gggaccucauuccuuacaa

SEQ ID NO: 800285 - RNA, 19 nt, Homo sapiens
  misc_RNA (1)...(19): siRNA sense strand
ccuccaagccgaagcucaa

SEQ ID NO: 800286 - RNA, 19 nt, Homo sapiens
  misc_RNA (1)...(19): siRNA sense strand
cagccucaguggcagaagu

SEQ ID NO: 800287 - RNA, 19 nt, Homo sapiens
  misc_RNA (1)...(19): siRNA sense strand
gaaagagguucgauuuaug

SEQ ID NO: 800288 - RNA, 19 nt, Homo sapiens
  misc_RNA (1)...(19): siRNA sense strand
gaagaucacuccauugaag

SEQ ID NO: 800289 - RNA, 19 nt, Homo sapiens
  misc_RNA (1)...(19): siRNA sense strand
gagaacagcuuacaugaac

SEQ ID NO: 800290 - RNA, 19 nt, Homo sapiens
  misc_RNA (1)...(19): siRNA sense strand
ugaaagagguucgauuuau

SEQ ID NO: 800291 - RNA, 19 nt, Homo sapiens
  misc_RNA (1)...(19): siRNA sense strand
gagaagaucacuccauuga

SEQ ID NO: 800292 - RNA, 19 nt, Homo sapiens
  misc_RNA (1)...(19): siRNA sense strand
gaaucuggcucacuugaug

SEQ ID NO: 800293 - RNA, 19 nt, Homo sapiens
  misc_RNA (1)...(19): siRNA sense strand
caagagaacggaauugaaa

SEQ ID NO: 800294 - RNA, 19 nt, Homo sapiens
  misc_RNA (1)...(19): siRNA sense strand
gugauaagcugaguacuga

SEQ ID NO: 800295 - RNA, 19 nt, Homo sapiens
  misc_RNA (1)...(19): siRNA sense strand
gauggaaucugcaaacaca

SEQ ID NO: 800296 - RNA, 19 nt, Homo sapiens
  misc_RNA (1)...(19): siRNA sense strand
gaagaaagccauggaaauc

SEQ ID NO: 800297 - RNA, 19 nt, Homo sapiens
  misc_RNA (1)...(19): siRNA sense strand
gaccagaguuacccuuauu

SEQ ID NO: 800298 - RNA, 19 nt, Homo sapiens
  misc_RNA (1)...(19): siRNA sense strand
caagugauguuccuacuag

SEQ ID NO: 800299 - RNA, 19 nt, Homo sapiens
  misc_RNA (1)...(19): siRNA sense strand
aagcuacucucauaacuuu

SEQ ID NO: 800300 - RNA, 19 nt, Homo sapiens
  misc_RNA (1)...(19): siRNA sense strand
gaacguguaugaaacaacu

SEQ ID NO: 800301 - RNA, 19 nt, Homo sapiens
  misc_RNA (1)...(19): siRNA sense strand
gaucacagcuuuccaucag

SEQ ID NO: 800302 - RNA, 19 nt, Homo sapiens
  misc_RNA (1)...(19): siRNA sense strand
gaaagcaugcuacaauguu

SEQ ID NO: 800303 - RNA, 19 nt, Homo sapiens
  misc_RNA (1)...(19): siRNA sense strand
gagguucgauuuaugaugu

SEQ ID NO: 800304 - RNA, 19 nt, Homo sapiens
  misc_RNA (1)...(19): siRNA sense strand
gaaugagaaugaaguaugg

SEQ ID NO: 800305 - RNA, 19 nt, Homo sapiens
  misc_RNA (1)...(19): siRNA sense strand
gcaaugucaacucuauuua

SEQ ID NO: 800306 - RNA, 19 nt, Homo sapiens
  misc_RNA (1)...(19): siRNA sense strand
gcaacuucaucaucacaaa

SEQ ID NO: 800307 - RNA, 19 nt, Homo sapiens
  misc_RNA (1)...(19): siRNA sense strand
cagaguguauucaaugauu

SEQ ID NO: 800308 - RNA, 19 nt, Homo sapiens
  misc_RNA (1)...(19): siRNA sense strand
gagagacauuuauuucaug

SEQ ID NO: 800309 - RNA, 19 nt, Homo sapiens
  misc_RNA (1)...(19): siRNA sense strand
uaaacacucuucuagaauc

SEQ ID NO: 800310 - RNA, 19 nt, Homo sapiens
  misc_RNA (1)...(19): siRNA sense strand
guauggaggacaagaauuu

SEQ ID NO: 800311 - RNA, 19 nt, Homo sapiens
  misc_RNA (1)...(19): siRNA sense strand
gaugagaacagcuuacaug

SEQ ID NO: 800312 - RNA, 19 nt, Homo sapiens
  misc_RNA (1)...(19): siRNA sense strand
ggaguccacuucauguuuc

SEQ ID NO: 800313 - RNA, 19 nt, Homo sapiens
  misc_RNA (1)...(19): siRNA sense strand
gagaguaucccgagucugu

SEQ ID NO: 800314 - RNA, 19 nt, Homo sapiens
  misc_RNA (1)...(19): siRNA sense strand
ugaaugccaugaacgugua

SEQ ID NO: 800315 - RNA, 19 nt, Homo sapiens
  misc_RNA (1)...(19): siRNA sense strand
aauccaagaucacagcuuu

SEQ ID NO: 800316 - RNA, 19 nt, Homo sapiens
  misc_RNA (1)...(19): siRNA sense strand
caaaggaguccacuucaug

SEQ ID NO: 800317 - RNA, 19 nt, Homo sapiens
  misc_RNA (1)...(19): siRNA sense strand
aaggcaagcuacucucaua

SEQ ID NO: 800318 - RNA, 19 nt, Homo sapiens
  misc_RNA (1)...(19): siRNA sense strand
gugacaggauaauaaauga

SEQ ID NO: 800319 - RNA, 19 nt, Homo sapiens
  misc_RNA (1)...(19): siRNA sense strand
ugaaacaacugaauuugac

SEQ ID NO: 800320 - RNA, 19 nt, Homo sapiens
  misc_RNA (1)...(19): siRNA sense strand
uuaaugaugaccagaguua

SEQ ID NO: 800321 - RNA, 19 nt, Homo sapiens
  misc_RNA (1)...(19): siRNA sense strand
acucuuguguggauaauuu

SEQ ID NO: 800322 - RNA, 19 nt, Homo sapiens
  misc_RNA (1)...(19): siRNA sense strand
aaagcaugcuacaauguuu

SEQ ID NO: 800323 - RNA, 19 nt, Homo sapiens
  misc_RNA (1)...(19): siRNA sense strand
aggaauauaugaacaggaa

SEQ ID NO: 800324 - RNA, 19 nt, Homo sapiens
  misc_RNA (1)...(19): siRNA sense strand
cagcuuacaugaaccuaug

SEQ ID NO: 800325 - RNA, 19 nt, Homo sapiens
  misc_RNA (1)...(19): siRNA sense strand
caacugaauuugaccaacu

SEQ ID NO: 800326 - RNA, 19 nt, Homo sapiens
  misc_RNA (1)...(19): siRNA sense strand
ucacagcuuuccaucagaa

SEQ ID NO: 800327 - RNA, 19 nt, Homo sapiens
  misc_RNA (1)...(19): siRNA sense strand
ggaaccagaguacagauga

SEQ ID NO: 800328 - RNA, 19 nt, Homo sapiens
  misc_RNA (1)...(19): siRNA sense strand
gcugaguacugagcucuuu

SEQ ID NO: 800329 - RNA, 19 nt, Homo sapiens
  misc_RNA (1)...(19): siRNA sense strand
agaaagccauggaaaucaa

SEQ ID NO: 800330 - RNA, 19 nt, Homo sapiens
  misc_RNA (1)...(19): siRNA sense strand
gcaagcuacucucauaacu

SEQ ID NO: 800331 - RNA, 19 nt, Homo sapiens
  misc_RNA (1)...(19): siRNA sense strand
gcaguuauuuugcaaagaa

SEQ ID NO: 800332 - RNA, 19 nt, Homo sapiens
  misc_RNA (1)...(19): siRNA sense strand
ggacaaggcaguuauuuug

SEQ ID NO: 800333 - RNA, 19 nt, Homo sapiens
  misc_RNA (1)...(19): siRNA sense strand
guuaucggaucauuuacaa

SEQ ID NO: 800334 - RNA, 19 nt, Homo sapiens
  misc_RNA (1)...(19): siRNA sense strand
gaauuugaccaacuacgaa

SEQ ID NO: 800335 - RNA, 19 nt, Homo sapiens
  misc_RNA (1)...(19): siRNA sense strand
gaaguauggaggacaagaa

SEQ ID NO: 800336 - RNA, 19 nt, Homo sapiens
  misc_RNA (1)...(19): siRNA sense strand
ggcagaguguauucaauga

SEQ ID NO: 800337 - RNA, 19 nt, Homo sapiens
  misc_RNA (1)...(19): siRNA sense strand
cugagaagaucacuccauu

SEQ ID NO: 800338 - RNA, 19 nt, Homo sapiens
  misc_RNA (1)...(19): siRNA sense strand
ggaaagcaugcuacaaugu

SEQ ID NO: 800339 - RNA, 19 nt, Homo sapiens
  misc_RNA (1)...(19): siRNA sense strand
ucuagaaucuggcucacuu

SEQ ID NO: 800340 - RNA, 19 nt, Homo sapiens
  misc_RNA (1)...(19): siRNA sense strand
agacugugccugaguuuaa

SEQ ID NO: 800341 - RNA, 19 nt, Homo sapiens
  misc_RNA (1)...(19): siRNA sense strand
guaccacacucaccaagag

SEQ ID NO: 800342 - RNA, 19 nt, Homo sapiens
  misc_RNA (1)...(19): siRNA sense strand
gaaccuaugaugaagaaag

SEQ ID NO: 800343 - RNA, 19 nt, Homo sapiens
  misc_RNA (1)...(19): siRNA sense strand
gccaugaacguguaugaaa

SEQ ID NO: 800344 - RNA, 19 nt, Homo sapiens
  misc_RNA (1)...(19): siRNA sense strand
ccauggaaaucaauucauc

SEQ ID NO: 800345 - RNA, 19 nt, Homo sapiens
  misc_RNA (1)...(19): siRNA sense strand
guacagaugagaacagcuu

SEQ ID NO: 800346 - RNA, 19 nt, Homo sapiens
  misc_RNA (1)...(19): siRNA sense strand
ccaaaggaguccacuucau

SEQ ID NO: 800347 - RNA, 19 nt, Homo sapiens
  misc_RNA (1)...(19): siRNA sense strand
ggccgugacaggauaauaa

SEQ ID NO: 800348 - RNA, 19 nt, Homo sapiens
  misc_RNA (1)...(19): siRNA sense strand
cgauuuaugauguggaaua

SEQ ID NO: 800349 - RNA, 19 nt, Homo sapiens
  misc_RNA (1)...(19): siRNA sense strand
aaagagguucgauuuauga

SEQ ID NO: 800350 - RNA, 19 nt, Homo sapiens
  misc_RNA (1)...(19): siRNA sense strand
gagagaguaucccgagucu

SEQ ID NO: 800351 - RNA, 19 nt, Homo sapiens
  misc_RNA (1)...(19): siRNA sense strand
cuagcaaugucaacucuau

SEQ ID NO: 800352 - RNA, 19 nt, Homo sapiens
  misc_RNA (1)...(19): siRNA sense strand
uuacaugaaccuaugauga

SEQ ID NO: 800353 - RNA, 19 nt, Homo sapiens
  misc_RNA (1)...(19): siRNA sense strand
gcacccaguuucaagugau

SEQ ID NO: 800354 - RNA, 19 nt, Homo sapiens
  misc_RNA (1)...(19): siRNA sense strand
gacaggauaauaaaugaga

SEQ ID NO: 800355 - RNA, 19 nt, Homo sapiens
  misc_RNA (1)...(19): siRNA sense strand
guggaaagcaugcuacaau

SEQ ID NO: 800356 - RNA, 19 nt, Homo sapiens
  misc_RNA (1)...(19): siRNA sense strand
gaaccagaguacagaugag

SEQ ID NO: 800357 - RNA, 19 nt, Homo sapiens
  misc_RNA (1)...(19): siRNA sense strand
ucuaagaaguccuccaaag

SEQ ID NO: 800358 - RNA, 19 nt, Homo sapiens
  misc_RNA (1)...(19): siRNA sense strand
uggaaagcaugcuacaaug

SEQ ID NO: 800359 - RNA, 19 nt, Homo sapiens
  misc_RNA (1)...(19): siRNA sense strand
ucugaaagagguucgauuu

SEQ ID NO: 800360 - RNA, 19 nt, Homo sapiens
  misc_RNA (1)...(19): siRNA sense strand
gauagaaugagaaugaagu

SEQ ID NO: 800361 - RNA, 19 nt, Homo sapiens
  misc_RNA (1)...(19): siRNA sense strand
cagcucacuuccagacuga

SEQ ID NO: 800362 - RNA, 19 nt, Homo sapiens
  misc_RNA (1)...(19): siRNA sense strand
ugaagaaagccauggaaau

SEQ ID NO: 800363 - RNA, 19 nt, Homo sapiens
  misc_RNA (1)...(19): siRNA sense strand
acaccacccucuagcaaug

SEQ ID NO: 800364 - RNA, 19 nt, Homo sapiens
  misc_RNA (1)...(19): siRNA sense strand
uauccaauaugaagaaguc

SEQ ID NO: 800365 - RNA, 19 nt, Homo sapiens
  misc_RNA (1)...(19): siRNA sense strand
cggaucauuuacaaucuuu

SEQ ID NO: 800366 - RNA, 19 nt, Homo sapiens
  misc_RNA (1)...(19): siRNA sense strand
uacaugaaccuaugaugaa

SEQ ID NO: 800367 - RNA, 19 nt, Homo sapiens
  misc_RNA (1)...(19): siRNA sense strand
ucacuccauugaagacuug

SEQ ID NO: 800368 - RNA, 19 nt, Homo sapiens
  misc_RNA (1)...(19): siRNA sense strand
ccaagagaacggaauugaa

SEQ ID NO: 800369 - RNA, 19 nt, Homo sapiens
  misc_RNA (1)...(19): siRNA sense strand
cugcuuagacaaagucaua

SEQ ID NO: 800370 - RNA, 19 nt, Homo sapiens
  misc_RNA (1)...(19): siRNA sense strand
ccugauaggacaaauguug

SEQ ID NO: 800371 - RNA, 19 nt, Homo sapiens
  misc_RNA (1)...(19): siRNA sense strand
gacugugccugaguuuaaa

SEQ ID NO: 800372 - RNA, 19 nt, Homo sapiens
  misc_RNA (1)...(19): siRNA sense strand
caggagcacuuggaaagau

SEQ ID NO: 800373 - RNA, 19 nt, Homo sapiens
  misc_RNA (1)...(19): siRNA sense strand
ccauaucauuggcagauca

SEQ ID NO: 800374 - RNA, 19 nt, Homo sapiens
  misc_RNA (1)...(19): siRNA sense strand
cacugaagcuccagaacga

SEQ ID NO: 800375 - RNA, 19 nt, Homo sapiens
  misc_RNA (1)...(19): siRNA sense strand
uggcagggauuguuugaag

SEQ ID NO: 800376 - RNA, 19 nt, Homo sapiens
  misc_RNA (1)...(19): siRNA sense strand
ugaccagaguuacccuuau

SEQ ID NO: 800377 - RNA, 19 nt, Homo sapiens
  misc_RNA (1)...(19): siRNA sense strand
ggucacuucagcaaacuuu

SEQ ID NO: 800378 - RNA, 19 nt, Homo sapiens
  misc_RNA (1)...(19): siRNA sense strand
ccgagucugucauucgauu

SEQ ID NO: 800379 - RNA, 19 nt, Homo sapiens
  misc_RNA (1)...(19): siRNA sense strand
gaugaagaaagccauggaa

SEQ ID NO: 800380 - RNA, 19 nt, Homo sapiens
  misc_RNA (1)...(19): siRNA sense strand
gcauccaucucaggacuuc

SEQ ID NO: 800381 - RNA, 19 nt, Homo sapiens
  misc_RNA (1)...(19): siRNA sense strand
cugaaagagguucgauuua

SEQ ID NO: 800382 - RNA, 19 nt, Homo sapiens
  misc_RNA (1)...(19): siRNA sense strand
gucauucgauugauugaag

SEQ ID NO: 800383 - RNA, 19 nt, Homo sapiens
  misc_RNA (1)...(19): siRNA sense strand
ccacacagucuggaaauuc

SEQ ID NO: 800384 - RNA, 19 nt, Homo sapiens
  misc_RNA (1)...(19): siRNA sense strand
ugagaacagcuuacaugaa

SEQ ID NO: 800385 - RNA, 19 nt, Homo sapiens
  misc_RNA (1)...(19): siRNA sense strand
gauacacaaugggcaguca

SEQ ID NO: 800386 - RNA, 19 nt, Homo sapiens
  misc_RNA (1)...(19): siRNA sense strand
gcaaagaaggcaagcuacu

SEQ ID NO: 800387 - RNA, 19 nt, Homo sapiens
  misc_RNA (1)...(19): siRNA sense strand
ggcaggagcugagguguuu

SEQ ID NO: 800388 - RNA, 19 nt, Homo sapiens
  misc_RNA (1)...(19): siRNA sense strand
ggcuggagauggugaauga

SEQ ID NO: 800389 - RNA, 19 nt, Homo sapiens
  misc_RNA (1)...(19): siRNA sense strand
guggagaccuucggccuuu

SEQ ID NO: 800390 - RNA, 19 nt, Homo sapiens
  misc_RNA (1)...(19): siRNA sense strand
gacguuggcuggccuggau

SEQ ID NO: 800391 - RNA, 19 nt, Homo sapiens
  misc_RNA (1)...(19): siRNA sense strand
ugacucggguggauuguag

SEQ ID NO: 800392 - RNA, 19 nt, Homo sapiens
  misc_RNA (1)...(19): siRNA sense strand
gccugaaccuggccuggaa

SEQ ID NO: 800393 - RNA, 19 nt, Homo sapiens
  misc_RNA (1)...(19): siRNA sense strand
ugcaggagcuggaccuuuc

SEQ ID NO: 800394 - RNA, 19 nt, Homo sapiens
  misc_RNA (1)...(19): siRNA sense strand
gcccaucccucuggacaca

SEQ ID NO: 800395 - RNA, 19 nt, Homo sapiens
  misc_RNA (1)...(19): siRNA sense strand
ccaaccggcuggagauggu

SEQ ID NO: 800396 - RNA, 19 nt, Homo sapiens
  misc_RNA (1)...(19): siRNA sense strand
ugagcgacgugaaccuuag

SEQ ID NO: 800397 - RNA, 19 nt, Homo sapiens
  misc_RNA (1)...(19): siRNA sense strand
gggcaggagcugagguguu

SEQ ID NO: 800398 - RNA, 19 nt, Homo sapiens
  misc_RNA (1)...(19): siRNA sense strand
ggaacccucuagcugucau

SEQ ID NO: 800399 - RNA, 19 nt, Homo sapiens
  misc_RNA (1)...(19): siRNA sense strand
gcccugcacugcguagaca

SEQ ID NO: 800400 - RNA, 19 nt, Homo sapiens
  misc_RNA (1)...(19): siRNA sense strand
gcccaaccuccgagacuug

SEQ ID NO: 800401 - RNA, 19 nt, Homo sapiens
  misc_RNA (1)...(19): siRNA sense strand
gccuggaucucagccacaa

SEQ ID NO: 800402 - RNA, 19 nt, Homo sapiens
  misc_RNA (1)...(19): siRNA sense strand
gaacaaggcucaguuauga

SEQ ID NO: 800403 - RNA, 19 nt, Homo sapiens
  misc_RNA (1)...(19): siRNA sense strand
caaagcagaugacuacaua

SEQ ID NO: 800404 - RNA, 19 nt, Homo sapiens
  misc_RNA (1)...(19): siRNA sense strand
guaagaagguggacagaaa

SEQ ID NO: 800405 - RNA, 19 nt, Homo sapiens
  misc_RNA (1)...(19): siRNA sense strand
caacauggauuauggaaug

SEQ ID NO: 800406 - RNA, 19 nt, Homo sapiens
  misc_RNA (1)...(19): siRNA sense strand
cauguuagcuucuauugua

SEQ ID NO: 800407 - RNA, 19 nt, Homo sapiens
  misc_RNA (1)...(19): siRNA sense strand
auacuaagcugacagauaa

SEQ ID NO: 800408 - RNA, 19 nt, Homo sapiens
  misc_RNA (1)...(19): siRNA sense strand
gacaaugaguugcguauuu

SEQ ID NO: 800409 - RNA, 19 nt, Homo sapiens
  misc_RNA (1)...(19): siRNA sense strand
gaaagacgcacgagagauu

SEQ ID NO: 800410 - RNA, 19 nt, Homo sapiens
  misc_RNA (1)...(19): siRNA sense strand
gcagaugacuacauagaga

SEQ ID NO: 800411 - RNA, 19 nt, Homo sapiens
  misc_RNA (1)...(19): siRNA sense strand
gcagauaagugaacgagau

SEQ ID NO: 800412 - RNA, 19 nt, Homo sapiens
  misc_RNA (1)...(19): siRNA sense strand
gauuacaagcgcuuuauua

SEQ ID NO: 800413 - RNA, 19 nt, Homo sapiens
  misc_RNA (1)...(19): siRNA sense strand
ggaggugguuacuauguuu

SEQ ID NO: 800414 - RNA, 19 nt, Homo sapiens
  misc_RNA (1)...(19): siRNA sense strand
gaauuaagccugucaugga

SEQ ID NO: 800415 - RNA, 19 nt, Homo sapiens
  misc_RNA (1)...(19): siRNA sense strand
ugaaaucacaggcgcauua

SEQ ID NO: 800416 - RNA, 19 nt, Homo sapiens
  misc_RNA (1)...(19): siRNA sense strand
ggaacaauauggucucauc

SEQ ID NO: 800417 - RNA, 19 nt, Homo sapiens
  misc_RNA (1)...(19): siRNA sense strand
gaaauggacgcaugaacaa

SEQ ID NO: 800418 - RNA, 19 nt, Homo sapiens
  misc_RNA (1)...(19): siRNA sense strand
gcugggaggugguuacuau

SEQ ID NO: 800419 - RNA, 19 nt, Homo sapiens
  misc_RNA (1)...(19): siRNA sense strand
gcucaguuaugauguuuga

SEQ ID NO: 800420 - RNA, 19 nt, Homo sapiens
  misc_RNA (1)...(19): siRNA sense strand
caaauugaauaccguaauc

SEQ ID NO: 800421 - RNA, 19 nt, Homo sapiens
  misc_RNA (1)...(19): siRNA sense strand
uacaagcgcuuuauuaagu

SEQ ID NO: 800422 - RNA, 19 nt, Homo sapiens
  misc_RNA (1)...(19): siRNA sense strand
ggacugccaucaucuugga

SEQ ID NO: 800423 - RNA, 19 nt, Homo sapiens
  misc_RNA (1)...(19): siRNA sense strand
ggacagaaagaguuuguau

SEQ ID NO: 800424 - RNA, 19 nt, Homo sapiens
  misc_RNA (1)...(19): siRNA sense strand
ugaaucaccugucgaagau

SEQ ID NO: 800425 - RNA, 19 nt, Homo sapiens
  misc_RNA (1)...(19): siRNA sense strand
gcagccaacaggacaaaua

SEQ ID NO: 800426 - RNA, 19 nt, Homo sapiens
  misc_RNA (1)...(19): siRNA sense strand
ggaaaucuguaugacaugu

SEQ ID NO: 800427 - RNA, 19 nt, Homo sapiens
  misc_RNA (1)...(19): siRNA sense strand
gcaggauggcgauguuaua

SEQ ID NO: 800428 - RNA, 19 nt, Homo sapiens
  misc_RNA (1)...(19): siRNA sense strand
cgacaguacuucaguccaa

SEQ ID NO: 800429 - RNA, 19 nt, Homo sapiens
  misc_RNA (1)...(19): siRNA sense strand
cacaaucgauuugagcaua

SEQ ID NO: 800430 - RNA, 19 nt, Homo sapiens
  misc_RNA (1)...(19): siRNA sense strand
gcagcugauucgaguauau

SEQ ID NO: 800431 - RNA, 19 nt, Homo sapiens
  misc_RNA (1)...(19): siRNA sense strand
ucagauugcuggacuuugu

SEQ ID NO: 800432 - RNA, 19 nt, Homo sapiens
  misc_RNA (1)...(19): siRNA sense strand
cauguuugauggacgauuu

SEQ ID NO: 800433 - RNA, 19 nt, Homo sapiens
  misc_RNA (1)...(19): siRNA sense strand
cuacugaucccaaauugaa

SEQ ID NO: 800434 - RNA, 19 nt, Homo sapiens
  misc_RNA (1)...(19): siRNA sense strand
ugauacaccucaauuucaa

SEQ ID NO: 800435 - RNA, 19 nt, Homo sapiens
  misc_RNA (1)...(19): siRNA sense strand
ggaggacuaugaaucucuu

SEQ ID NO: 800436 - RNA, 19 nt, Homo sapiens
  misc_RNA (1)...(19): siRNA sense strand
ugaaguagacaaugaguug

SEQ ID NO: 800437 - RNA, 19 nt, Homo sapiens
  misc_RNA (1)...(19): siRNA sense strand
acaaugaguugcguauuug

SEQ ID NO: 800438 - RNA, 19 nt, Homo sapiens
  misc_RNA (1)...(19): siRNA sense strand
uaaggaaguuggaaaucug

SEQ ID NO: 800439 - RNA, 19 nt, Homo sapiens
  misc_RNA (1)...(19): siRNA sense strand
aaccagagcugcagauaag

SEQ ID NO: 800440 - RNA, 19 nt, Homo sapiens
  misc_RNA (1)...(19): siRNA sense strand
gaauccaauugaucauguu

SEQ ID NO: 800441 - RNA, 19 nt, Homo sapiens
  misc_RNA (1)...(19): siRNA sense strand
caacaggacaaauaaagau

SEQ ID NO: 800442 - RNA, 19 nt, Homo sapiens
  misc_RNA (1)...(19): siRNA sense strand
uacagaugcuuuccucaaa

SEQ ID NO: 800443 - RNA, 19 nt, Homo sapiens
  misc_RNA (1)...(19): siRNA sense strand
aagcuuccuuuaugagaua

SEQ ID NO: 800444 - RNA, 19 nt, Homo sapiens
  misc_RNA (1)...(19): siRNA sense strand
uuaguuauauccagcgauu

SEQ ID NO: 800445 - RNA, 19 nt, Homo sapiens
  misc_RNA (1)...(19): siRNA sense strand
uaaagaugacccaauguga

SEQ ID NO: 800446 - RNA, 19 nt, Homo sapiens
  misc_RNA (1)...(19): siRNA sense strand
gugcuaaacccaaaguauu

SEQ ID NO: 800447 - RNA, 19 nt, Homo sapiens
  misc_RNA (1)...(19): siRNA sense strand
gagauaaggaaguuggaaa

SEQ ID NO: 800448 - RNA, 19 nt, Homo sapiens
  misc_RNA (1)...(19): siRNA sense strand
caagcgcuuuauuaaguuu

SEQ ID NO: 800449 - RNA, 19 nt, Homo sapiens
  misc_RNA (1)...(19): siRNA sense strand
ucucaucccugaagaagau

SEQ ID NO: 800450 - RNA, 19 nt, Homo sapiens
  misc_RNA (1)...(19): siRNA sense strand
caaccagagcugcagauaa

SEQ ID NO: 800451 - RNA, 19 nt, Homo sapiens
  misc_RNA (1)...(19): siRNA sense strand
gggaggugguuacuauguu

SEQ ID NO: 800452 - RNA, 19 nt, Homo sapiens
  misc_RNA (1)...(19): siRNA sense strand
cguaaucuauucaaguaug

SEQ ID NO: 800453 - RNA, 19 nt, Homo sapiens
  misc_RNA (1)...(19): siRNA sense strand
gauuauggaaugcaagaaa

SEQ ID NO: 800454 - RNA, 19 nt, Homo sapiens
  misc_RNA (1)...(19): siRNA sense strand
uccaggagcuucacacaau

SEQ ID NO: 800455 - RNA, 19 nt, Homo sapiens
  misc_RNA (1)...(19): siRNA sense strand
gaauggaacgacaguacuu

SEQ ID NO: 800456 - RNA, 19 nt, Homo sapiens
  misc_RNA (1)...(19): siRNA sense strand
uauaaagggcguccugaaa

SEQ ID NO: 800457 - RNA, 19 nt, Homo sapiens
  misc_RNA (1)...(19): siRNA sense strand
caaauuguaggaccacuug

SEQ ID NO: 800458 - RNA, 19 nt, Homo sapiens
  misc_RNA (1)...(19): siRNA sense strand
gagcuucacacaaucgauu

SEQ ID NO: 800459 - RNA, 19 nt, Homo sapiens
  misc_RNA (1)...(19): siRNA sense strand
caugaacaaggcucaguua

SEQ ID NO: 800460 - RNA, 19 nt, Homo sapiens
  misc_RNA (1)...(19): siRNA sense strand
uauacuaagcugacagaua

SEQ ID NO: 800461 - RNA, 19 nt, Homo sapiens
  misc_RNA (1)...(19): siRNA sense strand
gagcuuaucaacacaaagu

SEQ ID NO: 800462 - RNA, 19 nt, Homo sapiens
  misc_RNA (1)...(19): siRNA sense strand
uugagcaccuuauuaauuc

SEQ ID NO: 800463 - RNA, 19 nt, Homo sapiens
  misc_RNA (1)...(19): siRNA sense strand
ggaacuccaucccgacuac

SEQ ID NO: 800464 - RNA, 19 nt, Homo sapiens
  misc_RNA (1)...(19): siRNA sense strand
gcgcauuacugccuugucu

SEQ ID NO: 800465 - RNA, 19 nt, Homo sapiens
  misc_RNA (1)...(19): siRNA sense strand
gguaauuaaugauccuauc

SEQ ID NO: 800466 - RNA, 19 nt, Homo sapiens
  misc_RNA (1)...(19): siRNA sense strand
gaguuuguaugccgcaaga

SEQ ID NO: 800467 - RNA, 19 nt, Homo sapiens
  misc_RNA (1)...(19): siRNA sense strand
gagcagcugauucgaguau

SEQ ID NO: 800468 - RNA, 19 nt, Homo sapiens
  misc_RNA (1)...(19): siRNA sense strand
accguaaucuauucaagua

SEQ ID NO: 800469 - RNA, 19 nt, Homo sapiens
  misc_RNA (1)...(19): siRNA sense strand
gauaagugaacgagauguu

SEQ ID NO: 800470 - RNA, 19 nt, Homo sapiens
  misc_RNA (1)...(19): siRNA sense strand
ucugugaaguagacaauga

SEQ ID NO: 800471 - RNA, 19 nt, Homo sapiens
  misc_RNA (1)...(19): siRNA sense strand
gauucauuguggccauaua

SEQ ID NO: 800472 - RNA, 19 nt, Homo sapiens
  misc_RNA (1)...(19): siRNA sense strand
ugaaauggacgcaugaaca

SEQ ID NO: 800473 - RNA, 19 nt, Homo sapiens
  misc_RNA (1)...(19): siRNA sense strand
gacaguacuucaguccaaa

SEQ ID NO: 800474 - RNA, 19 nt, Homo sapiens
  misc_RNA (1)...(19): siRNA sense strand
cagccaacaggacaaauaa

SEQ ID NO: 800475 - RNA, 19 nt, Homo sapiens
  misc_RNA (1)...(19): siRNA sense strand
gauacaaugauuacagaug

SEQ ID NO: 800476 - RNA, 19 nt, Homo sapiens
  misc_RNA (1)...(19): siRNA sense strand
guugauacaaugaagguaa

SEQ ID NO: 800477 - RNA, 19 nt, Homo sapiens
  misc_RNA (1)...(19): siRNA sense strand
gaagguggacagaaagagu

SEQ ID NO: 800478 - RNA, 19 nt, Homo sapiens
  misc_RNA (1)...(19): siRNA sense strand
caauugaucauguuagcuu

SEQ ID NO: 800479 - RNA, 19 nt, Homo sapiens
  misc_RNA (1)...(19): siRNA sense strand
gaaaagaauccaauugauc

SEQ ID NO: 800480 - RNA, 19 nt, Homo sapiens
  misc_RNA (1)...(19): siRNA sense strand
gaaacugaaggcugaagau

SEQ ID NO: 800481 - RNA, 19 nt, Homo sapiens
  misc_RNA (1)...(19): siRNA sense strand
gacuaugaaucucuuccaa

SEQ ID NO: 800482 - RNA, 19 nt, Homo sapiens
  misc_RNA (1)...(19): siRNA sense strand
gaugacuacauagagauua

SEQ ID NO: 800483 - RNA, 19 nt, Homo sapiens
  misc_RNA (1)...(19): siRNA sense strand
gaaguuggaaaucuguaug

SEQ ID NO: 800484 - RNA, 19 nt, Homo sapiens
  misc_RNA (1)...(19): siRNA sense strand
gcauuacugccuugucuug

SEQ ID NO: 800485 - RNA, 19 nt, Homo sapiens
  misc_RNA (1)...(19): siRNA sense strand
aauuaagccugucauggaa

SEQ ID NO: 800486 - RNA, 19 nt, Homo sapiens
  misc_RNA (1)...(19): siRNA sense strand
ugaacaaggcucaguuaug

SEQ ID NO: 800487 - RNA, 19 nt, Homo sapiens
  misc_RNA (1)...(19): siRNA sense strand
ucgcauuucuacagcaauu

SEQ ID NO: 800488 - RNA, 19 nt, Homo sapiens
  misc_RNA (1)...(19): siRNA sense strand
ucgaguauauuguaagaag

SEQ ID NO: 800489 - RNA, 19 nt, Homo sapiens
  misc_RNA (1)...(19): siRNA sense strand
gaucauguuagcuucuauu

SEQ ID NO: 800490 - RNA, 19 nt, Homo sapiens
  misc_RNA (1)...(19): siRNA sense strand
uauaguggauguuaucaac

SEQ ID NO: 800491 - RNA, 19 nt, Homo sapiens
  misc_RNA (1)...(19): siRNA sense strand
guggacaaaugggauuauu

SEQ ID NO: 800492 - RNA, 19 nt, Homo sapiens
  misc_RNA (1)...(19): siRNA sense strand
ucaguggugugcagacaga

SEQ ID NO: 800493 - RNA, 19 nt, Homo sapiens
  misc_RNA (1)...(19): siRNA sense strand
agaauccaauugaucaugu

SEQ ID NO: 800494 - RNA, 19 nt, Homo sapiens
  misc_RNA (1)...(19): siRNA sense strand
ccaacaggacaaauaaaga

SEQ ID NO: 800495 - RNA, 19 nt, Homo sapiens
  misc_RNA (1)...(19): siRNA sense strand
cuacagcaauugacgacau

SEQ ID NO: 800496 - RNA, 19 nt, Homo sapiens
  misc_RNA (1)...(19): siRNA sense strand
ggaaguuggaaaucuguau

SEQ ID NO: 800497 - RNA, 19 nt, Homo sapiens
  misc_RNA (1)...(19): siRNA sense strand
acaagcgcuuuauuaaguu

SEQ ID NO: 800498 - RNA, 19 nt, Homo sapiens
  misc_RNA (1)...(19): siRNA sense strand
ccucaaagcagaugacuac

SEQ ID NO: 800499 - RNA, 19 nt, Homo sapiens
  misc_RNA (1)...(19): siRNA sense strand
cugaagaacauccgagaaa

SEQ ID NO: 800500 - RNA, 19 nt, Homo sapiens
  misc_RNA (1)...(19): siRNA sense strand
ccacucauaacaccucaaa

SEQ ID NO: 800501 - RNA, 19 nt, Homo sapiens
  misc_RNA (1)...(19): siRNA sense strand
gaagguaauuaaugauccu

SEQ ID NO: 800502 - RNA, 19 nt, Homo sapiens
  misc_RNA (1)...(19): siRNA sense strand
acacaaaccugcucacaga

SEQ ID NO: 800503 - RNA, 19 nt, Homo sapiens
  misc_RNA (1)...(19): siRNA sense strand
gcaaaguguuuaagagcaa

SEQ ID NO: 800504 - RNA, 19 nt, Homo sapiens
  misc_RNA (1)...(19): siRNA sense strand
gaaaccagcauuagcagaa

SEQ ID NO: 800505 - RNA, 19 nt, Homo sapiens
  misc_RNA (1)...(19): siRNA sense strand
cagagaagccucacuuuga

SEQ ID NO: 800506 - RNA, 19 nt, Homo sapiens
  misc_RNA (1)...(19): siRNA sense strand
ggaggacgauacacaugaa

SEQ ID NO: 800507 - RNA, 19 nt, Homo sapiens
  misc_RNA (1)...(19): siRNA sense strand
uaagcuagaucccagcaaa

SEQ ID NO: 800508 - RNA, 19 nt, Homo sapiens
  misc_RNA (1)...(19): siRNA sense strand
gaagagaccgacuccuuug

SEQ ID NO: 800509 - RNA, 19 nt, Homo sapiens
  misc_RNA (1)...(19): siRNA sense strand
gcaauuaacagcaucucaa

SEQ ID NO: 800510 - RNA, 19 nt, Homo sapiens
  misc_RNA (1)...(19): siRNA sense strand
gagaccgacuccuuuguga

SEQ ID NO: 800511 - RNA, 19 nt, Homo sapiens
  misc_RNA (1)...(19): siRNA sense strand
uauuugagcuggauucaug

SEQ ID NO: 800512 - RNA, 19 nt, Homo sapiens
  misc_RNA (1)...(19): siRNA sense strand
caaaccugcucacagaaga

SEQ ID NO: 800513 - RNA, 19 nt, Homo sapiens
  misc_RNA (1)...(19): siRNA sense strand
gagcuggauucaugcaaug

SEQ ID NO: 800514 - RNA, 19 nt, Homo sapiens
  misc_RNA (1)...(19): siRNA sense strand
accaauggcuuccacauga

SEQ ID NO: 800515 - RNA, 19 nt, Homo sapiens
  misc_RNA (1)...(19): siRNA sense strand
cugaagaugugaagaacuu

SEQ ID NO: 800516 - RNA, 19 nt, Homo sapiens
  misc_RNA (1)...(19): siRNA sense strand
gcaagaacaagaucguaau

SEQ ID NO: 800517 - RNA, 19 nt, Homo sapiens
  misc_RNA (1)...(19): siRNA sense strand
ugggaagcauggcaauuaa

SEQ ID NO: 800518 - RNA, 19 nt, Homo sapiens
  misc_RNA (1)...(19): siRNA sense strand
gaagaacuuuuaccugaug

SEQ ID NO: 800519 - RNA, 19 nt, Homo sapiens
  misc_RNA (1)...(19): siRNA sense strand
uguauaaaccuaucaccua

SEQ ID NO: 800520 - RNA, 19 nt, Homo sapiens
  misc_RNA (1)...(19): siRNA sense strand
ggaagcauggcaauuaaca

SEQ ID NO: 800521 - RNA, 19 nt, Homo sapiens
  misc_RNA (1)...(19): siRNA sense strand
caauuaacagcaucucaaa

SEQ ID NO: 800522 - RNA, 19 nt, Homo sapiens
  misc_RNA (1)...(19): siRNA sense strand
ccagagaagccucacuuug

SEQ ID NO: 800523 - RNA, 19 nt, Homo sapiens
  misc_RNA (1)...(19): siRNA sense strand
cagaagagaccgacuccuu

SEQ ID NO: 800524 - RNA, 19 nt, Homo sapiens
  misc_RNA (1)...(19): siRNA sense strand
agaagagaccgacuccuuu

SEQ ID NO: 800525 - RNA, 19 nt, Homo sapiens
  misc_RNA (1)...(19): siRNA sense strand
ccacuuccuccacuucuaa

SEQ ID NO: 800526 - RNA, 19 nt, Homo sapiens
  misc_RNA (1)...(19): siRNA sense strand
ccgacuccuuugugaauaa

SEQ ID NO: 800527 - RNA, 19 nt, Homo sapiens
  misc_RNA (1)...(19): siRNA sense strand
gaaaguuugccuugucuac

SEQ ID NO: 800528 - RNA, 19 nt, Homo sapiens
  misc_RNA (1)...(19): siRNA sense strand
ccagcaaaguguuuaagag

SEQ ID NO: 800529 - RNA, 19 nt, Homo sapiens
  misc_RNA (1)...(19): siRNA sense strand
cacccagucuuccauguau

SEQ ID NO: 800530 - RNA, 19 nt, Homo sapiens
  misc_RNA (1)...(19): siRNA sense strand
gagcaagaacaagaucgua

SEQ ID NO: 800531 - RNA, 19 nt, Homo sapiens
  misc_RNA (1)...(19): siRNA sense strand
gggaaaguuugccuugucu

SEQ ID NO: 800532 - RNA, 19 nt, Homo sapiens
  misc_RNA (1)...(19): siRNA sense strand
gcauggcaauuaacagcau

SEQ ID NO: 800533 - RNA, 19 nt, Homo sapiens
  misc_RNA (1)...(19): siRNA sense strand
gaucccagcaaaguguuua

SEQ ID NO: 800534 - RNA, 19 nt, Homo sapiens
  misc_RNA (1)...(19): siRNA sense strand
gaccgacuccuuugugaau

SEQ ID NO: 800535 - RNA, 19 nt, Homo sapiens
  misc_RNA (1)...(19): siRNA sense strand
auaaaccuaucaccuacaa

SEQ ID NO: 800536 - RNA, 19 nt, Homo sapiens
  misc_RNA (1)...(19): siRNA sense strand
gcaaugguucagcauguau

SEQ ID NO: 800537 - RNA, 19 nt, Homo sapiens
  misc_RNA (1)...(19): siRNA sense strand
uguauucacuuccuaaugc

SEQ ID NO: 800538 - RNA, 19 nt, Homo sapiens
  misc_RNA (1)...(19): siRNA sense strand
aagcaaugguucagcaugu

SEQ ID NO: 800539 - RNA, 19 nt, Homo sapiens
  misc_RNA (1)...(19): siRNA sense strand
acaccuuuacugccuauua

SEQ ID NO: 800540 - RNA, 19 nt, Homo sapiens
  misc_RNA (1)...(19): siRNA sense strand
caauggcagugggaaaguu

SEQ ID NO: 800541 - RNA, 19 nt, Homo sapiens
  misc_RNA (1)...(19): siRNA sense strand
cugggaagcauggcaauua

SEQ ID NO: 800542 - RNA, 19 nt, Homo sapiens
  misc_RNA (1)...(19): siRNA sense strand
ggagugugaagcuggauga

SEQ ID NO: 800543 - RNA, 19 nt, Homo sapiens
  misc_RNA (1)...(19): siRNA sense strand
cagcauguauaaaccuauc

SEQ ID NO: 800544 - RNA, 19 nt, Homo sapiens
  misc_RNA (1)...(19): siRNA sense strand
ccuaucaccuacaacacaa

SEQ ID NO: 800545 - RNA, 19 nt, Homo sapiens
  misc_RNA (1)...(19): siRNA sense strand
gaccaauggcuuccacaug

SEQ ID NO: 800546 - RNA, 19 nt, Homo sapiens
  misc_RNA (1)...(19): siRNA sense strand
ugagcuggauucaugcaau

SEQ ID NO: 800547 - RNA, 19 nt, Homo sapiens
  misc_RNA (1)...(19): siRNA sense strand
caaugguucagcauguaua

SEQ ID NO: 800548 - RNA, 19 nt, Homo sapiens
  misc_RNA (1)...(19): siRNA sense strand
gcccacaggccaagcaaug

SEQ ID NO: 800549 - RNA, 19 nt, Homo sapiens
  misc_RNA (1)...(19): siRNA sense strand
gccugcagguggccagaaa

SEQ ID NO: 800550 - RNA, 19 nt, Homo sapiens
  misc_RNA (1)...(19): siRNA sense strand
caagaacaagaucguaauc

SEQ ID NO: 800551 - RNA, 19 nt, Homo sapiens
  misc_RNA (1)...(19): siRNA sense strand
aaaccuaucaccuacaaca

SEQ ID NO: 800552 - RNA, 19 nt, Homo sapiens
  misc_RNA (1)...(19): siRNA sense strand
ggaaaguuugccuugucua

SEQ ID NO: 800553 - RNA, 19 nt, Homo sapiens
  misc_RNA (1)...(19): siRNA sense strand
caacacaaaccugcucaca

SEQ ID NO: 800554 - RNA, 19 nt, Homo sapiens
  misc_RNA (1)...(19): siRNA sense strand
aauaugccuucaccagcua

SEQ ID NO: 800555 - RNA, 19 nt, Homo sapiens
  misc_RNA (1)...(19): siRNA sense strand
agagaagccucacuuugac

SEQ ID NO: 800556 - RNA, 19 nt, Homo sapiens
  misc_RNA (1)...(19): siRNA sense strand
uuuaagagcaagaacaaga

SEQ ID NO: 800557 - RNA, 19 nt, Homo sapiens
  misc_RNA (1)...(19): siRNA sense strand
ucacccagucuuccaugua

SEQ ID NO: 800558 - RNA, 19 nt, Homo sapiens
  misc_RNA (1)...(19): siRNA sense strand
gcagaagacacugagaucu

SEQ ID NO: 800559 - RNA, 19 nt, Homo sapiens
  misc_RNA (1)...(19): siRNA sense strand
acaagaucguaaucccaaa

SEQ ID NO: 800560 - RNA, 19 nt, Homo sapiens
  misc_RNA (1)...(19): siRNA sense strand
ugggaaaguuugccuuguc

SEQ ID NO: 800561 - RNA, 19 nt, Homo sapiens
  misc_RNA (1)...(19): siRNA sense strand
caccuuuacugccuauuac

SEQ ID NO: 800562 - RNA, 19 nt, Homo sapiens
  misc_RNA (1)...(19): siRNA sense strand
guuccuggacagagcguua

SEQ ID NO: 800563 - RNA, 19 nt, Homo sapiens
  misc_RNA (1)...(19): siRNA sense strand
gccagagaagccucacuuu

SEQ ID NO: 800564 - RNA, 19 nt, Homo sapiens
  misc_RNA (1)...(19): siRNA sense strand
gaagaugugaagaacuuuu

SEQ ID NO: 800565 - RNA, 19 nt, Homo sapiens
  misc_RNA (1)...(19): siRNA sense strand
cuagaucccagcaaagugu

SEQ ID NO: 800566 - RNA, 19 nt, Homo sapiens
  misc_RNA (1)...(19): siRNA sense strand
guauucacuuccuaaugca

SEQ ID NO: 800567 - RNA, 19 nt, Homo sapiens
  misc_RNA (1)...(19): siRNA sense strand
ccauguauucacuuccuaa

SEQ ID NO: 800568 - RNA, 19 nt, Homo sapiens
  misc_RNA (1)...(19): siRNA sense strand
acacaugaagccagugaug

SEQ ID NO: 800569 - RNA, 19 nt, Homo sapiens
  misc_RNA (1)...(19): siRNA sense strand
gcaauggcagugggaaagu

SEQ ID NO: 800570 - RNA, 19 nt, Homo sapiens
  misc_RNA (1)...(19): siRNA sense strand
uucaccagcuauggcauua

SEQ ID NO: 800571 - RNA, 19 nt, Homo sapiens
  misc_RNA (1)...(19): siRNA sense strand
uagcagaagacacugagau

SEQ ID NO: 800572 - RNA, 19 nt, Homo sapiens
  misc_RNA (1)...(19): siRNA sense strand
agcaaugguucagcaugua

SEQ ID NO: 800573 - RNA, 19 nt, Homo sapiens
  misc_RNA (1)...(19): siRNA sense strand
uggaggacgauacacauga

SEQ ID NO: 800574 - RNA, 19 nt, Homo sapiens
  misc_RNA (1)...(19): siRNA sense strand
gauauuugagcuggauuca

SEQ ID NO: 800575 - RNA, 19 nt, Homo sapiens
  misc_RNA (1)...(19): siRNA sense strand
cacaugaagccagugauga

SEQ ID NO: 800576 - RNA, 19 nt, Homo sapiens
  misc_RNA (1)...(19): siRNA sense strand
gugggaaaguuugccuugu

SEQ ID NO: 800577 - RNA, 19 nt, Homo sapiens
  misc_RNA (1)...(19): siRNA sense strand
agcaagaacaagaucguaa

SEQ ID NO: 800578 - RNA, 19 nt, Homo sapiens
  misc_RNA (1)...(19): siRNA sense strand
gcuagaucccagcaaagug

SEQ ID NO: 800579 - RNA, 19 nt, Homo sapiens
  misc_RNA (1)...(19): siRNA sense strand
ugacauggagugugaagcu

SEQ ID NO: 800580 - RNA, 19 nt, Homo sapiens
  misc_RNA (1)...(19): siRNA sense strand
ccaauggcuuccacaugac

SEQ ID NO: 800581 - RNA, 19 nt, Homo sapiens
  misc_RNA (1)...(19): siRNA sense strand
aaaccagcauuagcagaag

SEQ ID NO: 800582 - RNA, 19 nt, Homo sapiens
  misc_RNA (1)...(19): siRNA sense strand
ccgauacucuuucauauua

SEQ ID NO: 800583 - RNA, 19 nt, Homo sapiens
  misc_RNA (1)...(19): siRNA sense strand
gaaugaaguuugucaguga

SEQ ID NO: 800584 - RNA, 19 nt, Homo sapiens
  misc_RNA (1)...(19): siRNA sense strand
aaacgaagaugacuuaguu

SEQ ID NO: 800585 - RNA, 19 nt, Homo sapiens
  misc_RNA (1)...(19): siRNA sense strand
ugacuuaguuucacaugua

SEQ ID NO: 800586 - RNA, 19 nt, Homo sapiens
  misc_RNA (1)...(19): siRNA sense strand
ggaauauucugcuauagga

SEQ ID NO: 800587 - RNA, 19 nt, Homo sapiens
  misc_RNA (1)...(19): siRNA sense strand
gcgaauuacuuguguugua

SEQ ID NO: 800588 - RNA, 19 nt, Homo sapiens
  misc_RNA (1)...(19): siRNA sense strand
acaauggccugaugguuua

SEQ ID NO: 800589 - RNA, 19 nt, Homo sapiens
  misc_RNA (1)...(19): siRNA sense strand
gaacuacauuccaccauca

SEQ ID NO: 800590 - RNA, 19 nt, Homo sapiens
  misc_RNA (1)...(19): siRNA sense strand
gcuggaauauucugcuaua

SEQ ID NO: 800591 - RNA, 19 nt, Homo sapiens
  misc_RNA (1)...(19): siRNA sense strand
guagaugguuccguaauuu

SEQ ID NO: 800592 - RNA, 19 nt, Homo sapiens
  misc_RNA (1)...(19): siRNA sense strand
gaucauugcuaguguagug

SEQ ID NO: 800593 - RNA, 19 nt, Homo sapiens
  misc_RNA (1)...(19): siRNA sense strand
caauauggauucucuguuc

SEQ ID NO: 800594 - RNA, 19 nt, Homo sapiens
  misc_RNA (1)...(19): siRNA sense strand
ggaaauugguuuguaggaa

SEQ ID NO: 800595 - RNA, 19 nt, Homo sapiens
  misc_RNA (1)...(19): siRNA sense strand
cugcaaagcuguuacauuc

SEQ ID NO: 800596 - RNA, 19 nt, Homo sapiens
  misc_RNA (1)...(19): siRNA sense strand
gacaauggccugaugguuu

SEQ ID NO: 800597 - RNA, 19 nt, Homo sapiens
  misc_RNA (1)...(19): siRNA sense strand
caacaauuacucugcauaa

SEQ ID NO: 800598 - RNA, 19 nt, Homo sapiens
  misc_RNA (1)...(19): siRNA sense strand
gcuagaggaaggcgaauua

SEQ ID NO: 800599 - RNA, 19 nt, Homo sapiens
  misc_RNA (1)...(19): siRNA sense strand
gaaaccauaacacagauuu

SEQ ID NO: 800600 - RNA, 19 nt, Homo sapiens
  misc_RNA (1)...(19): siRNA sense strand
ggagggagugguauguuua

SEQ ID NO: 800601 - RNA, 19 nt, Homo sapiens
  misc_RNA (1)...(19): siRNA sense strand
ggaaggugaucuuggugaa

SEQ ID NO: 800602 - RNA, 19 nt, Homo sapiens
  misc_RNA (1)...(19): siRNA sense strand
gagacuacuuugccaagaa

SEQ ID NO: 800603 - RNA, 19 nt, Homo sapiens
  misc_RNA (1)...(19): siRNA sense strand
gaagauacauggcaaaagu

SEQ ID NO: 800604 - RNA, 19 nt, Homo sapiens
  misc_RNA (1)...(19): siRNA sense strand
gaaggcgaauuacuugugu

SEQ ID NO: 800605 - RNA, 19 nt, Homo sapiens
  misc_RNA (1)...(19): siRNA sense strand
uggaggaaaugaaacagua

SEQ ID NO: 800606 - RNA, 19 nt, Homo sapiens
  misc_RNA (1)...(19): siRNA sense strand
ugccuuagcuggaccaauu

SEQ ID NO: 800607 - RNA, 19 nt, Homo sapiens
  misc_RNA (1)...(19): siRNA sense strand
gauggaaauugguuuguag

SEQ ID NO: 800608 - RNA, 19 nt, Homo sapiens
  misc_RNA (1)...(19): siRNA sense strand
caauuacucugcauaacau

SEQ ID NO: 800609 - RNA, 19 nt, Homo sapiens
  misc_RNA (1)...(19): siRNA sense strand
ggaaaugcccaguccucua

SEQ ID NO: 800610 - RNA, 19 nt, Homo sapiens
  misc_RNA (1)...(19): siRNA sense strand
caacuuuggcaacaauuaa

SEQ ID NO: 800611 - RNA, 19 nt, Homo sapiens
  misc_RNA (1)...(19): siRNA sense strand
gaaaacccguugcacauau

SEQ ID NO: 800612 - RNA, 19 nt, Homo sapiens
  misc_RNA (1)...(19): siRNA sense strand
uggcaacaauuaaggauga

SEQ ID NO: 800613 - RNA, 19 nt, Homo sapiens
  misc_RNA (1)...(19): siRNA sense strand
gaaaagguguuaaucucaa

SEQ ID NO: 800614 - RNA, 19 nt, Homo sapiens
  misc_RNA (1)...(19): siRNA sense strand
caacgauuaucagccagua

SEQ ID NO: 800615 - RNA, 19 nt, Homo sapiens
  misc_RNA (1)...(19): siRNA sense strand
gugaugaacauuaugauga

SEQ ID NO: 800616 - RNA, 19 nt, Homo sapiens
  misc_RNA (1)...(19): siRNA sense strand
acaguaugcuccugaaguu

SEQ ID NO: 800617 - RNA, 19 nt, Homo sapiens
  misc_RNA (1)...(19): siRNA sense strand
gcaacaauuacucugcaua

SEQ ID NO: 800618 - RNA, 19 nt, Homo sapiens
  misc_RNA (1)...(19): siRNA sense strand
gaagaugacuuaguuucac

SEQ ID NO: 800619 - RNA, 19 nt, Homo sapiens
  misc_RNA (1)...(19): siRNA sense strand
gaccaauggauuauuauga

SEQ ID NO: 800620 - RNA, 19 nt, Homo sapiens
  misc_RNA (1)...(19): siRNA sense strand
gaaagaccaauggauuauu

SEQ ID NO: 800621 - RNA, 19 nt, Homo sapiens
  misc_RNA (1)...(19): siRNA sense strand
gaggaaggcgaauuacuug

SEQ ID NO: 800622 - RNA, 19 nt, Homo sapiens
  misc_RNA (1)...(19): siRNA sense strand
gggccagauucuuuaauug

SEQ ID NO: 800623 - RNA, 19 nt, Homo sapiens
  misc_RNA (1)...(19): siRNA sense strand
gauggacaauggccugaug

SEQ ID NO: 800624 - RNA, 19 nt, Homo sapiens
  misc_RNA (1)...(19): siRNA sense strand
cauccgauacucuuucaua

SEQ ID NO: 800625 - RNA, 19 nt, Homo sapiens
  misc_RNA (1)...(19): siRNA sense strand
gaaaugcccaguccucuac

SEQ ID NO: 800626 - RNA, 19 nt, Homo sapiens
  misc_RNA (1)...(19): siRNA sense strand
cagacaauacucuucauuu

SEQ ID NO: 800627 - RNA, 19 nt, Homo sapiens
  misc_RNA (1)...(19): siRNA sense strand
gcaaauccaccacccuuca

SEQ ID NO: 800628 - RNA, 19 nt, Homo sapiens
  misc_RNA (1)...(19): siRNA sense strand
gaaacggcaacgauuauca

SEQ ID NO: 800629 - RNA, 19 nt, Homo sapiens
  misc_RNA (1)...(19): siRNA sense strand
uaacauaggauucucugau

SEQ ID NO: 800630 - RNA, 19 nt, Homo sapiens
  misc_RNA (1)...(19): siRNA sense strand
caaaugaaacggcaacgau

SEQ ID NO: 800631 - RNA, 19 nt, Homo sapiens
  misc_RNA (1)...(19): siRNA sense strand
caacuucuuuuccaaauga

SEQ ID NO: 800632 - RNA, 19 nt, Homo sapiens
  misc_RNA (1)...(19): siRNA sense strand
aacauaggauucucugauu

SEQ ID NO: 800633 - RNA, 19 nt, Homo sapiens
  misc_RNA (1)...(19): siRNA sense strand
ugucagugaugaacauuau

SEQ ID NO: 800634 - RNA, 19 nt, Homo sapiens
  misc_RNA (1)...(19): siRNA sense strand
ggagacuacuuugccaaga

SEQ ID NO: 800635 - RNA, 19 nt, Homo sapiens
  misc_RNA (1)...(19): siRNA sense strand
caucgaggaucuagcaaca

SEQ ID NO: 800636 - RNA, 19 nt, Homo sapiens
  misc_RNA (1)...(19): siRNA sense strand
uggauucucuguucaagga

SEQ ID NO: 800637 - RNA, 19 nt, Homo sapiens
  misc_RNA (1)...(19): siRNA sense strand
uguagaugguuccguaauu

SEQ ID NO: 800638 - RNA, 19 nt, Homo sapiens
  misc_RNA (1)...(19): siRNA sense strand
gguguuaaucucaaaugua

SEQ ID NO: 800639 - RNA, 19 nt, Homo sapiens
  misc_RNA (1)...(19): siRNA sense strand
ugauggaaauugguuugua

SEQ ID NO: 800640 - RNA, 19 nt, Homo sapiens
  misc_RNA (1)...(19): siRNA sense strand
aaugaaacggcaacgauua

SEQ ID NO: 800641 - RNA, 19 nt, Homo sapiens
  misc_RNA (1)...(19): siRNA sense strand
ggaauccacuacaacuucu

SEQ ID NO: 800642 - RNA, 19 nt, Homo sapiens
  misc_RNA (1)...(19): siRNA sense strand
ggccagauucuuuaauuga

SEQ ID NO: 800643 - RNA, 19 nt, Homo sapiens
  misc_RNA (1)...(19): siRNA sense strand
ggaaggcgaauuacuugug

SEQ ID NO: 800644 - RNA, 19 nt, Homo sapiens
  misc_RNA (1)...(19): siRNA sense strand
ucuguaaagugaccaauuc

SEQ ID NO: 800645 - RNA, 19 nt, Homo sapiens
  misc_RNA (1)...(19): siRNA sense strand
ccagauucuuuaauugaug

SEQ ID NO: 800646 - RNA, 19 nt, Homo sapiens
  misc_RNA (1)...(19): siRNA sense strand
ggacauccgauacucuuuc

SEQ ID NO: 800647 - RNA, 19 nt, Homo sapiens
  misc_RNA (1)...(19): siRNA sense strand
gaaacaguagcagccauuu

SEQ ID NO: 800648 - RNA, 19 nt, Homo sapiens
  misc_RNA (1)...(19): siRNA sense strand
gauaugauggaaauugguu

SEQ ID NO: 800649 - RNA, 19 nt, Homo sapiens
  misc_RNA (1)...(19): siRNA sense strand
uugaaagaccaauggauua

SEQ ID NO: 800650 - RNA, 19 nt, Homo sapiens
  misc_RNA (1)...(19): siRNA sense strand
aaauugcccuucccauugu

SEQ ID NO: 800651 - RNA, 19 nt, Homo sapiens
  misc_RNA (1)...(19): siRNA sense strand
ucgaggaucuagcaacaga

SEQ ID NO: 800652 - RNA, 19 nt, Homo sapiens
  misc_RNA (1)...(19): siRNA sense strand
caaauguaaugcugaugca

SEQ ID NO: 800653 - RNA, 19 nt, Homo sapiens
  misc_RNA (1)...(19): siRNA sense strand
gaaaauacaucugcaaagc

SEQ ID NO: 800654 - RNA, 19 nt, Homo sapiens
  misc_RNA (1)...(19): siRNA sense strand
gugaacaaucuaauacgua

SEQ ID NO: 800655 - RNA, 19 nt, Homo sapiens
  misc_RNA (1)...(19): siRNA sense strand
caauuaaggaugacacaau

SEQ ID NO: 800656 - RNA, 19 nt, Homo sapiens
  misc_RNA (1)...(19): siRNA sense strand
guaacaggauaugauggaa

SEQ ID NO: 800657 - RNA, 19 nt, Homo sapiens
  misc_RNA (1)...(19): siRNA sense strand
gagaauaucagggaagagu

SEQ ID NO: 800658 - RNA, 19 nt, Homo sapiens
  misc_RNA (1)...(19): siRNA sense strand
ugaaaacgaagaugacuua

SEQ ID NO: 800659 - RNA, 19 nt, Homo sapiens
  misc_RNA (1)...(19): siRNA sense strand
ccacgaucauugcuagugu

SEQ ID NO: 800660 - RNA, 19 nt, Homo sapiens
  misc_RNA (1)...(19): siRNA sense strand
guccauccauugacuuuca

SEQ ID NO: 800661 - RNA, 19 nt, Homo sapiens
  misc_RNA (1)...(19): siRNA sense strand
cagguuggauggacaaugg

SEQ ID NO: 800662 - RNA, 19 nt, Homo sapiens
  misc_RNA (1)...(19): siRNA sense strand
gacauccgauacucuuuca

SEQ ID NO: 800663 - RNA, 19 nt, Homo sapiens
  misc_RNA (1)...(19): siRNA sense strand
gccagauucuuuaauugau

SEQ ID NO: 800664 - RNA, 19 nt, Homo sapiens
  misc_RNA (1)...(19): siRNA sense strand
ggacaauggccugaugguu

SEQ ID NO: 800665 - RNA, 19 nt, Homo sapiens
  misc_RNA (1)...(19): siRNA sense strand
ccaccacccuucaaaucug

SEQ ID NO: 800666 - RNA, 19 nt, Homo sapiens
  misc_RNA (1)...(19): siRNA sense strand
gaaggugaucuuggugaaa

SEQ ID NO: 800667 - RNA, 19 nt, Homo sapiens
  misc_RNA (1)...(19): siRNA sense strand
gaaaaucucaauagguuug

SEQ ID NO: 800668 - RNA, 19 nt, Homo sapiens
  misc_RNA (1)...(19): siRNA sense strand
ucaacuuuggcaacaauua

SEQ ID NO: 800669 - RNA, 19 nt, Homo sapiens
  misc_RNA (1)...(19): siRNA sense strand
gguaacaggauaugaugga

SEQ ID NO: 800670 - RNA, 19 nt, Homo sapiens
  misc_RNA (1)...(19): siRNA sense strand
uaacaggauaugauggaaa

SEQ ID NO: 800671 - RNA, 19 nt, Homo sapiens
  misc_RNA (1)...(19): siRNA sense strand
aggagggagugguauguuu

SEQ ID NO: 800672 - RNA, 19 nt, Homo sapiens
  misc_RNA (1)...(19): siRNA sense strand
cgaagaugacuuaguuuca

SEQ ID NO: 800673 - RNA, 19 nt, Homo sapiens
  misc_RNA (1)...(19): siRNA sense strand
aaaugggaaugaaguuugu

SEQ ID NO: 800674 - RNA, 19 nt, Homo sapiens
  misc_RNA (1)...(19): siRNA sense strand
ggagaagauacauggcaaa

SEQ ID NO: 800675 - RNA, 19 nt, Homo sapiens
  misc_RNA (1)...(19): siRNA sense strand
aacaggauaugauggaaau

SEQ ID NO: 800676 - RNA, 19 nt, Homo sapiens
  misc_RNA (1)...(19): siRNA sense strand
agaggaaggcgaauuacuu

SEQ ID NO: 800677 - RNA, 19 nt, Homo sapiens
  misc_RNA (1)...(19): siRNA sense strand
ugaaguuugucagugauga

SEQ ID NO: 800678 - RNA, 19 nt, Homo sapiens
  misc_RNA (1)...(19): siRNA sense strand
ugaaagaccaauggauuau

SEQ ID NO: 800679 - RNA, 19 nt, Homo sapiens
  misc_RNA (1)...(19): siRNA sense strand
caauucccuuggucaaaga

SEQ ID NO: 800680 - RNA, 19 nt, Homo sapiens
  misc_RNA (1)...(19): siRNA sense strand
gaaguuugucagugaugaa

SEQ ID NO: 800681 - RNA, 19 nt, Homo sapiens
  misc_RNA (1)...(19): siRNA sense strand
ucagugaugaacauuauga

SEQ ID NO: 800682 - RNA, 19 nt, Homo sapiens
  misc_RNA (1)...(19): siRNA sense strand
gugcugaagcugcucaaua

SEQ ID NO: 800683 - RNA, 19 nt, Homo sapiens
  misc_RNA (1)...(19): siRNA sense strand
gcgacgaccuggaccuaug

SEQ ID NO: 800684 - RNA, 19 nt, Homo sapiens
  misc_RNA (1)...(19): siRNA sense strand
gcacucgcacgacaucaaa

SEQ ID NO: 800685 - RNA, 19 nt, Homo sapiens
  misc_RNA (1)...(19): siRNA sense strand
cgucgccgcuguccaacaa

SEQ ID NO: 800686 - RNA, 19 nt, Homo sapiens
  misc_RNA (1)...(19): siRNA sense strand
ugaggcugcugugcgcuua

SEQ ID NO: 800687 - RNA, 19 nt, Homo sapiens
  misc_RNA (1)...(19): siRNA sense strand
ugcugaagcugcucaauac

SEQ ID NO: 800688 - RNA, 19 nt, Homo sapiens
  misc_RNA (1)...(19): siRNA sense strand
acucgcacgacaucaaaua

SEQ ID NO: 800689 - RNA, 19 nt, Homo sapiens
  misc_RNA (1)...(19): siRNA sense strand
caugugggcaccucugugu

SEQ ID NO: 800690 - RNA, 19 nt, Homo sapiens
  misc_RNA (1)...(19): siRNA sense strand
ggaaagagauggaggauuu

SEQ ID NO: 800691 - RNA, 19 nt, Homo sapiens
  misc_RNA (1)...(19): siRNA sense strand
gaacuucagucucgucuua

SEQ ID NO: 800692 - RNA, 19 nt, Homo sapiens
  misc_RNA (1)...(19): siRNA sense strand
gaagaucucagaaauguua

SEQ ID NO: 800693 - RNA, 19 nt, Homo sapiens
  misc_RNA (1)...(19): siRNA sense strand
gaaagaaaguuuggauuug

SEQ ID NO: 800694 - RNA, 19 nt, Homo sapiens
  misc_RNA (1)...(19): siRNA sense strand
ggaaagaaaguuuggauuu

SEQ ID NO: 800695 - RNA, 19 nt, Homo sapiens
  misc_RNA (1)...(19): siRNA sense strand
gaacgguccuuaccaguga

SEQ ID NO: 800696 - RNA, 19 nt, Homo sapiens
  misc_RNA (1)...(19): siRNA sense strand
ugacaaagauccuccuaaa

SEQ ID NO: 800697 - RNA, 19 nt, Homo sapiens
  misc_RNA (1)...(19): siRNA sense strand
gaacugaaguaucccgauu

SEQ ID NO: 800698 - RNA, 19 nt, Homo sapiens
  misc_RNA (1)...(19): siRNA sense strand
gaucuacccuccugcuaua

SEQ ID NO: 800699 - RNA, 19 nt, Homo sapiens
  misc_RNA (1)...(19): siRNA sense strand
caaagauccuccuaaauug

SEQ ID NO: 800700 - RNA, 19 nt, Homo sapiens
  misc_RNA (1)...(19): siRNA sense strand
cuaaagaauugcugaagua

SEQ ID NO: 800701 - RNA, 19 nt, Homo sapiens
  misc_RNA (1)...(19): siRNA sense strand
gaagaagaagacaguaaua

SEQ ID NO: 800702 - RNA, 19 nt, Homo sapiens
  misc_RNA (1)...(19): siRNA sense strand
gcuauuaucucuuguuaca

SEQ ID NO: 800703 - RNA, 19 nt, Homo sapiens
  misc_RNA (1)...(19): siRNA sense strand
acaaagauccuccuaaauu

SEQ ID NO: 800704 - RNA, 19 nt, Homo sapiens
  misc_RNA (1)...(19): siRNA sense strand
gagucacacuuaagaauuu

SEQ ID NO: 800705 - RNA, 19 nt, Homo sapiens
  misc_RNA (1)...(19): siRNA sense strand
guauugccauguaccauua

SEQ ID NO: 800706 - RNA, 19 nt, Homo sapiens
  misc_RNA (1)...(19): siRNA sense strand
aaacgaauaucgaagaaug

SEQ ID NO: 800707 - RNA, 19 nt, Homo sapiens
  misc_RNA (1)...(19): siRNA sense strand
ggaaaccaauccucuggaa

SEQ ID NO: 800708 - RNA, 19 nt, Homo sapiens
  misc_RNA (1)...(19): siRNA sense strand
uaaagggagucacacuuaa

SEQ ID NO: 800709 - RNA, 19 nt, Homo sapiens
  misc_RNA (1)...(19): siRNA sense strand
guagagcaaugguagauau

SEQ ID NO: 800710 - RNA, 19 nt, Homo sapiens
  misc_RNA (1)...(19): siRNA sense strand
gagagaaacaguuagcuaa

SEQ ID NO: 800711 - RNA, 19 nt, Homo sapiens
  misc_RNA (1)...(19): siRNA sense strand
gagaaacaguuagcuaaug

SEQ ID NO: 800712 - RNA, 19 nt, Homo sapiens
  misc_RNA (1)...(19): siRNA sense strand
uagaagaucucagaaaugu

SEQ ID NO: 800713 - RNA, 19 nt, Homo sapiens
  misc_RNA (1)...(19): siRNA sense strand
gaaccuaauuccucaaguc

SEQ ID NO: 800714 - RNA, 19 nt, Homo sapiens
  misc_RNA (1)...(19): siRNA sense strand
ccuaauuccucaagucuaa

SEQ ID NO: 800715 - RNA, 19 nt, Homo sapiens
  misc_RNA (1)...(19): siRNA sense strand
ugaaguaucccgauugaaa

SEQ ID NO: 800716 - RNA, 19 nt, Homo sapiens
  misc_RNA (1)...(19): siRNA sense strand
gaauuugaguuaggauuga

SEQ ID NO: 800717 - RNA, 19 nt, Homo sapiens
  misc_RNA (1)...(19): siRNA sense strand
gaaagacuauuuaccuacu

SEQ ID NO: 800718 - RNA, 19 nt, Homo sapiens
  misc_RNA (1)...(19): siRNA sense strand
ggaaggaauauauagcuaa

SEQ ID NO: 800719 - RNA, 19 nt, Homo sapiens
  misc_RNA (1)...(19): siRNA sense strand
ggagaguguucuagcuauu

SEQ ID NO: 800720 - RNA, 19 nt, Homo sapiens
  misc_RNA (1)...(19): siRNA sense strand
gaagaagacaguaauagca

SEQ ID NO: 800721 - RNA, 19 nt, Homo sapiens
  misc_RNA (1)...(19): siRNA sense strand
gaucugaauugccuuuauc

SEQ ID NO: 800722 - RNA, 19 nt, Homo sapiens
  misc_RNA (1)...(19): siRNA sense strand
gagcaaugguagauauaau

SEQ ID NO: 800723 - RNA, 19 nt, Homo sapiens
  misc_RNA (1)...(19): siRNA sense strand
gaauaucgaagaauguuug

SEQ ID NO: 800724 - RNA, 19 nt, Homo sapiens
  misc_RNA (1)...(19): siRNA sense strand
gaaucaagaucacagaaac

SEQ ID NO: 800725 - RNA, 19 nt, Homo sapiens
  misc_RNA (1)...(19): siRNA sense strand
ucacauuguuggaugcuaa

SEQ ID NO: 800726 - RNA, 19 nt, Homo sapiens
  misc_RNA (1)...(19): siRNA sense strand
cugcuaauguuguaucuuu

SEQ ID NO: 800727 - RNA, 19 nt, Homo sapiens
  misc_RNA (1)...(19): siRNA sense strand
uuaaagggagucacacuua

SEQ ID NO: 800728 - RNA, 19 nt, Homo sapiens
  misc_RNA (1)...(19): siRNA sense strand
ccagaaagccacaaacaga

SEQ ID NO: 800729 - RNA, 19 nt, Homo sapiens
  misc_RNA (1)...(19): siRNA sense strand
gaagaagccaaauugaguu

SEQ ID NO: 800730 - RNA, 19 nt, Homo sapiens
  misc_RNA (1)...(19): siRNA sense strand
gacagaagaagccaaauug

SEQ ID NO: 800731 - RNA, 19 nt, Homo sapiens
  misc_RNA (1)...(19): siRNA sense strand
gaucauaccaucaaaggau

SEQ ID NO: 800732 - RNA, 19 nt, Homo sapiens
  misc_RNA (1)...(19): siRNA sense strand
ugaagaagcugcagaaaau

SEQ ID NO: 800733 - RNA, 19 nt, Homo sapiens
  misc_RNA (1)...(19): siRNA sense strand
ggucuuaccuuuugagaaa

SEQ ID NO: 800734 - RNA, 19 nt, Homo sapiens
  misc_RNA (1)...(19): siRNA sense strand
ugaaguacuuuaccucaga

SEQ ID NO: 800735 - RNA, 19 nt, Homo sapiens
  misc_RNA (1)...(19): siRNA sense strand
aagaauugcugaaguacuu

SEQ ID NO: 800736 - RNA, 19 nt, Homo sapiens
  misc_RNA (1)...(19): siRNA sense strand
gcuaaagaauugcugaagu

SEQ ID NO: 800737 - RNA, 19 nt, Homo sapiens
  misc_RNA (1)...(19): siRNA sense strand
acaguuagcuaauguucaa

SEQ ID NO: 800738 - RNA, 19 nt, Homo sapiens
  misc_RNA (1)...(19): siRNA sense strand
ugucggauauugaauuuga

SEQ ID NO: 800739 - RNA, 19 nt, Homo sapiens
  misc_RNA (1)...(19): siRNA sense strand
uggcugaucucuaugaaga

SEQ ID NO: 800740 - RNA, 19 nt, Homo sapiens
  misc_RNA (1)...(19): siRNA sense strand
ggaaucaagaucacagaaa

SEQ ID NO: 800741 - RNA, 19 nt, Homo sapiens
  misc_RNA (1)...(19): siRNA sense strand
gcauuagugcuucaauuaa

SEQ ID NO: 800742 - RNA, 19 nt, Homo sapiens
  misc_RNA (1)...(19): siRNA sense strand
gaaaggcauguucuucaaa

SEQ ID NO: 800743 - RNA, 19 nt, Homo sapiens
  misc_RNA (1)...(19): siRNA sense strand
gaguuaggauugacaaaca

SEQ ID NO: 800744 - RNA, 19 nt, Homo sapiens
  misc_RNA (1)...(19): siRNA sense strand
ggagucacacuuaagaauu

SEQ ID NO: 800745 - RNA, 19 nt, Homo sapiens
  misc_RNA (1)...(19): siRNA sense strand
gaauuugugcagaugauaa

SEQ ID NO: 800746 - RNA, 19 nt, Homo sapiens
  misc_RNA (1)...(19): siRNA sense strand
cugaagaaacacaguauua

SEQ ID NO: 800747 - RNA, 19 nt, Homo sapiens
  misc_RNA (1)...(19): siRNA sense strand
caaggcaaauuaaggaauc

SEQ ID NO: 800748 - RNA, 19 nt, Homo sapiens
  misc_RNA (1)...(19): siRNA sense strand
ucagacaacugguaauagu

SEQ ID NO: 800749 - RNA, 19 nt, Homo sapiens
  misc_RNA (1)...(19): siRNA sense strand
caaagcagccugaaacagu

SEQ ID NO: 800750 - RNA, 19 nt, Homo sapiens
  misc_RNA (1)...(19): siRNA sense strand
acagagagagaaacaguua

SEQ ID NO: 800751 - RNA, 19 nt, Homo sapiens
  misc_RNA (1)...(19): siRNA sense strand
gagaguguucuagcuauua

SEQ ID NO: 800752 - RNA, 19 nt, Homo sapiens
  misc_RNA (1)...(19): siRNA sense strand
gauaugggaaagaaaguuu

SEQ ID NO: 800753 - RNA, 19 nt, Homo sapiens
  misc_RNA (1)...(19): siRNA sense strand
uuggagaucuucaaccuuu

SEQ ID NO: 800754 - RNA, 19 nt, Homo sapiens
  misc_RNA (1)...(19): siRNA sense strand
ucaaacgaauaucgaagaa

SEQ ID NO: 800755 - RNA, 19 nt, Homo sapiens
  misc_RNA (1)...(19): siRNA sense strand
gacgaaaguuggcaaagca

SEQ ID NO: 800756 - RNA, 19 nt, Homo sapiens
  misc_RNA (1)...(19): siRNA sense strand
agaaacaguuagcuaaugu

SEQ ID NO: 800757 - RNA, 19 nt, Homo sapiens
  misc_RNA (1)...(19): siRNA sense strand
cagcaaagaucacuauagc

SEQ ID NO: 800758 - RNA, 19 nt, Homo sapiens
  misc_RNA (1)...(19): siRNA sense strand
gagaaagccucaguauguc

SEQ ID NO: 800759 - RNA, 19 nt, Homo sapiens
  misc_RNA (1)...(19): siRNA sense strand
auacagauaugggaaagaa

SEQ ID NO: 800760 - RNA, 19 nt, Homo sapiens
  misc_RNA (1)...(19): siRNA sense strand
ucacagcagcaaauguuua

SEQ ID NO: 800761 - RNA, 19 nt, Homo sapiens
  misc_RNA (1)...(19): siRNA sense strand
aaacacacacggauacuga

SEQ ID NO: 800762 - RNA, 19 nt, Homo sapiens
  misc_RNA (1)...(19): siRNA sense strand
guuggaugcuaaagaauug

SEQ ID NO: 800763 - RNA, 19 nt, Homo sapiens
  misc_RNA (1)...(19): siRNA sense strand
ggacuucacagcagcaaau

SEQ ID NO: 800764 - RNA, 19 nt, Homo sapiens
  misc_RNA (1)...(19): siRNA sense strand
ggugauugacuggguauua

SEQ ID NO: 800765 - RNA, 19 nt, Homo sapiens
  misc_RNA (1)...(19): siRNA sense strand
acacacggauacugaaaga

SEQ ID NO: 800766 - RNA, 19 nt, Homo sapiens
  misc_RNA (1)...(19): siRNA sense strand
gcaaauuaaggaaucaaga

SEQ ID NO: 800767 - RNA, 19 nt, Homo sapiens
  misc_RNA (1)...(19): siRNA sense strand
agucucgucuuauucguua

SEQ ID NO: 800768 - RNA, 19 nt, Homo sapiens
  misc_RNA (1)...(19): siRNA sense strand
gaauugcugaaguacuuua

SEQ ID NO: 800769 - RNA, 19 nt, Homo sapiens
  misc_RNA (1)...(19): siRNA sense strand
gcaggaaaucauugugaaa

SEQ ID NO: 800770 - RNA, 19 nt, Homo sapiens
  misc_RNA (1)...(19): siRNA sense strand
aaacaacaaugcuguacag

SEQ ID NO: 800771 - RNA, 19 nt, Homo sapiens
  misc_RNA (1)...(19): siRNA sense strand
gaaguacuuuaccucagau

SEQ ID NO: 800772 - RNA, 19 nt, Homo sapiens
  misc_RNA (1)...(19): siRNA sense strand
ugccaaagguuuuccauua

SEQ ID NO: 800773 - RNA, 19 nt, Homo sapiens
  misc_RNA (1)...(19): siRNA sense strand
gaauaccuuucugcuaaug

SEQ ID NO: 800774 - RNA, 19 nt, Homo sapiens
  misc_RNA (1)...(19): siRNA sense strand
aaagcagccugaaacaguu

SEQ ID NO: 800775 - RNA, 19 nt, Homo sapiens
  misc_RNA (1)...(19): siRNA sense strand
gcagccagcgucucuuuga

SEQ ID NO: 800776 - RNA, 19 nt, Homo sapiens
  misc_RNA (1)...(19): siRNA sense strand
cugaaacccugaagaaaca

SEQ ID NO: 800777 - RNA, 19 nt, Homo sapiens
  misc_RNA (1)...(19): siRNA sense strand
agacaacugguaauaguaa

SEQ ID NO: 800778 - RNA, 19 nt, Homo sapiens
  misc_RNA (1)...(19): siRNA sense strand
aaaccaauccucuggaaug

SEQ ID NO: 800779 - RNA, 19 nt, Homo sapiens
  misc_RNA (1)...(19): siRNA sense strand
uaccgagacucaugaaugu

SEQ ID NO: 800780 - RNA, 19 nt, Homo sapiens
  misc_RNA (1)...(19): siRNA sense strand
aaagacuugugaaaucuga

SEQ ID NO: 800781 - RNA, 19 nt, Homo sapiens
  misc_RNA (1)...(19): siRNA sense strand
guaauagcagggaaucauu

SEQ ID NO: 800782 - RNA, 19 nt, Homo sapiens
  misc_RNA (1)...(19): siRNA sense strand
gcaggcaauauauggauuu

SEQ ID NO: 800783 - RNA, 19 nt, Homo sapiens
  misc_RNA (1)...(19): siRNA sense strand
aaaaugaacuucgaacuga

SEQ ID NO: 800784 - RNA, 19 nt, Homo sapiens
  misc_RNA (1)...(19): siRNA sense strand
ugggaaacuucaggucuua

SEQ ID NO: 800785 - RNA, 19 nt, Homo sapiens
  misc_RNA (1)...(19): siRNA sense strand
ggagcagauuguacagaga

SEQ ID NO: 800786 - RNA, 19 nt, Homo sapiens
  misc_RNA (1)...(19): siRNA sense strand
gaguuuuccuuuugacuua

SEQ ID NO: 800787 - RNA, 19 nt, Homo sapiens
  misc_RNA (1)...(19): siRNA sense strand
gcucauuugcacucaauuu

SEQ ID NO: 800788 - RNA, 19 nt, Homo sapiens
  misc_RNA (1)...(19): siRNA sense strand
gguaauggcaauagaagau

SEQ ID NO: 800789 - RNA, 19 nt, Homo sapiens
  misc_RNA (1)...(19): siRNA sense strand
gaaaagacaagcaagaaau

SEQ ID NO: 800790 - RNA, 19 nt, Homo sapiens
  misc_RNA (1)...(19): siRNA sense strand
ccagagaacuuccugauug

SEQ ID NO: 800791 - RNA, 19 nt, Homo sapiens
  misc_RNA (1)...(19): siRNA sense strand
acucaaggcugacacauua

SEQ ID NO: 800792 - RNA, 19 nt, Homo sapiens
  misc_RNA (1)...(19): siRNA sense strand
cgacuggacuucuuugaaa

SEQ ID NO: 800793 - RNA, 19 nt, Homo sapiens
  misc_RNA (1)...(19): siRNA sense strand
gaccgaacauuuacuuuga

SEQ ID NO: 800794 - RNA, 19 nt, Homo sapiens
  misc_RNA (1)...(19): siRNA sense strand
cgagaaagccacacacaua

SEQ ID NO: 800795 - RNA, 19 nt, Homo sapiens
  misc_RNA (1)...(19): siRNA sense strand
gagcaaagccggagagaug

SEQ ID NO: 800796 - RNA, 19 nt, Homo sapiens
  misc_RNA (1)...(19): siRNA sense strand
gaaagacaacggacaacua

SEQ ID NO: 800797 - RNA, 19 nt, Homo sapiens
  misc_RNA (1)...(19): siRNA sense strand
caaccuaccuucgauaugu

SEQ ID NO: 800798 - RNA, 19 nt, Homo sapiens
  misc_RNA (1)...(19): siRNA sense strand
ggccauauguucauguauu

SEQ ID NO: 800799 - RNA, 19 nt, Homo sapiens
  misc_RNA (1)...(19): siRNA sense strand
cagaggagauggcaaccua

SEQ ID NO: 800800 - RNA, 19 nt, Homo sapiens
  misc_RNA (1)...(19): siRNA sense strand
ggagagcucagauuaggua

SEQ ID NO: 800801 - RNA, 19 nt, Homo sapiens
  misc_RNA (1)...(19): siRNA sense strand
gaagacgguguuaaugaua

SEQ ID NO: 800802 - RNA, 19 nt, Homo sapiens
  misc_RNA (1)...(19): siRNA sense strand
caacacgcaucuuggcaaa

SEQ ID NO: 800803 - RNA, 19 nt, Homo sapiens
  misc_RNA (1)...(19): siRNA sense strand
gaaagagcauguuauacac

SEQ ID NO: 800804 - RNA, 19 nt, Homo sapiens
  misc_RNA (1)...(19): siRNA sense strand
ucacagaccucuuugaaaa

SEQ ID NO: 800805 - RNA, 19 nt, Homo sapiens
  misc_RNA (1)...(19): siRNA sense strand
uaacuggaacugcaagaua

SEQ ID NO: 800806 - RNA, 19 nt, Homo sapiens
  misc_RNA (1)...(19): siRNA sense strand
ggacuuguuugaccucugu

SEQ ID NO: 800807 - RNA, 19 nt, Homo sapiens
  misc_RNA (1)...(19): siRNA sense strand
gccauauguucauguauuu

SEQ ID NO: 800808 - RNA, 19 nt, Homo sapiens
  misc_RNA (1)...(19): siRNA sense strand
uggaauacgugcacucaaa

SEQ ID NO: 800809 - RNA, 19 nt, Homo sapiens
  misc_RNA (1)...(19): siRNA sense strand
caaugaauauguagcaauc

SEQ ID NO: 800810 - RNA, 19 nt, Homo sapiens
  misc_RNA (1)...(19): siRNA sense strand
ggaaaaggaugaaagacaa

SEQ ID NO: 800811 - RNA, 19 nt, Homo sapiens
  misc_RNA (1)...(19): siRNA sense strand
ccggagagaugauuuggaa

SEQ ID NO: 800812 - RNA, 19 nt, Homo sapiens
  misc_RNA (1)...(19): siRNA sense strand
gaccaugugggaaauauaa

SEQ ID NO: 800813 - RNA, 19 nt, Homo sapiens
  misc_RNA (1)...(19): siRNA sense strand
gauaggaugugggaacuuc

SEQ ID NO: 800814 - RNA, 19 nt, Homo sapiens
  misc_RNA (1)...(19): siRNA sense strand
ccacagguguauuacuuug

SEQ ID NO: 800815 - RNA, 19 nt, Homo sapiens
  misc_RNA (1)...(19): siRNA sense strand
acucaaagaaccucauuua

SEQ ID NO: 800816 - RNA, 19 nt, Homo sapiens
  misc_RNA (1)...(19): siRNA sense strand
gcaauaagaaagagcaugu

SEQ ID NO: 800817 - RNA, 19 nt, Homo sapiens
  misc_RNA (1)...(19): siRNA sense strand
aaagacaacggacaacuaa

SEQ ID NO: 800818 - RNA, 19 nt, Homo sapiens
  misc_RNA (1)...(19): siRNA sense strand
gcacacugcucucgaccau

SEQ ID NO: 800819 - RNA, 19 nt, Homo sapiens
  misc_RNA (1)...(19): siRNA sense strand
caaucaaacuggaaccaau

SEQ ID NO: 800820 - RNA, 19 nt, Homo sapiens
  misc_RNA (1)...(19): siRNA sense strand
agaaagagcauguuauaca

SEQ ID NO: 800821 - RNA, 19 nt, Homo sapiens
  misc_RNA (1)...(19): siRNA sense strand
gaaccucauuuaccgagau

SEQ ID NO: 800822 - RNA, 19 nt, Homo sapiens
  misc_RNA (1)...(19): siRNA sense strand
ugaagacgguguuaaugau

SEQ ID NO: 800823 - RNA, 19 nt, Homo sapiens
  misc_RNA (1)...(19): siRNA sense strand
caacagcagccucuucgaa

SEQ ID NO: 800824 - RNA, 19 nt, Homo sapiens
  misc_RNA (1)...(19): siRNA sense strand
ggaaauauaaugccauggu

SEQ ID NO: 800825 - RNA, 19 nt, Homo sapiens
  misc_RNA (1)...(19): siRNA sense strand
gcugagcauuaugauguua

SEQ ID NO: 800826 - RNA, 19 nt, Homo sapiens
  misc_RNA (1)...(19): siRNA sense strand
gagaaagccacacacauag

SEQ ID NO: 800827 - RNA, 19 nt, Homo sapiens
  misc_RNA (1)...(19): siRNA sense strand
cuccacagcuucauuuaga

SEQ ID NO: 800828 - RNA, 19 nt, Homo sapiens
  misc_RNA (1)...(19): siRNA sense strand
cagcugagcauuaugaugu

SEQ ID NO: 800829 - RNA, 19 nt, Homo sapiens
  misc_RNA (1)...(19): siRNA sense strand
gaugaaagacaacggacaa

SEQ ID NO: 800830 - RNA, 19 nt, Homo sapiens
  misc_RNA (1)...(19): siRNA sense strand
gaacauuuacuuugaagac

SEQ ID NO: 800831 - RNA, 19 nt, Homo sapiens
  misc_RNA (1)...(19): siRNA sense strand
aaaggaauacucccauuga

SEQ ID NO: 800832 - RNA, 19 nt, Homo sapiens
  misc_RNA (1)...(19): siRNA sense strand
gagcucagauuagguaaaa

SEQ ID NO: 800833 - RNA, 19 nt, Homo sapiens
  misc_RNA (1)...(19): siRNA sense strand
gaacuucggagagcucaga

SEQ ID NO: 800834 - RNA, 19 nt, Homo sapiens
  misc_RNA (1)...(19): siRNA sense strand
gacaaggcaauaagaaaga

SEQ ID NO: 800835 - RNA, 19 nt, Homo sapiens
  misc_RNA (1)...(19): siRNA sense strand
cuucggagagcucagauua

SEQ ID NO: 800836 - RNA, 19 nt, Homo sapiens
  misc_RNA (1)...(19): siRNA sense strand
ggagauggcaaccuaccuu

SEQ ID NO: 800837 - RNA, 19 nt, Homo sapiens
  misc_RNA (1)...(19): siRNA sense strand
guucauguauuuccuucga

SEQ ID NO: 800838 - RNA, 19 nt, Homo sapiens
  misc_RNA (1)...(19): siRNA sense strand
gcacucaaagaaccucauu

SEQ ID NO: 800839 - RNA, 19 nt, Homo sapiens
  misc_RNA (1)...(19): siRNA sense strand
ggaacugcaagauauaugu

SEQ ID NO: 800840 - RNA, 19 nt, Homo sapiens
  misc_RNA (1)...(19): siRNA sense strand
gcauuaugauguuaacaac

SEQ ID NO: 800841 - RNA, 19 nt, Homo sapiens
  misc_RNA (1)...(19): siRNA sense strand
aaucaaacuggaaccaaua

SEQ ID NO: 800842 - RNA, 19 nt, Homo sapiens
  misc_RNA (1)...(19): siRNA sense strand
ggaccaugugggaaauaua

SEQ ID NO: 800843 - RNA, 19 nt, Homo sapiens
  misc_RNA (1)...(19): siRNA sense strand
ucccacagguguauuacuu

SEQ ID NO: 800844 - RNA, 19 nt, Homo sapiens
  misc_RNA (1)...(19): siRNA sense strand
gaauacgugcacucaaaga

SEQ ID NO: 800845 - RNA, 19 nt, Homo sapiens
  misc_RNA (1)...(19): siRNA sense strand
acacugcucucgaccaucu

SEQ ID NO: 800846 - RNA, 19 nt, Homo sapiens
  misc_RNA (1)...(19): siRNA sense strand
cgacaaggcaauaagaaag

SEQ ID NO: 800847 - RNA, 19 nt, Homo sapiens
  misc_RNA (1)...(19): siRNA sense strand
ugaccgaacauuuacuuug

SEQ ID NO: 800848 - RNA, 19 nt, Homo sapiens
  misc_RNA (1)...(19): siRNA sense strand
guuaacaacucagccaucu

SEQ ID NO: 800849 - RNA, 19 nt, Homo sapiens
  misc_RNA (1)...(19): siRNA sense strand
uuacagcugagcauuauga

SEQ ID NO: 800850 - RNA, 19 nt, Homo sapiens
  misc_RNA (1)...(19): siRNA sense strand
guugggagaccuauuccua

SEQ ID NO: 800851 - RNA, 19 nt, Homo sapiens
  misc_RNA (1)...(19): siRNA sense strand
aaggaauacucccauugaa

SEQ ID NO: 800852 - RNA, 19 nt, Homo sapiens
  misc_RNA (1)...(19): siRNA sense strand
caaaaggaauacucccauu

SEQ ID NO: 800853 - RNA, 19 nt, Homo sapiens
  misc_RNA (1)...(19): siRNA sense strand
uagcuuggaggacuuguuu

SEQ ID NO: 800854 - RNA, 19 nt, Homo sapiens
  misc_RNA (1)...(19): siRNA sense strand
cgaaaucagagccuuagga

SEQ ID NO: 800855 - RNA, 19 nt, Homo sapiens
  misc_RNA (1)...(19): siRNA sense strand
ccauugaagcucucuguga

SEQ ID NO: 800856 - RNA, 19 nt, Homo sapiens
  misc_RNA (1)...(19): siRNA sense strand
uaggccauauguucaugua

SEQ ID NO: 800857 - RNA, 19 nt, Homo sapiens
  misc_RNA (1)...(19): siRNA sense strand
cagagaacuuccugauugg

SEQ ID NO: 800858 - RNA, 19 nt, Homo sapiens
  misc_RNA (1)...(19): siRNA sense strand
guauuacuuuggaccaugu

SEQ ID NO: 800859 - RNA, 19 nt, Homo sapiens
  misc_RNA (1)...(19): siRNA sense strand
ugcaauaacucgagaaagc

SEQ ID NO: 800860 - RNA, 19 nt, Homo sapiens
  misc_RNA (1)...(19): siRNA sense strand
gaacuuuccagaggagaug

SEQ ID NO: 800861 - RNA, 19 nt, Homo sapiens
  misc_RNA (1)...(19): siRNA sense strand
gcaaucaaacuggaaccaa

SEQ ID NO: 800862 - RNA, 19 nt, Homo sapiens
  misc_RNA (1)...(19): siRNA sense strand
uguuacagcugagcauuau

SEQ ID NO: 800863 - RNA, 19 nt, Homo sapiens
  misc_RNA (1)...(19): siRNA sense strand
aacuggaacugcaagauau

SEQ ID NO: 800864 - RNA, 19 nt, Homo sapiens
  misc_RNA (1)...(19): siRNA sense strand
gcugcuuucucgaauggaa

SEQ ID NO: 800865 - RNA, 19 nt, Homo sapiens
  misc_RNA (1)...(19): siRNA sense strand
acagguguauuacuuugga

SEQ ID NO: 800866 - RNA, 19 nt, Homo sapiens
  misc_RNA (1)...(19): siRNA sense strand
ggaauacgugcacucaaag

SEQ ID NO: 800867 - RNA, 19 nt, Homo sapiens
  misc_RNA (1)...(19): siRNA sense strand
gaauauguagcaaucaaac

SEQ ID NO: 800868 - RNA, 19 nt, Homo sapiens
  misc_RNA (1)...(19): siRNA sense strand
ccucuucacagaccucuuu

SEQ ID NO: 800869 - RNA, 19 nt, Homo sapiens
  misc_RNA (1)...(19): siRNA sense strand
gaacugcaagauauauguc

SEQ ID NO: 800870 - RNA, 19 nt, Homo sapiens
  misc_RNA (1)...(19): siRNA sense strand
gcuuggaggacuuguuuga

SEQ ID NO: 800871 - RNA, 19 nt, Homo sapiens
  misc_RNA (1)...(19): siRNA sense strand
gcgacuggacuucuuugaa

SEQ ID NO: 800872 - RNA, 19 nt, Homo sapiens
  misc_RNA (1)...(19): siRNA sense strand
cuaaacccauggcacaaag

SEQ ID NO: 800873 - RNA, 19 nt, Homo sapiens
  misc_RNA (1)...(19): siRNA sense strand
ucaaggcugacacauuaaa

SEQ ID NO: 800874 - RNA, 19 nt, Homo sapiens
  misc_RNA (1)...(19): siRNA sense strand
ggucgacaaggcaauaaga

SEQ ID NO: 800875 - RNA, 19 nt, Homo sapiens
  misc_RNA (1)...(19): siRNA sense strand
ucaaagaaccucauuuacc

SEQ ID NO: 800876 - RNA, 19 nt, Homo sapiens
  misc_RNA (1)...(19): siRNA sense strand
acagcagccucuucgaaau

SEQ ID NO: 800877 - RNA, 19 nt, Homo sapiens
  misc_RNA (1)...(19): siRNA sense strand
ggucaguucacguagauuc

SEQ ID NO: 800878 - RNA, 19 nt, Homo sapiens
  misc_RNA (1)...(19): siRNA sense strand
uugaagacgguguuaauga

SEQ ID NO: 800879 - RNA, 19 nt, Homo sapiens
  misc_RNA (1)...(19): siRNA sense strand
ugacuaugccuaugauugg

SEQ ID NO: 800880 - RNA, 19 nt, Homo sapiens
  misc_RNA (1)...(19): siRNA sense strand
ucaggcgacuggacuucuu

SEQ ID NO: 800881 - RNA, 19 nt, Homo sapiens
  misc_RNA (1)...(19): siRNA sense strand
ucucuacaccaaugaauau

SEQ ID NO: 800882 - RNA, 19 nt, Homo sapiens
  misc_RNA (1)...(19): siRNA sense strand
cagcugcuuucucgaaugg

SEQ ID NO: 800883 - RNA, 19 nt, Homo sapiens
  misc_RNA (1)...(19): siRNA sense strand
gccagagaacuuccugauu

SEQ ID NO: 800884 - RNA, 19 nt, Homo sapiens
  misc_RNA (1)...(19): siRNA sense strand
uacggacccucuucacaga

SEQ ID NO: 800885 - RNA, 19 nt, Homo sapiens
  misc_RNA (1)...(19): siRNA sense strand
gcaaccuaccuucgauaug

SEQ ID NO: 800886 - RNA, 19 nt, Homo sapiens
  misc_RNA (1)...(19): siRNA sense strand
gcugacacauuaaaagaga

SEQ ID NO: 800887 - RNA, 19 nt, Homo sapiens
  misc_RNA (1)...(19): siRNA sense strand
ccucugugaccgaacauuu

SEQ ID NO: 800888 - RNA, 19 nt, Homo sapiens
  misc_RNA (1)...(19): siRNA sense strand
gauggcaaccuaccuucga

SEQ ID NO: 800889 - RNA, 19 nt, Homo sapiens
  misc_RNA (1)...(19): siRNA sense strand
gacucaaggcugacacauu

SEQ ID NO: 800890 - RNA, 19 nt, Homo sapiens
  misc_RNA (1)...(19): siRNA sense strand
ccaacggcauggucaucua

SEQ ID NO: 800891 - RNA, 19 nt, Homo sapiens
  misc_RNA (1)...(19): siRNA sense strand
cagcaacgccuucauugug

SEQ ID NO: 800892 - RNA, 19 nt, Homo sapiens
  misc_RNA (1)...(19): siRNA sense strand
cggugucacuccuguauuc

SEQ ID NO: 800893 - RNA, 19 nt, Homo sapiens
  misc_RNA (1)...(19): siRNA sense strand
ccaccuaccaggcgcugua

SEQ ID NO: 800894 - RNA, 19 nt, Homo sapiens
  misc_RNA (1)...(19): siRNA sense strand
agcaacgccuucauuguga

SEQ ID NO: 800895 - RNA, 19 nt, Homo sapiens
  misc_RNA (1)...(19): siRNA sense strand
caacggcauggucaucuau

SEQ ID NO: 800896 - RNA, 19 nt, Homo sapiens
  misc_RNA (1)...(19): siRNA sense strand
caccagcaacgccuucauu

SEQ ID NO: 800897 - RNA, 19 nt, Homo sapiens
  misc_RNA (1)...(19): siRNA sense strand
ggucagcgugcucaacuuc

SEQ ID NO: 800898 - RNA, 19 nt, Homo sapiens
  misc_RNA (1)...(19): siRNA sense strand
gaaccgcuaccugcucauc

SEQ ID NO: 800899 - RNA, 19 nt, Homo sapiens
  misc_RNA (1)...(19): siRNA sense strand
ccagcaacgccuucauugu

SEQ ID NO: 800900 - RNA, 19 nt, Homo sapiens
  misc_RNA (1)...(19): siRNA sense strand
caagguaaguggagguaua

SEQ ID NO: 800901 - RNA, 19 nt, Homo sapiens
  misc_RNA (1)...(19): siRNA sense strand
ggagguauacuucgaauuu

SEQ ID NO: 800902 - RNA, 19 nt, Homo sapiens
  misc_RNA (1)...(19): siRNA sense strand
ucgcaacccucaugaagua

SEQ ID NO: 800903 - RNA, 19 nt, Homo sapiens
  misc_RNA (1)...(19): siRNA sense strand
gaacaagcacggcaucugu

SEQ ID NO: 800904 - RNA, 19 nt, Homo sapiens
  misc_RNA (1)...(19): siRNA sense strand
caauaaaccuucagauucg

SEQ ID NO: 800905 - RNA, 19 nt, Homo sapiens
  misc_RNA (1)...(19): siRNA sense strand
gcgauaagaucaccuggau

SEQ ID NO: 800906 - RNA, 19 nt, Homo sapiens
  misc_RNA (1)...(19): siRNA sense strand
gcuacaagguacgcaauaa

SEQ ID NO: 800907 - RNA, 19 nt, Homo sapiens
  misc_RNA (1)...(19): siRNA sense strand
ggagauggaagauguguga

SEQ ID NO: 800908 - RNA, 19 nt, Homo sapiens
  misc_RNA (1)...(19): siRNA sense strand
ucaauaaaccuucagauuc

SEQ ID NO: 800909 - RNA, 19 nt, Homo sapiens
  misc_RNA (1)...(19): siRNA sense strand
cgcaauaacuguuugguau

SEQ ID NO: 800910 - RNA, 19 nt, Homo sapiens
  misc_RNA (1)...(19): siRNA sense strand
agacugggaugccaaggua

SEQ ID NO: 800911 - RNA, 19 nt, Homo sapiens
  misc_RNA (1)...(19): siRNA sense strand
ccaguuugcugacauugaa

SEQ ID NO: 800912 - RNA, 19 nt, Homo sapiens
  misc_RNA (1)...(19): siRNA sense strand
cagcauggacgaccugaua

SEQ ID NO: 800913 - RNA, 19 nt, Homo sapiens
  misc_RNA (1)...(19): siRNA sense strand
aaauggagauggaagaugu

SEQ ID NO: 800914 - RNA, 19 nt, Homo sapiens
  misc_RNA (1)...(19): siRNA sense strand
ugacauugaacccaaauuu

SEQ ID NO: 800915 - RNA, 19 nt, Homo sapiens
  misc_RNA (1)...(19): siRNA sense strand
gaugagagagcacgagcua

SEQ ID NO: 800916 - RNA, 19 nt, Homo sapiens
  misc_RNA (1)...(19): siRNA sense strand
caauggaacggguuaugua

SEQ ID NO: 800917 - RNA, 19 nt, Homo sapiens
  misc_RNA (1)...(19): siRNA sense strand
ugagagagcacgagcuaaa

SEQ ID NO: 800918 - RNA, 19 nt, Homo sapiens
  misc_RNA (1)...(19): siRNA sense strand
gagagcacgagcuaaagua

SEQ ID NO: 800919 - RNA, 19 nt, Homo sapiens
  misc_RNA (1)...(19): siRNA sense strand
cagauucggucgguaaaga

SEQ ID NO: 800920 - RNA, 19 nt, Homo sapiens
  misc_RNA (1)...(19): siRNA sense strand
gacauugaacccaaauuug

SEQ ID NO: 800921 - RNA, 19 nt, Homo sapiens
  misc_RNA (1)...(19): siRNA sense strand
gaacccaaauuugauagac

SEQ ID NO: 800922 - RNA, 19 nt, Homo sapiens
  misc_RNA (1)...(19): siRNA sense strand
gaccugauacgccacugua

SEQ ID NO: 800923 - RNA, 19 nt, Homo sapiens
  misc_RNA (1)...(19): siRNA sense strand
gagcacgagcuaaaguaaa

SEQ ID NO: 800924 - RNA, 19 nt, Homo sapiens
  misc_RNA (1)...(19): siRNA sense strand
acauugaacccaaauuuga

SEQ ID NO: 800925 - RNA, 19 nt, Homo sapiens
  misc_RNA (1)...(19): siRNA sense strand
gcaauggaacggguuaugu

SEQ ID NO: 800926 - RNA, 19 nt, Homo sapiens
  misc_RNA (1)...(19): siRNA sense strand
gcacgacaccgggaaguuc

SEQ ID NO: 800927 - RNA, 19 nt, Homo sapiens
  misc_RNA (1)...(19): siRNA sense strand
gaaguacaaccagcauaug

SEQ ID NO: 800928 - RNA, 19 nt, Homo sapiens
  misc_RNA (1)...(19): siRNA sense strand
ugaaguacaaccagcauau

SEQ ID NO: 800929 - RNA, 19 nt, Homo sapiens
  misc_RNA (1)...(19): siRNA sense strand
ggagaaggcgaaccuguac

SEQ ID NO: 800930 - RNA, 19 nt, Homo sapiens
  misc_RNA (1)...(19): siRNA sense strand
caagguacgcaauaacugu

SEQ ID NO: 800931 - RNA, 19 nt, Homo sapiens
  misc_RNA (1)...(19): siRNA sense strand
gguacgcaauaacuguuug

SEQ ID NO: 800932 - RNA, 19 nt, Homo sapiens
  misc_RNA (1)...(19): siRNA sense strand
ccauugggcugcucaugag

SEQ ID NO: 800933 - RNA, 19 nt, Homo sapiens
  misc_RNA (1)...(19): siRNA sense strand
gaagcuggcgcucgaguac

SEQ ID NO: 800934 - RNA, 19 nt, Homo sapiens
  misc_RNA (1)...(19): siRNA sense strand
caacccucaugaaguacaa

SEQ ID NO: 800935 - RNA, 19 nt, Homo sapiens
  misc_RNA (1)...(19): siRNA sense strand
ggacauccgaggcgauaag

SEQ ID NO: 800936 - RNA, 19 nt, Homo sapiens
  misc_RNA (1)...(19): siRNA sense strand
gguuauguacgucauguug

SEQ ID NO: 800937 - RNA, 19 nt, Homo sapiens
  misc_RNA (1)...(19): siRNA sense strand
gcgggaagauggagaaccu

SEQ ID NO: 800938 - RNA, 19 nt, Homo sapiens
  misc_RNA (1)...(19): siRNA sense strand
cucaauaaaccuucagauu

SEQ ID NO: 800939 - RNA, 19 nt, Homo sapiens
  misc_RNA (1)...(19): siRNA sense strand
gagguauacuucgaauuuu

SEQ ID NO: 800940 - RNA, 19 nt, Homo sapiens
  misc_RNA (1)...(19): siRNA sense strand
uuauguacgucauguugau

SEQ ID NO: 800941 - RNA, 19 nt, Homo sapiens
  misc_RNA (1)...(19): siRNA sense strand
agaaggcaaagcccaguuu

SEQ ID NO: 800942 - RNA, 19 nt, Homo sapiens
  misc_RNA (1)...(19): siRNA sense strand
aggagaaggcgaaccugua

SEQ ID NO: 800943 - RNA, 19 nt, Homo sapiens
  misc_RNA (1)...(19): siRNA sense strand
cauccgaggcgauaagauc

SEQ ID NO: 800944 - RNA, 19 nt, Homo sapiens
  misc_RNA (1)...(19): siRNA sense strand
caaauggagauggaagaug

SEQ ID NO: 800945 - RNA, 19 nt, Homo sapiens
  misc_RNA (1)...(19): siRNA sense strand
cuucagauucggucgguaa

SEQ ID NO: 800946 - RNA, 19 nt, Homo sapiens
  misc_RNA (1)...(19): siRNA sense strand
guggagguauacuucgaau

SEQ ID NO: 800947 - RNA, 19 nt, Homo sapiens
  misc_RNA (1)...(19): siRNA sense strand
gaccgucgcaacccucaug

SEQ ID NO: 800948 - RNA, 19 nt, Homo sapiens
  misc_RNA (1)...(19): siRNA sense strand
agagcacgagcuaaaguaa

SEQ ID NO: 800949 - RNA, 19 nt, Homo sapiens
  misc_RNA (1)...(19): siRNA sense strand
agccaugguugcuuguuau

SEQ ID NO: 800950 - RNA, 19 nt, Homo sapiens
  misc_RNA (1)...(19): siRNA sense strand
ugaagcuggcgcucgagua

SEQ ID NO: 800951 - RNA, 19 nt, Homo sapiens
  misc_RNA (1)...(19): siRNA sense strand
caucgcuguuccaggagaa

SEQ ID NO: 800952 - RNA, 19 nt, Homo sapiens
  misc_RNA (1)...(19): siRNA sense strand
uggaacggguuauguacgu

SEQ ID NO: 800953 - RNA, 19 nt, Homo sapiens
  misc_RNA (1)...(19): siRNA sense strand
gagagagcacgagcuaaag

SEQ ID NO: 800954 - RNA, 19 nt, Homo sapiens
  misc_RNA (1)...(19): siRNA sense strand
ccaaauggagauggaagau

SEQ ID NO: 800955 - RNA, 19 nt, Homo sapiens
  misc_RNA (1)...(19): siRNA sense strand
guuauguacgucauguuga

SEQ ID NO: 800956 - RNA, 19 nt, Homo sapiens
  misc_RNA (1)...(19): siRNA sense strand
gaagauggaucaauagaaa

SEQ ID NO: 800957 - RNA, 19 nt, Homo sapiens
  misc_RNA (1)...(19): siRNA sense strand
gaacaacuaugaugugaaa

SEQ ID NO: 800958 - RNA, 19 nt, Homo sapiens
  misc_RNA (1)...(19): siRNA sense strand
ggaauacacucuccauaaa

SEQ ID NO: 800959 - RNA, 19 nt, Homo sapiens
  misc_RNA (1)...(19): siRNA sense strand
caaugaagauggaucaaua

SEQ ID NO: 800960 - RNA, 19 nt, Homo sapiens
  misc_RNA (1)...(19): siRNA sense strand
caacacagcugguaucuag

SEQ ID NO: 800961 - RNA, 19 nt, Homo sapiens
  misc_RNA (1)...(19): siRNA sense strand
caacaagccuccacagauu

SEQ ID NO: 800962 - RNA, 19 nt, Homo sapiens
  misc_RNA (1)...(19): siRNA sense strand
ccagagagcugaaugaaga

SEQ ID NO: 800963 - RNA, 19 nt, Homo sapiens
  misc_RNA (1)...(19): siRNA sense strand
cauaaucccuggaagcuua

SEQ ID NO: 800964 - RNA, 19 nt, Homo sapiens
  misc_RNA (1)...(19): siRNA sense strand
ccagaaaccuuaaucaaga

SEQ ID NO: 800965 - RNA, 19 nt, Homo sapiens
  misc_RNA (1)...(19): siRNA sense strand
aaacaggccuucagaacua

SEQ ID NO: 800966 - RNA, 19 nt, Homo sapiens
  misc_RNA (1)...(19): siRNA sense strand
ggacaccaauucaaucaaa

SEQ ID NO: 800967 - RNA, 19 nt, Homo sapiens
  misc_RNA (1)...(19): siRNA sense strand
gaccuucccuugcuuuaua

SEQ ID NO: 800968 - RNA, 19 nt, Homo sapiens
  misc_RNA (1)...(19): siRNA sense strand
gggauugucuuacagcaua

SEQ ID NO: 800969 - RNA, 19 nt, Homo sapiens
  misc_RNA (1)...(19): siRNA sense strand
agaaagagauggccacuau

SEQ ID NO: 800970 - RNA, 19 nt, Homo sapiens
  misc_RNA (1)...(19): siRNA sense strand
gguaagggcuggucacaga

SEQ ID NO: 800971 - RNA, 19 nt, Homo sapiens
  misc_RNA (1)...(19): siRNA sense strand
gaggugaacuguugcaaug

SEQ ID NO: 800972 - RNA, 19 nt, Homo sapiens
  misc_RNA (1)...(19): siRNA sense strand
ccaaacagcuccugcuuca

SEQ ID NO: 800973 - RNA, 19 nt, Homo sapiens
  misc_RNA (1)...(19): siRNA sense strand
gguauagacccaacuguua

SEQ ID NO: 800974 - RNA, 19 nt, Homo sapiens
  misc_RNA (1)...(19): siRNA sense strand
gagaagggauugucuuaca

SEQ ID NO: 800975 - RNA, 19 nt, Homo sapiens
  misc_RNA (1)...(19): siRNA sense strand
gcauaguggugauaauuga

SEQ ID NO: 800976 - RNA, 19 nt, Homo sapiens
  misc_RNA (1)...(19): siRNA sense strand
caaauugccuguacacaca

SEQ ID NO: 800977 - RNA, 19 nt, Homo sapiens
  misc_RNA (1)...(19): siRNA sense strand
aagcaaagaucaaaccauu

SEQ ID NO: 800978 - RNA, 19 nt, Homo sapiens
  misc_RNA (1)...(19): siRNA sense strand
caaaugguccugauaagaa

SEQ ID NO: 800979 - RNA, 19 nt, Homo sapiens
  misc_RNA (1)...(19): siRNA sense strand
gcaaugggaucucacucaa

SEQ ID NO: 800980 - RNA, 19 nt, Homo sapiens
  misc_RNA (1)...(19): siRNA sense strand
ucagggagcuucaccauca

SEQ ID NO: 800981 - RNA, 19 nt, Homo sapiens
  misc_RNA (1)...(19): siRNA sense strand
ggagaagccuuugacauca

SEQ ID NO: 800982 - RNA, 19 nt, Homo sapiens
  misc_RNA (1)...(19): siRNA sense strand
aaacggcucucucaaccua

SEQ ID NO: 800983 - RNA, 19 nt, Homo sapiens
  misc_RNA (1)...(19): siRNA sense strand
gaaagggucucuggcuuca

SEQ ID NO: 800984 - RNA, 19 nt, Homo sapiens
  misc_RNA (1)...(19): siRNA sense strand
gaaugaaccggaaguagaa

SEQ ID NO: 800985 - RNA, 19 nt, Homo sapiens
  misc_RNA (1)...(19): siRNA sense strand
gaagaugugucugcugaug

SEQ ID NO: 800986 - RNA, 19 nt, Homo sapiens
  misc_RNA (1)...(19): siRNA sense strand
gggcauacggccaagauua

SEQ ID NO: 800987 - RNA, 19 nt, Homo sapiens
  misc_RNA (1)...(19): siRNA sense strand
gaaauacacccucuucagu

SEQ ID NO: 800988 - RNA, 19 nt, Homo sapiens
  misc_RNA (1)...(19): siRNA sense strand
cccaagagcuccuucagaa

SEQ ID NO: 800989 - RNA, 19 nt, Homo sapiens
  misc_RNA (1)...(19): siRNA sense strand
gauccagacugcaucuauu

SEQ ID NO: 800990 - RNA, 19 nt, Homo sapiens
  misc_RNA (1)...(19): siRNA sense strand
gcugguaucugcuuccuau

SEQ ID NO: 800991 - RNA, 19 nt, Homo sapiens
  misc_RNA (1)...(19): siRNA sense strand
gaaauacggcaacacgaaa

SEQ ID NO: 800992 - RNA, 19 nt, Homo sapiens
  misc_RNA (1)...(19): siRNA sense strand
cuacaaggauggcauagug

SEQ ID NO: 800993 - RNA, 19 nt, Homo sapiens
  misc_RNA (1)...(19): siRNA sense strand
ggauagagauguaaaaugu

SEQ ID NO: 800994 - RNA, 19 nt, Homo sapiens
  misc_RNA (1)...(19): siRNA sense strand
gaucaaaccauucgaaucu

SEQ ID NO: 800995 - RNA, 19 nt, Homo sapiens
  misc_RNA (1)...(19): siRNA sense strand
gcacauaucauaagaagac

SEQ ID NO: 800996 - RNA, 19 nt, Homo sapiens
  misc_RNA (1)...(19): siRNA sense strand
uagaacggcugcagaguug

SEQ ID NO: 800997 - RNA, 19 nt, Homo sapiens
  misc_RNA (1)...(19): siRNA sense strand
cuacaucaauggauagaga

SEQ ID NO: 800998 - RNA, 19 nt, Homo sapiens
  misc_RNA (1)...(19): siRNA sense strand
guacccaucugcuacaaau

SEQ ID NO: 800999 - RNA, 19 nt, Homo sapiens
  misc_RNA (1)...(19): siRNA sense strand
gggcuacccuguauagaau

SEQ ID NO: 801000 - RNA, 19 nt, Homo sapiens
  misc_RNA (1)...(19): siRNA sense strand
gaaagcagauggcaaaauc

SEQ ID NO: 801001 - RNA, 19 nt, Homo sapiens
  misc_RNA (1)...(19): siRNA sense strand
ggcgugaaguccaagguua

SEQ ID NO: 801002 - RNA, 19 nt, Homo sapiens
  misc_RNA (1)...(19): siRNA sense strand
gaaaggagagguuauucau

SEQ ID NO: 801003 - RNA, 19 nt, Homo sapiens
  misc_RNA (1)...(19): siRNA sense strand
gaagaaacggacccugaaa

SEQ ID NO: 801004 - RNA, 19 nt, Homo sapiens
  misc_RNA (1)...(19): siRNA sense strand
ggaaguguacucagccuuu

SEQ ID NO: 801005 - RNA, 19 nt, Homo sapiens
  misc_RNA (1)...(19): siRNA sense strand
uaacacaccugccaaacag

SEQ ID NO: 801006 - RNA, 19 nt, Homo sapiens
  misc_RNA (1)...(19): siRNA sense strand
gaaccguccuagaaagaga

SEQ ID NO: 801007 - RNA, 19 nt, Homo sapiens
  misc_RNA (1)...(19): siRNA sense strand
aaacugaucuguacuaucc

SEQ ID NO: 801008 - RNA, 19 nt, Homo sapiens
  misc_RNA (1)...(19): siRNA sense strand
cagggaagcuauugcgauu

SEQ ID NO: 801009 - RNA, 19 nt, Homo sapiens
  misc_RNA (1)...(19): siRNA sense strand
ugauggaaaugaagaagaa

SEQ ID NO: 801010 - RNA, 19 nt, Homo sapiens
  misc_RNA (1)...(19): siRNA sense strand
caaggaagguugcuuagcu

SEQ ID NO: 801011 - RNA, 19 nt, Homo sapiens
  misc_RNA (1)...(19): siRNA sense strand
gcaaaugguccugauaaga

SEQ ID NO: 801012 - RNA, 19 nt, Homo sapiens
  misc_RNA (1)...(19): siRNA sense strand
gaaaaggucacuuagaaaa

SEQ ID NO: 801013 - RNA, 19 nt, Homo sapiens
  misc_RNA (1)...(19): siRNA sense strand
gaagacuguauauacguua

SEQ ID NO: 801014 - RNA, 19 nt, Homo sapiens
  misc_RNA (1)...(19): siRNA sense strand
aaggagagguuauucauag

SEQ ID NO: 801015 - RNA, 19 nt, Homo sapiens
  misc_RNA (1)...(19): siRNA sense strand
caagagcuccuucagaaau

SEQ ID NO: 801016 - RNA, 19 nt, Homo sapiens
  misc_RNA (1)...(19): siRNA sense strand
caaggcugcuucucaccua

SEQ ID NO: 801017 - RNA, 19 nt, Homo sapiens
  misc_RNA (1)...(19): siRNA sense strand
uggaaucgauugauggaaa

SEQ ID NO: 801018 - RNA, 19 nt, Homo sapiens
  misc_RNA (1)...(19): siRNA sense strand
guauagacccaacuguuaa

SEQ ID NO: 801019 - RNA, 19 nt, Homo sapiens
  misc_RNA (1)...(19): siRNA sense strand
gccagcaccucuuuauaga

SEQ ID NO: 801020 - RNA, 19 nt, Homo sapiens
  misc_RNA (1)...(19): siRNA sense strand
cagcaaaugguccugauaa

SEQ ID NO: 801021 - RNA, 19 nt, Homo sapiens
  misc_RNA (1)...(19): siRNA sense strand
gaggaugaguugucugcuu

SEQ ID NO: 801022 - RNA, 19 nt, Homo sapiens
  misc_RNA (1)...(19): siRNA sense strand
gcagcuggcuaccaugugu

SEQ ID NO: 801023 - RNA, 19 nt, Homo sapiens
  misc_RNA (1)...(19): siRNA sense strand
ccaaagaggagcuucauca

SEQ ID NO: 801024 - RNA, 19 nt, Homo sapiens
  misc_RNA (1)...(19): siRNA sense strand
ggaaucgauugauggaaau

SEQ ID NO: 801025 - RNA, 19 nt, Homo sapiens
  misc_RNA (1)...(19): siRNA sense strand
aaucauggcucuuggcaau

SEQ ID NO: 801026 - RNA, 19 nt, Homo sapiens
  misc_RNA (1)...(19): siRNA sense strand
cauaggcucuuuggccaua

SEQ ID NO: 801027 - RNA, 19 nt, Homo sapiens
  misc_RNA (1)...(19): siRNA sense strand
aaacagaggaugacaaaca

SEQ ID NO: 801028 - RNA, 19 nt, Homo sapiens
  misc_RNA (1)...(19): siRNA sense strand
aacaaaagguugcuacuua

SEQ ID NO: 801029 - RNA, 19 nt, Homo sapiens
  misc_RNA (1)...(19): siRNA sense strand
aaacggacccugaaacuuc

SEQ ID NO: 801030 - RNA, 19 nt, Homo sapiens
  misc_RNA (1)...(19): siRNA sense strand
acacagagauaaguuggaa

SEQ ID NO: 801031 - RNA, 19 nt, Homo sapiens
  misc_RNA (1)...(19): siRNA sense strand
gaaauuaccaacgggaaug

SEQ ID NO: 801032 - RNA, 19 nt, Homo sapiens
  misc_RNA (1)...(19): siRNA sense strand
aagagcuccuucagaaaua

SEQ ID NO: 801033 - RNA, 19 nt, Homo sapiens
  misc_RNA (1)...(19): siRNA sense strand
gagccaguguaaagaagaa

SEQ ID NO: 801034 - RNA, 19 nt, Homo sapiens
  misc_RNA (1)...(19): siRNA sense strand
gagcgaaugcugaguacuu

SEQ ID NO: 801035 - RNA, 19 nt, Homo sapiens
  misc_RNA (1)...(19): siRNA sense strand
gaacaucaaguacccaucu

SEQ ID NO: 801036 - RNA, 19 nt, Homo sapiens
  misc_RNA (1)...(19): siRNA sense strand
cagaaaccuuaaucaagaa

SEQ ID NO: 801037 - RNA, 19 nt, Homo sapiens
  misc_RNA (1)...(19): siRNA sense strand
ucacuuccaugcaagauca

SEQ ID NO: 801038 - RNA, 19 nt, Homo sapiens
  misc_RNA (1)...(19): siRNA sense strand
uaagaagacuguauauacg

SEQ ID NO: 801039 - RNA, 19 nt, Homo sapiens
  misc_RNA (1)...(19): siRNA sense strand
ccacagauuucuagcacau

SEQ ID NO: 801040 - RNA, 19 nt, Homo sapiens
  misc_RNA (1)...(19): siRNA sense strand
gcuguuacuuucuacauca

SEQ ID NO: 801041 - RNA, 19 nt, Homo sapiens
  misc_RNA (1)...(19): siRNA sense strand
aaauugcccuuucugaaga

SEQ ID NO: 801042 - RNA, 19 nt, Homo sapiens
  misc_RNA (1)...(19): siRNA sense strand
aauacacucuccauaaaga

SEQ ID NO: 801043 - RNA, 19 nt, Homo sapiens
  misc_RNA (1)...(19): siRNA sense strand
gcagcugcaugaaagucua

SEQ ID NO: 801044 - RNA, 19 nt, Homo sapiens
  misc_RNA (1)...(19): siRNA sense strand
aaagugggauuguaugaca

SEQ ID NO: 801045 - RNA, 19 nt, Homo sapiens
  misc_RNA (1)...(19): siRNA sense strand
gaaguguacucagccuuuc

SEQ ID NO: 801046 - RNA, 19 nt, Homo sapiens
  misc_RNA (1)...(19): siRNA sense strand
uaagaaaggagagguuauu

SEQ ID NO: 801047 - RNA, 19 nt, Homo sapiens
  misc_RNA (1)...(19): siRNA sense strand
agaagaaggugagcgaaug

SEQ ID NO: 801048 - RNA, 19 nt, Homo sapiens
  misc_RNA (1)...(19): siRNA sense strand
gaaaggggaucucaaaggu

SEQ ID NO: 801049 - RNA, 19 nt, Homo sapiens
  misc_RNA (1)...(19): siRNA sense strand
aagaaagcaugaaggagaa

SEQ ID NO: 801050 - RNA, 19 nt, Homo sapiens
  misc_RNA (1)...(19): siRNA sense strand
acauuggucuccucgagua

SEQ ID NO: 801051 - RNA, 19 nt, Homo sapiens
  misc_RNA (1)...(19): siRNA sense strand
agagaagccagaaaccuua

SEQ ID NO: 801052 - RNA, 19 nt, Homo sapiens
  misc_RNA (1)...(19): siRNA sense strand
cuugagaacuccuguaaag

SEQ ID NO: 801053 - RNA, 19 nt, Homo sapiens
  misc_RNA (1)...(19): siRNA sense strand
uagcacauaucauaagaag

SEQ ID NO: 801054 - RNA, 19 nt, Homo sapiens
  misc_RNA (1)...(19): siRNA sense strand
gaaacggacccugaaacuu

SEQ ID NO: 801055 - RNA, 19 nt, Homo sapiens
  misc_RNA (1)...(19): siRNA sense strand
ucgaguaaaggacuuaaua

SEQ ID NO: 801056 - RNA, 19 nt, Homo sapiens
  misc_RNA (1)...(19): siRNA sense strand
ggaagaaacuugugcagau

SEQ ID NO: 801057 - RNA, 19 nt, Homo sapiens
  misc_RNA (1)...(19): siRNA sense strand
gugcacaggugguagauua

SEQ ID NO: 801058 - RNA, 19 nt, Homo sapiens
  misc_RNA (1)...(19): siRNA sense strand
gaaggaggccggugacuuu

SEQ ID NO: 801059 - RNA, 19 nt, Homo sapiens
  misc_RNA (1)...(19): siRNA sense strand
gcaagucuguggcccauga

SEQ ID NO: 801060 - RNA, 19 nt, Homo sapiens
  misc_RNA (1)...(19): siRNA sense strand
acagggagcugaagaagaa

SEQ ID NO: 801061 - RNA, 19 nt, Homo sapiens
  misc_RNA (1)...(19): siRNA sense strand
gaagaaacuugugcagaug

SEQ ID NO: 801062 - RNA, 19 nt, Homo sapiens
  misc_RNA (1)...(19): siRNA sense strand
gagcaggccuguauucucu

SEQ ID NO: 801063 - RNA, 19 nt, Homo sapiens
  misc_RNA (1)...(19): siRNA sense strand
gcgcuucgcuucacuaugg

SEQ ID NO: 801064 - RNA, 19 nt, Homo sapiens
  misc_RNA (1)...(19): siRNA sense strand
acucagagaugaagaaguu

SEQ ID NO: 801065 - RNA, 19 nt, Homo sapiens
  misc_RNA (1)...(19): siRNA sense strand
gaagaaguuuguccugaag

SEQ ID NO: 801066 - RNA, 19 nt, Homo sapiens
  misc_RNA (1)...(19): siRNA sense strand
gcaaacagcggaugagcaa

SEQ ID NO: 801067 - RNA, 19 nt, Homo sapiens
  misc_RNA (1)...(19): siRNA sense strand
gcagaaagugucagucauu

SEQ ID NO: 801068 - RNA, 19 nt, Homo sapiens
  misc_RNA (1)...(19): siRNA sense strand
gugaagcccuugccaguga

SEQ ID NO: 801069 - RNA, 19 nt, Homo sapiens
  misc_RNA (1)...(19): siRNA sense strand
ggacaacgacuucauuuac

SEQ ID NO: 801070 - RNA, 19 nt, Homo sapiens
  misc_RNA (1)...(19): siRNA sense strand
gcaugaaggucuccuguac

SEQ ID NO: 801071 - RNA, 19 nt, Homo sapiens
  misc_RNA (1)...(19): siRNA sense strand
ugaagaaguuuguccugaa

SEQ ID NO: 801072 - RNA, 19 nt, Homo sapiens
  misc_RNA (1)...(19): siRNA sense strand
caaugaagccaucaaguug

SEQ ID NO: 801073 - RNA, 19 nt, Homo sapiens
  misc_RNA (1)...(19): siRNA sense strand
gaagaauuauggagagaac

SEQ ID NO: 801074 - RNA, 19 nt, Homo sapiens
  misc_RNA (1)...(19): siRNA sense strand
gagcuuauccagaaagaug

SEQ ID NO: 801075 - RNA, 19 nt, Homo sapiens
  misc_RNA (1)...(19): siRNA sense strand
ggaggaggaugagcugcua

SEQ ID NO: 801076 - RNA, 19 nt, Homo sapiens
  misc_RNA (1)...(19): siRNA sense strand
uaaagcgcauccuggcuaa

SEQ ID NO: 801077 - RNA, 19 nt, Homo sapiens
  misc_RNA (1)...(19): siRNA sense strand
ugaagaagcuggaguugcu

SEQ ID NO: 801078 - RNA, 19 nt, Homo sapiens
  misc_RNA (1)...(19): siRNA sense strand
gaugagcaagcauaacuuu

SEQ ID NO: 801079 - RNA, 19 nt, Homo sapiens
  misc_RNA (1)...(19): siRNA sense strand
ucaaugaagccaucaaguu

SEQ ID NO: 801080 - RNA, 19 nt, Homo sapiens
  misc_RNA (1)...(19): siRNA sense strand
gcaagcaucagccagaaga

SEQ ID NO: 801081 - RNA, 19 nt, Homo sapiens
  misc_RNA (1)...(19): siRNA sense strand
guaguguccuccgcaagua

SEQ ID NO: 801082 - RNA, 19 nt, Homo sapiens
  misc_RNA (1)...(19): siRNA sense strand
gcacgcacauuaccugcau

SEQ ID NO: 801083 - RNA, 19 nt, Homo sapiens
  misc_RNA (1)...(19): siRNA sense strand
gaaagugucagucauuguc

SEQ ID NO: 801084 - RNA, 19 nt, Homo sapiens
  misc_RNA (1)...(19): siRNA sense strand
gagcagaaagugucaguca

SEQ ID NO: 801085 - RNA, 19 nt, Homo sapiens
  misc_RNA (1)...(19): siRNA sense strand
ggacaaggccgugcugcaa

SEQ ID NO: 801086 - RNA, 19 nt, Homo sapiens
  misc_RNA (1)...(19): siRNA sense strand
gagaugauggccaagauug

SEQ ID NO: 801087 - RNA, 19 nt, Homo sapiens
  misc_RNA (1)...(19): siRNA sense strand
cagaaagugucagucauug

SEQ ID NO: 801088 - RNA, 19 nt, Homo sapiens
  misc_RNA (1)...(19): siRNA sense strand
agaagucgauguuggacaa

SEQ ID NO: 801089 - RNA, 19 nt, Homo sapiens
  misc_RNA (1)...(19): siRNA sense strand
cagaaggacuggaagaaac

SEQ ID NO: 801090 - RNA, 19 nt, Homo sapiens
  misc_RNA (1)...(19): siRNA sense strand
gagcaagcauaacuuucug

SEQ ID NO: 801091 - RNA, 19 nt, Homo sapiens
  misc_RNA (1)...(19): siRNA sense strand
gagaaugggccaaguacau

SEQ ID NO: 801092 - RNA, 19 nt, Homo sapiens
  misc_RNA (1)...(19): siRNA sense strand
ccagaagccuacaaugaag

SEQ ID NO: 801093 - RNA, 19 nt, Homo sapiens
  misc_RNA (1)...(19): siRNA sense strand
ggagcggguugcauacuuc

SEQ ID NO: 801094 - RNA, 19 nt, Homo sapiens
  misc_RNA (1)...(19): siRNA sense strand
gaacccagaagccuacaau

SEQ ID NO: 801095 - RNA, 19 nt, Homo sapiens
  misc_RNA (1)...(19): siRNA sense strand
gggagcggguugcauacuu

SEQ ID NO: 801096 - RNA, 19 nt, Homo sapiens
  misc_RNA (1)...(19): siRNA sense strand
aguuuguccugaagaauua

SEQ ID NO: 801097 - RNA, 19 nt, Homo sapiens
  misc_RNA (1)...(19): siRNA sense strand
acgcagaucuggagagcaa

SEQ ID NO: 801098 - RNA, 19 nt, Homo sapiens
  misc_RNA (1)...(19): siRNA sense strand
augaggaccugaugaagaa

SEQ ID NO: 801099 - RNA, 19 nt, Homo sapiens
  misc_RNA (1)...(19): siRNA sense strand
agaaguuuguccugaagaa

SEQ ID NO: 801100 - RNA, 19 nt, Homo sapiens
  misc_RNA (1)...(19): siRNA sense strand
gcacagcaccacuucucuu

SEQ ID NO: 801101 - RNA, 19 nt, Homo sapiens
  misc_RNA (1)...(19): siRNA sense strand
ccacagaccacucagagau

SEQ ID NO: 801102 - RNA, 19 nt, Homo sapiens
  misc_RNA (1)...(19): siRNA sense strand
ugcgugagcuuauccagaa

SEQ ID NO: 801103 - RNA, 19 nt, Homo sapiens
  misc_RNA (1)...(19): siRNA sense strand
gggagaugauggccaagau

SEQ ID NO: 801104 - RNA, 19 nt, Homo sapiens
  misc_RNA (1)...(19): siRNA sense strand
ggagaugauggccaagauu

SEQ ID NO: 801105 - RNA, 19 nt, Homo sapiens
  misc_RNA (1)...(19): siRNA sense strand
ccgaggagcagcagaaguu

SEQ ID NO: 801106 - RNA, 19 nt, Homo sapiens
  misc_RNA (1)...(19): siRNA sense strand
ggugagcagucccuaugug

SEQ ID NO: 801107 - RNA, 19 nt, Homo sapiens
  misc_RNA (1)...(19): siRNA sense strand
ccaagaaggacaacgacuu

SEQ ID NO: 801108 - RNA, 19 nt, Homo sapiens
  misc_RNA (1)...(19): siRNA sense strand
cccagaagccuacaaugaa

SEQ ID NO: 801109 - RNA, 19 nt, Homo sapiens
  misc_RNA (1)...(19): siRNA sense strand
gacaaggccgugcugcaaa

SEQ ID NO: 801110 - RNA, 19 nt, Homo sapiens
  misc_RNA (1)...(19): siRNA sense strand
gcccugagccuggcauuga

SEQ ID NO: 801111 - RNA, 19 nt, Homo sapiens
  misc_RNA (1)...(19): siRNA sense strand
cagcaccacuucucuucug

SEQ ID NO: 801112 - RNA, 19 nt, Homo sapiens
  misc_RNA (1)...(19): siRNA sense strand
acagaccacucagagauga

SEQ ID NO: 801113 - RNA, 19 nt, Homo sapiens
  misc_RNA (1)...(19): siRNA sense strand
uggcuaaggugcaggagau

SEQ ID NO: 801114 - RNA, 19 nt, Homo sapiens
  misc_RNA (1)...(19): siRNA sense strand
uggaauugcuggccuccuu

SEQ ID NO: 801115 - RNA, 19 nt, Homo sapiens
  misc_RNA (1)...(19): siRNA sense strand
cccaugaggacaucaagua

SEQ ID NO: 801116 - RNA, 19 nt, Homo sapiens
  misc_RNA (1)...(19): siRNA sense strand
cagcggaugagcaagcaua

SEQ ID NO: 801117 - RNA, 19 nt, Homo sapiens
  misc_RNA (1)...(19): siRNA sense strand
gcaugcggcagcagagaaa

SEQ ID NO: 801118 - RNA, 19 nt, Homo sapiens
  misc_RNA (1)...(19): siRNA sense strand
gaagaaccggcaccaggau

SEQ ID NO: 801119 - RNA, 19 nt, Homo sapiens
  misc_RNA (1)...(19): siRNA sense strand
ggagagugaggcaguggaa

SEQ ID NO: 801120 - RNA, 19 nt, Homo sapiens
  misc_RNA (1)...(19): siRNA sense strand
ugaaggacaucagagaucu

SEQ ID NO: 801121 - RNA, 19 nt, Homo sapiens
  misc_RNA (1)...(19): siRNA sense strand
caagugcugucaggugugu

SEQ ID NO: 801122 - RNA, 19 nt, Homo sapiens
  misc_RNA (1)...(19): siRNA sense strand
agauugaggacaagaauga

SEQ ID NO: 801123 - RNA, 19 nt, Homo sapiens
  misc_RNA (1)...(19): siRNA sense strand
caagauugaggacaagaau

SEQ ID NO: 801124 - RNA, 19 nt, Homo sapiens
  misc_RNA (1)...(19): siRNA sense strand
cacaggugguagauuacua

SEQ ID NO: 801125 - RNA, 19 nt, Homo sapiens
  misc_RNA (1)...(19): siRNA sense strand
ggacaacaggaagagcuuu

SEQ ID NO: 801126 - RNA, 19 nt, Homo sapiens
  misc_RNA (1)...(19): siRNA sense strand
ggacuucuacgcagaucug

SEQ ID NO: 801127 - RNA, 19 nt, Homo sapiens
  misc_RNA (1)...(19): siRNA sense strand
uaugaggaccugaugaaga

SEQ ID NO: 801128 - RNA, 19 nt, Homo sapiens
  misc_RNA (1)...(19): siRNA sense strand
ggacacucuucagccugua

SEQ ID NO: 801129 - RNA, 19 nt, Homo sapiens
  misc_RNA (1)...(19): siRNA sense strand
agaaacuugugcagaugaa

SEQ ID NO: 801130 - RNA, 19 nt, Homo sapiens
  misc_RNA (1)...(19): siRNA sense strand
uggccaagauugaggacaa

SEQ ID NO: 801131 - RNA, 19 nt, Homo sapiens
  misc_RNA (1)...(19): siRNA sense strand
gugcaagcaucagccagaa

SEQ ID NO: 801132 - RNA, 19 nt, Homo sapiens
  misc_RNA (1)...(19): siRNA sense strand
ccacuuggccugaguuagg

SEQ ID NO: 801133 - RNA, 19 nt, Homo sapiens
  misc_RNA (1)...(19): siRNA sense strand
gcucaggcaaggaugacua

SEQ ID NO: 801134 - RNA, 19 nt, Homo sapiens
  misc_RNA (1)...(19): siRNA sense strand
gcagaggugaggcgagaau

SEQ ID NO: 801135 - RNA, 19 nt, Homo sapiens
  misc_RNA (1)...(19): siRNA sense strand
aggcugagauggagaagca

SEQ ID NO: 801136 - RNA, 19 nt, Homo sapiens
  misc_RNA (1)...(19): siRNA sense strand
aagaugcgcaggaacauga

SEQ ID NO: 801137 - RNA, 19 nt, Homo sapiens
  misc_RNA (1)...(19): siRNA sense strand
ugggagcucuggacacugu

SEQ ID NO: 801138 - RNA, 19 nt, Homo sapiens
  misc_RNA (1)...(19): siRNA sense strand
gaucuucucaggcaagucu

SEQ ID NO: 801139 - RNA, 19 nt, Homo sapiens
  misc_RNA (1)...(19): siRNA sense strand
gaauugcuggccuccuuga

SEQ ID NO: 801140 - RNA, 19 nt, Homo sapiens
  misc_RNA (1)...(19): siRNA sense strand
ugaucuggcuggaccugaa

SEQ ID NO: 801141 - RNA, 19 nt, Homo sapiens
  misc_RNA (1)...(19): siRNA sense strand
acaaugaagaacugaagaa

SEQ ID NO: 801142 - RNA, 19 nt, Homo sapiens
  misc_RNA (1)...(19): siRNA sense strand
ggacagggagcugaagaag

SEQ ID NO: 801143 - RNA, 19 nt, Homo sapiens
  misc_RNA (1)...(19): siRNA sense strand
gcaggccuguauucucuac

SEQ ID NO: 801144 - RNA, 19 nt, Homo sapiens
  misc_RNA (1)...(19): siRNA sense strand
gcccgcugcuacucacuga

SEQ ID NO: 801145 - RNA, 19 nt, Homo sapiens
  misc_RNA (1)...(19): siRNA sense strand
gacagggagcugaagaaga

SEQ ID NO: 801146 - RNA, 19 nt, Homo sapiens
  misc_RNA (1)...(19): siRNA sense strand
gugagcuuauccagaaaga

SEQ ID NO: 801147 - RNA, 19 nt, Homo sapiens
  misc_RNA (1)...(19): siRNA sense strand
augaagaacugaagaagcu

SEQ ID NO: 801148 - RNA, 19 nt, Homo sapiens
  misc_RNA (1)...(19): siRNA sense strand
gacaacgacuucauuuacc

SEQ ID NO: 801149 - RNA, 19 nt, Homo sapiens
  misc_RNA (1)...(19): siRNA sense strand
guacgagcaggccuguauu

SEQ ID NO: 801150 - RNA, 19 nt, Homo sapiens
  misc_RNA (1)...(19): siRNA sense strand
ccuaugaggaccugaugaa

SEQ ID NO: 801151 - RNA, 19 nt, Homo sapiens
  misc_RNA (1)...(19): siRNA sense strand
agccagcugugaagaaguu

SEQ ID NO: 801152 - RNA, 19 nt, Homo sapiens
  misc_RNA (1)...(19): siRNA sense strand
aaacuugugcagaugaaga

SEQ ID NO: 801153 - RNA, 19 nt, Homo sapiens
  misc_RNA (1)...(19): siRNA sense strand
gcucaacgucaaccucaug

SEQ ID NO: 801154 - RNA, 19 nt, Homo sapiens
  misc_RNA (1)...(19): siRNA sense strand
cgacaugagccgccagauc

SEQ ID NO: 801155 - RNA, 19 nt, Homo sapiens
  misc_RNA (1)...(19): siRNA sense strand
ggucuccuguacccauuuc

SEQ ID NO: 801156 - RNA, 19 nt, Homo sapiens
  misc_RNA (1)...(19): siRNA sense strand
ggaaagccuuggccaaaga

SEQ ID NO: 801157 - RNA, 19 nt, Homo sapiens
  misc_RNA (1)...(19): siRNA sense strand
caagaacaauuccucauuc

SEQ ID NO: 801158 - RNA, 19 nt, Homo sapiens
  misc_RNA (1)...(19): siRNA sense strand
ggacagcucacucugaauu

SEQ ID NO: 801159 - RNA, 19 nt, Homo sapiens
  misc_RNA (1)...(19): siRNA sense strand
ucuaugaacuggccacuuu

SEQ ID NO: 801160 - RNA, 19 nt, Homo sapiens
  misc_RNA (1)...(19): siRNA sense strand
gaacaauuccucauuccaa

SEQ ID NO: 801161 - RNA, 19 nt, Homo sapiens
  misc_RNA (1)...(19): siRNA sense strand
cagaaugaauacaguguuu

SEQ ID NO: 801162 - RNA, 19 nt, Homo sapiens
  misc_RNA (1)...(19): siRNA sense strand
gcaagaacaauuccucauu

SEQ ID NO: 801163 - RNA, 19 nt, Homo sapiens
  misc_RNA (1)...(19): siRNA sense strand
auacuggaguguagaauuu

SEQ ID NO: 801164 - RNA, 19 nt, Homo sapiens
  misc_RNA (1)...(19): siRNA sense strand
ggaaugagagugcagauag

SEQ ID NO: 801165 - RNA, 19 nt, Homo sapiens
  misc_RNA (1)...(19): siRNA sense strand
guacggagcacucaacaga

SEQ ID NO: 801166 - RNA, 19 nt, Homo sapiens
  misc_RNA (1)...(19): siRNA sense strand
gaauuuggaggcagaauga

SEQ ID NO: 801167 - RNA, 19 nt, Homo sapiens
  misc_RNA (1)...(19): siRNA sense strand
cuuaagcccucaaagauga

SEQ ID NO: 801168 - RNA, 19 nt, Homo sapiens
  misc_RNA (1)...(19): siRNA sense strand
gauaaggaauggcaagaac

SEQ ID NO: 801169 - RNA, 19 nt, Homo sapiens
  misc_RNA (1)...(19): siRNA sense strand
caaauuuggcucucauuga

SEQ ID NO: 801170 - RNA, 19 nt, Homo sapiens
  misc_RNA (1)...(19): siRNA sense strand
gaaugagagugcagauagu

SEQ ID NO: 801171 - RNA, 19 nt, Homo sapiens
  misc_RNA (1)...(19): siRNA sense strand
aaauuuggcucucauugau

SEQ ID NO: 801172 - RNA, 19 nt, Homo sapiens
  misc_RNA (1)...(19): siRNA sense strand
ggagacauaagucccauga

SEQ ID NO: 801173 - RNA, 19 nt, Homo sapiens
  misc_RNA (1)...(19): siRNA sense strand
aaacaagagagugagauua

SEQ ID NO: 801174 - RNA, 19 nt, Homo sapiens
  misc_RNA (1)...(19): siRNA sense strand
cagacaauacgauggaaua

SEQ ID NO: 801175 - RNA, 19 nt, Homo sapiens
  misc_RNA (1)...(19): siRNA sense strand
gguaccauggugcaaauua

SEQ ID NO: 801176 - RNA, 19 nt, Homo sapiens
  misc_RNA (1)...(19): siRNA sense strand
guaccauggugcaaauuag

SEQ ID NO: 801177 - RNA, 19 nt, Homo sapiens
  misc_RNA (1)...(19): siRNA sense strand
gauacuggaguguagaauu

SEQ ID NO: 801178 - RNA, 19 nt, Homo sapiens
  misc_RNA (1)...(19): siRNA sense strand
ggaaagugucaacuaccua

SEQ ID NO: 801179 - RNA, 19 nt, Homo sapiens
  misc_RNA (1)...(19): siRNA sense strand
uaaacaagagagugagauu

SEQ ID NO: 801180 - RNA, 19 nt, Homo sapiens
  misc_RNA (1)...(19): siRNA sense strand
ccuaguaucucagcagaau

SEQ ID NO: 801181 - RNA, 19 nt, Homo sapiens
  misc_RNA (1)...(19): siRNA sense strand
ccaugaggaucccagaguu

SEQ ID NO: 801182 - RNA, 19 nt, Homo sapiens
  misc_RNA (1)...(19): siRNA sense strand
acucugaauugguuggaua

SEQ ID NO: 801183 - RNA, 19 nt, Homo sapiens
  misc_RNA (1)...(19): siRNA sense strand
guucuuugguggaaugaga

SEQ ID NO: 801184 - RNA, 19 nt, Homo sapiens
  misc_RNA (1)...(19): siRNA sense strand
ggccaaagauaaggaaugg

SEQ ID NO: 801185 - RNA, 19 nt, Homo sapiens
  misc_RNA (1)...(19): siRNA sense strand
ucggacagcucacucugaa

SEQ ID NO: 801186 - RNA, 19 nt, Homo sapiens
  misc_RNA (1)...(19): siRNA sense strand
caagagagugagauuacuu

SEQ ID NO: 801187 - RNA, 19 nt, Homo sapiens
  misc_RNA (1)...(19): siRNA sense strand
aacaauuccucauuccaaa

SEQ ID NO: 801188 - RNA, 19 nt, Homo sapiens
  misc_RNA (1)...(19): siRNA sense strand
gcagaaugaauacaguguu

SEQ ID NO: 801189 - RNA, 19 nt, Homo sapiens
  misc_RNA (1)...(19): siRNA sense strand
gauaaacaagagagugaga

SEQ ID NO: 801190 - RNA, 19 nt, Homo sapiens
  misc_RNA (1)...(19): siRNA sense strand
uaaggaauggcaagaacaa

SEQ ID NO: 801191 - RNA, 19 nt, Homo sapiens
  misc_RNA (1)...(19): siRNA sense strand
acgauggaauauucuauga

SEQ ID NO: 801192 - RNA, 19 nt, Homo sapiens
  misc_RNA (1)...(19): siRNA sense strand
aagagagugagauuacuua

SEQ ID NO: 801193 - RNA, 19 nt, Homo sapiens
  misc_RNA (1)...(19): siRNA sense strand
cuacgggacccagacaaua

SEQ ID NO: 801194 - RNA, 19 nt, Homo sapiens
  misc_RNA (1)...(19): siRNA sense strand
gaauuucguucuuauuacc

SEQ ID NO: 801195 - RNA, 19 nt, Homo sapiens
  misc_RNA (1)...(19): siRNA sense strand
gaggcagaaugaauacagu

SEQ ID NO: 801196 - RNA, 19 nt, Homo sapiens
  misc_RNA (1)...(19): siRNA sense strand
caaaagaaggagucuauga

SEQ ID NO: 801197 - RNA, 19 nt, Homo sapiens
  misc_RNA (1)...(19): siRNA sense strand
gggaaagugucaacuaccu

SEQ ID NO: 801198 - RNA, 19 nt, Homo sapiens
  misc_RNA (1)...(19): siRNA sense strand
gaacuggccacuuuucaga

SEQ ID NO: 801199 - RNA, 19 nt, Homo sapiens
  misc_RNA (1)...(19): siRNA sense strand
ucugauuccuacaucguuu

SEQ ID NO: 801200 - RNA, 19 nt, Homo sapiens
  misc_RNA (1)...(19): siRNA sense strand
cauguucuuugguggaaug

SEQ ID NO: 801201 - RNA, 19 nt, Homo sapiens
  misc_RNA (1)...(19): siRNA sense strand
gagagugagauuacuuauc

SEQ ID NO: 801202 - RNA, 19 nt, Homo sapiens
  misc_RNA (1)...(19): siRNA sense strand
guuggauacuggaguguag

SEQ ID NO: 801203 - RNA, 19 nt, Homo sapiens
  misc_RNA (1)...(19): siRNA sense strand
uaguaucucagcagaauau

SEQ ID NO: 801204 - RNA, 19 nt, Homo sapiens
  misc_RNA (1)...(19): siRNA sense strand
uaccuuaagcccucaaaga

SEQ ID NO: 801205 - RNA, 19 nt, Homo sapiens
  misc_RNA (1)...(19): siRNA sense strand
agaaggagucuaugaacug

SEQ ID NO: 801206 - RNA, 19 nt, Homo sapiens
  misc_RNA (1)...(19): siRNA sense strand
auuuggcucucauugauaa

SEQ ID NO: 801207 - RNA, 19 nt, Homo sapiens
  misc_RNA (1)...(19): siRNA sense strand
gaaagccuuggccaaagau

SEQ ID NO: 801208 - RNA, 19 nt, Homo sapiens
  misc_RNA (1)...(19): siRNA sense strand
aagaaggagucuaugaacu

SEQ ID NO: 801209 - RNA, 19 nt, Homo sapiens
  misc_RNA (1)...(19): siRNA sense strand
uuuggaggcagaaugaaua

SEQ ID NO: 801210 - RNA, 19 nt, Homo sapiens
  misc_RNA (1)...(19): siRNA sense strand
gcagcugggagacauaagu

SEQ ID NO: 801211 - RNA, 19 nt, Homo sapiens
  misc_RNA (1)...(19): siRNA sense strand
cagaguucauguucuuugg

SEQ ID NO: 801212 - RNA, 19 nt, Homo sapiens
  misc_RNA (1)...(19): siRNA sense strand
aaaacuaguuggaguguuc

SEQ ID NO: 801213 - RNA, 19 nt, Homo sapiens
  misc_RNA (1)...(19): siRNA sense strand
aggaauggcaagaacaauu

SEQ ID NO: 801214 - RNA, 19 nt, Homo sapiens
  misc_RNA (1)...(19): siRNA sense strand
cggaaagccuuggccaaag

SEQ ID NO: 801215 - RNA, 19 nt, Homo sapiens
  misc_RNA (1)...(19): siRNA sense strand
ggaggcagaaugaauacag

SEQ ID NO: 801216 - RNA, 19 nt, Homo sapiens
  misc_RNA (1)...(19): siRNA sense strand
ccuggaaaauuuugagaaa

SEQ ID NO: 801217 - RNA, 19 nt, Homo sapiens
  misc_RNA (1)...(19): siRNA sense strand
ucggaaagccuuggccaaa

SEQ ID NO: 801218 - RNA, 19 nt, Homo sapiens
  misc_RNA (1)...(19): siRNA sense strand
ucucauugauaaacaagag

SEQ ID NO: 801219 - RNA, 19 nt, Homo sapiens
  misc_RNA (1)...(19): siRNA sense strand
gcuacgggacccagacaau

SEQ ID NO: 801220 - RNA, 19 nt, Homo sapiens
  misc_RNA (1)...(19): siRNA sense strand
gacagcucacucugaauug

SEQ ID NO: 801221 - RNA, 19 nt, Homo sapiens
  misc_RNA (1)...(19): siRNA sense strand
ucgggaaagugucaacuac

SEQ ID NO: 801222 - RNA, 19 nt, Homo sapiens
  misc_RNA (1)...(19): siRNA sense strand
aaagaaggagucuaugaac

SEQ ID NO: 801223 - RNA, 19 nt, Homo sapiens
  misc_RNA (1)...(19): siRNA sense strand
caugaggaucccagaguug

SEQ ID NO: 801224 - RNA, 19 nt, Homo sapiens
  misc_RNA (1)...(19): siRNA sense strand
ccauggugcaaauuagaaa

SEQ ID NO: 801225 - RNA, 19 nt, Homo sapiens
  misc_RNA (1)...(19): siRNA sense strand
aaaagaaggagucuaugaa

SEQ ID NO: 801226 - RNA, 19 nt, Homo sapiens
  misc_RNA (1)...(19): siRNA sense strand
uugauaaacaagagaguga

SEQ ID NO: 801227 - RNA, 19 nt, Homo sapiens
  misc_RNA (1)...(19): siRNA sense strand
gugcagcugggagacauaa

SEQ ID NO: 801228 - RNA, 19 nt, Homo sapiens
  misc_RNA (1)...(19): siRNA sense strand
acagaguucauguucuuug

SEQ ID NO: 801229 - RNA, 19 nt, Homo sapiens
  misc_RNA (1)...(19): siRNA sense strand
cgauggaauauucuaugaa

SEQ ID NO: 801230 - RNA, 19 nt, Homo sapiens
  misc_RNA (1)...(19): siRNA sense strand
ccuuaagcccucaaagaug

SEQ ID NO: 801231 - RNA, 19 nt, Homo sapiens
  misc_RNA (1)...(19): siRNA sense strand
gaagaaguaugaucuggaa

SEQ ID NO: 801232 - RNA, 19 nt, Homo sapiens
  misc_RNA (1)...(19): siRNA sense strand
guacgucggugguggagaa

SEQ ID NO: 801233 - RNA, 19 nt, Homo sapiens
  misc_RNA (1)...(19): siRNA sense strand
gcaacaagcugcgcaaguc

SEQ ID NO: 801234 - RNA, 19 nt, Homo sapiens
  misc_RNA (1)...(19): siRNA sense strand
gguacaagcugcacuccaa

SEQ ID NO: 801235 - RNA, 19 nt, Homo sapiens
  misc_RNA (1)...(19): siRNA sense strand
gcaagaagaaguaugaucu

SEQ ID NO: 801236 - RNA, 19 nt, Homo sapiens
  misc_RNA (1)...(19): siRNA sense strand
gcagugggcuggagaagcu

SEQ ID NO: 801237 - RNA, 19 nt, Homo sapiens
  misc_RNA (1)...(19): siRNA sense strand
gaaguaugaucuggaaucu

SEQ ID NO: 801238 - RNA, 19 nt, Homo sapiens
  misc_RNA (1)...(19): siRNA sense strand
ccaaggacccgacucagaa

SEQ ID NO: 801239 - RNA, 19 nt, Homo sapiens
  misc_RNA (1)...(19): siRNA sense strand
ccaagcuguucacccauaa

SEQ ID NO: 801240 - RNA, 19 nt, Homo sapiens
  misc_RNA (1)...(19): siRNA sense strand
gaagucaccauccaguuca

SEQ ID NO: 801241 - RNA, 19 nt, Homo sapiens
  misc_RNA (1)...(19): siRNA sense strand
caagaugggcaaagccaaa

SEQ ID NO: 801242 - RNA, 19 nt, Homo sapiens
  misc_RNA (1)...(19): siRNA sense strand
ggccaagaguagcugguuu

SEQ ID NO: 801243 - RNA, 19 nt, Homo sapiens
  misc_RNA (1)...(19): siRNA sense strand
cccaagcuguucacccaua

SEQ ID NO: 801244 - RNA, 19 nt, Homo sapiens
  misc_RNA (1)...(19): siRNA sense strand
gcucuucgcucugugucaa

SEQ ID NO: 801245 - RNA, 19 nt, Homo sapiens
  misc_RNA (1)...(19): siRNA sense strand
ugaagggcaagaagaagua

SEQ ID NO: 801246 - RNA, 19 nt, Homo sapiens
  misc_RNA (1)...(19): siRNA sense strand
ccugagcgccaguauguuu

SEQ ID NO: 801247 - RNA, 19 nt, Homo sapiens
  misc_RNA (1)...(19): siRNA sense strand
uguuugaccuguccaugaa

SEQ ID NO: 801248 - RNA, 19 nt, Homo sapiens
  misc_RNA (1)...(19): siRNA sense strand
gcgaugaggccaaccagau

SEQ ID NO: 801249 - RNA, 19 nt, Homo sapiens
  misc_RNA (1)...(19): siRNA sense strand
caagaucagggacaagaug

SEQ ID NO: 801250 - RNA, 19 nt, Homo sapiens
  misc_RNA (1)...(19): siRNA sense strand
gggcaagccaguccagguu

SEQ ID NO: 801251 - RNA, 19 nt, Homo sapiens
  misc_RNA (1)...(19): siRNA sense strand
gccaaggacccgacucaga

SEQ ID NO: 801252 - RNA, 19 nt, Homo sapiens
  misc_RNA (1)...(19): siRNA sense strand
gggccucguuccacagaug

SEQ ID NO: 801253 - RNA, 19 nt, Homo sapiens
  misc_RNA (1)...(19): siRNA sense strand
caaggacccgacucagaaa

SEQ ID NO: 801254 - RNA, 19 nt, Homo sapiens
  misc_RNA (1)...(19): siRNA sense strand
gcucaucggcgucgacaag

SEQ ID NO: 801255 - RNA, 19 nt, Homo sapiens
  misc_RNA (1)...(19): siRNA sense strand
ccagguugccacacccaua

SEQ ID NO: 801256 - RNA, 19 nt, Homo sapiens
  misc_RNA (1)...(19): siRNA sense strand
ugaagucaccauccaguuc

SEQ ID NO: 801257 - RNA, 19 nt, Homo sapiens
  misc_RNA (1)...(19): siRNA sense strand
uagcugguuuggcuugaga

SEQ ID NO: 801258 - RNA, 19 nt, Homo sapiens
  misc_RNA (1)...(19): siRNA sense strand
gaugcugccucccgcucuu

SEQ ID NO: 801259 - RNA, 19 nt, Homo sapiens
  misc_RNA (1)...(19): siRNA sense strand
ucagcaagaucagggacaa

SEQ ID NO: 801260 - RNA, 19 nt, Homo sapiens
  misc_RNA (1)...(19): siRNA sense strand
agucacaucugggagcauu

SEQ ID NO: 801261 - RNA, 19 nt, Homo sapiens
  misc_RNA (1)...(19): siRNA sense strand
gccaagaguagcugguuug

SEQ ID NO: 801262 - RNA, 19 nt, Homo sapiens
  misc_RNA (1)...(19): siRNA sense strand
caagaagaaguaugaucug

SEQ ID NO: 801263 - RNA, 19 nt, Homo sapiens
  misc_RNA (1)...(19): siRNA sense strand
gcaagaucagggacaagau

SEQ ID NO: 801264 - RNA, 19 nt, Homo sapiens
  misc_RNA (1)...(19): siRNA sense strand
caagaugaagggcaagaag

SEQ ID NO: 801265 - RNA, 19 nt, Homo sapiens
  misc_RNA (1)...(19): siRNA sense strand
cagucccgcuccagucuga

SEQ ID NO: 801266 - RNA, 19 nt, Homo sapiens
  misc_RNA (1)...(19): siRNA sense strand
agaugaagggcaagaagaa

SEQ ID NO: 801267 - RNA, 19 nt, Homo sapiens
  misc_RNA (1)...(19): siRNA sense strand
aaccugagcgccaguaugu

SEQ ID NO: 801268 - RNA, 19 nt, Homo sapiens
  misc_RNA (1)...(19): siRNA sense strand
ggaccagucggccaaguac

SEQ ID NO: 801269 - RNA, 19 nt, Homo sapiens
  misc_RNA (1)...(19): siRNA sense strand
ccauaguggccuccucuga

SEQ ID NO: 801270 - RNA, 19 nt, Homo sapiens
  misc_RNA (1)...(19): siRNA sense strand
gaagggcaagaagaaguau

SEQ ID NO: 801271 - RNA, 19 nt, Homo sapiens
  misc_RNA (1)...(19): siRNA sense strand
gaucagggacaagaugaag

SEQ ID NO: 801272 - RNA, 19 nt, Homo sapiens
  misc_RNA (1)...(19): siRNA sense strand
gaggaaaaggccaagagua

SEQ ID NO: 801273 - RNA, 19 nt, Homo sapiens
  misc_RNA (1)...(19): siRNA sense strand
agaaguaugaucuggaauc

SEQ ID NO: 801274 - RNA, 19 nt, Homo sapiens
  misc_RNA (1)...(19): siRNA sense strand
uggagaagcucaaaacagu

SEQ ID NO: 801275 - RNA, 19 nt, Homo sapiens
  misc_RNA (1)...(19): siRNA sense strand
ucaucggcgucgacaaguu

SEQ ID NO: 801276 - RNA, 19 nt, Homo sapiens
  misc_RNA (1)...(19): siRNA sense strand
cgaugaggccaaccagaug

SEQ ID NO: 801277 - RNA, 19 nt, Homo sapiens
  misc_RNA (1)...(19): siRNA sense strand
ugguuuggcuugagagaag

SEQ ID NO: 801278 - RNA, 19 nt, Homo sapiens
  misc_RNA (1)...(19): siRNA sense strand
caaccugagcgccaguaug

SEQ ID NO: 801279 - RNA, 19 nt, Homo sapiens
  misc_RNA (1)...(19): siRNA sense strand
cugaggcuguggcagagaa

SEQ ID NO: 801280 - RNA, 19 nt, Homo sapiens
  misc_RNA (1)...(19): siRNA sense strand
caucggcgucgacaaguuc

SEQ ID NO: 801281 - RNA, 19 nt, Homo sapiens
  misc_RNA (1)...(19): siRNA sense strand
aagaugaagggcaagaaga

SEQ ID NO: 801282 - RNA, 19 nt, Homo sapiens
  misc_RNA (1)...(19): siRNA sense strand
ggaugcagcuagaggauga

SEQ ID NO: 801283 - RNA, 19 nt, Homo sapiens
  misc_RNA (1)...(19): siRNA sense strand
gagugaaggugucucagaa

SEQ ID NO: 801284 - RNA, 19 nt, Homo sapiens
  misc_RNA (1)...(19): siRNA sense strand
ggaugauucucuguacaua

SEQ ID NO: 801285 - RNA, 19 nt, Homo sapiens
  misc_RNA (1)...(19): siRNA sense strand
gaggugaacuguguggauu

SEQ ID NO: 801286 - RNA, 19 nt, Homo sapiens
  misc_RNA (1)...(19): siRNA sense strand
gcagucagaugcccuggau

SEQ ID NO: 801287 - RNA, 19 nt, Homo sapiens
  misc_RNA (1)...(19): siRNA sense strand
gggaagauuggcauucaua

SEQ ID NO: 801288 - RNA, 19 nt, Homo sapiens
  misc_RNA (1)...(19): siRNA sense strand
ugaggacguuugccacuuu

SEQ ID NO: 801289 - RNA, 19 nt, Homo sapiens
  misc_RNA (1)...(19): siRNA sense strand
gcuaucagcccauuacuca

SEQ ID NO: 801290 - RNA, 19 nt, Homo sapiens
  misc_RNA (1)...(19): siRNA sense strand
ggaagauuggcauucauaa

SEQ ID NO: 801291 - RNA, 19 nt, Homo sapiens
  misc_RNA (1)...(19): siRNA sense strand
guacucggcucaugaacag

SEQ ID NO: 801292 - RNA, 19 nt, Homo sapiens
  misc_RNA (1)...(19): siRNA sense strand
gauuggcauucauaagauu

SEQ ID NO: 801293 - RNA, 19 nt, Homo sapiens
  misc_RNA (1)...(19): siRNA sense strand
gcccauuacucagcucuuu

SEQ ID NO: 801294 - RNA, 19 nt, Homo sapiens
  misc_RNA (1)...(19): siRNA sense strand
guacauaucccaggcuaau

SEQ ID NO: 801295 - RNA, 19 nt, Homo sapiens
  misc_RNA (1)...(19): siRNA sense strand
ugacagggacggcuuguug

SEQ ID NO: 801296 - RNA, 19 nt, Homo sapiens
  misc_RNA (1)...(19): siRNA sense strand
gcaccuucacugucaagua

SEQ ID NO: 801297 - RNA, 19 nt, Homo sapiens
  misc_RNA (1)...(19): siRNA sense strand
ggugcuggaugucauguau

SEQ ID NO: 801298 - RNA, 19 nt, Homo sapiens
  misc_RNA (1)...(19): siRNA sense strand
gaacuguguggauugcaaa

SEQ ID NO: 801299 - RNA, 19 nt, Homo sapiens
  misc_RNA (1)...(19): siRNA sense strand
gcaccagcguccggaaaug

SEQ ID NO: 801300 - RNA, 19 nt, Homo sapiens
  misc_RNA (1)...(19): siRNA sense strand
ccacagguuccuccuacua

SEQ ID NO: 801301 - RNA, 19 nt, Homo sapiens
  misc_RNA (1)...(19): siRNA sense strand
gaagauuggcauucauaag

SEQ ID NO: 801302 - RNA, 19 nt, Homo sapiens
  misc_RNA (1)...(19): siRNA sense strand
uuacucagcucuuuuguga

SEQ ID NO: 801303 - RNA, 19 nt, Homo sapiens
  misc_RNA (1)...(19): siRNA sense strand
acauaucccaggcuaauuu

SEQ ID NO: 801304 - RNA, 19 nt, Homo sapiens
  misc_RNA (1)...(19): siRNA sense strand
aagauuggcauucauaaga

SEQ ID NO: 801305 - RNA, 19 nt, Homo sapiens
  misc_RNA (1)...(19): siRNA sense strand
gaggaugauucucuguaca

SEQ ID NO: 801306 - RNA, 19 nt, Homo sapiens
  misc_RNA (1)...(19): siRNA sense strand
gugggcagcugaugacaca

SEQ ID NO: 801307 - RNA, 19 nt, Homo sapiens
  misc_RNA (1)...(19): siRNA sense strand
caaguacucggcucaugaa

SEQ ID NO: 801308 - RNA, 19 nt, Homo sapiens
  misc_RNA (1)...(19): siRNA sense strand
gaggacguuugccacuuug

SEQ ID NO: 801309 - RNA, 19 nt, Homo sapiens
  misc_RNA (1)...(19): siRNA sense strand
ucaaguacucggcucauga

SEQ ID NO: 801310 - RNA, 19 nt, Homo sapiens
  misc_RNA (1)...(19): siRNA sense strand
caacucgcauauuguuagu

SEQ ID NO: 801311 - RNA, 19 nt, Homo sapiens
  misc_RNA (1)...(19): siRNA sense strand
caccuucacugucaaguac

SEQ ID NO: 801312 - RNA, 19 nt, Homo sapiens
  misc_RNA (1)...(19): siRNA sense strand
ugaacuguguggauugcaa

SEQ ID NO: 801313 - RNA, 19 nt, Homo sapiens
  misc_RNA (1)...(19): siRNA sense strand
ucuaugcugcccugucuua

SEQ ID NO: 801314 - RNA, 19 nt, Homo sapiens
  misc_RNA (1)...(19): siRNA sense strand
cgagucugguccauugcua

SEQ ID NO: 801315 - RNA, 19 nt, Homo sapiens
  misc_RNA (1)...(19): siRNA sense strand
aaguggagaugcagucaga

SEQ ID NO: 801316 - RNA, 19 nt, Homo sapiens
  misc_RNA (1)...(19): siRNA sense strand
ggccaacucgcauauuguu

SEQ ID NO: 801317 - RNA, 19 nt, Homo sapiens
  misc_RNA (1)...(19): siRNA sense strand
gaugauucucuguacauau

SEQ ID NO: 801318 - RNA, 19 nt, Homo sapiens
  misc_RNA (1)...(19): siRNA sense strand
gcagcuagaggaugauucu

SEQ ID NO: 801319 - RNA, 19 nt, Homo sapiens
  misc_RNA (1)...(19): siRNA sense strand
gugaaggugucucagaacu

SEQ ID NO: 801320 - RNA, 19 nt, Homo sapiens
  misc_RNA (1)...(19): siRNA sense strand
ggaggugaacuguguggau

SEQ ID NO: 801321 - RNA, 19 nt, Homo sapiens
  misc_RNA (1)...(19): siRNA sense strand
gagaggggauucugcugaa

SEQ ID NO: 801322 - RNA, 19 nt, Homo sapiens
  misc_RNA (1)...(19): siRNA sense strand
ccaacucgcauauuguuag

SEQ ID NO: 801323 - RNA, 19 nt, Homo sapiens
  misc_RNA (1)...(19): siRNA sense strand
ggacguuugccacuuugug

SEQ ID NO: 801324 - RNA, 19 nt, Homo sapiens
  misc_RNA (1)...(19): siRNA sense strand
ugaccagugucccagugaa

SEQ ID NO: 801325 - RNA, 19 nt, Homo sapiens
  misc_RNA (1)...(19): siRNA sense strand
agauuggcauucauaagau

SEQ ID NO: 801326 - RNA, 19 nt, Homo sapiens
  misc_RNA (1)...(19): siRNA sense strand
cuggccaacucgcauauug

SEQ ID NO: 801327 - RNA, 19 nt, Homo sapiens
  misc_RNA (1)...(19): siRNA sense strand
cgagugaaggugucucaga

SEQ ID NO: 801328 - RNA, 19 nt, Homo sapiens
  misc_RNA (1)...(19): siRNA sense strand
gccaacucgcauauuguua

SEQ ID NO: 801329 - RNA, 19 nt, Homo sapiens
  misc_RNA (1)...(19): siRNA sense strand
uacacaccauccagacuga

SEQ ID NO: 801330 - RNA, 19 nt, Homo sapiens
  misc_RNA (1)...(19): siRNA sense strand
augauucucuguacauauc

SEQ ID NO: 801331 - RNA, 19 nt, Homo sapiens
  misc_RNA (1)...(19): siRNA sense strand
ccagugaaggaacgaguga

SEQ ID NO: 801332 - RNA, 19 nt, Homo sapiens
  misc_RNA (1)...(19): siRNA sense strand
gauggugccagcuugaauc

SEQ ID NO: 801333 - RNA, 19 nt, Homo sapiens
  misc_RNA (1)...(19): siRNA sense strand
ccaguuccguccagauggu

SEQ ID NO: 801334 - RNA, 19 nt, Homo sapiens
  misc_RNA (1)...(19): siRNA sense strand
augcugcccugucuuacaa

SEQ ID NO: 801335 - RNA, 19 nt, Homo sapiens
  misc_RNA (1)...(19): siRNA sense strand
ccagauggugccagcuuga

SEQ ID NO: 801336 - RNA, 19 nt, Homo sapiens
  misc_RNA (1)...(19): siRNA sense strand
ucucuaugcugcccugucu

SEQ ID NO: 801337 - RNA, 19 nt, Homo sapiens
  misc_RNA (1)...(19): siRNA sense strand
ccauugcuaucagcccauu

SEQ ID NO: 801338 - RNA, 19 nt, Homo sapiens
  misc_RNA (1)...(19): siRNA sense strand
ugaaggaacgagugaaggu

SEQ ID NO: 801339 - RNA, 19 nt, Homo sapiens
  misc_RNA (1)...(19): siRNA sense strand
ggcaugaugaggacguuug

SEQ ID NO: 801340 - RNA, 19 nt, Homo sapiens
  misc_RNA (1)...(19): siRNA sense strand
acaccuauguucgcuacug

SEQ ID NO: 801341 - RNA, 19 nt, Homo sapiens
  misc_RNA (1)...(19): siRNA sense strand
caacagugggcagcugaug

SEQ ID NO: 801342 - RNA, 19 nt, Homo sapiens
  misc_RNA (1)...(19): siRNA sense strand
gagaaucugggaccucaac

SEQ ID NO: 801343 - RNA, 19 nt, Homo sapiens
  misc_RNA (1)...(19): siRNA sense strand
gucaaguacucggcucaug

SEQ ID NO: 801344 - RNA, 19 nt, Homo sapiens
  misc_RNA (1)...(19): siRNA sense strand
gaugggaagauuggcauuc

SEQ ID NO: 801345 - RNA, 19 nt, Homo sapiens
  misc_RNA (1)...(19): siRNA sense strand
gugcuggccaacucgcaua

SEQ ID NO: 801346 - RNA, 19 nt, Homo sapiens
  misc_RNA (1)...(19): siRNA sense strand
ggcagcugaugacacacuu

SEQ ID NO: 801347 - RNA, 19 nt, Homo sapiens
  misc_RNA (1)...(19): siRNA sense strand
guggagaugcagucagaug

SEQ ID NO: 801348 - RNA, 19 nt, Homo sapiens
  misc_RNA (1)...(19): siRNA sense strand
aaacagagcugcagaauca

SEQ ID NO: 801349 - RNA, 19 nt, Homo sapiens
  misc_RNA (1)...(19): siRNA sense strand
gagcagacaucucuuaaga

SEQ ID NO: 801350 - RNA, 19 nt, Homo sapiens
  misc_RNA (1)...(19): siRNA sense strand
gagaggcacuagauuguaa

SEQ ID NO: 801351 - RNA, 19 nt, Homo sapiens
  misc_RNA (1)...(19): siRNA sense strand
gcacaccuuugucuucuuu

SEQ ID NO: 801352 - RNA, 19 nt, Homo sapiens
  misc_RNA (1)...(19): siRNA sense strand
gaagaaauccagggccuua

SEQ ID NO: 801353 - RNA, 19 nt, Homo sapiens
  misc_RNA (1)...(19): siRNA sense strand
gaacacaaagucacgcaua

SEQ ID NO: 801354 - RNA, 19 nt, Homo sapiens
  misc_RNA (1)...(19): siRNA sense strand
gaacaagcauaucaaagag

SEQ ID NO: 801355 - RNA, 19 nt, Homo sapiens
  misc_RNA (1)...(19): siRNA sense strand
ucacagaacacaagauuaa

SEQ ID NO: 801356 - RNA, 19 nt, Homo sapiens
  misc_RNA (1)...(19): siRNA sense strand
caucagaccuggagaaagu

SEQ ID NO: 801357 - RNA, 19 nt, Homo sapiens
  misc_RNA (1)...(19): siRNA sense strand
caaagaaccaguaguagaa

SEQ ID NO: 801358 - RNA, 19 nt, Homo sapiens
  misc_RNA (1)...(19): siRNA sense strand
aaacuuugcugcagaauca

SEQ ID NO: 801359 - RNA, 19 nt, Homo sapiens
  misc_RNA (1)...(19): siRNA sense strand
gcacuagauuguaagaaga

SEQ ID NO: 801360 - RNA, 19 nt, Homo sapiens
  misc_RNA (1)...(19): siRNA sense strand
caacagcguucuuaaacug

SEQ ID NO: 801361 - RNA, 19 nt, Homo sapiens
  misc_RNA (1)...(19): siRNA sense strand
caacaagccauauaaaugu

SEQ ID NO: 801362 - RNA, 19 nt, Homo sapiens
  misc_RNA (1)...(19): siRNA sense strand
cagccgagaucgccacaua

SEQ ID NO: 801363 - RNA, 19 nt, Homo sapiens
  misc_RNA (1)...(19): siRNA sense strand
gacaagaucuaugacugua

SEQ ID NO: 801364 - RNA, 19 nt, Homo sapiens
  misc_RNA (1)...(19): siRNA sense strand
ugaauuauauccacaaugg

SEQ ID NO: 801365 - RNA, 19 nt, Homo sapiens
  misc_RNA (1)...(19): siRNA sense strand
gaguggauguugaagauga

SEQ ID NO: 801366 - RNA, 19 nt, Homo sapiens
  misc_RNA (1)...(19): siRNA sense strand
gaagaagaccuaucaaugc

SEQ ID NO: 801367 - RNA, 19 nt, Homo sapiens
  misc_RNA (1)...(19): siRNA sense strand
guacaaauucgccaauauu

SEQ ID NO: 801368 - RNA, 19 nt, Homo sapiens
  misc_RNA (1)...(19): siRNA sense strand
aaacucaucucgacacugu

SEQ ID NO: 801369 - RNA, 19 nt, Homo sapiens
  misc_RNA (1)...(19): siRNA sense strand
uuagacagguucauuguga

SEQ ID NO: 801370 - RNA, 19 nt, Homo sapiens
  misc_RNA (1)...(19): siRNA sense strand
caagcaagaucuggugaaa

SEQ ID NO: 801371 - RNA, 19 nt, Homo sapiens
  misc_RNA (1)...(19): siRNA sense strand
agacaagacugaagaugga

SEQ ID NO: 801372 - RNA, 19 nt, Homo sapiens
  misc_RNA (1)...(19): siRNA sense strand
ccaacaagccauauaaaug

SEQ ID NO: 801373 - RNA, 19 nt, Homo sapiens
  misc_RNA (1)...(19): siRNA sense strand
caaacugccuuucaaaugc

SEQ ID NO: 801374 - RNA, 19 nt, Homo sapiens
  misc_RNA (1)...(19): siRNA sense strand
ccucaacacucuucaggaa

SEQ ID NO: 801375 - RNA, 19 nt, Homo sapiens
  misc_RNA (1)...(19): siRNA sense strand
gcccauauuugucaguauu

SEQ ID NO: 801376 - RNA, 19 nt, Homo sapiens
  misc_RNA (1)...(19): siRNA sense strand
gugcgcaucuugccucaaa

SEQ ID NO: 801377 - RNA, 19 nt, Homo sapiens
  misc_RNA (1)...(19): siRNA sense strand
aaauggagcuuccgagcaa

SEQ ID NO: 801378 - RNA, 19 nt, Homo sapiens
  misc_RNA (1)...(19): siRNA sense strand
gagcugcaaugccacauca

SEQ ID NO: 801379 - RNA, 19 nt, Homo sapiens
  misc_RNA (1)...(19): siRNA sense strand
cauguuaccauucacuuua

SEQ ID NO: 801380 - RNA, 19 nt, Homo sapiens
  misc_RNA (1)...(19): siRNA sense strand
ugaacaagcauaucaaaga

SEQ ID NO: 801381 - RNA, 19 nt, Homo sapiens
  misc_RNA (1)...(19): siRNA sense strand
caaauucgccaauauucaa

SEQ ID NO: 801382 - RNA, 19 nt, Homo sapiens
  misc_RNA (1)...(19): siRNA sense strand
ugaaugugaugcugcguuu

SEQ ID NO: 801383 - RNA, 19 nt, Homo sapiens
  misc_RNA (1)...(19): siRNA sense strand
uaugaucacuucaacguau

SEQ ID NO: 801384 - RNA, 19 nt, Homo sapiens
  misc_RNA (1)...(19): siRNA sense strand
gcugaagcauguuaccauu

SEQ ID NO: 801385 - RNA, 19 nt, Homo sapiens
  misc_RNA (1)...(19): siRNA sense strand
gaacaggcccauauuuguc

SEQ ID NO: 801386 - RNA, 19 nt, Homo sapiens
  misc_RNA (1)...(19): siRNA sense strand
caagaucuaugacuguaca

SEQ ID NO: 801387 - RNA, 19 nt, Homo sapiens
  misc_RNA (1)...(19): siRNA sense strand
ucacaugauugaugaagga

SEQ ID NO: 801388 - RNA, 19 nt, Homo sapiens
  misc_RNA (1)...(19): siRNA sense strand
gcugcaacguuaaguuuga

SEQ ID NO: 801389 - RNA, 19 nt, Homo sapiens
  misc_RNA (1)...(19): siRNA sense strand
gcugagcgauaucacagaa

SEQ ID NO: 801390 - RNA, 19 nt, Homo sapiens
  misc_RNA (1)...(19): siRNA sense strand
gagaagaagaccuaucaau

SEQ ID NO: 801391 - RNA, 19 nt, Homo sapiens
  misc_RNA (1)...(19): siRNA sense strand
uggaugaccuucagaaaca

SEQ ID NO: 801392 - RNA, 19 nt, Homo sapiens
  misc_RNA (1)...(19): siRNA sense strand
acaagcauaucaaagagaa

SEQ ID NO: 801393 - RNA, 19 nt, Homo sapiens
  misc_RNA (1)...(19): siRNA sense strand
ccaaagaaccaguaguaga

SEQ ID NO: 801394 - RNA, 19 nt, Homo sapiens
  misc_RNA (1)...(19): siRNA sense strand
ccgauguucucauggauuu

SEQ ID NO: 801395 - RNA, 19 nt, Homo sapiens
  misc_RNA (1)...(19): siRNA sense strand
ugacuggucccucgaguaa

SEQ ID NO: 801396 - RNA, 19 nt, Homo sapiens
  misc_RNA (1)...(19): siRNA sense strand
ccagucugcuuuacaguau

SEQ ID NO: 801397 - RNA, 19 nt, Homo sapiens
  misc_RNA (1)...(19): siRNA sense strand
aaagugaacuccagaacca

SEQ ID NO: 801398 - RNA, 19 nt, Homo sapiens
  misc_RNA (1)...(19): siRNA sense strand
caacguauuacaucuguga

SEQ ID NO: 801399 - RNA, 19 nt, Homo sapiens
  misc_RNA (1)...(19): siRNA sense strand
acuggaaacugccggauuu

SEQ ID NO: 801400 - RNA, 19 nt, Homo sapiens
  misc_RNA (1)...(19): siRNA sense strand
gaaacacaaccaccuggaa

SEQ ID NO: 801401 - RNA, 19 nt, Homo sapiens
  misc_RNA (1)...(19): siRNA sense strand
cagaacaggcccauauuug

SEQ ID NO: 801402 - RNA, 19 nt, Homo sapiens
  misc_RNA (1)...(19): siRNA sense strand
gacaagaagacaagaucua

SEQ ID NO: 801403 - RNA, 19 nt, Homo sapiens
  misc_RNA (1)...(19): siRNA sense strand
gggaaugggucugcaguuc

SEQ ID NO: 801404 - RNA, 19 nt, Homo sapiens
  misc_RNA (1)...(19): siRNA sense strand
aaaccgagaucccucaaag

SEQ ID NO: 801405 - RNA, 19 nt, Homo sapiens
  misc_RNA (1)...(19): siRNA sense strand
guaagaagaggccggaaga

SEQ ID NO: 801406 - RNA, 19 nt, Homo sapiens
  misc_RNA (1)...(19): siRNA sense strand
guccugcccucacucuaua

SEQ ID NO: 801407 - RNA, 19 nt, Homo sapiens
  misc_RNA (1)...(19): siRNA sense strand
gugacaaacugccuuucaa

SEQ ID NO: 801408 - RNA, 19 nt, Homo sapiens
  misc_RNA (1)...(19): siRNA sense strand
agaagaagaccuaucaaug

SEQ ID NO: 801409 - RNA, 19 nt, Homo sapiens
  misc_RNA (1)...(19): siRNA sense strand
ccaaaugcacccugacuug

SEQ ID NO: 801410 - RNA, 19 nt, Homo sapiens
  misc_RNA (1)...(19): siRNA sense strand
ccacucacaguaagaagua

SEQ ID NO: 801411 - RNA, 19 nt, Homo sapiens
  misc_RNA (1)...(19): siRNA sense strand
ccagaacaggcccauauuu

SEQ ID NO: 801412 - RNA, 19 nt, Homo sapiens
  misc_RNA (1)...(19): siRNA sense strand
ggagaggcacuagauugua

SEQ ID NO: 801413 - RNA, 19 nt, Homo sapiens
  misc_RNA (1)...(19): siRNA sense strand
cacuacaugugcccuauuu

SEQ ID NO: 801414 - RNA, 19 nt, Homo sapiens
  misc_RNA (1)...(19): siRNA sense strand
aaacugaacaagcauauca

SEQ ID NO: 801415 - RNA, 19 nt, Homo sapiens
  misc_RNA (1)...(19): siRNA sense strand
ucaacgaccucaacacucu

SEQ ID NO: 801416 - RNA, 19 nt, Homo sapiens
  misc_RNA (1)...(19): siRNA sense strand
gccauugucuaccagugua

SEQ ID NO: 801417 - RNA, 19 nt, Homo sapiens
  misc_RNA (1)...(19): siRNA sense strand
cagauggaguggauguuga

SEQ ID NO: 801418 - RNA, 19 nt, Homo sapiens
  misc_RNA (1)...(19): siRNA sense strand
gauauucagguucauguug

SEQ ID NO: 801419 - RNA, 19 nt, Homo sapiens
  misc_RNA (1)...(19): siRNA sense strand
gaaacugccggauuugcaa

SEQ ID NO: 801420 - RNA, 19 nt, Homo sapiens
  misc_RNA (1)...(19): siRNA sense strand
cacaaagucacgcauagua

SEQ ID NO: 801421 - RNA, 19 nt, Homo sapiens
  misc_RNA (1)...(19): siRNA sense strand
ccaccuaggcccugucaaa

SEQ ID NO: 801422 - RNA, 19 nt, Homo sapiens
  misc_RNA (1)...(19): siRNA sense strand
ccuacacuauggaaacuuu

SEQ ID NO: 801423 - RNA, 19 nt, Homo sapiens
  misc_RNA (1)...(19): siRNA sense strand
gcaauucacaucaguggau

SEQ ID NO: 801424 - RNA, 19 nt, Homo sapiens
  misc_RNA (1)...(19): siRNA sense strand
aaauugaccuguccucagu

SEQ ID NO: 801425 - RNA, 19 nt, Homo sapiens
  misc_RNA (1)...(19): siRNA sense strand
gaagauccacuuaaagacu

SEQ ID NO: 801426 - RNA, 19 nt, Homo sapiens
  misc_RNA (1)...(19): siRNA sense strand
ucaaagaccccaacuguaa

SEQ ID NO: 801427 - RNA, 19 nt, Homo sapiens
  misc_RNA (1)...(19): siRNA sense strand
aagaagacaagaucuauga

SEQ ID NO: 801428 - RNA, 19 nt, Homo sapiens
  misc_RNA (1)...(19): siRNA sense strand
gaucuggugaaacuugaua

SEQ ID NO: 801429 - RNA, 19 nt, Homo sapiens
  misc_RNA (1)...(19): siRNA sense strand
ucaacacucuucaggaaca

SEQ ID NO: 801430 - RNA, 19 nt, Homo sapiens
  misc_RNA (1)...(19): siRNA sense strand
gaaugggucugcaguucag

SEQ ID NO: 801431 - RNA, 19 nt, Homo sapiens
  misc_RNA (1)...(19): siRNA sense strand
caacaucagaccuggagaa

SEQ ID NO: 801432 - RNA, 19 nt, Homo sapiens
  misc_RNA (1)...(19): siRNA sense strand
aaacacaaccaccuggaaa

SEQ ID NO: 801433 - RNA, 19 nt, Homo sapiens
  misc_RNA (1)...(19): siRNA sense strand
agaaacaccugcuggacau

SEQ ID NO: 801434 - RNA, 19 nt, Homo sapiens
  misc_RNA (1)...(19): siRNA sense strand
ggcacuagauuguaagaag

SEQ ID NO: 801435 - RNA, 19 nt, Homo sapiens
  misc_RNA (1)...(19): siRNA sense strand
acacaucccuagacagcuu

SEQ ID NO: 801436 - RNA, 19 nt, Homo sapiens
  misc_RNA (1)...(19): siRNA sense strand
ugacaaacugccuuucaaa

SEQ ID NO: 801437 - RNA, 19 nt, Homo sapiens
  misc_RNA (1)...(19): siRNA sense strand
augaaggacugaaccauga

SEQ ID NO: 801438 - RNA, 19 nt, Homo sapiens
  misc_RNA (1)...(19): siRNA sense strand
gaaaacgccccaaguauca

SEQ ID NO: 801439 - RNA, 19 nt, Homo sapiens
  misc_RNA (1)...(19): siRNA sense strand
ucaaagaauuccguuccaa

SEQ ID NO: 801440 - RNA, 19 nt, Homo sapiens
  misc_RNA (1)...(19): siRNA sense strand
gagaaagugccaucgugaa

SEQ ID NO: 801441 - RNA, 19 nt, Homo sapiens
  misc_RNA (1)...(19): siRNA sense strand
caaccggagucaugcaauc

SEQ ID NO: 801442 - RNA, 19 nt, Homo sapiens
  misc_RNA (1)...(19): siRNA sense strand
gcauuuguucugagaguuu

SEQ ID NO: 801443 - RNA, 19 nt, Homo sapiens
  misc_RNA (1)...(19): siRNA sense strand
gggagaagaagaacucaug

SEQ ID NO: 801444 - RNA, 19 nt, Homo sapiens
  misc_RNA (1)...(19): siRNA sense strand
uaucacagaacacaagauu

SEQ ID NO: 801445 - RNA, 19 nt, Homo sapiens
  misc_RNA (1)...(19): siRNA sense strand
aagaagaccuaucaaugca

SEQ ID NO: 801446 - RNA, 19 nt, Homo sapiens
  misc_RNA (1)...(19): siRNA sense strand
cacccugacuugaggaauu

SEQ ID NO: 801447 - RNA, 19 nt, Homo sapiens
  misc_RNA (1)...(19): siRNA sense strand
caaaugcacccugacuuga

SEQ ID NO: 801448 - RNA, 19 nt, Homo sapiens
  misc_RNA (1)...(19): siRNA sense strand
caagucaaguucuacaauu

SEQ ID NO: 801449 - RNA, 19 nt, Homo sapiens
  misc_RNA (1)...(19): siRNA sense strand
ggacagaguuguuuauacg

SEQ ID NO: 801450 - RNA, 19 nt, Homo sapiens
  misc_RNA (1)...(19): siRNA sense strand
cacuggaacugaagucuaa

SEQ ID NO: 801451 - RNA, 19 nt, Homo sapiens
  misc_RNA (1)...(19): siRNA sense strand
ggucgagaauauuuccauu

SEQ ID NO: 801452 - RNA, 19 nt, Homo sapiens
  misc_RNA (1)...(19): siRNA sense strand
ggguacauaugacacagaa

SEQ ID NO: 801453 - RNA, 19 nt, Homo sapiens
  misc_RNA (1)...(19): siRNA sense strand
gagacaguguggcaaguca

SEQ ID NO: 801454 - RNA, 19 nt, Homo sapiens
  misc_RNA (1)...(19): siRNA sense strand
ucacagacauugggaccuu

SEQ ID NO: 801455 - RNA, 19 nt, Homo sapiens
  misc_RNA (1)...(19): siRNA sense strand
gcaagucaaguucuacaau

SEQ ID NO: 801456 - RNA, 19 nt, Homo sapiens
  misc_RNA (1)...(19): siRNA sense strand
agguugaggugaagauuaa

SEQ ID NO: 801457 - RNA, 19 nt, Homo sapiens
  misc_RNA (1)...(19): siRNA sense strand
ggccagaaccgcaccauca

SEQ ID NO: 801458 - RNA, 19 nt, Homo sapiens
  misc_RNA (1)...(19): siRNA sense strand
gggacagaguuguuuauac

SEQ ID NO: 801459 - RNA, 19 nt, Homo sapiens
  misc_RNA (1)...(19): siRNA sense strand
ccuacaagguugaggugaa

SEQ ID NO: 801460 - RNA, 19 nt, Homo sapiens
  misc_RNA (1)...(19): siRNA sense strand
ugaugugggugaacaagga

SEQ ID NO: 801461 - RNA, 19 nt, Homo sapiens
  misc_RNA (1)...(19): siRNA sense strand
guucuacaauuaccacaag

SEQ ID NO: 801462 - RNA, 19 nt, Homo sapiens
  misc_RNA (1)...(19): siRNA sense strand
ucgagaauauuuccauugg

SEQ ID NO: 801463 - RNA, 19 nt, Homo sapiens
  misc_RNA (1)...(19): siRNA sense strand
ccacuggaacugaagucua

SEQ ID NO: 801464 - RNA, 19 nt, Homo sapiens
  misc_RNA (1)...(19): siRNA sense strand
gcacgcugcaggucgagaa

SEQ ID NO: 801465 - RNA, 19 nt, Homo sapiens
  misc_RNA (1)...(19): siRNA sense strand
cugcaggucgagaauauuu

SEQ ID NO: 801466 - RNA, 19 nt, Homo sapiens
  misc_RNA (1)...(19): siRNA sense strand
cuacaagguugaggugaag

SEQ ID NO: 801467 - RNA, 19 nt, Homo sapiens
  misc_RNA (1)...(19): siRNA sense strand
uguggcaagucaaguucua

SEQ ID NO: 801468 - RNA, 19 nt, Homo sapiens
  misc_RNA (1)...(19): siRNA sense strand
aagguugaggugaagauua

SEQ ID NO: 801469 - RNA, 19 nt, Homo sapiens
  misc_RNA (1)...(19): siRNA sense strand
ggaacugaagucuaaagag

SEQ ID NO: 801470 - RNA, 19 nt, Homo sapiens
  misc_RNA (1)...(19): siRNA sense strand
gcagucugaugugggugaa

SEQ ID NO: 801471 - RNA, 19 nt, Homo sapiens
  misc_RNA (1)...(19): siRNA sense strand
ucaccaugccguucacaga

SEQ ID NO: 801472 - RNA, 19 nt, Homo sapiens
  misc_RNA (1)...(19): siRNA sense strand
cgcugcaggucgagaauau

SEQ ID NO: 801473 - RNA, 19 nt, Homo sapiens
  misc_RNA (1)...(19): siRNA sense strand
uuuauacggguacauauga

SEQ ID NO: 801474 - RNA, 19 nt, Homo sapiens
  misc_RNA (1)...(19): siRNA sense strand
cgagaauauuuccauuggu

SEQ ID NO: 801475 - RNA, 19 nt, Homo sapiens
  misc_RNA (1)...(19): siRNA sense strand
ccuucucugucauugagua

SEQ ID NO: 801476 - RNA, 19 nt, Homo sapiens
  misc_RNA (1)...(19): siRNA sense strand
gccagaaccgcaccaucaa

SEQ ID NO: 801477 - RNA, 19 nt, Homo sapiens
  misc_RNA (1)...(19): siRNA sense strand
cggcaacccauccagauca

SEQ ID NO: 801478 - RNA, 19 nt, Homo sapiens
  misc_RNA (1)...(19): siRNA sense strand
caagguugaggugaagauu

SEQ ID NO: 801479 - RNA, 19 nt, Homo sapiens
  misc_RNA (1)...(19): siRNA sense strand
guuuauacggguacauaug

SEQ ID NO: 801480 - RNA, 19 nt, Homo sapiens
  misc_RNA (1)...(19): siRNA sense strand
ccacagaaauccuuuauuc

SEQ ID NO: 801481 - RNA, 19 nt, Homo sapiens
  misc_RNA (1)...(19): siRNA sense strand
gcaagcacagcaugaguua

SEQ ID NO: 801482 - RNA, 19 nt, Homo sapiens
  misc_RNA (1)...(19): siRNA sense strand
gaaauccuuuauucacaug

SEQ ID NO: 801483 - RNA, 19 nt, Homo sapiens
  misc_RNA (1)...(19): siRNA sense strand
ggaggaggcuauggaacaa

SEQ ID NO: 801484 - RNA, 19 nt, Homo sapiens
  misc_RNA (1)...(19): siRNA sense strand
cagaaauccuuuauucaca

SEQ ID NO: 801485 - RNA, 19 nt, Homo sapiens
  misc_RNA (1)...(19): siRNA sense strand
ggaggcaggcauuucagua

SEQ ID NO: 801486 - RNA, 19 nt, Homo sapiens
  misc_RNA (1)...(19): siRNA sense strand
cgaguccagucacaacuuu

SEQ ID NO: 801487 - RNA, 19 nt, Homo sapiens
  misc_RNA (1)...(19): siRNA sense strand
gaaucaagccagaaaugga

SEQ ID NO: 801488 - RNA, 19 nt, Homo sapiens
  misc_RNA (1)...(19): siRNA sense strand
gaggcaggcauuucaguaa

SEQ ID NO: 801489 - RNA, 19 nt, Homo sapiens
  misc_RNA (1)...(19): siRNA sense strand
cagcugcagugccaagaug

SEQ ID NO: 801490 - RNA, 19 nt, Homo sapiens
  misc_RNA (1)...(19): siRNA sense strand
ccaagccaguccagcauca

SEQ ID NO: 801491 - RNA, 19 nt, Homo sapiens
  misc_RNA (1)...(19): siRNA sense strand
gaaaagagccagcaaaucc

SEQ ID NO: 801492 - RNA, 19 nt, Homo sapiens
  misc_RNA (1)...(19): siRNA sense strand
gaggcuauggaacaaagua

SEQ ID NO: 801493 - RNA, 19 nt, Homo sapiens
  misc_RNA (1)...(19): siRNA sense strand
uugcaugcauccuaaugaa

SEQ ID NO: 801494 - RNA, 19 nt, Homo sapiens
  misc_RNA (1)...(19): siRNA sense strand
ggcaggcauuucaguaaca

SEQ ID NO: 801495 - RNA, 19 nt, Homo sapiens
  misc_RNA (1)...(19): siRNA sense strand
gaguggcggugugucaaug

SEQ ID NO: 801496 - RNA, 19 nt, Homo sapiens
  misc_RNA (1)...(19): siRNA sense strand
gcagcacacgcaccuacaa

SEQ ID NO: 801497 - RNA, 19 nt, Homo sapiens
  misc_RNA (1)...(19): siRNA sense strand
ccaccaaauacaucucuga

SEQ ID NO: 801498 - RNA, 19 nt, Homo sapiens
  misc_RNA (1)...(19): siRNA sense strand
cagcacacgcaccuacaaa

SEQ ID NO: 801499 - RNA, 19 nt, Homo sapiens
  misc_RNA (1)...(19): siRNA sense strand
gcaugcauccuaaugaaaa

SEQ ID NO: 801500 - RNA, 19 nt, Homo sapiens
  misc_RNA (1)...(19): siRNA sense strand
ggaguggcggugugucaau

SEQ ID NO: 801501 - RNA, 19 nt, Homo sapiens
  misc_RNA (1)...(19): siRNA sense strand
caacuuugagagcauguca

SEQ ID NO: 801502 - RNA, 19 nt, Homo sapiens
  misc_RNA (1)...(19): siRNA sense strand
caacgaguccagucacaac

SEQ ID NO: 801503 - RNA, 19 nt, Homo sapiens
  misc_RNA (1)...(19): siRNA sense strand
cacagaaauccuuuauuca

SEQ ID NO: 801504 - RNA, 19 nt, Homo sapiens
  misc_RNA (1)...(19): siRNA sense strand
gauuggaggaggcuaugga

SEQ ID NO: 801505 - RNA, 19 nt, Homo sapiens
  misc_RNA (1)...(19): siRNA sense strand
acagaaauccuuuauucac

SEQ ID NO: 801506 - RNA, 19 nt, Homo sapiens
  misc_RNA (1)...(19): siRNA sense strand
cuccugccauucauuucua

SEQ ID NO: 801507 - RNA, 19 nt, Homo sapiens
  misc_RNA (1)...(19): siRNA sense strand
cacaacgaguccagucaca

SEQ ID NO: 801508 - RNA, 19 nt, Homo sapiens
  misc_RNA (1)...(19): siRNA sense strand
gcacacgcaccuacaaaau

SEQ ID NO: 801509 - RNA, 19 nt, Homo sapiens
  misc_RNA (1)...(19): siRNA sense strand
acacgcaccuacaaaauca

SEQ ID NO: 801510 - RNA, 19 nt, Homo sapiens
  misc_RNA (1)...(19): siRNA sense strand
ggccagugcaccagcauca

SEQ ID NO: 801511 - RNA, 19 nt, Homo sapiens
  misc_RNA (1)...(19): siRNA sense strand
uggaggaggcuauggaaca

SEQ ID NO: 801512 - RNA, 19 nt, Homo sapiens
  misc_RNA (1)...(19): siRNA sense strand
caaaacccguacccagaga

SEQ ID NO: 801513 - RNA, 19 nt, Homo sapiens
  misc_RNA (1)...(19): siRNA sense strand
gcuauggaacaaaguacug

SEQ ID NO: 801514 - RNA, 19 nt, Homo sapiens
  misc_RNA (1)...(19): siRNA sense strand
gcuggcggcugaaccguaa

SEQ ID NO: 801515 - RNA, 19 nt, Homo sapiens
  misc_RNA (1)...(19): siRNA sense strand
gcgagccgcugcauuucug

SEQ ID NO: 801516 - RNA, 19 nt, Homo sapiens
  misc_RNA (1)...(19): siRNA sense strand
gcugguggccugcuucaug

SEQ ID NO: 801517 - RNA, 19 nt, Homo sapiens
  misc_RNA (1)...(19): siRNA sense strand
cugguggccugcuucauga

SEQ ID NO: 801518 - RNA, 19 nt, Homo sapiens
  misc_RNA (1)...(19): siRNA sense strand
gcugaaccguaagcccauu

SEQ ID NO: 801519 - RNA, 19 nt, Homo sapiens
  misc_RNA (1)...(19): siRNA sense strand
agggcgagccgcugcauuu

SEQ ID NO: 801520 - RNA, 19 nt, Homo sapiens
  misc_RNA (1)...(19): siRNA sense strand
gggcuuccagugcgaccua

SEQ ID NO: 801521 - RNA, 19 nt, Homo sapiens
  misc_RNA (1)...(19): siRNA sense strand
gaagagaacuggauuauua

SEQ ID NO: 801522 - RNA, 19 nt, Homo sapiens
  misc_RNA (1)...(19): siRNA sense strand
gaaagaagcucccagcauu

SEQ ID NO: 801523 - RNA, 19 nt, Homo sapiens
  misc_RNA (1)...(19): siRNA sense strand
ggacagauccuucuuauug

SEQ ID NO: 801524 - RNA, 19 nt, Homo sapiens
  misc_RNA (1)...(19): siRNA sense strand
ggauuuaucuucucaguuu

SEQ ID NO: 801525 - RNA, 19 nt, Homo sapiens
  misc_RNA (1)...(19): siRNA sense strand
ugacuuagcugauaacaaa

SEQ ID NO: 801526 - RNA, 19 nt, Homo sapiens
  misc_RNA (1)...(19): siRNA sense strand
gaacaagaauuacagauca

SEQ ID NO: 801527 - RNA, 19 nt, Homo sapiens
  misc_RNA (1)...(19): siRNA sense strand
gaaccaaacucugaagauu

SEQ ID NO: 801528 - RNA, 19 nt, Homo sapiens
  misc_RNA (1)...(19): siRNA sense strand
gcaggaauguuuagugaaa

SEQ ID NO: 801529 - RNA, 19 nt, Homo sapiens
  misc_RNA (1)...(19): siRNA sense strand
gaagauggauaacagaaga

SEQ ID NO: 801530 - RNA, 19 nt, Homo sapiens
  misc_RNA (1)...(19): siRNA sense strand
gaacaggucuuggaaggaa

SEQ ID NO: 801531 - RNA, 19 nt, Homo sapiens
  misc_RNA (1)...(19): siRNA sense strand
gaagaaccaucuccuauag

SEQ ID NO: 801532 - RNA, 19 nt, Homo sapiens
  misc_RNA (1)...(19): siRNA sense strand
gggaaagccuucuguauau

SEQ ID NO: 801533 - RNA, 19 nt, Homo sapiens
  misc_RNA (1)...(19): siRNA sense strand
gaacaagcuugaagaugaa

SEQ ID NO: 801534 - RNA, 19 nt, Homo sapiens
  misc_RNA (1)...(19): siRNA sense strand
caaagacacugcugaaugu

SEQ ID NO: 801535 - RNA, 19 nt, Homo sapiens
  misc_RNA (1)...(19): siRNA sense strand
gaaacaagcacaaugacua

SEQ ID NO: 801536 - RNA, 19 nt, Homo sapiens
  misc_RNA (1)...(19): siRNA sense strand
gcaauaaguuugugguuuc

SEQ ID NO: 801537 - RNA, 19 nt, Homo sapiens
  misc_RNA (1)...(19): siRNA sense strand
gagcaggaauguuuaguga

SEQ ID NO: 801538 - RNA, 19 nt, Homo sapiens
  misc_RNA (1)...(19): siRNA sense strand
gcaauagguugaauauaga

SEQ ID NO: 801539 - RNA, 19 nt, Homo sapiens
  misc_RNA (1)...(19): siRNA sense strand
gcacauguaugaagucugu

SEQ ID NO: 801540 - RNA, 19 nt, Homo sapiens
  misc_RNA (1)...(19): siRNA sense strand
cagaugaaaugacacauaa

SEQ ID NO: 801541 - RNA, 19 nt, Homo sapiens
  misc_RNA (1)...(19): siRNA sense strand
ggauggagauaaagaugua

SEQ ID NO: 801542 - RNA, 19 nt, Homo sapiens
  misc_RNA (1)...(19): siRNA sense strand
gaaacaauaccuuuaguga

SEQ ID NO: 801543 - RNA, 19 nt, Homo sapiens
  misc_RNA (1)...(19): siRNA sense strand
agaacaagcuugaagauga

SEQ ID NO: 801544 - RNA, 19 nt, Homo sapiens
  misc_RNA (1)...(19): siRNA sense strand
gaacagccguuucaacucu

SEQ ID NO: 801545 - RNA, 19 nt, Homo sapiens
  misc_RNA (1)...(19): siRNA sense strand
agaaggagaucuacaagaa

SEQ ID NO: 801546 - RNA, 19 nt, Homo sapiens
  misc_RNA (1)...(19): siRNA sense strand
cuccagggcuucagaauua

SEQ ID NO: 801547 - RNA, 19 nt, Homo sapiens
  misc_RNA (1)...(19): siRNA sense strand
gaagaacaguuagaagcua

SEQ ID NO: 801548 - RNA, 19 nt, Homo sapiens
  misc_RNA (1)...(19): siRNA sense strand
ccacugcacuaacuacuaa

SEQ ID NO: 801549 - RNA, 19 nt, Homo sapiens
  misc_RNA (1)...(19): siRNA sense strand
caucucaccuccugcuuua

SEQ ID NO: 801550 - RNA, 19 nt, Homo sapiens
  misc_RNA (1)...(19): siRNA sense strand
guuaagguuucaucuguua

SEQ ID NO: 801551 - RNA, 19 nt, Homo sapiens
  misc_RNA (1)...(19): siRNA sense strand
gagaaagugugaugagaga

SEQ ID NO: 801552 - RNA, 19 nt, Homo sapiens
  misc_RNA (1)...(19): siRNA sense strand
gaacugaagcuucucuuug

SEQ ID NO: 801553 - RNA, 19 nt, Homo sapiens
  misc_RNA (1)...(19): siRNA sense strand
ucaggaaaguguugaaauu

SEQ ID NO: 801554 - RNA, 19 nt, Homo sapiens
  misc_RNA (1)...(19): siRNA sense strand
ggaaauaagcaagaugaua

SEQ ID NO: 801555 - RNA, 19 nt, Homo sapiens
  misc_RNA (1)...(19): siRNA sense strand
uaacagcuauugaaccuau

SEQ ID NO: 801556 - RNA, 19 nt, Homo sapiens
  misc_RNA (1)...(19): siRNA sense strand
aagaugaacugaaagauga

SEQ ID NO: 801557 - RNA, 19 nt, Homo sapiens
  misc_RNA (1)...(19): siRNA sense strand
gaacaguccauucaugaaa

SEQ ID NO: 801558 - RNA, 19 nt, Homo sapiens
  misc_RNA (1)...(19): siRNA sense strand
gacagaaguuugagcguuu

SEQ ID NO: 801559 - RNA, 19 nt, Homo sapiens
  misc_RNA (1)...(19): siRNA sense strand
ggagagcgauugucugcuu

SEQ ID NO: 801560 - RNA, 19 nt, Homo sapiens
  misc_RNA (1)...(19): siRNA sense strand
gacaagcagcugcguauua

SEQ ID NO: 801561 - RNA, 19 nt, Homo sapiens
  misc_RNA (1)...(19): siRNA sense strand
gaaacugaauggccgaaga

SEQ ID NO: 801562 - RNA, 19 nt, Homo sapiens
  misc_RNA (1)...(19): siRNA sense strand
gaauggacguggaauaaag

SEQ ID NO: 801563 - RNA, 19 nt, Homo sapiens
  misc_RNA (1)...(19): siRNA sense strand
guuagaagcuauauuguca

SEQ ID NO: 801564 - RNA, 19 nt, Homo sapiens
  misc_RNA (1)...(19): siRNA sense strand
gagagaaguuuaaauagag

SEQ ID NO: 801565 - RNA, 19 nt, Homo sapiens
  misc_RNA (1)...(19): siRNA sense strand
caggacaaaucuuauauga

SEQ ID NO: 801566 - RNA, 19 nt, Homo sapiens
  misc_RNA (1)...(19): siRNA sense strand
gaugauaaauccagugaca

SEQ ID NO: 801567 - RNA, 19 nt, Homo sapiens
  misc_RNA (1)...(19): siRNA sense strand
ggaaacuccucgcucacua

SEQ ID NO: 801568 - RNA, 19 nt, Homo sapiens
  misc_RNA (1)...(19): siRNA sense strand
gcuugaaacuccucuugua

SEQ ID NO: 801569 - RNA, 19 nt, Homo sapiens
  misc_RNA (1)...(19): siRNA sense strand
gaaagccuucuguauauuu

SEQ ID NO: 801570 - RNA, 19 nt, Homo sapiens
  misc_RNA (1)...(19): siRNA sense strand
ggaguguucucugucuuua

SEQ ID NO: 801571 - RNA, 19 nt, Homo sapiens
  misc_RNA (1)...(19): siRNA sense strand
ggagaaagaaagaaguuaa

SEQ ID NO: 801572 - RNA, 19 nt, Homo sapiens
  misc_RNA (1)...(19): siRNA sense strand
gaaacuggaugugagcaaa

SEQ ID NO: 801573 - RNA, 19 nt, Homo sapiens
  misc_RNA (1)...(19): siRNA sense strand
gauggaagauuuacugaag

SEQ ID NO: 801574 - RNA, 19 nt, Homo sapiens
  misc_RNA (1)...(19): siRNA sense strand
gacaagcccucagauauau

SEQ ID NO: 801575 - RNA, 19 nt, Homo sapiens
  misc_RNA (1)...(19): siRNA sense strand
ggaaagccuucuguauauu

SEQ ID NO: 801576 - RNA, 19 nt, Homo sapiens
  misc_RNA (1)...(19): siRNA sense strand
gcuugaagaugaacugaaa

SEQ ID NO: 801577 - RNA, 19 nt, Homo sapiens
  misc_RNA (1)...(19): siRNA sense strand
gaagaacgcacagaugaaa

SEQ ID NO: 801578 - RNA, 19 nt, Homo sapiens
  misc_RNA (1)...(19): siRNA sense strand
ugacauugcugaaguagau

SEQ ID NO: 801579 - RNA, 19 nt, Homo sapiens
  misc_RNA (1)...(19): siRNA sense strand
gcuaggaaucuuucauuua

SEQ ID NO: 801580 - RNA, 19 nt, Homo sapiens
  misc_RNA (1)...(19): siRNA sense strand
gcacuaacuacuaauguaa

SEQ ID NO: 801581 - RNA, 19 nt, Homo sapiens
  misc_RNA (1)...(19): siRNA sense strand
ccacauggcaucuuggaua

SEQ ID NO: 801582 - RNA, 19 nt, Homo sapiens
  misc_RNA (1)...(19): siRNA sense strand
cagcuggccuuugguaaua

SEQ ID NO: 801583 - RNA, 19 nt, Homo sapiens
  misc_RNA (1)...(19): siRNA sense strand
gaagaugaacugaaagaug

SEQ ID NO: 801584 - RNA, 19 nt, Homo sapiens
  misc_RNA (1)...(19): siRNA sense strand
gcaaauaccucaaaauucu

SEQ ID NO: 801585 - RNA, 19 nt, Homo sapiens
  misc_RNA (1)...(19): siRNA sense strand
gcacaaugacuaugaaugu

SEQ ID NO: 801586 - RNA, 19 nt, Homo sapiens
  misc_RNA (1)...(19): siRNA sense strand
aaacgugaaugucaaauca

SEQ ID NO: 801587 - RNA, 19 nt, Homo sapiens
  misc_RNA (1)...(19): siRNA sense strand
guaguaaacucuauaacag

SEQ ID NO: 801588 - RNA, 19 nt, Homo sapiens
  misc_RNA (1)...(19): siRNA sense strand
gaucuaaggcuguuaagga

SEQ ID NO: 801589 - RNA, 19 nt, Homo sapiens
  misc_RNA (1)...(19): siRNA sense strand
acaagcagcugcguauuaa

SEQ ID NO: 801590 - RNA, 19 nt, Homo sapiens
  misc_RNA (1)...(19): siRNA sense strand
cugauagacuuaagcaaua

SEQ ID NO: 801591 - RNA, 19 nt, Homo sapiens
  misc_RNA (1)...(19): siRNA sense strand
cugcacagcugaaagaauu

SEQ ID NO: 801592 - RNA, 19 nt, Homo sapiens
  misc_RNA (1)...(19): siRNA sense strand
gaaaucuccuuuguaccua

SEQ ID NO: 801593 - RNA, 19 nt, Homo sapiens
  misc_RNA (1)...(19): siRNA sense strand
ggcucgaaauucuauauua

SEQ ID NO: 801594 - RNA, 19 nt, Homo sapiens
  misc_RNA (1)...(19): siRNA sense strand
caaacacucuauuaccauu

SEQ ID NO: 801595 - RNA, 19 nt, Homo sapiens
  misc_RNA (1)...(19): siRNA sense strand
gacagauccuucuuauuga

SEQ ID NO: 801596 - RNA, 19 nt, Homo sapiens
  misc_RNA (1)...(19): siRNA sense strand
gagagaaguuaguccauca

SEQ ID NO: 801597 - RNA, 19 nt, Homo sapiens
  misc_RNA (1)...(19): siRNA sense strand
caugaaaucuccuuuguac

SEQ ID NO: 801598 - RNA, 19 nt, Homo sapiens
  misc_RNA (1)...(19): siRNA sense strand
gaacuguguugacaagauc

SEQ ID NO: 801599 - RNA, 19 nt, Homo sapiens
  misc_RNA (1)...(19): siRNA sense strand
uggcaacauucaaagauua

SEQ ID NO: 801600 - RNA, 19 nt, Homo sapiens
  misc_RNA (1)...(19): siRNA sense strand
gagagugguuuggaucuuu

SEQ ID NO: 801601 - RNA, 19 nt, Homo sapiens
  misc_RNA (1)...(19): siRNA sense strand
caucagaucuugaaguucu

SEQ ID NO: 801602 - RNA, 19 nt, Homo sapiens
  misc_RNA (1)...(19): siRNA sense strand
ccacuaaauuggucaaauc

SEQ ID NO: 801603 - RNA, 19 nt, Homo sapiens
  misc_RNA (1)...(19): siRNA sense strand
gaauuucauuuguggaaga

SEQ ID NO: 801604 - RNA, 19 nt, Homo sapiens
  misc_RNA (1)...(19): siRNA sense strand
agacaagcccucagauaua

SEQ ID NO: 801605 - RNA, 19 nt, Homo sapiens
  misc_RNA (1)...(19): siRNA sense strand
uauaaucgaugucuuguag

SEQ ID NO: 801606 - RNA, 19 nt, Homo sapiens
  misc_RNA (1)...(19): siRNA sense strand
agaaggagacuuugacuuu

SEQ ID NO: 801607 - RNA, 19 nt, Homo sapiens
  misc_RNA (1)...(19): siRNA sense strand
ugaugccacuuguuuguua

SEQ ID NO: 801608 - RNA, 19 nt, Homo sapiens
  misc_RNA (1)...(19): siRNA sense strand
guacaugagagaaguuuaa

SEQ ID NO: 801609 - RNA, 19 nt, Homo sapiens
  misc_RNA (1)...(19): siRNA sense strand
gcugaaguaccacacauua

SEQ ID NO: 801610 - RNA, 19 nt, Homo sapiens
  misc_RNA (1)...(19): siRNA sense strand
gaaacugucuuccuaucca

SEQ ID NO: 801611 - RNA, 19 nt, Homo sapiens
  misc_RNA (1)...(19): siRNA sense strand
gcaauuagagcaaaugaca

SEQ ID NO: 801612 - RNA, 19 nt, Homo sapiens
  misc_RNA (1)...(19): siRNA sense strand
acacugagcaggaauguuu

SEQ ID NO: 801613 - RNA, 19 nt, Homo sapiens
  misc_RNA (1)...(19): siRNA sense strand
caaagauuauucaggcauu

SEQ ID NO: 801614 - RNA, 19 nt, Homo sapiens
  misc_RNA (1)...(19): siRNA sense strand
gaugauugauggacugguu

SEQ ID NO: 801615 - RNA, 19 nt, Homo sapiens
  misc_RNA (1)...(19): siRNA sense strand
uaacacagcaacugaagaa

SEQ ID NO: 801616 - RNA, 19 nt, Homo sapiens
  misc_RNA (1)...(19): siRNA sense strand
ggaaccagcaguugaagaa

SEQ ID NO: 801617 - RNA, 19 nt, Homo sapiens
  misc_RNA (1)...(19): siRNA sense strand
caaaucagcacaacaggaa

SEQ ID NO: 801618 - RNA, 19 nt, Homo sapiens
  misc_RNA (1)...(19): siRNA sense strand
gcagaagagaacuggauua

SEQ ID NO: 801619 - RNA, 19 nt, Homo sapiens
  misc_RNA (1)...(19): siRNA sense strand
gagagcgauugucugcuua

SEQ ID NO: 801620 - RNA, 19 nt, Homo sapiens
  misc_RNA (1)...(19): siRNA sense strand
cauaaugugucccacuaaa

SEQ ID NO: 801621 - RNA, 19 nt, Homo sapiens
  misc_RNA (1)...(19): siRNA sense strand
gcaaagcacucauugauac

SEQ ID NO: 801622 - RNA, 19 nt, Homo sapiens
  misc_RNA (1)...(19): siRNA sense strand
uugaagagcuuuaaggaua

SEQ ID NO: 801623 - RNA, 19 nt, Homo sapiens
  misc_RNA (1)...(19): siRNA sense strand
ggauaacuauaacacauug

SEQ ID NO: 801624 - RNA, 19 nt, Homo sapiens
  misc_RNA (1)...(19): siRNA sense strand
gaaagaggagauugauauu

SEQ ID NO: 801625 - RNA, 19 nt, Homo sapiens
  misc_RNA (1)...(19): siRNA sense strand
ugaagagcuuuaaggauaa

SEQ ID NO: 801626 - RNA, 19 nt, Homo sapiens
  misc_RNA (1)...(19): siRNA sense strand
gcaagaauuuccgcuccua

SEQ ID NO: 801627 - RNA, 19 nt, Homo sapiens
  misc_RNA (1)...(19): siRNA sense strand
ugaaagaggagauugauau

SEQ ID NO: 801628 - RNA, 19 nt, Homo sapiens
  misc_RNA (1)...(19): siRNA sense strand
ccucugagaucccauuuca

SEQ ID NO: 801629 - RNA, 19 nt, Homo sapiens
  misc_RNA (1)...(19): siRNA sense strand
uauaacacauuggagagua

SEQ ID NO: 801630 - RNA, 19 nt, Homo sapiens
  misc_RNA (1)...(19): siRNA sense strand
gaucugcgaaacacuagua

SEQ ID NO: 801631 - RNA, 19 nt, Homo sapiens
  misc_RNA (1)...(19): siRNA sense strand
gaaacacuaguacgccuuu

SEQ ID NO: 801632 - RNA, 19 nt, Homo sapiens
  misc_RNA (1)...(19): siRNA sense strand
gaaaucaaaguugcuacaa

SEQ ID NO: 801633 - RNA, 19 nt, Homo sapiens
  misc_RNA (1)...(19): siRNA sense strand
gcuccuaccugcuggaucu

SEQ ID NO: 801634 - RNA, 19 nt, Homo sapiens
  misc_RNA (1)...(19): siRNA sense strand
ugaugaugcuagacuacua

SEQ ID NO: 801635 - RNA, 19 nt, Homo sapiens
  misc_RNA (1)...(19): siRNA sense strand
ucugagaucccauuucauu

SEQ ID NO: 801636 - RNA, 19 nt, Homo sapiens
  misc_RNA (1)...(19): siRNA sense strand
uucaggauaucaaguauga

SEQ ID NO: 801637 - RNA, 19 nt, Homo sapiens
  misc_RNA (1)...(19): siRNA sense strand
gaaacccagggaaaucaaa

SEQ ID NO: 801638 - RNA, 19 nt, Homo sapiens
  misc_RNA (1)...(19): siRNA sense strand
caaccauccaggugacaua

SEQ ID NO: 801639 - RNA, 19 nt, Homo sapiens
  misc_RNA (1)...(19): siRNA sense strand
gaaugaguaccuacgcuau

SEQ ID NO: 801640 - RNA, 19 nt, Homo sapiens
  misc_RNA (1)...(19): siRNA sense strand
ggaaaucaaaguugcuaca

SEQ ID NO: 801641 - RNA, 19 nt, Homo sapiens
  misc_RNA (1)...(19): siRNA sense strand
uuucaaggguguacgcaaa

SEQ ID NO: 801642 - RNA, 19 nt, Homo sapiens
  misc_RNA (1)...(19): siRNA sense strand
gcgguuaaagcacgaauug

SEQ ID NO: 801643 - RNA, 19 nt, Homo sapiens
  misc_RNA (1)...(19): siRNA sense strand
gagaucccauuucauucug

SEQ ID NO: 801644 - RNA, 19 nt, Homo sapiens
  misc_RNA (1)...(19): siRNA sense strand
guacgcaaagcacucauug

SEQ ID NO: 801645 - RNA, 19 nt, Homo sapiens
  misc_RNA (1)...(19): siRNA sense strand
gagcuggccacugcgguua

SEQ ID NO: 801646 - RNA, 19 nt, Homo sapiens
  misc_RNA (1)...(19): siRNA sense strand
gaauugaagagcuuuaagg

SEQ ID NO: 801647 - RNA, 19 nt, Homo sapiens
  misc_RNA (1)...(19): siRNA sense strand
aagaggagauugauauucg

SEQ ID NO: 801648 - RNA, 19 nt, Homo sapiens
  misc_RNA (1)...(19): siRNA sense strand
ggacuugaaagaggagauu

SEQ ID NO: 801649 - RNA, 19 nt, Homo sapiens
  misc_RNA (1)...(19): siRNA sense strand
cgcaaagcacucauugaua

SEQ ID NO: 801650 - RNA, 19 nt, Homo sapiens
  misc_RNA (1)...(19): siRNA sense strand
ucagcgacaucaccaguca

SEQ ID NO: 801651 - RNA, 19 nt, Homo sapiens
  misc_RNA (1)...(19): siRNA sense strand
ggguucaggauaucaagua

SEQ ID NO: 801652 - RNA, 19 nt, Homo sapiens
  misc_RNA (1)...(19): siRNA sense strand
ggaaacccagggaaaucaa

SEQ ID NO: 801653 - RNA, 19 nt, Homo sapiens
  misc_RNA (1)...(19): siRNA sense strand
gcacucauugauacccuuu

SEQ ID NO: 801654 - RNA, 19 nt, Homo sapiens
  misc_RNA (1)...(19): siRNA sense strand
gaagagcuuuaaggauaac

SEQ ID NO: 801655 - RNA, 19 nt, Homo sapiens
  misc_RNA (1)...(19): siRNA sense strand
gagcuuuaaggauaacuau

SEQ ID NO: 801656 - RNA, 19 nt, Homo sapiens
  misc_RNA (1)...(19): siRNA sense strand
gguucaggauaucaaguau

SEQ ID NO: 801657 - RNA, 19 nt, Homo sapiens
  misc_RNA (1)...(19): siRNA sense strand
gccaaagaccuaacucagu

SEQ ID NO: 801658 - RNA, 19 nt, Homo sapiens
  misc_RNA (1)...(19): siRNA sense strand
ucuccaggguucaggauau

SEQ ID NO: 801659 - RNA, 19 nt, Homo sapiens
  misc_RNA (1)...(19): siRNA sense strand
agaugaugaugcuagacua

SEQ ID NO: 801660 - RNA, 19 nt, Homo sapiens
  misc_RNA (1)...(19): siRNA sense strand
gcuggccacugcgguuaaa

SEQ ID NO: 801661 - RNA, 19 nt, Homo sapiens
  misc_RNA (1)...(19): siRNA sense strand
gaugcuagacuacuacaac

SEQ ID NO: 801662 - RNA, 19 nt, Homo sapiens
  misc_RNA (1)...(19): siRNA sense strand
acgcaaagcacucauugau

SEQ ID NO: 801663 - RNA, 19 nt, Homo sapiens
  misc_RNA (1)...(19): siRNA sense strand
gcucuggaugccauucgua

SEQ ID NO: 801664 - RNA, 19 nt, Homo sapiens
  misc_RNA (1)...(19): siRNA sense strand
ccuccagucagaagaguaa

SEQ ID NO: 801665 - RNA, 19 nt, Homo sapiens
  misc_RNA (1)...(19): siRNA sense strand
ugagaucccauuucauucu

SEQ ID NO: 801666 - RNA, 19 nt, Homo sapiens
  misc_RNA (1)...(19): siRNA sense strand
aaagaggagauugauauuc

SEQ ID NO: 801667 - RNA, 19 nt, Homo sapiens
  misc_RNA (1)...(19): siRNA sense strand
gucagcagccaaagaccua

SEQ ID NO: 801668 - RNA, 19 nt, Homo sapiens
  misc_RNA (1)...(19): siRNA sense strand
ccuuaaugggcaagaauuu

SEQ ID NO: 801669 - RNA, 19 nt, Homo sapiens
  misc_RNA (1)...(19): siRNA sense strand
guaccucugagaucccauu

SEQ ID NO: 801670 - RNA, 19 nt, Homo sapiens
  misc_RNA (1)...(19): siRNA sense strand
acgggagccuggacuugaa

SEQ ID NO: 801671 - RNA, 19 nt, Homo sapiens
  misc_RNA (1)...(19): siRNA sense strand
agacuacuacaacuggaaa

SEQ ID NO: 801672 - RNA, 19 nt, Homo sapiens
  misc_RNA (1)...(19): siRNA sense strand
agaguaaacgugccaagca

SEQ ID NO: 801673 - RNA, 19 nt, Homo sapiens
  misc_RNA (1)...(19): siRNA sense strand
gaaagcucuggaugccauu

SEQ ID NO: 801674 - RNA, 19 nt, Homo sapiens
  misc_RNA (1)...(19): siRNA sense strand
ugaaugucgugcuggugau

SEQ ID NO: 801675 - RNA, 19 nt, Homo sapiens
  misc_RNA (1)...(19): siRNA sense strand
ucaccagucagcagccaaa

SEQ ID NO: 801676 - RNA, 19 nt, Homo sapiens
  misc_RNA (1)...(19): siRNA sense strand
acacuaguacgccuuucaa

SEQ ID NO: 801677 - RNA, 19 nt, Homo sapiens
  misc_RNA (1)...(19): siRNA sense strand
uaaauucccugguugauaa

SEQ ID NO: 801678 - RNA, 19 nt, Homo sapiens
  misc_RNA (1)...(19): siRNA sense strand
guagaagccuuacguguuu

SEQ ID NO: 801679 - RNA, 19 nt, Homo sapiens
  misc_RNA (1)...(19): siRNA sense strand
gcaaaggaacugauuauug

SEQ ID NO: 801680 - RNA, 19 nt, Homo sapiens
  misc_RNA (1)...(19): siRNA sense strand
guuaugaccuuuacacuug

SEQ ID NO: 801681 - RNA, 19 nt, Homo sapiens
  misc_RNA (1)...(19): siRNA sense strand
caaaggaacugauuauugc

SEQ ID NO: 801682 - RNA, 19 nt, Homo sapiens
  misc_RNA (1)...(19): siRNA sense strand
agaaagaugucaacagcua

SEQ ID NO: 801683 - RNA, 19 nt, Homo sapiens
  misc_RNA (1)...(19): siRNA sense strand
gagcaucauuucuucuaaa

SEQ ID NO: 801684 - RNA, 19 nt, Homo sapiens
  misc_RNA (1)...(19): siRNA sense strand
acagcuaucugcuacaaua

SEQ ID NO: 801685 - RNA, 19 nt, Homo sapiens
  misc_RNA (1)...(19): siRNA sense strand
gauuauugcucaguuguaa

SEQ ID NO: 801686 - RNA, 19 nt, Homo sapiens
  misc_RNA (1)...(19): siRNA sense strand
uaacuugccugcucuuuag

SEQ ID NO: 801687 - RNA, 19 nt, Homo sapiens
  misc_RNA (1)...(19): siRNA sense strand
ggacaccauuuccaucuug

SEQ ID NO: 801688 - RNA, 19 nt, Homo sapiens
  misc_RNA (1)...(19): siRNA sense strand
ggacggagcaucauuucuu

SEQ ID NO: 801689 - RNA, 19 nt, Homo sapiens
  misc_RNA (1)...(19): siRNA sense strand
gcaagaaguuccacaugag

SEQ ID NO: 801690 - RNA, 19 nt, Homo sapiens
  misc_RNA (1)...(19): siRNA sense strand
gacaaauucuuccagauuc

SEQ ID NO: 801691 - RNA, 19 nt, Homo sapiens
  misc_RNA (1)...(19): siRNA sense strand
uaucauaccucgcacuuca

SEQ ID NO: 801692 - RNA, 19 nt, Homo sapiens
  misc_RNA (1)...(19): siRNA sense strand
cgaacaaguuuaauagugu

SEQ ID NO: 801693 - RNA, 19 nt, Homo sapiens
  misc_RNA (1)...(19): siRNA sense strand
ggagcaucauuucuucuaa

SEQ ID NO: 801694 - RNA, 19 nt, Homo sapiens
  misc_RNA (1)...(19): siRNA sense strand
ucucauggauucugacaaa

SEQ ID NO: 801695 - RNA, 19 nt, Homo sapiens
  misc_RNA (1)...(19): siRNA sense strand
gaacaauacaucacuaugg

SEQ ID NO: 801696 - RNA, 19 nt, Homo sapiens
  misc_RNA (1)...(19): siRNA sense strand
caacagcuaucugcuacaa

SEQ ID NO: 801697 - RNA, 19 nt, Homo sapiens
  misc_RNA (1)...(19): siRNA sense strand
cuacaauacuuacagauca

SEQ ID NO: 801698 - RNA, 19 nt, Homo sapiens
  misc_RNA (1)...(19): siRNA sense strand
ggcaagaucucugaagguu

SEQ ID NO: 801699 - RNA, 19 nt, Homo sapiens
  misc_RNA (1)...(19): siRNA sense strand
gcucuggcuuugcaucuuu

SEQ ID NO: 801700 - RNA, 19 nt, Homo sapiens
  misc_RNA (1)...(19): siRNA sense strand
gagaaucagacaauguuaa

SEQ ID NO: 801701 - RNA, 19 nt, Homo sapiens
  misc_RNA (1)...(19): siRNA sense strand
gguagaagccuuacguguu

SEQ ID NO: 801702 - RNA, 19 nt, Homo sapiens
  misc_RNA (1)...(19): siRNA sense strand
gauguuaucugucaaucag

SEQ ID NO: 801703 - RNA, 19 nt, Homo sapiens
  misc_RNA (1)...(19): siRNA sense strand
ugagggcgauuuggauaua

SEQ ID NO: 801704 - RNA, 19 nt, Homo sapiens
  misc_RNA (1)...(19): siRNA sense strand
caucguggauuccuucuuc

SEQ ID NO: 801705 - RNA, 19 nt, Homo sapiens
  misc_RNA (1)...(19): siRNA sense strand
gauaaaacaucguggauuc

SEQ ID NO: 801706 - RNA, 19 nt, Homo sapiens
  misc_RNA (1)...(19): siRNA sense strand
ggagaggacaccacuaugu

SEQ ID NO: 801707 - RNA, 19 nt, Homo sapiens
  misc_RNA (1)...(19): siRNA sense strand
ugacaaauucuuccagauu

SEQ ID NO: 801708 - RNA, 19 nt, Homo sapiens
  misc_RNA (1)...(19): siRNA sense strand
aaacuucauugcccuaaau

SEQ ID NO: 801709 - RNA, 19 nt, Homo sapiens
  misc_RNA (1)...(19): siRNA sense strand
ucacaaauggaacagauaa

SEQ ID NO: 801710 - RNA, 19 nt, Homo sapiens
  misc_RNA (1)...(19): siRNA sense strand
caucauuucuucuaaaggu

SEQ ID NO: 801711 - RNA, 19 nt, Homo sapiens
  misc_RNA (1)...(19): siRNA sense strand
cagacaauguuaaguuuag

SEQ ID NO: 801712 - RNA, 19 nt, Homo sapiens
  misc_RNA (1)...(19): siRNA sense strand
gcauauccgugguuggaau

SEQ ID NO: 801713 - RNA, 19 nt, Homo sapiens
  misc_RNA (1)...(19): siRNA sense strand
aaucagcauucagauguua

SEQ ID NO: 801714 - RNA, 19 nt, Homo sapiens
  misc_RNA (1)...(19): siRNA sense strand
ugcaagaaguuccacauga

SEQ ID NO: 801715 - RNA, 19 nt, Homo sapiens
  misc_RNA (1)...(19): siRNA sense strand
ugugagaucuggccacgaa

SEQ ID NO: 801716 - RNA, 19 nt, Homo sapiens
  misc_RNA (1)...(19): siRNA sense strand
gagcaaaauugaggucaua

SEQ ID NO: 801717 - RNA, 19 nt, Homo sapiens
  misc_RNA (1)...(19): siRNA sense strand
caaauggaacagauaauca

SEQ ID NO: 801718 - RNA, 19 nt, Homo sapiens
  misc_RNA (1)...(19): siRNA sense strand
cauacaaugucacaaaugg

SEQ ID NO: 801719 - RNA, 19 nt, Homo sapiens
  misc_RNA (1)...(19): siRNA sense strand
cauggauucugacaaauuc

SEQ ID NO: 801720 - RNA, 19 nt, Homo sapiens
  misc_RNA (1)...(19): siRNA sense strand
ccaaucagcauucagaugu

SEQ ID NO: 801721 - RNA, 19 nt, Homo sapiens
  misc_RNA (1)...(19): siRNA sense strand
gcagaagcacuggguauug

SEQ ID NO: 801722 - RNA, 19 nt, Homo sapiens
  misc_RNA (1)...(19): siRNA sense strand
ucgaacaaguuuaauagug

SEQ ID NO: 801723 - RNA, 19 nt, Homo sapiens
  misc_RNA (1)...(19): siRNA sense strand
uaccaaacuucaaucaaug

SEQ ID NO: 801724 - RNA, 19 nt, Homo sapiens
  misc_RNA (1)...(19): siRNA sense strand
aagccuaucucauggauuc

SEQ ID NO: 801725 - RNA, 19 nt, Homo sapiens
  misc_RNA (1)...(19): siRNA sense strand
cagaagcacuggguauugu

SEQ ID NO: 801726 - RNA, 19 nt, Homo sapiens
  misc_RNA (1)...(19): siRNA sense strand
gcuaucugcuacaauacuu

SEQ ID NO: 801727 - RNA, 19 nt, Homo sapiens
  misc_RNA (1)...(19): siRNA sense strand
uaagcaaaggaacugauua

SEQ ID NO: 801728 - RNA, 19 nt, Homo sapiens
  misc_RNA (1)...(19): siRNA sense strand
ggaccuuucagcaccauuu

SEQ ID NO: 801729 - RNA, 19 nt, Homo sapiens
  misc_RNA (1)...(19): siRNA sense strand
ccagacaaauguaaaacua

SEQ ID NO: 801730 - RNA, 19 nt, Homo sapiens
  misc_RNA (1)...(19): siRNA sense strand
cuaacuugccugcucuuua

SEQ ID NO: 801731 - RNA, 19 nt, Homo sapiens
  misc_RNA (1)...(19): siRNA sense strand
aacaauacaucacuaugga

SEQ ID NO: 801732 - RNA, 19 nt, Homo sapiens
  misc_RNA (1)...(19): siRNA sense strand
uaaacuucauugcccuaaa

SEQ ID NO: 801733 - RNA, 19 nt, Homo sapiens
  misc_RNA (1)...(19): siRNA sense strand
aaauugaggucauauaagc

SEQ ID NO: 801734 - RNA, 19 nt, Homo sapiens
  misc_RNA (1)...(19): siRNA sense strand
uauacgagguagaaagaug

SEQ ID NO: 801735 - RNA, 19 nt, Homo sapiens
  misc_RNA (1)...(19): siRNA sense strand
cagagaaucagacaauguu

SEQ ID NO: 801736 - RNA, 19 nt, Homo sapiens
  misc_RNA (1)...(19): siRNA sense strand
guuugggcaucuacucaua

SEQ ID NO: 801737 - RNA, 19 nt, Homo sapiens
  misc_RNA (1)...(19): siRNA sense strand
gacggagcaucauuucuuc

SEQ ID NO: 801738 - RNA, 19 nt, Homo sapiens
  misc_RNA (1)...(19): siRNA sense strand
gagggcgauuuggauauaa

SEQ ID NO: 801739 - RNA, 19 nt, Homo sapiens
  misc_RNA (1)...(19): siRNA sense strand
caaauuugacagccaauca

SEQ ID NO: 801740 - RNA, 19 nt, Homo sapiens
  misc_RNA (1)...(19): siRNA sense strand
guuuagaguuucaucuuca

SEQ ID NO: 801741 - RNA, 19 nt, Homo sapiens
  misc_RNA (1)...(19): siRNA sense strand
ucuaugguguugugaaguu

SEQ ID NO: 801742 - RNA, 19 nt, Homo sapiens
  misc_RNA (1)...(19): siRNA sense strand
ucacauccaucggcuacaa

SEQ ID NO: 801743 - RNA, 19 nt, Homo sapiens
  misc_RNA (1)...(19): siRNA sense strand
ucuauagccuucauaccaa

SEQ ID NO: 801744 - RNA, 19 nt, Homo sapiens
  misc_RNA (1)...(19): siRNA sense strand
caaugucuaugguguugug

SEQ ID NO: 801745 - RNA, 19 nt, Homo sapiens
  misc_RNA (1)...(19): siRNA sense strand
cuaaauucccugguugaua

SEQ ID NO: 801746 - RNA, 19 nt, Homo sapiens
  misc_RNA (1)...(19): siRNA sense strand
aaaucuaaauucccugguu

SEQ ID NO: 801747 - RNA, 19 nt, Homo sapiens
  misc_RNA (1)...(19): siRNA sense strand
agaaggagguacacucagu

SEQ ID NO: 801748 - RNA, 19 nt, Homo sapiens
  misc_RNA (1)...(19): siRNA sense strand
gagaggacaccacuaugug

SEQ ID NO: 801749 - RNA, 19 nt, Homo sapiens
  misc_RNA (1)...(19): siRNA sense strand
cuggaucaguaucauuaua

SEQ ID NO: 801750 - RNA, 19 nt, Homo sapiens
  misc_RNA (1)...(19): siRNA sense strand
ggagauauuguucgcuuuc

SEQ ID NO: 801751 - RNA, 19 nt, Homo sapiens
  misc_RNA (1)...(19): siRNA sense strand
guggauaugaucauggaua

SEQ ID NO: 801752 - RNA, 19 nt, Homo sapiens
  misc_RNA (1)...(19): siRNA sense strand
ggaugaugaccuucagaaa

SEQ ID NO: 801753 - RNA, 19 nt, Homo sapiens
  misc_RNA (1)...(19): siRNA sense strand
ggaacaauacaucacuaug

SEQ ID NO: 801754 - RNA, 19 nt, Homo sapiens
  misc_RNA (1)...(19): siRNA sense strand
ucaggauggugcaacuaaa

SEQ ID NO: 801755 - RNA, 19 nt, Homo sapiens
  misc_RNA (1)...(19): siRNA sense strand
gaaagaugucaacagcuau

SEQ ID NO: 801756 - RNA, 19 nt, Homo sapiens
  misc_RNA (1)...(19): siRNA sense strand
caaucagcauucagauguu

SEQ ID NO: 801757 - RNA, 19 nt, Homo sapiens
  misc_RNA (1)...(19): siRNA sense strand
ucugaagguuggaagcuuu

SEQ ID NO: 801758 - RNA, 19 nt, Homo sapiens
  misc_RNA (1)...(19): siRNA sense strand
ggacauuacuaaaauugug

SEQ ID NO: 801759 - RNA, 19 nt, Homo sapiens
  misc_RNA (1)...(19): siRNA sense strand
caccacaguugcagaagau

SEQ ID NO: 801760 - RNA, 19 nt, Homo sapiens
  misc_RNA (1)...(19): siRNA sense strand
caugagggcgauuuggaua

SEQ ID NO: 801761 - RNA, 19 nt, Homo sapiens
  misc_RNA (1)...(19): siRNA sense strand
gagauauuguucgcuuuca

SEQ ID NO: 801762 - RNA, 19 nt, Homo sapiens
  misc_RNA (1)...(19): siRNA sense strand
acuagaagccuaucucaug

SEQ ID NO: 801763 - RNA, 19 nt, Homo sapiens
  misc_RNA (1)...(19): siRNA sense strand
uauaagcccagaagacuau

SEQ ID NO: 801764 - RNA, 19 nt, Homo sapiens
  misc_RNA (1)...(19): siRNA sense strand
caaaaugguagaagccuua

SEQ ID NO: 801765 - RNA, 19 nt, Homo sapiens
  misc_RNA (1)...(19): siRNA sense strand
ccacgaagaccuggaacuu

SEQ ID NO: 801766 - RNA, 19 nt, Homo sapiens
  misc_RNA (1)...(19): siRNA sense strand
gguauucucccgcuuucaa

SEQ ID NO: 801767 - RNA, 19 nt, Homo sapiens
  misc_RNA (1)...(19): siRNA sense strand
gaaaaguagcaguucauuu

SEQ ID NO: 801768 - RNA, 19 nt, Homo sapiens
  misc_RNA (1)...(19): siRNA sense strand
uggagagucuuaauacaag

SEQ ID NO: 801769 - RNA, 19 nt, Homo sapiens
  misc_RNA (1)...(19): siRNA sense strand
ucuugaaggugauuuaagu

SEQ ID NO: 801770 - RNA, 19 nt, Homo sapiens
  misc_RNA (1)...(19): siRNA sense strand
gucauacaaugucacaaau

SEQ ID NO: 801771 - RNA, 19 nt, Homo sapiens
  misc_RNA (1)...(19): siRNA sense strand
gucaaugucuaugguguug

SEQ ID NO: 801772 - RNA, 19 nt, Homo sapiens
  misc_RNA (1)...(19): siRNA sense strand
ugauggaacaggaguacua

SEQ ID NO: 801773 - RNA, 19 nt, Homo sapiens
  misc_RNA (1)...(19): siRNA sense strand
acuuacagaucaucaguau

SEQ ID NO: 801774 - RNA, 19 nt, Homo sapiens
  misc_RNA (1)...(19): siRNA sense strand
gaugaugaccuucagaaaa

SEQ ID NO: 801775 - RNA, 19 nt, Homo sapiens
  misc_RNA (1)...(19): siRNA sense strand
ucugauggaugaugaccuu

SEQ ID NO: 801776 - RNA, 19 nt, Homo sapiens
  misc_RNA (1)...(19): siRNA sense strand
aaggaacaauacaucacua

SEQ ID NO: 801777 - RNA, 19 nt, Homo sapiens
  misc_RNA (1)...(19): siRNA sense strand
gcaaacagcugcagaugaa

SEQ ID NO: 801778 - RNA, 19 nt, Homo sapiens
  misc_RNA (1)...(19): siRNA sense strand
gaacauccaugauaaugaa

SEQ ID NO: 801779 - RNA, 19 nt, Homo sapiens
  misc_RNA (1)...(19): siRNA sense strand
gaucaacucuugccuaugg

SEQ ID NO: 801780 - RNA, 19 nt, Homo sapiens
  misc_RNA (1)...(19): siRNA sense strand
ggagagaaacauugcuuua

SEQ ID NO: 801781 - RNA, 19 nt, Homo sapiens
  misc_RNA (1)...(19): siRNA sense strand
gcaaagaugagacugauga

SEQ ID NO: 801782 - RNA, 19 nt, Homo sapiens
  misc_RNA (1)...(19): siRNA sense strand
caaagaggauguaucaaca

SEQ ID NO: 801783 - RNA, 19 nt, Homo sapiens
  misc_RNA (1)...(19): siRNA sense strand
caacagggcaggagagaaa

SEQ ID NO: 801784 - RNA, 19 nt, Homo sapiens
  misc_RNA (1)...(19): siRNA sense strand
caaaugaggcugcaagaga

SEQ ID NO: 801785 - RNA, 19 nt, Homo sapiens
  misc_RNA (1)...(19): siRNA sense strand
aaacauugcuuuaccucaa

SEQ ID NO: 801786 - RNA, 19 nt, Homo sapiens
  misc_RNA (1)...(19): siRNA sense strand
guucaggaguuucaagauu

SEQ ID NO: 801787 - RNA, 19 nt, Homo sapiens
  misc_RNA (1)...(19): siRNA sense strand
uaacagauuugccauuugg

SEQ ID NO: 801788 - RNA, 19 nt, Homo sapiens
  misc_RNA (1)...(19): siRNA sense strand
gagagaaacuugggucauc

SEQ ID NO: 801789 - RNA, 19 nt, Homo sapiens
  misc_RNA (1)...(19): siRNA sense strand
cagagaccguggcaagaua

SEQ ID NO: 801790 - RNA, 19 nt, Homo sapiens
  misc_RNA (1)...(19): siRNA sense strand
gaauagagcagcaaauaac

SEQ ID NO: 801791 - RNA, 19 nt, Homo sapiens
  misc_RNA (1)...(19): siRNA sense strand
gaggaacucuuuggcaaug

SEQ ID NO: 801792 - RNA, 19 nt, Homo sapiens
  misc_RNA (1)...(19): siRNA sense strand
gauuaccaguucaaacaaa

SEQ ID NO: 801793 - RNA, 19 nt, Homo sapiens
  misc_RNA (1)...(19): siRNA sense strand
gugaauagagcagcaaaua

SEQ ID NO: 801794 - RNA, 19 nt, Homo sapiens
  misc_RNA (1)...(19): siRNA sense strand
acucuuagaucaacucuug

SEQ ID NO: 801795 - RNA, 19 nt, Homo sapiens
  misc_RNA (1)...(19): siRNA sense strand
gaugaaagcucaaaagaag

SEQ ID NO: 801796 - RNA, 19 nt, Homo sapiens
  misc_RNA (1)...(19): siRNA sense strand
ugaauggucugacuguuuc

SEQ ID NO: 801797 - RNA, 19 nt, Homo sapiens
  misc_RNA (1)...(19): siRNA sense strand
uguaacagauuugccauuu

SEQ ID NO: 801798 - RNA, 19 nt, Homo sapiens
  misc_RNA (1)...(19): siRNA sense strand
gauccucuaccuuaugaua

SEQ ID NO: 801799 - RNA, 19 nt, Homo sapiens
  misc_RNA (1)...(19): siRNA sense strand
ccauauugcuggugauaau

SEQ ID NO: 801800 - RNA, 19 nt, Homo sapiens
  misc_RNA (1)...(19): siRNA sense strand
gugcugaaguuuagaguca

SEQ ID NO: 801801 - RNA, 19 nt, Homo sapiens
  misc_RNA (1)...(19): siRNA sense strand
gaacuggcucuguggauau

SEQ ID NO: 801802 - RNA, 19 nt, Homo sapiens
  misc_RNA (1)...(19): siRNA sense strand
uaacuuauuuguggugguu

SEQ ID NO: 801803 - RNA, 19 nt, Homo sapiens
  misc_RNA (1)...(19): siRNA sense strand
guaacagauuugccauuug

SEQ ID NO: 801804 - RNA, 19 nt, Homo sapiens
  misc_RNA (1)...(19): siRNA sense strand
uagaucaacucuugccuau

SEQ ID NO: 801805 - RNA, 19 nt, Homo sapiens
  misc_RNA (1)...(19): siRNA sense strand
caacauuaauaggugauga

SEQ ID NO: 801806 - RNA, 19 nt, Homo sapiens
  misc_RNA (1)...(19): siRNA sense strand
uucaggaguuucaagauua

SEQ ID NO: 801807 - RNA, 19 nt, Homo sapiens
  misc_RNA (1)...(19): siRNA sense strand
gaccaagagccaaauuaaa

SEQ ID NO: 801808 - RNA, 19 nt, Homo sapiens
  misc_RNA (1)...(19): siRNA sense strand
gagcuguacuacuuacuca

SEQ ID NO: 801809 - RNA, 19 nt, Homo sapiens
  misc_RNA (1)...(19): siRNA sense strand
gaauucaaguaaagagaag

SEQ ID NO: 801810 - RNA, 19 nt, Homo sapiens
  misc_RNA (1)...(19): siRNA sense strand
agaacuggcucuguggaua

SEQ ID NO: 801811 - RNA, 19 nt, Homo sapiens
  misc_RNA (1)...(19): siRNA sense strand
ugaccaagagccaaauuaa

SEQ ID NO: 801812 - RNA, 19 nt, Homo sapiens
  misc_RNA (1)...(19): siRNA sense strand
gugauccucuaccuuauga

SEQ ID NO: 801813 - RNA, 19 nt, Homo sapiens
  misc_RNA (1)...(19): siRNA sense strand
caacuuugauguggagguu

SEQ ID NO: 801814 - RNA, 19 nt, Homo sapiens
  misc_RNA (1)...(19): siRNA sense strand
gcacagguucauugucuga

SEQ ID NO: 801815 - RNA, 19 nt, Homo sapiens
  misc_RNA (1)...(19): siRNA sense strand
gaacguugguggucuucgu

SEQ ID NO: 801816 - RNA, 19 nt, Homo sapiens
  misc_RNA (1)...(19): siRNA sense strand
ggcgaaagguggauacagu

SEQ ID NO: 801817 - RNA, 19 nt, Homo sapiens
  misc_RNA (1)...(19): siRNA sense strand
ugaauagagcagcaaauaa

SEQ ID NO: 801818 - RNA, 19 nt, Homo sapiens
  misc_RNA (1)...(19): siRNA sense strand
aaacuugggucaucaugca

SEQ ID NO: 801819 - RNA, 19 nt, Homo sapiens
  misc_RNA (1)...(19): siRNA sense strand
gcauugcauugacugaaga

SEQ ID NO: 801820 - RNA, 19 nt, Homo sapiens
  misc_RNA (1)...(19): siRNA sense strand
ugaagaagccacuaaccaa

SEQ ID NO: 801821 - RNA, 19 nt, Homo sapiens
  misc_RNA (1)...(19): siRNA sense strand
gaacaagacggagaaagag

SEQ ID NO: 801822 - RNA, 19 nt, Homo sapiens
  misc_RNA (1)...(19): siRNA sense strand
uauaauagucgauccaaug

SEQ ID NO: 801823 - RNA, 19 nt, Homo sapiens
  misc_RNA (1)...(19): siRNA sense strand
ccucaagugcugaaguuua

SEQ ID NO: 801824 - RNA, 19 nt, Homo sapiens
  misc_RNA (1)...(19): siRNA sense strand
cagaugaagucagagagaa

SEQ ID NO: 801825 - RNA, 19 nt, Homo sapiens
  misc_RNA (1)...(19): siRNA sense strand
ucugugauccucuaccuua

SEQ ID NO: 801826 - RNA, 19 nt, Homo sapiens
  misc_RNA (1)...(19): siRNA sense strand
aaaugaggcugcaagagau

SEQ ID NO: 801827 - RNA, 19 nt, Homo sapiens
  misc_RNA (1)...(19): siRNA sense strand
cuaaccaacuccuagaugu

SEQ ID NO: 801828 - RNA, 19 nt, Homo sapiens
  misc_RNA (1)...(19): siRNA sense strand
gcagaugaagucagagaga

SEQ ID NO: 801829 - RNA, 19 nt, Homo sapiens
  misc_RNA (1)...(19): siRNA sense strand
aauagucgauccaaugugu

SEQ ID NO: 801830 - RNA, 19 nt, Homo sapiens
  misc_RNA (1)...(19): siRNA sense strand
gcccauagaugcuguucag

SEQ ID NO: 801831 - RNA, 19 nt, Homo sapiens
  misc_RNA (1)...(19): siRNA sense strand
agaacaagacggagaaaga

SEQ ID NO: 801832 - RNA, 19 nt, Homo sapiens
  misc_RNA (1)...(19): siRNA sense strand
caaaaucgaucagagaaau

SEQ ID NO: 801833 - RNA, 19 nt, Homo sapiens
  misc_RNA (1)...(19): siRNA sense strand
caagagccaaauuaaagaa

SEQ ID NO: 801834 - RNA, 19 nt, Homo sapiens
  misc_RNA (1)...(19): siRNA sense strand
ccaagagccaaauuaaaga

SEQ ID NO: 801835 - RNA, 19 nt, Homo sapiens
  misc_RNA (1)...(19): siRNA sense strand
ggaccuacaacucuuagau

SEQ ID NO: 801836 - RNA, 19 nt, Homo sapiens
  misc_RNA (1)...(19): siRNA sense strand
gcagagaccguggcaagau

SEQ ID NO: 801837 - RNA, 19 nt, Homo sapiens
  misc_RNA (1)...(19): siRNA sense strand
aggccgagcuguacuacuu

SEQ ID NO: 801838 - RNA, 19 nt, Homo sapiens
  misc_RNA (1)...(19): siRNA sense strand
gaccguggcaagauauauu

SEQ ID NO: 801839 - RNA, 19 nt, Homo sapiens
  misc_RNA (1)...(19): siRNA sense strand
gagaaacauugcuuuaccu

SEQ ID NO: 801840 - RNA, 19 nt, Homo sapiens
  misc_RNA (1)...(19): siRNA sense strand
guuucaagauuaccaguuc

SEQ ID NO: 801841 - RNA, 19 nt, Homo sapiens
  misc_RNA (1)...(19): siRNA sense strand
uccucuaccuuaugauaua

SEQ ID NO: 801842 - RNA, 19 nt, Homo sapiens
  misc_RNA (1)...(19): siRNA sense strand
cuacaacucuuagaucaac

SEQ ID NO: 801843 - RNA, 19 nt, Homo sapiens
  misc_RNA (1)...(19): siRNA sense strand
ggggugcuguucaagauua

SEQ ID NO: 801844 - RNA, 19 nt, Homo sapiens
  misc_RNA (1)...(19): siRNA sense strand
acaaacaaaggaagaaguu

SEQ ID NO: 801845 - RNA, 19 nt, Homo sapiens
  misc_RNA (1)...(19): siRNA sense strand
caaacaaacaaaggaagaa

SEQ ID NO: 801846 - RNA, 19 nt, Homo sapiens
  misc_RNA (1)...(19): siRNA sense strand
ucaaacaaacaaaggaaga

SEQ ID NO: 801847 - RNA, 19 nt, Homo sapiens
  misc_RNA (1)...(19): siRNA sense strand
ccgaagaaauauaacacau

SEQ ID NO: 801848 - RNA, 19 nt, Homo sapiens
  misc_RNA (1)...(19): siRNA sense strand
cgacaugaccaacuuugau

SEQ ID NO: 801849 - RNA, 19 nt, Homo sapiens
  misc_RNA (1)...(19): siRNA sense strand
uaauggacaagaagucaaa

SEQ ID NO: 801850 - RNA, 19 nt, Homo sapiens
  misc_RNA (1)...(19): siRNA sense strand
ggaacucuuuggcaaugca

SEQ ID NO: 801851 - RNA, 19 nt, Homo sapiens
  misc_RNA (1)...(19): siRNA sense strand
gacaugaccaacuuugaug

SEQ ID NO: 801852 - RNA, 19 nt, Homo sapiens
  misc_RNA (1)...(19): siRNA sense strand
gggcaggagagaaacauug

SEQ ID NO: 801853 - RNA, 19 nt, Homo sapiens
  misc_RNA (1)...(19): siRNA sense strand
ucaaagaggauguaucaac

SEQ ID NO: 801854 - RNA, 19 nt, Homo sapiens
  misc_RNA (1)...(19): siRNA sense strand
uggcacagguucauugucu

SEQ ID NO: 801855 - RNA, 19 nt, Homo sapiens
  misc_RNA (1)...(19): siRNA sense strand
ggugaacguugguggucuu

SEQ ID NO: 801856 - RNA, 19 nt, Homo sapiens
  misc_RNA (1)...(19): siRNA sense strand
ccaaggcguuaucuggaau

SEQ ID NO: 801857 - RNA, 19 nt, Homo sapiens
  misc_RNA (1)...(19): siRNA sense strand
uagagcagcaaauaacauu

SEQ ID NO: 801858 - RNA, 19 nt, Homo sapiens
  misc_RNA (1)...(19): siRNA sense strand
cacuguaccuacuggcuuu

SEQ ID NO: 801859 - RNA, 19 nt, Homo sapiens
  misc_RNA (1)...(19): siRNA sense strand
ucacuagccaugcuuuaga

SEQ ID NO: 801860 - RNA, 19 nt, Homo sapiens
  misc_RNA (1)...(19): siRNA sense strand
gagagaaacauugcuuuac

SEQ ID NO: 801861 - RNA, 19 nt, Homo sapiens
  misc_RNA (1)...(19): siRNA sense strand
gagcaaacagcugcagaug

SEQ ID NO: 801862 - RNA, 19 nt, Homo sapiens
  misc_RNA (1)...(19): siRNA sense strand
ccaaauuaaagaaggcaaa

SEQ ID NO: 801863 - RNA, 19 nt, Homo sapiens
  misc_RNA (1)...(19): siRNA sense strand
gaaucugagcuucuaguca

SEQ ID NO: 801864 - RNA, 19 nt, Homo sapiens
  misc_RNA (1)...(19): siRNA sense strand
gaaacuggaaccuuuaucc

SEQ ID NO: 801865 - RNA, 19 nt, Homo sapiens
  misc_RNA (1)...(19): siRNA sense strand
aagauuaccaguucaaaca

SEQ ID NO: 801866 - RNA, 19 nt, Homo sapiens
  misc_RNA (1)...(19): siRNA sense strand
ccacuaaccaacuccuaga

SEQ ID NO: 801867 - RNA, 19 nt, Homo sapiens
  misc_RNA (1)...(19): siRNA sense strand
ucagugggauaucugcaau

SEQ ID NO: 801868 - RNA, 19 nt, Homo sapiens
  misc_RNA (1)...(19): siRNA sense strand
ggucugacuguuuccauau

SEQ ID NO: 801869 - RNA, 19 nt, Homo sapiens
  misc_RNA (1)...(19): siRNA sense strand
gauauaauagucgauccaa

SEQ ID NO: 801870 - RNA, 19 nt, Homo sapiens
  misc_RNA (1)...(19): siRNA sense strand
agucuccaccgaagaaaua

SEQ ID NO: 801871 - RNA, 19 nt, Homo sapiens
  misc_RNA (1)...(19): siRNA sense strand
ggcauugcauugacugaag

SEQ ID NO: 801872 - RNA, 19 nt, Homo sapiens
  misc_RNA (1)...(19): siRNA sense strand
ugaacauccaugauaauga

SEQ ID NO: 801873 - RNA, 19 nt, Homo sapiens
  misc_RNA (1)...(19): siRNA sense strand
uugaagacuuggcuggaaa

SEQ ID NO: 801874 - RNA, 19 nt, Homo sapiens
  misc_RNA (1)...(19): siRNA sense strand
agagaaacuugggucauca

SEQ ID NO: 801875 - RNA, 19 nt, Homo sapiens
  misc_RNA (1)...(19): siRNA sense strand
cagauuugccauuuggaaa

SEQ ID NO: 801876 - RNA, 19 nt, Homo sapiens
  misc_RNA (1)...(19): siRNA sense strand
cugaauggucugacuguuu

SEQ ID NO: 801877 - RNA, 19 nt, Homo sapiens
  misc_RNA (1)...(19): siRNA sense strand
gcacaaagguggcagauga

SEQ ID NO: 801878 - RNA, 19 nt, Homo sapiens
  misc_RNA (1)...(19): siRNA sense strand
uaagugagcugaagcagaa

SEQ ID NO: 801879 - RNA, 19 nt, Homo sapiens
  misc_RNA (1)...(19): siRNA sense strand
aggaagagcugaagaagaa

SEQ ID NO: 801880 - RNA, 19 nt, Homo sapiens
  misc_RNA (1)...(19): siRNA sense strand
agucaaaccuggagaauga

SEQ ID NO: 801881 - RNA, 19 nt, Homo sapiens
  misc_RNA (1)...(19): siRNA sense strand
ccacagaaguccugaaagu

SEQ ID NO: 801882 - RNA, 19 nt, Homo sapiens
  misc_RNA (1)...(19): siRNA sense strand
gaaagucuguccucugaag

SEQ ID NO: 801883 - RNA, 19 nt, Homo sapiens
  misc_RNA (1)...(19): siRNA sense strand
uggaaugguucuacaauaa

SEQ ID NO: 801884 - RNA, 19 nt, Homo sapiens
  misc_RNA (1)...(19): siRNA sense strand
gaaugguucuacaauaaug

SEQ ID NO: 801885 - RNA, 19 nt, Homo sapiens
  misc_RNA (1)...(19): siRNA sense strand
agacagacaucagcaauga

SEQ ID NO: 801886 - RNA, 19 nt, Homo sapiens
  misc_RNA (1)...(19): siRNA sense strand
gaacuccagauuucagaua

SEQ ID NO: 801887 - RNA, 19 nt, Homo sapiens
  misc_RNA (1)...(19): siRNA sense strand
gaagaagaacgacuaagug

SEQ ID NO: 801888 - RNA, 19 nt, Homo sapiens
  misc_RNA (1)...(19): siRNA sense strand
cgacaauccugcagaagau

SEQ ID NO: 801889 - RNA, 19 nt, Homo sapiens
  misc_RNA (1)...(19): siRNA sense strand
caacaaacaggacuaagga

SEQ ID NO: 801890 - RNA, 19 nt, Homo sapiens
  misc_RNA (1)...(19): siRNA sense strand
ggagucagcugugauguac

SEQ ID NO: 801891 - RNA, 19 nt, Homo sapiens
  misc_RNA (1)...(19): siRNA sense strand
uggcagugauucaacauuu

SEQ ID NO: 801892 - RNA, 19 nt, Homo sapiens
  misc_RNA (1)...(19): siRNA sense strand
ggaaaggcaccaccaagga

SEQ ID NO: 801893 - RNA, 19 nt, Homo sapiens
  misc_RNA (1)...(19): siRNA sense strand
ggaacuggguggcccugaa

SEQ ID NO: 801894 - RNA, 19 nt, Homo sapiens
  misc_RNA (1)...(19): siRNA sense strand
ccacgacaauccugcagaa

SEQ ID NO: 801895 - RNA, 19 nt, Homo sapiens
  misc_RNA (1)...(19): siRNA sense strand
gcaaaggacccagguacaa

SEQ ID NO: 801896 - RNA, 19 nt, Homo sapiens
  misc_RNA (1)...(19): siRNA sense strand
guguggagauugcaaauuc

SEQ ID NO: 801897 - RNA, 19 nt, Homo sapiens
  misc_RNA (1)...(19): siRNA sense strand
acaagucccuccugacaga

SEQ ID NO: 801898 - RNA, 19 nt, Homo sapiens
  misc_RNA (1)...(19): siRNA sense strand
gaugagaugggcuccgaua

SEQ ID NO: 801899 - RNA, 19 nt, Homo sapiens
  misc_RNA (1)...(19): siRNA sense strand
ggagugaggccuugagcaa

SEQ ID NO: 801900 - RNA, 19 nt, Homo sapiens
  misc_RNA (1)...(19): siRNA sense strand
ucaggugucggaugauuua

SEQ ID NO: 801901 - RNA, 19 nt, Homo sapiens
  misc_RNA (1)...(19): siRNA sense strand
agacuucaaucuucgcaaa

SEQ ID NO: 801902 - RNA, 19 nt, Homo sapiens
  misc_RNA (1)...(19): siRNA sense strand
gaggagaaacggagaaaca

SEQ ID NO: 801903 - RNA, 19 nt, Homo sapiens
  misc_RNA (1)...(19): siRNA sense strand
ugcagaagauuauacgaaa

SEQ ID NO: 801904 - RNA, 19 nt, Homo sapiens
  misc_RNA (1)...(19): siRNA sense strand
ggagcuaacugaggaacug

SEQ ID NO: 801905 - RNA, 19 nt, Homo sapiens
  misc_RNA (1)...(19): siRNA sense strand
ggaccugucugguuugacu

SEQ ID NO: 801906 - RNA, 19 nt, Homo sapiens
  misc_RNA (1)...(19): siRNA sense strand
gauauugagagccggauuu

SEQ ID NO: 801907 - RNA, 19 nt, Homo sapiens
  misc_RNA (1)...(19): siRNA sense strand
caaaggacccagguacaaa

SEQ ID NO: 801908 - RNA, 19 nt, Homo sapiens
  misc_RNA (1)...(19): siRNA sense strand
caagaagacgggaucagaa

SEQ ID NO: 801909 - RNA, 19 nt, Homo sapiens
  misc_RNA (1)...(19): siRNA sense strand
cagaagagccaagcaaaga

SEQ ID NO: 801910 - RNA, 19 nt, Homo sapiens
  misc_RNA (1)...(19): siRNA sense strand
gaaaggcaccaccaaggau

SEQ ID NO: 801911 - RNA, 19 nt, Homo sapiens
  misc_RNA (1)...(19): siRNA sense strand
cccaaucucuggaaugguu

SEQ ID NO: 801912 - RNA, 19 nt, Homo sapiens
  misc_RNA (1)...(19): siRNA sense strand
caacaucuccacagaaguc

SEQ ID NO: 801913 - RNA, 19 nt, Homo sapiens
  misc_RNA (1)...(19): siRNA sense strand
ggaaugguucuacaauaau

SEQ ID NO: 801914 - RNA, 19 nt, Homo sapiens
  misc_RNA (1)...(19): siRNA sense strand
cuggaaugguucuacaaua

SEQ ID NO: 801915 - RNA, 19 nt, Homo sapiens
  misc_RNA (1)...(19): siRNA sense strand
agaaggacauagugugaug

SEQ ID NO: 801916 - RNA, 19 nt, Homo sapiens
  misc_RNA (1)...(19): siRNA sense strand
cucaaucacuggagaagaa

SEQ ID NO: 801917 - RNA, 19 nt, Homo sapiens
  misc_RNA (1)...(19): siRNA sense strand
guacaaaccauagauacau

SEQ ID NO: 801918 - RNA, 19 nt, Homo sapiens
  misc_RNA (1)...(19): siRNA sense strand
ugagacaucuucagugacu

SEQ ID NO: 801919 - RNA, 19 nt, Homo sapiens
  misc_RNA (1)...(19): siRNA sense strand
gccaggagguggagaagag

SEQ ID NO: 801920 - RNA, 19 nt, Homo sapiens
  misc_RNA (1)...(19): siRNA sense strand
caaggcuccucaacaaaca

SEQ ID NO: 801921 - RNA, 19 nt, Homo sapiens
  misc_RNA (1)...(19): siRNA sense strand
acaaggaggagcuaacuga

SEQ ID NO: 801922 - RNA, 19 nt, Homo sapiens
  misc_RNA (1)...(19): siRNA sense strand
cuccaaggcuccucaacaa

SEQ ID NO: 801923 - RNA, 19 nt, Homo sapiens
  misc_RNA (1)...(19): siRNA sense strand
gaagcaaaggacccaggua

SEQ ID NO: 801924 - RNA, 19 nt, Homo sapiens
  misc_RNA (1)...(19): siRNA sense strand
ccacaagucccuccugaca

SEQ ID NO: 801925 - RNA, 19 nt, Homo sapiens
  misc_RNA (1)...(19): siRNA sense strand
ggagaagaagcccugaaga

SEQ ID NO: 801926 - RNA, 19 nt, Homo sapiens
  misc_RNA (1)...(19): siRNA sense strand
ugaagaggccauugaggaa

SEQ ID NO: 801927 - RNA, 19 nt, Homo sapiens
  misc_RNA (1)...(19): siRNA sense strand
gcucuggagucagcuguga

SEQ ID NO: 801928 - RNA, 19 nt, Homo sapiens
  misc_RNA (1)...(19): siRNA sense strand
cgauagcgaggaagacuuu

SEQ ID NO: 801929 - RNA, 19 nt, Homo sapiens
  misc_RNA (1)...(19): siRNA sense strand
ucagaaggacauaguguga

SEQ ID NO: 801930 - RNA, 19 nt, Homo sapiens
  misc_RNA (1)...(19): siRNA sense strand
ggacccagguacaaaccau

SEQ ID NO: 801931 - RNA, 19 nt, Homo sapiens
  misc_RNA (1)...(19): siRNA sense strand
ggacagaccaagugagacu

SEQ ID NO: 801932 - RNA, 19 nt, Homo sapiens
  misc_RNA (1)...(19): siRNA sense strand
gagaagaagcccugaagac

SEQ ID NO: 801933 - RNA, 19 nt, Homo sapiens
  misc_RNA (1)...(19): siRNA sense strand
gcaaauucaaugucugcaa

SEQ ID NO: 801934 - RNA, 19 nt, Homo sapiens
  misc_RNA (1)...(19): siRNA sense strand
aaacaggacuaaggaaagg

SEQ ID NO: 801935 - RNA, 19 nt, Homo sapiens
  misc_RNA (1)...(19): siRNA sense strand
acaaacaggacuaaggaaa

SEQ ID NO: 801936 - RNA, 19 nt, Homo sapiens
  misc_RNA (1)...(19): siRNA sense strand
gaagacgggaucagaagca

SEQ ID NO: 801937 - RNA, 19 nt, Homo sapiens
  misc_RNA (1)...(19): siRNA sense strand
gcaaugaaaaugagugaaa

SEQ ID NO: 801938 - RNA, 19 nt, Homo sapiens
  misc_RNA (1)...(19): siRNA sense strand
aagaagaacgacuaaguga

SEQ ID NO: 801939 - RNA, 19 nt, Homo sapiens
  misc_RNA (1)...(19): siRNA sense strand
ugacugaugaugaaacaga

SEQ ID NO: 801940 - RNA, 19 nt, Homo sapiens
  misc_RNA (1)...(19): siRNA sense strand
auugagacaucuucaguga

SEQ ID NO: 801941 - RNA, 19 nt, Homo sapiens
  misc_RNA (1)...(19): siRNA sense strand
gccagaguguccaggaaga

SEQ ID NO: 801942 - RNA, 19 nt, Homo sapiens
  misc_RNA (1)...(19): siRNA sense strand
gcagcauccucucgaagca

SEQ ID NO: 801943 - RNA, 19 nt, Homo sapiens
  misc_RNA (1)...(19): siRNA sense strand
gcuccgggaucuagacaca

SEQ ID NO: 801944 - RNA, 19 nt, Homo sapiens
  misc_RNA (1)...(19): siRNA sense strand
ugaagcagaagcuggauga

SEQ ID NO: 801945 - RNA, 19 nt, Homo sapiens
  misc_RNA (1)...(19): siRNA sense strand
ggacaggcuggaugaaaca

SEQ ID NO: 801946 - RNA, 19 nt, Homo sapiens
  misc_RNA (1)...(19): siRNA sense strand
gcagaagauuauacgaaaa

SEQ ID NO: 801947 - RNA, 19 nt, Homo sapiens
  misc_RNA (1)...(19): siRNA sense strand
gcagugauucaacauuuua

SEQ ID NO: 801948 - RNA, 19 nt, Homo sapiens
  misc_RNA (1)...(19): siRNA sense strand
caaacaggacuaaggaaag

SEQ ID NO: 801949 - RNA, 19 nt, Homo sapiens
  misc_RNA (1)...(19): siRNA sense strand
augcugaacuccagauuuc

SEQ ID NO: 801950 - RNA, 19 nt, Homo sapiens
  misc_RNA (1)...(19): siRNA sense strand
acagaaguccugaaaguca

SEQ ID NO: 801951 - RNA, 19 nt, Homo sapiens
  misc_RNA (1)...(19): siRNA sense strand
gaacuggccacgacaaucc

SEQ ID NO: 801952 - RNA, 19 nt, Homo sapiens
  misc_RNA (1)...(19): siRNA sense strand
gggacagccuggacaagca

SEQ ID NO: 801953 - RNA, 19 nt, Homo sapiens
  misc_RNA (1)...(19): siRNA sense strand
aaagaagaagaacgacuaa

SEQ ID NO: 801954 - RNA, 19 nt, Homo sapiens
  misc_RNA (1)...(19): siRNA sense strand
ccuaagagcgggacguuuc

SEQ ID NO: 801955 - RNA, 19 nt, Homo sapiens
  misc_RNA (1)...(19): siRNA sense strand
agaagaagaacgacuaagu

SEQ ID NO: 801956 - RNA, 19 nt, Homo sapiens
  misc_RNA (1)...(19): siRNA sense strand
guacgaguuagcaaugaaa

SEQ ID NO: 801957 - RNA, 19 nt, Homo sapiens
  misc_RNA (1)...(19): siRNA sense strand
auggagagcuggacgugaa

SEQ ID NO: 801958 - RNA, 19 nt, Homo sapiens
  misc_RNA (1)...(19): siRNA sense strand
cauugcaggauuaaacaua

SEQ ID NO: 801959 - RNA, 19 nt, Homo sapiens
  misc_RNA (1)...(19): siRNA sense strand
cagucugccuucucaauca

SEQ ID NO: 801960 - RNA, 19 nt, Homo sapiens
  misc_RNA (1)...(19): siRNA sense strand
gaagagcugaagaagaagu

SEQ ID NO: 801961 - RNA, 19 nt, Homo sapiens
  misc_RNA (1)...(19): siRNA sense strand
gagacagacaucagcaaug

SEQ ID NO: 801962 - RNA, 19 nt, Homo sapiens
  misc_RNA (1)...(19): siRNA sense strand
gaagagccaagcaaagaac

SEQ ID NO: 801963 - RNA, 19 nt, Homo sapiens
  misc_RNA (1)...(19): siRNA sense strand
gggcuccgauagcgaggaa

SEQ ID NO: 801964 - RNA, 19 nt, Homo sapiens
  misc_RNA (1)...(19): siRNA sense strand
gcagucagaaggacauagu

SEQ ID NO: 801965 - RNA, 19 nt, Homo sapiens
  misc_RNA (1)...(19): siRNA sense strand
ugucugguuugacugauga

SEQ ID NO: 801966 - RNA, 19 nt, Homo sapiens
  misc_RNA (1)...(19): siRNA sense strand
cagguacaaaccauagaua

SEQ ID NO: 801967 - RNA, 19 nt, Homo sapiens
  misc_RNA (1)...(19): siRNA sense strand
gcagaagcuggaugaggaa

SEQ ID NO: 801968 - RNA, 19 nt, Homo sapiens
  misc_RNA (1)...(19): siRNA sense strand
gaaguuuucugcuguuucu

SEQ ID NO: 801969 - RNA, 19 nt, Homo sapiens
  misc_RNA (1)...(19): siRNA sense strand
gaacuggguggcccugaag

SEQ ID NO: 801970 - RNA, 19 nt, Homo sapiens
  misc_RNA (1)...(19): siRNA sense strand
cgaagcaccagcaguuugu

SEQ ID NO: 801971 - RNA, 19 nt, Homo sapiens
  misc_RNA (1)...(19): siRNA sense strand
cuucagugacuaccauuaa

SEQ ID NO: 801972 - RNA, 19 nt, Homo sapiens
  misc_RNA (1)...(19): siRNA sense strand
caucuucagugacuaccau

SEQ ID NO: 801973 - RNA, 19 nt, Homo sapiens
  misc_RNA (1)...(19): siRNA sense strand
gguacaaaccauagauaca

SEQ ID NO: 801974 - RNA, 19 nt, Homo sapiens
  misc_RNA (1)...(19): siRNA sense strand
guugauagcaggaucuaca

SEQ ID NO: 801975 - RNA, 19 nt, Homo sapiens
  misc_RNA (1)...(19): siRNA sense strand
cagaaguccugaaagucau

SEQ ID NO: 801976 - RNA, 19 nt, Homo sapiens
  misc_RNA (1)...(19): siRNA sense strand
ccaccaaggauuugaugga

SEQ ID NO: 801977 - RNA, 19 nt, Homo sapiens
  misc_RNA (1)...(19): siRNA sense strand
ggaagaagccaucagaaua

SEQ ID NO: 801978 - RNA, 19 nt, Homo sapiens
  misc_RNA (1)...(19): siRNA sense strand
gcauagccaucacuuagua

SEQ ID NO: 801979 - RNA, 19 nt, Homo sapiens
  misc_RNA (1)...(19): siRNA sense strand
cagcaaagguguccauuga

SEQ ID NO: 801980 - RNA, 19 nt, Homo sapiens
  misc_RNA (1)...(19): siRNA sense strand
gcaaagguguccauugaug

SEQ ID NO: 801981 - RNA, 19 nt, Homo sapiens
  misc_RNA (1)...(19): siRNA sense strand
caacacaauucuaaagaug

SEQ ID NO: 801982 - RNA, 19 nt, Homo sapiens
  misc_RNA (1)...(19): siRNA sense strand
caccacaccuccaaagaua

SEQ ID NO: 801983 - RNA, 19 nt, Homo sapiens
  misc_RNA (1)...(19): siRNA sense strand
cuuaaagggucccagauua

SEQ ID NO: 801984 - RNA, 19 nt, Homo sapiens
  misc_RNA (1)...(19): siRNA sense strand
ugcaacagguuauggauua

SEQ ID NO: 801985 - RNA, 19 nt, Homo sapiens
  misc_RNA (1)...(19): siRNA sense strand
gaagaagccaucagaauag

SEQ ID NO: 801986 - RNA, 19 nt, Homo sapiens
  misc_RNA (1)...(19): siRNA sense strand
aaacacaucagaacucaua

SEQ ID NO: 801987 - RNA, 19 nt, Homo sapiens
  misc_RNA (1)...(19): siRNA sense strand
ucaacaaguuacacucaua

SEQ ID NO: 801988 - RNA, 19 nt, Homo sapiens
  misc_RNA (1)...(19): siRNA sense strand
ggcagauggugacaacuua

SEQ ID NO: 801989 - RNA, 19 nt, Homo sapiens
  misc_RNA (1)...(19): siRNA sense strand
gagaaggcauuucgaugug

SEQ ID NO: 801990 - RNA, 19 nt, Homo sapiens
  misc_RNA (1)...(19): siRNA sense strand
caacauguacccauaccua

SEQ ID NO: 801991 - RNA, 19 nt, Homo sapiens
  misc_RNA (1)...(19): siRNA sense strand
gagaaagaccuuauuacug

SEQ ID NO: 801992 - RNA, 19 nt, Homo sapiens
  misc_RNA (1)...(19): siRNA sense strand
ggacaugcuacaagaguaa

SEQ ID NO: 801993 - RNA, 19 nt, Homo sapiens
  misc_RNA (1)...(19): siRNA sense strand
gcacccagauugcaguuca

SEQ ID NO: 801994 - RNA, 19 nt, Homo sapiens
  misc_RNA (1)...(19): siRNA sense strand
ggaacgcacucuguugcua

SEQ ID NO: 801995 - RNA, 19 nt, Homo sapiens
  misc_RNA (1)...(19): siRNA sense strand
gaaggcauuucgaugugaa

SEQ ID NO: 801996 - RNA, 19 nt, Homo sapiens
  misc_RNA (1)...(19): siRNA sense strand
gaugguaccacagcauuua

SEQ ID NO: 801997 - RNA, 19 nt, Homo sapiens
  misc_RNA (1)...(19): siRNA sense strand
caggagaucuacagaaaca

SEQ ID NO: 801998 - RNA, 19 nt, Homo sapiens
  misc_RNA (1)...(19): siRNA sense strand
acaaggacaugcuacaaga

SEQ ID NO: 801999 - RNA, 19 nt, Homo sapiens
  misc_RNA (1)...(19): siRNA sense strand
cgccaggguuggaugauua

SEQ ID NO: 802000 - RNA, 19 nt, Homo sapiens
  misc_RNA (1)...(19): siRNA sense strand
cauacugccucaucagaaa

SEQ ID NO: 802001 - RNA, 19 nt, Homo sapiens
  misc_RNA (1)...(19): siRNA sense strand
ggagaaagaccuuauuacu

SEQ ID NO: 802002 - RNA, 19 nt, Homo sapiens
  misc_RNA (1)...(19): siRNA sense strand
aagaguaacugcuaaaucu

SEQ ID NO: 802003 - RNA, 19 nt, Homo sapiens
  misc_RNA (1)...(19): siRNA sense strand
cuacaagaguaacugcuaa

SEQ ID NO: 802004 - RNA, 19 nt, Homo sapiens
  misc_RNA (1)...(19): siRNA sense strand
gcaacagguuauggauuaa

SEQ ID NO: 802005 - RNA, 19 nt, Homo sapiens
  misc_RNA (1)...(19): siRNA sense strand
ggacgacguuguuucuaca

SEQ ID NO: 802006 - RNA, 19 nt, Homo sapiens
  misc_RNA (1)...(19): siRNA sense strand
caggagaaagaccuuauua

SEQ ID NO: 802007 - RNA, 19 nt, Homo sapiens
  misc_RNA (1)...(19): siRNA sense strand
ggucccagauuacguaugu

SEQ ID NO: 802008 - RNA, 19 nt, Homo sapiens
  misc_RNA (1)...(19): siRNA sense strand
gcauuucgaugugaauaug

SEQ ID NO: 802009 - RNA, 19 nt, Homo sapiens
  misc_RNA (1)...(19): siRNA sense strand
cagaauagcgucuagaauc

SEQ ID NO: 802010 - RNA, 19 nt, Homo sapiens
  misc_RNA (1)...(19): siRNA sense strand
gacaaaagguuuacagaau

SEQ ID NO: 802011 - RNA, 19 nt, Homo sapiens
  misc_RNA (1)...(19): siRNA sense strand
gcaguacaguuagaagaug

SEQ ID NO: 802012 - RNA, 19 nt, Homo sapiens
  misc_RNA (1)...(19): siRNA sense strand
ggugacaacuuagaaaaua

SEQ ID NO: 802013 - RNA, 19 nt, Homo sapiens
  misc_RNA (1)...(19): siRNA sense strand
gaaaagccauauguuugua

SEQ ID NO: 802014 - RNA, 19 nt, Homo sapiens
  misc_RNA (1)...(19): siRNA sense strand
gaugguaccacagcuuaua

SEQ ID NO: 802015 - RNA, 19 nt, Homo sapiens
  misc_RNA (1)...(19): siRNA sense strand
ggagaaaagccauauguuu

SEQ ID NO: 802016 - RNA, 19 nt, Homo sapiens
  misc_RNA (1)...(19): siRNA sense strand
ugauggaagugaaagugua

SEQ ID NO: 802017 - RNA, 19 nt, Homo sapiens
  misc_RNA (1)...(19): siRNA sense strand
ggaacaguaugcagcaaag

SEQ ID NO: 802018 - RNA, 19 nt, Homo sapiens
  misc_RNA (1)...(19): siRNA sense strand
ugauggauguggaaaauua

SEQ ID NO: 802019 - RNA, 19 nt, Homo sapiens
  misc_RNA (1)...(19): siRNA sense strand
gcacucuguugcuaugguu

SEQ ID NO: 802020 - RNA, 19 nt, Homo sapiens
  misc_RNA (1)...(19): siRNA sense strand
ggagaucggccuuaucagu

SEQ ID NO: 802021 - RNA, 19 nt, Homo sapiens
  misc_RNA (1)...(19): siRNA sense strand
gaacgcacucuguugcuau

SEQ ID NO: 802022 - RNA, 19 nt, Homo sapiens
  misc_RNA (1)...(19): siRNA sense strand
uacagaauauuccaguuug

SEQ ID NO: 802023 - RNA, 19 nt, Homo sapiens
  misc_RNA (1)...(19): siRNA sense strand
ccagugcaacaaauuauaa

SEQ ID NO: 802024 - RNA, 19 nt, Homo sapiens
  misc_RNA (1)...(19): siRNA sense strand
caacaaguuacacucauau

SEQ ID NO: 802025 - RNA, 19 nt, Homo sapiens
  misc_RNA (1)...(19): siRNA sense strand
ucagugcuuuggaacagua

SEQ ID NO: 802026 - RNA, 19 nt, Homo sapiens
  misc_RNA (1)...(19): siRNA sense strand
gcagcauagccaucacuua

SEQ ID NO: 802027 - RNA, 19 nt, Homo sapiens
  misc_RNA (1)...(19): siRNA sense strand
gagaaaagccauauguuug

SEQ ID NO: 802028 - RNA, 19 nt, Homo sapiens
  misc_RNA (1)...(19): siRNA sense strand
caccaucagugcuuuggaa

SEQ ID NO: 802029 - RNA, 19 nt, Homo sapiens
  misc_RNA (1)...(19): siRNA sense strand
cagcauagccaucacuuag

SEQ ID NO: 802030 - RNA, 19 nt, Homo sapiens
  misc_RNA (1)...(19): siRNA sense strand
gcaggaacgcacucuguug

SEQ ID NO: 802031 - RNA, 19 nt, Homo sapiens
  misc_RNA (1)...(19): siRNA sense strand
caacagcucaucaucucaa

SEQ ID NO: 802032 - RNA, 19 nt, Homo sapiens
  misc_RNA (1)...(19): siRNA sense strand
gaagaugguaccacagcuu

SEQ ID NO: 802033 - RNA, 19 nt, Homo sapiens
  misc_RNA (1)...(19): siRNA sense strand
ggagagaaggcauuucgau

SEQ ID NO: 802034 - RNA, 19 nt, Homo sapiens
  misc_RNA (1)...(19): siRNA sense strand
gcagguacuggaaugauug

SEQ ID NO: 802035 - RNA, 19 nt, Homo sapiens
  misc_RNA (1)...(19): siRNA sense strand
ggauggaggcgcaacaugu

SEQ ID NO: 802036 - RNA, 19 nt, Homo sapiens
  misc_RNA (1)...(19): siRNA sense strand
gacaccaucuuggcaauuc

SEQ ID NO: 802037 - RNA, 19 nt, Homo sapiens
  misc_RNA (1)...(19): siRNA sense strand
agaggauggucaagcagua

SEQ ID NO: 802038 - RNA, 19 nt, Homo sapiens
  misc_RNA (1)...(19): siRNA sense strand
ccauauguuuguacaguuc

SEQ ID NO: 802039 - RNA, 19 nt, Homo sapiens
  misc_RNA (1)...(19): siRNA sense strand
gaggauacacacaggagaa

SEQ ID NO: 802040 - RNA, 19 nt, Homo sapiens
  misc_RNA (1)...(19): siRNA sense strand
gaaaagccauaucgguguu

SEQ ID NO: 802041 - RNA, 19 nt, Homo sapiens
  misc_RNA (1)...(19): siRNA sense strand
gauggaggcgcaacauguu

SEQ ID NO: 802042 - RNA, 19 nt, Homo sapiens
  misc_RNA (1)...(19): siRNA sense strand
uuccaaaccuuacaacugu

SEQ ID NO: 802043 - RNA, 19 nt, Homo sapiens
  misc_RNA (1)...(19): siRNA sense strand
agaaacacaucagaacuca

SEQ ID NO: 802044 - RNA, 19 nt, Homo sapiens
  misc_RNA (1)...(19): siRNA sense strand
uucaggagaucuacagaaa

SEQ ID NO: 802045 - RNA, 19 nt, Homo sapiens
  misc_RNA (1)...(19): siRNA sense strand
caggagaucggccuuauca

SEQ ID NO: 802046 - RNA, 19 nt, Homo sapiens
  misc_RNA (1)...(19): siRNA sense strand
gcuacaagaguaacugcua

SEQ ID NO: 802047 - RNA, 19 nt, Homo sapiens
  misc_RNA (1)...(19): siRNA sense strand
cuacagaaacacaucagaa

SEQ ID NO: 802048 - RNA, 19 nt, Homo sapiens
  misc_RNA (1)...(19): siRNA sense strand
acacaaguagccacaguaa

SEQ ID NO: 802049 - RNA, 19 nt, Homo sapiens
  misc_RNA (1)...(19): siRNA sense strand
cagaauauuccaguuugua

SEQ ID NO: 802050 - RNA, 19 nt, Homo sapiens
  misc_RNA (1)...(19): siRNA sense strand
ggucgguccuuuacaacau

SEQ ID NO: 802051 - RNA, 19 nt, Homo sapiens
  misc_RNA (1)...(19): siRNA sense strand
gcagcaaagguguccauug

SEQ ID NO: 802052 - RNA, 19 nt, Homo sapiens
  misc_RNA (1)...(19): siRNA sense strand
gggacgacguuguuucuac

SEQ ID NO: 802053 - RNA, 19 nt, Homo sapiens
  misc_RNA (1)...(19): siRNA sense strand
gaauaugauggauguggaa

SEQ ID NO: 802054 - RNA, 19 nt, Homo sapiens
  misc_RNA (1)...(19): siRNA sense strand
gcaguaacacuugcagaug

SEQ ID NO: 802055 - RNA, 19 nt, Homo sapiens
  misc_RNA (1)...(19): siRNA sense strand
gauggugacaacuuagaaa

SEQ ID NO: 802056 - RNA, 19 nt, Homo sapiens
  misc_RNA (1)...(19): siRNA sense strand
ccucugaccuuaguagcaa

SEQ ID NO: 802057 - RNA, 19 nt, Homo sapiens
  misc_RNA (1)...(19): siRNA sense strand
acacucauuccaaaccuua

SEQ ID NO: 802058 - RNA, 19 nt, Homo sapiens
  misc_RNA (1)...(19): siRNA sense strand
guacaguuccuggguguga

SEQ ID NO: 802059 - RNA, 19 nt, Homo sapiens
  misc_RNA (1)...(19): siRNA sense strand
cagaugguucuacugcuua

SEQ ID NO: 802060 - RNA, 19 nt, Homo sapiens
  misc_RNA (1)...(19): siRNA sense strand
uacaacagcucaucaucuc

SEQ ID NO: 802061 - RNA, 19 nt, Homo sapiens
  misc_RNA (1)...(19): siRNA sense strand
caagaguaacugcuaaauc

SEQ ID NO: 802062 - RNA, 19 nt, Homo sapiens
  misc_RNA (1)...(19): siRNA sense strand
gaguaacugcuaaaucuca

SEQ ID NO: 802063 - RNA, 19 nt, Homo sapiens
  misc_RNA (1)...(19): siRNA sense strand
gccauauguuuguacaguu

SEQ ID NO: 802064 - RNA, 19 nt, Homo sapiens
  misc_RNA (1)...(19): siRNA sense strand
gccagugcaacaaauuaua

SEQ ID NO: 802065 - RNA, 19 nt, Homo sapiens
  misc_RNA (1)...(19): siRNA sense strand
ggagaucuacagaaacaca

SEQ ID NO: 802066 - RNA, 19 nt, Homo sapiens
  misc_RNA (1)...(19): siRNA sense strand
cggaagauaauuguacuaa

SEQ ID NO: 802067 - RNA, 19 nt, Homo sapiens
  misc_RNA (1)...(19): siRNA sense strand
caacagguuauggauuaaa

SEQ ID NO: 802068 - RNA, 19 nt, Homo sapiens
  misc_RNA (1)...(19): siRNA sense strand
uguccacacucauuccaaa

SEQ ID NO: 802069 - RNA, 19 nt, Homo sapiens
  misc_RNA (1)...(19): siRNA sense strand
aagaugguaccacagcuua

SEQ ID NO: 802070 - RNA, 19 nt, Homo sapiens
  misc_RNA (1)...(19): siRNA sense strand
agagaaggcauuucgaugu

SEQ ID NO: 802071 - RNA, 19 nt, Homo sapiens
  misc_RNA (1)...(19): siRNA sense strand
acacaauucuaaagaugca

SEQ ID NO: 802072 - RNA, 19 nt, Homo sapiens
  misc_RNA (1)...(19): siRNA sense strand
gagaaacgccaggguugga

SEQ ID NO: 802073 - RNA, 19 nt, Homo sapiens
  misc_RNA (1)...(19): siRNA sense strand
guaacccaaucuggacuga

SEQ ID NO: 802074 - RNA, 19 nt, Homo sapiens
  misc_RNA (1)...(19): siRNA sense strand
gaauauuccaguuuguaca

SEQ ID NO: 802075 - RNA, 19 nt, Homo sapiens
  misc_RNA (1)...(19): siRNA sense strand
cacaggagaucggccuuau

SEQ ID NO: 802076 - RNA, 19 nt, Homo sapiens
  misc_RNA (1)...(19): siRNA sense strand
gaagaugguaccacagcau

SEQ ID NO: 802077 - RNA, 19 nt, Homo sapiens
  misc_RNA (1)...(19): siRNA sense strand
ucacacagaugauaugauu

SEQ ID NO: 802078 - RNA, 19 nt, Homo sapiens
  misc_RNA (1)...(19): siRNA sense strand
gagauacacuacucuucua

SEQ ID NO: 802079 - RNA, 19 nt, Homo sapiens
  misc_RNA (1)...(19): siRNA sense strand
gcacugagauacacuacuc

SEQ ID NO: 802080 - RNA, 19 nt, Homo sapiens
  misc_RNA (1)...(19): siRNA sense strand
aaacaacgaugugugugua

SEQ ID NO: 802081 - RNA, 19 nt, Homo sapiens
  misc_RNA (1)...(19): siRNA sense strand
ccaucucacuuucuugaua

SEQ ID NO: 802082 - RNA, 19 nt, Homo sapiens
  misc_RNA (1)...(19): siRNA sense strand
gcagccaucucacuuucuu

SEQ ID NO: 802083 - RNA, 19 nt, Homo sapiens
  misc_RNA (1)...(19): siRNA sense strand
ggauuggucucuucacaca

SEQ ID NO: 802084 - RNA, 19 nt, Homo sapiens
  misc_RNA (1)...(19): siRNA sense strand
caguucaccuaccguguua

SEQ ID NO: 802085 - RNA, 19 nt, Homo sapiens
  misc_RNA (1)...(19): siRNA sense strand
gcuacgagguguucagcuu

SEQ ID NO: 802086 - RNA, 19 nt, Homo sapiens
  misc_RNA (1)...(19): siRNA sense strand
gaggauuggucucuucaca

SEQ ID NO: 802087 - RNA, 19 nt, Homo sapiens
  misc_RNA (1)...(19): siRNA sense strand
ccacagcccagaaggauga

SEQ ID NO: 802088 - RNA, 19 nt, Homo sapiens
  misc_RNA (1)...(19): siRNA sense strand
caucucacuuucuugauau

SEQ ID NO: 802089 - RNA, 19 nt, Homo sapiens
  misc_RNA (1)...(19): siRNA sense strand
ccaggucccuugucaccaa

SEQ ID NO: 802090 - RNA, 19 nt, Homo sapiens
  misc_RNA (1)...(19): siRNA sense strand
gaaaugcuacgagguguuc

SEQ ID NO: 802091 - RNA, 19 nt, Homo sapiens
  misc_RNA (1)...(19): siRNA sense strand
gggcacgccaucuaaguuu

SEQ ID NO: 802092 - RNA, 19 nt, Homo sapiens
  misc_RNA (1)...(19): siRNA sense strand
caccuugugucuucaguga

SEQ ID NO: 802093 - RNA, 19 nt, Homo sapiens
  misc_RNA (1)...(19): siRNA sense strand
gcuaaacaacgaugugugu

SEQ ID NO: 802094 - RNA, 19 nt, Homo sapiens
  misc_RNA (1)...(19): siRNA sense strand
ccacacgccuaccaguuca

SEQ ID NO: 802095 - RNA, 19 nt, Homo sapiens
  misc_RNA (1)...(19): siRNA sense strand
ccagaaggaugagaaaugc

SEQ ID NO: 802096 - RNA, 19 nt, Homo sapiens
  misc_RNA (1)...(19): siRNA sense strand
ucaccuaccguguuacuga

SEQ ID NO: 802097 - RNA, 19 nt, Homo sapiens
  misc_RNA (1)...(19): siRNA sense strand
cuaagggcacgccaucuaa

SEQ ID NO: 802098 - RNA, 19 nt, Homo sapiens
  misc_RNA (1)...(19): siRNA sense strand
accaagcccugcuccauga

SEQ ID NO: 802099 - RNA, 19 nt, Homo sapiens
  misc_RNA (1)...(19): siRNA sense strand
agaaggaugagaaaugcua

SEQ ID NO: 802100 - RNA, 19 nt, Homo sapiens
  misc_RNA (1)...(19): siRNA sense strand
gauaugauuggguccaugu

SEQ ID NO: 802101 - RNA, 19 nt, Homo sapiens
  misc_RNA (1)...(19): siRNA sense strand
guguucagcuugucacagu

SEQ ID NO: 802102 - RNA, 19 nt, Homo sapiens
  misc_RNA (1)...(19): siRNA sense strand
caaaggcccaacugcgauu

SEQ ID NO: 802103 - RNA, 19 nt, Homo sapiens
  misc_RNA (1)...(19): siRNA sense strand
cucaggacaugguuaucua

SEQ ID NO: 802104 - RNA, 19 nt, Homo sapiens
  misc_RNA (1)...(19): siRNA sense strand
uaaacaacgaugugugugu

SEQ ID NO: 802105 - RNA, 19 nt, Homo sapiens
  misc_RNA (1)...(19): siRNA sense strand
uguacacuuucaugaacua

SEQ ID NO: 802106 - RNA, 19 nt, Homo sapiens
  misc_RNA (1)...(19): siRNA sense strand
ucuaagggcacgccaucua

SEQ ID NO: 802107 - RNA, 19 nt, Homo sapiens
  misc_RNA (1)...(19): siRNA sense strand
ccaguucaccuaccguguu

SEQ ID NO: 802108 - RNA, 19 nt, Homo sapiens
  misc_RNA (1)...(19): siRNA sense strand
ggcacgccaucuaaguuug

SEQ ID NO: 802109 - RNA, 19 nt, Homo sapiens
  misc_RNA (1)...(19): siRNA sense strand
caccuaccguguuacugaa

SEQ ID NO: 802110 - RNA, 19 nt, Homo sapiens
  misc_RNA (1)...(19): siRNA sense strand
gcacgccaucuaaguuugu

SEQ ID NO: 802111 - RNA, 19 nt, Homo sapiens
  misc_RNA (1)...(19): siRNA sense strand
acacagaugauaugauugg

SEQ ID NO: 802112 - RNA, 19 nt, Homo sapiens
  misc_RNA (1)...(19): siRNA sense strand
gcgauuguccaccuugugu

SEQ ID NO: 802113 - RNA, 19 nt, Homo sapiens
  misc_RNA (1)...(19): siRNA sense strand
gugcugugcuccauagacu

SEQ ID NO: 802114 - RNA, 19 nt, Homo sapiens
  misc_RNA (1)...(19): siRNA sense strand
gggccaaagcugucucuca

SEQ ID NO: 802115 - RNA, 19 nt, Homo sapiens
  misc_RNA (1)...(19): siRNA sense strand
auacccaggucccuuguca

SEQ ID NO: 802116 - RNA, 19 nt, Homo sapiens
  misc_RNA (1)...(19): siRNA sense strand
ugagauacacuacucuucu

SEQ ID NO: 802117 - RNA, 19 nt, Homo sapiens
  misc_RNA (1)...(19): siRNA sense strand
gugcaccccuucaugcuaa

SEQ ID NO: 802118 - RNA, 19 nt, Homo sapiens
  misc_RNA (1)...(19): siRNA sense strand
cuacagcacugagauacac

SEQ ID NO: 802119 - RNA, 19 nt, Homo sapiens
  misc_RNA (1)...(19): siRNA sense strand
gccacacgccuaccaguuc

SEQ ID NO: 802120 - RNA, 19 nt, Homo sapiens
  misc_RNA (1)...(19): siRNA sense strand
cugcagccaucucacuuuc

SEQ ID NO: 802121 - RNA, 19 nt, Homo sapiens
  misc_RNA (1)...(19): siRNA sense strand
cccagaaggaugagaaaug

SEQ ID NO: 802122 - RNA, 19 nt, Homo sapiens
  misc_RNA (1)...(19): siRNA sense strand
auacacuacucuucuaagg

SEQ ID NO: 802123 - RNA, 19 nt, Homo sapiens
  misc_RNA (1)...(19): siRNA sense strand
ugacugugcugugcuccau

SEQ ID NO: 802124 - RNA, 19 nt, Homo sapiens
  misc_RNA (1)...(19): siRNA sense strand
ucucuucacacagaugaua

SEQ ID NO: 802125 - RNA, 19 nt, Homo sapiens
  misc_RNA (1)...(19): siRNA sense strand
cuugauauuucugaggauu

SEQ ID NO: 802126 - RNA, 19 nt, Homo sapiens
  misc_RNA (1)...(19): siRNA sense strand
uguguacacuuucaugaac

SEQ ID NO: 802127 - RNA, 19 nt, Homo sapiens
  misc_RNA (1)...(19): siRNA sense strand
ucugaggauuggucucuuc

SEQ ID NO: 802128 - RNA, 19 nt, Homo sapiens
  misc_RNA (1)...(19): siRNA sense strand
ggucucuucacacagauga

SEQ ID NO: 802129 - RNA, 19 nt, Homo sapiens
  misc_RNA (1)...(19): siRNA sense strand
gauacacuacucuucuaag

SEQ ID NO: 802130 - RNA, 19 nt, Homo sapiens
  misc_RNA (1)...(19): siRNA sense strand
auuggucucuucacacaga

SEQ ID NO: 802131 - RNA, 19 nt, Homo sapiens
  misc_RNA (1)...(19): siRNA sense strand
ccuccucaccucugcguuu

SEQ ID NO: 802132 - RNA, 19 nt, Homo sapiens
  misc_RNA (1)...(19): siRNA sense strand
guuacugaauguggcauca

SEQ ID NO: 802133 - RNA, 19 nt, Homo sapiens
  misc_RNA (1)...(19): siRNA sense strand
uaugauuggguccauguga

SEQ ID NO: 802134 - RNA, 19 nt, Homo sapiens
  misc_RNA (1)...(19): siRNA sense strand
ugauauuucugaggauugg

SEQ ID NO: 802135 - RNA, 19 nt, Homo sapiens
  misc_RNA (1)...(19): siRNA sense strand
gucaagagcuucgauauua

SEQ ID NO: 802136 - RNA, 19 nt, Homo sapiens
  misc_RNA (1)...(19): siRNA sense strand
ggaagugccuuaugccuau

SEQ ID NO: 802137 - RNA, 19 nt, Homo sapiens
  misc_RNA (1)...(19): siRNA sense strand
ucaagagcuucgauauuaa

SEQ ID NO: 802138 - RNA, 19 nt, Homo sapiens
  misc_RNA (1)...(19): siRNA sense strand
caauguggauuaugucaug

SEQ ID NO: 802139 - RNA, 19 nt, Homo sapiens
  misc_RNA (1)...(19): siRNA sense strand
ggacaagcaucucuucacu

SEQ ID NO: 802140 - RNA, 19 nt, Homo sapiens
  misc_RNA (1)...(19): siRNA sense strand
uggauuaugucaugaacua

SEQ ID NO: 802141 - RNA, 19 nt, Homo sapiens
  misc_RNA (1)...(19): siRNA sense strand
ggaaaugcgugaagcuuuu

SEQ ID NO: 802142 - RNA, 19 nt, Homo sapiens
  misc_RNA (1)...(19): siRNA sense strand
ucaccucagucaucaaauu

SEQ ID NO: 802143 - RNA, 19 nt, Homo sapiens
  misc_RNA (1)...(19): siRNA sense strand
ccauugaucuggaugacuu

SEQ ID NO: 802144 - RNA, 19 nt, Homo sapiens
  misc_RNA (1)...(19): siRNA sense strand
acaagcaucucuucacugu

SEQ ID NO: 802145 - RNA, 19 nt, Homo sapiens
  misc_RNA (1)...(19): siRNA sense strand
ucaaauuccugcgccagua

SEQ ID NO: 802146 - RNA, 19 nt, Homo sapiens
  misc_RNA (1)...(19): siRNA sense strand
ugacuucacuggcacuuuc

SEQ ID NO: 802147 - RNA, 19 nt, Homo sapiens
  misc_RNA (1)...(19): siRNA sense strand
gaucuguaccuuccugaaa

SEQ ID NO: 802148 - RNA, 19 nt, Homo sapiens
  misc_RNA (1)...(19): siRNA sense strand
cagcaacgccuaccucaau

SEQ ID NO: 802149 - RNA, 19 nt, Homo sapiens
  misc_RNA (1)...(19): siRNA sense strand
cacaguaccuggacuacau

SEQ ID NO: 802150 - RNA, 19 nt, Homo sapiens
  misc_RNA (1)...(19): siRNA sense strand
gagaaccgccagacuuuca

SEQ ID NO: 802151 - RNA, 19 nt, Homo sapiens
  misc_RNA (1)...(19): siRNA sense strand
ggcuuaagcacaacaaauu

SEQ ID NO: 802152 - RNA, 19 nt, Homo sapiens
  misc_RNA (1)...(19): siRNA sense strand
gggaggcaguggauucugu

SEQ ID NO: 802153 - RNA, 19 nt, Homo sapiens
  misc_RNA (1)...(19): siRNA sense strand
cucaauggcuuaagcacaa

SEQ ID NO: 802154 - RNA, 19 nt, Homo sapiens
  misc_RNA (1)...(19): siRNA sense strand
gcuuaagcacaacaaauuu

SEQ ID NO: 802155 - RNA, 19 nt, Homo sapiens
  misc_RNA (1)...(19): siRNA sense strand
gcugcuggcaucuccaaua

SEQ ID NO: 802156 - RNA, 19 nt, Homo sapiens
  misc_RNA (1)...(19): siRNA sense strand
gggcuacacuggagagaac

SEQ ID NO: 802157 - RNA, 19 nt, Homo sapiens
  misc_RNA (1)...(19): siRNA sense strand
caucaccucagucaucaaa

SEQ ID NO: 802158 - RNA, 19 nt, Homo sapiens
  misc_RNA (1)...(19): siRNA sense strand
cugcuggcaucuccaauau

SEQ ID NO: 802159 - RNA, 19 nt, Homo sapiens
  misc_RNA (1)...(19): siRNA sense strand
agucugggaucugggcuua

SEQ ID NO: 802160 - RNA, 19 nt, Homo sapiens
  misc_RNA (1)...(19): siRNA sense strand
cgucaagagcuucgauauu

SEQ ID NO: 802161 - RNA, 19 nt, Homo sapiens
  misc_RNA (1)...(19): siRNA sense strand
uugacgggcuggacuuuga

SEQ ID NO: 802162 - RNA, 19 nt, Homo sapiens
  misc_RNA (1)...(19): siRNA sense strand
ugaauggagucacguacca

SEQ ID NO: 802163 - RNA, 19 nt, Homo sapiens
  misc_RNA (1)...(19): siRNA sense strand
gcuggcaucuccaauaucc

SEQ ID NO: 802164 - RNA, 19 nt, Homo sapiens
  misc_RNA (1)...(19): siRNA sense strand
gaagcucaucguuggauuc

SEQ ID NO: 802165 - RNA, 19 nt, Homo sapiens
  misc_RNA (1)...(19): siRNA sense strand
ucacguaccagcagaacug

SEQ ID NO: 802166 - RNA, 19 nt, Homo sapiens
  misc_RNA (1)...(19): siRNA sense strand
cugagaaccgccagacuuu

SEQ ID NO: 802167 - RNA, 19 nt, Homo sapiens
  misc_RNA (1)...(19): siRNA sense strand
caaauuccugcgccaguau

SEQ ID NO: 802168 - RNA, 19 nt, Homo sapiens
  misc_RNA (1)...(19): siRNA sense strand
caagagcuucgauauuaag

SEQ ID NO: 802169 - RNA, 19 nt, Homo sapiens
  misc_RNA (1)...(19): siRNA sense strand
cuaccucaauguggauuau

SEQ ID NO: 802170 - RNA, 19 nt, Homo sapiens
  misc_RNA (1)...(19): siRNA sense strand
gagaagcucaucguuggau

SEQ ID NO: 802171 - RNA, 19 nt, Homo sapiens
  misc_RNA (1)...(19): siRNA sense strand
gaacuacuggaaggacaau

SEQ ID NO: 802172 - RNA, 19 nt, Homo sapiens
  misc_RNA (1)...(19): siRNA sense strand
ccugagaaccgccagacuu

SEQ ID NO: 802173 - RNA, 19 nt, Homo sapiens
  misc_RNA (1)...(19): siRNA sense strand
uggauucccuaccuaugga

SEQ ID NO: 802174 - RNA, 19 nt, Homo sapiens
  misc_RNA (1)...(19): siRNA sense strand
gcagcaacgccuaccucaa

SEQ ID NO: 802175 - RNA, 19 nt, Homo sapiens
  misc_RNA (1)...(19): siRNA sense strand
caacgccuaccucaaugug

SEQ ID NO: 802176 - RNA, 19 nt, Homo sapiens
  misc_RNA (1)...(19): siRNA sense strand
aggaaaugcgugaagcuuu

SEQ ID NO: 802177 - RNA, 19 nt, Homo sapiens
  misc_RNA (1)...(19): siRNA sense strand
ucacuggcacuuucugcaa

SEQ ID NO: 802178 - RNA, 19 nt, Homo sapiens
  misc_RNA (1)...(19): siRNA sense strand
ggucugggccauugaucug

SEQ ID NO: 802179 - RNA, 19 nt, Homo sapiens
  misc_RNA (1)...(19): siRNA sense strand
gaagugccuuaugccuauc

SEQ ID NO: 802180 - RNA, 19 nt, Homo sapiens
  misc_RNA (1)...(19): siRNA sense strand
ggaucugggcuuacuacga

SEQ ID NO: 802181 - RNA, 19 nt, Homo sapiens
  misc_RNA (1)...(19): siRNA sense strand
agaagcucaucguuggauu

SEQ ID NO: 802182 - RNA, 19 nt, Homo sapiens
  misc_RNA (1)...(19): siRNA sense strand
gcaacgccuaccucaaugu

SEQ ID NO: 802183 - RNA, 19 nt, Homo sapiens
  misc_RNA (1)...(19): siRNA sense strand
agacuuucaucaccucagu

SEQ ID NO: 802184 - RNA, 19 nt, Homo sapiens
  misc_RNA (1)...(19): siRNA sense strand
gcaggaggccaagcagauc

SEQ ID NO: 802185 - RNA, 19 nt, Homo sapiens
  misc_RNA (1)...(19): siRNA sense strand
cuuaagcacaacaaauuug

SEQ ID NO: 802186 - RNA, 19 nt, Homo sapiens
  misc_RNA (1)...(19): siRNA sense strand
gaaccgccagacuuucauc

SEQ ID NO: 802187 - RNA, 19 nt, Homo sapiens
  misc_RNA (1)...(19): siRNA sense strand
cguggcaaauaacagaaau

SEQ ID NO: 802188 - RNA, 19 nt, Homo sapiens
  misc_RNA (1)...(19): siRNA sense strand
ggacuuugacugggaguac

SEQ ID NO: 802189 - RNA, 19 nt, Homo sapiens
  misc_RNA (1)...(19): siRNA sense strand
uaaucuccacccugaagaa

SEQ ID NO: 802190 - RNA, 19 nt, Homo sapiens
  misc_RNA (1)...(19): siRNA sense strand
ggagacagcuggaugauga

SEQ ID NO: 802191 - RNA, 19 nt, Homo sapiens
  misc_RNA (1)...(19): siRNA sense strand
gaacaugacuguggauauu

SEQ ID NO: 802192 - RNA, 19 nt, Homo sapiens
  misc_RNA (1)...(19): siRNA sense strand
gaagaaauguugaaagaag

SEQ ID NO: 802193 - RNA, 19 nt, Homo sapiens
  misc_RNA (1)...(19): siRNA sense strand
cuagaucgcuuuaaaguga

SEQ ID NO: 802194 - RNA, 19 nt, Homo sapiens
  misc_RNA (1)...(19): siRNA sense strand
gaaagaaggcuacagaugu

SEQ ID NO: 802195 - RNA, 19 nt, Homo sapiens
  misc_RNA (1)...(19): siRNA sense strand
gcacauuguuuggagaaua

SEQ ID NO: 802196 - RNA, 19 nt, Homo sapiens
  misc_RNA (1)...(19): siRNA sense strand
ucaacuagaucgcuuuaaa

SEQ ID NO: 802197 - RNA, 19 nt, Homo sapiens
  misc_RNA (1)...(19): siRNA sense strand
cuacagauguccauuaugu

SEQ ID NO: 802198 - RNA, 19 nt, Homo sapiens
  misc_RNA (1)...(19): siRNA sense strand
gcacucugcuuuagauaug

SEQ ID NO: 802199 - RNA, 19 nt, Homo sapiens
  misc_RNA (1)...(19): siRNA sense strand
ccaacagacuugugaagaa

SEQ ID NO: 802200 - RNA, 19 nt, Homo sapiens
  misc_RNA (1)...(19): siRNA sense strand
caacagacuugugaagaau

SEQ ID NO: 802201 - RNA, 19 nt, Homo sapiens
  misc_RNA (1)...(19): siRNA sense strand
cgauauaugccauuuguuu

SEQ ID NO: 802202 - RNA, 19 nt, Homo sapiens
  misc_RNA (1)...(19): siRNA sense strand
gauauucucugcaaugacu

SEQ ID NO: 802203 - RNA, 19 nt, Homo sapiens
  misc_RNA (1)...(19): siRNA sense strand
ggacaucuuuuacauagaa

SEQ ID NO: 802204 - RNA, 19 nt, Homo sapiens
  misc_RNA (1)...(19): siRNA sense strand
acagcuggaugaugaagua

SEQ ID NO: 802205 - RNA, 19 nt, Homo sapiens
  misc_RNA (1)...(19): siRNA sense strand
gcuggaggacguagaauuu

SEQ ID NO: 802206 - RNA, 19 nt, Homo sapiens
  misc_RNA (1)...(19): siRNA sense strand
acaaagauaagaagcagua

SEQ ID NO: 802207 - RNA, 19 nt, Homo sapiens
  misc_RNA (1)...(19): siRNA sense strand
uagaacguguuaugaagaa

SEQ ID NO: 802208 - RNA, 19 nt, Homo sapiens
  misc_RNA (1)...(19): siRNA sense strand
gauaugaccagguauugga

SEQ ID NO: 802209 - RNA, 19 nt, Homo sapiens
  misc_RNA (1)...(19): siRNA sense strand
aaagaaggcuacagauguc

SEQ ID NO: 802210 - RNA, 19 nt, Homo sapiens
  misc_RNA (1)...(19): siRNA sense strand
gauauaugccauuuguuug

SEQ ID NO: 802211 - RNA, 19 nt, Homo sapiens
  misc_RNA (1)...(19): siRNA sense strand
caacaugcccaacagacuu

SEQ ID NO: 802212 - RNA, 19 nt, Homo sapiens
  misc_RNA (1)...(19): siRNA sense strand
ggcuacagauguccauuau

SEQ ID NO: 802213 - RNA, 19 nt, Homo sapiens
  misc_RNA (1)...(19): siRNA sense strand
gaacguguuaugaagaaau

SEQ ID NO: 802214 - RNA, 19 nt, Homo sapiens
  misc_RNA (1)...(19): siRNA sense strand
uaacuuaugccuagcuaug

SEQ ID NO: 802215 - RNA, 19 nt, Homo sapiens
  misc_RNA (1)...(19): siRNA sense strand
gaaguagcacagacuccua

SEQ ID NO: 802216 - RNA, 19 nt, Homo sapiens
  misc_RNA (1)...(19): siRNA sense strand
cacauuguuuggagaauau

SEQ ID NO: 802217 - RNA, 19 nt, Homo sapiens
  misc_RNA (1)...(19): siRNA sense strand
cuuuagauaugaccaggua

SEQ ID NO: 802218 - RNA, 19 nt, Homo sapiens
  misc_RNA (1)...(19): siRNA sense strand
ugaaagaaggcuacagaug

SEQ ID NO: 802219 - RNA, 19 nt, Homo sapiens
  misc_RNA (1)...(19): siRNA sense strand
ugaagaucaucaacuagau

SEQ ID NO: 802220 - RNA, 19 nt, Homo sapiens
  misc_RNA (1)...(19): siRNA sense strand
gcuuuaaagugaaggaagu

SEQ ID NO: 802221 - RNA, 19 nt, Homo sapiens
  misc_RNA (1)...(19): siRNA sense strand
caucaacuagaucgcuuua

SEQ ID NO: 802222 - RNA, 19 nt, Homo sapiens
  misc_RNA (1)...(19): siRNA sense strand
caacuagaucgcuuuaaag

SEQ ID NO: 802223 - RNA, 19 nt, Homo sapiens
  misc_RNA (1)...(19): siRNA sense strand
uguggaauuuguaggauug

SEQ ID NO: 802224 - RNA, 19 nt, Homo sapiens
  misc_RNA (1)...(19): siRNA sense strand
acagauguccauuauguau

SEQ ID NO: 802225 - RNA, 19 nt, Homo sapiens
  misc_RNA (1)...(19): siRNA sense strand
guugaaagaaggcuacaga

SEQ ID NO: 802226 - RNA, 19 nt, Homo sapiens
  misc_RNA (1)...(19): siRNA sense strand
ugugaaaacuguggaauuu

SEQ ID NO: 802227 - RNA, 19 nt, Homo sapiens
  misc_RNA (1)...(19): siRNA sense strand
uggauauucucugcaauga

SEQ ID NO: 802228 - RNA, 19 nt, Homo sapiens
  misc_RNA (1)...(19): siRNA sense strand
gcacuaugacagaggaugu

SEQ ID NO: 802229 - RNA, 19 nt, Homo sapiens
  misc_RNA (1)...(19): siRNA sense strand
uggaggacauucacacauc

SEQ ID NO: 802230 - RNA, 19 nt, Homo sapiens
  misc_RNA (1)...(19): siRNA sense strand
agacuccuaugccaucaga

SEQ ID NO: 802231 - RNA, 19 nt, Homo sapiens
  misc_RNA (1)...(19): siRNA sense strand
gcuggaugaugaaguagca

SEQ ID NO: 802232 - RNA, 19 nt, Homo sapiens
  misc_RNA (1)...(19): siRNA sense strand
uaugcacucugcuuuagau

SEQ ID NO: 802233 - RNA, 19 nt, Homo sapiens
  misc_RNA (1)...(19): siRNA sense strand
ugcgauauaugccauuugu

SEQ ID NO: 802234 - RNA, 19 nt, Homo sapiens
  misc_RNA (1)...(19): siRNA sense strand
ugaaaacuguggaauuugu

SEQ ID NO: 802235 - RNA, 19 nt, Homo sapiens
  misc_RNA (1)...(19): siRNA sense strand
uggaggacguagaauuuca

SEQ ID NO: 802236 - RNA, 19 nt, Homo sapiens
  misc_RNA (1)...(19): siRNA sense strand
caagcuggaggacguagaa

SEQ ID NO: 802237 - RNA, 19 nt, Homo sapiens
  misc_RNA (1)...(19): siRNA sense strand
uguuguugcucaugucuug

SEQ ID NO: 802238 - RNA, 19 nt, Homo sapiens
  misc_RNA (1)...(19): siRNA sense strand
acagacuugugaagaaugu

SEQ ID NO: 802239 - RNA, 19 nt, Homo sapiens
  misc_RNA (1)...(19): siRNA sense strand
cagaauaucagaacaugac

SEQ ID NO: 802240 - RNA, 19 nt, Homo sapiens
  misc_RNA (1)...(19): siRNA sense strand
uuagauaugaccagguauu

SEQ ID NO: 802241 - RNA, 19 nt, Homo sapiens
  misc_RNA (1)...(19): siRNA sense strand
gaaaacuguggaauuugua

SEQ ID NO: 802242 - RNA, 19 nt, Homo sapiens
  misc_RNA (1)...(19): siRNA sense strand
guggauauucucugcaaug

SEQ ID NO: 802243 - RNA, 19 nt, Homo sapiens
  misc_RNA (1)...(19): siRNA sense strand
uguaugcacucugcuuuag

SEQ ID NO: 802244 - RNA, 19 nt, Homo sapiens
  misc_RNA (1)...(19): siRNA sense strand
uguaacuuaugccuagcua

SEQ ID NO: 802245 - RNA, 19 nt, Homo sapiens
  misc_RNA (1)...(19): siRNA sense strand
guggacaucuuuuacauag

SEQ ID NO: 802246 - RNA, 19 nt, Homo sapiens
  misc_RNA (1)...(19): siRNA sense strand
ucucugcaaugacuguaau

SEQ ID NO: 802247 - RNA, 19 nt, Homo sapiens
  misc_RNA (1)...(19): siRNA sense strand
gcugugacaagcuuuauac

SEQ ID NO: 802248 - RNA, 19 nt, Homo sapiens
  misc_RNA (1)...(19): siRNA sense strand
cagaacaugacuguggaua

SEQ ID NO: 802249 - RNA, 19 nt, Homo sapiens
  misc_RNA (1)...(19): siRNA sense strand
caucagaauaucagaacau

SEQ ID NO: 802250 - RNA, 19 nt, Homo sapiens
  misc_RNA (1)...(19): siRNA sense strand
aggcuacagauguccauua

SEQ ID NO: 802251 - RNA, 19 nt, Homo sapiens
  misc_RNA (1)...(19): siRNA sense strand
gaugaugaaguagcacaga

SEQ ID NO: 802252 - RNA, 19 nt, Homo sapiens
  misc_RNA (1)...(19): siRNA sense strand
uauguaugcacucugcuuu

SEQ ID NO: 802253 - RNA, 19 nt, Homo sapiens
  misc_RNA (1)...(19): siRNA sense strand
uagaucgcuuuaaagugaa

SEQ ID NO: 802254 - RNA, 19 nt, Homo sapiens
  misc_RNA (1)...(19): siRNA sense strand
acuuaugccuagcuaugaa

SEQ ID NO: 802255 - RNA, 19 nt, Homo sapiens
  misc_RNA (1)...(19): siRNA sense strand
ugugaauccuauaauacug

SEQ ID NO: 802256 - RNA, 19 nt, Homo sapiens
  misc_RNA (1)...(19): siRNA sense strand
uagauaugaccagguauug

SEQ ID NO: 802257 - RNA, 19 nt, Homo sapiens
  misc_RNA (1)...(19): siRNA sense strand
agauguccauuauguaugc

SEQ ID NO: 802258 - RNA, 19 nt, Homo sapiens
  misc_RNA (1)...(19): siRNA sense strand
cuauaauacugcucaagcu

SEQ ID NO: 802259 - RNA, 19 nt, Homo sapiens
  misc_RNA (1)...(19): siRNA sense strand
ccgcuugugucaugauaac

SEQ ID NO: 802260 - RNA, 19 nt, Homo sapiens
  misc_RNA (1)...(19): siRNA sense strand
aggcaugaaauguaagauu

SEQ ID NO: 802261 - RNA, 19 nt, Homo sapiens
  misc_RNA (1)...(19): siRNA sense strand
agaacaugacuguggauau

SEQ ID NO: 802262 - RNA, 19 nt, Homo sapiens
  misc_RNA (1)...(19): siRNA sense strand
aauaucagaacaugacugu

SEQ ID NO: 802263 - RNA, 19 nt, Homo sapiens
  misc_RNA (1)...(19): siRNA sense strand
ugugacaagcuuuauacuu

SEQ ID NO: 802264 - RNA, 19 nt, Homo sapiens
  misc_RNA (1)...(19): siRNA sense strand
gauaugaguugcuguauaa

SEQ ID NO: 802265 - RNA, 19 nt, Homo sapiens
  misc_RNA (1)...(19): siRNA sense strand
ccacucagcuguugaagaa

SEQ ID NO: 802266 - RNA, 19 nt, Homo sapiens
  misc_RNA (1)...(19): siRNA sense strand
ggucaaggcuaucaucgua

SEQ ID NO: 802267 - RNA, 19 nt, Homo sapiens
  misc_RNA (1)...(19): siRNA sense strand
gcaauggaauccucuggua

SEQ ID NO: 802268 - RNA, 19 nt, Homo sapiens
  misc_RNA (1)...(19): siRNA sense strand
gagcuuauauccaaaugaa

SEQ ID NO: 802269 - RNA, 19 nt, Homo sapiens
  misc_RNA (1)...(19): siRNA sense strand
gaaaucaagucagucauga

SEQ ID NO: 802270 - RNA, 19 nt, Homo sapiens
  misc_RNA (1)...(19): siRNA sense strand
gaaagaaugagacugguaa

SEQ ID NO: 802271 - RNA, 19 nt, Homo sapiens
  misc_RNA (1)...(19): siRNA sense strand
gugauaaccucauggcuuu

SEQ ID NO: 802272 - RNA, 19 nt, Homo sapiens
  misc_RNA (1)...(19): siRNA sense strand
gucaggaucucuuaaguuu

SEQ ID NO: 802273 - RNA, 19 nt, Homo sapiens
  misc_RNA (1)...(19): siRNA sense strand
caaaugaagucucugaaag

SEQ ID NO: 802274 - RNA, 19 nt, Homo sapiens
  misc_RNA (1)...(19): siRNA sense strand
gaauucagcuucuucacau

SEQ ID NO: 802275 - RNA, 19 nt, Homo sapiens
  misc_RNA (1)...(19): siRNA sense strand
gaaaguggagcucuaauag

SEQ ID NO: 802276 - RNA, 19 nt, Homo sapiens
  misc_RNA (1)...(19): siRNA sense strand
agaaauggauggauuagau

SEQ ID NO: 802277 - RNA, 19 nt, Homo sapiens
  misc_RNA (1)...(19): siRNA sense strand
ugacaaagcccgaaagugu

SEQ ID NO: 802278 - RNA, 19 nt, Homo sapiens
  misc_RNA (1)...(19): siRNA sense strand
ugagaaagcuuugcaucuu

SEQ ID NO: 802279 - RNA, 19 nt, Homo sapiens
  misc_RNA (1)...(19): siRNA sense strand
uuagggaucucuucaaaug

SEQ ID NO: 802280 - RNA, 19 nt, Homo sapiens
  misc_RNA (1)...(19): siRNA sense strand
gagaaagcuuugcaucuuc

SEQ ID NO: 802281 - RNA, 19 nt, Homo sapiens
  misc_RNA (1)...(19): siRNA sense strand
ggaauuguacagucuauug

SEQ ID NO: 802282 - RNA, 19 nt, Homo sapiens
  misc_RNA (1)...(19): siRNA sense strand
ggacugugaugcuguucaa

SEQ ID NO: 802283 - RNA, 19 nt, Homo sapiens
  misc_RNA (1)...(19): siRNA sense strand
gaaugagacugguaauaac

SEQ ID NO: 802284 - RNA, 19 nt, Homo sapiens
  misc_RNA (1)...(19): siRNA sense strand
uuaaccagcugaagaauca

SEQ ID NO: 802285 - RNA, 19 nt, Homo sapiens
  misc_RNA (1)...(19): siRNA sense strand
ggaccaaggaucagacaaa

SEQ ID NO: 802286 - RNA, 19 nt, Homo sapiens
  misc_RNA (1)...(19): siRNA sense strand
ucucagaaaugccuuguug

SEQ ID NO: 802287 - RNA, 19 nt, Homo sapiens
  misc_RNA (1)...(19): siRNA sense strand
gaaaagccgugaagcuauu

SEQ ID NO: 802288 - RNA, 19 nt, Homo sapiens
  misc_RNA (1)...(19): siRNA sense strand
uggauuagaugauguugaa

SEQ ID NO: 802289 - RNA, 19 nt, Homo sapiens
  misc_RNA (1)...(19): siRNA sense strand
agaaugagacugguaauaa

SEQ ID NO: 802290 - RNA, 19 nt, Homo sapiens
  misc_RNA (1)...(19): siRNA sense strand
gagaaagaagccaguguuu

SEQ ID NO: 802291 - RNA, 19 nt, Homo sapiens
  misc_RNA (1)...(19): siRNA sense strand
ggaaagaaugagacuggua

SEQ ID NO: 802292 - RNA, 19 nt, Homo sapiens
  misc_RNA (1)...(19): siRNA sense strand
ugaagaaauggauggauua

SEQ ID NO: 802293 - RNA, 19 nt, Homo sapiens
  misc_RNA (1)...(19): siRNA sense strand
gaacugcagaaugguaaua

SEQ ID NO: 802294 - RNA, 19 nt, Homo sapiens
  misc_RNA (1)...(19): siRNA sense strand
gaaauuaugaugccugucu

SEQ ID NO: 802295 - RNA, 19 nt, Homo sapiens
  misc_RNA (1)...(19): siRNA sense strand
ccucaucucucucgacaga

SEQ ID NO: 802296 - RNA, 19 nt, Homo sapiens
  misc_RNA (1)...(19): siRNA sense strand
ucaaggcuaucaucguaaa

SEQ ID NO: 802297 - RNA, 19 nt, Homo sapiens
  misc_RNA (1)...(19): siRNA sense strand
cuaaaggccuucccagcaa

SEQ ID NO: 802298 - RNA, 19 nt, Homo sapiens
  misc_RNA (1)...(19): siRNA sense strand
gaagacccauguguacguu

SEQ ID NO: 802299 - RNA, 19 nt, Homo sapiens
  misc_RNA (1)...(19): siRNA sense strand
caagcacaauuugggaaua

SEQ ID NO: 802300 - RNA, 19 nt, Homo sapiens
  misc_RNA (1)...(19): siRNA sense strand
ggaaaucaagucagucaug

SEQ ID NO: 802301 - RNA, 19 nt, Homo sapiens
  misc_RNA (1)...(19): siRNA sense strand
ugaaaguggagcucuaaua

SEQ ID NO: 802302 - RNA, 19 nt, Homo sapiens
  misc_RNA (1)...(19): siRNA sense strand
caacagauaauuugagaca

SEQ ID NO: 802303 - RNA, 19 nt, Homo sapiens
  misc_RNA (1)...(19): siRNA sense strand
gcagccauaugucucagaa

SEQ ID NO: 802304 - RNA, 19 nt, Homo sapiens
  misc_RNA (1)...(19): siRNA sense strand
ugagaugcauguucuggaa

SEQ ID NO: 802305 - RNA, 19 nt, Homo sapiens
  misc_RNA (1)...(19): siRNA sense strand
cagcuggccuuacagauca

SEQ ID NO: 802306 - RNA, 19 nt, Homo sapiens
  misc_RNA (1)...(19): siRNA sense strand
agauaugaguugcuguaua

SEQ ID NO: 802307 - RNA, 19 nt, Homo sapiens
  misc_RNA (1)...(19): siRNA sense strand
gaggagcgaauaugacaaa

SEQ ID NO: 802308 - RNA, 19 nt, Homo sapiens
  misc_RNA (1)...(19): siRNA sense strand
ucaagucagucaugaauac

SEQ ID NO: 802309 - RNA, 19 nt, Homo sapiens
  misc_RNA (1)...(19): siRNA sense strand
ccaaaugaagucucugaaa

SEQ ID NO: 802310 - RNA, 19 nt, Homo sapiens
  misc_RNA (1)...(19): siRNA sense strand
cagaagcccucaucucucu

SEQ ID NO: 802311 - RNA, 19 nt, Homo sapiens
  misc_RNA (1)...(19): siRNA sense strand
gaaauggauggauuagaug

SEQ ID NO: 802312 - RNA, 19 nt, Homo sapiens
  misc_RNA (1)...(19): siRNA sense strand
agacaaaggugaaaaugaa

SEQ ID NO: 802313 - RNA, 19 nt, Homo sapiens
  misc_RNA (1)...(19): siRNA sense strand
ucaauuaggugggaacaca

SEQ ID NO: 802314 - RNA, 19 nt, Homo sapiens
  misc_RNA (1)...(19): siRNA sense strand
uaaaggccuucccagcaaa

SEQ ID NO: 802315 - RNA, 19 nt, Homo sapiens
  misc_RNA (1)...(19): siRNA sense strand
aaagggaaaucaagucagu

SEQ ID NO: 802316 - RNA, 19 nt, Homo sapiens
  misc_RNA (1)...(19): siRNA sense strand
gcaguauacagaagccaua

SEQ ID NO: 802317 - RNA, 19 nt, Homo sapiens
  misc_RNA (1)...(19): siRNA sense strand
agaugcauguucuggaaua

SEQ ID NO: 802318 - RNA, 19 nt, Homo sapiens
  misc_RNA (1)...(19): siRNA sense strand
guacgagcuuauauccaaa

SEQ ID NO: 802319 - RNA, 19 nt, Homo sapiens
  misc_RNA (1)...(19): siRNA sense strand
uugaagaaauggauggauu

SEQ ID NO: 802320 - RNA, 19 nt, Homo sapiens
  misc_RNA (1)...(19): siRNA sense strand
ccuuagggaucucuucaaa

SEQ ID NO: 802321 - RNA, 19 nt, Homo sapiens
  misc_RNA (1)...(19): siRNA sense strand
ugucacugaugucuccuua

SEQ ID NO: 802322 - RNA, 19 nt, Homo sapiens
  misc_RNA (1)...(19): siRNA sense strand
gcaucacagucuauacaga

SEQ ID NO: 802323 - RNA, 19 nt, Homo sapiens
  misc_RNA (1)...(19): siRNA sense strand
ggaauucagcuucuucaca

SEQ ID NO: 802324 - RNA, 19 nt, Homo sapiens
  misc_RNA (1)...(19): siRNA sense strand
ccaauaagagauaugaguu

SEQ ID NO: 802325 - RNA, 19 nt, Homo sapiens
  misc_RNA (1)...(19): siRNA sense strand
cacccucucucuuucuuaa

SEQ ID NO: 802326 - RNA, 19 nt, Homo sapiens
  misc_RNA (1)...(19): siRNA sense strand
aauagaagcugcaaaauca

SEQ ID NO: 802327 - RNA, 19 nt, Homo sapiens
  misc_RNA (1)...(19): siRNA sense strand
ggugaaugcuugagaugca

SEQ ID NO: 802328 - RNA, 19 nt, Homo sapiens
  misc_RNA (1)...(19): siRNA sense strand
ucaccacugugcagagaaa

SEQ ID NO: 802329 - RNA, 19 nt, Homo sapiens
  misc_RNA (1)...(19): siRNA sense strand
cuucaaugauccauccuaa

SEQ ID NO: 802330 - RNA, 19 nt, Homo sapiens
  misc_RNA (1)...(19): siRNA sense strand
ggaguuugcagccauaugu

SEQ ID NO: 802331 - RNA, 19 nt, Homo sapiens
  misc_RNA (1)...(19): siRNA sense strand
aguacgagcuuauauccaa

SEQ ID NO: 802332 - RNA, 19 nt, Homo sapiens
  misc_RNA (1)...(19): siRNA sense strand
ccaggcggcuucaaugauc

SEQ ID NO: 802333 - RNA, 19 nt, Homo sapiens
  misc_RNA (1)...(19): siRNA sense strand
cggagaaugucacugaugu

SEQ ID NO: 802334 - RNA, 19 nt, Homo sapiens
  misc_RNA (1)...(19): siRNA sense strand
acauuuauaugcugcagaa

SEQ ID NO: 802335 - RNA, 19 nt, Homo sapiens
  misc_RNA (1)...(19): siRNA sense strand
cuacguggcucuggcuuug

SEQ ID NO: 802336 - RNA, 19 nt, Homo sapiens
  misc_RNA (1)...(19): siRNA sense strand
ucaggaagacccaugugua

SEQ ID NO: 802337 - RNA, 19 nt, Homo sapiens
  misc_RNA (1)...(19): siRNA sense strand
caaagauacaucaguacaa

SEQ ID NO: 802338 - RNA, 19 nt, Homo sapiens
  misc_RNA (1)...(19): siRNA sense strand
gaccaaggaucagacaaag

SEQ ID NO: 802339 - RNA, 19 nt, Homo sapiens
  misc_RNA (1)...(19): siRNA sense strand
gcucuggcuuugggugaua

SEQ ID NO: 802340 - RNA, 19 nt, Homo sapiens
  misc_RNA (1)...(19): siRNA sense strand
caaaguacgagcuuauauc

SEQ ID NO: 802341 - RNA, 19 nt, Homo sapiens
  misc_RNA (1)...(19): siRNA sense strand
aagcagucauucuuuauca

SEQ ID NO: 802342 - RNA, 19 nt, Homo sapiens
  misc_RNA (1)...(19): siRNA sense strand
ucacaucuggaaauuauga

SEQ ID NO: 802343 - RNA, 19 nt, Homo sapiens
  misc_RNA (1)...(19): siRNA sense strand
auacucagcuggccuuaca

SEQ ID NO: 802344 - RNA, 19 nt, Homo sapiens
  misc_RNA (1)...(19): siRNA sense strand
ucaaugauccauccuaaag

SEQ ID NO: 802345 - RNA, 19 nt, Homo sapiens
  misc_RNA (1)...(19): siRNA sense strand
cagacaagccugcagauca

SEQ ID NO: 802346 - RNA, 19 nt, Homo sapiens
  misc_RNA (1)...(19): siRNA sense strand
gcacaauuugggaauauuc

SEQ ID NO: 802347 - RNA, 19 nt, Homo sapiens
  misc_RNA (1)...(19): siRNA sense strand
gaugcauguucuggaauaa

SEQ ID NO: 802348 - RNA, 19 nt, Homo sapiens
  misc_RNA (1)...(19): siRNA sense strand
gguaauaacaacaacaaag

SEQ ID NO: 802349 - RNA, 19 nt, Homo sapiens
  misc_RNA (1)...(19): siRNA sense strand
gcuuguagaccuguauaua

SEQ ID NO: 802350 - RNA, 19 nt, Homo sapiens
  misc_RNA (1)...(19): siRNA sense strand
acagcauguuguacuauaa

SEQ ID NO: 802351 - RNA, 19 nt, Homo sapiens
  misc_RNA (1)...(19): siRNA sense strand
ucacugaugucuccuuagg

SEQ ID NO: 802352 - RNA, 19 nt, Homo sapiens
  misc_RNA (1)...(19): siRNA sense strand
caucacagucuauacagaa

SEQ ID NO: 802353 - RNA, 19 nt, Homo sapiens
  misc_RNA (1)...(19): siRNA sense strand
caauaagagauaugaguug

SEQ ID NO: 802354 - RNA, 19 nt, Homo sapiens
  misc_RNA (1)...(19): siRNA sense strand
guauacagaagccauauca

SEQ ID NO: 802355 - RNA, 19 nt, Homo sapiens
  misc_RNA (1)...(19): siRNA sense strand
gccaugagcaagcacaauu

SEQ ID NO: 802356 - RNA, 19 nt, Homo sapiens
  misc_RNA (1)...(19): siRNA sense strand
ccaaacaacaacagauaau

SEQ ID NO: 802357 - RNA, 19 nt, Homo sapiens
  misc_RNA (1)...(19): siRNA sense strand
gcgaaagcagugaaacuug

SEQ ID NO: 802358 - RNA, 19 nt, Homo sapiens
  misc_RNA (1)...(19): siRNA sense strand
gaagaaauggauggauuag

SEQ ID NO: 802359 - RNA, 19 nt, Homo sapiens
  misc_RNA (1)...(19): siRNA sense strand
agugaaacuugcagcagua

SEQ ID NO: 802360 - RNA, 19 nt, Homo sapiens
  misc_RNA (1)...(19): siRNA sense strand
agaaggaguuauccaccaa

SEQ ID NO: 802361 - RNA, 19 nt, Homo sapiens
  misc_RNA (1)...(19): siRNA sense strand
cuuaagagguaauuaucga

SEQ ID NO: 802362 - RNA, 19 nt, Homo sapiens
  misc_RNA (1)...(19): siRNA sense strand
cauagagccuuuugaagaa

SEQ ID NO: 802363 - RNA, 19 nt, Homo sapiens
  misc_RNA (1)...(19): siRNA sense strand
acacuuaaccagcugaaga

SEQ ID NO: 802364 - RNA, 19 nt, Homo sapiens
  misc_RNA (1)...(19): siRNA sense strand
ggagagagcucauuugaua

SEQ ID NO: 802365 - RNA, 19 nt, Homo sapiens
  misc_RNA (1)...(19): siRNA sense strand
gcaaacaaauccucuguca

SEQ ID NO: 802366 - RNA, 19 nt, Homo sapiens
  misc_RNA (1)...(19): siRNA sense strand
gaggaacaauuacauaaga

SEQ ID NO: 802367 - RNA, 19 nt, Homo sapiens
  misc_RNA (1)...(19): siRNA sense strand
gaagugaaguguugaagca

SEQ ID NO: 802368 - RNA, 19 nt, Homo sapiens
  misc_RNA (1)...(19): siRNA sense strand
gcaaacagacauuuacaaa

SEQ ID NO: 802369 - RNA, 19 nt, Homo sapiens
  misc_RNA (1)...(19): siRNA sense strand
uaauagcacugcaaacaaa

SEQ ID NO: 802370 - RNA, 19 nt, Homo sapiens
  misc_RNA (1)...(19): siRNA sense strand
guaaauggguuggcuaaga

SEQ ID NO: 802371 - RNA, 19 nt, Homo sapiens
  misc_RNA (1)...(19): siRNA sense strand
gcauacaacagacuuauuu

SEQ ID NO: 802372 - RNA, 19 nt, Homo sapiens
  misc_RNA (1)...(19): siRNA sense strand
uaaauggguuggcuaagaa

SEQ ID NO: 802373 - RNA, 19 nt, Homo sapiens
  misc_RNA (1)...(19): siRNA sense strand
ugagagaagugaaguguug

SEQ ID NO: 802374 - RNA, 19 nt, Homo sapiens
  misc_RNA (1)...(19): siRNA sense strand
uagagaaacugcaauacaa

SEQ ID NO: 802375 - RNA, 19 nt, Homo sapiens
  misc_RNA (1)...(19): siRNA sense strand
uaaaucucauccucucuua

SEQ ID NO: 802376 - RNA, 19 nt, Homo sapiens
  misc_RNA (1)...(19): siRNA sense strand
aaacagauacgugcuaaua

SEQ ID NO: 802377 - RNA, 19 nt, Homo sapiens
  misc_RNA (1)...(19): siRNA sense strand
cagaagaauuggagagauu

SEQ ID NO: 802378 - RNA, 19 nt, Homo sapiens
  misc_RNA (1)...(19): siRNA sense strand
aaacaaauccucugucaau

SEQ ID NO: 802379 - RNA, 19 nt, Homo sapiens
  misc_RNA (1)...(19): siRNA sense strand
caaggaagcaguagauuau

SEQ ID NO: 802380 - RNA, 19 nt, Homo sapiens
  misc_RNA (1)...(19): siRNA sense strand
caucuuaucucugcucuga

SEQ ID NO: 802381 - RNA, 19 nt, Homo sapiens
  misc_RNA (1)...(19): siRNA sense strand
gagagcucauuugauauua

SEQ ID NO: 802382 - RNA, 19 nt, Homo sapiens
  misc_RNA (1)...(19): siRNA sense strand
caccaugccucccgaaauu

SEQ ID NO: 802383 - RNA, 19 nt, Homo sapiens
  misc_RNA (1)...(19): siRNA sense strand
acacaaggauaacagcuuu

SEQ ID NO: 802384 - RNA, 19 nt, Homo sapiens
  misc_RNA (1)...(19): siRNA sense strand
gcagugaacaggcauuuga

SEQ ID NO: 802385 - RNA, 19 nt, Homo sapiens
  misc_RNA (1)...(19): siRNA sense strand
gaagaauuggagagauuua

SEQ ID NO: 802386 - RNA, 19 nt, Homo sapiens
  misc_RNA (1)...(19): siRNA sense strand
gcaauaauagcacugcaaa

SEQ ID NO: 802387 - RNA, 19 nt, Homo sapiens
  misc_RNA (1)...(19): siRNA sense strand
ucaugggacugauaaauug

SEQ ID NO: 802388 - RNA, 19 nt, Homo sapiens
  misc_RNA (1)...(19): siRNA sense strand
gaaaugggaggaucugaau

SEQ ID NO: 802389 - RNA, 19 nt, Homo sapiens
  misc_RNA (1)...(19): siRNA sense strand
ucaaggaagcaguagauua

SEQ ID NO: 802390 - RNA, 19 nt, Homo sapiens
  misc_RNA (1)...(19): siRNA sense strand
ggacugauaaauugauuga

SEQ ID NO: 802391 - RNA, 19 nt, Homo sapiens
  misc_RNA (1)...(19): siRNA sense strand
ggacacuccgcgacacuua

SEQ ID NO: 802392 - RNA, 19 nt, Homo sapiens
  misc_RNA (1)...(19): siRNA sense strand
gcaagcagacaguccuuaa

SEQ ID NO: 802393 - RNA, 19 nt, Homo sapiens
  misc_RNA (1)...(19): siRNA sense strand
guaaggacaggcacaaauu

SEQ ID NO: 802394 - RNA, 19 nt, Homo sapiens
  misc_RNA (1)...(19): siRNA sense strand
caacacauucugaucauga

SEQ ID NO: 802395 - RNA, 19 nt, Homo sapiens
  misc_RNA (1)...(19): siRNA sense strand
caacaacucgcguagagaa

SEQ ID NO: 802396 - RNA, 19 nt, Homo sapiens
  misc_RNA (1)...(19): siRNA sense strand
agacaguccuuaaaucuca

SEQ ID NO: 802397 - RNA, 19 nt, Homo sapiens
  misc_RNA (1)...(19): siRNA sense strand
gagccgugcccgcagauua

SEQ ID NO: 802398 - RNA, 19 nt, Homo sapiens
  misc_RNA (1)...(19): siRNA sense strand
ccacauagaagccuugaug

SEQ ID NO: 802399 - RNA, 19 nt, Homo sapiens
  misc_RNA (1)...(19): siRNA sense strand
ugagcaaacugccaaacuu

SEQ ID NO: 802400 - RNA, 19 nt, Homo sapiens
  misc_RNA (1)...(19): siRNA sense strand
gacugaaucucgucucuuc

SEQ ID NO: 802401 - RNA, 19 nt, Homo sapiens
  misc_RNA (1)...(19): siRNA sense strand
acaacagacuuauuucuuc

SEQ ID NO: 802402 - RNA, 19 nt, Homo sapiens
  misc_RNA (1)...(19): siRNA sense strand
ugaggagaaugaagagauu

SEQ ID NO: 802403 - RNA, 19 nt, Homo sapiens
  misc_RNA (1)...(19): siRNA sense strand
gaacaggcauuugauucag

SEQ ID NO: 802404 - RNA, 19 nt, Homo sapiens
  misc_RNA (1)...(19): siRNA sense strand
gaauacgaguggucagaca

SEQ ID NO: 802405 - RNA, 19 nt, Homo sapiens
  misc_RNA (1)...(19): siRNA sense strand
aaacugcaauacaaggaaa

SEQ ID NO: 802406 - RNA, 19 nt, Homo sapiens
  misc_RNA (1)...(19): siRNA sense strand
cagagucacugucuaccaa

SEQ ID NO: 802407 - RNA, 19 nt, Homo sapiens
  misc_RNA (1)...(19): siRNA sense strand
uagaagccuugauguagaa

SEQ ID NO: 802408 - RNA, 19 nt, Homo sapiens
  misc_RNA (1)...(19): siRNA sense strand
guacagacuccagcucuaa

SEQ ID NO: 802409 - RNA, 19 nt, Homo sapiens
  misc_RNA (1)...(19): siRNA sense strand
ccacaagccugcauuucca

SEQ ID NO: 802410 - RNA, 19 nt, Homo sapiens
  misc_RNA (1)...(19): siRNA sense strand
acaaacagauacgugcuaa

SEQ ID NO: 802411 - RNA, 19 nt, Homo sapiens
  misc_RNA (1)...(19): siRNA sense strand
ggcugaagcugccuugaga

SEQ ID NO: 802412 - RNA, 19 nt, Homo sapiens
  misc_RNA (1)...(19): siRNA sense strand
gagcaaacugccaaacuug

SEQ ID NO: 802413 - RNA, 19 nt, Homo sapiens
  misc_RNA (1)...(19): siRNA sense strand
gcagacaguccuuaaaucu

SEQ ID NO: 802414 - RNA, 19 nt, Homo sapiens
  misc_RNA (1)...(19): siRNA sense strand
uuggagagauuuacagcua

SEQ ID NO: 802415 - RNA, 19 nt, Homo sapiens
  misc_RNA (1)...(19): siRNA sense strand
gguacagacuccagcucua

SEQ ID NO: 802416 - RNA, 19 nt, Homo sapiens
  misc_RNA (1)...(19): siRNA sense strand
ggagguugaucuucagucu

SEQ ID NO: 802417 - RNA, 19 nt, Homo sapiens
  misc_RNA (1)...(19): siRNA sense strand
gaaacugcaauacaaggaa

SEQ ID NO: 802418 - RNA, 19 nt, Homo sapiens
  misc_RNA (1)...(19): siRNA sense strand
guagagaaacugcaauaca

SEQ ID NO: 802419 - RNA, 19 nt, Homo sapiens
  misc_RNA (1)...(19): siRNA sense strand
ggucagcuccuuccuaaca

SEQ ID NO: 802420 - RNA, 19 nt, Homo sapiens
  misc_RNA (1)...(19): siRNA sense strand
acucagaccugucaaugga

SEQ ID NO: 802421 - RNA, 19 nt, Homo sapiens
  misc_RNA (1)...(19): siRNA sense strand
acagauacgugcuaauaag

SEQ ID NO: 802422 - RNA, 19 nt, Homo sapiens
  misc_RNA (1)...(19): siRNA sense strand
gaacugaccagagcugauc

SEQ ID NO: 802423 - RNA, 19 nt, Homo sapiens
  misc_RNA (1)...(19): siRNA sense strand
ggagagauuuacagcuagu

SEQ ID NO: 802424 - RNA, 19 nt, Homo sapiens
  misc_RNA (1)...(19): siRNA sense strand
gaggaucccagccuagauu

SEQ ID NO: 802425 - RNA, 19 nt, Homo sapiens
  misc_RNA (1)...(19): siRNA sense strand
acacagacaugagcaguuc

SEQ ID NO: 802426 - RNA, 19 nt, Homo sapiens
  misc_RNA (1)...(19): siRNA sense strand
gcugaggaacaauuacaua

SEQ ID NO: 802427 - RNA, 19 nt, Homo sapiens
  misc_RNA (1)...(19): siRNA sense strand
caauuccacuucccucaau

SEQ ID NO: 802428 - RNA, 19 nt, Homo sapiens
  misc_RNA (1)...(19): siRNA sense strand
cagaugauguucccacaag

SEQ ID NO: 802429 - RNA, 19 nt, Homo sapiens
  misc_RNA (1)...(19): siRNA sense strand
cauaagaagcaacgacuga

SEQ ID NO: 802430 - RNA, 19 nt, Homo sapiens
  misc_RNA (1)...(19): siRNA sense strand
agacuuauuucuuccacuu

SEQ ID NO: 802431 - RNA, 19 nt, Homo sapiens
  misc_RNA (1)...(19): siRNA sense strand
ugacuuggaauaucgaauu

SEQ ID NO: 802432 - RNA, 19 nt, Homo sapiens
  misc_RNA (1)...(19): siRNA sense strand
guucuagcauuuccagaug

SEQ ID NO: 802433 - RNA, 19 nt, Homo sapiens
  misc_RNA (1)...(19): siRNA sense strand
gaacagccggcacuucaag

SEQ ID NO: 802434 - RNA, 19 nt, Homo sapiens
  misc_RNA (1)...(19): siRNA sense strand
gccacucuuugucagaaua

SEQ ID NO: 802435 - RNA, 19 nt, Homo sapiens
  misc_RNA (1)...(19): siRNA sense strand
gcguagagaaacugcaaua

SEQ ID NO: 802436 - RNA, 19 nt, Homo sapiens
  misc_RNA (1)...(19): siRNA sense strand
gcacucagaccugucaaug

SEQ ID NO: 802437 - RNA, 19 nt, Homo sapiens
  misc_RNA (1)...(19): siRNA sense strand
caauugcacucuuccacau

SEQ ID NO: 802438 - RNA, 19 nt, Homo sapiens
  misc_RNA (1)...(19): siRNA sense strand
gagcucauuugauauuaac

SEQ ID NO: 802439 - RNA, 19 nt, Homo sapiens
  misc_RNA (1)...(19): siRNA sense strand
ucucugcucugauguaaca

SEQ ID NO: 802440 - RNA, 19 nt, Homo sapiens
  misc_RNA (1)...(19): siRNA sense strand
uaucucugcucugauguaa

SEQ ID NO: 802441 - RNA, 19 nt, Homo sapiens
  misc_RNA (1)...(19): siRNA sense strand
auagaagccuugauguaga

SEQ ID NO: 802442 - RNA, 19 nt, Homo sapiens
  misc_RNA (1)...(19): siRNA sense strand
cauagaagccuugauguag

SEQ ID NO: 802443 - RNA, 19 nt, Homo sapiens
  misc_RNA (1)...(19): siRNA sense strand
caaauccucugucaauucc

SEQ ID NO: 802444 - RNA, 19 nt, Homo sapiens
  misc_RNA (1)...(19): siRNA sense strand
agagggacuuagcaacuuu

SEQ ID NO: 802445 - RNA, 19 nt, Homo sapiens
  misc_RNA (1)...(19): siRNA sense strand
cagagggacuuagcaacuu

SEQ ID NO: 802446 - RNA, 19 nt, Homo sapiens
  misc_RNA (1)...(19): siRNA sense strand
ucucuuaucucaguccuau

SEQ ID NO: 802447 - RNA, 19 nt, Homo sapiens
  misc_RNA (1)...(19): siRNA sense strand
gaucaugacaauuccacuu

SEQ ID NO: 802448 - RNA, 19 nt, Homo sapiens
  misc_RNA (1)...(19): siRNA sense strand
cauccucucuuaucucagu

SEQ ID NO: 802449 - RNA, 19 nt, Homo sapiens
  misc_RNA (1)...(19): siRNA sense strand
ggcgggagguugaucuuca

SEQ ID NO: 802450 - RNA, 19 nt, Homo sapiens
  misc_RNA (1)...(19): siRNA sense strand
agagagcucauuugauauu

SEQ ID NO: 802451 - RNA, 19 nt, Homo sapiens
  misc_RNA (1)...(19): siRNA sense strand
gugaaguguugaagcauca

SEQ ID NO: 802452 - RNA, 19 nt, Homo sapiens
  misc_RNA (1)...(19): siRNA sense strand
uuggucagcuccuuccuaa

SEQ ID NO: 802453 - RNA, 19 nt, Homo sapiens
  misc_RNA (1)...(19): siRNA sense strand
gcgacaggcugacauugag

SEQ ID NO: 802454 - RNA, 19 nt, Homo sapiens
  misc_RNA (1)...(19): siRNA sense strand
gagcauacaacagacuuau

SEQ ID NO: 802455 - RNA, 19 nt, Homo sapiens
  misc_RNA (1)...(19): siRNA sense strand
caacggaaccaaaagaaaa

SEQ ID NO: 802456 - RNA, 19 nt, Homo sapiens
  misc_RNA (1)...(19): siRNA sense strand
caguuggacucuuguguuc

SEQ ID NO: 802457 - RNA, 19 nt, Homo sapiens
  misc_RNA (1)...(19): siRNA sense strand
caagcagacaguccuuaaa

SEQ ID NO: 802458 - RNA, 19 nt, Homo sapiens
  misc_RNA (1)...(19): siRNA sense strand
gaggauacccguuguucca

SEQ ID NO: 802459 - RNA, 19 nt, Homo sapiens
  misc_RNA (1)...(19): siRNA sense strand
cgagaccauucaucugaga

SEQ ID NO: 802460 - RNA, 19 nt, Homo sapiens
  misc_RNA (1)...(19): siRNA sense strand
uaaggacaggcacaaauug

SEQ ID NO: 802461 - RNA, 19 nt, Homo sapiens
  misc_RNA (1)...(19): siRNA sense strand
agacagaucaugggacuga

SEQ ID NO: 802462 - RNA, 19 nt, Homo sapiens
  misc_RNA (1)...(19): siRNA sense strand
gaauucgucagcaaacaga

SEQ ID NO: 802463 - RNA, 19 nt, Homo sapiens
  misc_RNA (1)...(19): siRNA sense strand
gaagcugccuugagaaaag

SEQ ID NO: 802464 - RNA, 19 nt, Homo sapiens
  misc_RNA (1)...(19): siRNA sense strand
gaagagaccucaguuguau

SEQ ID NO: 802465 - RNA, 19 nt, Homo sapiens
  misc_RNA (1)...(19): siRNA sense strand
aaacaaaggcgaaagauua

SEQ ID NO: 802466 - RNA, 19 nt, Homo sapiens
  misc_RNA (1)...(19): siRNA sense strand
ggaggaagaugcugaaugu

SEQ ID NO: 802467 - RNA, 19 nt, Homo sapiens
  misc_RNA (1)...(19): siRNA sense strand
ggaagaugcugaauguauu

SEQ ID NO: 802468 - RNA, 19 nt, Homo sapiens
  misc_RNA (1)...(19): siRNA sense strand
ggaagaagcaguacaauca

SEQ ID NO: 802469 - RNA, 19 nt, Homo sapiens
  misc_RNA (1)...(19): siRNA sense strand
aagauuaccuccaaagaua

SEQ ID NO: 802470 - RNA, 19 nt, Homo sapiens
  misc_RNA (1)...(19): siRNA sense strand
ggaaugagccagagagaaa

SEQ ID NO: 802471 - RNA, 19 nt, Homo sapiens
  misc_RNA (1)...(19): siRNA sense strand
caaccagucuugaaacaaa

SEQ ID NO: 802472 - RNA, 19 nt, Homo sapiens
  misc_RNA (1)...(19): siRNA sense strand
caagaaagaccaucaaguu

SEQ ID NO: 802473 - RNA, 19 nt, Homo sapiens
  misc_RNA (1)...(19): siRNA sense strand
gaaagaccaucaaguuuac

SEQ ID NO: 802474 - RNA, 19 nt, Homo sapiens
  misc_RNA (1)...(19): siRNA sense strand
ccacagcgguauccaauug

SEQ ID NO: 802475 - RNA, 19 nt, Homo sapiens
  misc_RNA (1)...(19): siRNA sense strand
caugaagacuugaacuuaa

SEQ ID NO: 802476 - RNA, 19 nt, Homo sapiens
  misc_RNA (1)...(19): siRNA sense strand
caacauggcggacaacaaa

SEQ ID NO: 802477 - RNA, 19 nt, Homo sapiens
  misc_RNA (1)...(19): siRNA sense strand
ggaaauaugagcagcauga

SEQ ID NO: 802478 - RNA, 19 nt, Homo sapiens
  misc_RNA (1)...(19): siRNA sense strand
ggccauagcugugcagaaa

SEQ ID NO: 802479 - RNA, 19 nt, Homo sapiens
  misc_RNA (1)...(19): siRNA sense strand
agaaagaccaucaaguuua

SEQ ID NO: 802480 - RNA, 19 nt, Homo sapiens
  misc_RNA (1)...(19): siRNA sense strand
caacagcucuagccugaug

SEQ ID NO: 802481 - RNA, 19 nt, Homo sapiens
  misc_RNA (1)...(19): siRNA sense strand
gaaccagaguggacuuaug

SEQ ID NO: 802482 - RNA, 19 nt, Homo sapiens
  misc_RNA (1)...(19): siRNA sense strand
caagaucccuuuccaacug

SEQ ID NO: 802483 - RNA, 19 nt, Homo sapiens
  misc_RNA (1)...(19): siRNA sense strand
ugaccgaucugacaaguug

SEQ ID NO: 802484 - RNA, 19 nt, Homo sapiens
  misc_RNA (1)...(19): siRNA sense strand
gaucagaggauaaaucaug

SEQ ID NO: 802485 - RNA, 19 nt, Homo sapiens
  misc_RNA (1)...(19): siRNA sense strand
gauguacuguuucagauug

SEQ ID NO: 802486 - RNA, 19 nt, Homo sapiens
  misc_RNA (1)...(19): siRNA sense strand
ggaaggcuauggaacuaga

SEQ ID NO: 802487 - RNA, 19 nt, Homo sapiens
  misc_RNA (1)...(19): siRNA sense strand
ggaagcagcgagcccuuua

SEQ ID NO: 802488 - RNA, 19 nt, Homo sapiens
  misc_RNA (1)...(19): siRNA sense strand
gcaguaacccucauucuca

SEQ ID NO: 802489 - RNA, 19 nt, Homo sapiens
  misc_RNA (1)...(19): siRNA sense strand
gaaacaaaggcgaaagauu

SEQ ID NO: 802490 - RNA, 19 nt, Homo sapiens
  misc_RNA (1)...(19): siRNA sense strand
gcaguaaguuucccuuugg

SEQ ID NO: 802491 - RNA, 19 nt, Homo sapiens
  misc_RNA (1)...(19): siRNA sense strand
ggaacuccaugacuccaaa

SEQ ID NO: 802492 - RNA, 19 nt, Homo sapiens
  misc_RNA (1)...(19): siRNA sense strand
caaagcagacggcaaagaa

SEQ ID NO: 802493 - RNA, 19 nt, Homo sapiens
  misc_RNA (1)...(19): siRNA sense strand
gaaagauuaccuccaaaga

SEQ ID NO: 802494 - RNA, 19 nt, Homo sapiens
  misc_RNA (1)...(19): siRNA sense strand
ccagaugacuccaaugcaa

SEQ ID NO: 802495 - RNA, 19 nt, Homo sapiens
  misc_RNA (1)...(19): siRNA sense strand
gugaugaugucccuuaaau

SEQ ID NO: 802496 - RNA, 19 nt, Homo sapiens
  misc_RNA (1)...(19): siRNA sense strand
ucgacaagcugccaauaaa

SEQ ID NO: 802497 - RNA, 19 nt, Homo sapiens
  misc_RNA (1)...(19): siRNA sense strand
caacagcaacaucccauuu

SEQ ID NO: 802498 - RNA, 19 nt, Homo sapiens
  misc_RNA (1)...(19): siRNA sense strand
gagcaccgcagaccuauga

SEQ ID NO: 802499 - RNA, 19 nt, Homo sapiens
  misc_RNA (1)...(19): siRNA sense strand
gggagaagaucacgaaggu

SEQ ID NO: 802500 - RNA, 19 nt, Homo sapiens
  misc_RNA (1)...(19): siRNA sense strand
gaaaaugccugauugacau

SEQ ID NO: 802501 - RNA, 19 nt, Homo sapiens
  misc_RNA (1)...(19): siRNA sense strand
ggcgaaagauuaccuccaa

SEQ ID NO: 802502 - RNA, 19 nt, Homo sapiens
  misc_RNA (1)...(19): siRNA sense strand
guauggaccucaacagaca

SEQ ID NO: 802503 - RNA, 19 nt, Homo sapiens
  misc_RNA (1)...(19): siRNA sense strand
gcaucuguguguccaauau

SEQ ID NO: 802504 - RNA, 19 nt, Homo sapiens
  misc_RNA (1)...(19): siRNA sense strand
gaaagagcaagaaggcaaa

SEQ ID NO: 802505 - RNA, 19 nt, Homo sapiens
  misc_RNA (1)...(19): siRNA sense strand
gagcaugcccgaugugaug

SEQ ID NO: 802506 - RNA, 19 nt, Homo sapiens
  misc_RNA (1)...(19): siRNA sense strand
ugaagagaccucaguugua

SEQ ID NO: 802507 - RNA, 19 nt, Homo sapiens
  misc_RNA (1)...(19): siRNA sense strand
gcagcgagcucccugaaaa

SEQ ID NO: 802508 - RNA, 19 nt, Homo sapiens
  misc_RNA (1)...(19): siRNA sense strand
gagagcaagucaaagaagu

SEQ ID NO: 802509 - RNA, 19 nt, Homo sapiens
  misc_RNA (1)...(19): siRNA sense strand
gaacuuaauacagcaagaa

SEQ ID NO: 802510 - RNA, 19 nt, Homo sapiens
  misc_RNA (1)...(19): siRNA sense strand
ccaugaagacuugaacuua

SEQ ID NO: 802511 - RNA, 19 nt, Homo sapiens
  misc_RNA (1)...(19): siRNA sense strand
gaacagcucggcagcaucu

SEQ ID NO: 802512 - RNA, 19 nt, Homo sapiens
  misc_RNA (1)...(19): siRNA sense strand
gaagacagaaagcgaugaa

SEQ ID NO: 802513 - RNA, 19 nt, Homo sapiens
  misc_RNA (1)...(19): siRNA sense strand
caggaaggcuauggaacua

SEQ ID NO: 802514 - RNA, 19 nt, Homo sapiens
  misc_RNA (1)...(19): siRNA sense strand
gaagaugcugaauguauug

SEQ ID NO: 802515 - RNA, 19 nt, Homo sapiens
  misc_RNA (1)...(19): siRNA sense strand
ccacgagcauccagagaga

SEQ ID NO: 802516 - RNA, 19 nt, Homo sapiens
  misc_RNA (1)...(19): siRNA sense strand
gagacccucuguaaacuca

SEQ ID NO: 802517 - RNA, 19 nt, Homo sapiens
  misc_RNA (1)...(19): siRNA sense strand
ggcgugagcuggcaaccaa

SEQ ID NO: 802518 - RNA, 19 nt, Homo sapiens
  misc_RNA (1)...(19): siRNA sense strand
gugcaggaguucaauagug

SEQ ID NO: 802519 - RNA, 19 nt, Homo sapiens
  misc_RNA (1)...(19): siRNA sense strand
gacaagcugccaauaaaga

SEQ ID NO: 802520 - RNA, 19 nt, Homo sapiens
  misc_RNA (1)...(19): siRNA sense strand
gcuuuggacacuauuaaua

SEQ ID NO: 802521 - RNA, 19 nt, Homo sapiens
  misc_RNA (1)...(19): siRNA sense strand
caacaucccauuuccaaca

SEQ ID NO: 802522 - RNA, 19 nt, Homo sapiens
  misc_RNA (1)...(19): siRNA sense strand
gcaaguaucccagguaguc

SEQ ID NO: 802523 - RNA, 19 nt, Homo sapiens
  misc_RNA (1)...(19): siRNA sense strand
gcaaaggcgacucugaaga

SEQ ID NO: 802524 - RNA, 19 nt, Homo sapiens
  misc_RNA (1)...(19): siRNA sense strand
gaugcugaauguauugaug

SEQ ID NO: 802525 - RNA, 19 nt, Homo sapiens
  misc_RNA (1)...(19): siRNA sense strand
caccgucacugccaaauca

SEQ ID NO: 802526 - RNA, 19 nt, Homo sapiens
  misc_RNA (1)...(19): siRNA sense strand
caaagucccuccggagcaa

SEQ ID NO: 802527 - RNA, 19 nt, Homo sapiens
  misc_RNA (1)...(19): siRNA sense strand
ggacauguacaaccaaagu

SEQ ID NO: 802528 - RNA, 19 nt, Homo sapiens
  misc_RNA (1)...(19): siRNA sense strand
ucagauggcucaguaugga

SEQ ID NO: 802529 - RNA, 19 nt, Homo sapiens
  misc_RNA (1)...(19): siRNA sense strand
caagguggaagaagcagua

SEQ ID NO: 802530 - RNA, 19 nt, Homo sapiens
  misc_RNA (1)...(19): siRNA sense strand
gcaaugaugccgaaauguc

SEQ ID NO: 802531 - RNA, 19 nt, Homo sapiens
  misc_RNA (1)...(19): siRNA sense strand
agacgagacuccucugugu

SEQ ID NO: 802532 - RNA, 19 nt, Homo sapiens
  misc_RNA (1)...(19): siRNA sense strand
gaccgaaagcaguaaguuu

SEQ ID NO: 802533 - RNA, 19 nt, Homo sapiens
  misc_RNA (1)...(19): siRNA sense strand
guagaaagaaagagcaaga

SEQ ID NO: 802534 - RNA, 19 nt, Homo sapiens
  misc_RNA (1)...(19): siRNA sense strand
gaaccgcacagacgauaug

SEQ ID NO: 802535 - RNA, 19 nt, Homo sapiens
  misc_RNA (1)...(19): siRNA sense strand
ggagauguacaaccaguau

SEQ ID NO: 802536 - RNA, 19 nt, Homo sapiens
  misc_RNA (1)...(19): siRNA sense strand
gcacuacagcagcagcuaa

SEQ ID NO: 802537 - RNA, 19 nt, Homo sapiens
  misc_RNA (1)...(19): siRNA sense strand
caagcaagccaguaaguuc

SEQ ID NO: 802538 - RNA, 19 nt, Homo sapiens
  misc_RNA (1)...(19): siRNA sense strand
ccuaugagcccaacaagga

SEQ ID NO: 802539 - RNA, 19 nt, Homo sapiens
  misc_RNA (1)...(19): siRNA sense strand
uaugaugucuccuggugaa

SEQ ID NO: 802540 - RNA, 19 nt, Homo sapiens
  misc_RNA (1)...(19): siRNA sense strand
gcaagaaagaccaucaagu

SEQ ID NO: 802541 - RNA, 19 nt, Homo sapiens
  misc_RNA (1)...(19): siRNA sense strand
gaaaggaagcauuggaaac

SEQ ID NO: 802542 - RNA, 19 nt, Homo sapiens
  misc_RNA (1)...(19): siRNA sense strand
gcagaaaggaagcauugga

SEQ ID NO: 802543 - RNA, 19 nt, Homo sapiens
  misc_RNA (1)...(19): siRNA sense strand
gcacauucagacucacuuu

SEQ ID NO: 802544 - RNA, 19 nt, Homo sapiens
  misc_RNA (1)...(19): siRNA sense strand
gcgaaagauuaccuccaaa

SEQ ID NO: 802545 - RNA, 19 nt, Homo sapiens
  misc_RNA (1)...(19): siRNA sense strand
aagaaagaccaucaaguuu

SEQ ID NO: 802546 - RNA, 19 nt, Homo sapiens
  misc_RNA (1)...(19): siRNA sense strand
gcacaagaucccuuuccaa

SEQ ID NO: 802547 - RNA, 19 nt, Homo sapiens
  misc_RNA (1)...(19): siRNA sense strand
gggcagcacgcaaugauau

SEQ ID NO: 802548 - RNA, 19 nt, Homo sapiens
  misc_RNA (1)...(19): siRNA sense strand
acaaagaaacccucagaug

SEQ ID NO: 802549 - RNA, 19 nt, Homo sapiens
  misc_RNA (1)...(19): siRNA sense strand
ggaaucccgccucagauga

SEQ ID NO: 802550 - RNA, 19 nt, Homo sapiens
  misc_RNA (1)...(19): siRNA sense strand
caaaggagaagcccaagca

SEQ ID NO: 802551 - RNA, 19 nt, Homo sapiens
  misc_RNA (1)...(19): siRNA sense strand
gcacagacgauaugauggu

SEQ ID NO: 802552 - RNA, 19 nt, Homo sapiens
  misc_RNA (1)...(19): siRNA sense strand
gaacggaagcaacuuugag

SEQ ID NO: 802553 - RNA, 19 nt, Homo sapiens
  misc_RNA (1)...(19): siRNA sense strand
gguugcaucugucaucugu

SEQ ID NO: 802554 - RNA, 19 nt, Homo sapiens
  misc_RNA (1)...(19): siRNA sense strand
gaaauguccauggcgcuuu

SEQ ID NO: 802555 - RNA, 19 nt, Homo sapiens
  misc_RNA (1)...(19): siRNA sense strand
guaaguuucccuuugguau

SEQ ID NO: 802556 - RNA, 19 nt, Homo sapiens
  misc_RNA (1)...(19): siRNA sense strand
guccacagaugagccagua

SEQ ID NO: 802557 - RNA, 19 nt, Homo sapiens
  misc_RNA (1)...(19): siRNA sense strand
ggcccaaucucuccugcaa

SEQ ID NO: 802558 - RNA, 19 nt, Homo sapiens
  misc_RNA (1)...(19): siRNA sense strand
acaauaauguggaccugau

SEQ ID NO: 802559 - RNA, 19 nt, Homo sapiens
  misc_RNA (1)...(19): siRNA sense strand
caagcugccaauaaagaua

SEQ ID NO: 802560 - RNA, 19 nt, Homo sapiens
  misc_RNA (1)...(19): siRNA sense strand
acccacagcagccgaauua

SEQ ID NO: 802561 - RNA, 19 nt, Homo sapiens
  misc_RNA (1)...(19): siRNA sense strand
ucucaaagcagacggcaaa

SEQ ID NO: 802562 - RNA, 19 nt, Homo sapiens
  misc_RNA (1)...(19): siRNA sense strand
gagccaguauggaccacaa

SEQ ID NO: 802563 - RNA, 19 nt, Homo sapiens
  misc_RNA (1)...(19): siRNA sense strand
gagaaaagcaucauagcaa

SEQ ID NO: 802564 - RNA, 19 nt, Homo sapiens
  misc_RNA (1)...(19): siRNA sense strand
gaagagaccucaguuguau

SEQ ID NO: 802565 - RNA, 19 nt, Homo sapiens
  misc_RNA (1)...(19): siRNA sense strand
aaacaaaggcgaaagauua

SEQ ID NO: 802566 - RNA, 19 nt, Homo sapiens
  misc_RNA (1)...(19): siRNA sense strand
ggaggaagaugcugaaugu

SEQ ID NO: 802567 - RNA, 19 nt, Homo sapiens
  misc_RNA (1)...(19): siRNA sense strand
ggaagaugcugaauguauu

SEQ ID NO: 802568 - RNA, 19 nt, Homo sapiens
  misc_RNA (1)...(19): siRNA sense strand
ggaagaagcaguacaauca

SEQ ID NO: 802569 - RNA, 19 nt, Homo sapiens
  misc_RNA (1)...(19): siRNA sense strand
aagauuaccuccaaagaua

SEQ ID NO: 802570 - RNA, 19 nt, Homo sapiens
  misc_RNA (1)...(19): siRNA sense strand
ggaaugagccagagagaaa

SEQ ID NO: 802571 - RNA, 19 nt, Homo sapiens
  misc_RNA (1)...(19): siRNA sense strand
caaccagucuugaaacaaa

SEQ ID NO: 802572 - RNA, 19 nt, Homo sapiens
  misc_RNA (1)...(19): siRNA sense strand
caagaaagaccaucaaguu

SEQ ID NO: 802573 - RNA, 19 nt, Homo sapiens
  misc_RNA (1)...(19): siRNA sense strand
gaaagaccaucaaguuuac

SEQ ID NO: 802574 - RNA, 19 nt, Homo sapiens
  misc_RNA (1)...(19): siRNA sense strand
ccacagcgguauccaauug

SEQ ID NO: 802575 - RNA, 19 nt, Homo sapiens
  misc_RNA (1)...(19): siRNA sense strand
caugaagacuugaacuuaa

SEQ ID NO: 802576 - RNA, 19 nt, Homo sapiens
  misc_RNA (1)...(19): siRNA sense strand
caacauggcggacaacaaa

SEQ ID NO: 802577 - RNA, 19 nt, Homo sapiens
  misc_RNA (1)...(19): siRNA sense strand
ggaaauaugagcagcauga

SEQ ID NO: 802578 - RNA, 19 nt, Homo sapiens
  misc_RNA (1)...(19): siRNA sense strand
ggccauagcugugcagaaa

SEQ ID NO: 802579 - RNA, 19 nt, Homo sapiens
  misc_RNA (1)...(19): siRNA sense strand
agaaagaccaucaaguuua

SEQ ID NO: 802580 - RNA, 19 nt, Homo sapiens
  misc_RNA (1)...(19): siRNA sense strand
caacagcucuagccugaug

SEQ ID NO: 802581 - RNA, 19 nt, Homo sapiens
  misc_RNA (1)...(19): siRNA sense strand
gaaccagaguggacuuaug

SEQ ID NO: 802582 - RNA, 19 nt, Homo sapiens
  misc_RNA (1)...(19): siRNA sense strand
caagaucccuuuccaacug

SEQ ID NO: 802583 - RNA, 19 nt, Homo sapiens
  misc_RNA (1)...(19): siRNA sense strand
ugaccgaucugacaaguug

SEQ ID NO: 802584 - RNA, 19 nt, Homo sapiens
  misc_RNA (1)...(19): siRNA sense strand
gaucagaggauaaaucaug

SEQ ID NO: 802585 - RNA, 19 nt, Homo sapiens
  misc_RNA (1)...(19): siRNA sense strand
gauguacuguuucagauug

SEQ ID NO: 802586 - RNA, 19 nt, Homo sapiens
  misc_RNA (1)...(19): siRNA sense strand
ggaaggcuauggaacuaga

SEQ ID NO: 802587 - RNA, 19 nt, Homo sapiens
  misc_RNA (1)...(19): siRNA sense strand
ggaagcagcgagcccuuua

SEQ ID NO: 802588 - RNA, 19 nt, Homo sapiens
  misc_RNA (1)...(19): siRNA sense strand
gcaguaacccucauucuca

SEQ ID NO: 802589 - RNA, 19 nt, Homo sapiens
  misc_RNA (1)...(19): siRNA sense strand
gaaacaaaggcgaaagauu

SEQ ID NO: 802590 - RNA, 19 nt, Homo sapiens
  misc_RNA (1)...(19): siRNA sense strand
gcaguaaguuucccuuugg

SEQ ID NO: 802591 - RNA, 19 nt, Homo sapiens
  misc_RNA (1)...(19): siRNA sense strand
ggaacuccaugacuccaaa

SEQ ID NO: 802592 - RNA, 19 nt, Homo sapiens
  misc_RNA (1)...(19): siRNA sense strand
caaagcagacggcaaagaa

SEQ ID NO: 802593 - RNA, 19 nt, Homo sapiens
  misc_RNA (1)...(19): siRNA sense strand
gaaagauuaccuccaaaga

SEQ ID NO: 802594 - RNA, 19 nt, Homo sapiens
  misc_RNA (1)...(19): siRNA sense strand
ccagaugacuccaaugcaa

SEQ ID NO: 802595 - RNA, 19 nt, Homo sapiens
  misc_RNA (1)...(19): siRNA sense strand
gugaugaugucccuuaaau

SEQ ID NO: 802596 - RNA, 19 nt, Homo sapiens
  misc_RNA (1)...(19): siRNA sense strand
ucgacaagcugccaauaaa

SEQ ID NO: 802597 - RNA, 19 nt, Homo sapiens
  misc_RNA (1)...(19): siRNA sense strand
caacagcaacaucccauuu

SEQ ID NO: 802598 - RNA, 19 nt, Homo sapiens
  misc_RNA (1)...(19): siRNA sense strand
gagcaccgcagaccuauga

SEQ ID NO: 802599 - RNA, 19 nt, Homo sapiens
  misc_RNA (1)...(19): siRNA sense strand
gggagaagaucacgaaggu

SEQ ID NO: 802600 - RNA, 19 nt, Homo sapiens
  misc_RNA (1)...(19): siRNA sense strand
gaaaaugccugauugacau

SEQ ID NO: 802601 - RNA, 19 nt, Homo sapiens
  misc_RNA (1)...(19): siRNA sense strand
ggcgaaagauuaccuccaa

SEQ ID NO: 802602 - RNA, 19 nt, Homo sapiens
  misc_RNA (1)...(19): siRNA sense strand
guauggaccucaacagaca

SEQ ID NO: 802603 - RNA, 19 nt, Homo sapiens
  misc_RNA (1)...(19): siRNA sense strand
gcaucuguguguccaauau

SEQ ID NO: 802604 - RNA, 19 nt, Homo sapiens
  misc_RNA (1)...(19): siRNA sense strand
gaaagagcaagaaggcaaa

SEQ ID NO: 802605 - RNA, 19 nt, Homo sapiens
  misc_RNA (1)...(19): siRNA sense strand
gagcaugcccgaugugaug

SEQ ID NO: 802606 - RNA, 19 nt, Homo sapiens
  misc_RNA (1)...(19): siRNA sense strand
ugaagagaccucaguugua

SEQ ID NO: 802607 - RNA, 19 nt, Homo sapiens
  misc_RNA (1)...(19): siRNA sense strand
gcagcgagcucccugaaaa

SEQ ID NO: 802608 - RNA, 19 nt, Homo sapiens
  misc_RNA (1)...(19): siRNA sense strand
gagagcaagucaaagaagu

SEQ ID NO: 802609 - RNA, 19 nt, Homo sapiens
  misc_RNA (1)...(19): siRNA sense strand
gaacuuaauacagcaagaa

SEQ ID NO: 802610 - RNA, 19 nt, Homo sapiens
  misc_RNA (1)...(19): siRNA sense strand
ccaugaagacuugaacuua

SEQ ID NO: 802611 - RNA, 19 nt, Homo sapiens
  misc_RNA (1)...(19): siRNA sense strand
gaacagcucggcagcaucu

SEQ ID NO: 802612 - RNA, 19 nt, Homo sapiens
  misc_RNA (1)...(19): siRNA sense strand
gaagacagaaagcgaugaa

SEQ ID NO: 802613 - RNA, 19 nt, Homo sapiens
  misc_RNA (1)...(19): siRNA sense strand
caggaaggcuauggaacua

SEQ ID NO: 802614 - RNA, 19 nt, Homo sapiens
  misc_RNA (1)...(19): siRNA sense strand
gaagaugcugaauguauug

SEQ ID NO: 802615 - RNA, 19 nt, Homo sapiens
  misc_RNA (1)...(19): siRNA sense strand
ccacgagcauccagagaga

SEQ ID NO: 802616 - RNA, 19 nt, Homo sapiens
  misc_RNA (1)...(19): siRNA sense strand
gagacccucuguaaacuca

SEQ ID NO: 802617 - RNA, 19 nt, Homo sapiens
  misc_RNA (1)...(19): siRNA sense strand
ggcgugagcuggcaaccaa

SEQ ID NO: 802618 - RNA, 19 nt, Homo sapiens
  misc_RNA (1)...(19): siRNA sense strand
gugcaggaguucaauagug

SEQ ID NO: 802619 - RNA, 19 nt, Homo sapiens
  misc_RNA (1)...(19): siRNA sense strand
gacaagcugccaauaaaga

SEQ ID NO: 802620 - RNA, 19 nt, Homo sapiens
  misc_RNA (1)...(19): siRNA sense strand
gcuuuggacacuauuaaua

SEQ ID NO: 802621 - RNA, 19 nt, Homo sapiens
  misc_RNA (1)...(19): siRNA sense strand
caacaucccauuuccaaca

SEQ ID NO: 802622 - RNA, 19 nt, Homo sapiens
  misc_RNA (1)...(19): siRNA sense strand
gcaaguaucccagguaguc

SEQ ID NO: 802623 - RNA, 19 nt, Homo sapiens
  misc_RNA (1)...(19): siRNA sense strand
gcaaaggcgacucugaaga

SEQ ID NO: 802624 - RNA, 19 nt, Homo sapiens
  misc_RNA (1)...(19): siRNA sense strand
gaugcugaauguauugaug

SEQ ID NO: 802625 - RNA, 19 nt, Homo sapiens
  misc_RNA (1)...(19): siRNA sense strand
caccgucacugccaaauca

SEQ ID NO: 802626 - RNA, 19 nt, Homo sapiens
  misc_RNA (1)...(19): siRNA sense strand
caaagucccuccggagcaa

SEQ ID NO: 802627 - RNA, 19 nt, Homo sapiens
  misc_RNA (1)...(19): siRNA sense strand
ggacauguacaaccaaagu

SEQ ID NO: 802628 - RNA, 19 nt, Homo sapiens
  misc_RNA (1)...(19): siRNA sense strand
ucagauggcucaguaugga

SEQ ID NO: 802629 - RNA, 19 nt, Homo sapiens
  misc_RNA (1)...(19): siRNA sense strand
caagguggaagaagcagua

SEQ ID NO: 802630 - RNA, 19 nt, Homo sapiens
  misc_RNA (1)...(19): siRNA sense strand
gcaaugaugccgaaauguc

SEQ ID NO: 802631 - RNA, 19 nt, Homo sapiens
  misc_RNA (1)...(19): siRNA sense strand
agacgagacuccucugugu

SEQ ID NO: 802632 - RNA, 19 nt, Homo sapiens
  misc_RNA (1)...(19): siRNA sense strand
gaccgaaagcaguaaguuu

SEQ ID NO: 802633 - RNA, 19 nt, Homo sapiens
  misc_RNA (1)...(19): siRNA sense strand
guagaaagaaagagcaaga

SEQ ID NO: 802634 - RNA, 19 nt, Homo sapiens
  misc_RNA (1)...(19): siRNA sense strand
gaaccgcacagacgauaug

SEQ ID NO: 802635 - RNA, 19 nt, Homo sapiens
  misc_RNA (1)...(19): siRNA sense strand
ggagauguacaaccaguau

SEQ ID NO: 802636 - RNA, 19 nt, Homo sapiens
  misc_RNA (1)...(19): siRNA sense strand
gcacuacagcagcagcuaa

SEQ ID NO: 802637 - RNA, 19 nt, Homo sapiens
  misc_RNA (1)...(19): siRNA sense strand
caagcaagccaguaaguuc

SEQ ID NO: 802638 - RNA, 19 nt, Homo sapiens
  misc_RNA (1)...(19): siRNA sense strand
ccuaugagcccaacaagga

SEQ ID NO: 802639 - RNA, 19 nt, Homo sapiens
  misc_RNA (1)...(19): siRNA sense strand
uaugaugucuccuggugaa

SEQ ID NO: 802640 - RNA, 19 nt, Homo sapiens
  misc_RNA (1)...(19): siRNA sense strand
gcaagaaagaccaucaagu

SEQ ID NO: 802641 - RNA, 19 nt, Homo sapiens
  misc_RNA (1)...(19): siRNA sense strand
gaaaggaagcauuggaaac

SEQ ID NO: 802642 - RNA, 19 nt, Homo sapiens
  misc_RNA (1)...(19): siRNA sense strand
gcagaaaggaagcauugga

SEQ ID NO: 802643 - RNA, 19 nt, Homo sapiens
  misc_RNA (1)...(19): siRNA sense strand
gcacauucagacucacuuu

SEQ ID NO: 802644 - RNA, 19 nt, Homo sapiens
  misc_RNA (1)...(19): siRNA sense strand
gcgaaagauuaccuccaaa

SEQ ID NO: 802645 - RNA, 19 nt, Homo sapiens
  misc_RNA (1)...(19): siRNA sense strand
aagaaagaccaucaaguuu

SEQ ID NO: 802646 - RNA, 19 nt, Homo sapiens
  misc_RNA (1)...(19): siRNA sense strand
gcacaagaucccuuuccaa

SEQ ID NO: 802647 - RNA, 19 nt, Homo sapiens
  misc_RNA (1)...(19): siRNA sense strand
gggcagcacgcaaugauau

SEQ ID NO: 802648 - RNA, 19 nt, Homo sapiens
  misc_RNA (1)...(19): siRNA sense strand
acaaagaaacccucagaug

SEQ ID NO: 802649 - RNA, 19 nt, Homo sapiens
  misc_RNA (1)...(19): siRNA sense strand
ggaaucccgccucagauga

SEQ ID NO: 802650 - RNA, 19 nt, Homo sapiens
  misc_RNA (1)...(19): siRNA sense strand
caaaggagaagcccaagca

SEQ ID NO: 802651 - RNA, 19 nt, Homo sapiens
  misc_RNA (1)...(19): siRNA sense strand
gcacagacgauaugauggu

SEQ ID NO: 802652 - RNA, 19 nt, Homo sapiens
  misc_RNA (1)...(19): siRNA sense strand
gaacggaagcaacuuugag

SEQ ID NO: 802653 - RNA, 19 nt, Homo sapiens
  misc_RNA (1)...(19): siRNA sense strand
gguugcaucugucaucugu

SEQ ID NO: 802654 - RNA, 19 nt, Homo sapiens
  misc_RNA (1)...(19): siRNA sense strand
gaaauguccauggcgcuuu

SEQ ID NO: 802655 - RNA, 19 nt, Homo sapiens
  misc_RNA (1)...(19): siRNA sense strand
guaaguuucccuuugguau

SEQ ID NO: 802656 - RNA, 19 nt, Homo sapiens
  misc_RNA (1)...(19): siRNA sense strand
guccacagaugagccagua

SEQ ID NO: 802657 - RNA, 19 nt, Homo sapiens
  misc_RNA (1)...(19): siRNA sense strand
ggcccaaucucuccugcaa

SEQ ID NO: 802658 - RNA, 19 nt, Homo sapiens
  misc_RNA (1)...(19): siRNA sense strand
acaauaauguggaccugau

SEQ ID NO: 802659 - RNA, 19 nt, Homo sapiens
  misc_RNA (1)...(19): siRNA sense strand
caagcugccaauaaagaua

SEQ ID NO: 802660 - RNA, 19 nt, Homo sapiens
  misc_RNA (1)...(19): siRNA sense strand
acccacagcagccgaauua

SEQ ID NO: 802661 - RNA, 19 nt, Homo sapiens
  misc_RNA (1)...(19): siRNA sense strand
ucucaaagcagacggcaaa

SEQ ID NO: 802662 - RNA, 19 nt, Homo sapiens
  misc_RNA (1)...(19): siRNA sense strand
gagccaguauggaccacaa

SEQ ID NO: 802663 - RNA, 19 nt, Homo sapiens
  misc_RNA (1)...(19): siRNA sense strand
gagaaaagcaucauagcaa

SEQ ID NO: 802664 - RNA, 19 nt, Homo sapiens
  misc_RNA (1)...(19): siRNA sense strand
ggacagagagcuucuuuca

SEQ ID NO: 802665 - RNA, 19 nt, Homo sapiens
  misc_RNA (1)...(19): siRNA sense strand
gaaaggagcacgggacaga

SEQ ID NO: 802666 - RNA, 19 nt, Homo sapiens
  misc_RNA (1)...(19): siRNA sense strand
caucaugucuucccugcaa

SEQ ID NO: 802667 - RNA, 19 nt, Homo sapiens
  misc_RNA (1)...(19): siRNA sense strand
ugucuucccugcaaacuau

SEQ ID NO: 802668 - RNA, 19 nt, Homo sapiens
  misc_RNA (1)...(19): siRNA sense strand
gauugaccaucaugucuuc

SEQ ID NO: 802669 - RNA, 19 nt, Homo sapiens
  misc_RNA (1)...(19): siRNA sense strand
ccaucuaucuggccuccaa

SEQ ID NO: 802670 - RNA, 19 nt, Homo sapiens
  misc_RNA (1)...(19): siRNA sense strand
ggauugaccaucaugucuu

SEQ ID NO: 802671 - RNA, 19 nt, Homo sapiens
  misc_RNA (1)...(19): siRNA sense strand
gggcugauaucguguaccu

SEQ ID NO: 802672 - RNA, 19 nt, Homo sapiens
  misc_RNA (1)...(19): siRNA sense strand
ccuccaagaugagaaagga

SEQ ID NO: 802673 - RNA, 19 nt, Homo sapiens
  misc_RNA (1)...(19): siRNA sense strand
gcaacguccaggccaaugu

SEQ ID NO: 802674 - RNA, 19 nt, Homo sapiens
  misc_RNA (1)...(19): siRNA sense strand
caacguccaggccaaugug

SEQ ID NO: 802675 - RNA, 19 nt, Homo sapiens
  misc_RNA (1)...(19): siRNA sense strand
gggauugaccaucaugucu

SEQ ID NO: 802676 - RNA, 19 nt, Homo sapiens
  misc_RNA (1)...(19): siRNA sense strand
ucagcgggaugaggaugaa

SEQ ID NO: 802677 - RNA, 19 nt, Homo sapiens
  misc_RNA (1)...(19): siRNA sense strand
ggaugaggaugaaaauguc

SEQ ID NO: 802678 - RNA, 19 nt, Homo sapiens
  misc_RNA (1)...(19): siRNA sense strand
cgggacagagagcuucuuu

SEQ ID NO: 802679 - RNA, 19 nt, Homo sapiens
  misc_RNA (1)...(19): siRNA sense strand
gggaugaggaugaaaaugu

SEQ ID NO: 802680 - RNA, 19 nt, Homo sapiens
  misc_RNA (1)...(19): siRNA sense strand
gcguggagccuguggacau

SEQ ID NO: 802681 - RNA, 19 nt, Homo sapiens
  misc_RNA (1)...(19): siRNA sense strand
caacuuaucuguacuugua

SEQ ID NO: 802682 - RNA, 19 nt, Homo sapiens
  misc_RNA (1)...(19): siRNA sense strand
gaagaaugaugucuguaua

SEQ ID NO: 802683 - RNA, 19 nt, Homo sapiens
  misc_RNA (1)...(19): siRNA sense strand
gcagagcuguuuacugaua

SEQ ID NO: 802684 - RNA, 19 nt, Homo sapiens
  misc_RNA (1)...(19): siRNA sense strand
gaaaguaaggcaguaauua

SEQ ID NO: 802685 - RNA, 19 nt, Homo sapiens
  misc_RNA (1)...(19): siRNA sense strand
caagagugcuguuaccaua

SEQ ID NO: 802686 - RNA, 19 nt, Homo sapiens
  misc_RNA (1)...(19): siRNA sense strand
gaauauggaucuacuggaa

SEQ ID NO: 802687 - RNA, 19 nt, Homo sapiens
  misc_RNA (1)...(19): siRNA sense strand
gaucugaaauuacuugcua

SEQ ID NO: 802688 - RNA, 19 nt, Homo sapiens
  misc_RNA (1)...(19): siRNA sense strand
gaagaaugcucaucauagu

SEQ ID NO: 802689 - RNA, 19 nt, Homo sapiens
  misc_RNA (1)...(19): siRNA sense strand
guacaccacugaauccuuu

SEQ ID NO: 802690 - RNA, 19 nt, Homo sapiens
  misc_RNA (1)...(19): siRNA sense strand
uaaagagacuugcuauuca

SEQ ID NO: 802691 - RNA, 19 nt, Homo sapiens
  misc_RNA (1)...(19): siRNA sense strand
gaacuuugcuauccuugga

SEQ ID NO: 802692 - RNA, 19 nt, Homo sapiens
  misc_RNA (1)...(19): siRNA sense strand
gaaagaugccaaugguaua

SEQ ID NO: 802693 - RNA, 19 nt, Homo sapiens
  misc_RNA (1)...(19): siRNA sense strand
ggacaagacuacaagauac

SEQ ID NO: 802694 - RNA, 19 nt, Homo sapiens
  misc_RNA (1)...(19): siRNA sense strand
acugauaucucaugcaaua

SEQ ID NO: 802695 - RNA, 19 nt, Homo sapiens
  misc_RNA (1)...(19): siRNA sense strand
ccaguagacuugaagcuaa

SEQ ID NO: 802696 - RNA, 19 nt, Homo sapiens
  misc_RNA (1)...(19): siRNA sense strand
ccuaagaucuggcaaacuu

SEQ ID NO: 802697 - RNA, 19 nt, Homo sapiens
  misc_RNA (1)...(19): siRNA sense strand
ggacaaaggccuaagaucu

SEQ ID NO: 802698 - RNA, 19 nt, Homo sapiens
  misc_RNA (1)...(19): siRNA sense strand
ggaagucuggcaucaauaa

SEQ ID NO: 802699 - RNA, 19 nt, Homo sapiens
  misc_RNA (1)...(19): siRNA sense strand
guaaagagacuugcuauuc

SEQ ID NO: 802700 - RNA, 19 nt, Homo sapiens
  misc_RNA (1)...(19): siRNA sense strand
gaggcuauguguucuuaaa

SEQ ID NO: 802701 - RNA, 19 nt, Homo sapiens
  misc_RNA (1)...(19): siRNA sense strand
ucccagaacuaccauauuu

SEQ ID NO: 802702 - RNA, 19 nt, Homo sapiens
  misc_RNA (1)...(19): siRNA sense strand
ccaaugagauggagcaaag

SEQ ID NO: 802703 - RNA, 19 nt, Homo sapiens
  misc_RNA (1)...(19): siRNA sense strand
aaagauugcucuaaacugu

SEQ ID NO: 802704 - RNA, 19 nt, Homo sapiens
  misc_RNA (1)...(19): siRNA sense strand
gcaccaugaugcaaucuug

SEQ ID NO: 802705 - RNA, 19 nt, Homo sapiens
  misc_RNA (1)...(19): siRNA sense strand
aaacuucucugcacaguca

SEQ ID NO: 802706 - RNA, 19 nt, Homo sapiens
  misc_RNA (1)...(19): siRNA sense strand
guaauagccugaagacaag

SEQ ID NO: 802707 - RNA, 19 nt, Homo sapiens
  misc_RNA (1)...(19): siRNA sense strand
caucaaacauuacuucagu

SEQ ID NO: 802708 - RNA, 19 nt, Homo sapiens
  misc_RNA (1)...(19): siRNA sense strand
ucaagacgcugcccggauu

SEQ ID NO: 802709 - RNA, 19 nt, Homo sapiens
  misc_RNA (1)...(19): siRNA sense strand
ggaagaaugcucaucauag

SEQ ID NO: 802710 - RNA, 19 nt, Homo sapiens
  misc_RNA (1)...(19): siRNA sense strand
ggucgcaucuccaaucaga

SEQ ID NO: 802711 - RNA, 19 nt, Homo sapiens
  misc_RNA (1)...(19): siRNA sense strand
caagccuucucucaacuua

SEQ ID NO: 802712 - RNA, 19 nt, Homo sapiens
  misc_RNA (1)...(19): siRNA sense strand
uugcauugcugaaucuuua

SEQ ID NO: 802713 - RNA, 19 nt, Homo sapiens
  misc_RNA (1)...(19): siRNA sense strand
gaguuuggcuacugugauu

SEQ ID NO: 802714 - RNA, 19 nt, Homo sapiens
  misc_RNA (1)...(19): siRNA sense strand
caucauugcuuugcugaaa

SEQ ID NO: 802715 - RNA, 19 nt, Homo sapiens
  misc_RNA (1)...(19): siRNA sense strand
ccauugcuguccagaauaa

SEQ ID NO: 802716 - RNA, 19 nt, Homo sapiens
  misc_RNA (1)...(19): siRNA sense strand
caacaaagugagaaacauu

SEQ ID NO: 802717 - RNA, 19 nt, Homo sapiens
  misc_RNA (1)...(19): siRNA sense strand
gcaauagaagcccugauuu

SEQ ID NO: 802718 - RNA, 19 nt, Homo sapiens
  misc_RNA (1)...(19): siRNA sense strand
gaguuuagauucacaugau

SEQ ID NO: 802719 - RNA, 19 nt, Homo sapiens
  misc_RNA (1)...(19): siRNA sense strand
uaucaauucugcauuccua

SEQ ID NO: 802720 - RNA, 19 nt, Homo sapiens
  misc_RNA (1)...(19): siRNA sense strand
guaggaaucuguaacaaaa

SEQ ID NO: 802721 - RNA, 19 nt, Homo sapiens
  misc_RNA (1)...(19): siRNA sense strand
ggaaaguaaggcaguaauu

SEQ ID NO: 802722 - RNA, 19 nt, Homo sapiens
  misc_RNA (1)...(19): siRNA sense strand
gaguaaaucuggacaagac

SEQ ID NO: 802723 - RNA, 19 nt, Homo sapiens
  misc_RNA (1)...(19): siRNA sense strand
caaacucaacuaagucuuu

SEQ ID NO: 802724 - RNA, 19 nt, Homo sapiens
  misc_RNA (1)...(19): siRNA sense strand
caacaugaccaaugagaug

SEQ ID NO: 802725 - RNA, 19 nt, Homo sapiens
  misc_RNA (1)...(19): siRNA sense strand
aaagaagaaugaugucugu

SEQ ID NO: 802726 - RNA, 19 nt, Homo sapiens
  misc_RNA (1)...(19): siRNA sense strand
gcuauguguucuuaaaguu

SEQ ID NO: 802727 - RNA, 19 nt, Homo sapiens
  misc_RNA (1)...(19): siRNA sense strand
gccaugaccuuaggaaaug

SEQ ID NO: 802728 - RNA, 19 nt, Homo sapiens
  misc_RNA (1)...(19): siRNA sense strand
ugacucagguugccucaga

SEQ ID NO: 802729 - RNA, 19 nt, Homo sapiens
  misc_RNA (1)...(19): siRNA sense strand
ccaucgccaucaaacauua

SEQ ID NO: 802730 - RNA, 19 nt, Homo sapiens
  misc_RNA (1)...(19): siRNA sense strand
ggaacuggaugccaacucu

SEQ ID NO: 802731 - RNA, 19 nt, Homo sapiens
  misc_RNA (1)...(19): siRNA sense strand
gaacacacaacauuacagu

SEQ ID NO: 802732 - RNA, 19 nt, Homo sapiens
  misc_RNA (1)...(19): siRNA sense strand
caauuucuguugaacuuug

SEQ ID NO: 802733 - RNA, 19 nt, Homo sapiens
  misc_RNA (1)...(19): siRNA sense strand
gaugccaacucugcccuua

SEQ ID NO: 802734 - RNA, 19 nt, Homo sapiens
  misc_RNA (1)...(19): siRNA sense strand
gauaucucaugcaauagaa

SEQ ID NO: 802735 - RNA, 19 nt, Homo sapiens
  misc_RNA (1)...(19): siRNA sense strand
aaagagacuugcuauucaa

SEQ ID NO: 802736 - RNA, 19 nt, Homo sapiens
  misc_RNA (1)...(19): siRNA sense strand
ucaggccacuuuaaagauu

SEQ ID NO: 802737 - RNA, 19 nt, Homo sapiens
  misc_RNA (1)...(19): siRNA sense strand
gagaaacauuuggagaaga

SEQ ID NO: 802738 - RNA, 19 nt, Homo sapiens
  misc_RNA (1)...(19): siRNA sense strand
ccaaugguauaguauggaa

SEQ ID NO: 802739 - RNA, 19 nt, Homo sapiens
  misc_RNA (1)...(19): siRNA sense strand
ggagguagaaucacucaau

SEQ ID NO: 802740 - RNA, 19 nt, Homo sapiens
  misc_RNA (1)...(19): siRNA sense strand
cagacaggcuuccagaaug

SEQ ID NO: 802741 - RNA, 19 nt, Homo sapiens
  misc_RNA (1)...(19): siRNA sense strand
aaauggugauugugucuuu

SEQ ID NO: 802742 - RNA, 19 nt, Homo sapiens
  misc_RNA (1)...(19): siRNA sense strand
gcccauugcuguccagaau

SEQ ID NO: 802743 - RNA, 19 nt, Homo sapiens
  misc_RNA (1)...(19): siRNA sense strand
gcaguaaagagacuugcua

SEQ ID NO: 802744 - RNA, 19 nt, Homo sapiens
  misc_RNA (1)...(19): siRNA sense strand
aaaguuagcugauguuuuc

SEQ ID NO: 802745 - RNA, 19 nt, Homo sapiens
  misc_RNA (1)...(19): siRNA sense strand
ugaaagaugccaaugguau

SEQ ID NO: 802746 - RNA, 19 nt, Homo sapiens
  misc_RNA (1)...(19): siRNA sense strand
aguggaaucuucugugaaa

SEQ ID NO: 802747 - RNA, 19 nt, Homo sapiens
  misc_RNA (1)...(19): siRNA sense strand
gcagcuggcgcuaaaggua

SEQ ID NO: 802748 - RNA, 19 nt, Homo sapiens
  misc_RNA (1)...(19): siRNA sense strand
uuacugauaucucaugcaa

SEQ ID NO: 802749 - RNA, 19 nt, Homo sapiens
  misc_RNA (1)...(19): siRNA sense strand
ucauggagcuguacaaggu

SEQ ID NO: 802750 - RNA, 19 nt, Homo sapiens
  misc_RNA (1)...(19): siRNA sense strand
gcucaggccacuuuaaaga

SEQ ID NO: 802751 - RNA, 19 nt, Homo sapiens
  misc_RNA (1)...(19): siRNA sense strand
caaacuuggugaacagugu

SEQ ID NO: 802752 - RNA, 19 nt, Homo sapiens
  misc_RNA (1)...(19): siRNA sense strand
uacaacagcuggucacauc

SEQ ID NO: 802753 - RNA, 19 nt, Homo sapiens
  misc_RNA (1)...(19): siRNA sense strand
gcaacgcaaugccuacaca

SEQ ID NO: 802754 - RNA, 19 nt, Homo sapiens
  misc_RNA (1)...(19): siRNA sense strand
uguaauagccugaagacaa

SEQ ID NO: 802755 - RNA, 19 nt, Homo sapiens
  misc_RNA (1)...(19): siRNA sense strand
gcuguuuacugauaucuca

SEQ ID NO: 802756 - RNA, 19 nt, Homo sapiens
  misc_RNA (1)...(19): siRNA sense strand
gagguagaaucacucaauc

SEQ ID NO: 802757 - RNA, 19 nt, Homo sapiens
  misc_RNA (1)...(19): siRNA sense strand
cagcuucuguugcaguauu

SEQ ID NO: 802758 - RNA, 19 nt, Homo sapiens
  misc_RNA (1)...(19): siRNA sense strand
gaugaaacaguccauggaa

SEQ ID NO: 802759 - RNA, 19 nt, Homo sapiens
  misc_RNA (1)...(19): siRNA sense strand
guaaggcaguaauuaagca

SEQ ID NO: 802760 - RNA, 19 nt, Homo sapiens
  misc_RNA (1)...(19): siRNA sense strand
cauugucuguggaaaguaa

SEQ ID NO: 802761 - RNA, 19 nt, Homo sapiens
  misc_RNA (1)...(19): siRNA sense strand
cauugcagcucauggaguu

SEQ ID NO: 802762 - RNA, 19 nt, Homo sapiens
  misc_RNA (1)...(19): siRNA sense strand
gaaguauccauucccuauu

SEQ ID NO: 802763 - RNA, 19 nt, Homo sapiens
  misc_RNA (1)...(19): siRNA sense strand
gaaacaguccauggaagaa

SEQ ID NO: 802764 - RNA, 19 nt, Homo sapiens
  misc_RNA (1)...(19): siRNA sense strand
guucagcacuuucuugcau

SEQ ID NO: 802765 - RNA, 19 nt, Homo sapiens
  misc_RNA (1)...(19): siRNA sense strand
ccacagacaagcaacaaga

SEQ ID NO: 802766 - RNA, 19 nt, Homo sapiens
  misc_RNA (1)...(19): siRNA sense strand
gaaugcucaucauaguauu

SEQ ID NO: 802767 - RNA, 19 nt, Homo sapiens
  misc_RNA (1)...(19): siRNA sense strand
ggaugaauuugugaagaga

SEQ ID NO: 802768 - RNA, 19 nt, Homo sapiens
  misc_RNA (1)...(19): siRNA sense strand
agaaacauuuggagaagau

SEQ ID NO: 802769 - RNA, 19 nt, Homo sapiens
  misc_RNA (1)...(19): siRNA sense strand
gaggaagaaugcucaucau

SEQ ID NO: 802770 - RNA, 19 nt, Homo sapiens
  misc_RNA (1)...(19): siRNA sense strand
ucacucaaucggaaauaua

SEQ ID NO: 802771 - RNA, 19 nt, Homo sapiens
  misc_RNA (1)...(19): siRNA sense strand
gauccagaaucagcaaguu

SEQ ID NO: 802772 - RNA, 19 nt, Homo sapiens
  misc_RNA (1)...(19): siRNA sense strand
gacaaaggccuaagaucug

SEQ ID NO: 802773 - RNA, 19 nt, Homo sapiens
  misc_RNA (1)...(19): siRNA sense strand
gagaauauucaggcacuuu

SEQ ID NO: 802774 - RNA, 19 nt, Homo sapiens
  misc_RNA (1)...(19): siRNA sense strand
gaaguugaagcugcuguuu

SEQ ID NO: 802775 - RNA, 19 nt, Homo sapiens
  misc_RNA (1)...(19): siRNA sense strand
ugcaguauuugaagaauga

SEQ ID NO: 802776 - RNA, 19 nt, Homo sapiens
  misc_RNA (1)...(19): siRNA sense strand
gcgucaaacucaacuaagu

SEQ ID NO: 802777 - RNA, 19 nt, Homo sapiens
  misc_RNA (1)...(19): siRNA sense strand
caggaaaugugaguucuuc

SEQ ID NO: 802778 - RNA, 19 nt, Homo sapiens
  misc_RNA (1)...(19): siRNA sense strand
acucugcccuuauggaauu

SEQ ID NO: 802779 - RNA, 19 nt, Homo sapiens
  misc_RNA (1)...(19): siRNA sense strand
ggaguagggagaauauuca

SEQ ID NO: 802780 - RNA, 19 nt, Homo sapiens
  misc_RNA (1)...(19): siRNA sense strand
uggacaagacuacaagaua

SEQ ID NO: 802781 - RNA, 19 nt, Homo sapiens
  misc_RNA (1)...(19): siRNA sense strand
caaaggagauucugaccaa

SEQ ID NO: 802782 - RNA, 19 nt, Homo sapiens
  misc_RNA (1)...(19): siRNA sense strand
cagaagauacugaagauua

SEQ ID NO: 802783 - RNA, 19 nt, Homo sapiens
  misc_RNA (1)...(19): siRNA sense strand
ggaagaaucugacaagacu

SEQ ID NO: 802784 - RNA, 19 nt, Homo sapiens
  misc_RNA (1)...(19): siRNA sense strand
gcaaagagaaagaaagaaa

SEQ ID NO: 802785 - RNA, 19 nt, Homo sapiens
  misc_RNA (1)...(19): siRNA sense strand
gaacaaauccuggcagaau

SEQ ID NO: 802786 - RNA, 19 nt, Homo sapiens
  misc_RNA (1)...(19): siRNA sense strand
gaagauuacuacacauuac

SEQ ID NO: 802787 - RNA, 19 nt, Homo sapiens
  misc_RNA (1)...(19): siRNA sense strand
gagcaaagagaaagaaaga

SEQ ID NO: 802788 - RNA, 19 nt, Homo sapiens
  misc_RNA (1)...(19): siRNA sense strand
caaggaugcucccucagaa

SEQ ID NO: 802789 - RNA, 19 nt, Homo sapiens
  misc_RNA (1)...(19): siRNA sense strand
ggaauguaaugagcaaaga

SEQ ID NO: 802790 - RNA, 19 nt, Homo sapiens
  misc_RNA (1)...(19): siRNA sense strand
uaucuucgguugaacaaau

SEQ ID NO: 802791 - RNA, 19 nt, Homo sapiens
  misc_RNA (1)...(19): siRNA sense strand
ugaacuaucuucgguugaa

SEQ ID NO: 802792 - RNA, 19 nt, Homo sapiens
  misc_RNA (1)...(19): siRNA sense strand
ccaccaagauggaaaauga

SEQ ID NO: 802793 - RNA, 19 nt, Homo sapiens
  misc_RNA (1)...(19): siRNA sense strand
gggaugugaugaacuaucu

SEQ ID NO: 802794 - RNA, 19 nt, Homo sapiens
  misc_RNA (1)...(19): siRNA sense strand
gaaucugacaagacucaua

SEQ ID NO: 802795 - RNA, 19 nt, Homo sapiens
  misc_RNA (1)...(19): siRNA sense strand
gcagaaggcaaaggagauu

SEQ ID NO: 802796 - RNA, 19 nt, Homo sapiens
  misc_RNA (1)...(19): siRNA sense strand
ucaaugcacuggguuguca

SEQ ID NO: 802797 - RNA, 19 nt, Homo sapiens
  misc_RNA (1)...(19): siRNA sense strand
aauuacaggucagaagaua

SEQ ID NO: 802798 - RNA, 19 nt, Homo sapiens
  misc_RNA (1)...(19): siRNA sense strand
aagaggagcuggcuucaac

SEQ ID NO: 802799 - RNA, 19 nt, Homo sapiens
  misc_RNA (1)...(19): siRNA sense strand
aacaaauccuggcagaauu

SEQ ID NO: 802800 - RNA, 19 nt, Homo sapiens
  misc_RNA (1)...(19): siRNA sense strand
ccaaggaugcucccucaga

SEQ ID NO: 802801 - RNA, 19 nt, Homo sapiens
  misc_RNA (1)...(19): siRNA sense strand
ggcagaauuuaaagucaga

SEQ ID NO: 802802 - RNA, 19 nt, Homo sapiens
  misc_RNA (1)...(19): siRNA sense strand
ugaggaauguaaugagcaa

SEQ ID NO: 802803 - RNA, 19 nt, Homo sapiens
  misc_RNA (1)...(19): siRNA sense strand
gaaggagccagaugucgau

SEQ ID NO: 802804 - RNA, 19 nt, Homo sapiens
  misc_RNA (1)...(19): siRNA sense strand
aggagauucugaccaauga

SEQ ID NO: 802805 - RNA, 19 nt, Homo sapiens
  misc_RNA (1)...(19): siRNA sense strand
gcagugggaagcuuugaau

SEQ ID NO: 802806 - RNA, 19 nt, Homo sapiens
  misc_RNA (1)...(19): siRNA sense strand
agaagauacugaagauuac

SEQ ID NO: 802807 - RNA, 19 nt, Homo sapiens
  misc_RNA (1)...(19): siRNA sense strand
acugggaugugaugaacua

SEQ ID NO: 802808 - RNA, 19 nt, Homo sapiens
  misc_RNA (1)...(19): siRNA sense strand
ugaauuacaggucagaaga

SEQ ID NO: 802809 - RNA, 19 nt, Homo sapiens
  misc_RNA (1)...(19): siRNA sense strand
uaugaccacuggcgaagga

SEQ ID NO: 802810 - RNA, 19 nt, Homo sapiens
  misc_RNA (1)...(19): siRNA sense strand
gaauuacaggucagaagau

SEQ ID NO: 802811 - RNA, 19 nt, Homo sapiens
  misc_RNA (1)...(19): siRNA sense strand
gaaagaggagcuggcuuca

SEQ ID NO: 802812 - RNA, 19 nt, Homo sapiens
  misc_RNA (1)...(19): siRNA sense strand
gaaaaugaggaauguaaug

SEQ ID NO: 802813 - RNA, 19 nt, Homo sapiens
  misc_RNA (1)...(19): siRNA sense strand
caaagagaaagaaagaaag

SEQ ID NO: 802814 - RNA, 19 nt, Homo sapiens
  misc_RNA (1)...(19): siRNA sense strand
gaugcaauacugaauuaca

SEQ ID NO: 802815 - RNA, 19 nt, Homo sapiens
  misc_RNA (1)...(19): siRNA sense strand
guaaugagcaaagagaaag

SEQ ID NO: 802816 - RNA, 19 nt, Homo sapiens
  misc_RNA (1)...(19): siRNA sense strand
ccagacaagcauccugaaa

SEQ ID NO: 802817 - RNA, 19 nt, Homo sapiens
  misc_RNA (1)...(19): siRNA sense strand
uugaaugacucagugaaga

SEQ ID NO: 802818 - RNA, 19 nt, Homo sapiens
  misc_RNA (1)...(19): siRNA sense strand
uacugaagauuacuacaca

SEQ ID NO: 802819 - RNA, 19 nt, Homo sapiens
  misc_RNA (1)...(19): siRNA sense strand
gaugugaugaacuaucuuc

SEQ ID NO: 802820 - RNA, 19 nt, Homo sapiens
  misc_RNA (1)...(19): siRNA sense strand
aauccuggcagaauuuaaa

SEQ ID NO: 802821 - RNA, 19 nt, Homo sapiens
  misc_RNA (1)...(19): siRNA sense strand
gaacuaucuucgguugaac

SEQ ID NO: 802822 - RNA, 19 nt, Homo sapiens
  misc_RNA (1)...(19): siRNA sense strand
gauggaaaaugaggaaugu

SEQ ID NO: 802823 - RNA, 19 nt, Homo sapiens
  misc_RNA (1)...(19): siRNA sense strand
gagagucgagcccgcuaug

SEQ ID NO: 802824 - RNA, 19 nt, Homo sapiens
  misc_RNA (1)...(19): siRNA sense strand
gagauucugaccaaugaag

SEQ ID NO: 802825 - RNA, 19 nt, Homo sapiens
  misc_RNA (1)...(19): siRNA sense strand
uguaaugagcaaagagaaa

SEQ ID NO: 802826 - RNA, 19 nt, Homo sapiens
  misc_RNA (1)...(19): siRNA sense strand
gcuggaagaaucugacaag

SEQ ID NO: 802827 - RNA, 19 nt, Homo sapiens
  misc_RNA (1)...(19): siRNA sense strand
gugggaagcuuugaaugac

SEQ ID NO: 802828 - RNA, 19 nt, Homo sapiens
  misc_RNA (1)...(19): siRNA sense strand
agaaacugcagaaggcaaa

SEQ ID NO: 802829 - RNA, 19 nt, Homo sapiens
  misc_RNA (1)...(19): siRNA sense strand
gaaaacggagcagaaagaa

SEQ ID NO: 802830 - RNA, 19 nt, Homo sapiens
  misc_RNA (1)...(19): siRNA sense strand
agugggaagcuuugaauga

SEQ ID NO: 802831 - RNA, 19 nt, Homo sapiens
  misc_RNA (1)...(19): siRNA sense strand
gaccugaugcuggaagaau

SEQ ID NO: 802832 - RNA, 19 nt, Homo sapiens
  misc_RNA (1)...(19): siRNA sense strand
acaagacucauaccaccaa

SEQ ID NO: 802833 - RNA, 19 nt, Homo sapiens
  misc_RNA (1)...(19): siRNA sense strand
cugaagauuacuacacauu

SEQ ID NO: 802834 - RNA, 19 nt, Homo sapiens
  misc_RNA (1)...(19): siRNA sense strand
agacucauaccaccaagau

SEQ ID NO: 802835 - RNA, 19 nt, Homo sapiens
  misc_RNA (1)...(19): siRNA sense strand
gaauguaaugagcaaagag

SEQ ID NO: 802836 - RNA, 19 nt, Homo sapiens
  misc_RNA (1)...(19): siRNA sense strand
gcaaaauucagauucuuca

SEQ ID NO: 802837 - RNA, 19 nt, Homo sapiens
  misc_RNA (1)...(19): siRNA sense strand
ggcuucaaccgcagagaaa

SEQ ID NO: 802838 - RNA, 19 nt, Homo sapiens
  misc_RNA (1)...(19): siRNA sense strand
auucagauucuucagguuu

SEQ ID NO: 802839 - RNA, 19 nt, Homo sapiens
  misc_RNA (1)...(19): siRNA sense strand
gaccagcacugaagucuau

SEQ ID NO: 802840 - RNA, 19 nt, Homo sapiens
  misc_RNA (1)...(19): siRNA sense strand
gaaagacgggcuuccauug

SEQ ID NO: 802841 - RNA, 19 nt, Homo sapiens
  misc_RNA (1)...(19): siRNA sense strand
ucagagagcuggcccuaca

SEQ ID NO: 802842 - RNA, 19 nt, Homo sapiens
  misc_RNA (1)...(19): siRNA sense strand
ucaacgugcugcucuggua

SEQ ID NO: 802843 - RNA, 19 nt, Homo sapiens
  misc_RNA (1)...(19): siRNA sense strand
gaucucggcucgcgaaacu

SEQ ID NO: 802844 - RNA, 19 nt, Homo sapiens
  misc_RNA (1)...(19): siRNA sense strand
guccaaggaugauauguag

SEQ ID NO: 802845 - RNA, 19 nt, Homo sapiens
  misc_RNA (1)...(19): siRNA sense strand
ggucaaggccaaccuguca

SEQ ID NO: 802846 - RNA, 19 nt, Homo sapiens
  misc_RNA (1)...(19): siRNA sense strand
ugaaagacgggcuuccauu

SEQ ID NO: 802847 - RNA, 19 nt, Homo sapiens
  misc_RNA (1)...(19): siRNA sense strand
caacgugaccagcacugaa

SEQ ID NO: 802848 - RNA, 19 nt, Homo sapiens
  misc_RNA (1)...(19): siRNA sense strand
acuacagccuccacgagua

SEQ ID NO: 802849 - RNA, 19 nt, Homo sapiens
  misc_RNA (1)...(19): siRNA sense strand
ccgccgaccucuuggugaa

SEQ ID NO: 802850 - RNA, 19 nt, Homo sapiens
  misc_RNA (1)...(19): siRNA sense strand
uaugucaagugccgucuca

SEQ ID NO: 802851 - RNA, 19 nt, Homo sapiens
  misc_RNA (1)...(19): siRNA sense strand
guacaggccgguggaagga

SEQ ID NO: 802852 - RNA, 19 nt, Homo sapiens
  misc_RNA (1)...(19): siRNA sense strand
uguccaaggaugauaugua

SEQ ID NO: 802853 - RNA, 19 nt, Homo sapiens
  misc_RNA (1)...(19): siRNA sense strand
uaaacgacgggaagcucua

SEQ ID NO: 802854 - RNA, 19 nt, Homo sapiens
  misc_RNA (1)...(19): siRNA sense strand
gcagacccaucuucaucac

SEQ ID NO: 802855 - RNA, 19 nt, Homo sapiens
  misc_RNA (1)...(19): siRNA sense strand
ccgcagacccaucuucauc

SEQ ID NO: 802856 - RNA, 19 nt, Homo sapiens
  misc_RNA (1)...(19): siRNA sense strand
ugacuccuuccuccgauuu

SEQ ID NO: 802857 - RNA, 19 nt, Homo sapiens
  misc_RNA (1)...(19): siRNA sense strand
ucuacugccugguguccaa

SEQ ID NO: 802858 - RNA, 19 nt, Homo sapiens
  misc_RNA (1)...(19): siRNA sense strand
gugacuccuuccuccgauu

SEQ ID NO: 802859 - RNA, 19 nt, Homo sapiens
  misc_RNA (1)...(19): siRNA sense strand
ccagaaagcucuucaguga

SEQ ID NO: 802860 - RNA, 19 nt, Homo sapiens
  misc_RNA (1)...(19): siRNA sense strand
ccaccaagaugaaugaaga

SEQ ID NO: 802861 - RNA, 19 nt, Homo sapiens
  misc_RNA (1)...(19): siRNA sense strand
ccaagggugugcagaacaa

SEQ ID NO: 802862 - RNA, 19 nt, Homo sapiens
  misc_RNA (1)...(19): siRNA sense strand
guaagcacagcaacaagua

SEQ ID NO: 802863 - RNA, 19 nt, Homo sapiens
  misc_RNA (1)...(19): siRNA sense strand
gaacaucgcccuggugaac

SEQ ID NO: 802864 - RNA, 19 nt, Homo sapiens
  misc_RNA (1)...(19): siRNA sense strand
ggagaagcacggccagcua

SEQ ID NO: 802865 - RNA, 19 nt, Homo sapiens
  misc_RNA (1)...(19): siRNA sense strand
ugaaugaagagaccagaaa

SEQ ID NO: 802866 - RNA, 19 nt, Homo sapiens
  misc_RNA (1)...(19): siRNA sense strand
gagcagcacgugaagaaca

SEQ ID NO: 802867 - RNA, 19 nt, Homo sapiens
  misc_RNA (1)...(19): siRNA sense strand
gaggacaagaugcugauga

SEQ ID NO: 802868 - RNA, 19 nt, Homo sapiens
  misc_RNA (1)...(19): siRNA sense strand
gcacagcaacaaguacgaa

SEQ ID NO: 802869 - RNA, 19 nt, Homo sapiens
  misc_RNA (1)...(19): siRNA sense strand
aacgaccuguugaaguuua

SEQ ID NO: 802870 - RNA, 19 nt, Homo sapiens
  misc_RNA (1)...(19): siRNA sense strand
gaaugaagagaccagaaag

SEQ ID NO: 802871 - RNA, 19 nt, Homo sapiens
  misc_RNA (1)...(19): siRNA sense strand
cgggacagcuggguguuug

SEQ ID NO: 802872 - RNA, 19 nt, Homo sapiens
  misc_RNA (1)...(19): siRNA sense strand
ggagauggaaggcuguauc

SEQ ID NO: 802873 - RNA, 19 nt, Homo sapiens
  misc_RNA (1)...(19): siRNA sense strand
gaccagaaagcucuucagu

SEQ ID NO: 802874 - RNA, 19 nt, Homo sapiens
  misc_RNA (1)...(19): siRNA sense strand
cgacccagccaccaagaug

SEQ ID NO: 802875 - RNA, 19 nt, Homo sapiens
  misc_RNA (1)...(19): siRNA sense strand
gggccaagggugugcagaa

SEQ ID NO: 802876 - RNA, 19 nt, Homo sapiens
  misc_RNA (1)...(19): siRNA sense strand
gacccagccaccaagauga

SEQ ID NO: 802877 - RNA, 19 nt, Homo sapiens
  misc_RNA (1)...(19): siRNA sense strand
acaguaagcacagcaacaa

SEQ ID NO: 802878 - RNA, 19 nt, Homo sapiens
  misc_RNA (1)...(19): siRNA sense strand
gcagcaggaacgccaagga

SEQ ID NO: 802879 - RNA, 19 nt, Homo sapiens
  misc_RNA (1)...(19): siRNA sense strand
ugagcagcgucaaggacaa

SEQ ID NO: 802880 - RNA, 19 nt, Homo sapiens
  misc_RNA (1)...(19): siRNA sense strand
cagccaccaagaugaauga

SEQ ID NO: 802881 - RNA, 19 nt, Homo sapiens
  misc_RNA (1)...(19): siRNA sense strand
ggccaagggugugcagaac

SEQ ID NO: 802882 - RNA, 19 nt, Homo sapiens
  misc_RNA (1)...(19): siRNA sense strand
gaagagaucaaaucacaaa

SEQ ID NO: 802883 - RNA, 19 nt, Homo sapiens
  misc_RNA (1)...(19): siRNA sense strand
gaucaaaucacaaaucuug

SEQ ID NO: 802884 - RNA, 19 nt, Homo sapiens
  misc_RNA (1)...(19): siRNA sense strand
caaaaucucuuccuugugu

SEQ ID NO: 802885 - RNA, 19 nt, Homo sapiens
  misc_RNA (1)...(19): siRNA sense strand
gcaggacuguguggaggua

SEQ ID NO: 802886 - RNA, 19 nt, Homo sapiens
  misc_RNA (1)...(19): siRNA sense strand
ggaggaagagaucaaauca

SEQ ID NO: 802887 - RNA, 19 nt, Homo sapiens
  misc_RNA (1)...(19): siRNA sense strand
aggaagagaucaaaucaca

SEQ ID NO: 802888 - RNA, 19 nt, Homo sapiens
  misc_RNA (1)...(19): siRNA sense strand
ggccuuggcuucccuagca

SEQ ID NO: 802889 - RNA, 19 nt, Homo sapiens
  misc_RNA (1)...(19): siRNA sense strand
caacgagaaacacgauuug

SEQ ID NO: 802890 - RNA, 19 nt, Homo sapiens
  misc_RNA (1)...(19): siRNA sense strand
caucagacaacgagaaaca

SEQ ID NO: 802891 - RNA, 19 nt, Homo sapiens
  misc_RNA (1)...(19): siRNA sense strand
uugcauaccuucuuuaucc

SEQ ID NO: 802892 - RNA, 19 nt, Homo sapiens
  misc_RNA (1)...(19): siRNA sense strand
guccuuggguugauuucuu

SEQ ID NO: 802893 - RNA, 19 nt, Homo sapiens
  misc_RNA (1)...(19): siRNA sense strand
gggaggaagagaucaaauc

SEQ ID NO: 802894 - RNA, 19 nt, Homo sapiens
  misc_RNA (1)...(19): siRNA sense strand
acaacgagaaacacgauuu

SEQ ID NO: 802895 - RNA, 19 nt, Homo sapiens
  misc_RNA (1)...(19): siRNA sense strand
ggaagagaucaaaucacaa

SEQ ID NO: 802896 - RNA, 19 nt, Homo sapiens
  misc_RNA (1)...(19): siRNA sense strand
gcagggaucccaaaacaug

SEQ ID NO: 802897 - RNA, 19 nt, Homo sapiens
  misc_RNA (1)...(19): siRNA sense strand
gcucaguccuuggguugau

SEQ ID NO: 802898 - RNA, 19 nt, Homo sapiens
  misc_RNA (1)...(19): siRNA sense strand
ggagugagggagagacaca

SEQ ID NO: 802899 - RNA, 19 nt, Homo sapiens
  misc_RNA (1)...(19): siRNA sense strand
ggagugggcuugggauacc

SEQ ID NO: 802900 - RNA, 19 nt, Homo sapiens
  misc_RNA (1)...(19): siRNA sense strand
cauauccuuugcauaccuu

SEQ ID NO: 802901 - RNA, 19 nt, Homo sapiens
  misc_RNA (1)...(19): siRNA sense strand
uagcagggaucccaaaaca

SEQ ID NO: 802902 - RNA, 19 nt, Homo sapiens
  misc_RNA (1)...(19): siRNA sense strand
agagaucaaaucacaaauc

SEQ ID NO: 802903 - RNA, 19 nt, Homo sapiens
  misc_RNA (1)...(19): siRNA sense strand
ggcuugggauaccaucaga

SEQ ID NO: 802904 - RNA, 19 nt, Homo sapiens
  misc_RNA (1)...(19): siRNA sense strand
uccuuggguugauuucuuu

SEQ ID NO: 802905 - RNA, 19 nt, Homo sapiens
  misc_RNA (1)...(19): siRNA sense strand
gaagauaacucuagcaaca

SEQ ID NO: 802906 - RNA, 19 nt, Homo sapiens
  misc_RNA (1)...(19): siRNA sense strand
ggaaaugacugauaagugu

SEQ ID NO: 802907 - RNA, 19 nt, Homo sapiens
  misc_RNA (1)...(19): siRNA sense strand
gaacagcccaggaaagauu

SEQ ID NO: 802908 - RNA, 19 nt, Homo sapiens
  misc_RNA (1)...(19): siRNA sense strand
aaaggaaacuggacuguau

SEQ ID NO: 802909 - RNA, 19 nt, Homo sapiens
  misc_RNA (1)...(19): siRNA sense strand
gagaaacuguugucagaga

SEQ ID NO: 802910 - RNA, 19 nt, Homo sapiens
  misc_RNA (1)...(19): siRNA sense strand
guaccaagaaugucuauaa

SEQ ID NO: 802911 - RNA, 19 nt, Homo sapiens
  misc_RNA (1)...(19): siRNA sense strand
gccaggaaaugacugauaa

SEQ ID NO: 802912 - RNA, 19 nt, Homo sapiens
  misc_RNA (1)...(19): siRNA sense strand
aaacuggacuguauucaga

SEQ ID NO: 802913 - RNA, 19 nt, Homo sapiens
  misc_RNA (1)...(19): siRNA sense strand
gcaaauuggugugugagaa

SEQ ID NO: 802914 - RNA, 19 nt, Homo sapiens
  misc_RNA (1)...(19): siRNA sense strand
ccaagaaugucuauaaugc

SEQ ID NO: 802915 - RNA, 19 nt, Homo sapiens
  misc_RNA (1)...(19): siRNA sense strand
gaugggagauggaauguac

SEQ ID NO: 802916 - RNA, 19 nt, Homo sapiens
  misc_RNA (1)...(19): siRNA sense strand
agaaggagguguccaacuu

SEQ ID NO: 802917 - RNA, 19 nt, Homo sapiens
  misc_RNA (1)...(19): siRNA sense strand
aagagaaacuguugucaga

SEQ ID NO: 802918 - RNA, 19 nt, Homo sapiens
  misc_RNA (1)...(19): siRNA sense strand
ucagaacaguuagaguuua

SEQ ID NO: 802919 - RNA, 19 nt, Homo sapiens
  misc_RNA (1)...(19): siRNA sense strand
gaaugucuauaaugcauca

SEQ ID NO: 802920 - RNA, 19 nt, Homo sapiens
  misc_RNA (1)...(19): siRNA sense strand
gaggauggccuguuugugu

SEQ ID NO: 802921 - RNA, 19 nt, Homo sapiens
  misc_RNA (1)...(19): siRNA sense strand
gaaaugacugauaagugua

SEQ ID NO: 802922 - RNA, 19 nt, Homo sapiens
  misc_RNA (1)...(19): siRNA sense strand
agagaggaaucaacugaaa

SEQ ID NO: 802923 - RNA, 19 nt, Homo sapiens
  misc_RNA (1)...(19): siRNA sense strand
cagaacaguuagaguuuau

SEQ ID NO: 802924 - RNA, 19 nt, Homo sapiens
  misc_RNA (1)...(19): siRNA sense strand
gacaacuucuccugccuuu

SEQ ID NO: 802925 - RNA, 19 nt, Homo sapiens
  misc_RNA (1)...(19): siRNA sense strand
guuggaggcucucuguaaa

SEQ ID NO: 802926 - RNA, 19 nt, Homo sapiens
  misc_RNA (1)...(19): siRNA sense strand
ccagauuccuugccacaga

SEQ ID NO: 802927 - RNA, 19 nt, Homo sapiens
  misc_RNA (1)...(19): siRNA sense strand
cccacggccuccaguauua

SEQ ID NO: 802928 - RNA, 19 nt, Homo sapiens
  misc_RNA (1)...(19): siRNA sense strand
gaacaguuagaguuuauuc

SEQ ID NO: 802929 - RNA, 19 nt, Homo sapiens
  misc_RNA (1)...(19): siRNA sense strand
gaaauaccagcuugcaugu

SEQ ID NO: 802930 - RNA, 19 nt, Homo sapiens
  misc_RNA (1)...(19): siRNA sense strand
gcugauggccgaccacuug

SEQ ID NO: 802931 - RNA, 19 nt, Homo sapiens
  misc_RNA (1)...(19): siRNA sense strand
uuaaaugugagcagucuua

SEQ ID NO: 802932 - RNA, 19 nt, Homo sapiens
  misc_RNA (1)...(19): siRNA sense strand
guauugcccuguccucaga

SEQ ID NO: 802933 - RNA, 19 nt, Homo sapiens
  misc_RNA (1)...(19): siRNA sense strand
gagaggaggaggaugaaga

SEQ ID NO: 802934 - RNA, 19 nt, Homo sapiens
  misc_RNA (1)...(19): siRNA sense strand
caaauuggugugugagaaa

SEQ ID NO: 802935 - RNA, 19 nt, Homo sapiens
  misc_RNA (1)...(19): siRNA sense strand
gagauggaauguacaacca

SEQ ID NO: 802936 - RNA, 19 nt, Homo sapiens
  misc_RNA (1)...(19): siRNA sense strand
uauaaugcaucaucacaca

SEQ ID NO: 802937 - RNA, 19 nt, Homo sapiens
  misc_RNA (1)...(19): siRNA sense strand
aaaaggauauucucuguga

SEQ ID NO: 802938 - RNA, 19 nt, Homo sapiens
  misc_RNA (1)...(19): siRNA sense strand
cagugaggauggccuguuu

SEQ ID NO: 802939 - RNA, 19 nt, Homo sapiens
  misc_RNA (1)...(19): siRNA sense strand
uaaggucucuguucagcau

SEQ ID NO: 802940 - RNA, 19 nt, Homo sapiens
  misc_RNA (1)...(19): siRNA sense strand
gguuggaggcucucuguaa

SEQ ID NO: 802941 - RNA, 19 nt, Homo sapiens
  misc_RNA (1)...(19): siRNA sense strand
gugaagagaaugaggaaga

SEQ ID NO: 802942 - RNA, 19 nt, Homo sapiens
  misc_RNA (1)...(19): siRNA sense strand
guacaucucagcagcacuu

SEQ ID NO: 802943 - RNA, 19 nt, Homo sapiens
  misc_RNA (1)...(19): siRNA sense strand
ugagaaagagaaacuguug

SEQ ID NO: 802944 - RNA, 19 nt, Homo sapiens
  misc_RNA (1)...(19): siRNA sense strand
gcaacaccuccgagaauug

SEQ ID NO: 802945 - RNA, 19 nt, Homo sapiens
  misc_RNA (1)...(19): siRNA sense strand
gcacugacccgggaaccuu

SEQ ID NO: 802946 - RNA, 19 nt, Homo sapiens
  misc_RNA (1)...(19): siRNA sense strand
ccucagaacaguuagaguu

SEQ ID NO: 802947 - RNA, 19 nt, Homo sapiens
  misc_RNA (1)...(19): siRNA sense strand
gaaagagaaacuguuguca

SEQ ID NO: 802948 - RNA, 19 nt, Homo sapiens
  misc_RNA (1)...(19): siRNA sense strand
aaugugaaauccgcaaauu

SEQ ID NO: 802949 - RNA, 19 nt, Homo sapiens
  misc_RNA (1)...(19): siRNA sense strand
ccgcaugcagugaauauuu

SEQ ID NO: 802950 - RNA, 19 nt, Homo sapiens
  misc_RNA (1)...(19): siRNA sense strand
ggacuucugccaggaaaug

SEQ ID NO: 802951 - RNA, 19 nt, Homo sapiens
  misc_RNA (1)...(19): siRNA sense strand
gggaagauaacucuagcaa

SEQ ID NO: 802952 - RNA, 19 nt, Homo sapiens
  misc_RNA (1)...(19): siRNA sense strand
ccaggaaagauuauaccua

SEQ ID NO: 802953 - RNA, 19 nt, Homo sapiens
  misc_RNA (1)...(19): siRNA sense strand
caggagaggaggaggauga

SEQ ID NO: 802954 - RNA, 19 nt, Homo sapiens
  misc_RNA (1)...(19): siRNA sense strand
cagcaacaccuccgagaau

SEQ ID NO: 802955 - RNA, 19 nt, Homo sapiens
  misc_RNA (1)...(19): siRNA sense strand
cagauuccuugccacagaa

SEQ ID NO: 802956 - RNA, 19 nt, Homo sapiens
  misc_RNA (1)...(19): siRNA sense strand
gaaacuggacuguauucag

SEQ ID NO: 802957 - RNA, 19 nt, Homo sapiens
  misc_RNA (1)...(19): siRNA sense strand
gauuuccagaugaugauua

SEQ ID NO: 802958 - RNA, 19 nt, Homo sapiens
  misc_RNA (1)...(19): siRNA sense strand
ucucugagccggugccaaa

SEQ ID NO: 802959 - RNA, 19 nt, Homo sapiens
  misc_RNA (1)...(19): siRNA sense strand
caguuagaguuuauucaug

SEQ ID NO: 802960 - RNA, 19 nt, Homo sapiens
  misc_RNA (1)...(19): siRNA sense strand
aauaccagcuugcauguac

SEQ ID NO: 802961 - RNA, 19 nt, Homo sapiens
  misc_RNA (1)...(19): siRNA sense strand
caacaccuccgagaauugu

SEQ ID NO: 802962 - RNA, 19 nt, Homo sapiens
  misc_RNA (1)...(19): siRNA sense strand
ccagggagccagauuccuu

SEQ ID NO: 802963 - RNA, 19 nt, Homo sapiens
  misc_RNA (1)...(19): siRNA sense strand
gccgaccacuugccaggaa

SEQ ID NO: 802964 - RNA, 19 nt, Homo sapiens
  misc_RNA (1)...(19): siRNA sense strand
ggaggagcgugaucuucuc

SEQ ID NO: 802965 - RNA, 19 nt, Homo sapiens
  misc_RNA (1)...(19): siRNA sense strand
aggagacgauggauucaga

SEQ ID NO: 802966 - RNA, 19 nt, Homo sapiens
  misc_RNA (1)...(19): siRNA sense strand
gaaugugaaauccgcaaau

SEQ ID NO: 802967 - RNA, 19 nt, Homo sapiens
  misc_RNA (1)...(19): siRNA sense strand
ugugagcagucuuauggaa

SEQ ID NO: 802968 - RNA, 19 nt, Homo sapiens
  misc_RNA (1)...(19): siRNA sense strand
acugauaaguguacaacug

SEQ ID NO: 802969 - RNA, 19 nt, Homo sapiens
  misc_RNA (1)...(19): siRNA sense strand
ccagagcccaucagcuuug

SEQ ID NO: 802970 - RNA, 19 nt, Homo sapiens
  misc_RNA (1)...(19): siRNA sense strand
aagcuaaccucagaacagu

SEQ ID NO: 802971 - RNA, 19 nt, Homo sapiens
  misc_RNA (1)...(19): siRNA sense strand
gcacaagcuaaccucagaa

SEQ ID NO: 802972 - RNA, 19 nt, Homo sapiens
  misc_RNA (1)...(19): siRNA sense strand
cuccagcgcuugugaccaa

SEQ ID NO: 802973 - RNA, 19 nt, Homo sapiens
  misc_RNA (1)...(19): siRNA sense strand
gaagagaaugaggaagaga

SEQ ID NO: 802974 - RNA, 19 nt, Homo sapiens
  misc_RNA (1)...(19): siRNA sense strand
caacuccagugacgaaucc

SEQ ID NO: 802975 - RNA, 19 nt, Homo sapiens
  misc_RNA (1)...(19): siRNA sense strand
gcccacggccuccaguauu

SEQ ID NO: 802976 - RNA, 19 nt, Homo sapiens
  misc_RNA (1)...(19): siRNA sense strand
cuacacugccaagcuguua

SEQ ID NO: 802977 - RNA, 19 nt, Homo sapiens
  misc_RNA (1)...(19): siRNA sense strand
ugcacaagcuaaccucaga

SEQ ID NO: 802978 - RNA, 19 nt, Homo sapiens
  misc_RNA (1)...(19): siRNA sense strand
caagcuaaccucagaacag

SEQ ID NO: 802979 - RNA, 19 nt, Homo sapiens
  misc_RNA (1)...(19): siRNA sense strand
cccaggagccaaacaguga

SEQ ID NO: 802980 - RNA, 19 nt, Homo sapiens
  misc_RNA (1)...(19): siRNA sense strand
gaggaggagacgauggauu

SEQ ID NO: 802981 - RNA, 19 nt, Homo sapiens
  misc_RNA (1)...(19): siRNA sense strand
ugacgaacagcccaggaaa

SEQ ID NO: 802982 - RNA, 19 nt, Homo sapiens
  misc_RNA (1)...(19): siRNA sense strand
aaacagugaccguggacuu

SEQ ID NO: 802983 - RNA, 19 nt, Homo sapiens
  misc_RNA (1)...(19): siRNA sense strand
ggaaguuugccgagacauc

SEQ ID NO: 802984 - RNA, 19 nt, Homo sapiens
  misc_RNA (1)...(19): siRNA sense strand
cauccgcugugcugaguuc

SEQ ID NO: 802985 - RNA, 19 nt, Homo sapiens
  misc_RNA (1)...(19): siRNA sense strand
agacccagcuccugaacag

SEQ ID NO: 802986 - RNA, 19 nt, Homo sapiens
  misc_RNA (1)...(19): siRNA sense strand
ccagauacaagaaauacca

SEQ ID NO: 802987 - RNA, 19 nt, Homo sapiens
  misc_RNA (1)...(19): siRNA sense strand
guggacuucugccaggaaa

SEQ ID NO: 802988 - RNA, 19 nt, Homo sapiens
  misc_RNA (1)...(19): siRNA sense strand
ugaagagaaugaggaagag

SEQ ID NO: 802989 - RNA, 19 nt, Homo sapiens
  misc_RNA (1)...(19): siRNA sense strand
gaacgauuuccagaugaug

SEQ ID NO: 802990 - RNA, 19 nt, Homo sapiens
  misc_RNA (1)...(19): siRNA sense strand
gcauguaccaagaaugucu

SEQ ID NO: 802991 - RNA, 19 nt, Homo sapiens
  misc_RNA (1)...(19): siRNA sense strand
gaacccaggagccaaacag

SEQ ID NO: 802992 - RNA, 19 nt, Homo sapiens
  misc_RNA (1)...(19): siRNA sense strand
caacuucuccugccuuucc

SEQ ID NO: 802993 - RNA, 19 nt, Homo sapiens
  misc_RNA (1)...(19): siRNA sense strand
gagaaagagaaacuguugu

SEQ ID NO: 802994 - RNA, 19 nt, Homo sapiens
  misc_RNA (1)...(19): siRNA sense strand
caaaucacagaucuuccaa

SEQ ID NO: 802995 - RNA, 19 nt, Homo sapiens
  misc_RNA (1)...(19): siRNA sense strand
aaugugagcagucuuaugg

SEQ ID NO: 802996 - RNA, 19 nt, Homo sapiens
  misc_RNA (1)...(19): siRNA sense strand
ugucuauaaugcaucauca

SEQ ID NO: 802997 - RNA, 19 nt, Homo sapiens
  misc_RNA (1)...(19): siRNA sense strand
caagaaugucuauaaugca

SEQ ID NO: 802998 - RNA, 19 nt, Homo sapiens
  misc_RNA (1)...(19): siRNA sense strand
cagagcccaucagcuuuga

SEQ ID NO: 802999 - RNA, 19 nt, Homo sapiens
  misc_RNA (1)...(19): siRNA sense strand
guguacaacugacgaacag

SEQ ID NO: 803000 - RNA, 19 nt, Homo sapiens
  misc_RNA (1)...(19): siRNA sense strand
agcaacaccuccgagaauu

SEQ ID NO: 803001 - RNA, 19 nt, Homo sapiens
  misc_RNA (1)...(19): siRNA sense strand
caggaaguuugccgagaca

SEQ ID NO: 803002 - RNA, 19 nt, Homo sapiens
  misc_RNA (1)...(19): siRNA sense strand
gagaggaaucaacugaaag

SEQ ID NO: 803003 - RNA, 19 nt, Homo sapiens
  misc_RNA (1)...(19): siRNA sense strand
ugugaaauccgcaaauugg

SEQ ID NO: 803004 - RNA, 19 nt, Homo sapiens
  misc_RNA (1)...(19): siRNA sense strand
uggaggcucucuguaaaca

SEQ ID NO: 803005 - RNA, 19 nt, Homo sapiens
  misc_RNA (1)...(19): siRNA sense strand
gguaccaguucaauuacua

SEQ ID NO: 803006 - RNA, 19 nt, Homo sapiens
  misc_RNA (1)...(19): siRNA sense strand
gccgguaccaguucaauua

SEQ ID NO: 803007 - RNA, 19 nt, Homo sapiens
  misc_RNA (1)...(19): siRNA sense strand
gggaaacgcugauccucau

SEQ ID NO: 803008 - RNA, 19 nt, Homo sapiens
  misc_RNA (1)...(19): siRNA sense strand
ggucuggacugguguaacg

SEQ ID NO: 803009 - RNA, 19 nt, Homo sapiens
  misc_RNA (1)...(19): siRNA sense strand
agugugcgcuucccaauca

SEQ ID NO: 803010 - RNA, 19 nt, Homo sapiens
  misc_RNA (1)...(19): siRNA sense strand
ccuaugggaccuacugcua

SEQ ID NO: 803011 - RNA, 19 nt, Homo sapiens
  misc_RNA (1)...(19): siRNA sense strand
gcagugugcgcuucccaau

SEQ ID NO: 803012 - RNA, 19 nt, Homo sapiens
  misc_RNA (1)...(19): siRNA sense strand
acugcuacgccgagaauua

SEQ ID NO: 803013 - RNA, 19 nt, Homo sapiens
  misc_RNA (1)...(19): siRNA sense strand
cuuggagggugugguguuu

SEQ ID NO: 803014 - RNA, 19 nt, Homo sapiens
  misc_RNA (1)...(19): siRNA sense strand
gcuacgacgccuucugcuu

SEQ ID NO: 803015 - RNA, 19 nt, Homo sapiens
  misc_RNA (1)...(19): siRNA sense strand
gggcugggcuccugucauu

SEQ ID NO: 803016 - RNA, 19 nt, Homo sapiens
  misc_RNA (1)...(19): siRNA sense strand
gaaguagaggugcaaauga

SEQ ID NO: 803017 - RNA, 19 nt, Homo sapiens
  misc_RNA (1)...(19): siRNA sense strand
cauugagcaucauuucuua

SEQ ID NO: 803018 - RNA, 19 nt, Homo sapiens
  misc_RNA (1)...(19): siRNA sense strand
gcaucgggaucuucuuuga

SEQ ID NO: 803019 - RNA, 19 nt, Homo sapiens
  misc_RNA (1)...(19): siRNA sense strand
ggcaggagcugaacaagag

SEQ ID NO: 803020 - RNA, 19 nt, Homo sapiens
  misc_RNA (1)...(19): siRNA sense strand
ggaaguagaggugcaaaug

SEQ ID NO: 803021 - RNA, 19 nt, Homo sapiens
  misc_RNA (1)...(19): siRNA sense strand
ggauguaacuccaaaauca

SEQ ID NO: 803022 - RNA, 19 nt, Homo sapiens
  misc_RNA (1)...(19): siRNA sense strand
gagcacggaucaccuacug

SEQ ID NO: 803023 - RNA, 19 nt, Homo sapiens
  misc_RNA (1)...(19): siRNA sense strand
ccaugucacucaauaagga

SEQ ID NO: 803024 - RNA, 19 nt, Homo sapiens
  misc_RNA (1)...(19): siRNA sense strand
gcauugagcaucauuucuu

SEQ ID NO: 803025 - RNA, 19 nt, Homo sapiens
  misc_RNA (1)...(19): siRNA sense strand
gcugagagacaauggaaga

SEQ ID NO: 803026 - RNA, 19 nt, Homo sapiens
  misc_RNA (1)...(19): siRNA sense strand
gaugcuuccugccagauuc

SEQ ID NO: 803027 - RNA, 19 nt, Homo sapiens
  misc_RNA (1)...(19): siRNA sense strand
cagaagcccaggucuccua

SEQ ID NO: 803028 - RNA, 19 nt, Homo sapiens
  misc_RNA (1)...(19): siRNA sense strand
caagagccuucaggagugu

SEQ ID NO: 803029 - RNA, 19 nt, Homo sapiens
  misc_RNA (1)...(19): siRNA sense strand
ucagagcacggaucaccua

SEQ ID NO: 803030 - RNA, 19 nt, Homo sapiens
  misc_RNA (1)...(19): siRNA sense strand
ucuuagagcuggaccacau

SEQ ID NO: 803031 - RNA, 19 nt, Homo sapiens
  misc_RNA (1)...(19): siRNA sense strand
cucugaagcucaaggagaa

SEQ ID NO: 803032 - RNA, 19 nt, Homo sapiens
  misc_RNA (1)...(19): siRNA sense strand
gggcauugagcaucauuuc

SEQ ID NO: 803033 - RNA, 19 nt, Homo sapiens
  misc_RNA (1)...(19): siRNA sense strand
cggcugacgccauccauga

SEQ ID NO: 803034 - RNA, 19 nt, Homo sapiens
  misc_RNA (1)...(19): siRNA sense strand
ccuggcagaugaucaugau

SEQ ID NO: 803035 - RNA, 19 nt, Homo sapiens
  misc_RNA (1)...(19): siRNA sense strand
cggcaucgggaucuucuuu

SEQ ID NO: 803036 - RNA, 19 nt, Homo sapiens
  misc_RNA (1)...(19): siRNA sense strand
ccauguaggcucuguccuu

SEQ ID NO: 803037 - RNA, 19 nt, Homo sapiens
  misc_RNA (1)...(19): siRNA sense strand
aaguagaggugcaaaugag

SEQ ID NO: 803038 - RNA, 19 nt, Homo sapiens
  misc_RNA (1)...(19): siRNA sense strand
gcgcauguccuugaacagu

SEQ ID NO: 803039 - RNA, 19 nt, Homo sapiens
  misc_RNA (1)...(19): siRNA sense strand
ggaugcuuccugccagauu

SEQ ID NO: 803040 - RNA, 19 nt, Homo sapiens
  misc_RNA (1)...(19): siRNA sense strand
ggcagaugaucaugauguc

SEQ ID NO: 803041 - RNA, 19 nt, Homo sapiens
  misc_RNA (1)...(19): siRNA sense strand
cuacgcagguuugaguaca

SEQ ID NO: 803042 - RNA, 19 nt, Homo sapiens
  misc_RNA (1)...(19): siRNA sense strand
uguucuaccuccucauuca

SEQ ID NO: 803043 - RNA, 19 nt, Homo sapiens
  misc_RNA (1)...(19): siRNA sense strand
ggcccaggcugagagacaa

SEQ ID NO: 803044 - RNA, 19 nt, Homo sapiens
  misc_RNA (1)...(19): siRNA sense strand
gggcuggaauacccuucug

SEQ ID NO: 803045 - RNA, 19 nt, Homo sapiens
  misc_RNA (1)...(19): siRNA sense strand
ccagugauccaggugaguu

SEQ ID NO: 803046 - RNA, 19 nt, Homo sapiens
  misc_RNA (1)...(19): siRNA sense strand
ccugcagccuggcaucuuc

SEQ ID NO: 803047 - RNA, 19 nt, Homo sapiens
  misc_RNA (1)...(19): siRNA sense strand
uggcagaugaucaugaugu

SEQ ID NO: 803048 - RNA, 19 nt, Homo sapiens
  misc_RNA (1)...(19): siRNA sense strand
ggacggcaucgggaucuuc

SEQ ID NO: 803049 - RNA, 19 nt, Homo sapiens
  misc_RNA (1)...(19): siRNA sense strand
ugaguucuguguggaugug

SEQ ID NO: 803050 - RNA, 19 nt, Homo sapiens
  misc_RNA (1)...(19): siRNA sense strand
gcgaauagaugcacuugaa

SEQ ID NO: 803051 - RNA, 19 nt, Homo sapiens
  misc_RNA (1)...(19): siRNA sense strand
ggacagacauagacuacaa

SEQ ID NO: 803052 - RNA, 19 nt, Homo sapiens
  misc_RNA (1)...(19): siRNA sense strand
ggacagagagagcuuauug

SEQ ID NO: 803053 - RNA, 19 nt, Homo sapiens
  misc_RNA (1)...(19): siRNA sense strand
ucaagaaacuuauggaaag

SEQ ID NO: 803054 - RNA, 19 nt, Homo sapiens
  misc_RNA (1)...(19): siRNA sense strand
gagaauccgcauaauauuu

SEQ ID NO: 803055 - RNA, 19 nt, Homo sapiens
  misc_RNA (1)...(19): siRNA sense strand
gaauagaugcacuugaauu

SEQ ID NO: 803056 - RNA, 19 nt, Homo sapiens
  misc_RNA (1)...(19): siRNA sense strand
gcaagaaauuugaugaaac

SEQ ID NO: 803057 - RNA, 19 nt, Homo sapiens
  misc_RNA (1)...(19): siRNA sense strand
gcugguuugucauucauua

SEQ ID NO: 803058 - RNA, 19 nt, Homo sapiens
  misc_RNA (1)...(19): siRNA sense strand
uaaagaaaccgcaacaugu

SEQ ID NO: 803059 - RNA, 19 nt, Homo sapiens
  misc_RNA (1)...(19): siRNA sense strand
gagagcuuauugagucaua

SEQ ID NO: 803060 - RNA, 19 nt, Homo sapiens
  misc_RNA (1)...(19): siRNA sense strand
cugaagauauugcaagaaa

SEQ ID NO: 803061 - RNA, 19 nt, Homo sapiens
  misc_RNA (1)...(19): siRNA sense strand
aaagaaaccgcaacaugua

SEQ ID NO: 803062 - RNA, 19 nt, Homo sapiens
  misc_RNA (1)...(19): siRNA sense strand
gagcuguacaguucucuua

SEQ ID NO: 803063 - RNA, 19 nt, Homo sapiens
  misc_RNA (1)...(19): siRNA sense strand
gcuguacaguucucuuaaa

SEQ ID NO: 803064 - RNA, 19 nt, Homo sapiens
  misc_RNA (1)...(19): siRNA sense strand
gaaaccgcaacauguauuu

SEQ ID NO: 803065 - RNA, 19 nt, Homo sapiens
  misc_RNA (1)...(19): siRNA sense strand
caagaaauuugaugaaacg

SEQ ID NO: 803066 - RNA, 19 nt, Homo sapiens
  misc_RNA (1)...(19): siRNA sense strand
caaacugcaucccugagaa

SEQ ID NO: 803067 - RNA, 19 nt, Homo sapiens
  misc_RNA (1)...(19): siRNA sense strand
cugaggagcuguacaguuc

SEQ ID NO: 803068 - RNA, 19 nt, Homo sapiens
  misc_RNA (1)...(19): siRNA sense strand
aagagacacuuuauuggaa

SEQ ID NO: 803069 - RNA, 19 nt, Homo sapiens
  misc_RNA (1)...(19): siRNA sense strand
gcgcugucguguacccuua

SEQ ID NO: 803070 - RNA, 19 nt, Homo sapiens
  misc_RNA (1)...(19): siRNA sense strand
gauugcagauggacagaga

SEQ ID NO: 803071 - RNA, 19 nt, Homo sapiens
  misc_RNA (1)...(19): siRNA sense strand
cauucggacucuacauaua

SEQ ID NO: 803072 - RNA, 19 nt, Homo sapiens
  misc_RNA (1)...(19): siRNA sense strand
aauaagacauugacacaag

SEQ ID NO: 803073 - RNA, 19 nt, Homo sapiens
  misc_RNA (1)...(19): siRNA sense strand
gauauugucuuugauccau

SEQ ID NO: 803074 - RNA, 19 nt, Homo sapiens
  misc_RNA (1)...(19): siRNA sense strand
agacauagacuacaacaca

SEQ ID NO: 803075 - RNA, 19 nt, Homo sapiens
  misc_RNA (1)...(19): siRNA sense strand
uuuggaggauuaugguuua

SEQ ID NO: 803076 - RNA, 19 nt, Homo sapiens
  misc_RNA (1)...(19): siRNA sense strand
uagaugcacuugaauuucu

SEQ ID NO: 803077 - RNA, 19 nt, Homo sapiens
  misc_RNA (1)...(19): siRNA sense strand
ccugagaauccgcauaaua

SEQ ID NO: 803078 - RNA, 19 nt, Homo sapiens
  misc_RNA (1)...(19): siRNA sense strand
cugagaauccgcauaauau

SEQ ID NO: 803079 - RNA, 19 nt, Homo sapiens
  misc_RNA (1)...(19): siRNA sense strand
ugucauucauuauggcuaa

SEQ ID NO: 803080 - RNA, 19 nt, Homo sapiens
  misc_RNA (1)...(19): siRNA sense strand
gaugcugguuugucauuca

SEQ ID NO: 803081 - RNA, 19 nt, Homo sapiens
  misc_RNA (1)...(19): siRNA sense strand
agagacacuuuauuggaaa

SEQ ID NO: 803082 - RNA, 19 nt, Homo sapiens
  misc_RNA (1)...(19): siRNA sense strand
gagagagcuuauugaguca

SEQ ID NO: 803083 - RNA, 19 nt, Homo sapiens
  misc_RNA (1)...(19): siRNA sense strand
gcaggagcaucuggaguuc

SEQ ID NO: 803084 - RNA, 19 nt, Homo sapiens
  misc_RNA (1)...(19): siRNA sense strand
uuaaagaaaccgcaacaug

SEQ ID NO: 803085 - RNA, 19 nt, Homo sapiens
  misc_RNA (1)...(19): siRNA sense strand
uugaauuucugccauuuga

SEQ ID NO: 803086 - RNA, 19 nt, Homo sapiens
  misc_RNA (1)...(19): siRNA sense strand
gucaagaaacuuauggaaa

SEQ ID NO: 803087 - RNA, 19 nt, Homo sapiens
  misc_RNA (1)...(19): siRNA sense strand
uauggaugcugguuuguca

SEQ ID NO: 803088 - RNA, 19 nt, Homo sapiens
  misc_RNA (1)...(19): siRNA sense strand
ugccaagucuauauuugaa

SEQ ID NO: 803089 - RNA, 19 nt, Homo sapiens
  misc_RNA (1)...(19): siRNA sense strand
aaacuacccuguggagaag

SEQ ID NO: 803090 - RNA, 19 nt, Homo sapiens
  misc_RNA (1)...(19): siRNA sense strand
gaauuucugccauuugaag

SEQ ID NO: 803091 - RNA, 19 nt, Homo sapiens
  misc_RNA (1)...(19): siRNA sense strand
ggaggauuaugguuuagac

SEQ ID NO: 803092 - RNA, 19 nt, Homo sapiens
  misc_RNA (1)...(19): siRNA sense strand
gagacacuuuauuggaaau

SEQ ID NO: 803093 - RNA, 19 nt, Homo sapiens
  misc_RNA (1)...(19): siRNA sense strand
gacagugugugccaagucu

SEQ ID NO: 803094 - RNA, 19 nt, Homo sapiens
  misc_RNA (1)...(19): siRNA sense strand
ugucuuugauccauuuguu

SEQ ID NO: 803095 - RNA, 19 nt, Homo sapiens
  misc_RNA (1)...(19): siRNA sense strand
ccaagucuauauuugaacu

SEQ ID NO: 803096 - RNA, 19 nt, Homo sapiens
  misc_RNA (1)...(19): siRNA sense strand
gugccaagucuauauuuga

SEQ ID NO: 803097 - RNA, 19 nt, Homo sapiens
  misc_RNA (1)...(19): siRNA sense strand
gaaaaucaagcgaauagau

SEQ ID NO: 803098 - RNA, 19 nt, Homo sapiens
  misc_RNA (1)...(19): siRNA sense strand
aaguauggaugcugguuug

SEQ ID NO: 803099 - RNA, 19 nt, Homo sapiens
  misc_RNA (1)...(19): siRNA sense strand
caaguauggaugcugguuu

SEQ ID NO: 803100 - RNA, 19 nt, Homo sapiens
  misc_RNA (1)...(19): siRNA sense strand
ugagaauccgcauaauauu

SEQ ID NO: 803101 - RNA, 19 nt, Homo sapiens
  misc_RNA (1)...(19): siRNA sense strand
uacauucggacucuacaua

SEQ ID NO: 803102 - RNA, 19 nt, Homo sapiens
  misc_RNA (1)...(19): siRNA sense strand
gacagagagagcuuauuga

SEQ ID NO: 803103 - RNA, 19 nt, Homo sapiens
  misc_RNA (1)...(19): siRNA sense strand
auaagacauugacacaaga

SEQ ID NO: 803104 - RNA, 19 nt, Homo sapiens
  misc_RNA (1)...(19): siRNA sense strand
acagguaucugcuccucau

SEQ ID NO: 803105 - RNA, 19 nt, Homo sapiens
  misc_RNA (1)...(19): siRNA sense strand
agcauucccucugaagaua

SEQ ID NO: 803106 - RNA, 19 nt, Homo sapiens
  misc_RNA (1)...(19): siRNA sense strand
ccaaacugcaucccugaga

SEQ ID NO: 803107 - RNA, 19 nt, Homo sapiens
  misc_RNA (1)...(19): siRNA sense strand
gagaaaaucaagcgaauag

SEQ ID NO: 803108 - RNA, 19 nt, Homo sapiens
  misc_RNA (1)...(19): siRNA sense strand
gaugaaacggacagugugu

SEQ ID NO: 803109 - RNA, 19 nt, Homo sapiens
  misc_RNA (1)...(19): siRNA sense strand
cauucccucugaagauauu

SEQ ID NO: 803110 - RNA, 19 nt, Homo sapiens
  misc_RNA (1)...(19): siRNA sense strand
gucuauauuugaacuaugg

SEQ ID NO: 803111 - RNA, 19 nt, Homo sapiens
  misc_RNA (1)...(19): siRNA sense strand
gauggacagagagagcuua

SEQ ID NO: 803112 - RNA, 19 nt, Homo sapiens
  misc_RNA (1)...(19): siRNA sense strand
agaaaccgcaacauguauu

SEQ ID NO: 803113 - RNA, 19 nt, Homo sapiens
  misc_RNA (1)...(19): siRNA sense strand
gaggagcuguacaguucuc

SEQ ID NO: 803114 - RNA, 19 nt, Homo sapiens
  misc_RNA (1)...(19): siRNA sense strand
gaaagucaccauuuuggau

SEQ ID NO: 803115 - RNA, 19 nt, Homo sapiens
  misc_RNA (1)...(19): siRNA sense strand
uagauggauugcagaugga

SEQ ID NO: 803116 - RNA, 19 nt, Homo sapiens
  misc_RNA (1)...(19): siRNA sense strand
ggacagugugugccaaguc

SEQ ID NO: 803117 - RNA, 19 nt, Homo sapiens
  misc_RNA (1)...(19): siRNA sense strand
gacauugacacaagaagag

SEQ ID NO: 803118 - RNA, 19 nt, Homo sapiens
  misc_RNA (1)...(19): siRNA sense strand
uaagacauugacacaagaa

SEQ ID NO: 803119 - RNA, 19 nt, Homo sapiens
  misc_RNA (1)...(19): siRNA sense strand
uagcauucccucugaagau

SEQ ID NO: 803120 - RNA, 19 nt, Homo sapiens
  misc_RNA (1)...(19): siRNA sense strand
gguuugucauucauuaugg

SEQ ID NO: 803121 - RNA, 19 nt, Homo sapiens
  misc_RNA (1)...(19): siRNA sense strand
ggaugcugguuugucauuc

SEQ ID NO: 803122 - RNA, 19 nt, Homo sapiens
  misc_RNA (1)...(19): siRNA sense strand
ucccugagaauccgcauaa

SEQ ID NO: 803123 - RNA, 19 nt, Homo sapiens
  misc_RNA (1)...(19): siRNA sense strand
agacauugacacaagaaga

SEQ ID NO: 803124 - RNA, 19 nt, Homo sapiens
  misc_RNA (1)...(19): siRNA sense strand
auucggacucuacauauaa

SEQ ID NO: 803125 - RNA, 19 nt, Homo sapiens
  misc_RNA (1)...(19): siRNA sense strand
ugagucauacagugucaaa

SEQ ID NO: 803126 - RNA, 19 nt, Homo sapiens
  misc_RNA (1)...(19): siRNA sense strand
ugugccaagucuauauuug

SEQ ID NO: 803127 - RNA, 19 nt, Homo sapiens
  misc_RNA (1)...(19): siRNA sense strand
cacuugaauuucugccauu

SEQ ID NO: 803128 - RNA, 19 nt, Homo sapiens
  misc_RNA (1)...(19): siRNA sense strand
cgcaggagcaucuggaguu

SEQ ID NO: 803129 - RNA, 19 nt, Homo sapiens
  misc_RNA (1)...(19): siRNA sense strand
cauagacuacaacacaguu

SEQ ID NO: 803130 - RNA, 19 nt, Homo sapiens
  misc_RNA (1)...(19): siRNA sense strand
cgaauagaugcacuugaau

SEQ ID NO: 803131 - RNA, 19 nt, Homo sapiens
  misc_RNA (1)...(19): siRNA sense strand
gagcuuauugagucauaca

SEQ ID NO: 803132 - RNA, 19 nt, Homo sapiens
  misc_RNA (1)...(19): siRNA sense strand
aaacugcaucccugagaau

SEQ ID NO: 803133 - RNA, 19 nt, Homo sapiens
  misc_RNA (1)...(19): siRNA sense strand
aagaaaccgcaacauguau

SEQ ID NO: 803134 - RNA, 19 nt, Homo sapiens
  misc_RNA (1)...(19): siRNA sense strand
ucaccauuuuggauucuua

SEQ ID NO: 803135 - RNA, 19 nt, Homo sapiens
  misc_RNA (1)...(19): siRNA sense strand
acagagagagcuuauugag

SEQ ID NO: 803136 - RNA, 19 nt, Homo sapiens
  misc_RNA (1)...(19): siRNA sense strand
gcauucccucugaagauau

SEQ ID NO: 803137 - RNA, 19 nt, Homo sapiens
  misc_RNA (1)...(19): siRNA sense strand
cagagagagcuuauugagu

SEQ ID NO: 803138 - RNA, 19 nt, Homo sapiens
  misc_RNA (1)...(19): siRNA sense strand
gaaccaagcccaccacaua

SEQ ID NO: 803139 - RNA, 19 nt, Homo sapiens
  misc_RNA (1)...(19): siRNA sense strand
gaacgaggcuuucuuucug

SEQ ID NO: 803140 - RNA, 19 nt, Homo sapiens
  misc_RNA (1)...(19): siRNA sense strand
gaacaaacacggauuaauc

SEQ ID NO: 803141 - RNA, 19 nt, Homo sapiens
  misc_RNA (1)...(19): siRNA sense strand
gaaaggaauugacgguguu

SEQ ID NO: 803142 - RNA, 19 nt, Homo sapiens
  misc_RNA (1)...(19): siRNA sense strand
ggauuaaucugaauuguac

SEQ ID NO: 803143 - RNA, 19 nt, Homo sapiens
  misc_RNA (1)...(19): siRNA sense strand
cgaguagaauucaacguua

SEQ ID NO: 803144 - RNA, 19 nt, Homo sapiens
  misc_RNA (1)...(19): siRNA sense strand
gaacagagucgguaucuac

SEQ ID NO: 803145 - RNA, 19 nt, Homo sapiens
  misc_RNA (1)...(19): siRNA sense strand
gaguagaauucaacguuaa

SEQ ID NO: 803146 - RNA, 19 nt, Homo sapiens
  misc_RNA (1)...(19): siRNA sense strand
ggacaauguuggauuacug

SEQ ID NO: 803147 - RNA, 19 nt, Homo sapiens
  misc_RNA (1)...(19): siRNA sense strand
gguaucuacucuccucaua

SEQ ID NO: 803148 - RNA, 19 nt, Homo sapiens
  misc_RNA (1)...(19): siRNA sense strand
gcccauacauccuuccaaa

SEQ ID NO: 803149 - RNA, 19 nt, Homo sapiens
  misc_RNA (1)...(19): siRNA sense strand
aaacacggauuaaucugaa

SEQ ID NO: 803150 - RNA, 19 nt, Homo sapiens
  misc_RNA (1)...(19): siRNA sense strand
gcauuaaccuggaacacau

SEQ ID NO: 803151 - RNA, 19 nt, Homo sapiens
  misc_RNA (1)...(19): siRNA sense strand
gaggaacaaacacggauua

SEQ ID NO: 803152 - RNA, 19 nt, Homo sapiens
  misc_RNA (1)...(19): siRNA sense strand
uaaaugucauccucuguga

SEQ ID NO: 803153 - RNA, 19 nt, Homo sapiens
  misc_RNA (1)...(19): siRNA sense strand
ggaacaaacaacuuuauca

SEQ ID NO: 803154 - RNA, 19 nt, Homo sapiens
  misc_RNA (1)...(19): siRNA sense strand
ugaugcaggugguagauuu

SEQ ID NO: 803155 - RNA, 19 nt, Homo sapiens
  misc_RNA (1)...(19): siRNA sense strand
agucaugucugcagugaaa

SEQ ID NO: 803156 - RNA, 19 nt, Homo sapiens
  misc_RNA (1)...(19): siRNA sense strand
caaacaacuuuaucagaag

SEQ ID NO: 803157 - RNA, 19 nt, Homo sapiens
  misc_RNA (1)...(19): siRNA sense strand
gaacaaacaacuuuaucag

SEQ ID NO: 803158 - RNA, 19 nt, Homo sapiens
  misc_RNA (1)...(19): siRNA sense strand
aaagaaggcagaccucauu

SEQ ID NO: 803159 - RNA, 19 nt, Homo sapiens
  misc_RNA (1)...(19): siRNA sense strand
gaacacagcaacacugaac

SEQ ID NO: 803160 - RNA, 19 nt, Homo sapiens
  misc_RNA (1)...(19): siRNA sense strand
gaaaccaccgaguagaauu

SEQ ID NO: 803161 - RNA, 19 nt, Homo sapiens
  misc_RNA (1)...(19): siRNA sense strand
cuuagagucucaagucaaa

SEQ ID NO: 803162 - RNA, 19 nt, Homo sapiens
  misc_RNA (1)...(19): siRNA sense strand
cccaagaccuggacaaagu

SEQ ID NO: 803163 - RNA, 19 nt, Homo sapiens
  misc_RNA (1)...(19): siRNA sense strand
caaacacggauuaaucuga

SEQ ID NO: 803164 - RNA, 19 nt, Homo sapiens
  misc_RNA (1)...(19): siRNA sense strand
gaagggagcgccuggugau

SEQ ID NO: 803165 - RNA, 19 nt, Homo sapiens
  misc_RNA (1)...(19): siRNA sense strand
aaccaugauugaucgaaua

SEQ ID NO: 803166 - RNA, 19 nt, Homo sapiens
  misc_RNA (1)...(19): siRNA sense strand
uaucuacucuccucauaca

SEQ ID NO: 803167 - RNA, 19 nt, Homo sapiens
  misc_RNA (1)...(19): siRNA sense strand
ucacuuggagaauaagaua

SEQ ID NO: 803168 - RNA, 19 nt, Homo sapiens
  misc_RNA (1)...(19): siRNA sense strand
caaccaugauugaucgaau

SEQ ID NO: 803169 - RNA, 19 nt, Homo sapiens
  misc_RNA (1)...(19): siRNA sense strand
gggaaaccaccgaguagaa

SEQ ID NO: 803170 - RNA, 19 nt, Homo sapiens
  misc_RNA (1)...(19): siRNA sense strand
ggaugcugcuucccaagga

SEQ ID NO: 803171 - RNA, 19 nt, Homo sapiens
  misc_RNA (1)...(19): siRNA sense strand
gcugagaguugggacaaug

SEQ ID NO: 803172 - RNA, 19 nt, Homo sapiens
  misc_RNA (1)...(19): siRNA sense strand
gaauugacgguguuucugu

SEQ ID NO: 803173 - RNA, 19 nt, Homo sapiens
  misc_RNA (1)...(19): siRNA sense strand
gaagcgcauuaaccuggaa

SEQ ID NO: 803174 - RNA, 19 nt, Homo sapiens
  misc_RNA (1)...(19): siRNA sense strand
ggaaugggacgguuaugca

SEQ ID NO: 803175 - RNA, 19 nt, Homo sapiens
  misc_RNA (1)...(19): siRNA sense strand
guguuucugucacuucuuu

SEQ ID NO: 803176 - RNA, 19 nt, Homo sapiens
  misc_RNA (1)...(19): siRNA sense strand
ggaaaccaccgaguagaau

SEQ ID NO: 803177 - RNA, 19 nt, Homo sapiens
  misc_RNA (1)...(19): siRNA sense strand
gaagacggaaauucuguca

SEQ ID NO: 803178 - RNA, 19 nt, Homo sapiens
  misc_RNA (1)...(19): siRNA sense strand
uugggacaauguuggauua

SEQ ID NO: 803179 - RNA, 19 nt, Homo sapiens
  misc_RNA (1)...(19): siRNA sense strand
ggaacaaacacggauuaau

SEQ ID NO: 803180 - RNA, 19 nt, Homo sapiens
  misc_RNA (1)...(19): siRNA sense strand
guguugaggcugaccuuua

SEQ ID NO: 803181 - RNA, 19 nt, Homo sapiens
  misc_RNA (1)...(19): siRNA sense strand
aaagucaugucugcaguga

SEQ ID NO: 803182 - RNA, 19 nt, Homo sapiens
  misc_RNA (1)...(19): siRNA sense strand
uaugcuggauucucacuug

SEQ ID NO: 803183 - RNA, 19 nt, Homo sapiens
  misc_RNA (1)...(19): siRNA sense strand
gaauucaacguuaacuaca

SEQ ID NO: 803184 - RNA, 19 nt, Homo sapiens
  misc_RNA (1)...(19): siRNA sense strand
cggauuaaucugaauugua

SEQ ID NO: 803185 - RNA, 19 nt, Homo sapiens
  misc_RNA (1)...(19): siRNA sense strand
uaaagggcuuggagcuugu

SEQ ID NO: 803186 - RNA, 19 nt, Homo sapiens
  misc_RNA (1)...(19): siRNA sense strand
caacacugaacgaggcuuu

SEQ ID NO: 803187 - RNA, 19 nt, Homo sapiens
  misc_RNA (1)...(19): siRNA sense strand
uuccaaagcucccaacuac

SEQ ID NO: 803188 - RNA, 19 nt, Homo sapiens
  misc_RNA (1)...(19): siRNA sense strand
gaaggcagaccucauucuc

SEQ ID NO: 803189 - RNA, 19 nt, Homo sapiens
  misc_RNA (1)...(19): siRNA sense strand
agacggaaauucugucacu

SEQ ID NO: 803190 - RNA, 19 nt, Homo sapiens
  misc_RNA (1)...(19): siRNA sense strand
gagggaaaccaccgaguag

SEQ ID NO: 803191 - RNA, 19 nt, Homo sapiens
  misc_RNA (1)...(19): siRNA sense strand
uuucugaccuucgagauau

SEQ ID NO: 803192 - RNA, 19 nt, Homo sapiens
  misc_RNA (1)...(19): siRNA sense strand
ggacugguaaugaggaaca

SEQ ID NO: 803193 - RNA, 19 nt, Homo sapiens
  misc_RNA (1)...(19): siRNA sense strand
gcucuccuuucuuccuuga

SEQ ID NO: 803194 - RNA, 19 nt, Homo sapiens
  misc_RNA (1)...(19): siRNA sense strand
gcacacuggaugaaucugu

SEQ ID NO: 803195 - RNA, 19 nt, Homo sapiens
  misc_RNA (1)...(19): siRNA sense strand
agagggaaaccaccgagua

SEQ ID NO: 803196 - RNA, 19 nt, Homo sapiens
  misc_RNA (1)...(19): siRNA sense strand
guacucagaaggcuuugau

SEQ ID NO: 803197 - RNA, 19 nt, Homo sapiens
  misc_RNA (1)...(19): siRNA sense strand
ugaccugacugaggaagug

SEQ ID NO: 803198 - RNA, 19 nt, Homo sapiens
  misc_RNA (1)...(19): siRNA sense strand
ccgaguagaauucaacguu

SEQ ID NO: 803199 - RNA, 19 nt, Homo sapiens
  misc_RNA (1)...(19): siRNA sense strand
gauccgggcucuggagaac

SEQ ID NO: 803200 - RNA, 19 nt, Homo sapiens
  misc_RNA (1)...(19): siRNA sense strand
gugaacacagcaacacuga

SEQ ID NO: 803201 - RNA, 19 nt, Homo sapiens
  misc_RNA (1)...(19): siRNA sense strand
gagaacagagucgguaucu

SEQ ID NO: 803202 - RNA, 19 nt, Homo sapiens
  misc_RNA (1)...(19): siRNA sense strand
ugaccaaugaccugacuga

SEQ ID NO: 803203 - RNA, 19 nt, Homo sapiens
  misc_RNA (1)...(19): siRNA sense strand
ugaacgaggcuuucuuucu

SEQ ID NO: 803204 - RNA, 19 nt, Homo sapiens
  misc_RNA (1)...(19): siRNA sense strand
cgacccaugaagcgcauua

SEQ ID NO: 803205 - RNA, 19 nt, Homo sapiens
  misc_RNA (1)...(19): siRNA sense strand
gagaguugggacaauguug

SEQ ID NO: 803206 - RNA, 19 nt, Homo sapiens
  misc_RNA (1)...(19): siRNA sense strand
caaagucguggcccugugu

SEQ ID NO: 803207 - RNA, 19 nt, Homo sapiens
  misc_RNA (1)...(19): siRNA sense strand
uaugcacacuggaugaauc

SEQ ID NO: 803208 - RNA, 19 nt, Homo sapiens
  misc_RNA (1)...(19): siRNA sense strand
gcuucuacauacuggaaug

SEQ ID NO: 803209 - RNA, 19 nt, Homo sapiens
  misc_RNA (1)...(19): siRNA sense strand
gcuaaagggcuuggagcuu

SEQ ID NO: 803210 - RNA, 19 nt, Homo sapiens
  misc_RNA (1)...(19): siRNA sense strand
uaucagaagacggaaauuc

SEQ ID NO: 803211 - RNA, 19 nt, Homo sapiens
  misc_RNA (1)...(19): siRNA sense strand
ggaauugacgguguuucug

SEQ ID NO: 803212 - RNA, 19 nt, Homo sapiens
  misc_RNA (1)...(19): siRNA sense strand
caccacauacuguaaauac

SEQ ID NO: 803213 - RNA, 19 nt, Homo sapiens
  misc_RNA (1)...(19): siRNA sense strand
ggagaacagagucgguauc

SEQ ID NO: 803214 - RNA, 19 nt, Homo sapiens
  misc_RNA (1)...(19): siRNA sense strand
agaacagagucgguaucua

SEQ ID NO: 803215 - RNA, 19 nt, Homo sapiens
  misc_RNA (1)...(19): siRNA sense strand
aacgaggcuuucuuucuga

SEQ ID NO: 803216 - RNA, 19 nt, Homo sapiens
  misc_RNA (1)...(19): siRNA sense strand
ugucugcagugaaaggaau

SEQ ID NO: 803217 - RNA, 19 nt, Homo sapiens
  misc_RNA (1)...(19): siRNA sense strand
ccaccacauacuguaaaua

SEQ ID NO: 803218 - RNA, 19 nt, Homo sapiens
  misc_RNA (1)...(19): siRNA sense strand
ugacugaggaagugaugga

SEQ ID NO: 803219 - RNA, 19 nt, Homo sapiens
  misc_RNA (1)...(19): siRNA sense strand
uggaggaggugcugcaaaa

SEQ ID NO: 803220 - RNA, 19 nt, Homo sapiens
  misc_RNA (1)...(19): siRNA sense strand
gcccaccacauacuguaaa

SEQ ID NO: 803221 - RNA, 19 nt, Homo sapiens
  misc_RNA (1)...(19): siRNA sense strand
agaauucaacguuaacuac

SEQ ID NO: 803222 - RNA, 19 nt, Homo sapiens
  misc_RNA (1)...(19): siRNA sense strand
uucgagauaugcuggauuc

SEQ ID NO: 803223 - RNA, 19 nt, Homo sapiens
  misc_RNA (1)...(19): siRNA sense strand
acugaacgaggcuuucuuu

SEQ ID NO: 803224 - RNA, 19 nt, Homo sapiens
  misc_RNA (1)...(19): siRNA sense strand
ugucccaucaugauacuuu

SEQ ID NO: 803225 - RNA, 19 nt, Homo sapiens
  misc_RNA (1)...(19): siRNA sense strand
caccuaaaacuaucucaua

SEQ ID NO: 803226 - RNA, 19 nt, Homo sapiens
  misc_RNA (1)...(19): siRNA sense strand
gcaaccaugauugaucgaa

SEQ ID NO: 803227 - RNA, 19 nt, Homo sapiens
  misc_RNA (1)...(19): siRNA sense strand
gggacaauguuggauuacu

SEQ ID NO: 803228 - RNA, 19 nt, Homo sapiens
  misc_RNA (1)...(19): siRNA sense strand
uguugaggcugaccuuuac

SEQ ID NO: 803229 - RNA, 19 nt, Homo sapiens
  misc_RNA (1)...(19): siRNA sense strand
gaaccuuagagucucaagu

SEQ ID NO: 803230 - RNA, 19 nt, Homo sapiens
  misc_RNA (1)...(19): siRNA sense strand
gguuaugcacacuggauga

SEQ ID NO: 803231 - RNA, 19 nt, Homo sapiens
  misc_RNA (1)...(19): siRNA sense strand
ucuccuuucuuccuugaau

SEQ ID NO: 803232 - RNA, 19 nt, Homo sapiens
  misc_RNA (1)...(19): siRNA sense strand
aaaccaccgaguagaauuc

SEQ ID NO: 803233 - RNA, 19 nt, Homo sapiens
  misc_RNA (1)...(19): siRNA sense strand
ccauacauccuuccaaagc

SEQ ID NO: 803234 - RNA, 19 nt, Homo sapiens
  misc_RNA (1)...(19): siRNA sense strand
ggacccucuucagguggua

SEQ ID NO: 803235 - RNA, 19 nt, Homo sapiens
  misc_RNA (1)...(19): siRNA sense strand
acacggauuaaucugaauu

SEQ ID NO: 803236 - RNA, 19 nt, Homo sapiens
  misc_RNA (1)...(19): siRNA sense strand
gcucccaacuacccuacag

SEQ ID NO: 803237 - RNA, 19 nt, Homo sapiens
  misc_RNA (1)...(19): siRNA sense strand
cacucuuccugaccaauga

SEQ ID NO: 803238 - RNA, 19 nt, Homo sapiens
  misc_RNA (1)...(19): siRNA sense strand
gaaaggaagugcaaguuaa

SEQ ID NO: 803239 - RNA, 19 nt, Homo sapiens
  misc_RNA (1)...(19): siRNA sense strand
gaagaaggcaccagagaua

SEQ ID NO: 803240 - RNA, 19 nt, Homo sapiens
  misc_RNA (1)...(19): siRNA sense strand
ggaaagccauccugcauca

SEQ ID NO: 803241 - RNA, 19 nt, Homo sapiens
  misc_RNA (1)...(19): siRNA sense strand
uaagaaaccacaagaauga

SEQ ID NO: 803242 - RNA, 19 nt, Homo sapiens
  misc_RNA (1)...(19): siRNA sense strand
gaaugagggugaacugaug

SEQ ID NO: 803243 - RNA, 19 nt, Homo sapiens
  misc_RNA (1)...(19): siRNA sense strand
ccugaaagcuuaucauauc

SEQ ID NO: 803244 - RNA, 19 nt, Homo sapiens
  misc_RNA (1)...(19): siRNA sense strand
uaaauagagucaaccaaug

SEQ ID NO: 803245 - RNA, 19 nt, Homo sapiens
  misc_RNA (1)...(19): siRNA sense strand
caagagagcuuuggaugca

SEQ ID NO: 803246 - RNA, 19 nt, Homo sapiens
  misc_RNA (1)...(19): siRNA sense strand
gaaagcuuaucauauccaa

SEQ ID NO: 803247 - RNA, 19 nt, Homo sapiens
  misc_RNA (1)...(19): siRNA sense strand
ggagacccuuguagaagaa

SEQ ID NO: 803248 - RNA, 19 nt, Homo sapiens
  misc_RNA (1)...(19): siRNA sense strand
guaaauagagucaaccaau

SEQ ID NO: 803249 - RNA, 19 nt, Homo sapiens
  misc_RNA (1)...(19): siRNA sense strand
gagaguggugggaagauua

SEQ ID NO: 803250 - RNA, 19 nt, Homo sapiens
  misc_RNA (1)...(19): siRNA sense strand
uaacaaggcaggacagaug

SEQ ID NO: 803251 - RNA, 19 nt, Homo sapiens
  misc_RNA (1)...(19): siRNA sense strand
agaagaauguggagagaau

SEQ ID NO: 803252 - RNA, 19 nt, Homo sapiens
  misc_RNA (1)...(19): siRNA sense strand
agaaaggaagugcaaguua

SEQ ID NO: 803253 - RNA, 19 nt, Homo sapiens
  misc_RNA (1)...(19): siRNA sense strand
gaaacaaauggauaacaga

SEQ ID NO: 803254 - RNA, 19 nt, Homo sapiens
  misc_RNA (1)...(19): siRNA sense strand
gaaaggagugcugcgauga

SEQ ID NO: 803255 - RNA, 19 nt, Homo sapiens
  misc_RNA (1)...(19): siRNA sense strand
uggaguugcugaagcuaua

SEQ ID NO: 803256 - RNA, 19 nt, Homo sapiens
  misc_RNA (1)...(19): siRNA sense strand
gagcuggagcgaguaaaua

SEQ ID NO: 803257 - RNA, 19 nt, Homo sapiens
  misc_RNA (1)...(19): siRNA sense strand
cgaaauaaagcaaagacaa

SEQ ID NO: 803258 - RNA, 19 nt, Homo sapiens
  misc_RNA (1)...(19): siRNA sense strand
guagaagaauguggagaga

SEQ ID NO: 803259 - RNA, 19 nt, Homo sapiens
  misc_RNA (1)...(19): siRNA sense strand
caaagacaauacagagagu

SEQ ID NO: 803260 - RNA, 19 nt, Homo sapiens
  misc_RNA (1)...(19): siRNA sense strand
gaaacacgacagugagaug

SEQ ID NO: 803261 - RNA, 19 nt, Homo sapiens
  misc_RNA (1)...(19): siRNA sense strand
gaagaauguggagagaaua

SEQ ID NO: 803262 - RNA, 19 nt, Homo sapiens
  misc_RNA (1)...(19): siRNA sense strand
ugaaacaaauggauaacag

SEQ ID NO: 803263 - RNA, 19 nt, Homo sapiens
  misc_RNA (1)...(19): siRNA sense strand
gaaaccacaagaaugagaa

SEQ ID NO: 803264 - RNA, 19 nt, Homo sapiens
  misc_RNA (1)...(19): siRNA sense strand
ggagugcugcgaugaagaa

SEQ ID NO: 803265 - RNA, 19 nt, Homo sapiens
  misc_RNA (1)...(19): siRNA sense strand
gagaauagagaaaggaagu

SEQ ID NO: 803266 - RNA, 19 nt, Homo sapiens
  misc_RNA (1)...(19): siRNA sense strand
uaucggcgcugcaagcaau

SEQ ID NO: 803267 - RNA, 19 nt, Homo sapiens
  misc_RNA (1)...(19): siRNA sense strand
gagaaaggaagugcaaguu

SEQ ID NO: 803268 - RNA, 19 nt, Homo sapiens
  misc_RNA (1)...(19): siRNA sense strand
cuagagaacagaaucagaa

SEQ ID NO: 803269 - RNA, 19 nt, Homo sapiens
  misc_RNA (1)...(19): siRNA sense strand
gaaugagaaaccggaauuu

SEQ ID NO: 803270 - RNA, 19 nt, Homo sapiens
  misc_RNA (1)...(19): siRNA sense strand
uagagucaaccaaugcuua

SEQ ID NO: 803271 - RNA, 19 nt, Homo sapiens
  misc_RNA (1)...(19): siRNA sense strand
aagauaagauggaagaaac

SEQ ID NO: 803272 - RNA, 19 nt, Homo sapiens
  misc_RNA (1)...(19): siRNA sense strand
cagcuugccaggaucauaa

SEQ ID NO: 803273 - RNA, 19 nt, Homo sapiens
  misc_RNA (1)...(19): siRNA sense strand
uggagacccuuguagaaga

SEQ ID NO: 803274 - RNA, 19 nt, Homo sapiens
  misc_RNA (1)...(19): siRNA sense strand
gcuauaagaaaccacaaga

SEQ ID NO: 803275 - RNA, 19 nt, Homo sapiens
  misc_RNA (1)...(19): siRNA sense strand
gagagaauagagaaaggaa

SEQ ID NO: 803276 - RNA, 19 nt, Homo sapiens
  misc_RNA (1)...(19): siRNA sense strand
aaaggaagugcaaguuaaa

SEQ ID NO: 803277 - RNA, 19 nt, Homo sapiens
  misc_RNA (1)...(19): siRNA sense strand
gcacagauaaagaacaaac

SEQ ID NO: 803278 - RNA, 19 nt, Homo sapiens
  misc_RNA (1)...(19): siRNA sense strand
gcgaguaaauagagucaac

SEQ ID NO: 803279 - RNA, 19 nt, Homo sapiens
  misc_RNA (1)...(19): siRNA sense strand
ccagucagacaaagaagaa

SEQ ID NO: 803280 - RNA, 19 nt, Homo sapiens
  misc_RNA (1)...(19): siRNA sense strand
caggaggacugggaaagga

SEQ ID NO: 803281 - RNA, 19 nt, Homo sapiens
  misc_RNA (1)...(19): siRNA sense strand
gcgcaaagagcgaaauuuu

SEQ ID NO: 803282 - RNA, 19 nt, Homo sapiens
  misc_RNA (1)...(19): siRNA sense strand
ugaaaagucuggcuacuag

SEQ ID NO: 803283 - RNA, 19 nt, Homo sapiens
  misc_RNA (1)...(19): siRNA sense strand
ugagaguggugggaagauu

SEQ ID NO: 803284 - RNA, 19 nt, Homo sapiens
  misc_RNA (1)...(19): siRNA sense strand
gaaaacaaacugccuaugg

SEQ ID NO: 803285 - RNA, 19 nt, Homo sapiens
  misc_RNA (1)...(19): siRNA sense strand
ggaaaaguuugaacgaagu

SEQ ID NO: 803286 - RNA, 19 nt, Homo sapiens
  misc_RNA (1)...(19): siRNA sense strand
cauccugcaucaacuagug

SEQ ID NO: 803287 - RNA, 19 nt, Homo sapiens
  misc_RNA (1)...(19): siRNA sense strand
ggaacaagugcaacucaca

SEQ ID NO: 803288 - RNA, 19 nt, Homo sapiens
  misc_RNA (1)...(19): siRNA sense strand
agaaugagaaaccggaauu

SEQ ID NO: 803289 - RNA, 19 nt, Homo sapiens
  misc_RNA (1)...(19): siRNA sense strand
ccacucaguccugcgcuua

SEQ ID NO: 803290 - RNA, 19 nt, Homo sapiens
  misc_RNA (1)...(19): siRNA sense strand
ggacacaaagagagcacuu

SEQ ID NO: 803291 - RNA, 19 nt, Homo sapiens
  misc_RNA (1)...(19): siRNA sense strand
caaaagcgagaacaaaauu

SEQ ID NO: 803292 - RNA, 19 nt, Homo sapiens
  misc_RNA (1)...(19): siRNA sense strand
gaaggcaccagagauaucu

SEQ ID NO: 803293 - RNA, 19 nt, Homo sapiens
  misc_RNA (1)...(19): siRNA sense strand
ggagagaauagagaaagga

SEQ ID NO: 803294 - RNA, 19 nt, Homo sapiens
  misc_RNA (1)...(19): siRNA sense strand
cugccaaagugacaaaugu

SEQ ID NO: 803295 - RNA, 19 nt, Homo sapiens
  misc_RNA (1)...(19): siRNA sense strand
ccucugagcccaucuuugg

SEQ ID NO: 803296 - RNA, 19 nt, Homo sapiens
  misc_RNA (1)...(19): siRNA sense strand
uauggagacccuuguagaa

SEQ ID NO: 803297 - RNA, 19 nt, Homo sapiens
  misc_RNA (1)...(19): siRNA sense strand
auaagaaaccacaagaaug

SEQ ID NO: 803298 - RNA, 19 nt, Homo sapiens
  misc_RNA (1)...(19): siRNA sense strand
aaaacaaacugccuaugga

SEQ ID NO: 803299 - RNA, 19 nt, Homo sapiens
  misc_RNA (1)...(19): siRNA sense strand
uaugaccccugaaagcuua

SEQ ID NO: 803300 - RNA, 19 nt, Homo sapiens
  misc_RNA (1)...(19): siRNA sense strand
gcucccgguugcuugugua

SEQ ID NO: 803301 - RNA, 19 nt, Homo sapiens
  misc_RNA (1)...(19): siRNA sense strand
caaggcaggacagaugaaa

SEQ ID NO: 803302 - RNA, 19 nt, Homo sapiens
  misc_RNA (1)...(19): siRNA sense strand
augcacagauaaagaacaa

SEQ ID NO: 803303 - RNA, 19 nt, Homo sapiens
  misc_RNA (1)...(19): siRNA sense strand
aaacacgacagugagauga

SEQ ID NO: 803304 - RNA, 19 nt, Homo sapiens
  misc_RNA (1)...(19): siRNA sense strand
agagagcacuuggcagaca

SEQ ID NO: 803305 - RNA, 19 nt, Homo sapiens
  misc_RNA (1)...(19): siRNA sense strand
gcaaaagcgagaacaaaau

SEQ ID NO: 803306 - RNA, 19 nt, Homo sapiens
  misc_RNA (1)...(19): siRNA sense strand
gcaacucacagaggaacuu

SEQ ID NO: 803307 - RNA, 19 nt, Homo sapiens
  misc_RNA (1)...(19): siRNA sense strand
aaugcugccuauaaucuug

SEQ ID NO: 803308 - RNA, 19 nt, Homo sapiens
  misc_RNA (1)...(19): siRNA sense strand
uaaaagaccagucagacaa

SEQ ID NO: 803309 - RNA, 19 nt, Homo sapiens
  misc_RNA (1)...(19): siRNA sense strand
uagagaacagaaucagaaa

SEQ ID NO: 803310 - RNA, 19 nt, Homo sapiens
  misc_RNA (1)...(19): siRNA sense strand
uauccaaguugucugaaac

SEQ ID NO: 803311 - RNA, 19 nt, Homo sapiens
  misc_RNA (1)...(19): siRNA sense strand
uugcugaagcuauaagaaa

SEQ ID NO: 803312 - RNA, 19 nt, Homo sapiens
  misc_RNA (1)...(19): siRNA sense strand
uggaugcacagauaaagaa

SEQ ID NO: 803313 - RNA, 19 nt, Homo sapiens
  misc_RNA (1)...(19): siRNA sense strand
guugauggaccgccuggaa

SEQ ID NO: 803314 - RNA, 19 nt, Homo sapiens
  misc_RNA (1)...(19): siRNA sense strand
gacaauacagagaguugau

SEQ ID NO: 803315 - RNA, 19 nt, Homo sapiens
  misc_RNA (1)...(19): siRNA sense strand
ugacaaacggccacucagu

SEQ ID NO: 803316 - RNA, 19 nt, Homo sapiens
  misc_RNA (1)...(19): siRNA sense strand
gagaaaccggaauuuuaua

SEQ ID NO: 803317 - RNA, 19 nt, Homo sapiens
  misc_RNA (1)...(19): siRNA sense strand
cuuaucauauccaaguugu

SEQ ID NO: 803318 - RNA, 19 nt, Homo sapiens
  misc_RNA (1)...(19): siRNA sense strand
ggaagugcaaguuaaaaga

SEQ ID NO: 803319 - RNA, 19 nt, Homo sapiens
  misc_RNA (1)...(19): siRNA sense strand
agcuuuggaugcacagaua

SEQ ID NO: 803320 - RNA, 19 nt, Homo sapiens
  misc_RNA (1)...(19): siRNA sense strand
agaccagucagacaaagaa

SEQ ID NO: 803321 - RNA, 19 nt, Homo sapiens
  misc_RNA (1)...(19): siRNA sense strand
gaauguggagagaauagag

SEQ ID NO: 803322 - RNA, 19 nt, Homo sapiens
  misc_RNA (1)...(19): siRNA sense strand
ggaguugcugaagcuauaa

SEQ ID NO: 803323 - RNA, 19 nt, Homo sapiens
  misc_RNA (1)...(19): siRNA sense strand
aagcuuaucauauccaagu

SEQ ID NO: 803324 - RNA, 19 nt, Homo sapiens
  misc_RNA (1)...(19): siRNA sense strand
agaccagugugagaaguau

SEQ ID NO: 803325 - RNA, 19 nt, Homo sapiens
  misc_RNA (1)...(19): siRNA sense strand
gagcgaguaaauagaguca

SEQ ID NO: 803326 - RNA, 19 nt, Homo sapiens
  misc_RNA (1)...(19): siRNA sense strand
cugagcccaucuuugguaa

SEQ ID NO: 803327 - RNA, 19 nt, Homo sapiens
  misc_RNA (1)...(19): siRNA sense strand
ucugagcccaucuuuggua

SEQ ID NO: 803328 - RNA, 19 nt, Homo sapiens
  misc_RNA (1)...(19): siRNA sense strand
aaagcaaagacaauacaga

SEQ ID NO: 803329 - RNA, 19 nt, Homo sapiens
  misc_RNA (1)...(19): siRNA sense strand
uaacagacaggaaaacgaa

SEQ ID NO: 803330 - RNA, 19 nt, Homo sapiens
  misc_RNA (1)...(19): siRNA sense strand
uuaagcaagaggaauauuc

SEQ ID NO: 803331 - RNA, 19 nt, Homo sapiens
  misc_RNA (1)...(19): siRNA sense strand
aagaagaaggcaccagaga

SEQ ID NO: 803332 - RNA, 19 nt, Homo sapiens
  misc_RNA (1)...(19): siRNA sense strand
ucauauccaaguugucuga

SEQ ID NO: 803333 - RNA, 19 nt, Homo sapiens
  misc_RNA (1)...(19): siRNA sense strand
ugagaaaccggaauuuuau

SEQ ID NO: 803334 - RNA, 19 nt, Homo sapiens
  misc_RNA (1)...(19): siRNA sense strand
agcgagaccuggaggacaa

SEQ ID NO: 803335 - RNA, 19 nt, Homo sapiens
  misc_RNA (1)...(19): siRNA sense strand
aaaggagugcugcgaugaa

SEQ ID NO: 803336 - RNA, 19 nt, Homo sapiens
  misc_RNA (1)...(19): siRNA sense strand
gcugagcuggagcgaguaa

SEQ ID NO: 803337 - RNA, 19 nt, Homo sapiens
  misc_RNA (1)...(19): siRNA sense strand
uaagaaugagggugaacug

SEQ ID NO: 803338 - RNA, 19 nt, Homo sapiens
  misc_RNA (1)...(19): siRNA sense strand
gaaagaagauuuggcuuga

SEQ ID NO: 803339 - RNA, 19 nt, Homo sapiens
  misc_RNA (1)...(19): siRNA sense strand
gcaguuaccuggcaacauu

SEQ ID NO: 803340 - RNA, 19 nt, Homo sapiens
  misc_RNA (1)...(19): siRNA sense strand
gaagugauguugccuuaga

SEQ ID NO: 803341 - RNA, 19 nt, Homo sapiens
  misc_RNA (1)...(19): siRNA sense strand
cagaaaggcugcaagauug

SEQ ID NO: 803342 - RNA, 19 nt, Homo sapiens
  misc_RNA (1)...(19): siRNA sense strand
guaaugagccaaauaacua

SEQ ID NO: 803343 - RNA, 19 nt, Homo sapiens
  misc_RNA (1)...(19): siRNA sense strand
agacagagcugcagguuug

SEQ ID NO: 803344 - RNA, 19 nt, Homo sapiens
  misc_RNA (1)...(19): siRNA sense strand
caacauugcuacauugaug

SEQ ID NO: 803345 - RNA, 19 nt, Homo sapiens
  misc_RNA (1)...(19): siRNA sense strand
gggcauugaugucgugaua

SEQ ID NO: 803346 - RNA, 19 nt, Homo sapiens
  misc_RNA (1)...(19): siRNA sense strand
ucaagaaugucaaugcuuu

SEQ ID NO: 803347 - RNA, 19 nt, Homo sapiens
  misc_RNA (1)...(19): siRNA sense strand
gagcaauucuccaauacuu

SEQ ID NO: 803348 - RNA, 19 nt, Homo sapiens
  misc_RNA (1)...(19): siRNA sense strand
gggacaaacuaaggauuua

SEQ ID NO: 803349 - RNA, 19 nt, Homo sapiens
  misc_RNA (1)...(19): siRNA sense strand
gaaagugguuaauacauac

SEQ ID NO: 803350 - RNA, 19 nt, Homo sapiens
  misc_RNA (1)...(19): siRNA sense strand
gcaggauucuuaugguuga

SEQ ID NO: 803351 - RNA, 19 nt, Homo sapiens
  misc_RNA (1)...(19): siRNA sense strand
uaaaugcacugcgucguaa

SEQ ID NO: 803352 - RNA, 19 nt, Homo sapiens
  misc_RNA (1)...(19): siRNA sense strand
caugauggcuggcucgauu

SEQ ID NO: 803353 - RNA, 19 nt, Homo sapiens
  misc_RNA (1)...(19): siRNA sense strand
ggacuccaccugauauuug

SEQ ID NO: 803354 - RNA, 19 nt, Homo sapiens
  misc_RNA (1)...(19): siRNA sense strand
guugaacacuuuaggaaug

SEQ ID NO: 803355 - RNA, 19 nt, Homo sapiens
  misc_RNA (1)...(19): siRNA sense strand
ucgaagugauguugccuua

SEQ ID NO: 803356 - RNA, 19 nt, Homo sapiens
  misc_RNA (1)...(19): siRNA sense strand
gaaggcagcucagaugcau

SEQ ID NO: 803357 - RNA, 19 nt, Homo sapiens
  misc_RNA (1)...(19): siRNA sense strand
ggagaaggcagcucagaug

SEQ ID NO: 803358 - RNA, 19 nt, Homo sapiens
  misc_RNA (1)...(19): siRNA sense strand
ggaccgacuuccugcaguu

SEQ ID NO: 803359 - RNA, 19 nt, Homo sapiens
  misc_RNA (1)...(19): siRNA sense strand
gcacaaaccaccacaacca

SEQ ID NO: 803360 - RNA, 19 nt, Homo sapiens
  misc_RNA (1)...(19): siRNA sense strand
caacauuucuugggaacug

SEQ ID NO: 803361 - RNA, 19 nt, Homo sapiens
  misc_RNA (1)...(19): siRNA sense strand
ccugaaaacucgccuguua

SEQ ID NO: 803362 - RNA, 19 nt, Homo sapiens
  misc_RNA (1)...(19): siRNA sense strand
gaaaagacccugauucuac

SEQ ID NO: 803363 - RNA, 19 nt, Homo sapiens
  misc_RNA (1)...(19): siRNA sense strand
uaggaaugcuggccaauca

SEQ ID NO: 803364 - RNA, 19 nt, Homo sapiens
  misc_RNA (1)...(19): siRNA sense strand
caccugauauuugcucuaa

SEQ ID NO: 803365 - RNA, 19 nt, Homo sapiens
  misc_RNA (1)...(19): siRNA sense strand
acagaaaggcugcaagauu

SEQ ID NO: 803366 - RNA, 19 nt, Homo sapiens
  misc_RNA (1)...(19): siRNA sense strand
gaaguacagcgccagcaaa

SEQ ID NO: 803367 - RNA, 19 nt, Homo sapiens
  misc_RNA (1)...(19): siRNA sense strand
uugcaucgaucaagaaaga

SEQ ID NO: 803368 - RNA, 19 nt, Homo sapiens
  misc_RNA (1)...(19): siRNA sense strand
ggugauggacuuccugaaa

SEQ ID NO: 803369 - RNA, 19 nt, Homo sapiens
  misc_RNA (1)...(19): siRNA sense strand
cccaauaacuccuggaaca

SEQ ID NO: 803370 - RNA, 19 nt, Homo sapiens
  misc_RNA (1)...(19): siRNA sense strand
cagcuuauauggcccuaau

SEQ ID NO: 803371 - RNA, 19 nt, Homo sapiens
  misc_RNA (1)...(19): siRNA sense strand
gcccagcacccugauguua

SEQ ID NO: 803372 - RNA, 19 nt, Homo sapiens
  misc_RNA (1)...(19): siRNA sense strand
ccuccuagauggauucaug

SEQ ID NO: 803373 - RNA, 19 nt, Homo sapiens
  misc_RNA (1)...(19): siRNA sense strand
ugccuuagauaaacagaaa

SEQ ID NO: 803374 - RNA, 19 nt, Homo sapiens
  misc_RNA (1)...(19): siRNA sense strand
aaacagaaaggcugcaaga

SEQ ID NO: 803375 - RNA, 19 nt, Homo sapiens
  misc_RNA (1)...(19): siRNA sense strand
ucaggacagucaaugagaa

SEQ ID NO: 803376 - RNA, 19 nt, Homo sapiens
  misc_RNA (1)...(19): siRNA sense strand
gaagguggcaggaaguaca

SEQ ID NO: 803377 - RNA, 19 nt, Homo sapiens
  misc_RNA (1)...(19): siRNA sense strand
cuaaaugcacugcgucgua

SEQ ID NO: 803378 - RNA, 19 nt, Homo sapiens
  misc_RNA (1)...(19): siRNA sense strand
ccagcacccugauguuaug

SEQ ID NO: 803379 - RNA, 19 nt, Homo sapiens
  misc_RNA (1)...(19): siRNA sense strand
gauguugccuuagauaaac

SEQ ID NO: 803380 - RNA, 19 nt, Homo sapiens
  misc_RNA (1)...(19): siRNA sense strand
ucuuaugguugaacacuuu

SEQ ID NO: 803381 - RNA, 19 nt, Homo sapiens
  misc_RNA (1)...(19): siRNA sense strand
gcaucugguucuucuaaag

SEQ ID NO: 803382 - RNA, 19 nt, Homo sapiens
  misc_RNA (1)...(19): siRNA sense strand
gcaauucuccaauacuuac

SEQ ID NO: 803383 - RNA, 19 nt, Homo sapiens
  misc_RNA (1)...(19): siRNA sense strand
ggacagucaaugagaacuu

SEQ ID NO: 803384 - RNA, 19 nt, Homo sapiens
  misc_RNA (1)...(19): siRNA sense strand
cuaugaggaugacauuguu

SEQ ID NO: 803385 - RNA, 19 nt, Homo sapiens
  misc_RNA (1)...(19): siRNA sense strand
gacagucaaugagaacuuc

SEQ ID NO: 803386 - RNA, 19 nt, Homo sapiens
  misc_RNA (1)...(19): siRNA sense strand
cuugggaacuggguaauga

SEQ ID NO: 803387 - RNA, 19 nt, Homo sapiens
  misc_RNA (1)...(19): siRNA sense strand
ggagacccuugccuguaga

SEQ ID NO: 803388 - RNA, 19 nt, Homo sapiens
  misc_RNA (1)...(19): siRNA sense strand
cuuuauaacucugcugauu

SEQ ID NO: 803389 - RNA, 19 nt, Homo sapiens
  misc_RNA (1)...(19): siRNA sense strand
gcaucgaucaagaaagaaa

SEQ ID NO: 803390 - RNA, 19 nt, Homo sapiens
  misc_RNA (1)...(19): siRNA sense strand
gacaaacuaaggauuuaug

SEQ ID NO: 803391 - RNA, 19 nt, Homo sapiens
  misc_RNA (1)...(19): siRNA sense strand
ggacaaacuaaggauuuau

SEQ ID NO: 803392 - RNA, 19 nt, Homo sapiens
  misc_RNA (1)...(19): siRNA sense strand
ggcaggaaguacaguagau

SEQ ID NO: 803393 - RNA, 19 nt, Homo sapiens
  misc_RNA (1)...(19): siRNA sense strand
cccugagucuguugaagua

SEQ ID NO: 803394 - RNA, 19 nt, Homo sapiens
  misc_RNA (1)...(19): siRNA sense strand
ggucaagaaugucaaugcu

SEQ ID NO: 803395 - RNA, 19 nt, Homo sapiens
  misc_RNA (1)...(19): siRNA sense strand
aagaagauuuggcuugaag

SEQ ID NO: 803396 - RNA, 19 nt, Homo sapiens
  misc_RNA (1)...(19): siRNA sense strand
auacauacacuccaggaaa

SEQ ID NO: 803397 - RNA, 19 nt, Homo sapiens
  misc_RNA (1)...(19): siRNA sense strand
ggaugacauuguucgaagu

SEQ ID NO: 803398 - RNA, 19 nt, Homo sapiens
  misc_RNA (1)...(19): siRNA sense strand
gcauugaugucgugauacg

SEQ ID NO: 803399 - RNA, 19 nt, Homo sapiens
  misc_RNA (1)...(19): siRNA sense strand
aaagaagauuuggcuugaa

SEQ ID NO: 803400 - RNA, 19 nt, Homo sapiens
  misc_RNA (1)...(19): siRNA sense strand
gauuacauccagcugaaga

SEQ ID NO: 803401 - RNA, 19 nt, Homo sapiens
  misc_RNA (1)...(19): siRNA sense strand
aaacuaugaggaugacauu

SEQ ID NO: 803402 - RNA, 19 nt, Homo sapiens
  misc_RNA (1)...(19): siRNA sense strand
gcugcagguuugaaggaaa

SEQ ID NO: 803403 - RNA, 19 nt, Homo sapiens
  misc_RNA (1)...(19): siRNA sense strand
ugauguugccuuagauaaa

SEQ ID NO: 803404 - RNA, 19 nt, Homo sapiens
  misc_RNA (1)...(19): siRNA sense strand
ccacaaccacaacuacguu

SEQ ID NO: 803405 - RNA, 19 nt, Homo sapiens
  misc_RNA (1)...(19): siRNA sense strand
cgggacaaacuaaggauuu

SEQ ID NO: 803406 - RNA, 19 nt, Homo sapiens
  misc_RNA (1)...(19): siRNA sense strand
gguaaugagccaaauaacu

SEQ ID NO: 803407 - RNA, 19 nt, Homo sapiens
  misc_RNA (1)...(19): siRNA sense strand
gaggaugacauuguucgaa

SEQ ID NO: 803408 - RNA, 19 nt, Homo sapiens
  misc_RNA (1)...(19): siRNA sense strand
cgugauacggcacucauuu

SEQ ID NO: 803409 - RNA, 19 nt, Homo sapiens
  misc_RNA (1)...(19): siRNA sense strand
gaaugucaucgcccuccua

SEQ ID NO: 803410 - RNA, 19 nt, Homo sapiens
  misc_RNA (1)...(19): siRNA sense strand
gcagccaguugggaaagga

SEQ ID NO: 803411 - RNA, 19 nt, Homo sapiens
  misc_RNA (1)...(19): siRNA sense strand
ugacauuguucgaagugau

SEQ ID NO: 803412 - RNA, 19 nt, Homo sapiens
  misc_RNA (1)...(19): siRNA sense strand
cagcccauccggauuuauu

SEQ ID NO: 803413 - RNA, 19 nt, Homo sapiens
  misc_RNA (1)...(19): siRNA sense strand
gaagauuuggcuugaaggu

SEQ ID NO: 803414 - RNA, 19 nt, Homo sapiens
  misc_RNA (1)...(19): siRNA sense strand
uacauacacuccaggaaag

SEQ ID NO: 803415 - RNA, 19 nt, Homo sapiens
  misc_RNA (1)...(19): siRNA sense strand
gugauggacuuccugaaaa

SEQ ID NO: 803416 - RNA, 19 nt, Homo sapiens
  misc_RNA (1)...(19): siRNA sense strand
ggaaaagacccugauucua

SEQ ID NO: 803417 - RNA, 19 nt, Homo sapiens
  misc_RNA (1)...(19): siRNA sense strand
ugucaucgcccuccuagau

SEQ ID NO: 803418 - RNA, 19 nt, Homo sapiens
  misc_RNA (1)...(19): siRNA sense strand
gagcugcagguuugaagga

SEQ ID NO: 803419 - RNA, 19 nt, Homo sapiens
  misc_RNA (1)...(19): siRNA sense strand
ucagaaagugguuaauaca

SEQ ID NO: 803420 - RNA, 19 nt, Homo sapiens
  misc_RNA (1)...(19): siRNA sense strand
uaacagccaggucucuaga

SEQ ID NO: 803421 - RNA, 19 nt, Homo sapiens
  misc_RNA (1)...(19): siRNA sense strand
gugauguugccuuagauaa

SEQ ID NO: 803422 - RNA, 19 nt, Homo sapiens
  misc_RNA (1)...(19): siRNA sense strand
caaaccaccacaaccacaa

SEQ ID NO: 803423 - RNA, 19 nt, Homo sapiens
  misc_RNA (1)...(19): siRNA sense strand
ggaggcacaaacaaucuau

SEQ ID NO: 803424 - RNA, 19 nt, Homo sapiens
  misc_RNA (1)...(19): siRNA sense strand
gcaggaaguacaguagaug

SEQ ID NO: 803425 - RNA, 19 nt, Homo sapiens
  misc_RNA (1)...(19): siRNA sense strand
uuccagagccagcuuauau

SEQ ID NO: 803426 - RNA, 19 nt, Homo sapiens
  misc_RNA (1)...(19): siRNA sense strand
uggguaaugagccaaauaa

SEQ ID NO: 803427 - RNA, 19 nt, Homo sapiens
  misc_RNA (1)...(19): siRNA sense strand
cugcaggauucuuaugguu

SEQ ID NO: 803428 - RNA, 19 nt, Homo sapiens
  misc_RNA (1)...(19): siRNA sense strand
ggccugccgcuaccgauaa

SEQ ID NO: 803429 - RNA, 19 nt, Homo sapiens
  misc_RNA (1)...(19): siRNA sense strand
caagaaugucaaugcuuug

SEQ ID NO: 803430 - RNA, 19 nt, Homo sapiens
  misc_RNA (1)...(19): siRNA sense strand
ggauucuuaugguugaaca

SEQ ID NO: 803431 - RNA, 19 nt, Homo sapiens
  misc_RNA (1)...(19): siRNA sense strand
gaugacauuguucgaagug

SEQ ID NO: 803432 - RNA, 19 nt, Homo sapiens
  misc_RNA (1)...(19): siRNA sense strand
gaauggccagcccuuagug

SEQ ID NO: 803433 - RNA, 19 nt, Homo sapiens
  misc_RNA (1)...(19): siRNA sense strand
ccagaauuuuaacccauua

SEQ ID NO: 803434 - RNA, 19 nt, Homo sapiens
  misc_RNA (1)...(19): siRNA sense strand
uuauaacucugcugauugc

SEQ ID NO: 803435 - RNA, 19 nt, Homo sapiens
  misc_RNA (1)...(19): siRNA sense strand
gccaguugggaaaggauua

SEQ ID NO: 803436 - RNA, 19 nt, Homo sapiens
  misc_RNA (1)...(19): siRNA sense strand
gcugcaggauucuuauggu

SEQ ID NO: 803437 - RNA, 19 nt, Homo sapiens
  misc_RNA (1)...(19): siRNA sense strand
gcuggaggcacaaacaauc

SEQ ID NO: 803438 - RNA, 19 nt, Homo sapiens
  misc_RNA (1)...(19): siRNA sense strand
gggaagugcugcaagauuu

SEQ ID NO: 803439 - RNA, 19 nt, Homo sapiens
  misc_RNA (1)...(19): siRNA sense strand
gcaaagaugaggcaaguga

SEQ ID NO: 803440 - RNA, 19 nt, Homo sapiens
  misc_RNA (1)...(19): siRNA sense strand
gcacagagggccagaucua

SEQ ID NO: 803441 - RNA, 19 nt, Homo sapiens
  misc_RNA (1)...(19): siRNA sense strand
gcaaugcugucccaagugu

SEQ ID NO: 803442 - RNA, 19 nt, Homo sapiens
  misc_RNA (1)...(19): siRNA sense strand
gccagaaucuuccacuuga

SEQ ID NO: 803443 - RNA, 19 nt, Homo sapiens
  misc_RNA (1)...(19): siRNA sense strand
ugacucagaucaagaaagu

SEQ ID NO: 803444 - RNA, 19 nt, Homo sapiens
  misc_RNA (1)...(19): siRNA sense strand
gaaggagaaacauaagaaa

SEQ ID NO: 803445 - RNA, 19 nt, Homo sapiens
  misc_RNA (1)...(19): siRNA sense strand
cagcacaacugucaagauc

SEQ ID NO: 803446 - RNA, 19 nt, Homo sapiens
  misc_RNA (1)...(19): siRNA sense strand
caagugagcaaucggauga

SEQ ID NO: 803447 - RNA, 19 nt, Homo sapiens
  misc_RNA (1)...(19): siRNA sense strand
gcacaacugucaagaucgu

SEQ ID NO: 803448 - RNA, 19 nt, Homo sapiens
  misc_RNA (1)...(19): siRNA sense strand
gaccaagacauaacaaaga

SEQ ID NO: 803449 - RNA, 19 nt, Homo sapiens
  misc_RNA (1)...(19): siRNA sense strand
uaagaaagccugugugcau

SEQ ID NO: 803450 - RNA, 19 nt, Homo sapiens
  misc_RNA (1)...(19): siRNA sense strand
gaaagaggcacagcacuuc

SEQ ID NO: 803451 - RNA, 19 nt, Homo sapiens
  misc_RNA (1)...(19): siRNA sense strand
ccacacagccagaaucuuc

SEQ ID NO: 803452 - RNA, 19 nt, Homo sapiens
  misc_RNA (1)...(19): siRNA sense strand
caaagugaccaagacauaa

SEQ ID NO: 803453 - RNA, 19 nt, Homo sapiens
  misc_RNA (1)...(19): siRNA sense strand
acaaagugaccaagacaua

SEQ ID NO: 803454 - RNA, 19 nt, Homo sapiens
  misc_RNA (1)...(19): siRNA sense strand
gcgcccaugugaguuguua

SEQ ID NO: 803455 - RNA, 19 nt, Homo sapiens
  misc_RNA (1)...(19): siRNA sense strand
gcugggaagugcugcaaga

SEQ ID NO: 803456 - RNA, 19 nt, Homo sapiens
  misc_RNA (1)...(19): siRNA sense strand
gcaggcagcacaacuguca

SEQ ID NO: 803457 - RNA, 19 nt, Homo sapiens
  misc_RNA (1)...(19): siRNA sense strand
ugaaggagaaacauaagaa

SEQ ID NO: 803458 - RNA, 19 nt, Homo sapiens
  misc_RNA (1)...(19): siRNA sense strand
cacaaggccugauguacug

SEQ ID NO: 803459 - RNA, 19 nt, Homo sapiens
  misc_RNA (1)...(19): siRNA sense strand
aagcaagacuuccagaaag

SEQ ID NO: 803460 - RNA, 19 nt, Homo sapiens
  misc_RNA (1)...(19): siRNA sense strand
ugacggagccacagcaaug

SEQ ID NO: 803461 - RNA, 19 nt, Homo sapiens
  misc_RNA (1)...(19): siRNA sense strand
gaucuucagugcccaugag

SEQ ID NO: 803462 - RNA, 19 nt, Homo sapiens
  misc_RNA (1)...(19): siRNA sense strand
ggaagugcugcaagauuug

SEQ ID NO: 803463 - RNA, 19 nt, Homo sapiens
  misc_RNA (1)...(19): siRNA sense strand
cuucaucccucgccacuuc

SEQ ID NO: 803464 - RNA, 19 nt, Homo sapiens
  misc_RNA (1)...(19): siRNA sense strand
ucaagaaagucaggaagca

SEQ ID NO: 803465 - RNA, 19 nt, Homo sapiens
  misc_RNA (1)...(19): siRNA sense strand
gauccauguuccagugaug

SEQ ID NO: 803466 - RNA, 19 nt, Homo sapiens
  misc_RNA (1)...(19): siRNA sense strand
agacauaacaaagaccuaa

SEQ ID NO: 803467 - RNA, 19 nt, Homo sapiens
  misc_RNA (1)...(19): siRNA sense strand
ccacaaggccugauguacu

SEQ ID NO: 803468 - RNA, 19 nt, Homo sapiens
  misc_RNA (1)...(19): siRNA sense strand
ugaccugucccaccgagua

SEQ ID NO: 803469 - RNA, 19 nt, Homo sapiens
  misc_RNA (1)...(19): siRNA sense strand
gcacaacgggaccauguac

SEQ ID NO: 803470 - RNA, 19 nt, Homo sapiens
  misc_RNA (1)...(19): siRNA sense strand
ugccaggccugcaaagaug

SEQ ID NO: 803471 - RNA, 19 nt, Homo sapiens
  misc_RNA (1)...(19): siRNA sense strand
agaaagaggcacagcacuu

SEQ ID NO: 803472 - RNA, 19 nt, Homo sapiens
  misc_RNA (1)...(19): siRNA sense strand
agcaagacuuccagaaaga

SEQ ID NO: 803473 - RNA, 19 nt, Homo sapiens
  misc_RNA (1)...(19): siRNA sense strand
uaaaagaugaggaaacuga

SEQ ID NO: 803474 - RNA, 19 nt, Homo sapiens
  misc_RNA (1)...(19): siRNA sense strand
gacucgcgcugcucugguu

SEQ ID NO: 803475 - RNA, 19 nt, Homo sapiens
  misc_RNA (1)...(19): siRNA sense strand
gagcaggcagcacaacugu

SEQ ID NO: 803476 - RNA, 19 nt, Homo sapiens
  misc_RNA (1)...(19): siRNA sense strand
ucuggaagcugguaaaaga

SEQ ID NO: 803477 - RNA, 19 nt, Homo sapiens
  misc_RNA (1)...(19): siRNA sense strand
acagugagaucaguucuac

SEQ ID NO: 803478 - RNA, 19 nt, Homo sapiens
  misc_RNA (1)...(19): siRNA sense strand
guaccaacacggagagauc

SEQ ID NO: 803479 - RNA, 19 nt, Homo sapiens
  misc_RNA (1)...(19): siRNA sense strand
cugcaaagaugaggcaagu

SEQ ID NO: 803480 - RNA, 19 nt, Homo sapiens
  misc_RNA (1)...(19): siRNA sense strand
ccagacaaagugaccaaga

SEQ ID NO: 803481 - RNA, 19 nt, Homo sapiens
  misc_RNA (1)...(19): siRNA sense strand
gcagcacaacugucaagau

SEQ ID NO: 803482 - RNA, 19 nt, Homo sapiens
  misc_RNA (1)...(19): siRNA sense strand
cagcacaacgggaccaugu

SEQ ID NO: 803483 - RNA, 19 nt, Homo sapiens
  misc_RNA (1)...(19): siRNA sense strand
cagacaaagugaccaagac

SEQ ID NO: 803484 - RNA, 19 nt, Homo sapiens
  misc_RNA (1)...(19): siRNA sense strand
cagccagaaucuuccacuu

SEQ ID NO: 803485 - RNA, 19 nt, Homo sapiens
  misc_RNA (1)...(19): siRNA sense strand
gguaaaagaugaggaaacu

SEQ ID NO: 803486 - RNA, 19 nt, Homo sapiens
  misc_RNA (1)...(19): siRNA sense strand
ggaagcugguaaaagauga

SEQ ID NO: 803487 - RNA, 19 nt, Homo sapiens
  misc_RNA (1)...(19): siRNA sense strand
ggagcaggcagcacaacug

SEQ ID NO: 803488 - RNA, 19 nt, Homo sapiens
  misc_RNA (1)...(19): siRNA sense strand
gaucuacugcggccucaca

SEQ ID NO: 803489 - RNA, 19 nt, Homo sapiens
  misc_RNA (1)...(19): siRNA sense strand
caagaaagucaggaagcaa

SEQ ID NO: 803490 - RNA, 19 nt, Homo sapiens
  misc_RNA (1)...(19): siRNA sense strand
caacacggagagaucuuca

SEQ ID NO: 803491 - RNA, 19 nt, Homo sapiens
  misc_RNA (1)...(19): siRNA sense strand
gcucagagaggugaaguac

SEQ ID NO: 803492 - RNA, 19 nt, Homo sapiens
  misc_RNA (1)...(19): siRNA sense strand
ggauccauguuccagugau

SEQ ID NO: 803493 - RNA, 19 nt, Homo sapiens
  misc_RNA (1)...(19): siRNA sense strand
cggacuugguggagaucua

SEQ ID NO: 803494 - RNA, 19 nt, Homo sapiens
  misc_RNA (1)...(19): siRNA sense strand
ugaccaagacauaacaaag

SEQ ID NO: 803495 - RNA, 19 nt, Homo sapiens
  misc_RNA (1)...(19): siRNA sense strand
gacccuggccacagugaga

SEQ ID NO: 803496 - RNA, 19 nt, Homo sapiens
  misc_RNA (1)...(19): siRNA sense strand
gaaucuuccacuugacuca

SEQ ID NO: 803497 - RNA, 19 nt, Homo sapiens
  misc_RNA (1)...(19): siRNA sense strand
gacaaccugcgucgcuuug

SEQ ID NO: 803498 - RNA, 19 nt, Homo sapiens
  misc_RNA (1)...(19): siRNA sense strand
ccucggacuugguggagau

SEQ ID NO: 803499 - RNA, 19 nt, Homo sapiens
  misc_RNA (1)...(19): siRNA sense strand
caacgggaccauguaccaa

SEQ ID NO: 803500 - RNA, 19 nt, Homo sapiens
  misc_RNA (1)...(19): siRNA sense strand
acucagaucaagaaaguca

SEQ ID NO: 803501 - RNA, 19 nt, Homo sapiens
  misc_RNA (1)...(19): siRNA sense strand
aaacaaagguugaugacua

SEQ ID NO: 803502 - RNA, 19 nt, Homo sapiens
  misc_RNA (1)...(19): siRNA sense strand
gaacgacgaugaagacaug

SEQ ID NO: 803503 - RNA, 19 nt, Homo sapiens
  misc_RNA (1)...(19): siRNA sense strand
cugaagagcucaagaaauu

SEQ ID NO: 803504 - RNA, 19 nt, Homo sapiens
  misc_RNA (1)...(19): siRNA sense strand
caacugaaauugugcagaa

SEQ ID NO: 803505 - RNA, 19 nt, Homo sapiens
  misc_RNA (1)...(19): siRNA sense strand
ccacugaacuuaucuggaa

SEQ ID NO: 803506 - RNA, 19 nt, Homo sapiens
  misc_RNA (1)...(19): siRNA sense strand
gaccagauguuuacuaaug

SEQ ID NO: 803507 - RNA, 19 nt, Homo sapiens
  misc_RNA (1)...(19): siRNA sense strand
gagaccagauguuuacuaa

SEQ ID NO: 803508 - RNA, 19 nt, Homo sapiens
  misc_RNA (1)...(19): siRNA sense strand
caaguugacuaucacauuu

SEQ ID NO: 803509 - RNA, 19 nt, Homo sapiens
  misc_RNA (1)...(19): siRNA sense strand
caaacggccuguacgauuu

SEQ ID NO: 803510 - RNA, 19 nt, Homo sapiens
  misc_RNA (1)...(19): siRNA sense strand
caacgcugcucauaaauau

SEQ ID NO: 803511 - RNA, 19 nt, Homo sapiens
  misc_RNA (1)...(19): siRNA sense strand
agaaggagcuugugcuaaa

SEQ ID NO: 803512 - RNA, 19 nt, Homo sapiens
  misc_RNA (1)...(19): siRNA sense strand
caucaaaccuccugaguuc

SEQ ID NO: 803513 - RNA, 19 nt, Homo sapiens
  misc_RNA (1)...(19): siRNA sense strand
gaagagcucaagaaauuaa

SEQ ID NO: 803514 - RNA, 19 nt, Homo sapiens
  misc_RNA (1)...(19): siRNA sense strand
gaacaauacacaacugaaa

SEQ ID NO: 803515 - RNA, 19 nt, Homo sapiens
  misc_RNA (1)...(19): siRNA sense strand
ugaaagcccugaaacuuga

SEQ ID NO: 803516 - RNA, 19 nt, Homo sapiens
  misc_RNA (1)...(19): siRNA sense strand
gaagaaagaaggccuguuc

SEQ ID NO: 803517 - RNA, 19 nt, Homo sapiens
  misc_RNA (1)...(19): siRNA sense strand
gaaaggaacacaacagcaa

SEQ ID NO: 803518 - RNA, 19 nt, Homo sapiens
  misc_RNA (1)...(19): siRNA sense strand
ucccagagcuauucaagua

SEQ ID NO: 803519 - RNA, 19 nt, Homo sapiens
  misc_RNA (1)...(19): siRNA sense strand
gcaagucacugcccugcuu

SEQ ID NO: 803520 - RNA, 19 nt, Homo sapiens
  misc_RNA (1)...(19): siRNA sense strand
ugucaacgcugcucauaaa

SEQ ID NO: 803521 - RNA, 19 nt, Homo sapiens
  misc_RNA (1)...(19): siRNA sense strand
gaaacaaccaacaauaaga

SEQ ID NO: 803522 - RNA, 19 nt, Homo sapiens
  misc_RNA (1)...(19): siRNA sense strand
gaggaaagccgaaggaaau

SEQ ID NO: 803523 - RNA, 19 nt, Homo sapiens
  misc_RNA (1)...(19): siRNA sense strand
gcaaacggccuguacgauu

SEQ ID NO: 803524 - RNA, 19 nt, Homo sapiens
  misc_RNA (1)...(19): siRNA sense strand
ucaagcagccucugagaua

SEQ ID NO: 803525 - RNA, 19 nt, Homo sapiens
  misc_RNA (1)...(19): siRNA sense strand
gcaggagggugaugaggaa

SEQ ID NO: 803526 - RNA, 19 nt, Homo sapiens
  misc_RNA (1)...(19): siRNA sense strand
gaagaguuaugagaaauca

SEQ ID NO: 803527 - RNA, 19 nt, Homo sapiens
  misc_RNA (1)...(19): siRNA sense strand
gggaggaauuagaacaaua

SEQ ID NO: 803528 - RNA, 19 nt, Homo sapiens
  misc_RNA (1)...(19): siRNA sense strand
guaaagaacgugugugaga

SEQ ID NO: 803529 - RNA, 19 nt, Homo sapiens
  misc_RNA (1)...(19): siRNA sense strand
ccacgucaauauuguguuu

SEQ ID NO: 803530 - RNA, 19 nt, Homo sapiens
  misc_RNA (1)...(19): siRNA sense strand
gaaaacacaugaugggaaa

SEQ ID NO: 803531 - RNA, 19 nt, Homo sapiens
  misc_RNA (1)...(19): siRNA sense strand
gaacguaaacacucgaaga

SEQ ID NO: 803532 - RNA, 19 nt, Homo sapiens
  misc_RNA (1)...(19): siRNA sense strand
ggaauuagaacaauacaca

SEQ ID NO: 803533 - RNA, 19 nt, Homo sapiens
  misc_RNA (1)...(19): siRNA sense strand
aggaggaagugaaccauua

SEQ ID NO: 803534 - RNA, 19 nt, Homo sapiens
  misc_RNA (1)...(19): siRNA sense strand
agaaggagaucaaggaugu

SEQ ID NO: 803535 - RNA, 19 nt, Homo sapiens
  misc_RNA (1)...(19): siRNA sense strand
caagaaagcccugaagaga

SEQ ID NO: 803536 - RNA, 19 nt, Homo sapiens
  misc_RNA (1)...(19): siRNA sense strand
guauaacccucuccucuuc

SEQ ID NO: 803537 - RNA, 19 nt, Homo sapiens
  misc_RNA (1)...(19): siRNA sense strand
aggaggagguugauuauga

SEQ ID NO: 803538 - RNA, 19 nt, Homo sapiens
  misc_RNA (1)...(19): siRNA sense strand
gcaaguugacuaucacauu

SEQ ID NO: 803539 - RNA, 19 nt, Homo sapiens
  misc_RNA (1)...(19): siRNA sense strand
gcaaggaccagagggauuu

SEQ ID NO: 803540 - RNA, 19 nt, Homo sapiens
  misc_RNA (1)...(19): siRNA sense strand
gagcugaggucuccuucug

SEQ ID NO: 803541 - RNA, 19 nt, Homo sapiens
  misc_RNA (1)...(19): siRNA sense strand
ggagaucaaggauguguuu

SEQ ID NO: 803542 - RNA, 19 nt, Homo sapiens
  misc_RNA (1)...(19): siRNA sense strand
gagaagaguuaugagaaau

SEQ ID NO: 803543 - RNA, 19 nt, Homo sapiens
  misc_RNA (1)...(19): siRNA sense strand
cgaaggaaauaccagaaga

SEQ ID NO: 803544 - RNA, 19 nt, Homo sapiens
  misc_RNA (1)...(19): siRNA sense strand
gguggacacugcugugaaa

SEQ ID NO: 803545 - RNA, 19 nt, Homo sapiens
  misc_RNA (1)...(19): siRNA sense strand
aaugaaggauucuuucuga

SEQ ID NO: 803546 - RNA, 19 nt, Homo sapiens
  misc_RNA (1)...(19): siRNA sense strand
agagaagaguuaugagaaa

SEQ ID NO: 803547 - RNA, 19 nt, Homo sapiens
  misc_RNA (1)...(19): siRNA sense strand
aaacagagaagaguuauga

SEQ ID NO: 803548 - RNA, 19 nt, Homo sapiens
  misc_RNA (1)...(19): siRNA sense strand
gccaaagguucaacuguga

SEQ ID NO: 803549 - RNA, 19 nt, Homo sapiens
  misc_RNA (1)...(19): siRNA sense strand
gaucagcaguaccuuguuc

SEQ ID NO: 803550 - RNA, 19 nt, Homo sapiens
  misc_RNA (1)...(19): siRNA sense strand
gaaggauucuuucugaacu

SEQ ID NO: 803551 - RNA, 19 nt, Homo sapiens
  misc_RNA (1)...(19): siRNA sense strand
ggaccuugcugcagcugaa

SEQ ID NO: 803552 - RNA, 19 nt, Homo sapiens
  misc_RNA (1)...(19): siRNA sense strand
gaaggaaauaccagaagaa

SEQ ID NO: 803553 - RNA, 19 nt, Homo sapiens
  misc_RNA (1)...(19): siRNA sense strand
ccacaucccacugaacuua

SEQ ID NO: 803554 - RNA, 19 nt, Homo sapiens
  misc_RNA (1)...(19): siRNA sense strand
ggacaaguacccaggcauu

SEQ ID NO: 803555 - RNA, 19 nt, Homo sapiens
  misc_RNA (1)...(19): siRNA sense strand
uaacaugauugaucugaag

SEQ ID NO: 803556 - RNA, 19 nt, Homo sapiens
  misc_RNA (1)...(19): siRNA sense strand
gaggcgccuucuugaguua

SEQ ID NO: 803557 - RNA, 19 nt, Homo sapiens
  misc_RNA (1)...(19): siRNA sense strand
ggaugaugaugguauggaa

SEQ ID NO: 803558 - RNA, 19 nt, Homo sapiens
  misc_RNA (1)...(19): siRNA sense strand
gccagaagccgcaucauau

SEQ ID NO: 803559 - RNA, 19 nt, Homo sapiens
  misc_RNA (1)...(19): siRNA sense strand
cauccugccugaagagaaa

SEQ ID NO: 803560 - RNA, 19 nt, Homo sapiens
  misc_RNA (1)...(19): siRNA sense strand
caucaacaccaacgaaauu

SEQ ID NO: 803561 - RNA, 19 nt, Homo sapiens
  misc_RNA (1)...(19): siRNA sense strand
gcccagacauguacaucaa

SEQ ID NO: 803562 - RNA, 19 nt, Homo sapiens
  misc_RNA (1)...(19): siRNA sense strand
gagauggacaaacuaauga

SEQ ID NO: 803563 - RNA, 19 nt, Homo sapiens
  misc_RNA (1)...(19): siRNA sense strand
gggaauggaugaugauggu

SEQ ID NO: 803564 - RNA, 19 nt, Homo sapiens
  misc_RNA (1)...(19): siRNA sense strand
gaaagacccaagagcaaga

SEQ ID NO: 803565 - RNA, 19 nt, Homo sapiens
  misc_RNA (1)...(19): siRNA sense strand
ggagguugauuaugagagu

SEQ ID NO: 803566 - RNA, 19 nt, Homo sapiens
  misc_RNA (1)...(19): siRNA sense strand
aagaaggccuguuccgaaa

SEQ ID NO: 803567 - RNA, 19 nt, Homo sapiens
  misc_RNA (1)...(19): siRNA sense strand
agaaagcccugaagagagu

SEQ ID NO: 803568 - RNA, 19 nt, Homo sapiens
  misc_RNA (1)...(19): siRNA sense strand
ccagagcuauucaaguaug

SEQ ID NO: 803569 - RNA, 19 nt, Homo sapiens
  misc_RNA (1)...(19): siRNA sense strand
uaugagaaaucagagcuuu

SEQ ID NO: 803570 - RNA, 19 nt, Homo sapiens
  misc_RNA (1)...(19): siRNA sense strand
uacagcagaugacauuuga

SEQ ID NO: 803571 - RNA, 19 nt, Homo sapiens
  misc_RNA (1)...(19): siRNA sense strand
gaacgucacccugggcauu

SEQ ID NO: 803572 - RNA, 19 nt, Homo sapiens
  misc_RNA (1)...(19): siRNA sense strand
ccucaacaccuuccacuuu

SEQ ID NO: 803573 - RNA, 19 nt, Homo sapiens
  misc_RNA (1)...(19): siRNA sense strand
ucuacgagcuugagagaau

SEQ ID NO: 803574 - RNA, 19 nt, Homo sapiens
  misc_RNA (1)...(19): siRNA sense strand
gaacuugcaggcugucaug

SEQ ID NO: 803575 - RNA, 19 nt, Homo sapiens
  misc_RNA (1)...(19): siRNA sense strand
cagcagaugacauuugaaa

SEQ ID NO: 803576 - RNA, 19 nt, Homo sapiens
  misc_RNA (1)...(19): siRNA sense strand
gaaugaaacaaccaacaau

SEQ ID NO: 803577 - RNA, 19 nt, Homo sapiens
  misc_RNA (1)...(19): siRNA sense strand
gugaaagcccugaaacuug

SEQ ID NO: 803578 - RNA, 19 nt, Homo sapiens
  misc_RNA (1)...(19): siRNA sense strand
gcuuugagccuuaugaguu

SEQ ID NO: 803579 - RNA, 19 nt, Homo sapiens
  misc_RNA (1)...(19): siRNA sense strand
ucaacgcugcucauaaaua

SEQ ID NO: 803580 - RNA, 19 nt, Homo sapiens
  misc_RNA (1)...(19): siRNA sense strand
gacaaguacccaggcauua

SEQ ID NO: 803581 - RNA, 19 nt, Homo sapiens
  misc_RNA (1)...(19): siRNA sense strand
caacguaucauugaagaau

SEQ ID NO: 803582 - RNA, 19 nt, Homo sapiens
  misc_RNA (1)...(19): siRNA sense strand
ugucagggcugcauuaaac

SEQ ID NO: 803583 - RNA, 19 nt, Homo sapiens
  misc_RNA (1)...(19): siRNA sense strand
aggcacauaugaaugcuaa

SEQ ID NO: 803584 - RNA, 19 nt, Homo sapiens
  misc_RNA (1)...(19): siRNA sense strand
ggauguguuugccguguau

SEQ ID NO: 803585 - RNA, 19 nt, Homo sapiens
  misc_RNA (1)...(19): siRNA sense strand
gugaagcucccucugauga

SEQ ID NO: 803586 - RNA, 19 nt, Homo sapiens
  misc_RNA (1)...(19): siRNA sense strand
ggaggaggagguugauuau

SEQ ID NO: 803587 - RNA, 19 nt, Homo sapiens
  misc_RNA (1)...(19): siRNA sense strand
guaaacacucgaagagcua

SEQ ID NO: 803588 - RNA, 19 nt, Homo sapiens
  misc_RNA (1)...(19): siRNA sense strand
gauggcgucuggcaaguca

SEQ ID NO: 803589 - RNA, 19 nt, Homo sapiens
  misc_RNA (1)...(19): siRNA sense strand
caggacagcuggccagaag

SEQ ID NO: 803590 - RNA, 19 nt, Homo sapiens
  misc_RNA (1)...(19): siRNA sense strand
ucauugcucucuucuggaa

SEQ ID NO: 803591 - RNA, 19 nt, Homo sapiens
  misc_RNA (1)...(19): siRNA sense strand
ugacaugagcucccuggua

SEQ ID NO: 803592 - RNA, 19 nt, Homo sapiens
  misc_RNA (1)...(19): siRNA sense strand
gcgaggagaacgacgauga

SEQ ID NO: 803593 - RNA, 19 nt, Homo sapiens
  misc_RNA (1)...(19): siRNA sense strand
ggaggagguugauuaugag

SEQ ID NO: 803594 - RNA, 19 nt, Homo sapiens
  misc_RNA (1)...(19): siRNA sense strand
gaggcaacguaucauugaa

SEQ ID NO: 803595 - RNA, 19 nt, Homo sapiens
  misc_RNA (1)...(19): siRNA sense strand
ggcagauccuggagaagaa

SEQ ID NO: 803596 - RNA, 19 nt, Homo sapiens
  misc_RNA (1)...(19): siRNA sense strand
ggagaccagauguuuacua

SEQ ID NO: 803597 - RNA, 19 nt, Homo sapiens
  misc_RNA (1)...(19): siRNA sense strand
gaauggaugaugaugguau

SEQ ID NO: 803598 - RNA, 19 nt, Homo sapiens
  misc_RNA (1)...(19): siRNA sense strand
cagagaagaguuaugagaa

SEQ ID NO: 803599 - RNA, 19 nt, Homo sapiens
  misc_RNA (1)...(19): siRNA sense strand
caacacguauggcauugag

SEQ ID NO: 803600 - RNA, 19 nt, Homo sapiens
  misc_RNA (1)...(19): siRNA sense strand
gaagcucccucugaugaag

SEQ ID NO: 803601 - RNA, 19 nt, Homo sapiens
  misc_RNA (1)...(19): siRNA sense strand
gaacaucacugcuccaaag

SEQ ID NO: 803602 - RNA, 19 nt, Homo sapiens
  misc_RNA (1)...(19): siRNA sense strand
caacuaagauuugucaugu

SEQ ID NO: 803603 - RNA, 19 nt, Homo sapiens
  misc_RNA (1)...(19): siRNA sense strand
cagcagaccugaaaguugu

SEQ ID NO: 803604 - RNA, 19 nt, Homo sapiens
  misc_RNA (1)...(19): siRNA sense strand
caagacagcagaccugaaa

SEQ ID NO: 803605 - RNA, 19 nt, Homo sapiens
  misc_RNA (1)...(19): siRNA sense strand
ugcaagagcugccgaaaug

SEQ ID NO: 803606 - RNA, 19 nt, Homo sapiens
  misc_RNA (1)...(19): siRNA sense strand
gaaacagcccaucugcaua

SEQ ID NO: 803607 - RNA, 19 nt, Homo sapiens
  misc_RNA (1)...(19): siRNA sense strand
gagaguacacagucauuaa

SEQ ID NO: 803608 - RNA, 19 nt, Homo sapiens
  misc_RNA (1)...(19): siRNA sense strand
gcggugcccuggugaauga

SEQ ID NO: 803609 - RNA, 19 nt, Homo sapiens
  misc_RNA (1)...(19): siRNA sense strand
agagggaagucguggguua

SEQ ID NO: 803610 - RNA, 19 nt, Homo sapiens
  misc_RNA (1)...(19): siRNA sense strand
ggaaacagcccaucugcau

SEQ ID NO: 803611 - RNA, 19 nt, Homo sapiens
  misc_RNA (1)...(19): siRNA sense strand
gcaggaaugaggagaauga

SEQ ID NO: 803612 - RNA, 19 nt, Homo sapiens
  misc_RNA (1)...(19): siRNA sense strand
aaacagcccaucugcauaa

SEQ ID NO: 803613 - RNA, 19 nt, Homo sapiens
  misc_RNA (1)...(19): siRNA sense strand
gcacgugcguccuugacaa

SEQ ID NO: 803614 - RNA, 19 nt, Homo sapiens
  misc_RNA (1)...(19): siRNA sense strand
ggagcagaguggaauauca

SEQ ID NO: 803615 - RNA, 19 nt, Homo sapiens
  misc_RNA (1)...(19): siRNA sense strand
gaucaaggcgucagaagau

SEQ ID NO: 803616 - RNA, 19 nt, Homo sapiens
  misc_RNA (1)...(19): siRNA sense strand
gaacuugccagcagaaugg

SEQ ID NO: 803617 - RNA, 19 nt, Homo sapiens
  misc_RNA (1)...(19): siRNA sense strand
ggagugcugugaauaugau

SEQ ID NO: 803618 - RNA, 19 nt, Homo sapiens
  misc_RNA (1)...(19): siRNA sense strand
ggaaagcuauccccuaaau

SEQ ID NO: 803619 - RNA, 19 nt, Homo sapiens
  misc_RNA (1)...(19): siRNA sense strand
gaccauggcaucccaguga

SEQ ID NO: 803620 - RNA, 19 nt, Homo sapiens
  misc_RNA (1)...(19): siRNA sense strand
caacggacgccaugcuaaa

SEQ ID NO: 803621 - RNA, 19 nt, Homo sapiens
  misc_RNA (1)...(19): siRNA sense strand
ggagaguucuuccgaugca

SEQ ID NO: 803622 - RNA, 19 nt, Homo sapiens
  misc_RNA (1)...(19): siRNA sense strand
gcugggaaguccaagauca

SEQ ID NO: 803623 - RNA, 19 nt, Homo sapiens
  misc_RNA (1)...(19): siRNA sense strand
acuaagauuugucauguug

SEQ ID NO: 803624 - RNA, 19 nt, Homo sapiens
  misc_RNA (1)...(19): siRNA sense strand
caacuccuauguucuuagu

SEQ ID NO: 803625 - RNA, 19 nt, Homo sapiens
  misc_RNA (1)...(19): siRNA sense strand
gugaauaugaucagauuga

SEQ ID NO: 803626 - RNA, 19 nt, Homo sapiens
  misc_RNA (1)...(19): siRNA sense strand
aagacuggauugaaagaaa

SEQ ID NO: 803627 - RNA, 19 nt, Homo sapiens
  misc_RNA (1)...(19): siRNA sense strand
gagaucugcccaugggaua

SEQ ID NO: 803628 - RNA, 19 nt, Homo sapiens
  misc_RNA (1)...(19): siRNA sense strand
guaugacuauguugagguu

SEQ ID NO: 803629 - RNA, 19 nt, Homo sapiens
  misc_RNA (1)...(19): siRNA sense strand
uaccuuggaugacuucuau

SEQ ID NO: 803630 - RNA, 19 nt, Homo sapiens
  misc_RNA (1)...(19): siRNA sense strand
uccgauggcuccaagaauu

SEQ ID NO: 803631 - RNA, 19 nt, Homo sapiens
  misc_RNA (1)...(19): siRNA sense strand
caaccgcgauggccagauc

SEQ ID NO: 803632 - RNA, 19 nt, Homo sapiens
  misc_RNA (1)...(19): siRNA sense strand
uuggaugacuucuauguga

SEQ ID NO: 803633 - RNA, 19 nt, Homo sapiens
  misc_RNA (1)...(19): siRNA sense strand
gucagaagauucauugucu

SEQ ID NO: 803634 - RNA, 19 nt, Homo sapiens
  misc_RNA (1)...(19): siRNA sense strand
ccaagagaguacacaguca

SEQ ID NO: 803635 - RNA, 19 nt, Homo sapiens
  misc_RNA (1)...(19): siRNA sense strand
caagggagcgugguuccua

SEQ ID NO: 803636 - RNA, 19 nt, Homo sapiens
  misc_RNA (1)...(19): siRNA sense strand
uggacucgcugcuguguga

SEQ ID NO: 803637 - RNA, 19 nt, Homo sapiens
  misc_RNA (1)...(19): siRNA sense strand
gguuguaccaucuuugaaa

SEQ ID NO: 803638 - RNA, 19 nt, Homo sapiens
  misc_RNA (1)...(19): siRNA sense strand
ccaagaauuuugacgguuu

SEQ ID NO: 803639 - RNA, 19 nt, Homo sapiens
  misc_RNA (1)...(19): siRNA sense strand
gggaaggucaccaugauca

SEQ ID NO: 803640 - RNA, 19 nt, Homo sapiens
  misc_RNA (1)...(19): siRNA sense strand
ggcuggaccuuacaagugu

SEQ ID NO: 803641 - RNA, 19 nt, Homo sapiens
  misc_RNA (1)...(19): siRNA sense strand
ggucagauuuuguuggaaa

SEQ ID NO: 803642 - RNA, 19 nt, Homo sapiens
  misc_RNA (1)...(19): siRNA sense strand
agacuggauugaaagaaau

SEQ ID NO: 803643 - RNA, 19 nt, Homo sapiens
  misc_RNA (1)...(19): siRNA sense strand
auccagagccuacagauuu

SEQ ID NO: 803644 - RNA, 19 nt, Homo sapiens
  misc_RNA (1)...(19): siRNA sense strand
uuucagaccuggugagaag

SEQ ID NO: 803645 - RNA, 19 nt, Homo sapiens
  misc_RNA (1)...(19): siRNA sense strand
gaucaucaagcgugucugu

SEQ ID NO: 803646 - RNA, 19 nt, Homo sapiens
  misc_RNA (1)...(19): siRNA sense strand
gagaaccaaagauuucaga

SEQ ID NO: 803647 - RNA, 19 nt, Homo sapiens
  misc_RNA (1)...(19): siRNA sense strand
gaaauucuaccgggaugau

SEQ ID NO: 803648 - RNA, 19 nt, Homo sapiens
  misc_RNA (1)...(19): siRNA sense strand
uaagauuugucauguugag

SEQ ID NO: 803649 - RNA, 19 nt, Homo sapiens
  misc_RNA (1)...(19): siRNA sense strand
gaugaugaccgggaugaga

SEQ ID NO: 803650 - RNA, 19 nt, Homo sapiens
  misc_RNA (1)...(19): siRNA sense strand
gagcagaguggaauaucau

SEQ ID NO: 803651 - RNA, 19 nt, Homo sapiens
  misc_RNA (1)...(19): siRNA sense strand
caagggagacaccauuaca

SEQ ID NO: 803652 - RNA, 19 nt, Homo sapiens
  misc_RNA (1)...(19): siRNA sense strand
gaguacacagucauuaaug

SEQ ID NO: 803653 - RNA, 19 nt, Homo sapiens
  misc_RNA (1)...(19): siRNA sense strand
uaaagacuggauugaaaga

SEQ ID NO: 803654 - RNA, 19 nt, Homo sapiens
  misc_RNA (1)...(19): siRNA sense strand
ggauaccaacaucugcaua

SEQ ID NO: 803655 - RNA, 19 nt, Homo sapiens
  misc_RNA (1)...(19): siRNA sense strand
gucaagggagacaccauua

SEQ ID NO: 803656 - RNA, 19 nt, Homo sapiens
  misc_RNA (1)...(19): siRNA sense strand
cauaaaagccugccgagaa

SEQ ID NO: 803657 - RNA, 19 nt, Homo sapiens
  misc_RNA (1)...(19): siRNA sense strand
ggguuugucauccaacuaa

SEQ ID NO: 803658 - RNA, 19 nt, Homo sapiens
  misc_RNA (1)...(19): siRNA sense strand
ugacaucgccauccugaag

SEQ ID NO: 803659 - RNA, 19 nt, Homo sapiens
  misc_RNA (1)...(19): siRNA sense strand
ccaacuaagauuugucaug

SEQ ID NO: 803660 - RNA, 19 nt, Homo sapiens
  misc_RNA (1)...(19): siRNA sense strand
cugugaauaugaucagauu

SEQ ID NO: 803661 - RNA, 19 nt, Homo sapiens
  misc_RNA (1)...(19): siRNA sense strand
cgaugcagguucagucaag

SEQ ID NO: 803662 - RNA, 19 nt, Homo sapiens
  misc_RNA (1)...(19): siRNA sense strand
gccgagaaccaaagauuuc

SEQ ID NO: 803663 - RNA, 19 nt, Homo sapiens
  misc_RNA (1)...(19): siRNA sense strand
gugccaguaugacuauguu

SEQ ID NO: 803664 - RNA, 19 nt, Homo sapiens
  misc_RNA (1)...(19): siRNA sense strand
gacuacaugugccaguaug

SEQ ID NO: 803665 - RNA, 19 nt, Homo sapiens
  misc_RNA (1)...(19): siRNA sense strand
gaaugaggagaaugagugu

SEQ ID NO: 803666 - RNA, 19 nt, Homo sapiens
  misc_RNA (1)...(19): siRNA sense strand
gacagcagaccugaaaguu

SEQ ID NO: 803667 - RNA, 19 nt, Homo sapiens
  misc_RNA (1)...(19): siRNA sense strand
ggaaggucaccaugaucaa

SEQ ID NO: 803668 - RNA, 19 nt, Homo sapiens
  misc_RNA (1)...(19): siRNA sense strand
ugucauccaacuaagauuu

SEQ ID NO: 803669 - RNA, 19 nt, Homo sapiens
  misc_RNA (1)...(19): siRNA sense strand
uggaugacuucuaugugaa

SEQ ID NO: 803670 - RNA, 19 nt, Homo sapiens
  misc_RNA (1)...(19): siRNA sense strand
ggagcgugguuccuagucu

SEQ ID NO: 803671 - RNA, 19 nt, Homo sapiens
  misc_RNA (1)...(19): siRNA sense strand
gagaacaucacugcuccaa

SEQ ID NO: 803672 - RNA, 19 nt, Homo sapiens
  misc_RNA (1)...(19): siRNA sense strand
gagugcaucucacccuucu

SEQ ID NO: 803673 - RNA, 19 nt, Homo sapiens
  misc_RNA (1)...(19): siRNA sense strand
cauugucuguccuugaaga

SEQ ID NO: 803674 - RNA, 19 nt, Homo sapiens
  misc_RNA (1)...(19): siRNA sense strand
caugcgauguggccagguu

SEQ ID NO: 803675 - RNA, 19 nt, Homo sapiens
  misc_RNA (1)...(19): siRNA sense strand
uguugagccuggaguuuga

SEQ ID NO: 803676 - RNA, 19 nt, Homo sapiens
  misc_RNA (1)...(19): siRNA sense strand
gggagugcugugaauauga

SEQ ID NO: 803677 - RNA, 19 nt, Homo sapiens
  misc_RNA (1)...(19): siRNA sense strand
ggagaguggucagggaaac

SEQ ID NO: 803678 - RNA, 19 nt, Homo sapiens
  misc_RNA (1)...(19): siRNA sense strand
gaauaugaucagauugagu

SEQ ID NO: 803679 - RNA, 19 nt, Homo sapiens
  misc_RNA (1)...(19): siRNA sense strand
gaaaguuguuuuggggaaa

SEQ ID NO: 803680 - RNA, 19 nt, Homo sapiens
  misc_RNA (1)...(19): siRNA sense strand
gcagaguggaauaucaugu

SEQ ID NO: 803681 - RNA, 19 nt, Homo sapiens
  misc_RNA (1)...(19): siRNA sense strand
agagaguacacagucauua

SEQ ID NO: 803682 - RNA, 19 nt, Homo sapiens
  misc_RNA (1)...(19): siRNA sense strand
gggcagcgcugugaaaauc

SEQ ID NO: 803683 - RNA, 19 nt, Homo sapiens
  misc_RNA (1)...(19): siRNA sense strand
cagguuguaccaucuuuga

SEQ ID NO: 803684 - RNA, 19 nt, Homo sapiens
  misc_RNA (1)...(19): siRNA sense strand
gacuggauugaaagaaaua

SEQ ID NO: 803685 - RNA, 19 nt, Homo sapiens
  misc_RNA (1)...(19): siRNA sense strand
gaaggucaccaugaucaag

SEQ ID NO: 803686 - RNA, 19 nt, Homo sapiens
  misc_RNA (1)...(19): siRNA sense strand
guucuuaguggcaaugaga

SEQ ID NO: 803687 - RNA, 19 nt, Homo sapiens
  misc_RNA (1)...(19): siRNA sense strand
ccgauggcuccaagaauuu

SEQ ID NO: 803688 - RNA, 19 nt, Homo sapiens
  misc_RNA (1)...(19): siRNA sense strand
gccaguaugacuauguuga

SEQ ID NO: 803689 - RNA, 19 nt, Homo sapiens
  misc_RNA (1)...(19): siRNA sense strand
ggagacugcaugcgaugug

SEQ ID NO: 803690 - RNA, 19 nt, Homo sapiens
  misc_RNA (1)...(19): siRNA sense strand
cgggagugcugugaauaug

SEQ ID NO: 803691 - RNA, 19 nt, Homo sapiens
  misc_RNA (1)...(19): siRNA sense strand
caccauuacaccagcuaua

SEQ ID NO: 803692 - RNA, 19 nt, Homo sapiens
  misc_RNA (1)...(19): siRNA sense strand
ucaacggacgccaugcuaa

SEQ ID NO: 803693 - RNA, 19 nt, Homo sapiens
  misc_RNA (1)...(19): siRNA sense strand
agaguggaauaucaugugu

SEQ ID NO: 803694 - RNA, 19 nt, Homo sapiens
  misc_RNA (1)...(19): siRNA sense strand
gggaagucguggguuauac

SEQ ID NO: 803695 - RNA, 19 nt, Homo sapiens
  misc_RNA (1)...(19): siRNA sense strand
caaggcgucagaagauuca

SEQ ID NO: 803696 - RNA, 19 nt, Homo sapiens
  misc_RNA (1)...(19): siRNA sense strand
uccugaagcuccuagacaa

SEQ ID NO: 803697 - RNA, 19 nt, Homo sapiens
  misc_RNA (1)...(19): siRNA sense strand
gauaccaacaucugcauac

SEQ ID NO: 803698 - RNA, 19 nt, Homo sapiens
  misc_RNA (1)...(19): siRNA sense strand
gcccuucccuuuggagauc

SEQ ID NO: 803699 - RNA, 19 nt, Homo sapiens
  misc_RNA (1)...(19): siRNA sense strand
gcagaccugaaaguuguuu

SEQ ID NO: 803700 - RNA, 19 nt, Homo sapiens
  misc_RNA (1)...(19): siRNA sense strand
gucgggaucucagcacuuc

SEQ ID NO: 803701 - RNA, 19 nt, Homo sapiens
  misc_RNA (1)...(19): siRNA sense strand
ggagggagcucuuaaggaa

SEQ ID NO: 803702 - RNA, 19 nt, Homo sapiens
  misc_RNA (1)...(19): siRNA sense strand
caacaacccugagcgauuu

SEQ ID NO: 803703 - RNA, 19 nt, Homo sapiens
  misc_RNA (1)...(19): siRNA sense strand
ugaaggagcuggcggauga

SEQ ID NO: 803704 - RNA, 19 nt, Homo sapiens
  misc_RNA (1)...(19): siRNA sense strand
ggaaaguccucgcugcauu

SEQ ID NO: 803705 - RNA, 19 nt, Homo sapiens
  misc_RNA (1)...(19): siRNA sense strand
gaaagggaaugaguacaug

SEQ ID NO: 803706 - RNA, 19 nt, Homo sapiens
  misc_RNA (1)...(19): siRNA sense strand
gaaguaaggcugucacaag

SEQ ID NO: 803707 - RNA, 19 nt, Homo sapiens
  misc_RNA (1)...(19): siRNA sense strand
gaacuuaugaggaaagagu

SEQ ID NO: 803708 - RNA, 19 nt, Homo sapiens
  misc_RNA (1)...(19): siRNA sense strand
gaaaguccucgcugcauug

SEQ ID NO: 803709 - RNA, 19 nt, Homo sapiens
  misc_RNA (1)...(19): siRNA sense strand
cuaugaagccggugaaauu

SEQ ID NO: 803710 - RNA, 19 nt, Homo sapiens
  misc_RNA (1)...(19): siRNA sense strand
caagacacacugccaagaa

SEQ ID NO: 803711 - RNA, 19 nt, Homo sapiens
  misc_RNA (1)...(19): siRNA sense strand
ggaaggagaaaguggaaau

SEQ ID NO: 803712 - RNA, 19 nt, Homo sapiens
  misc_RNA (1)...(19): siRNA sense strand
gauuggaguuugagaagca

SEQ ID NO: 803713 - RNA, 19 nt, Homo sapiens
  misc_RNA (1)...(19): siRNA sense strand
ccaacaacccugagcgauu

SEQ ID NO: 803714 - RNA, 19 nt, Homo sapiens
  misc_RNA (1)...(19): siRNA sense strand
gauccugcuucugauguaa

SEQ ID NO: 803715 - RNA, 19 nt, Homo sapiens
  misc_RNA (1)...(19): siRNA sense strand
aagacacacugccaagaaa

SEQ ID NO: 803716 - RNA, 19 nt, Homo sapiens
  misc_RNA (1)...(19): siRNA sense strand
ggaguccugagcagaagua

SEQ ID NO: 803717 - RNA, 19 nt, Homo sapiens
  misc_RNA (1)...(19): siRNA sense strand
caacucuucucuggucuuc

SEQ ID NO: 803718 - RNA, 19 nt, Homo sapiens
  misc_RNA (1)...(19): siRNA sense strand
gaaggagaaaguggaaaug

SEQ ID NO: 803719 - RNA, 19 nt, Homo sapiens
  misc_RNA (1)...(19): siRNA sense strand
ucaggugcaucuccgaguu

SEQ ID NO: 803720 - RNA, 19 nt, Homo sapiens
  misc_RNA (1)...(19): siRNA sense strand
aggcagcgcuucagauugg

SEQ ID NO: 803721 - RNA, 19 nt, Homo sapiens
  misc_RNA (1)...(19): siRNA sense strand
ucauuuagauccugcuucu

SEQ ID NO: 803722 - RNA, 19 nt, Homo sapiens
  misc_RNA (1)...(19): siRNA sense strand
ugaugcaacuccucuuauc

SEQ ID NO: 803723 - RNA, 19 nt, Homo sapiens
  misc_RNA (1)...(19): siRNA sense strand
gcagaggcagcgcuucaga

SEQ ID NO: 803724 - RNA, 19 nt, Homo sapiens
  misc_RNA (1)...(19): siRNA sense strand
gggaggagggagcucuuaa

SEQ ID NO: 803725 - RNA, 19 nt, Homo sapiens
  misc_RNA (1)...(19): siRNA sense strand
gcacccgagucugcucuug

SEQ ID NO: 803726 - RNA, 19 nt, Homo sapiens
  misc_RNA (1)...(19): siRNA sense strand
agauggcucuggaacuuau

SEQ ID NO: 803727 - RNA, 19 nt, Homo sapiens
  misc_RNA (1)...(19): siRNA sense strand
uugcagagcuucucaucag

SEQ ID NO: 803728 - RNA, 19 nt, Homo sapiens
  misc_RNA (1)...(19): siRNA sense strand
uaugaagccggugaaauuu

SEQ ID NO: 803729 - RNA, 19 nt, Homo sapiens
  misc_RNA (1)...(19): siRNA sense strand
ugaaagggaaugaguacau

SEQ ID NO: 803730 - RNA, 19 nt, Homo sapiens
  misc_RNA (1)...(19): siRNA sense strand
aaaagacugucauuuggaa

SEQ ID NO: 803731 - RNA, 19 nt, Homo sapiens
  misc_RNA (1)...(19): siRNA sense strand
acucuucucuggucuucuu

SEQ ID NO: 803732 - RNA, 19 nt, Homo sapiens
  misc_RNA (1)...(19): siRNA sense strand
ggacuaugaagccggugaa

SEQ ID NO: 803733 - RNA, 19 nt, Homo sapiens
  misc_RNA (1)...(19): siRNA sense strand
ggcccugcauccuggguuu

SEQ ID NO: 803734 - RNA, 19 nt, Homo sapiens
  misc_RNA (1)...(19): siRNA sense strand
agaggcagcgcuucagauu

SEQ ID NO: 803735 - RNA, 19 nt, Homo sapiens
  misc_RNA (1)...(19): siRNA sense strand
ugugaugcaacuccucuua

SEQ ID NO: 803736 - RNA, 19 nt, Homo sapiens
  misc_RNA (1)...(19): siRNA sense strand
gcauugggauuuucuugga

SEQ ID NO: 803737 - RNA, 19 nt, Homo sapiens
  misc_RNA (1)...(19): siRNA sense strand
ccagguaaagcuccagaug

SEQ ID NO: 803738 - RNA, 19 nt, Homo sapiens
  misc_RNA (1)...(19): siRNA sense strand
caauagcagggucaggaaa

SEQ ID NO: 803739 - RNA, 19 nt, Homo sapiens
  misc_RNA (1)...(19): siRNA sense strand
ugcaacuccucuuaucuug

SEQ ID NO: 803740 - RNA, 19 nt, Homo sapiens
  misc_RNA (1)...(19): siRNA sense strand
ggaggagggagcucuuaag

SEQ ID NO: 803741 - RNA, 19 nt, Homo sapiens
  misc_RNA (1)...(19): siRNA sense strand
cuucugauguaagagauga

SEQ ID NO: 803742 - RNA, 19 nt, Homo sapiens
  misc_RNA (1)...(19): siRNA sense strand
gaggagggagcucuuaagg

SEQ ID NO: 803743 - RNA, 19 nt, Homo sapiens
  misc_RNA (1)...(19): siRNA sense strand
gcuucagauuggaguuuga

SEQ ID NO: 803744 - RNA, 19 nt, Homo sapiens
  misc_RNA (1)...(19): siRNA sense strand
agauccugcuucugaugua

SEQ ID NO: 803745 - RNA, 19 nt, Homo sapiens
  misc_RNA (1)...(19): siRNA sense strand
caucagggaggcauuacug

SEQ ID NO: 803746 - RNA, 19 nt, Homo sapiens
  misc_RNA (1)...(19): siRNA sense strand
agggagcucuuaaggaagu

SEQ ID NO: 803747 - RNA, 19 nt, Homo sapiens
  misc_RNA (1)...(19): siRNA sense strand
gaggcagcgcuucagauug

SEQ ID NO: 803748 - RNA, 19 nt, Homo sapiens
  misc_RNA (1)...(19): siRNA sense strand
uaucuacacauucaaccaa

SEQ ID NO: 803749 - RNA, 19 nt, Homo sapiens
  misc_RNA (1)...(19): siRNA sense strand
gcugaaagggaaugaguac

SEQ ID NO: 803750 - RNA, 19 nt, Homo sapiens
  misc_RNA (1)...(19): siRNA sense strand
gcagagcaaggcccugaag

SEQ ID NO: 803751 - RNA, 19 nt, Homo sapiens
  misc_RNA (1)...(19): siRNA sense strand
ucagauuggaguuugagaa

SEQ ID NO: 803752 - RNA, 19 nt, Homo sapiens
  misc_RNA (1)...(19): siRNA sense strand
cucuggaacuuaugaggaa

SEQ ID NO: 803753 - RNA, 19 nt, Homo sapiens
  misc_RNA (1)...(19): siRNA sense strand
auagcagggucaggaaauu

SEQ ID NO: 803754 - RNA, 19 nt, Homo sapiens
  misc_RNA (1)...(19): siRNA sense strand
gcgcuucagauuggaguuu

SEQ ID NO: 803755 - RNA, 19 nt, Homo sapiens
  misc_RNA (1)...(19): siRNA sense strand
aggagaaaguggaaaugca

SEQ ID NO: 803756 - RNA, 19 nt, Homo sapiens
  misc_RNA (1)...(19): siRNA sense strand
gcuggaagcagagaacauc

SEQ ID NO: 803757 - RNA, 19 nt, Homo sapiens
  misc_RNA (1)...(19): siRNA sense strand
ucucaucagggaggcauua

SEQ ID NO: 803758 - RNA, 19 nt, Homo sapiens
  misc_RNA (1)...(19): siRNA sense strand
gaugcaacuccucuuaucu

SEQ ID NO: 803759 - RNA, 19 nt, Homo sapiens
  misc_RNA (1)...(19): siRNA sense strand
gugaugcaacuccucuuau

SEQ ID NO: 803760 - RNA, 19 nt, Homo sapiens
  misc_RNA (1)...(19): siRNA sense strand
ggauuuucuuggacuauga

SEQ ID NO: 803761 - RNA, 19 nt, Homo sapiens
  misc_RNA (1)...(19): siRNA sense strand
cagauuggaguuugagaag

SEQ ID NO: 803762 - RNA, 19 nt, Homo sapiens
  misc_RNA (1)...(19): siRNA sense strand
agacugucauuuggaagga

SEQ ID NO: 803763 - RNA, 19 nt, Homo sapiens
  misc_RNA (1)...(19): siRNA sense strand
gaacugaagacagcaugcu

SEQ ID NO: 803764 - RNA, 19 nt, Homo sapiens
  misc_RNA (1)...(19): siRNA sense strand
guccugagcagaaguaagg

SEQ ID NO: 803765 - RNA, 19 nt, Homo sapiens
  misc_RNA (1)...(19): siRNA sense strand
agagcaaggcccugaagga

SEQ ID NO: 803766 - RNA, 19 nt, Homo sapiens
  misc_RNA (1)...(19): siRNA sense strand
auuuagauccugcuucuga

SEQ ID NO: 803767 - RNA, 19 nt, Homo sapiens
  misc_RNA (1)...(19): siRNA sense strand
cacauucaaccaacucuuc

SEQ ID NO: 803768 - RNA, 19 nt, Homo sapiens
  misc_RNA (1)...(19): siRNA sense strand
gacagaagcugagauguuu

SEQ ID NO: 803769 - RNA, 19 nt, Homo sapiens
  misc_RNA (1)...(19): siRNA sense strand
ggacagaagcugagauguu

SEQ ID NO: 803770 - RNA, 19 nt, Homo sapiens
  misc_RNA (1)...(19): siRNA sense strand
ggauggagcuuugucuuug

SEQ ID NO: 803771 - RNA, 19 nt, Homo sapiens
  misc_RNA (1)...(19): siRNA sense strand
gggcaacacuccagauuca

SEQ ID NO: 803772 - RNA, 19 nt, Homo sapiens
  misc_RNA (1)...(19): siRNA sense strand
acaaagauuucagggauuu

SEQ ID NO: 803773 - RNA, 19 nt, Homo sapiens
  misc_RNA (1)...(19): siRNA sense strand
gaaauggacaggcuacuag

SEQ ID NO: 803774 - RNA, 19 nt, Homo sapiens
  misc_RNA (1)...(19): siRNA sense strand
ggaacaaauucuccagaca

SEQ ID NO: 803775 - RNA, 19 nt, Homo sapiens
  misc_RNA (1)...(19): siRNA sense strand
gaacaacuacgggcucuau

SEQ ID NO: 803776 - RNA, 19 nt, Homo sapiens
  misc_RNA (1)...(19): siRNA sense strand
ggaaauggacaggcuacua

SEQ ID NO: 803777 - RNA, 19 nt, Homo sapiens
  misc_RNA (1)...(19): siRNA sense strand
gauggagcuuugucuuuga

SEQ ID NO: 803778 - RNA, 19 nt, Homo sapiens
  misc_RNA (1)...(19): siRNA sense strand
ggaggaagagugggaguuu

SEQ ID NO: 803779 - RNA, 19 nt, Homo sapiens
  misc_RNA (1)...(19): siRNA sense strand
cugaugagcugagaaacaa

SEQ ID NO: 803780 - RNA, 19 nt, Homo sapiens
  misc_RNA (1)...(19): siRNA sense strand
gaggaagagugggaguuug

SEQ ID NO: 803781 - RNA, 19 nt, Homo sapiens
  misc_RNA (1)...(19): siRNA sense strand
gcugagauguuuggaugga

SEQ ID NO: 803782 - RNA, 19 nt, Homo sapiens
  misc_RNA (1)...(19): siRNA sense strand
ccaaugaagucuguacucu

SEQ ID NO: 803783 - RNA, 19 nt, Homo sapiens
  misc_RNA (1)...(19): siRNA sense strand
uugaggacuuugucucuga

SEQ ID NO: 803784 - RNA, 19 nt, Homo sapiens
  misc_RNA (1)...(19): siRNA sense strand
aacaaagauuucagggauu

SEQ ID NO: 803785 - RNA, 19 nt, Homo sapiens
  misc_RNA (1)...(19): siRNA sense strand
acaacuacgggcucuauga

SEQ ID NO: 803786 - RNA, 19 nt, Homo sapiens
  misc_RNA (1)...(19): siRNA sense strand
ccuuugccaucgacauauu

SEQ ID NO: 803787 - RNA, 19 nt, Homo sapiens
  misc_RNA (1)...(19): siRNA sense strand
gcccgugccuacugugcuu

SEQ ID NO: 803788 - RNA, 19 nt, Homo sapiens
  misc_RNA (1)...(19): siRNA sense strand
uggauggagcuuugucuuu

SEQ ID NO: 803789 - RNA, 19 nt, Homo sapiens
  misc_RNA (1)...(19): siRNA sense strand
ugacgcccgugccuacugu

SEQ ID NO: 803790 - RNA, 19 nt, Homo sapiens
  misc_RNA (1)...(19): siRNA sense strand
gcgggaggcgacagugaaa

SEQ ID NO: 803791 - RNA, 19 nt, Homo sapiens
  misc_RNA (1)...(19): siRNA sense strand
cuacuagcaugguccaacu

SEQ ID NO: 803792 - RNA, 19 nt, Homo sapiens
  misc_RNA (1)...(19): siRNA sense strand
aaagccacccagccaauga

SEQ ID NO: 803793 - RNA, 19 nt, Homo sapiens
  misc_RNA (1)...(19): siRNA sense strand
caaagccacccagccaaug

SEQ ID NO: 803794 - RNA, 19 nt, Homo sapiens
  misc_RNA (1)...(19): siRNA sense strand
gaugagcugagaaacaaag

SEQ ID NO: 803795 - RNA, 19 nt, Homo sapiens
  misc_RNA (1)...(19): siRNA sense strand
gaagcugagauguuuggau

SEQ ID NO: 803796 - RNA, 19 nt, Homo sapiens
  misc_RNA (1)...(19): siRNA sense strand
ugaaacccuuugccaucga

SEQ ID NO: 803797 - RNA, 19 nt, Homo sapiens
  misc_RNA (1)...(19): siRNA sense strand
ccacccagccaaugaaguc

SEQ ID NO: 803798 - RNA, 19 nt, Homo sapiens
  misc_RNA (1)...(19): siRNA sense strand
ggacuuugucucugaugag

SEQ ID NO: 803799 - RNA, 19 nt, Homo sapiens
  misc_RNA (1)...(19): siRNA sense strand
cagauucagccucagacaa

SEQ ID NO: 803800 - RNA, 19 nt, Homo sapiens
  misc_RNA (1)...(19): siRNA sense strand
ggacagcaucaccguacca

SEQ ID NO: 803801 - RNA, 19 nt, Homo sapiens
  misc_RNA (1)...(19): siRNA sense strand
gaacugaucucuacccuaa

SEQ ID NO: 803802 - RNA, 19 nt, Homo sapiens
  misc_RNA (1)...(19): siRNA sense strand
gaagaaaccuugcuuggaa

SEQ ID NO: 803803 - RNA, 19 nt, Homo sapiens
  misc_RNA (1)...(19): siRNA sense strand
cagagaagaucacagaaua

SEQ ID NO: 803804 - RNA, 19 nt, Homo sapiens
  misc_RNA (1)...(19): siRNA sense strand
guaagcagcucuugaauag

SEQ ID NO: 803805 - RNA, 19 nt, Homo sapiens
  misc_RNA (1)...(19): siRNA sense strand
gaagaucaauguacagaau

SEQ ID NO: 803806 - RNA, 19 nt, Homo sapiens
  misc_RNA (1)...(19): siRNA sense strand
ggacggugaugcaaauaaa

SEQ ID NO: 803807 - RNA, 19 nt, Homo sapiens
  misc_RNA (1)...(19): siRNA sense strand
gcaaccagcugaaacacaa

SEQ ID NO: 803808 - RNA, 19 nt, Homo sapiens
  misc_RNA (1)...(19): siRNA sense strand
ucacacaacuuucugaaga

SEQ ID NO: 803809 - RNA, 19 nt, Homo sapiens
  misc_RNA (1)...(19): siRNA sense strand
gcccuuaacuaccaaagua

SEQ ID NO: 803810 - RNA, 19 nt, Homo sapiens
  misc_RNA (1)...(19): siRNA sense strand
ggacagccaguaaagaaua

SEQ ID NO: 803811 - RNA, 19 nt, Homo sapiens
  misc_RNA (1)...(19): siRNA sense strand
ggagacagaugacauugau

SEQ ID NO: 803812 - RNA, 19 nt, Homo sapiens
  misc_RNA (1)...(19): siRNA sense strand
gcagcuaaaggaauaaaua

SEQ ID NO: 803813 - RNA, 19 nt, Homo sapiens
  misc_RNA (1)...(19): siRNA sense strand
cagaugacauugaugauau

SEQ ID NO: 803814 - RNA, 19 nt, Homo sapiens
  misc_RNA (1)...(19): siRNA sense strand
gaagagucaucagaauuug

SEQ ID NO: 803815 - RNA, 19 nt, Homo sapiens
  misc_RNA (1)...(19): siRNA sense strand
uaagggaaauucagcaguu

SEQ ID NO: 803816 - RNA, 19 nt, Homo sapiens
  misc_RNA (1)...(19): siRNA sense strand
caaagaaacuagagugcau

SEQ ID NO: 803817 - RNA, 19 nt, Homo sapiens
  misc_RNA (1)...(19): siRNA sense strand
cauugcagcuguaauuaaa

SEQ ID NO: 803818 - RNA, 19 nt, Homo sapiens
  misc_RNA (1)...(19): siRNA sense strand
gagaagaucacagaauaaa

SEQ ID NO: 803819 - RNA, 19 nt, Homo sapiens
  misc_RNA (1)...(19): siRNA sense strand
caaagaagagucaucagaa

SEQ ID NO: 803820 - RNA, 19 nt, Homo sapiens
  misc_RNA (1)...(19): siRNA sense strand
agaaugccaucucgucaua

SEQ ID NO: 803821 - RNA, 19 nt, Homo sapiens
  misc_RNA (1)...(19): siRNA sense strand
gcaaccggcuuaaacaucu

SEQ ID NO: 803822 - RNA, 19 nt, Homo sapiens
  misc_RNA (1)...(19): siRNA sense strand
caaaggaaaccacagagaa

SEQ ID NO: 803823 - RNA, 19 nt, Homo sapiens
  misc_RNA (1)...(19): siRNA sense strand
gacagccaguaaagaauaa

SEQ ID NO: 803824 - RNA, 19 nt, Homo sapiens
  misc_RNA (1)...(19): siRNA sense strand
ggauucaaccaaugccuua

SEQ ID NO: 803825 - RNA, 19 nt, Homo sapiens
  misc_RNA (1)...(19): siRNA sense strand
aaagaagagucaucagaau

SEQ ID NO: 803826 - RNA, 19 nt, Homo sapiens
  misc_RNA (1)...(19): siRNA sense strand
gaucuuggacagccaguaa

SEQ ID NO: 803827 - RNA, 19 nt, Homo sapiens
  misc_RNA (1)...(19): siRNA sense strand
aagcagcucuugaauagug

SEQ ID NO: 803828 - RNA, 19 nt, Homo sapiens
  misc_RNA (1)...(19): siRNA sense strand
gaaaaucagcccuuaacua

SEQ ID NO: 803829 - RNA, 19 nt, Homo sapiens
  misc_RNA (1)...(19): siRNA sense strand
gacuaaagacaaccaagua

SEQ ID NO: 803830 - RNA, 19 nt, Homo sapiens
  misc_RNA (1)...(19): siRNA sense strand
agaagagucaucagaauuu

SEQ ID NO: 803831 - RNA, 19 nt, Homo sapiens
  misc_RNA (1)...(19): siRNA sense strand
uuacagcaaucacaacaga

SEQ ID NO: 803832 - RNA, 19 nt, Homo sapiens
  misc_RNA (1)...(19): siRNA sense strand
gaaacuagagugcauaaaa

SEQ ID NO: 803833 - RNA, 19 nt, Homo sapiens
  misc_RNA (1)...(19): siRNA sense strand
uaaagacaaccaaguauuc

SEQ ID NO: 803834 - RNA, 19 nt, Homo sapiens
  misc_RNA (1)...(19): siRNA sense strand
gcauugcagcuguaauuaa

SEQ ID NO: 803835 - RNA, 19 nt, Homo sapiens
  misc_RNA (1)...(19): siRNA sense strand
gcugaagagccaaaccuua

SEQ ID NO: 803836 - RNA, 19 nt, Homo sapiens
  misc_RNA (1)...(19): siRNA sense strand
cuucugauaucacugaauu

SEQ ID NO: 803837 - RNA, 19 nt, Homo sapiens
  misc_RNA (1)...(19): siRNA sense strand
guacaucaggaaccauuaa

SEQ ID NO: 803838 - RNA, 19 nt, Homo sapiens
  misc_RNA (1)...(19): siRNA sense strand
ggagaccaguuuugauuuu

SEQ ID NO: 803839 - RNA, 19 nt, Homo sapiens
  misc_RNA (1)...(19): siRNA sense strand
cauacaaacuaaggagaaa

SEQ ID NO: 803840 - RNA, 19 nt, Homo sapiens
  misc_RNA (1)...(19): siRNA sense strand
aaaggaaaccacagagaaa

SEQ ID NO: 803841 - RNA, 19 nt, Homo sapiens
  misc_RNA (1)...(19): siRNA sense strand
accaaugccuuacuucaaa

SEQ ID NO: 803842 - RNA, 19 nt, Homo sapiens
  misc_RNA (1)...(19): siRNA sense strand
agacagaugacauugauga

SEQ ID NO: 803843 - RNA, 19 nt, Homo sapiens
  misc_RNA (1)...(19): siRNA sense strand
gaaaguugcagucgacucu

SEQ ID NO: 803844 - RNA, 19 nt, Homo sapiens
  misc_RNA (1)...(19): siRNA sense strand
ggaaaccacagagaaaguu

SEQ ID NO: 803845 - RNA, 19 nt, Homo sapiens
  misc_RNA (1)...(19): siRNA sense strand
aaccuuagaugcagaaaca

SEQ ID NO: 803846 - RNA, 19 nt, Homo sapiens
  misc_RNA (1)...(19): siRNA sense strand
gcucuugaauaguggaguu

SEQ ID NO: 803847 - RNA, 19 nt, Homo sapiens
  misc_RNA (1)...(19): siRNA sense strand
cggaagagugcuacagaua

SEQ ID NO: 803848 - RNA, 19 nt, Homo sapiens
  misc_RNA (1)...(19): siRNA sense strand
agacagagaagaucacaga

SEQ ID NO: 803849 - RNA, 19 nt, Homo sapiens
  misc_RNA (1)...(19): siRNA sense strand
ucaaagaagagucaucaga

SEQ ID NO: 803850 - RNA, 19 nt, Homo sapiens
  misc_RNA (1)...(19): siRNA sense strand
uauaugagccuuuguuugg

SEQ ID NO: 803851 - RNA, 19 nt, Homo sapiens
  misc_RNA (1)...(19): siRNA sense strand
caaacagguugagcaaugu

SEQ ID NO: 803852 - RNA, 19 nt, Homo sapiens
  misc_RNA (1)...(19): siRNA sense strand
caagaggucgcuaggauuc

SEQ ID NO: 803853 - RNA, 19 nt, Homo sapiens
  misc_RNA (1)...(19): siRNA sense strand
gaucucuacccuaacagua

SEQ ID NO: 803854 - RNA, 19 nt, Homo sapiens
  misc_RNA (1)...(19): siRNA sense strand
caaaugaagaucaauguac

SEQ ID NO: 803855 - RNA, 19 nt, Homo sapiens
  misc_RNA (1)...(19): siRNA sense strand
ugccuuacuucaaagauuu

SEQ ID NO: 803856 - RNA, 19 nt, Homo sapiens
  misc_RNA (1)...(19): siRNA sense strand
uaaggagacagaugacauu

SEQ ID NO: 803857 - RNA, 19 nt, Homo sapiens
  misc_RNA (1)...(19): siRNA sense strand
gaauaguggaguuucaaug

SEQ ID NO: 803858 - RNA, 19 nt, Homo sapiens
  misc_RNA (1)...(19): siRNA sense strand
gaagagugcuacagauacc

SEQ ID NO: 803859 - RNA, 19 nt, Homo sapiens
  misc_RNA (1)...(19): siRNA sense strand
gugcaguccuuuacagcaa

SEQ ID NO: 803860 - RNA, 19 nt, Homo sapiens
  misc_RNA (1)...(19): siRNA sense strand
gaagcucaagguacuaguu

SEQ ID NO: 803861 - RNA, 19 nt, Homo sapiens
  misc_RNA (1)...(19): siRNA sense strand
cuaaagacaaccaaguauu

SEQ ID NO: 803862 - RNA, 19 nt, Homo sapiens
  misc_RNA (1)...(19): siRNA sense strand
cagcuguaauuaaagaaug

SEQ ID NO: 803863 - RNA, 19 nt, Homo sapiens
  misc_RNA (1)...(19): siRNA sense strand
ccagauggcaguuguaugg

SEQ ID NO: 803864 - RNA, 19 nt, Homo sapiens
  misc_RNA (1)...(19): siRNA sense strand
ggaagagugcuacagauac

SEQ ID NO: 803865 - RNA, 19 nt, Homo sapiens
  misc_RNA (1)...(19): siRNA sense strand
gaaaccacagagaaaguug

SEQ ID NO: 803866 - RNA, 19 nt, Homo sapiens
  misc_RNA (1)...(19): siRNA sense strand
caaagcaucaucugagaca

SEQ ID NO: 803867 - RNA, 19 nt, Homo sapiens
  misc_RNA (1)...(19): siRNA sense strand
gcuaaacaaaugaagauca

SEQ ID NO: 803868 - RNA, 19 nt, Homo sapiens
  misc_RNA (1)...(19): siRNA sense strand
cuacagauaccagugcuaa

SEQ ID NO: 803869 - RNA, 19 nt, Homo sapiens
  misc_RNA (1)...(19): siRNA sense strand
caaccaaguauucuucuca

SEQ ID NO: 803870 - RNA, 19 nt, Homo sapiens
  misc_RNA (1)...(19): siRNA sense strand
aaucagcccuuaacuacca

SEQ ID NO: 803871 - RNA, 19 nt, Homo sapiens
  misc_RNA (1)...(19): siRNA sense strand
ccauuaaggagacagauga

SEQ ID NO: 803872 - RNA, 19 nt, Homo sapiens
  misc_RNA (1)...(19): siRNA sense strand
gaagagccaaaccuuagau

SEQ ID NO: 803873 - RNA, 19 nt, Homo sapiens
  misc_RNA (1)...(19): siRNA sense strand
acaguaagcagcucuugaa

SEQ ID NO: 803874 - RNA, 19 nt, Homo sapiens
  misc_RNA (1)...(19): siRNA sense strand
aaaccuugcuuggaauuuc

SEQ ID NO: 803875 - RNA, 19 nt, Homo sapiens
  misc_RNA (1)...(19): siRNA sense strand
caaccaaugccuuacuuca

SEQ ID NO: 803876 - RNA, 19 nt, Homo sapiens
  misc_RNA (1)...(19): siRNA sense strand
caucuagguuugcaagagu

SEQ ID NO: 803877 - RNA, 19 nt, Homo sapiens
  misc_RNA (1)...(19): siRNA sense strand
caucaggaaccauuaagga

SEQ ID NO: 803878 - RNA, 19 nt, Homo sapiens
  misc_RNA (1)...(19): siRNA sense strand
gcccuugaccuuugcauug

SEQ ID NO: 803879 - RNA, 19 nt, Homo sapiens
  misc_RNA (1)...(19): siRNA sense strand
gagaccaguuuugauuuua

SEQ ID NO: 803880 - RNA, 19 nt, Homo sapiens
  misc_RNA (1)...(19): siRNA sense strand
cuacucaggagaccaguuu

SEQ ID NO: 803881 - RNA, 19 nt, Homo sapiens
  misc_RNA (1)...(19): siRNA sense strand
gaaaccuugcuuggaauuu

SEQ ID NO: 803882 - RNA, 19 nt, Homo sapiens
  misc_RNA (1)...(19): siRNA sense strand
gagccaaaccuuagaugca

SEQ ID NO: 803883 - RNA, 19 nt, Homo sapiens
  misc_RNA (1)...(19): siRNA sense strand
acagaugacauugaugaua

SEQ ID NO: 803884 - RNA, 19 nt, Homo sapiens
  misc_RNA (1)...(19): siRNA sense strand
aagaagagucaucagaauu

SEQ ID NO: 803885 - RNA, 19 nt, Homo sapiens
  misc_RNA (1)...(19): siRNA sense strand
aguaagcagcucuugaaua

SEQ ID NO: 803886 - RNA, 19 nt, Homo sapiens
  misc_RNA (1)...(19): siRNA sense strand
guacugugcauagaacuga

SEQ ID NO: 803887 - RNA, 19 nt, Homo sapiens
  misc_RNA (1)...(19): siRNA sense strand
caaugaaaaucagcccuua

SEQ ID NO: 803888 - RNA, 19 nt, Homo sapiens
  misc_RNA (1)...(19): siRNA sense strand
agacaaaggaaaccacaga

SEQ ID NO: 803889 - RNA, 19 nt, Homo sapiens
  misc_RNA (1)...(19): siRNA sense strand
acucaaggcucaggccauu

SEQ ID NO: 803890 - RNA, 19 nt, Homo sapiens
  misc_RNA (1)...(19): siRNA sense strand
cuucguggcucagguauca

SEQ ID NO: 803891 - RNA, 19 nt, Homo sapiens
  misc_RNA (1)...(19): siRNA sense strand
uucaaugccugucauacaa

SEQ ID NO: 803892 - RNA, 19 nt, Homo sapiens
  misc_RNA (1)...(19): siRNA sense strand
guuauaugagccuuuguuu

SEQ ID NO: 803893 - RNA, 19 nt, Homo sapiens
  misc_RNA (1)...(19): siRNA sense strand
uugcagcuguaauuaaaga

SEQ ID NO: 803894 - RNA, 19 nt, Homo sapiens
  misc_RNA (1)...(19): siRNA sense strand
agagaagaucacagaauaa

SEQ ID NO: 803895 - RNA, 19 nt, Homo sapiens
  misc_RNA (1)...(19): siRNA sense strand
gcucagguaucaaaacuuc

SEQ ID NO: 803896 - RNA, 19 nt, Homo sapiens
  misc_RNA (1)...(19): siRNA sense strand
gaaauccagauggcaguug

SEQ ID NO: 803897 - RNA, 19 nt, Homo sapiens
  misc_RNA (1)...(19): siRNA sense strand
ugaagaaaccuugcuugga

SEQ ID NO: 803898 - RNA, 19 nt, Homo sapiens
  misc_RNA (1)...(19): siRNA sense strand
gucauacugucgcugaaga

SEQ ID NO: 803899 - RNA, 19 nt, Homo sapiens
  misc_RNA (1)...(19): siRNA sense strand
gaaccgcagcgcagugaca

SEQ ID NO: 803900 - RNA, 19 nt, Homo sapiens
  misc_RNA (1)...(19): siRNA sense strand
gaaccauuaaggagacaga

SEQ ID NO: 803901 - RNA, 19 nt, Homo sapiens
  misc_RNA (1)...(19): siRNA sense strand
caagacaccuuacugauua

SEQ ID NO: 803902 - RNA, 19 nt, Homo sapiens
  misc_RNA (1)...(19): siRNA sense strand
gaaauaagguuggugauga

SEQ ID NO: 803903 - RNA, 19 nt, Homo sapiens
  misc_RNA (1)...(19): siRNA sense strand
ggagauaacuuccacugaa

SEQ ID NO: 803904 - RNA, 19 nt, Homo sapiens
  misc_RNA (1)...(19): siRNA sense strand
ggaaauugauagcauacua

SEQ ID NO: 803905 - RNA, 19 nt, Homo sapiens
  misc_RNA (1)...(19): siRNA sense strand
ggacaaagaugccggagau

SEQ ID NO: 803906 - RNA, 19 nt, Homo sapiens
  misc_RNA (1)...(19): siRNA sense strand
ccaaacagaaggauaauua

SEQ ID NO: 803907 - RNA, 19 nt, Homo sapiens
  misc_RNA (1)...(19): siRNA sense strand
ccacaauucucaugucuuu

SEQ ID NO: 803908 - RNA, 19 nt, Homo sapiens
  misc_RNA (1)...(19): siRNA sense strand
caaagaaguuguacaaaca

SEQ ID NO: 803909 - RNA, 19 nt, Homo sapiens
  misc_RNA (1)...(19): siRNA sense strand
gaggaauucugaaguguaa

SEQ ID NO: 803910 - RNA, 19 nt, Homo sapiens
  misc_RNA (1)...(19): siRNA sense strand
cuacaaagcuggaauugga

SEQ ID NO: 803911 - RNA, 19 nt, Homo sapiens
  misc_RNA (1)...(19): siRNA sense strand
ggauuucacuuccgaguuu

SEQ ID NO: 803912 - RNA, 19 nt, Homo sapiens
  misc_RNA (1)...(19): siRNA sense strand
uuaaagagcuugaggaugu

SEQ ID NO: 803913 - RNA, 19 nt, Homo sapiens
  misc_RNA (1)...(19): siRNA sense strand
caaacaagcaguaucauaa

SEQ ID NO: 803914 - RNA, 19 nt, Homo sapiens
  misc_RNA (1)...(19): siRNA sense strand
gaacgguaccuuagugaua

SEQ ID NO: 803915 - RNA, 19 nt, Homo sapiens
  misc_RNA (1)...(19): siRNA sense strand
gcagcaaccucaaauccua

SEQ ID NO: 803916 - RNA, 19 nt, Homo sapiens
  misc_RNA (1)...(19): siRNA sense strand
ggauaaacauggcaaacaa

SEQ ID NO: 803917 - RNA, 19 nt, Homo sapiens
  misc_RNA (1)...(19): siRNA sense strand
ggaagaauccucuccugua

SEQ ID NO: 803918 - RNA, 19 nt, Homo sapiens
  misc_RNA (1)...(19): siRNA sense strand
ugacauaaaugcaacaguu

SEQ ID NO: 803919 - RNA, 19 nt, Homo sapiens
  misc_RNA (1)...(19): siRNA sense strand
guuuacaacuccaagauua

SEQ ID NO: 803920 - RNA, 19 nt, Homo sapiens
  misc_RNA (1)...(19): siRNA sense strand
gaagaauccucuccuguag

SEQ ID NO: 803921 - RNA, 19 nt, Homo sapiens
  misc_RNA (1)...(19): siRNA sense strand
caagauggcacucuccuua

SEQ ID NO: 803922 - RNA, 19 nt, Homo sapiens
  misc_RNA (1)...(19): siRNA sense strand
gcaaugagaucccaagcau

SEQ ID NO: 803923 - RNA, 19 nt, Homo sapiens
  misc_RNA (1)...(19): siRNA sense strand
gcaaacaagcaguaucaua

SEQ ID NO: 803924 - RNA, 19 nt, Homo sapiens
  misc_RNA (1)...(19): siRNA sense strand
ccgaagaacugaccaauuc

SEQ ID NO: 803925 - RNA, 19 nt, Homo sapiens
  misc_RNA (1)...(19): siRNA sense strand
ggacaaaccaccaccacua

SEQ ID NO: 803926 - RNA, 19 nt, Homo sapiens
  misc_RNA (1)...(19): siRNA sense strand
gaaaagcuauggaaauuga

SEQ ID NO: 803927 - RNA, 19 nt, Homo sapiens
  misc_RNA (1)...(19): siRNA sense strand
gcaaugugcuucaguccaa

SEQ ID NO: 803928 - RNA, 19 nt, Homo sapiens
  misc_RNA (1)...(19): siRNA sense strand
gagcaucucuuugaauaug

SEQ ID NO: 803929 - RNA, 19 nt, Homo sapiens
  misc_RNA (1)...(19): siRNA sense strand
gaaucuagacgaaggauaa

SEQ ID NO: 803930 - RNA, 19 nt, Homo sapiens
  misc_RNA (1)...(19): siRNA sense strand
ggcagaagcuggguaauga

SEQ ID NO: 803931 - RNA, 19 nt, Homo sapiens
  misc_RNA (1)...(19): siRNA sense strand
guccaagaauuccucauua

SEQ ID NO: 803932 - RNA, 19 nt, Homo sapiens
  misc_RNA (1)...(19): siRNA sense strand
gaagcuggguaaugauuga

SEQ ID NO: 803933 - RNA, 19 nt, Homo sapiens
  misc_RNA (1)...(19): siRNA sense strand
gaacaugguuagaacucuu

SEQ ID NO: 803934 - RNA, 19 nt, Homo sapiens
  misc_RNA (1)...(19): siRNA sense strand
gcaggaugcugaugaggaa

SEQ ID NO: 803935 - RNA, 19 nt, Homo sapiens
  misc_RNA (1)...(19): siRNA sense strand
ccaagaaggugcuacuuuc

SEQ ID NO: 803936 - RNA, 19 nt, Homo sapiens
  misc_RNA (1)...(19): siRNA sense strand
gaaauggaccgcaugguau

SEQ ID NO: 803937 - RNA, 19 nt, Homo sapiens
  misc_RNA (1)...(19): siRNA sense strand
guacaucacaguuauuuga

SEQ ID NO: 803938 - RNA, 19 nt, Homo sapiens
  misc_RNA (1)...(19): siRNA sense strand
gaaacugauugacugcaaa

SEQ ID NO: 803939 - RNA, 19 nt, Homo sapiens
  misc_RNA (1)...(19): siRNA sense strand
caacaucccugaggcaaga

SEQ ID NO: 803940 - RNA, 19 nt, Homo sapiens
  misc_RNA (1)...(19): siRNA sense strand
caccuuagcuggauucuuc

SEQ ID NO: 803941 - RNA, 19 nt, Homo sapiens
  misc_RNA (1)...(19): siRNA sense strand
ggaaauaacuacauauccu

SEQ ID NO: 803942 - RNA, 19 nt, Homo sapiens
  misc_RNA (1)...(19): siRNA sense strand
ugagaagacugaggagaua

SEQ ID NO: 803943 - RNA, 19 nt, Homo sapiens
  misc_RNA (1)...(19): siRNA sense strand
gcgcugggcugauauuuua

SEQ ID NO: 803944 - RNA, 19 nt, Homo sapiens
  misc_RNA (1)...(19): siRNA sense strand
uggagcaucucuuugaaua

SEQ ID NO: 803945 - RNA, 19 nt, Homo sapiens
  misc_RNA (1)...(19): siRNA sense strand
cacgggaacuuguuuguuu

SEQ ID NO: 803946 - RNA, 19 nt, Homo sapiens
  misc_RNA (1)...(19): siRNA sense strand
gaaacuagaccacagaauc

SEQ ID NO: 803947 - RNA, 19 nt, Homo sapiens
  misc_RNA (1)...(19): siRNA sense strand
caaccacaauggaguuauu

SEQ ID NO: 803948 - RNA, 19 nt, Homo sapiens
  misc_RNA (1)...(19): siRNA sense strand
ugaggaagcucuuuacuac

SEQ ID NO: 803949 - RNA, 19 nt, Homo sapiens
  misc_RNA (1)...(19): siRNA sense strand
gcacucuccuuauucagaa

SEQ ID NO: 803950 - RNA, 19 nt, Homo sapiens
  misc_RNA (1)...(19): siRNA sense strand
acaacucucucaagcauaa

SEQ ID NO: 803951 - RNA, 19 nt, Homo sapiens
  misc_RNA (1)...(19): siRNA sense strand
gaagaauccucagcagaug

SEQ ID NO: 803952 - RNA, 19 nt, Homo sapiens
  misc_RNA (1)...(19): siRNA sense strand
acaacaagaucgaguuuau

SEQ ID NO: 803953 - RNA, 19 nt, Homo sapiens
  misc_RNA (1)...(19): siRNA sense strand
caacuuacauccacgucuu

SEQ ID NO: 803954 - RNA, 19 nt, Homo sapiens
  misc_RNA (1)...(19): siRNA sense strand
ggaaacugauugacugcaa

SEQ ID NO: 803955 - RNA, 19 nt, Homo sapiens
  misc_RNA (1)...(19): siRNA sense strand
caagaacgguaccuuagug

SEQ ID NO: 803956 - RNA, 19 nt, Homo sapiens
  misc_RNA (1)...(19): siRNA sense strand
ccagauacuuuguaacuuc

SEQ ID NO: 803957 - RNA, 19 nt, Homo sapiens
  misc_RNA (1)...(19): siRNA sense strand
gcaccugacauuaagauuu

SEQ ID NO: 803958 - RNA, 19 nt, Homo sapiens
  misc_RNA (1)...(19): siRNA sense strand
caacauccaccuugugaaa

SEQ ID NO: 803959 - RNA, 19 nt, Homo sapiens
  misc_RNA (1)...(19): siRNA sense strand
ugaaagcgcccauggauga

SEQ ID NO: 803960 - RNA, 19 nt, Homo sapiens
  misc_RNA (1)...(19): siRNA sense strand
ccaaagaaguuguacaaac

SEQ ID NO: 803961 - RNA, 19 nt, Homo sapiens
  misc_RNA (1)...(19): siRNA sense strand
guauacauguugccaaaug

SEQ ID NO: 803962 - RNA, 19 nt, Homo sapiens
  misc_RNA (1)...(19): siRNA sense strand
gaacugaccaauucaaugg

SEQ ID NO: 803963 - RNA, 19 nt, Homo sapiens
  misc_RNA (1)...(19): siRNA sense strand
cagcauuccuaguaaguuu

SEQ ID NO: 803964 - RNA, 19 nt, Homo sapiens
  misc_RNA (1)...(19): siRNA sense strand
ggagacuucugcauccaaa

SEQ ID NO: 803965 - RNA, 19 nt, Homo sapiens
  misc_RNA (1)...(19): siRNA sense strand
ggaagacgguguggauuca

SEQ ID NO: 803966 - RNA, 19 nt, Homo sapiens
  misc_RNA (1)...(19): siRNA sense strand
gaugaaaccggccaagauu

SEQ ID NO: 803967 - RNA, 19 nt, Homo sapiens
  misc_RNA (1)...(19): siRNA sense strand
gugcguagcucgaaauaag

SEQ ID NO: 803968 - RNA, 19 nt, Homo sapiens
  misc_RNA (1)...(19): siRNA sense strand
acaaagcgcuuccagauac

SEQ ID NO: 803969 - RNA, 19 nt, Homo sapiens
  misc_RNA (1)...(19): siRNA sense strand
gcagagaacaugguuagaa

SEQ ID NO: 803970 - RNA, 19 nt, Homo sapiens
  misc_RNA (1)...(19): siRNA sense strand
caagaaacccaguuggaaa

SEQ ID NO: 803971 - RNA, 19 nt, Homo sapiens
  misc_RNA (1)...(19): siRNA sense strand
gcaagaaacccaguuggaa

SEQ ID NO: 803972 - RNA, 19 nt, Homo sapiens
  misc_RNA (1)...(19): siRNA sense strand
acuccaagauuaucaagua

SEQ ID NO: 803973 - RNA, 19 nt, Homo sapiens
  misc_RNA (1)...(19): siRNA sense strand
ccaaacaaacaucgauaua

SEQ ID NO: 803974 - RNA, 19 nt, Homo sapiens
  misc_RNA (1)...(19): siRNA sense strand
ggaagaggccaaacaaaca

SEQ ID NO: 803975 - RNA, 19 nt, Homo sapiens
  misc_RNA (1)...(19): siRNA sense strand
caaagacaccacaacagua

SEQ ID NO: 803976 - RNA, 19 nt, Homo sapiens
  misc_RNA (1)...(19): siRNA sense strand
ccaaucacaucuacaagga

SEQ ID NO: 803977 - RNA, 19 nt, Homo sapiens
  misc_RNA (1)...(19): siRNA sense strand
gaaagacacagugacaauu

SEQ ID NO: 803978 - RNA, 19 nt, Homo sapiens
  misc_RNA (1)...(19): siRNA sense strand
caaacaauauccaccaaag

SEQ ID NO: 803979 - RNA, 19 nt, Homo sapiens
  misc_RNA (1)...(19): siRNA sense strand
cagggucucucuaacuuaa

SEQ ID NO: 803980 - RNA, 19 nt, Homo sapiens
  misc_RNA (1)...(19): siRNA sense strand
caaaguggauguggugaug

SEQ ID NO: 803981 - RNA, 19 nt, Homo sapiens
  misc_RNA (1)...(19): siRNA sense strand
caacaaaccggaaauaacu

SEQ ID NO: 803982 - RNA, 19 nt, Homo sapiens
  misc_RNA (1)...(19): siRNA sense strand
aagaauaucucaagcaucu

SEQ ID NO: 803983 - RNA, 19 nt, Homo sapiens
  misc_RNA (1)...(19): siRNA sense strand
gcagauguaccucuacuug

SEQ ID NO: 803984 - RNA, 19 nt, Homo sapiens
  misc_RNA (1)...(19): siRNA sense strand
gcagaguguuugaaucuag

SEQ ID NO: 803985 - RNA, 19 nt, Homo sapiens
  misc_RNA (1)...(19): siRNA sense strand
aaacggauccuccagauau

SEQ ID NO: 803986 - RNA, 19 nt, Homo sapiens
  misc_RNA (1)...(19): siRNA sense strand
caauggauguguacaagau

SEQ ID NO: 803987 - RNA, 19 nt, Homo sapiens
  misc_RNA (1)...(19): siRNA sense strand
ccugaaauguccacacaaa

SEQ ID NO: 803988 - RNA, 19 nt, Homo sapiens
  misc_RNA (1)...(19): siRNA sense strand
gaaggaacacagcauaugu

SEQ ID NO: 803989 - RNA, 19 nt, Homo sapiens
  misc_RNA (1)...(19): siRNA sense strand
gcacuucccaguccaagaa

SEQ ID NO: 803990 - RNA, 19 nt, Homo sapiens
  misc_RNA (1)...(19): siRNA sense strand
ccacaacucucucaagcau

SEQ ID NO: 803991 - RNA, 19 nt, Homo sapiens
  misc_RNA (1)...(19): siRNA sense strand
caagagagcaaauccauca

SEQ ID NO: 803992 - RNA, 19 nt, Homo sapiens
  misc_RNA (1)...(19): siRNA sense strand
gcaaacaaacagauuaauc

SEQ ID NO: 803993 - RNA, 19 nt, Homo sapiens
  misc_RNA (1)...(19): siRNA sense strand
ugaaauggaccgcauggua

SEQ ID NO: 803994 - RNA, 19 nt, Homo sapiens
  misc_RNA (1)...(19): siRNA sense strand
cgugaaagcuucugagagu

SEQ ID NO: 803995 - RNA, 19 nt, Homo sapiens
  misc_RNA (1)...(19): siRNA sense strand
gaccugcgauugugagaug

SEQ ID NO: 803996 - RNA, 19 nt, Homo sapiens
  misc_RNA (1)...(19): siRNA sense strand
gcaggacggugcagcugaa

SEQ ID NO: 803997 - RNA, 19 nt, Homo sapiens
  misc_RNA (1)...(19): siRNA sense strand
aaacugagggcccuuauga

SEQ ID NO: 803998 - RNA, 19 nt, Homo sapiens
  misc_RNA (1)...(19): siRNA sense strand
gagagcaaauccaucacuu

SEQ ID NO: 803999 - RNA, 19 nt, Homo sapiens
  misc_RNA (1)...(19): siRNA sense strand
caagucaaguggagaguuc

SEQ ID NO: 804000 - RNA, 19 nt, Homo sapiens
  misc_RNA (1)...(19): siRNA sense strand
caagaucgaggccaguaua

SEQ ID NO: 804001 - RNA, 19 nt, Homo sapiens
  misc_RNA (1)...(19): siRNA sense strand
ggacauggcuuggcuguuc

SEQ ID NO: 804002 - RNA, 19 nt, Homo sapiens
  misc_RNA (1)...(19): siRNA sense strand
caacgucuguggaaugaug

SEQ ID NO: 804003 - RNA, 19 nt, Homo sapiens
  misc_RNA (1)...(19): siRNA sense strand
gcuaccaccuggaugcuaa

SEQ ID NO: 804004 - RNA, 19 nt, Homo sapiens
  misc_RNA (1)...(19): siRNA sense strand
gccaaccgauccaguauca

SEQ ID NO: 804005 - RNA, 19 nt, Homo sapiens
  misc_RNA (1)...(19): siRNA sense strand
ccacacaacuggcaaucca

SEQ ID NO: 804006 - RNA, 19 nt, Homo sapiens
  misc_RNA (1)...(19): siRNA sense strand
ucucuaaacugguccacaa

SEQ ID NO: 804007 - RNA, 19 nt, Homo sapiens
  misc_RNA (1)...(19): siRNA sense strand
caccagaacuuuacaaucc

SEQ ID NO: 804008 - RNA, 19 nt, Homo sapiens
  misc_RNA (1)...(19): siRNA sense strand
caucaccaaugacaagaga

SEQ ID NO: 804009 - RNA, 19 nt, Homo sapiens
  misc_RNA (1)...(19): siRNA sense strand
ccagaacuuuacaauccua

SEQ ID NO: 804010 - RNA, 19 nt, Homo sapiens
  misc_RNA (1)...(19): siRNA sense strand
gaagugggcagaagaacuc

SEQ ID NO: 804011 - RNA, 19 nt, Homo sapiens
  misc_RNA (1)...(19): siRNA sense strand
caaccgauccaguaucaug

SEQ ID NO: 804012 - RNA, 19 nt, Homo sapiens
  misc_RNA (1)...(19): siRNA sense strand
cuaaacugguccacaaugu

SEQ ID NO: 804013 - RNA, 19 nt, Homo sapiens
  misc_RNA (1)...(19): siRNA sense strand
gcgugcagguggugauuga

SEQ ID NO: 804014 - RNA, 19 nt, Homo sapiens
  misc_RNA (1)...(19): siRNA sense strand
gaguucuggucccugcuua

SEQ ID NO: 804015 - RNA, 19 nt, Homo sapiens
  misc_RNA (1)...(19): siRNA sense strand
gaaaguguccaucccugau

SEQ ID NO: 804016 - RNA, 19 nt, Homo sapiens
  misc_RNA (1)...(19): siRNA sense strand
ggaccaacgucuguggaau

SEQ ID NO: 804017 - RNA, 19 nt, Homo sapiens
  misc_RNA (1)...(19): siRNA sense strand
gagccuguguggccuacuu

SEQ ID NO: 804018 - RNA, 19 nt, Homo sapiens
  misc_RNA (1)...(19): siRNA sense strand
acaauuacacugauaagga

SEQ ID NO: 804019 - RNA, 19 nt, Homo sapiens
  misc_RNA (1)...(19): siRNA sense strand
ccagagacaggaccagaaa

SEQ ID NO: 804020 - RNA, 19 nt, Homo sapiens
  misc_RNA (1)...(19): siRNA sense strand
uggaaaagcucaagcaaga

SEQ ID NO: 804021 - RNA, 19 nt, Homo sapiens
  misc_RNA (1)...(19): siRNA sense strand
uggaauauuucaguaguga

SEQ ID NO: 804022 - RNA, 19 nt, Homo sapiens
  misc_RNA (1)...(19): siRNA sense strand
auaaccacaucaccaauga

SEQ ID NO: 804023 - RNA, 19 nt, Homo sapiens
  misc_RNA (1)...(19): siRNA sense strand
guccugacuugaacucauu

SEQ ID NO: 804024 - RNA, 19 nt, Homo sapiens
  misc_RNA (1)...(19): siRNA sense strand
uguguggccuacuuccuua

SEQ ID NO: 804025 - RNA, 19 nt, Homo sapiens
  misc_RNA (1)...(19): siRNA sense strand
gaaagcaucaaguccucuu

SEQ ID NO: 804026 - RNA, 19 nt, Homo sapiens
  misc_RNA (1)...(19): siRNA sense strand
gcuggacagugccuuggaa

SEQ ID NO: 804027 - RNA, 19 nt, Homo sapiens
  misc_RNA (1)...(19): siRNA sense strand
ccaccuggaugcuaacucu

SEQ ID NO: 804028 - RNA, 19 nt, Homo sapiens
  misc_RNA (1)...(19): siRNA sense strand
uuaaaggccugaaggaaaa

SEQ ID NO: 804029 - RNA, 19 nt, Homo sapiens
  misc_RNA (1)...(19): siRNA sense strand
ccuguaagagugagacuaa

SEQ ID NO: 804030 - RNA, 19 nt, Homo sapiens
  misc_RNA (1)...(19): siRNA sense strand
uggccuacuuccuuacuaa

SEQ ID NO: 804031 - RNA, 19 nt, Homo sapiens
  misc_RNA (1)...(19): siRNA sense strand
ggacagugccuuggaagag

SEQ ID NO: 804032 - RNA, 19 nt, Homo sapiens
  misc_RNA (1)...(19): siRNA sense strand
caaagccaaccguguguau

SEQ ID NO: 804033 - RNA, 19 nt, Homo sapiens
  misc_RNA (1)...(19): siRNA sense strand
ccaguaucaugaggcauuu

SEQ ID NO: 804034 - RNA, 19 nt, Homo sapiens
  misc_RNA (1)...(19): siRNA sense strand
gggaucuuguacucucuaa

SEQ ID NO: 804035 - RNA, 19 nt, Homo sapiens
  misc_RNA (1)...(19): siRNA sense strand
gaggaagugggcagaagaa

SEQ ID NO: 804036 - RNA, 19 nt, Homo sapiens
  misc_RNA (1)...(19): siRNA sense strand
gaucuuguacucucuaaac

SEQ ID NO: 804037 - RNA, 19 nt, Homo sapiens
  misc_RNA (1)...(19): siRNA sense strand
gaccaacgucuguggaaug

SEQ ID NO: 804038 - RNA, 19 nt, Homo sapiens
  misc_RNA (1)...(19): siRNA sense strand
ccacaucaccaaugacaag

SEQ ID NO: 804039 - RNA, 19 nt, Homo sapiens
  misc_RNA (1)...(19): siRNA sense strand
uuuaaaggccugaaggaaa

SEQ ID NO: 804040 - RNA, 19 nt, Homo sapiens
  misc_RNA (1)...(19): siRNA sense strand
gacagugccuuggaagagu

SEQ ID NO: 804041 - RNA, 19 nt, Homo sapiens
  misc_RNA (1)...(19): siRNA sense strand
gcaccuggcuccccaucuu

SEQ ID NO: 804042 - RNA, 19 nt, Homo sapiens
  misc_RNA (1)...(19): siRNA sense strand
gcaguggguuuggcugaag

SEQ ID NO: 804043 - RNA, 19 nt, Homo sapiens
  misc_RNA (1)...(19): siRNA sense strand
gcuccugcauguuaucuac

SEQ ID NO: 804044 - RNA, 19 nt, Homo sapiens
  misc_RNA (1)...(19): siRNA sense strand
ucaccaaugacaagagauu

SEQ ID NO: 804045 - RNA, 19 nt, Homo sapiens
  misc_RNA (1)...(19): siRNA sense strand
augauuacguggccucuga

SEQ ID NO: 804046 - RNA, 19 nt, Homo sapiens
  misc_RNA (1)...(19): siRNA sense strand
guaagagugagacuaaugg

SEQ ID NO: 804047 - RNA, 19 nt, Homo sapiens
  misc_RNA (1)...(19): siRNA sense strand
gacauggcuuggcuguuca

SEQ ID NO: 804048 - RNA, 19 nt, Homo sapiens
  misc_RNA (1)...(19): siRNA sense strand
ccaagaagaggaagaugag

SEQ ID NO: 804049 - RNA, 19 nt, Homo sapiens
  misc_RNA (1)...(19): siRNA sense strand
acacugauaaggagcuaaa

SEQ ID NO: 804050 - RNA, 19 nt, Homo sapiens
  misc_RNA (1)...(19): siRNA sense strand
ugaccaguccccacaauua

SEQ ID NO: 804051 - RNA, 19 nt, Homo sapiens
  misc_RNA (1)...(19): siRNA sense strand
cauaaccacaucaccaaug

SEQ ID NO: 804052 - RNA, 19 nt, Homo sapiens
  misc_RNA (1)...(19): siRNA sense strand
caauccuaauuuccaagaa

SEQ ID NO: 804053 - RNA, 19 nt, Homo sapiens
  misc_RNA (1)...(19): siRNA sense strand
ggaagugggcagaagaacu

SEQ ID NO: 804054 - RNA, 19 nt, Homo sapiens
  misc_RNA (1)...(19): siRNA sense strand
guccuucagugccaccauu

SEQ ID NO: 804055 - RNA, 19 nt, Homo sapiens
  misc_RNA (1)...(19): siRNA sense strand
ggucugaaagcaucaaguc

SEQ ID NO: 804056 - RNA, 19 nt, Homo sapiens
  misc_RNA (1)...(19): siRNA sense strand
gccugggccucucaaggaa

SEQ ID NO: 804057 - RNA, 19 nt, Homo sapiens
  misc_RNA (1)...(19): siRNA sense strand
ucgauaaggcaguggguuu

SEQ ID NO: 804058 - RNA, 19 nt, Homo sapiens
  misc_RNA (1)...(19): siRNA sense strand
uguaugggccucccucaga

SEQ ID NO: 804059 - RNA, 19 nt, Homo sapiens
  misc_RNA (1)...(19): siRNA sense strand
aaccugcuguccugacuug

SEQ ID NO: 804060 - RNA, 19 nt, Homo sapiens
  misc_RNA (1)...(19): siRNA sense strand
ggcaguggguuuggcugaa

SEQ ID NO: 804061 - RNA, 19 nt, Homo sapiens
  misc_RNA (1)...(19): siRNA sense strand
cagaggaagugggcagaag

SEQ ID NO: 804062 - RNA, 19 nt, Homo sapiens
  misc_RNA (1)...(19): siRNA sense strand
ucuaccagcgggucgauaa

SEQ ID NO: 804063 - RNA, 19 nt, Homo sapiens
  misc_RNA (1)...(19): siRNA sense strand
gcauaaccacaucaccaau

SEQ ID NO: 804064 - RNA, 19 nt, Homo sapiens
  misc_RNA (1)...(19): siRNA sense strand
ucucuagggcugaccguuu

SEQ ID NO: 804065 - RNA, 19 nt, Homo sapiens
  misc_RNA (1)...(19): siRNA sense strand
accaacgucuguggaauga

SEQ ID NO: 804066 - RNA, 19 nt, Homo sapiens
  misc_RNA (1)...(19): siRNA sense strand
gguggaaaaggaugaauaa

SEQ ID NO: 804067 - RNA, 19 nt, Homo sapiens
  misc_RNA (1)...(19): siRNA sense strand
uguaagagugagacuaaug

SEQ ID NO: 804068 - RNA, 19 nt, Homo sapiens
  misc_RNA (1)...(19): siRNA sense strand
ccagcuccuuccaccagaa

SEQ ID NO: 804069 - RNA, 19 nt, Homo sapiens
  misc_RNA (1)...(19): siRNA sense strand
ccaaugacaagagauucaa

SEQ ID NO: 804070 - RNA, 19 nt, Homo sapiens
  misc_RNA (1)...(19): siRNA sense strand
aauccuaauuuccaagaag

SEQ ID NO: 804071 - RNA, 19 nt, Homo sapiens
  misc_RNA (1)...(19): siRNA sense strand
ccaccagaacuuuacaauc

SEQ ID NO: 804072 - RNA, 19 nt, Homo sapiens
  misc_RNA (1)...(19): siRNA sense strand
ccaaagccaaccgugugua

SEQ ID NO: 804073 - RNA, 19 nt, Homo sapiens
  misc_RNA (1)...(19): siRNA sense strand
guggccuacuuccuuacua

SEQ ID NO: 804074 - RNA, 19 nt, Homo sapiens
  misc_RNA (1)...(19): siRNA sense strand
uccaagaagaggaagauga

SEQ ID NO: 804075 - RNA, 19 nt, Homo sapiens
  misc_RNA (1)...(19): siRNA sense strand
cuuggaauauuucaguagu

SEQ ID NO: 804076 - RNA, 19 nt, Homo sapiens
  misc_RNA (1)...(19): siRNA sense strand
cgauaaggcaguggguuug

SEQ ID NO: 804077 - RNA, 19 nt, Homo sapiens
  misc_RNA (1)...(19): siRNA sense strand
gaagcugcucugggucuug

SEQ ID NO: 804078 - RNA, 19 nt, Homo sapiens
  misc_RNA (1)...(19): siRNA sense strand
gaugugacagaggaacuga

SEQ ID NO: 804079 - RNA, 19 nt, Homo sapiens
  misc_RNA (1)...(19): siRNA sense strand
gaugauaucuucacuguca

SEQ ID NO: 804080 - RNA, 19 nt, Homo sapiens
  misc_RNA (1)...(19): siRNA sense strand
gaagguauaugcugcugaa

SEQ ID NO: 804081 - RNA, 19 nt, Homo sapiens
  misc_RNA (1)...(19): siRNA sense strand
ggaauagcaauuacaguua

SEQ ID NO: 804082 - RNA, 19 nt, Homo sapiens
  misc_RNA (1)...(19): siRNA sense strand
uugaacaccuggccuauua

SEQ ID NO: 804083 - RNA, 19 nt, Homo sapiens
  misc_RNA (1)...(19): siRNA sense strand
gacuuaaccuccuccauaa

SEQ ID NO: 804084 - RNA, 19 nt, Homo sapiens
  misc_RNA (1)...(19): siRNA sense strand
ucacagaggaugaaauuaa

SEQ ID NO: 804085 - RNA, 19 nt, Homo sapiens
  misc_RNA (1)...(19): siRNA sense strand
gcucagugguggaaaugua

SEQ ID NO: 804086 - RNA, 19 nt, Homo sapiens
  misc_RNA (1)...(19): siRNA sense strand
ucagggaccuuguggauga

SEQ ID NO: 804087 - RNA, 19 nt, Homo sapiens
  misc_RNA (1)...(19): siRNA sense strand
cgaaagcuguuguuacuca

SEQ ID NO: 804088 - RNA, 19 nt, Homo sapiens
  misc_RNA (1)...(19): siRNA sense strand
cauagcagauggugucaaa

SEQ ID NO: 804089 - RNA, 19 nt, Homo sapiens
  misc_RNA (1)...(19): siRNA sense strand
aaacugaugcccaaucuuu

SEQ ID NO: 804090 - RNA, 19 nt, Homo sapiens
  misc_RNA (1)...(19): siRNA sense strand
ggaaacugaugcccaaucu

SEQ ID NO: 804091 - RNA, 19 nt, Homo sapiens
  misc_RNA (1)...(19): siRNA sense strand
gaggaaugcuugcuggaau

SEQ ID NO: 804092 - RNA, 19 nt, Homo sapiens
  misc_RNA (1)...(19): siRNA sense strand
agacuuaaccuccuccaua

SEQ ID NO: 804093 - RNA, 19 nt, Homo sapiens
  misc_RNA (1)...(19): siRNA sense strand
cuacggagcgucaauugua

SEQ ID NO: 804094 - RNA, 19 nt, Homo sapiens
  misc_RNA (1)...(19): siRNA sense strand
caccuaugcugccaaauug

SEQ ID NO: 804095 - RNA, 19 nt, Homo sapiens
  misc_RNA (1)...(19): siRNA sense strand
gagcgucaauuguauacug

SEQ ID NO: 804096 - RNA, 19 nt, Homo sapiens
  misc_RNA (1)...(19): siRNA sense strand
ggaauuccugcuuauauug

SEQ ID NO: 804097 - RNA, 19 nt, Homo sapiens
  misc_RNA (1)...(19): siRNA sense strand
aaugugaacucuuccagaa

SEQ ID NO: 804098 - RNA, 19 nt, Homo sapiens
  misc_RNA (1)...(19): siRNA sense strand
ugguggaaauguagacuua

SEQ ID NO: 804099 - RNA, 19 nt, Homo sapiens
  misc_RNA (1)...(19): siRNA sense strand
gccgaaagcuguuguuacu

SEQ ID NO: 804100 - RNA, 19 nt, Homo sapiens
  misc_RNA (1)...(19): siRNA sense strand
gcucugaaaccuaguguga

SEQ ID NO: 804101 - RNA, 19 nt, Homo sapiens
  misc_RNA (1)...(19): siRNA sense strand
ggugucaaauccagcauug

SEQ ID NO: 804102 - RNA, 19 nt, Homo sapiens
  misc_RNA (1)...(19): siRNA sense strand
gcugugcugucucaacauu

SEQ ID NO: 804103 - RNA, 19 nt, Homo sapiens
  misc_RNA (1)...(19): siRNA sense strand
cugaaaggccagcuucuua

SEQ ID NO: 804104 - RNA, 19 nt, Homo sapiens
  misc_RNA (1)...(19): siRNA sense strand
cuaacaagcuccauuuuga

SEQ ID NO: 804105 - RNA, 19 nt, Homo sapiens
  misc_RNA (1)...(19): siRNA sense strand
ucaccuaugcugccaaauu

SEQ ID NO: 804106 - RNA, 19 nt, Homo sapiens
  misc_RNA (1)...(19): siRNA sense strand
cauaucaacauucgagauu

SEQ ID NO: 804107 - RNA, 19 nt, Homo sapiens
  misc_RNA (1)...(19): siRNA sense strand
gaaaggccagcuucuuauc

SEQ ID NO: 804108 - RNA, 19 nt, Homo sapiens
  misc_RNA (1)...(19): siRNA sense strand
uggaugauaucuucacugu

SEQ ID NO: 804109 - RNA, 19 nt, Homo sapiens
  misc_RNA (1)...(19): siRNA sense strand
aggaaugcuugcuggaaua

SEQ ID NO: 804110 - RNA, 19 nt, Homo sapiens
  misc_RNA (1)...(19): siRNA sense strand
cagagaaaauguugcaaaa

SEQ ID NO: 804111 - RNA, 19 nt, Homo sapiens
  misc_RNA (1)...(19): siRNA sense strand
gaaccuacagcugguguug

SEQ ID NO: 804112 - RNA, 19 nt, Homo sapiens
  misc_RNA (1)...(19): siRNA sense strand
gaacaccuggccuauuauc

SEQ ID NO: 804113 - RNA, 19 nt, Homo sapiens
  misc_RNA (1)...(19): siRNA sense strand
ucagucuguuucuguuuaa

SEQ ID NO: 804114 - RNA, 19 nt, Homo sapiens
  misc_RNA (1)...(19): siRNA sense strand
ucacagcaguggaaaccau

SEQ ID NO: 804115 - RNA, 19 nt, Homo sapiens
  misc_RNA (1)...(19): siRNA sense strand
ccagaaguaaagaacauuu

SEQ ID NO: 804116 - RNA, 19 nt, Homo sapiens
  misc_RNA (1)...(19): siRNA sense strand
gugcuaacaagcuccauuu

SEQ ID NO: 804117 - RNA, 19 nt, Homo sapiens
  misc_RNA (1)...(19): siRNA sense strand
cacagaggaugaaauuaag

SEQ ID NO: 804118 - RNA, 19 nt, Homo sapiens
  misc_RNA (1)...(19): siRNA sense strand
uggaauagcaauuacaguu

SEQ ID NO: 804119 - RNA, 19 nt, Homo sapiens
  misc_RNA (1)...(19): siRNA sense strand
gaagaaacagaaggcauca

SEQ ID NO: 804120 - RNA, 19 nt, Homo sapiens
  misc_RNA (1)...(19): siRNA sense strand
cagaaggcaucaugguaca

SEQ ID NO: 804121 - RNA, 19 nt, Homo sapiens
  misc_RNA (1)...(19): siRNA sense strand
ugaaaggccagcuucuuau

SEQ ID NO: 804122 - RNA, 19 nt, Homo sapiens
  misc_RNA (1)...(19): siRNA sense strand
ugucacagaggaugaaauu

SEQ ID NO: 804123 - RNA, 19 nt, Homo sapiens
  misc_RNA (1)...(19): siRNA sense strand
cuaacagggcgcaaucuuu

SEQ ID NO: 804124 - RNA, 19 nt, Homo sapiens
  misc_RNA (1)...(19): siRNA sense strand
ggaggaaugcuugcuggaa

SEQ ID NO: 804125 - RNA, 19 nt, Homo sapiens
  misc_RNA (1)...(19): siRNA sense strand
cgucaauuguauacuguga

SEQ ID NO: 804126 - RNA, 19 nt, Homo sapiens
  misc_RNA (1)...(19): siRNA sense strand
cuugguuccugaugcuuua

SEQ ID NO: 804127 - RNA, 19 nt, Homo sapiens
  misc_RNA (1)...(19): siRNA sense strand
gaauuccugcuuauauugu

SEQ ID NO: 804128 - RNA, 19 nt, Homo sapiens
  misc_RNA (1)...(19): siRNA sense strand
ucacaccagugcuaacaag

SEQ ID NO: 804129 - RNA, 19 nt, Homo sapiens
  misc_RNA (1)...(19): siRNA sense strand
uaacagggcgcaaucuuuu

SEQ ID NO: 804130 - RNA, 19 nt, Homo sapiens
  misc_RNA (1)...(19): siRNA sense strand
caacuaacagggcgcaauc

SEQ ID NO: 804131 - RNA, 19 nt, Homo sapiens
  misc_RNA (1)...(19): siRNA sense strand
gggagaggaugaaacuacu

SEQ ID NO: 804132 - RNA, 19 nt, Homo sapiens
  misc_RNA (1)...(19): siRNA sense strand
gccaggcucucaccuaugc

SEQ ID NO: 804133 - RNA, 19 nt, Homo sapiens
  misc_RNA (1)...(19): siRNA sense strand
gagaggaugaaacuacuca

SEQ ID NO: 804134 - RNA, 19 nt, Homo sapiens
  misc_RNA (1)...(19): siRNA sense strand
ccagaaaccauagcagaug

SEQ ID NO: 804135 - RNA, 19 nt, Homo sapiens
  misc_RNA (1)...(19): siRNA sense strand
ucugaaaccuagugugaag

SEQ ID NO: 804136 - RNA, 19 nt, Homo sapiens
  misc_RNA (1)...(19): siRNA sense strand
gcacuggugguaccuguag

SEQ ID NO: 804137 - RNA, 19 nt, Homo sapiens
  misc_RNA (1)...(19): siRNA sense strand
ggacaauugcccuggaagu

SEQ ID NO: 804138 - RNA, 19 nt, Homo sapiens
  misc_RNA (1)...(19): siRNA sense strand
agaaacagaaggcaucaug

SEQ ID NO: 804139 - RNA, 19 nt, Homo sapiens
  misc_RNA (1)...(19): siRNA sense strand
agugaugaguccagagaaa

SEQ ID NO: 804140 - RNA, 19 nt, Homo sapiens
  misc_RNA (1)...(19): siRNA sense strand
uaucaacauucgagauucu

SEQ ID NO: 804141 - RNA, 19 nt, Homo sapiens
  misc_RNA (1)...(19): siRNA sense strand
gaaggcaucaugguacauc

SEQ ID NO: 804142 - RNA, 19 nt, Homo sapiens
  misc_RNA (1)...(19): siRNA sense strand
aaacuacucauugaaccua

SEQ ID NO: 804143 - RNA, 19 nt, Homo sapiens
  misc_RNA (1)...(19): siRNA sense strand
uggccaggcucucaccuau

SEQ ID NO: 804144 - RNA, 19 nt, Homo sapiens
  misc_RNA (1)...(19): siRNA sense strand
ccuuguggaugauaucuuc

SEQ ID NO: 804145 - RNA, 19 nt, Homo sapiens
  misc_RNA (1)...(19): siRNA sense strand
uagcagauggugucaaauc

SEQ ID NO: 804146 - RNA, 19 nt, Homo sapiens
  misc_RNA (1)...(19): siRNA sense strand
ucaauuguauacugugaac

SEQ ID NO: 804147 - RNA, 19 nt, Homo sapiens
  misc_RNA (1)...(19): siRNA sense strand
caaucuuuauccuccagaa

SEQ ID NO: 804148 - RNA, 19 nt, Homo sapiens
  misc_RNA (1)...(19): siRNA sense strand
gacaauugcccuggaagug

SEQ ID NO: 804149 - RNA, 19 nt, Homo sapiens
  misc_RNA (1)...(19): siRNA sense strand
ucucaccuaugcugccaaa

SEQ ID NO: 804150 - RNA, 19 nt, Homo sapiens
  misc_RNA (1)...(19): siRNA sense strand
aucagucuguuucuguuua

SEQ ID NO: 804151 - RNA, 19 nt, Homo sapiens
  misc_RNA (1)...(19): siRNA sense strand
guggaaauguagacuuaac

SEQ ID NO: 804152 - RNA, 19 nt, Homo sapiens
  misc_RNA (1)...(19): siRNA sense strand
guuaaggcucugaaaccua

SEQ ID NO: 804153 - RNA, 19 nt, Homo sapiens
  misc_RNA (1)...(19): siRNA sense strand
uaaccuccuccauaacuug

SEQ ID NO: 804154 - RNA, 19 nt, Homo sapiens
  misc_RNA (1)...(19): siRNA sense strand
cagaaguaaagaacauuug

SEQ ID NO: 804155 - RNA, 19 nt, Homo sapiens
  misc_RNA (1)...(19): siRNA sense strand
aaacagaaggcaucauggu

SEQ ID NO: 804156 - RNA, 19 nt, Homo sapiens
  misc_RNA (1)...(19): siRNA sense strand
cuccuuugcugauguugaa

SEQ ID NO: 804157 - RNA, 19 nt, Homo sapiens
  misc_RNA (1)...(19): siRNA sense strand
gaaacugaugcccaaucuu

SEQ ID NO: 804158 - RNA, 19 nt, Homo sapiens
  misc_RNA (1)...(19): siRNA sense strand
gcuggacaagggacaauug

SEQ ID NO: 804159 - RNA, 19 nt, Homo sapiens
  misc_RNA (1)...(19): siRNA sense strand
ucaaugccgucagaagcuu

SEQ ID NO: 804160 - RNA, 19 nt, Homo sapiens
  misc_RNA (1)...(19): siRNA sense strand
ccaccucacaccagugcua

SEQ ID NO: 804161 - RNA, 19 nt, Homo sapiens
  misc_RNA (1)...(19): siRNA sense strand
gaugaaauuaagugugcaa

SEQ ID NO: 804162 - RNA, 19 nt, Homo sapiens
  misc_RNA (1)...(19): siRNA sense strand
caagcuccauuuugaauca

SEQ ID NO: 804163 - RNA, 19 nt, Homo sapiens
  misc_RNA (1)...(19): siRNA sense strand
uaucagggaccuuguggau

SEQ ID NO: 804164 - RNA, 19 nt, Homo sapiens
  misc_RNA (1)...(19): siRNA sense strand
aacagaaggcaucauggua

SEQ ID NO: 804165 - RNA, 19 nt, Homo sapiens
  misc_RNA (1)...(19): siRNA sense strand
uacggagcgucaauuguau

SEQ ID NO: 804166 - RNA, 19 nt, Homo sapiens
  misc_RNA (1)...(19): siRNA sense strand
gauucguggugcucucaau

SEQ ID NO: 804167 - RNA, 19 nt, Homo sapiens
  misc_RNA (1)...(19): siRNA sense strand
ugugaacucuuccagaaaa

SEQ ID NO: 804168 - RNA, 19 nt, Homo sapiens
  misc_RNA (1)...(19): siRNA sense strand
gcaaucuuuucuucaaaug

SEQ ID NO: 804169 - RNA, 19 nt, Homo sapiens
  misc_RNA (1)...(19): siRNA sense strand
ggaaugcuugcuggaauag

SEQ ID NO: 804170 - RNA, 19 nt, Homo sapiens
  misc_RNA (1)...(19): siRNA sense strand
cugcugugcugucucaaca

SEQ ID NO: 804171 - RNA, 19 nt, Homo sapiens
  misc_RNA (1)...(19): siRNA sense strand
uggcugcugugcugucuca

SEQ ID NO: 804172 - RNA, 19 nt, Homo sapiens
  misc_RNA (1)...(19): siRNA sense strand
cagaggaugaaauuaagug

SEQ ID NO: 804173 - RNA, 19 nt, Homo sapiens
  misc_RNA (1)...(19): siRNA sense strand
gggaccuuguggaugauau

SEQ ID NO: 804174 - RNA, 19 nt, Homo sapiens
  misc_RNA (1)...(19): siRNA sense strand
caacauucgagauucuauc

SEQ ID NO: 804175 - RNA, 19 nt, Homo sapiens
  misc_RNA (1)...(19): siRNA sense strand
gcgcaaucuuuucuucaaa

SEQ ID NO: 804176 - RNA, 19 nt, Homo sapiens
  misc_RNA (1)...(19): siRNA sense strand
uuaucagucuguuucuguu

SEQ ID NO: 804177 - RNA, 19 nt, Homo sapiens
  misc_RNA (1)...(19): siRNA sense strand
gggaaacugaugcccaauc

SEQ ID NO: 804178 - RNA, 19 nt, Homo sapiens
  misc_RNA (1)...(19): siRNA sense strand
aaaggccagcuucuuauca

SEQ ID NO: 804179 - RNA, 19 nt, Homo sapiens
  misc_RNA (1)...(19): siRNA sense strand
gaagaugacuggucugauu

SEQ ID NO: 804180 - RNA, 19 nt, Homo sapiens
  misc_RNA (1)...(19): siRNA sense strand
gggaucaacuggaguauua

SEQ ID NO: 804181 - RNA, 19 nt, Homo sapiens
  misc_RNA (1)...(19): siRNA sense strand
gaacaugcuuucaacauug

SEQ ID NO: 804182 - RNA, 19 nt, Homo sapiens
  misc_RNA (1)...(19): siRNA sense strand
gaacagagaauaugacaga

SEQ ID NO: 804183 - RNA, 19 nt, Homo sapiens
  misc_RNA (1)...(19): siRNA sense strand
caucuaaacuguaugcuuu

SEQ ID NO: 804184 - RNA, 19 nt, Homo sapiens
  misc_RNA (1)...(19): siRNA sense strand
cagagaauaugacagauuu

SEQ ID NO: 804185 - RNA, 19 nt, Homo sapiens
  misc_RNA (1)...(19): siRNA sense strand
gaacagcccaucacagauu

SEQ ID NO: 804186 - RNA, 19 nt, Homo sapiens
  misc_RNA (1)...(19): siRNA sense strand
gaacaagacaaacuucuga

SEQ ID NO: 804187 - RNA, 19 nt, Homo sapiens
  misc_RNA (1)...(19): siRNA sense strand
aaacagagacugagagaaa

SEQ ID NO: 804188 - RNA, 19 nt, Homo sapiens
  misc_RNA (1)...(19): siRNA sense strand
ggaagaaguucaguuggaa

SEQ ID NO: 804189 - RNA, 19 nt, Homo sapiens
  misc_RNA (1)...(19): siRNA sense strand
cagaaacaauugagaaguu

SEQ ID NO: 804190 - RNA, 19 nt, Homo sapiens
  misc_RNA (1)...(19): siRNA sense strand
ggaagaaacuaaacacacu

SEQ ID NO: 804191 - RNA, 19 nt, Homo sapiens
  misc_RNA (1)...(19): siRNA sense strand
ugaagcacaugauuauuga

SEQ ID NO: 804192 - RNA, 19 nt, Homo sapiens
  misc_RNA (1)...(19): siRNA sense strand
gaacucacauggaagaaac

SEQ ID NO: 804193 - RNA, 19 nt, Homo sapiens
  misc_RNA (1)...(19): siRNA sense strand
gggaagaaguucaguugga

SEQ ID NO: 804194 - RNA, 19 nt, Homo sapiens
  misc_RNA (1)...(19): siRNA sense strand
ucaaguugguugcugauuu

SEQ ID NO: 804195 - RNA, 19 nt, Homo sapiens
  misc_RNA (1)...(19): siRNA sense strand
aaacagcaucguaagauua

SEQ ID NO: 804196 - RNA, 19 nt, Homo sapiens
  misc_RNA (1)...(19): siRNA sense strand
aagugaaacuggucaauuu

SEQ ID NO: 804197 - RNA, 19 nt, Homo sapiens
  misc_RNA (1)...(19): siRNA sense strand
cuuaagaacucacauggaa

SEQ ID NO: 804198 - RNA, 19 nt, Homo sapiens
  misc_RNA (1)...(19): siRNA sense strand
ugucauagcugaugucaag

SEQ ID NO: 804199 - RNA, 19 nt, Homo sapiens
  misc_RNA (1)...(19): siRNA sense strand
ggaggaugcacacgaauuu

SEQ ID NO: 804200 - RNA, 19 nt, Homo sapiens
  misc_RNA (1)...(19): siRNA sense strand
gaaguucaguuggaagaug

SEQ ID NO: 804201 - RNA, 19 nt, Homo sapiens
  misc_RNA (1)...(19): siRNA sense strand
ggaggcaaguucaccaaug

SEQ ID NO: 804202 - RNA, 19 nt, Homo sapiens
  misc_RNA (1)...(19): siRNA sense strand
uaauuccacugcuccauuu

SEQ ID NO: 804203 - RNA, 19 nt, Homo sapiens
  misc_RNA (1)...(19): siRNA sense strand
gaaccaguugcuacuauaa

SEQ ID NO: 804204 - RNA, 19 nt, Homo sapiens
  misc_RNA (1)...(19): siRNA sense strand
caaguugguugcugauuuc

SEQ ID NO: 804205 - RNA, 19 nt, Homo sapiens
  misc_RNA (1)...(19): siRNA sense strand
gcacacgaauuugaucuuc

SEQ ID NO: 804206 - RNA, 19 nt, Homo sapiens
  misc_RNA (1)...(19): siRNA sense strand
ggaagaugaucgggaguug

SEQ ID NO: 804207 - RNA, 19 nt, Homo sapiens
  misc_RNA (1)...(19): siRNA sense strand
gaacgaaaugauaccaauu

SEQ ID NO: 804208 - RNA, 19 nt, Homo sapiens
  misc_RNA (1)...(19): siRNA sense strand
cagcaagaacgaaaugaua

SEQ ID NO: 804209 - RNA, 19 nt, Homo sapiens
  misc_RNA (1)...(19): siRNA sense strand
agaacaugcuuucaacauu

SEQ ID NO: 804210 - RNA, 19 nt, Homo sapiens
  misc_RNA (1)...(19): siRNA sense strand
caaauccaaagcagacuua

SEQ ID NO: 804211 - RNA, 19 nt, Homo sapiens
  misc_RNA (1)...(19): siRNA sense strand
agucagaacuuggauuaaa

SEQ ID NO: 804212 - RNA, 19 nt, Homo sapiens
  misc_RNA (1)...(19): siRNA sense strand
ugaaccaguugcuacuaua

SEQ ID NO: 804213 - RNA, 19 nt, Homo sapiens
  misc_RNA (1)...(19): siRNA sense strand
gggaguugcuggaccauca

SEQ ID NO: 804214 - RNA, 19 nt, Homo sapiens
  misc_RNA (1)...(19): siRNA sense strand
caucaucagugaagauaca

SEQ ID NO: 804215 - RNA, 19 nt, Homo sapiens
  misc_RNA (1)...(19): siRNA sense strand
ucauggcguuuguauguuu

SEQ ID NO: 804216 - RNA, 19 nt, Homo sapiens
  misc_RNA (1)...(19): siRNA sense strand
aaagcaagcagaaacaauu

SEQ ID NO: 804217 - RNA, 19 nt, Homo sapiens
  misc_RNA (1)...(19): siRNA sense strand
gcacaugauuauugagcau

SEQ ID NO: 804218 - RNA, 19 nt, Homo sapiens
  misc_RNA (1)...(19): siRNA sense strand
caauugagaaguuguaugu

SEQ ID NO: 804219 - RNA, 19 nt, Homo sapiens
  misc_RNA (1)...(19): siRNA sense strand
uuaaagaucacaugaggaa

SEQ ID NO: 804220 - RNA, 19 nt, Homo sapiens
  misc_RNA (1)...(19): siRNA sense strand
uaagaacucacauggaaga

SEQ ID NO: 804221 - RNA, 19 nt, Homo sapiens
  misc_RNA (1)...(19): siRNA sense strand
ucacauggaagaaacuaaa

SEQ ID NO: 804222 - RNA, 19 nt, Homo sapiens
  misc_RNA (1)...(19): siRNA sense strand
gaucaacuggaguauuauu

SEQ ID NO: 804223 - RNA, 19 nt, Homo sapiens
  misc_RNA (1)...(19): siRNA sense strand
ccagagaacaugcuuucaa

SEQ ID NO: 804224 - RNA, 19 nt, Homo sapiens
  misc_RNA (1)...(19): siRNA sense strand
caagugaaacuggucaauu

SEQ ID NO: 804225 - RNA, 19 nt, Homo sapiens
  misc_RNA (1)...(19): siRNA sense strand
cauggaggaugcacacgaa

SEQ ID NO: 804226 - RNA, 19 nt, Homo sapiens
  misc_RNA (1)...(19): siRNA sense strand
gagaacaugcuuucaacau

SEQ ID NO: 804227 - RNA, 19 nt, Homo sapiens
  misc_RNA (1)...(19): siRNA sense strand
agaaacaauugagaaguug

SEQ ID NO: 804228 - RNA, 19 nt, Homo sapiens
  misc_RNA (1)...(19): siRNA sense strand
gaagaaacuaaacacacuu

SEQ ID NO: 804229 - RNA, 19 nt, Homo sapiens
  misc_RNA (1)...(19): siRNA sense strand
gucagaacuuggauuaaau

SEQ ID NO: 804230 - RNA, 19 nt, Homo sapiens
  misc_RNA (1)...(19): siRNA sense strand
cauagcugaugucaaguug

SEQ ID NO: 804231 - RNA, 19 nt, Homo sapiens
  misc_RNA (1)...(19): siRNA sense strand
agaacgaaaugauaccaau

SEQ ID NO: 804232 - RNA, 19 nt, Homo sapiens
  misc_RNA (1)...(19): siRNA sense strand
guucaccaaugcagauguu

SEQ ID NO: 804233 - RNA, 19 nt, Homo sapiens
  misc_RNA (1)...(19): siRNA sense strand
cagagaacaugcuuucaac

SEQ ID NO: 804234 - RNA, 19 nt, Homo sapiens
  misc_RNA (1)...(19): siRNA sense strand
gaacaacagcagcaagaac

SEQ ID NO: 804235 - RNA, 19 nt, Homo sapiens
  misc_RNA (1)...(19): siRNA sense strand
caaagcagacuuaagaacu

SEQ ID NO: 804236 - RNA, 19 nt, Homo sapiens
  misc_RNA (1)...(19): siRNA sense strand
gaaguucaaauccaaagca

SEQ ID NO: 804237 - RNA, 19 nt, Homo sapiens
  misc_RNA (1)...(19): siRNA sense strand
cuaagaacagagaauauga

SEQ ID NO: 804238 - RNA, 19 nt, Homo sapiens
  misc_RNA (1)...(19): siRNA sense strand
caucguaagauuaauccua

SEQ ID NO: 804239 - RNA, 19 nt, Homo sapiens
  misc_RNA (1)...(19): siRNA sense strand
ccacauggccagagaacau

SEQ ID NO: 804240 - RNA, 19 nt, Homo sapiens
  misc_RNA (1)...(19): siRNA sense strand
gagcauaagauugucauag

SEQ ID NO: 804241 - RNA, 19 nt, Homo sapiens
  misc_RNA (1)...(19): siRNA sense strand
gaggcaaguucaccaaugc

SEQ ID NO: 804242 - RNA, 19 nt, Homo sapiens
  misc_RNA (1)...(19): siRNA sense strand
gcauaagauugucauagcu

SEQ ID NO: 804243 - RNA, 19 nt, Homo sapiens
  misc_RNA (1)...(19): siRNA sense strand
ccacugcuccauuugaaga

SEQ ID NO: 804244 - RNA, 19 nt, Homo sapiens
  misc_RNA (1)...(19): siRNA sense strand
uugcugauuuccaaaggua

SEQ ID NO: 804245 - RNA, 19 nt, Homo sapiens
  misc_RNA (1)...(19): siRNA sense strand
ggaacaacagcagcaagaa

SEQ ID NO: 804246 - RNA, 19 nt, Homo sapiens
  misc_RNA (1)...(19): siRNA sense strand
cugaagcacaugauuauug

SEQ ID NO: 804247 - RNA, 19 nt, Homo sapiens
  misc_RNA (1)...(19): siRNA sense strand
ugaaccacauggccagaga

SEQ ID NO: 804248 - RNA, 19 nt, Homo sapiens
  misc_RNA (1)...(19): siRNA sense strand
caaugaagaauuccuugga

SEQ ID NO: 804249 - RNA, 19 nt, Homo sapiens
  misc_RNA (1)...(19): siRNA sense strand
gcagcaagaacgaaaugau

SEQ ID NO: 804250 - RNA, 19 nt, Homo sapiens
  misc_RNA (1)...(19): siRNA sense strand
uaucugacagugaaaguga

SEQ ID NO: 804251 - RNA, 19 nt, Homo sapiens
  misc_RNA (1)...(19): siRNA sense strand
aaagcagacuuaagaacuc

SEQ ID NO: 804252 - RNA, 19 nt, Homo sapiens
  misc_RNA (1)...(19): siRNA sense strand
gauuaauccuaagaacaga

SEQ ID NO: 804253 - RNA, 19 nt, Homo sapiens
  misc_RNA (1)...(19): siRNA sense strand
caccaccacuuuagaaggu

SEQ ID NO: 804254 - RNA, 19 nt, Homo sapiens
  misc_RNA (1)...(19): siRNA sense strand
gcagaaacaauugagaagu

SEQ ID NO: 804255 - RNA, 19 nt, Homo sapiens
  misc_RNA (1)...(19): siRNA sense strand
uagcugaugucaaguuggu

SEQ ID NO: 804256 - RNA, 19 nt, Homo sapiens
  misc_RNA (1)...(19): siRNA sense strand
cugaacagcccaucacaga

SEQ ID NO: 804257 - RNA, 19 nt, Homo sapiens
  misc_RNA (1)...(19): siRNA sense strand
gaaaauguucccaucauca

SEQ ID NO: 804258 - RNA, 19 nt, Homo sapiens
  misc_RNA (1)...(19): siRNA sense strand
acacuuaaagaucacauga

SEQ ID NO: 804259 - RNA, 19 nt, Homo sapiens
  misc_RNA (1)...(19): siRNA sense strand
gaaagacgugggaucaacu

SEQ ID NO: 804260 - RNA, 19 nt, Homo sapiens
  misc_RNA (1)...(19): siRNA sense strand
ggccagagaacaugcuuuc

SEQ ID NO: 804261 - RNA, 19 nt, Homo sapiens
  misc_RNA (1)...(19): siRNA sense strand
caacuggaguauuauuuuc

SEQ ID NO: 804262 - RNA, 19 nt, Homo sapiens
  misc_RNA (1)...(19): siRNA sense strand
aagcagaaacaauugagaa

SEQ ID NO: 804263 - RNA, 19 nt, Homo sapiens
  misc_RNA (1)...(19): siRNA sense strand
gugggaagaaguucaguug

SEQ ID NO: 804264 - RNA, 19 nt, Homo sapiens
  misc_RNA (1)...(19): siRNA sense strand
gaaacagagacugagagaa

SEQ ID NO: 804265 - RNA, 19 nt, Homo sapiens
  misc_RNA (1)...(19): siRNA sense strand
ucuaaacuguaugcuuuga

SEQ ID NO: 804266 - RNA, 19 nt, Homo sapiens
  misc_RNA (1)...(19): siRNA sense strand
caaguucaccaaugcagau

SEQ ID NO: 804267 - RNA, 19 nt, Homo sapiens
  misc_RNA (1)...(19): siRNA sense strand
ccaucugugccuuguauuu

SEQ ID NO: 804268 - RNA, 19 nt, Homo sapiens
  misc_RNA (1)...(19): siRNA sense strand
acagagaauaugacagauu

SEQ ID NO: 804269 - RNA, 19 nt, Homo sapiens
  misc_RNA (1)...(19): siRNA sense strand
gaaccacauggccagagaa

SEQ ID NO: 804270 - RNA, 19 nt, Homo sapiens
  misc_RNA (1)...(19): siRNA sense strand
caacagcagcaagaacgaa

SEQ ID NO: 804271 - RNA, 19 nt, Homo sapiens
  misc_RNA (1)...(19): siRNA sense strand
cagugaaagugaccugaca

SEQ ID NO: 804272 - RNA, 19 nt, Homo sapiens
  misc_RNA (1)...(19): siRNA sense strand
agaaagacgugggaucaac

SEQ ID NO: 804273 - RNA, 19 nt, Homo sapiens
  misc_RNA (1)...(19): siRNA sense strand
ccuaagaacagagaauaug

SEQ ID NO: 804274 - RNA, 19 nt, Homo sapiens
  misc_RNA (1)...(19): siRNA sense strand
uuucauggcguuuguaugu

SEQ ID NO: 804275 - RNA, 19 nt, Homo sapiens
  misc_RNA (1)...(19): siRNA sense strand
aacagcaucguaagauuaa

SEQ ID NO: 804276 - RNA, 19 nt, Homo sapiens
  misc_RNA (1)...(19): siRNA sense strand
acacgaauuugaucuucuc

SEQ ID NO: 804277 - RNA, 19 nt, Homo sapiens
  misc_RNA (1)...(19): siRNA sense strand
aaguucaguuggaagauga

SEQ ID NO: 804278 - RNA, 19 nt, Homo sapiens
  misc_RNA (1)...(19): siRNA sense strand
ggacaguaaggauuguauc

SEQ ID NO: 804279 - RNA, 19 nt, Homo sapiens
  misc_RNA (1)...(19): siRNA sense strand
ggaagugcaucuccuauua

SEQ ID NO: 804280 - RNA, 19 nt, Homo sapiens
  misc_RNA (1)...(19): siRNA sense strand
gaacauaagucacuggaau

SEQ ID NO: 804281 - RNA, 19 nt, Homo sapiens
  misc_RNA (1)...(19): siRNA sense strand
ggaagaagaucaugagaag

SEQ ID NO: 804282 - RNA, 19 nt, Homo sapiens
  misc_RNA (1)...(19): siRNA sense strand
gaaguucagugucuuaaug

SEQ ID NO: 804283 - RNA, 19 nt, Homo sapiens
  misc_RNA (1)...(19): siRNA sense strand
ugacagugaugaccaagua

SEQ ID NO: 804284 - RNA, 19 nt, Homo sapiens
  misc_RNA (1)...(19): siRNA sense strand
ggacggauccucuccuuga

SEQ ID NO: 804285 - RNA, 19 nt, Homo sapiens
  misc_RNA (1)...(19): siRNA sense strand
gaaucuggaugaugcuaaa

SEQ ID NO: 804286 - RNA, 19 nt, Homo sapiens
  misc_RNA (1)...(19): siRNA sense strand
gaagugcaucuccuauuaa

SEQ ID NO: 804287 - RNA, 19 nt, Homo sapiens
  misc_RNA (1)...(19): siRNA sense strand
caacugcccugaccuccuu

SEQ ID NO: 804288 - RNA, 19 nt, Homo sapiens
  misc_RNA (1)...(19): siRNA sense strand
ggagagacccgaacauaag

SEQ ID NO: 804289 - RNA, 19 nt, Homo sapiens
  misc_RNA (1)...(19): siRNA sense strand
gaucucagccucagcaaug

SEQ ID NO: 804290 - RNA, 19 nt, Homo sapiens
  misc_RNA (1)...(19): siRNA sense strand
aaagugggcuccucucugu

SEQ ID NO: 804291 - RNA, 19 nt, Homo sapiens
  misc_RNA (1)...(19): siRNA sense strand
ggagccagaugcacagguu

SEQ ID NO: 804292 - RNA, 19 nt, Homo sapiens
  misc_RNA (1)...(19): siRNA sense strand
uaauggagaagcucuguaa

SEQ ID NO: 804293 - RNA, 19 nt, Homo sapiens
  misc_RNA (1)...(19): siRNA sense strand
gagcuucuccacugucuga

SEQ ID NO: 804294 - RNA, 19 nt, Homo sapiens
  misc_RNA (1)...(19): siRNA sense strand
gaauugcugcgaagggauu

SEQ ID NO: 804295 - RNA, 19 nt, Homo sapiens
  misc_RNA (1)...(19): siRNA sense strand
gggaagaggaagaagauca

SEQ ID NO: 804296 - RNA, 19 nt, Homo sapiens
  misc_RNA (1)...(19): siRNA sense strand
ccaaguaucaggcuaacau

SEQ ID NO: 804297 - RNA, 19 nt, Homo sapiens
  misc_RNA (1)...(19): siRNA sense strand
ugagaaguucagugucuua

SEQ ID NO: 804298 - RNA, 19 nt, Homo sapiens
  misc_RNA (1)...(19): siRNA sense strand
aagaagaucaugagaagga

SEQ ID NO: 804299 - RNA, 19 nt, Homo sapiens
  misc_RNA (1)...(19): siRNA sense strand
ggaagaggguccccaaaag

SEQ ID NO: 804300 - RNA, 19 nt, Homo sapiens
  misc_RNA (1)...(19): siRNA sense strand
cuacugugcugaccagaag

SEQ ID NO: 804301 - RNA, 19 nt, Homo sapiens
  misc_RNA (1)...(19): siRNA sense strand
gagaaguucagugucuuaa

SEQ ID NO: 804302 - RNA, 19 nt, Homo sapiens
  misc_RNA (1)...(19): siRNA sense strand
aaauauacauacccugucu

SEQ ID NO: 804303 - RNA, 19 nt, Homo sapiens
  misc_RNA (1)...(19): siRNA sense strand
ucuuggagcugcccuggaa

SEQ ID NO: 804304 - RNA, 19 nt, Homo sapiens
  misc_RNA (1)...(19): siRNA sense strand
ggaagaggaagaagaucau

SEQ ID NO: 804305 - RNA, 19 nt, Homo sapiens
  misc_RNA (1)...(19): siRNA sense strand
uuacuguguugccuuguga

SEQ ID NO: 804306 - RNA, 19 nt, Homo sapiens
  misc_RNA (1)...(19): siRNA sense strand
aaggagagacccgaacaua

SEQ ID NO: 804307 - RNA, 19 nt, Homo sapiens
  misc_RNA (1)...(19): siRNA sense strand
cuauggcccuagaaccuaa

SEQ ID NO: 804308 - RNA, 19 nt, Homo sapiens
  misc_RNA (1)...(19): siRNA sense strand
gcuacagcuucuucacgaa

SEQ ID NO: 804309 - RNA, 19 nt, Homo sapiens
  misc_RNA (1)...(19): siRNA sense strand
gaagaggguccccaaaaga

SEQ ID NO: 804310 - RNA, 19 nt, Homo sapiens
  misc_RNA (1)...(19): siRNA sense strand
ccuggaaggaggaaacuuu

SEQ ID NO: 804311 - RNA, 19 nt, Homo sapiens
  misc_RNA (1)...(19): siRNA sense strand
gcagauggaggaagugcau

SEQ ID NO: 804312 - RNA, 19 nt, Homo sapiens
  misc_RNA (1)...(19): siRNA sense strand
uguguugccuugugaagau

SEQ ID NO: 804313 - RNA, 19 nt, Homo sapiens
  misc_RNA (1)...(19): siRNA sense strand
ccagagacagcuccaaagu

SEQ ID NO: 804314 - RNA, 19 nt, Homo sapiens
  misc_RNA (1)...(19): siRNA sense strand
gcuauggcccuagaaccua

SEQ ID NO: 804315 - RNA, 19 nt, Homo sapiens
  misc_RNA (1)...(19): siRNA sense strand
ugaccaaguaucaggcuaa

SEQ ID NO: 804316 - RNA, 19 nt, Homo sapiens
  misc_RNA (1)...(19): siRNA sense strand
gaagaggaagaagaucaug

SEQ ID NO: 804317 - RNA, 19 nt, Homo sapiens
  misc_RNA (1)...(19): siRNA sense strand
ggaaagugggcuccucucu

SEQ ID NO: 804318 - RNA, 19 nt, Homo sapiens
  misc_RNA (1)...(19): siRNA sense strand
gagagacccgaacauaagu

SEQ ID NO: 804319 - RNA, 19 nt, Homo sapiens
  misc_RNA (1)...(19): siRNA sense strand
aggagagacccgaacauaa

SEQ ID NO: 804320 - RNA, 19 nt, Homo sapiens
  misc_RNA (1)...(19): siRNA sense strand
gaggguccccaaaagauua

SEQ ID NO: 804321 - RNA, 19 nt, Homo sapiens
  misc_RNA (1)...(19): siRNA sense strand
cuccuucugugccaaauau

SEQ ID NO: 804322 - RNA, 19 nt, Homo sapiens
  misc_RNA (1)...(19): siRNA sense strand
ggagcugaaaccacuguug

SEQ ID NO: 804323 - RNA, 19 nt, Homo sapiens
  misc_RNA (1)...(19): siRNA sense strand
cggauccucuccuugacuu

SEQ ID NO: 804324 - RNA, 19 nt, Homo sapiens
  misc_RNA (1)...(19): siRNA sense strand
gaaggagagacccgaacau

SEQ ID NO: 804325 - RNA, 19 nt, Homo sapiens
  misc_RNA (1)...(19): siRNA sense strand
gaggaagaagaucaugaga

SEQ ID NO: 804326 - RNA, 19 nt, Homo sapiens
  misc_RNA (1)...(19): siRNA sense strand
ggaguugcccaaagcuauc

SEQ ID NO: 804327 - RNA, 19 nt, Homo sapiens
  misc_RNA (1)...(19): siRNA sense strand
ccagaugcacagguucuaa

SEQ ID NO: 804328 - RNA, 19 nt, Homo sapiens
  misc_RNA (1)...(19): siRNA sense strand
ccaccuccauggccuaugc

SEQ ID NO: 804329 - RNA, 19 nt, Homo sapiens
  misc_RNA (1)...(19): siRNA sense strand
cagccugucauggcaguua

SEQ ID NO: 804330 - RNA, 19 nt, Homo sapiens
  misc_RNA (1)...(19): siRNA sense strand
guaucaggcuaacaucacu

SEQ ID NO: 804331 - RNA, 19 nt, Homo sapiens
  misc_RNA (1)...(19): siRNA sense strand
ccagauggacuugcugugu

SEQ ID NO: 804332 - RNA, 19 nt, Homo sapiens
  misc_RNA (1)...(19): siRNA sense strand
gcuaaaggucuggcugaga

SEQ ID NO: 804333 - RNA, 19 nt, Homo sapiens
  misc_RNA (1)...(19): siRNA sense strand
cgaaucuggaugaugcuaa

SEQ ID NO: 804334 - RNA, 19 nt, Homo sapiens
  misc_RNA (1)...(19): siRNA sense strand
cuccagacccugaagaaga

SEQ ID NO: 804335 - RNA, 19 nt, Homo sapiens
  misc_RNA (1)...(19): siRNA sense strand
guuacuguguugccuugug

SEQ ID NO: 804336 - RNA, 19 nt, Homo sapiens
  misc_RNA (1)...(19): siRNA sense strand
gcgaggacgguucgaaucu

SEQ ID NO: 804337 - RNA, 19 nt, Homo sapiens
  misc_RNA (1)...(19): siRNA sense strand
ccuggcagauggaggaagu

SEQ ID NO: 804338 - RNA, 19 nt, Homo sapiens
  misc_RNA (1)...(19): siRNA sense strand
uggcugagaguuuggaguu

SEQ ID NO: 804339 - RNA, 19 nt, Homo sapiens
  misc_RNA (1)...(19): siRNA sense strand
cgaggacgguucgaaucug

SEQ ID NO: 804340 - RNA, 19 nt, Homo sapiens
  misc_RNA (1)...(19): siRNA sense strand
aggaagaagaucaugagaa

SEQ ID NO: 804341 - RNA, 19 nt, Homo sapiens
  misc_RNA (1)...(19): siRNA sense strand
caggcuaacaucacugaga

SEQ ID NO: 804342 - RNA, 19 nt, Homo sapiens
  misc_RNA (1)...(19): siRNA sense strand
aagcucaugcugacaguga

SEQ ID NO: 804343 - RNA, 19 nt, Homo sapiens
  misc_RNA (1)...(19): siRNA sense strand
gcuacugugcugaccagaa

SEQ ID NO: 804344 - RNA, 19 nt, Homo sapiens
  misc_RNA (1)...(19): siRNA sense strand
cccaaaagauuacgguguu

SEQ ID NO: 804345 - RNA, 19 nt, Homo sapiens
  misc_RNA (1)...(19): siRNA sense strand
gaccaaguaucaggcuaac

SEQ ID NO: 804346 - RNA, 19 nt, Homo sapiens
  misc_RNA (1)...(19): siRNA sense strand
ccaagcucaugcugacagu

SEQ ID NO: 804347 - RNA, 19 nt, Homo sapiens
  misc_RNA (1)...(19): siRNA sense strand
aaacuuucuugguguugca

SEQ ID NO: 804348 - RNA, 19 nt, Homo sapiens
  misc_RNA (1)...(19): siRNA sense strand
cagaugcacagguucuaau

SEQ ID NO: 804349 - RNA, 19 nt, Homo sapiens
  misc_RNA (1)...(19): siRNA sense strand
uacagcuucuucacgaaug

SEQ ID NO: 804350 - RNA, 19 nt, Homo sapiens
  misc_RNA (1)...(19): siRNA sense strand
cagcuccaaagucuaugua

SEQ ID NO: 804351 - RNA, 19 nt, Homo sapiens
  misc_RNA (1)...(19): siRNA sense strand
aagugcaucuccuauuaag

SEQ ID NO: 804352 - RNA, 19 nt, Homo sapiens
  misc_RNA (1)...(19): siRNA sense strand
gagacccgaacauaaguca

SEQ ID NO: 804353 - RNA, 19 nt, Homo sapiens
  misc_RNA (1)...(19): siRNA sense strand
ggacgguucgaaucuggau

SEQ ID NO: 804354 - RNA, 19 nt, Homo sapiens
  misc_RNA (1)...(19): siRNA sense strand
guucuaaugcugggacaga

SEQ ID NO: 804355 - RNA, 19 nt, Homo sapiens
  misc_RNA (1)...(19): siRNA sense strand
ggacagaccucuuucauga

SEQ ID NO: 804356 - RNA, 19 nt, Homo sapiens
  misc_RNA (1)...(19): siRNA sense strand
caaacuagcuuuccugaga

SEQ ID NO: 804357 - RNA, 19 nt, Homo sapiens
  misc_RNA (1)...(19): siRNA sense strand
gagcauuuauguaagcuua

SEQ ID NO: 804358 - RNA, 19 nt, Homo sapiens
  misc_RNA (1)...(19): siRNA sense strand
gaacucaugugccaaagga

SEQ ID NO: 804359 - RNA, 19 nt, Homo sapiens
  misc_RNA (1)...(19): siRNA sense strand
ggaaauggcagacaugauu

SEQ ID NO: 804360 - RNA, 19 nt, Homo sapiens
  misc_RNA (1)...(19): siRNA sense strand
gaaccuagagaaugaauuu

SEQ ID NO: 804361 - RNA, 19 nt, Homo sapiens
  misc_RNA (1)...(19): siRNA sense strand
aaacauaccucaugcuuuc

SEQ ID NO: 804362 - RNA, 19 nt, Homo sapiens
  misc_RNA (1)...(19): siRNA sense strand
uaaugaaccuagagaauga

SEQ ID NO: 804363 - RNA, 19 nt, Homo sapiens
  misc_RNA (1)...(19): siRNA sense strand
gaaccauucugccuugcua

SEQ ID NO: 804364 - RNA, 19 nt, Homo sapiens
  misc_RNA (1)...(19): siRNA sense strand
gaagagagaugacgaaacc

SEQ ID NO: 804365 - RNA, 19 nt, Homo sapiens
  misc_RNA (1)...(19): siRNA sense strand
caaaggacaugaaacuugu

SEQ ID NO: 804366 - RNA, 19 nt, Homo sapiens
  misc_RNA (1)...(19): siRNA sense strand
uggacuaaauggacaaaua

SEQ ID NO: 804367 - RNA, 19 nt, Homo sapiens
  misc_RNA (1)...(19): siRNA sense strand
acaaauagagcacaaacua

SEQ ID NO: 804368 - RNA, 19 nt, Homo sapiens
  misc_RNA (1)...(19): siRNA sense strand
aacagacgcuuuccaguuu

SEQ ID NO: 804369 - RNA, 19 nt, Homo sapiens
  misc_RNA (1)...(19): siRNA sense strand
uucaaacgcucaagaaauu

SEQ ID NO: 804370 - RNA, 19 nt, Homo sapiens
  misc_RNA (1)...(19): siRNA sense strand
acucagaacucaaggaaga

SEQ ID NO: 804371 - RNA, 19 nt, Homo sapiens
  misc_RNA (1)...(19): siRNA sense strand
caacaucagaggauucaaa

SEQ ID NO: 804372 - RNA, 19 nt, Homo sapiens
  misc_RNA (1)...(19): siRNA sense strand
ccaaaggacaugaaacuug

SEQ ID NO: 804373 - RNA, 19 nt, Homo sapiens
  misc_RNA (1)...(19): siRNA sense strand
cuauguuacuggcuacuua

SEQ ID NO: 804374 - RNA, 19 nt, Homo sapiens
  misc_RNA (1)...(19): siRNA sense strand
ggacuaaauggacaaauag

SEQ ID NO: 804375 - RNA, 19 nt, Homo sapiens
  misc_RNA (1)...(19): siRNA sense strand
guaaugaaccuagagaaug

SEQ ID NO: 804376 - RNA, 19 nt, Homo sapiens
  misc_RNA (1)...(19): siRNA sense strand
aaacagacgcuuuccaguu

SEQ ID NO: 804377 - RNA, 19 nt, Homo sapiens
  misc_RNA (1)...(19): siRNA sense strand
gagagaugacgaaaccaua

SEQ ID NO: 804378 - RNA, 19 nt, Homo sapiens
  misc_RNA (1)...(19): siRNA sense strand
guuacuggcuacuuauuau

SEQ ID NO: 804379 - RNA, 19 nt, Homo sapiens
  misc_RNA (1)...(19): siRNA sense strand
ggacucagaacucaaggaa

SEQ ID NO: 804380 - RNA, 19 nt, Homo sapiens
  misc_RNA (1)...(19): siRNA sense strand
uaaggacauuuauggacua

SEQ ID NO: 804381 - RNA, 19 nt, Homo sapiens
  misc_RNA (1)...(19): siRNA sense strand
gauauguucucuauguuac

SEQ ID NO: 804382 - RNA, 19 nt, Homo sapiens
  misc_RNA (1)...(19): siRNA sense strand
gaaauggcagacaugauug

SEQ ID NO: 804383 - RNA, 19 nt, Homo sapiens
  misc_RNA (1)...(19): siRNA sense strand
cgauauguucucuauguua

SEQ ID NO: 804384 - RNA, 19 nt, Homo sapiens
  misc_RNA (1)...(19): siRNA sense strand
agaguacuaugaagacauu

SEQ ID NO: 804385 - RNA, 19 nt, Homo sapiens
  misc_RNA (1)...(19): siRNA sense strand
caaacgcucaagaaauuaa

SEQ ID NO: 804386 - RNA, 19 nt, Homo sapiens
  misc_RNA (1)...(19): siRNA sense strand
gcagcuauuucacacuuca

SEQ ID NO: 804387 - RNA, 19 nt, Homo sapiens
  misc_RNA (1)...(19): siRNA sense strand
aaacuagcuuuccugagaa

SEQ ID NO: 804388 - RNA, 19 nt, Homo sapiens
  misc_RNA (1)...(19): siRNA sense strand
uaagaaggauuuuccagaa

SEQ ID NO: 804389 - RNA, 19 nt, Homo sapiens
  misc_RNA (1)...(19): siRNA sense strand
gagaugacgaaaccauaaa

SEQ ID NO: 804390 - RNA, 19 nt, Homo sapiens
  misc_RNA (1)...(19): siRNA sense strand
ggauucaaacgcucaagaa

SEQ ID NO: 804391 - RNA, 19 nt, Homo sapiens
  misc_RNA (1)...(19): siRNA sense strand
caauugaacgaaugucuga

SEQ ID NO: 804392 - RNA, 19 nt, Homo sapiens
  misc_RNA (1)...(19): siRNA sense strand
agaauugccacuccacuuu

SEQ ID NO: 804393 - RNA, 19 nt, Homo sapiens
  misc_RNA (1)...(19): siRNA sense strand
gacauucgacucugugaga

SEQ ID NO: 804394 - RNA, 19 nt, Homo sapiens
  misc_RNA (1)...(19): siRNA sense strand
gaaggagacauucgacucu

SEQ ID NO: 804395 - RNA, 19 nt, Homo sapiens
  misc_RNA (1)...(19): siRNA sense strand
augaagacauuaagaagga

SEQ ID NO: 804396 - RNA, 19 nt, Homo sapiens
  misc_RNA (1)...(19): siRNA sense strand
gaagacauuaagaaggauu

SEQ ID NO: 804397 - RNA, 19 nt, Homo sapiens
  misc_RNA (1)...(19): siRNA sense strand
gauucaaacgcucaagaaa

SEQ ID NO: 804398 - RNA, 19 nt, Homo sapiens
  misc_RNA (1)...(19): siRNA sense strand
gaacucaaggaagaaauuc

SEQ ID NO: 804399 - RNA, 19 nt, Homo sapiens
  misc_RNA (1)...(19): siRNA sense strand
acagaccucuuucaugauc

SEQ ID NO: 804400 - RNA, 19 nt, Homo sapiens
  misc_RNA (1)...(19): siRNA sense strand
uaaaggaugacuuguccaa

SEQ ID NO: 804401 - RNA, 19 nt, Homo sapiens
  misc_RNA (1)...(19): siRNA sense strand
ggacaaauagagcacaaac

SEQ ID NO: 804402 - RNA, 19 nt, Homo sapiens
  misc_RNA (1)...(19): siRNA sense strand
caaauagagcacaaacuag

SEQ ID NO: 804403 - RNA, 19 nt, Homo sapiens
  misc_RNA (1)...(19): siRNA sense strand
gcuuuauacucuuugacaa

SEQ ID NO: 804404 - RNA, 19 nt, Homo sapiens
  misc_RNA (1)...(19): siRNA sense strand
agagaugacgaaaccauaa

SEQ ID NO: 804405 - RNA, 19 nt, Homo sapiens
  misc_RNA (1)...(19): siRNA sense strand
ugauggagguggugaagag

SEQ ID NO: 804406 - RNA, 19 nt, Homo sapiens
  misc_RNA (1)...(19): siRNA sense strand
uuucugcucuuuccaacaa

SEQ ID NO: 804407 - RNA, 19 nt, Homo sapiens
  misc_RNA (1)...(19): siRNA sense strand
guuucgauauguucucuau

SEQ ID NO: 804408 - RNA, 19 nt, Homo sapiens
  misc_RNA (1)...(19): siRNA sense strand
gguaauucgugccuuucug

SEQ ID NO: 804409 - RNA, 19 nt, Homo sapiens
  misc_RNA (1)...(19): siRNA sense strand
aaaggagcauuuauguaag

SEQ ID NO: 804410 - RNA, 19 nt, Homo sapiens
  misc_RNA (1)...(19): siRNA sense strand
aagaaauuccugugcauga

SEQ ID NO: 804411 - RNA, 19 nt, Homo sapiens
  misc_RNA (1)...(19): siRNA sense strand
caaguaaugaaccuagaga

SEQ ID NO: 804412 - RNA, 19 nt, Homo sapiens
  misc_RNA (1)...(19): siRNA sense strand
gugcugguuucgauauguu

SEQ ID NO: 804413 - RNA, 19 nt, Homo sapiens
  misc_RNA (1)...(19): siRNA sense strand
ucaaacgcucaagaaauua

SEQ ID NO: 804414 - RNA, 19 nt, Homo sapiens
  misc_RNA (1)...(19): siRNA sense strand
caaaagaguacuaugaaga

SEQ ID NO: 804415 - RNA, 19 nt, Homo sapiens
  misc_RNA (1)...(19): siRNA sense strand
ucccugagcucccgguaau

SEQ ID NO: 804416 - RNA, 19 nt, Homo sapiens
  misc_RNA (1)...(19): siRNA sense strand
gcccuggacagaccucuuu

SEQ ID NO: 804417 - RNA, 19 nt, Homo sapiens
  misc_RNA (1)...(19): siRNA sense strand
uucgauauguucucuaugu

SEQ ID NO: 804418 - RNA, 19 nt, Homo sapiens
  misc_RNA (1)...(19): siRNA sense strand
aggcagcuauuucacacuu

SEQ ID NO: 804419 - RNA, 19 nt, Homo sapiens
  misc_RNA (1)...(19): siRNA sense strand
uugaaaccguguccugaga

SEQ ID NO: 804420 - RNA, 19 nt, Homo sapiens
  misc_RNA (1)...(19): siRNA sense strand
ugaaacuugugcucauugg

SEQ ID NO: 804421 - RNA, 19 nt, Homo sapiens
  misc_RNA (1)...(19): siRNA sense strand
uguuacuggcuacuuauua

SEQ ID NO: 804422 - RNA, 19 nt, Homo sapiens
  misc_RNA (1)...(19): siRNA sense strand
cucaagaaauuaaggacau

SEQ ID NO: 804423 - RNA, 19 nt, Homo sapiens
  misc_RNA (1)...(19): siRNA sense strand
aaggaugacuuguccaaaa

SEQ ID NO: 804424 - RNA, 19 nt, Homo sapiens
  misc_RNA (1)...(19): siRNA sense strand
agaacucaaggaagaaauu

SEQ ID NO: 804425 - RNA, 19 nt, Homo sapiens
  misc_RNA (1)...(19): siRNA sense strand
guacuaugaagacauuaag

SEQ ID NO: 804426 - RNA, 19 nt, Homo sapiens
  misc_RNA (1)...(19): siRNA sense strand
aaagaguacuaugaagaca

SEQ ID NO: 804427 - RNA, 19 nt, Homo sapiens
  misc_RNA (1)...(19): siRNA sense strand
ucgauauguucucuauguu

SEQ ID NO: 804428 - RNA, 19 nt, Homo sapiens
  misc_RNA (1)...(19): siRNA sense strand
uccaacaauugaacgaaug

SEQ ID NO: 804429 - RNA, 19 nt, Homo sapiens
  misc_RNA (1)...(19): siRNA sense strand
cugacucccuaaaggauga

SEQ ID NO: 804430 - RNA, 19 nt, Homo sapiens
  misc_RNA (1)...(19): siRNA sense strand
ggugaagagagaugacgaa

SEQ ID NO: 804431 - RNA, 19 nt, Homo sapiens
  misc_RNA (1)...(19): siRNA sense strand
uggagguggugaagagaga

SEQ ID NO: 804432 - RNA, 19 nt, Homo sapiens
  misc_RNA (1)...(19): siRNA sense strand
cagaauugccacuccacuu

SEQ ID NO: 804433 - RNA, 19 nt, Homo sapiens
  misc_RNA (1)...(19): siRNA sense strand
cccgguaauucgugccuuu

SEQ ID NO: 804434 - RNA, 19 nt, Homo sapiens
  misc_RNA (1)...(19): siRNA sense strand
acagacgcuuuccaguuug

SEQ ID NO: 804435 - RNA, 19 nt, Homo sapiens
  misc_RNA (1)...(19): siRNA sense strand
ugacuuguccaaaauguaa

SEQ ID NO: 804436 - RNA, 19 nt, Homo sapiens
  misc_RNA (1)...(19): siRNA sense strand
gaaggauuuuccagaagga

SEQ ID NO: 804437 - RNA, 19 nt, Homo sapiens
  misc_RNA (1)...(19): siRNA sense strand
aaggacauuuauggacuaa

SEQ ID NO: 804438 - RNA, 19 nt, Homo sapiens
  misc_RNA (1)...(19): siRNA sense strand
agaccucuuucaugaucaa

SEQ ID NO: 804439 - RNA, 19 nt, Homo sapiens
  misc_RNA (1)...(19): siRNA sense strand
caggaaauggcagacauga

SEQ ID NO: 804440 - RNA, 19 nt, Homo sapiens
  misc_RNA (1)...(19): siRNA sense strand
aaaccauaaaggagcauuu

SEQ ID NO: 804441 - RNA, 19 nt, Homo sapiens
  misc_RNA (1)...(19): siRNA sense strand
gaaaccauaaaggagcauu

SEQ ID NO: 804442 - RNA, 19 nt, Homo sapiens
  misc_RNA (1)...(19): siRNA sense strand
cugagacaaucaaguccuu

SEQ ID NO: 804443 - RNA, 19 nt, Homo sapiens
  misc_RNA (1)...(19): siRNA sense strand
gccauucaauaggcagcua

SEQ ID NO: 804444 - RNA, 19 nt, Homo sapiens
  misc_RNA (1)...(19): siRNA sense strand
gagaacucaugugccaaag

SEQ ID NO: 804445 - RNA, 19 nt, Homo sapiens
  misc_RNA (1)...(19): siRNA sense strand
gacuaaauggacaaauaga

SEQ ID NO: 804446 - RNA, 19 nt, Homo sapiens
  misc_RNA (1)...(19): siRNA sense strand
acuggcuacuuauuauuga

SEQ ID NO: 804447 - RNA, 19 nt, Homo sapiens
  misc_RNA (1)...(19): siRNA sense strand
agaaauuccugugcaugag

SEQ ID NO: 804448 - RNA, 19 nt, Homo sapiens
  misc_RNA (1)...(19): siRNA sense strand
gugaagagagaugacgaaa

SEQ ID NO: 804449 - RNA, 19 nt, Homo sapiens
  misc_RNA (1)...(19): siRNA sense strand
gaauugccacuccacuuuu

SEQ ID NO: 804450 - RNA, 19 nt, Homo sapiens
  misc_RNA (1)...(19): siRNA sense strand
ucagaacucaaggaagaaa

SEQ ID NO: 804451 - RNA, 19 nt, Homo sapiens
  misc_RNA (1)...(19): siRNA sense strand
augcuuucaucacccauuu

SEQ ID NO: 804452 - RNA, 19 nt, Homo sapiens
  misc_RNA (1)...(19): siRNA sense strand
gagacauucgacucuguga

SEQ ID NO: 804453 - RNA, 19 nt, Homo sapiens
  misc_RNA (1)...(19): siRNA sense strand
uauguucucuauguuacug

SEQ ID NO: 804454 - RNA, 19 nt, Homo sapiens
  misc_RNA (1)...(19): siRNA sense strand
ccaaaagaguacuaugaag

SEQ ID NO: 804455 - RNA, 19 nt, Homo sapiens
  misc_RNA (1)...(19): siRNA sense strand
gcacaugggcagccuguuu

SEQ ID NO: 804456 - RNA, 19 nt, Homo sapiens
  misc_RNA (1)...(19): siRNA sense strand
ggaggaagcgggagcguuu

SEQ ID NO: 804457 - RNA, 19 nt, Homo sapiens
  misc_RNA (1)...(19): siRNA sense strand
gcaaccgcaucuuuacuug

SEQ ID NO: 804458 - RNA, 19 nt, Homo sapiens
  misc_RNA (1)...(19): siRNA sense strand
gggaacagcuggccaugag

SEQ ID NO: 804459 - RNA, 19 nt, Homo sapiens
  misc_RNA (1)...(19): siRNA sense strand
ggaccaccuucaccagcua

SEQ ID NO: 804460 - RNA, 19 nt, Homo sapiens
  misc_RNA (1)...(19): siRNA sense strand
uggaggagcuggagaaggu

SEQ ID NO: 804461 - RNA, 19 nt, Homo sapiens
  misc_RNA (1)...(19): siRNA sense strand
ggacagcagcuaccugagu

SEQ ID NO: 804462 - RNA, 19 nt, Homo sapiens
  misc_RNA (1)...(19): siRNA sense strand
gcagcuaccugagugucaa

SEQ ID NO: 804463 - RNA, 19 nt, Homo sapiens
  misc_RNA (1)...(19): siRNA sense strand
ccgcgcaaccgcaucuuua

SEQ ID NO: 804464 - RNA, 19 nt, Homo sapiens
  misc_RNA (1)...(19): siRNA sense strand
ccacuucuccacugcauau

SEQ ID NO: 804465 - RNA, 19 nt, Homo sapiens
  misc_RNA (1)...(19): siRNA sense strand
gaacggcagccucaaacuc

SEQ ID NO: 804466 - RNA, 19 nt, Homo sapiens
  misc_RNA (1)...(19): siRNA sense strand
ccacuacccagacguguau

SEQ ID NO: 804467 - RNA, 19 nt, Homo sapiens
  misc_RNA (1)...(19): siRNA sense strand
gaacuacgcccagauucag

SEQ ID NO: 804468 - RNA, 19 nt, Homo sapiens
  misc_RNA (1)...(19): siRNA sense strand
gagaaggccgacucagaga

SEQ ID NO: 804469 - RNA, 19 nt, Homo sapiens
  misc_RNA (1)...(19): siRNA sense strand
ugagaacuacgcccagauu

SEQ ID NO: 804470 - RNA, 19 nt, Homo sapiens
  misc_RNA (1)...(19): siRNA sense strand
ucaccgacuuccugagugu

SEQ ID NO: 804471 - RNA, 19 nt, Homo sapiens
  misc_RNA (1)...(19): siRNA sense strand
gagcaacaagggcaagaag

SEQ ID NO: 804472 - RNA, 19 nt, Homo sapiens
  misc_RNA (1)...(19): siRNA sense strand
gagaacuacgcccagauuc

SEQ ID NO: 804473 - RNA, 19 nt, Homo sapiens
  misc_RNA (1)...(19): siRNA sense strand
uggagaaggccgacucaga

SEQ ID NO: 804474 - RNA, 19 nt, Homo sapiens
  misc_RNA (1)...(19): siRNA sense strand
cacccgagcugagaacuac

SEQ ID NO: 804475 - RNA, 19 nt, Homo sapiens
  misc_RNA (1)...(19): siRNA sense strand
cguccuggcucggcaacaa

SEQ ID NO: 804476 - RNA, 19 nt, Homo sapiens
  misc_RNA (1)...(19): siRNA sense strand
gggcuccuuuaacaaguuc

SEQ ID NO: 804477 - RNA, 19 nt, Homo sapiens
  misc_RNA (1)...(19): siRNA sense strand
gaagggccaaguggaggaa

SEQ ID NO: 804478 - RNA, 19 nt, Homo sapiens
  misc_RNA (1)...(19): siRNA sense strand
aaccgcaucuuuacuugca

SEQ ID NO: 804479 - RNA, 19 nt, Homo sapiens
  misc_RNA (1)...(19): siRNA sense strand
cacaugggcagccuguuug

SEQ ID NO: 804480 - RNA, 19 nt, Homo sapiens
  misc_RNA (1)...(19): siRNA sense strand
ccagcagcgucaccgacuu

SEQ ID NO: 804481 - RNA, 19 nt, Homo sapiens
  misc_RNA (1)...(19): siRNA sense strand
agaacuacgcccagauuca

SEQ ID NO: 804482 - RNA, 19 nt, Homo sapiens
  misc_RNA (1)...(19): siRNA sense strand
guacaacaguucauccuua

SEQ ID NO: 804483 - RNA, 19 nt, Homo sapiens
  misc_RNA (1)...(19): siRNA sense strand
gcaagcagguggccaguaa

SEQ ID NO: 804484 - RNA, 19 nt, Homo sapiens
  misc_RNA (1)...(19): siRNA sense strand
gaaaacaucuccacucuga

SEQ ID NO: 804485 - RNA, 19 nt, Homo sapiens
  misc_RNA (1)...(19): siRNA sense strand
gcagagaaguuugccauug

SEQ ID NO: 804486 - RNA, 19 nt, Homo sapiens
  misc_RNA (1)...(19): siRNA sense strand
ucuauacccugaucaaaua

SEQ ID NO: 804487 - RNA, 19 nt, Homo sapiens
  misc_RNA (1)...(19): siRNA sense strand
gugcugaaauccaccuuua

SEQ ID NO: 804488 - RNA, 19 nt, Homo sapiens
  misc_RNA (1)...(19): siRNA sense strand
ggagcuaauuggcuuauau

SEQ ID NO: 804489 - RNA, 19 nt, Homo sapiens
  misc_RNA (1)...(19): siRNA sense strand
uggacaaacuccucaauaa

SEQ ID NO: 804490 - RNA, 19 nt, Homo sapiens
  misc_RNA (1)...(19): siRNA sense strand
ucagggauguucuguguaa

SEQ ID NO: 804491 - RNA, 19 nt, Homo sapiens
  misc_RNA (1)...(19): siRNA sense strand
agaacaaccugaugagaaa

SEQ ID NO: 804492 - RNA, 19 nt, Homo sapiens
  misc_RNA (1)...(19): siRNA sense strand
gcagauacacuuacucuuc

SEQ ID NO: 804493 - RNA, 19 nt, Homo sapiens
  misc_RNA (1)...(19): siRNA sense strand
ugagggagacugucaauaa

SEQ ID NO: 804494 - RNA, 19 nt, Homo sapiens
  misc_RNA (1)...(19): siRNA sense strand
gggauguucuguguaauaa

SEQ ID NO: 804495 - RNA, 19 nt, Homo sapiens
  misc_RNA (1)...(19): siRNA sense strand
gcuggaggcuguauacgaa

SEQ ID NO: 804496 - RNA, 19 nt, Homo sapiens
  misc_RNA (1)...(19): siRNA sense strand
gaggagggauuaagaaggu

SEQ ID NO: 804497 - RNA, 19 nt, Homo sapiens
  misc_RNA (1)...(19): siRNA sense strand
guggaagucugcagugaaa

SEQ ID NO: 804498 - RNA, 19 nt, Homo sapiens
  misc_RNA (1)...(19): siRNA sense strand
gagaauguguccagcaaag

SEQ ID NO: 804499 - RNA, 19 nt, Homo sapiens
  misc_RNA (1)...(19): siRNA sense strand
cagcaaaguucgucagcuu

SEQ ID NO: 804500 - RNA, 19 nt, Homo sapiens
  misc_RNA (1)...(19): siRNA sense strand
gcagugagcuauacuuacg

SEQ ID NO: 804501 - RNA, 19 nt, Homo sapiens
  misc_RNA (1)...(19): siRNA sense strand
aaaguaagauggucacucu

SEQ ID NO: 804502 - RNA, 19 nt, Homo sapiens
  misc_RNA (1)...(19): siRNA sense strand
gcaggaagcugagcaacgu

SEQ ID NO: 804503 - RNA, 19 nt, Homo sapiens
  misc_RNA (1)...(19): siRNA sense strand
ggaagaauucaaugacuau

SEQ ID NO: 804504 - RNA, 19 nt, Homo sapiens
  misc_RNA (1)...(19): siRNA sense strand
gcuuauauguuaccaugga

SEQ ID NO: 804505 - RNA, 19 nt, Homo sapiens
  misc_RNA (1)...(19): siRNA sense strand
ggauagacuuccgcaguga

SEQ ID NO: 804506 - RNA, 19 nt, Homo sapiens
  misc_RNA (1)...(19): siRNA sense strand
uacaacaguucauccuuaa

SEQ ID NO: 804507 - RNA, 19 nt, Homo sapiens
  misc_RNA (1)...(19): siRNA sense strand
gagggagacugucaauaag

SEQ ID NO: 804508 - RNA, 19 nt, Homo sapiens
  misc_RNA (1)...(19): siRNA sense strand
gaauguguccagcaaaguu

SEQ ID NO: 804509 - RNA, 19 nt, Homo sapiens
  misc_RNA (1)...(19): siRNA sense strand
uaaccggccucaugacuag

SEQ ID NO: 804510 - RNA, 19 nt, Homo sapiens
  misc_RNA (1)...(19): siRNA sense strand
ccaagaaccgccucuauca

SEQ ID NO: 804511 - RNA, 19 nt, Homo sapiens
  misc_RNA (1)...(19): siRNA sense strand
gcaaaguucgucagcuuga

SEQ ID NO: 804512 - RNA, 19 nt, Homo sapiens
  misc_RNA (1)...(19): siRNA sense strand
caguaaagcugaggagaau

SEQ ID NO: 804513 - RNA, 19 nt, Homo sapiens
  misc_RNA (1)...(19): siRNA sense strand
caaccuggcugagaaugug

SEQ ID NO: 804514 - RNA, 19 nt, Homo sapiens
  misc_RNA (1)...(19): siRNA sense strand
agaaaguggugcugaaauc

SEQ ID NO: 804515 - RNA, 19 nt, Homo sapiens
  misc_RNA (1)...(19): siRNA sense strand
cagaggaaguaaagcaaga

SEQ ID NO: 804516 - RNA, 19 nt, Homo sapiens
  misc_RNA (1)...(19): siRNA sense strand
cagaacaaccugaugagaa

SEQ ID NO: 804517 - RNA, 19 nt, Homo sapiens
  misc_RNA (1)...(19): siRNA sense strand
agaaagugguggagagaga

SEQ ID NO: 804518 - RNA, 19 nt, Homo sapiens
  misc_RNA (1)...(19): siRNA sense strand
ucggagagcugcagucauc

SEQ ID NO: 804519 - RNA, 19 nt, Homo sapiens
  misc_RNA (1)...(19): siRNA sense strand
gaggaagaauucaaugacu

SEQ ID NO: 804520 - RNA, 19 nt, Homo sapiens
  misc_RNA (1)...(19): siRNA sense strand
gcuggaaugaucaccuuua

SEQ ID NO: 804521 - RNA, 19 nt, Homo sapiens
  misc_RNA (1)...(19): siRNA sense strand
ggagaaaguggugcugaaa

SEQ ID NO: 804522 - RNA, 19 nt, Homo sapiens
  misc_RNA (1)...(19): siRNA sense strand
gcaaauggcagaguucaag

SEQ ID NO: 804523 - RNA, 19 nt, Homo sapiens
  misc_RNA (1)...(19): siRNA sense strand
aggaagaauucaaugacua

SEQ ID NO: 804524 - RNA, 19 nt, Homo sapiens
  misc_RNA (1)...(19): siRNA sense strand
caacaucgaggaggaagaa

SEQ ID NO: 804525 - RNA, 19 nt, Homo sapiens
  misc_RNA (1)...(19): siRNA sense strand
caugguggaugaugucuuc

SEQ ID NO: 804526 - RNA, 19 nt, Homo sapiens
  misc_RNA (1)...(19): siRNA sense strand
gcuaauuggcuuauauguu

SEQ ID NO: 804527 - RNA, 19 nt, Homo sapiens
  misc_RNA (1)...(19): siRNA sense strand
gaagggauugcccgcauug

SEQ ID NO: 804528 - RNA, 19 nt, Homo sapiens
  misc_RNA (1)...(19): siRNA sense strand
ccucaugacuagccuuguu

SEQ ID NO: 804529 - RNA, 19 nt, Homo sapiens
  misc_RNA (1)...(19): siRNA sense strand
ggacaaacuccucaauaac

SEQ ID NO: 804530 - RNA, 19 nt, Homo sapiens
  misc_RNA (1)...(19): siRNA sense strand
gagacuccauggccucaga

SEQ ID NO: 804531 - RNA, 19 nt, Homo sapiens
  misc_RNA (1)...(19): siRNA sense strand
gcacagcagccuccagcaa

SEQ ID NO: 804532 - RNA, 19 nt, Homo sapiens
  misc_RNA (1)...(19): siRNA sense strand
gagagcugcagucaucuuu

SEQ ID NO: 804533 - RNA, 19 nt, Homo sapiens
  misc_RNA (1)...(19): siRNA sense strand
gaccauccgagacaaguuu

SEQ ID NO: 804534 - RNA, 19 nt, Homo sapiens
  misc_RNA (1)...(19): siRNA sense strand
gacaaacuccucaauaacu

SEQ ID NO: 804535 - RNA, 19 nt, Homo sapiens
  misc_RNA (1)...(19): siRNA sense strand
uggagaaggugguagacaa

SEQ ID NO: 804536 - RNA, 19 nt, Homo sapiens
  misc_RNA (1)...(19): siRNA sense strand
cagauacacuuacucuucu

SEQ ID NO: 804537 - RNA, 19 nt, Homo sapiens
  misc_RNA (1)...(19): siRNA sense strand
ggacaagucggucauugag

SEQ ID NO: 804538 - RNA, 19 nt, Homo sapiens
  misc_RNA (1)...(19): siRNA sense strand
caaauuccgagaccucuug

SEQ ID NO: 804539 - RNA, 19 nt, Homo sapiens
  misc_RNA (1)...(19): siRNA sense strand
gaaggugguagacaaguuc

SEQ ID NO: 804540 - RNA, 19 nt, Homo sapiens
  misc_RNA (1)...(19): siRNA sense strand
gcaugaggagggauuaaga

SEQ ID NO: 804541 - RNA, 19 nt, Homo sapiens
  misc_RNA (1)...(19): siRNA sense strand
caacagcacagccaucaag

SEQ ID NO: 804542 - RNA, 19 nt, Homo sapiens
  misc_RNA (1)...(19): siRNA sense strand
caaggcaaauuugacacaa

SEQ ID NO: 804543 - RNA, 19 nt, Homo sapiens
  misc_RNA (1)...(19): siRNA sense strand
gauguucuguguaauaagc

SEQ ID NO: 804544 - RNA, 19 nt, Homo sapiens
  misc_RNA (1)...(19): siRNA sense strand
gcagguggaaugugacaga

SEQ ID NO: 804545 - RNA, 19 nt, Homo sapiens
  misc_RNA (1)...(19): siRNA sense strand
cacuuacucuucuguuuga

SEQ ID NO: 804546 - RNA, 19 nt, Homo sapiens
  misc_RNA (1)...(19): siRNA sense strand
ggaaugaucaccuuuaccu

SEQ ID NO: 804547 - RNA, 19 nt, Homo sapiens
  misc_RNA (1)...(19): siRNA sense strand
gagaaaguggugcugaaau

SEQ ID NO: 804548 - RNA, 19 nt, Homo sapiens
  misc_RNA (1)...(19): siRNA sense strand
cuucagggauguucugugu

SEQ ID NO: 804549 - RNA, 19 nt, Homo sapiens
  misc_RNA (1)...(19): siRNA sense strand
gagcugcagucaucuuugc

SEQ ID NO: 804550 - RNA, 19 nt, Homo sapiens
  misc_RNA (1)...(19): siRNA sense strand
ccaguaaagcugaggagaa

SEQ ID NO: 804551 - RNA, 19 nt, Homo sapiens
  misc_RNA (1)...(19): siRNA sense strand
gagcuaauuggcuuauaug

SEQ ID NO: 804552 - RNA, 19 nt, Homo sapiens
  misc_RNA (1)...(19): siRNA sense strand
ccgcagugagcuauacuua

SEQ ID NO: 804553 - RNA, 19 nt, Homo sapiens
  misc_RNA (1)...(19): siRNA sense strand
uacacuuacucuucuguuu

SEQ ID NO: 804554 - RNA, 19 nt, Homo sapiens
  misc_RNA (1)...(19): siRNA sense strand
cagagaaguuugccauugc

SEQ ID NO: 804555 - RNA, 19 nt, Homo sapiens
  misc_RNA (1)...(19): siRNA sense strand
acaaacuccucaauaacug

SEQ ID NO: 804556 - RNA, 19 nt, Homo sapiens
  misc_RNA (1)...(19): siRNA sense strand
agaaggugguagacaaguu

SEQ ID NO: 804557 - RNA, 19 nt, Homo sapiens
  misc_RNA (1)...(19): siRNA sense strand
acagacagguggagaaggu

SEQ ID NO: 804558 - RNA, 19 nt, Homo sapiens
  misc_RNA (1)...(19): siRNA sense strand
ccgaauggguccuaaucug

SEQ ID NO: 804559 - RNA, 19 nt, Homo sapiens
  misc_RNA (1)...(19): siRNA sense strand
gcagugaagauaucaagag

SEQ ID NO: 804560 - RNA, 19 nt, Homo sapiens
  misc_RNA (1)...(19): siRNA sense strand
uggguggucugcaguuuga

SEQ ID NO: 804561 - RNA, 19 nt, Homo sapiens
  misc_RNA (1)...(19): siRNA sense strand
ggagaaagugguggagaga

SEQ ID NO: 804562 - RNA, 19 nt, Homo sapiens
  misc_RNA (1)...(19): siRNA sense strand
gaagaagacacuggagagu

SEQ ID NO: 804563 - RNA, 19 nt, Homo sapiens
  misc_RNA (1)...(19): siRNA sense strand
gcaaggcaaauuugacaca

SEQ ID NO: 804564 - RNA, 19 nt, Homo sapiens
  misc_RNA (1)...(19): siRNA sense strand
caagugccgugaacaucau

SEQ ID NO: 804565 - RNA, 19 nt, Homo sapiens
  misc_RNA (1)...(19): siRNA sense strand
guaaagcugaggagaaucu

SEQ ID NO: 804566 - RNA, 19 nt, Homo sapiens
  misc_RNA (1)...(19): siRNA sense strand
gagaagggccagcugacau

SEQ ID NO: 804567 - RNA, 19 nt, Homo sapiens
  misc_RNA (1)...(19): siRNA sense strand
gacaaguucaucaagcaaa

SEQ ID NO: 804568 - RNA, 19 nt, Homo sapiens
  misc_RNA (1)...(19): siRNA sense strand
uagacaaguucaucaagca

SEQ ID NO: 804569 - RNA, 19 nt, Homo sapiens
  misc_RNA (1)...(19): siRNA sense strand
ugaagggauugcccgcauu

SEQ ID NO: 804570 - RNA, 19 nt, Homo sapiens
  misc_RNA (1)...(19): siRNA sense strand
caaaacaccauugaaagua

SEQ ID NO: 804571 - RNA, 19 nt, Homo sapiens
  misc_RNA (1)...(19): siRNA sense strand
guccuaaucugcagcugau

SEQ ID NO: 804572 - RNA, 19 nt, Homo sapiens
  misc_RNA (1)...(19): siRNA sense strand
ccugcaaccuggcugagaa

SEQ ID NO: 804573 - RNA, 19 nt, Homo sapiens
  misc_RNA (1)...(19): siRNA sense strand
uacuuacgcuuccucaaga

SEQ ID NO: 804574 - RNA, 19 nt, Homo sapiens
  misc_RNA (1)...(19): siRNA sense strand
gcuggguggucugcaguuu

SEQ ID NO: 804575 - RNA, 19 nt, Homo sapiens
  misc_RNA (1)...(19): siRNA sense strand
aaucuccgcugagcucauu

SEQ ID NO: 804576 - RNA, 19 nt, Homo sapiens
  misc_RNA (1)...(19): siRNA sense strand
uggagaaaguggugcugaa

SEQ ID NO: 804577 - RNA, 19 nt, Homo sapiens
  misc_RNA (1)...(19): siRNA sense strand
agaauucaaugacuaugag

SEQ ID NO: 804578 - RNA, 19 nt, Homo sapiens
  misc_RNA (1)...(19): siRNA sense strand
guacugacgaggcgaagau

SEQ ID NO: 804579 - RNA, 19 nt, Homo sapiens
  misc_RNA (1)...(19): siRNA sense strand
gacugucucugugccauga

SEQ ID NO: 804580 - RNA, 19 nt, Homo sapiens
  misc_RNA (1)...(19): siRNA sense strand
aaacaucuccacucugaag

SEQ ID NO: 804581 - RNA, 19 nt, Homo sapiens
  misc_RNA (1)...(19): siRNA sense strand
caucgaggaggaagaauuc

SEQ ID NO: 804582 - RNA, 19 nt, Homo sapiens
  misc_RNA (1)...(19): siRNA sense strand
gaacagauggcaagcaaga

SEQ ID NO: 804583 - RNA, 19 nt, Homo sapiens
  misc_RNA (1)...(19): siRNA sense strand
ucaguaaccugcaggaguu

SEQ ID NO: 804584 - RNA, 19 nt, Homo sapiens
  misc_RNA (1)...(19): siRNA sense strand
ccauuuacauccugacauu

SEQ ID NO: 804585 - RNA, 19 nt, Homo sapiens
  misc_RNA (1)...(19): siRNA sense strand
gaaccgacaccugcaguuu

SEQ ID NO: 804586 - RNA, 19 nt, Homo sapiens
  misc_RNA (1)...(19): siRNA sense strand
ucaagagcauugcagagaa

SEQ ID NO: 804587 - RNA, 19 nt, Homo sapiens
  misc_RNA (1)...(19): siRNA sense strand
ggaauuacuucuggcaaca

SEQ ID NO: 804588 - RNA, 19 nt, Homo sapiens
  misc_RNA (1)...(19): siRNA sense strand
ggugcaaccugaccagaga

SEQ ID NO: 804589 - RNA, 19 nt, Homo sapiens
  misc_RNA (1)...(19): siRNA sense strand
cuauggauaugcugugaaa

SEQ ID NO: 804590 - RNA, 19 nt, Homo sapiens
  misc_RNA (1)...(19): siRNA sense strand
gauauacaacgaacagaug

SEQ ID NO: 804591 - RNA, 19 nt, Homo sapiens
  misc_RNA (1)...(19): siRNA sense strand
agcgggagcucuucaguaa

SEQ ID NO: 804592 - RNA, 19 nt, Homo sapiens
  misc_RNA (1)...(19): siRNA sense strand
ggugcgcccucauaucuau

SEQ ID NO: 804593 - RNA, 19 nt, Homo sapiens
  misc_RNA (1)...(19): siRNA sense strand
gaaacucucccugcuggaa

SEQ ID NO: 804594 - RNA, 19 nt, Homo sapiens
  misc_RNA (1)...(19): siRNA sense strand
ccuggcaccuucuguuuga

SEQ ID NO: 804595 - RNA, 19 nt, Homo sapiens
  misc_RNA (1)...(19): siRNA sense strand
gcagcugaguguucgacuu

SEQ ID NO: 804596 - RNA, 19 nt, Homo sapiens
  misc_RNA (1)...(19): siRNA sense strand
ccuuguaccugcugaacuu

SEQ ID NO: 804597 - RNA, 19 nt, Homo sapiens
  misc_RNA (1)...(19): siRNA sense strand
gggaggggcuuucuauuuc

SEQ ID NO: 804598 - RNA, 19 nt, Homo sapiens
  misc_RNA (1)...(19): siRNA sense strand
gagcuuaccaucuuuaucc

SEQ ID NO: 804599 - RNA, 19 nt, Homo sapiens
  misc_RNA (1)...(19): siRNA sense strand
caagagcauugcagagaac

SEQ ID NO: 804600 - RNA, 19 nt, Homo sapiens
  misc_RNA (1)...(19): siRNA sense strand
uccugagacuggccauuua

SEQ ID NO: 804601 - RNA, 19 nt, Homo sapiens
  misc_RNA (1)...(19): siRNA sense strand
auggauaugcugugaaaua

SEQ ID NO: 804602 - RNA, 19 nt, Homo sapiens
  misc_RNA (1)...(19): siRNA sense strand
acgaacagauggcaagcaa

SEQ ID NO: 804603 - RNA, 19 nt, Homo sapiens
  misc_RNA (1)...(19): siRNA sense strand
gcauguggcagcugagugu

SEQ ID NO: 804604 - RNA, 19 nt, Homo sapiens
  misc_RNA (1)...(19): siRNA sense strand
gaagaaccaggagcggauu

SEQ ID NO: 804605 - RNA, 19 nt, Homo sapiens
  misc_RNA (1)...(19): siRNA sense strand
gaguuggugcgcccucaua

SEQ ID NO: 804606 - RNA, 19 nt, Homo sapiens
  misc_RNA (1)...(19): siRNA sense strand
gagacuggccauuuacauc

SEQ ID NO: 804607 - RNA, 19 nt, Homo sapiens
  misc_RNA (1)...(19): siRNA sense strand
gugcugugcucugugaaga

SEQ ID NO: 804608 - RNA, 19 nt, Homo sapiens
  misc_RNA (1)...(19): siRNA sense strand
uggauaugcugugaaauag

SEQ ID NO: 804609 - RNA, 19 nt, Homo sapiens
  misc_RNA (1)...(19): siRNA sense strand
cagcugaguguucgacuug

SEQ ID NO: 804610 - RNA, 19 nt, Homo sapiens
  misc_RNA (1)...(19): siRNA sense strand
gcugaguguucgacuugga

SEQ ID NO: 804611 - RNA, 19 nt, Homo sapiens
  misc_RNA (1)...(19): siRNA sense strand
accgacaccugcaguuuga

SEQ ID NO: 804612 - RNA, 19 nt, Homo sapiens
  misc_RNA (1)...(19): siRNA sense strand
aguguucgacuuggaauua

SEQ ID NO: 804613 - RNA, 19 nt, Homo sapiens
  misc_RNA (1)...(19): siRNA sense strand
cgacuuggaauuacuucug

SEQ ID NO: 804614 - RNA, 19 nt, Homo sapiens
  misc_RNA (1)...(19): siRNA sense strand
uaccaucuuuauccugaga

SEQ ID NO: 804615 - RNA, 19 nt, Homo sapiens
  misc_RNA (1)...(19): siRNA sense strand
gaauuacuucuggcaacaa

SEQ ID NO: 804616 - RNA, 19 nt, Homo sapiens
  misc_RNA (1)...(19): siRNA sense strand
gcaguuugagcgcuuugug

SEQ ID NO: 804617 - RNA, 19 nt, Homo sapiens
  misc_RNA (1)...(19): siRNA sense strand
aagcgggagcucuucagua

SEQ ID NO: 804618 - RNA, 19 nt, Homo sapiens
  misc_RNA (1)...(19): siRNA sense strand
ggaggggcuuucuauuuca

SEQ ID NO: 804619 - RNA, 19 nt, Homo sapiens
  misc_RNA (1)...(19): siRNA sense strand
gcugugcucugugaagaac

SEQ ID NO: 804620 - RNA, 19 nt, Homo sapiens
  misc_RNA (1)...(19): siRNA sense strand
gggcuuguggagcuggaua

SEQ ID NO: 804621 - RNA, 19 nt, Homo sapiens
  misc_RNA (1)...(19): siRNA sense strand
cuggugcugugcucuguga

SEQ ID NO: 804622 - RNA, 19 nt, Homo sapiens
  misc_RNA (1)...(19): siRNA sense strand
ugauauacaacgaacagau

SEQ ID NO: 804623 - RNA, 19 nt, Homo sapiens
  misc_RNA (1)...(19): siRNA sense strand
gaagacgucugacacuauu

SEQ ID NO: 804624 - RNA, 19 nt, Homo sapiens
  misc_RNA (1)...(19): siRNA sense strand
gaugauaccucaggcucua

SEQ ID NO: 804625 - RNA, 19 nt, Homo sapiens
  misc_RNA (1)...(19): siRNA sense strand
ggagucucauccuucauuu

SEQ ID NO: 804626 - RNA, 19 nt, Homo sapiens
  misc_RNA (1)...(19): siRNA sense strand
caacaucgacauccucaga

SEQ ID NO: 804627 - RNA, 19 nt, Homo sapiens
  misc_RNA (1)...(19): siRNA sense strand
gcugggcuauggccucuuu

SEQ ID NO: 804628 - RNA, 19 nt, Homo sapiens
  misc_RNA (1)...(19): siRNA sense strand
gcagguggcagaucagaug

SEQ ID NO: 804629 - RNA, 19 nt, Homo sapiens
  misc_RNA (1)...(19): siRNA sense strand
gcucuagcuucgaggauau

SEQ ID NO: 804630 - RNA, 19 nt, Homo sapiens
  misc_RNA (1)...(19): siRNA sense strand
ucaccaugcugcagauguu

SEQ ID NO: 804631 - RNA, 19 nt, Homo sapiens
  misc_RNA (1)...(19): siRNA sense strand
gcucagcugugauugacau

SEQ ID NO: 804632 - RNA, 19 nt, Homo sapiens
  misc_RNA (1)...(19): siRNA sense strand
gcauugcauuguccuguuc

SEQ ID NO: 804633 - RNA, 19 nt, Homo sapiens
  misc_RNA (1)...(19): siRNA sense strand
gagaguuccugggcaugaa

SEQ ID NO: 804634 - RNA, 19 nt, Homo sapiens
  misc_RNA (1)...(19): siRNA sense strand
guucaucaccuauaauauc

SEQ ID NO: 804635 - RNA, 19 nt, Homo sapiens
  misc_RNA (1)...(19): siRNA sense strand
gggagucucauccuucauu

SEQ ID NO: 804636 - RNA, 19 nt, Homo sapiens
  misc_RNA (1)...(19): siRNA sense strand
agaggaggauggagaguuc

SEQ ID NO: 804637 - RNA, 19 nt, Homo sapiens
  misc_RNA (1)...(19): siRNA sense strand
ggcucuagcuucgaggaua

SEQ ID NO: 804638 - RNA, 19 nt, Homo sapiens
  misc_RNA (1)...(19): siRNA sense strand
ggagaguuccugggcauga

SEQ ID NO: 804639 - RNA, 19 nt, Homo sapiens
  misc_RNA (1)...(19): siRNA sense strand
cuaucaagguggucaacuu

SEQ ID NO: 804640 - RNA, 19 nt, Homo sapiens
  misc_RNA (1)...(19): siRNA sense strand
ucucauccuucauuuacuu

SEQ ID NO: 804641 - RNA, 19 nt, Homo sapiens
  misc_RNA (1)...(19): siRNA sense strand
cagcugugauugacaugga

SEQ ID NO: 804642 - RNA, 19 nt, Homo sapiens
  misc_RNA (1)...(19): siRNA sense strand
ugauugacauggagaacau

SEQ ID NO: 804643 - RNA, 19 nt, Homo sapiens
  misc_RNA (1)...(19): siRNA sense strand
ggcauugcauuguccuguu

SEQ ID NO: 804644 - RNA, 19 nt, Homo sapiens
  misc_RNA (1)...(19): siRNA sense strand
ugaagacgucugacacuau

SEQ ID NO: 804645 - RNA, 19 nt, Homo sapiens
  misc_RNA (1)...(19): siRNA sense strand
ggaagaaguagacgcugau

SEQ ID NO: 804646 - RNA, 19 nt, Homo sapiens
  misc_RNA (1)...(19): siRNA sense strand
ggauaugggugagcugcau

SEQ ID NO: 804647 - RNA, 19 nt, Homo sapiens
  misc_RNA (1)...(19): siRNA sense strand
uggagaacauggaugauac

SEQ ID NO: 804648 - RNA, 19 nt, Homo sapiens
  misc_RNA (1)...(19): siRNA sense strand
gcgcaugguagcaguguug

SEQ ID NO: 804649 - RNA, 19 nt, Homo sapiens
  misc_RNA (1)...(19): siRNA sense strand
gagucucauccuucauuua

SEQ ID NO: 804650 - RNA, 19 nt, Homo sapiens
  misc_RNA (1)...(19): siRNA sense strand
aauugcaggugaacucuau

SEQ ID NO: 804651 - RNA, 19 nt, Homo sapiens
  misc_RNA (1)...(19): siRNA sense strand
ccucaacgccacagccaaa

SEQ ID NO: 804652 - RNA, 19 nt, Homo sapiens
  misc_RNA (1)...(19): siRNA sense strand
ccagggccuucagcuugua

SEQ ID NO: 804653 - RNA, 19 nt, Homo sapiens
  misc_RNA (1)...(19): siRNA sense strand
gaagaaguagacgcugaug

SEQ ID NO: 804654 - RNA, 19 nt, Homo sapiens
  misc_RNA (1)...(19): siRNA sense strand
gaggcucagcugugauuga

SEQ ID NO: 804655 - RNA, 19 nt, Homo sapiens
  misc_RNA (1)...(19): siRNA sense strand
agaaguagacgcugaugca

SEQ ID NO: 804656 - RNA, 19 nt, Homo sapiens
  misc_RNA (1)...(19): siRNA sense strand
ggggaggguucgaagaaaa

SEQ ID NO: 804657 - RNA, 19 nt, Homo sapiens
  misc_RNA (1)...(19): siRNA sense strand
gaaaauugcaggugaacuc

SEQ ID NO: 804658 - RNA, 19 nt, Homo sapiens
  misc_RNA (1)...(19): siRNA sense strand
gaugaagacgucugacacu

SEQ ID NO: 804659 - RNA, 19 nt, Homo sapiens
  misc_RNA (1)...(19): siRNA sense strand
augaagacgucugacacua

SEQ ID NO: 804660 - RNA, 19 nt, Homo sapiens
  misc_RNA (1)...(19): siRNA sense strand
ccagaaaauugcaggugaa

SEQ ID NO: 804661 - RNA, 19 nt, Homo sapiens
  misc_RNA (1)...(19): siRNA sense strand
cuguucaucaccuauaaua

SEQ ID NO: 804662 - RNA, 19 nt, Homo sapiens
  misc_RNA (1)...(19): siRNA sense strand
gggaugaagacgucugaca

SEQ ID NO: 804663 - RNA, 19 nt, Homo sapiens
  misc_RNA (1)...(19): siRNA sense strand
uaucaagguggucaacuuc

SEQ ID NO: 804664 - RNA, 19 nt, Homo sapiens
  misc_RNA (1)...(19): siRNA sense strand
agacgucugacacuauuau

SEQ ID NO: 804665 - RNA, 19 nt, Homo sapiens
  misc_RNA (1)...(19): siRNA sense strand
gcaccugcuucggcuacug

SEQ ID NO: 804666 - RNA, 19 nt, Homo sapiens
  misc_RNA (1)...(19): siRNA sense strand
gauguggcaggcugggaaa

SEQ ID NO: 804667 - RNA, 19 nt, Homo sapiens
  misc_RNA (1)...(19): siRNA sense strand
gcauuguccuguucaucac

SEQ ID NO: 804668 - RNA, 19 nt, Homo sapiens
  misc_RNA (1)...(19): siRNA sense strand
gcaacgcccagaucaccau

SEQ ID NO: 804669 - RNA, 19 nt, Homo sapiens
  misc_RNA (1)...(19): siRNA sense strand
cggaggcucagcugugauu

SEQ ID NO: 804670 - RNA, 19 nt, Homo sapiens
  misc_RNA (1)...(19): siRNA sense strand
ggucuucacucugguugcu

SEQ ID NO: 804671 - RNA, 19 nt, Homo sapiens
  misc_RNA (1)...(19): siRNA sense strand
gggcaugaagggcuuuaag

SEQ ID NO: 804672 - RNA, 19 nt, Homo sapiens
  misc_RNA (1)...(19): siRNA sense strand
gaacucuauggaccucuca

SEQ ID NO: 804673 - RNA, 19 nt, Homo sapiens
  misc_RNA (1)...(19): siRNA sense strand
ggacacaccucacuacaaa

SEQ ID NO: 804674 - RNA, 19 nt, Homo sapiens
  misc_RNA (1)...(19): siRNA sense strand
aaacagggcugaagaggaa

SEQ ID NO: 804675 - RNA, 19 nt, Homo sapiens
  misc_RNA (1)...(19): siRNA sense strand
ccaauaaccugcugauaga

SEQ ID NO: 804676 - RNA, 19 nt, Homo sapiens
  misc_RNA (1)...(19): siRNA sense strand
ggacuuugcugaggaguug

SEQ ID NO: 804677 - RNA, 19 nt, Homo sapiens
  misc_RNA (1)...(19): siRNA sense strand
ggaggaggauggagaagug

SEQ ID NO: 804678 - RNA, 19 nt, Homo sapiens
  misc_RNA (1)...(19): siRNA sense strand
gagggaagauggcugaauc

SEQ ID NO: 804679 - RNA, 19 nt, Homo sapiens
  misc_RNA (1)...(19): siRNA sense strand
ggaacgauaucccugagau

SEQ ID NO: 804680 - RNA, 19 nt, Homo sapiens
  misc_RNA (1)...(19): siRNA sense strand
gggagaaccugcucaaguc

SEQ ID NO: 804681 - RNA, 19 nt, Homo sapiens
  misc_RNA (1)...(19): siRNA sense strand
gaccgcguccucucuauua

SEQ ID NO: 804682 - RNA, 19 nt, Homo sapiens
  misc_RNA (1)...(19): siRNA sense strand
gaaccucucugagcugauc

SEQ ID NO: 804683 - RNA, 19 nt, Homo sapiens
  misc_RNA (1)...(19): siRNA sense strand
ugacuaagcugaccaaccu

SEQ ID NO: 804684 - RNA, 19 nt, Homo sapiens
  misc_RNA (1)...(19): siRNA sense strand
ggacgacgagggcauauuc

SEQ ID NO: 804685 - RNA, 19 nt, Homo sapiens
  misc_RNA (1)...(19): siRNA sense strand
gcaaggacacaccucacua

SEQ ID NO: 804686 - RNA, 19 nt, Homo sapiens
  misc_RNA (1)...(19): siRNA sense strand
aagcagcuauccauccuaa

SEQ ID NO: 804687 - RNA, 19 nt, Homo sapiens
  misc_RNA (1)...(19): siRNA sense strand
ggagauccgucugccaaga

SEQ ID NO: 804688 - RNA, 19 nt, Homo sapiens
  misc_RNA (1)...(19): siRNA sense strand
gcacugaggaggaggacaa

SEQ ID NO: 804689 - RNA, 19 nt, Homo sapiens
  misc_RNA (1)...(19): siRNA sense strand
gccaauaaccugcugauag

SEQ ID NO: 804690 - RNA, 19 nt, Homo sapiens
  misc_RNA (1)...(19): siRNA sense strand
ggaacagccuggagagcau

SEQ ID NO: 804691 - RNA, 19 nt, Homo sapiens
  misc_RNA (1)...(19): siRNA sense strand
ccagcgagcucaaggugau

SEQ ID NO: 804692 - RNA, 19 nt, Homo sapiens
  misc_RNA (1)...(19): siRNA sense strand
ugaagacucucgcccaucu

SEQ ID NO: 804693 - RNA, 19 nt, Homo sapiens
  misc_RNA (1)...(19): siRNA sense strand
ggaggaagacgccgaagag

SEQ ID NO: 804694 - RNA, 19 nt, Homo sapiens
  misc_RNA (1)...(19): siRNA sense strand
ggaggaagccagaaaacua

SEQ ID NO: 804695 - RNA, 19 nt, Homo sapiens
  misc_RNA (1)...(19): siRNA sense strand
cagcgucccugucauuucu

SEQ ID NO: 804696 - RNA, 19 nt, Homo sapiens
  misc_RNA (1)...(19): siRNA sense strand
ccagaaaacuacagcagaa

SEQ ID NO: 804697 - RNA, 19 nt, Homo sapiens
  misc_RNA (1)...(19): siRNA sense strand
ggaaccgccugcagagucu

SEQ ID NO: 804698 - RNA, 19 nt, Homo sapiens
  misc_RNA (1)...(19): siRNA sense strand
gcagcuauccauccuaaag

SEQ ID NO: 804699 - RNA, 19 nt, Homo sapiens
  misc_RNA (1)...(19): siRNA sense strand
gcaggaggaggauggagaa

SEQ ID NO: 804700 - RNA, 19 nt, Homo sapiens
  misc_RNA (1)...(19): siRNA sense strand
gcaccaagaagcagucagu

SEQ ID NO: 804701 - RNA, 19 nt, Homo sapiens
  misc_RNA (1)...(19): siRNA sense strand
agaaguggcucuggugcuu

SEQ ID NO: 804702 - RNA, 19 nt, Homo sapiens
  misc_RNA (1)...(19): siRNA sense strand
ucacccaccucaaucucaa

SEQ ID NO: 804703 - RNA, 19 nt, Homo sapiens
  misc_RNA (1)...(19): siRNA sense strand
ugacugaggccaggcauga

SEQ ID NO: 804704 - RNA, 19 nt, Homo sapiens
  misc_RNA (1)...(19): siRNA sense strand
gaagaugcaggaggaggaa

SEQ ID NO: 804705 - RNA, 19 nt, Homo sapiens
  misc_RNA (1)...(19): siRNA sense strand
gagcucaaggugaugaaga

SEQ ID NO: 804706 - RNA, 19 nt, Homo sapiens
  misc_RNA (1)...(19): siRNA sense strand
ggaagaggaggaggaggaa

SEQ ID NO: 804707 - RNA, 19 nt, Homo sapiens
  misc_RNA (1)...(19): siRNA sense strand
cgagguggccaacuucaug

SEQ ID NO: 804708 - RNA, 19 nt, Homo sapiens
  misc_RNA (1)...(19): siRNA sense strand
ggccugggcaucagcauug

SEQ ID NO: 804709 - RNA, 19 nt, Homo sapiens
  misc_RNA (1)...(19): siRNA sense strand
cguuugaccaggccaauaa

SEQ ID NO: 804710 - RNA, 19 nt, Homo sapiens
  misc_RNA (1)...(19): siRNA sense strand
ggcuggugcugcucacuga

SEQ ID NO: 804711 - RNA, 19 nt, Homo sapiens
  misc_RNA (1)...(19): siRNA sense strand
gaacgauaucccugagauc

SEQ ID NO: 804712 - RNA, 19 nt, Homo sapiens
  misc_RNA (1)...(19): siRNA sense strand
gacgagggcauauucaucu

SEQ ID NO: 804713 - RNA, 19 nt, Homo sapiens
  misc_RNA (1)...(19): siRNA sense strand
ggaguugaggucccuggaa

SEQ ID NO: 804714 - RNA, 19 nt, Homo sapiens
  misc_RNA (1)...(19): siRNA sense strand
ccagcccucugccacauuc

SEQ ID NO: 804715 - RNA, 19 nt, Homo sapiens
  misc_RNA (1)...(19): siRNA sense strand
gggaggcaacgaucuggaa

SEQ ID NO: 804716 - RNA, 19 nt, Homo sapiens
  misc_RNA (1)...(19): siRNA sense strand
caccaucgcccugcuguug

SEQ ID NO: 804717 - RNA, 19 nt, Homo sapiens
  misc_RNA (1)...(19): siRNA sense strand
gcuauccauccuaaaggua

SEQ ID NO: 804718 - RNA, 19 nt, Homo sapiens
  misc_RNA (1)...(19): siRNA sense strand
gaagcagcuauccauccua

SEQ ID NO: 804719 - RNA, 19 nt, Homo sapiens
  misc_RNA (1)...(19): siRNA sense strand
cugcaaggcucuggagauc

SEQ ID NO: 804720 - RNA, 19 nt, Homo sapiens
  misc_RNA (1)...(19): siRNA sense strand
gggagcggcagaaguacuu

SEQ ID NO: 804721 - RNA, 19 nt, Homo sapiens
  misc_RNA (1)...(19): siRNA sense strand
gacgagggcaucuucaucu

SEQ ID NO: 804722 - RNA, 19 nt, Homo sapiens
  misc_RNA (1)...(19): siRNA sense strand
ggaugccacgcaccaagaa

SEQ ID NO: 804723 - RNA, 19 nt, Homo sapiens
  misc_RNA (1)...(19): siRNA sense strand
gaccgcauccuggcaguga

SEQ ID NO: 804724 - RNA, 19 nt, Homo sapiens
  misc_RNA (1)...(19): siRNA sense strand
gacgugucccggaacgaua

SEQ ID NO: 804725 - RNA, 19 nt, Homo sapiens
  misc_RNA (1)...(19): siRNA sense strand
gggaggaagacgccgaaga

SEQ ID NO: 804726 - RNA, 19 nt, Homo sapiens
  misc_RNA (1)...(19): siRNA sense strand
gcugacgaccugcggaaga

SEQ ID NO: 804727 - RNA, 19 nt, Homo sapiens
  misc_RNA (1)...(19): siRNA sense strand
cgcguccucucuauuaaug

SEQ ID NO: 804728 - RNA, 19 nt, Homo sapiens
  misc_RNA (1)...(19): siRNA sense strand
gcgaccgcguccucucuau

SEQ ID NO: 804729 - RNA, 19 nt, Homo sapiens
  misc_RNA (1)...(19): siRNA sense strand
uggcucaccuggcccugaa

SEQ ID NO: 804730 - RNA, 19 nt, Homo sapiens
  misc_RNA (1)...(19): siRNA sense strand
ugaagcagcuauccauccu

SEQ ID NO: 804731 - RNA, 19 nt, Homo sapiens
  misc_RNA (1)...(19): siRNA sense strand
gggaugccacgcaccaaga

SEQ ID NO: 804732 - RNA, 19 nt, Homo sapiens
  misc_RNA (1)...(19): siRNA sense strand
cguccucucuauuaaugga

SEQ ID NO: 804733 - RNA, 19 nt, Homo sapiens
  misc_RNA (1)...(19): siRNA sense strand
cgacgagggcauauucauc

SEQ ID NO: 804734 - RNA, 19 nt, Homo sapiens
  misc_RNA (1)...(19): siRNA sense strand
gaagaggaggaggaggaaa

SEQ ID NO: 804735 - RNA, 19 nt, Homo sapiens
  misc_RNA (1)...(19): siRNA sense strand
caaggacacaccucacuac

SEQ ID NO: 804736 - RNA, 19 nt, Homo sapiens
  misc_RNA (1)...(19): siRNA sense strand
aggcaacgaucuggaagug

SEQ ID NO: 804737 - RNA, 19 nt, Homo sapiens
  misc_RNA (1)...(19): siRNA sense strand
gagaacgcggucaccauca

SEQ ID NO: 804738 - RNA, 19 nt, Homo sapiens
  misc_RNA (1)...(19): siRNA sense strand
uccuaaagguagaccagaa

SEQ ID NO: 804739 - RNA, 19 nt, Homo sapiens
  misc_RNA (1)...(19): siRNA sense strand
uccgggagcggcagaagua

SEQ ID NO: 804740 - RNA, 19 nt, Homo sapiens
  misc_RNA (1)...(19): siRNA sense strand
ggagggaagauggcugaau

SEQ ID NO: 804741 - RNA, 19 nt, Homo sapiens
  misc_RNA (1)...(19): siRNA sense strand
ccaucgcccugcuguugga

SEQ ID NO: 804742 - RNA, 19 nt, Homo sapiens
  misc_RNA (1)...(19): siRNA sense strand
cgggagaaccugcucaagu

SEQ ID NO: 804743 - RNA, 19 nt, Homo sapiens
  misc_RNA (1)...(19): siRNA sense strand
caucuucgucucccgcauu

SEQ ID NO: 804744 - RNA, 19 nt, Homo sapiens
  misc_RNA (1)...(19): siRNA sense strand
ggaggaggaggaggaggaa

SEQ ID NO: 804745 - RNA, 19 nt, Homo sapiens
  misc_RNA (1)...(19): siRNA sense strand
gcugugggcccugaagaug

SEQ ID NO: 804746 - RNA, 19 nt, Homo sapiens
  misc_RNA (1)...(19): siRNA sense strand
aggaggaacaggaggauga

SEQ ID NO: 804747 - RNA, 19 nt, Homo sapiens
  misc_RNA (1)...(19): siRNA sense strand
gcagaagagagcgcagaug

SEQ ID NO: 804748 - RNA, 19 nt, Homo sapiens
  misc_RNA (1)...(19): siRNA sense strand
ggccaauaaccugcugaua

SEQ ID NO: 804749 - RNA, 19 nt, Homo sapiens
  misc_RNA (1)...(19): siRNA sense strand
cggcaucggucagcugaag

SEQ ID NO: 804750 - RNA, 19 nt, Homo sapiens
  misc_RNA (1)...(19): siRNA sense strand
caccuggcccugaaugaug

SEQ ID NO: 804751 - RNA, 19 nt, Homo sapiens
  misc_RNA (1)...(19): siRNA sense strand
ugucauuucuggucaagcu

SEQ ID NO: 804752 - RNA, 19 nt, Homo sapiens
  misc_RNA (1)...(19): siRNA sense strand
ugaggacgcugaggaagcu

SEQ ID NO: 804753 - RNA, 19 nt, Homo sapiens
  misc_RNA (1)...(19): siRNA sense strand
cccuguggcuggcagagaa

SEQ ID NO: 804754 - RNA, 19 nt, Homo sapiens
  misc_RNA (1)...(19): siRNA sense strand
aggaagaggccagcacuga

SEQ ID NO: 804755 - RNA, 19 nt, Homo sapiens
  misc_RNA (1)...(19): siRNA sense strand
ugugggcccugaagaugug

SEQ ID NO: 804756 - RNA, 19 nt, Homo sapiens
  misc_RNA (1)...(19): siRNA sense strand
ggagggcagccaggaugaa

SEQ ID NO: 804757 - RNA, 19 nt, Homo sapiens
  misc_RNA (1)...(19): siRNA sense strand
gcaucuucaucuccaaggu

SEQ ID NO: 804758 - RNA, 19 nt, Homo sapiens
  misc_RNA (1)...(19): siRNA sense strand
cggagagcaucaaguucug

SEQ ID NO: 804759 - RNA, 19 nt, Homo sapiens
  misc_RNA (1)...(19): siRNA sense strand
ucacggagaaccugcugau

SEQ ID NO: 804760 - RNA, 19 nt, Homo sapiens
  misc_RNA (1)...(19): siRNA sense strand
gagcggcagaaguacuuug

SEQ ID NO: 804761 - RNA, 19 nt, Homo sapiens
  misc_RNA (1)...(19): siRNA sense strand
cgaccgcguccucucuauu

SEQ ID NO: 804762 - RNA, 19 nt, Homo sapiens
  misc_RNA (1)...(19): siRNA sense strand
agucuggccugagugaaga

SEQ ID NO: 804763 - RNA, 19 nt, Homo sapiens
  misc_RNA (1)...(19): siRNA sense strand
ggacacaccucacuacaaa

SEQ ID NO: 804764 - RNA, 19 nt, Homo sapiens
  misc_RNA (1)...(19): siRNA sense strand
aaacagggcugaagaggaa

SEQ ID NO: 804765 - RNA, 19 nt, Homo sapiens
  misc_RNA (1)...(19): siRNA sense strand
ccaauaaccugcugauaga

SEQ ID NO: 804766 - RNA, 19 nt, Homo sapiens
  misc_RNA (1)...(19): siRNA sense strand
ggacuuugcugaggaguug

SEQ ID NO: 804767 - RNA, 19 nt, Homo sapiens
  misc_RNA (1)...(19): siRNA sense strand
ggaggaggauggagaagug

SEQ ID NO: 804768 - RNA, 19 nt, Homo sapiens
  misc_RNA (1)...(19): siRNA sense strand
gagggaagauggcugaauc

SEQ ID NO: 804769 - RNA, 19 nt, Homo sapiens
  misc_RNA (1)...(19): siRNA sense strand
ggaacgauaucccugagau

SEQ ID NO: 804770 - RNA, 19 nt, Homo sapiens
  misc_RNA (1)...(19): siRNA sense strand
gggagaaccugcucaaguc

SEQ ID NO: 804771 - RNA, 19 nt, Homo sapiens
  misc_RNA (1)...(19): siRNA sense strand
gaccgcguccucucuauua

SEQ ID NO: 804772 - RNA, 19 nt, Homo sapiens
  misc_RNA (1)...(19): siRNA sense strand
gaaccucucugagcugauc

SEQ ID NO: 804773 - RNA, 19 nt, Homo sapiens
  misc_RNA (1)...(19): siRNA sense strand
ugacuaagcugaccaaccu

SEQ ID NO: 804774 - RNA, 19 nt, Homo sapiens
  misc_RNA (1)...(19): siRNA sense strand
ggacgacgagggcauauuc

SEQ ID NO: 804775 - RNA, 19 nt, Homo sapiens
  misc_RNA (1)...(19): siRNA sense strand
gcaaggacacaccucacua

SEQ ID NO: 804776 - RNA, 19 nt, Homo sapiens
  misc_RNA (1)...(19): siRNA sense strand
aagcagcuauccauccuaa

SEQ ID NO: 804777 - RNA, 19 nt, Homo sapiens
  misc_RNA (1)...(19): siRNA sense strand
ggagauccgucugccaaga

SEQ ID NO: 804778 - RNA, 19 nt, Homo sapiens
  misc_RNA (1)...(19): siRNA sense strand
gcacugaggaggaggacaa

SEQ ID NO: 804779 - RNA, 19 nt, Homo sapiens
  misc_RNA (1)...(19): siRNA sense strand
gccaauaaccugcugauag

SEQ ID NO: 804780 - RNA, 19 nt, Homo sapiens
  misc_RNA (1)...(19): siRNA sense strand
ggaacagccuggagagcau

SEQ ID NO: 804781 - RNA, 19 nt, Homo sapiens
  misc_RNA (1)...(19): siRNA sense strand
ccagcgagcucaaggugau

SEQ ID NO: 804782 - RNA, 19 nt, Homo sapiens
  misc_RNA (1)...(19): siRNA sense strand
ugaagacucucgcccaucu

SEQ ID NO: 804783 - RNA, 19 nt, Homo sapiens
  misc_RNA (1)...(19): siRNA sense strand
ggaggaagacgccgaagag

SEQ ID NO: 804784 - RNA, 19 nt, Homo sapiens
  misc_RNA (1)...(19): siRNA sense strand
ggaggaagccagaaaacua

SEQ ID NO: 804785 - RNA, 19 nt, Homo sapiens
  misc_RNA (1)...(19): siRNA sense strand
cagcgucccugucauuucu

SEQ ID NO: 804786 - RNA, 19 nt, Homo sapiens
  misc_RNA (1)...(19): siRNA sense strand
ccagaaaacuacagcagaa

SEQ ID NO: 804787 - RNA, 19 nt, Homo sapiens
  misc_RNA (1)...(19): siRNA sense strand
ggaaccgccugcagagucu

SEQ ID NO: 804788 - RNA, 19 nt, Homo sapiens
  misc_RNA (1)...(19): siRNA sense strand
gcagcuauccauccuaaag

SEQ ID NO: 804789 - RNA, 19 nt, Homo sapiens
  misc_RNA (1)...(19): siRNA sense strand
gcaggaggaggauggagaa

SEQ ID NO: 804790 - RNA, 19 nt, Homo sapiens
  misc_RNA (1)...(19): siRNA sense strand
gcaccaagaagcagucagu

SEQ ID NO: 804791 - RNA, 19 nt, Homo sapiens
  misc_RNA (1)...(19): siRNA sense strand
agaaguggcucuggugcuu

SEQ ID NO: 804792 - RNA, 19 nt, Homo sapiens
  misc_RNA (1)...(19): siRNA sense strand
ucacccaccucaaucucaa

SEQ ID NO: 804793 - RNA, 19 nt, Homo sapiens
  misc_RNA (1)...(19): siRNA sense strand
ugacugaggccaggcauga

SEQ ID NO: 804794 - RNA, 19 nt, Homo sapiens
  misc_RNA (1)...(19): siRNA sense strand
gaagaugcaggaggaggaa

SEQ ID NO: 804795 - RNA, 19 nt, Homo sapiens
  misc_RNA (1)...(19): siRNA sense strand
gagcucaaggugaugaaga

SEQ ID NO: 804796 - RNA, 19 nt, Homo sapiens
  misc_RNA (1)...(19): siRNA sense strand
ggaagaggaggaggaggaa

SEQ ID NO: 804797 - RNA, 19 nt, Homo sapiens
  misc_RNA (1)...(19): siRNA sense strand
cgagguggccaacuucaug

SEQ ID NO: 804798 - RNA, 19 nt, Homo sapiens
  misc_RNA (1)...(19): siRNA sense strand
ggccugggcaucagcauug

SEQ ID NO: 804799 - RNA, 19 nt, Homo sapiens
  misc_RNA (1)...(19): siRNA sense strand
cguuugaccaggccaauaa

SEQ ID NO: 804800 - RNA, 19 nt, Homo sapiens
  misc_RNA (1)...(19): siRNA sense strand
ggcuggugcugcucacuga

SEQ ID NO: 804801 - RNA, 19 nt, Homo sapiens
  misc_RNA (1)...(19): siRNA sense strand
gaacgauaucccugagauc

SEQ ID NO: 804802 - RNA, 19 nt, Homo sapiens
  misc_RNA (1)...(19): siRNA sense strand
gacgagggcauauucaucu

SEQ ID NO: 804803 - RNA, 19 nt, Homo sapiens
  misc_RNA (1)...(19): siRNA sense strand
ggaguugaggucccuggaa

SEQ ID NO: 804804 - RNA, 19 nt, Homo sapiens
  misc_RNA (1)...(19): siRNA sense strand
ccagcccucugccacauuc

SEQ ID NO: 804805 - RNA, 19 nt, Homo sapiens
  misc_RNA (1)...(19): siRNA sense strand
gggaggcaacgaucuggaa

SEQ ID NO: 804806 - RNA, 19 nt, Homo sapiens
  misc_RNA (1)...(19): siRNA sense strand
caccaucgcccugcuguug

SEQ ID NO: 804807 - RNA, 19 nt, Homo sapiens
  misc_RNA (1)...(19): siRNA sense strand
gcuauccauccuaaaggua

SEQ ID NO: 804808 - RNA, 19 nt, Homo sapiens
  misc_RNA (1)...(19): siRNA sense strand
gaagcagcuauccauccua

SEQ ID NO: 804809 - RNA, 19 nt, Homo sapiens
  misc_RNA (1)...(19): siRNA sense strand
cugcaaggcucuggagauc

SEQ ID NO: 804810 - RNA, 19 nt, Homo sapiens
  misc_RNA (1)...(19): siRNA sense strand
gggagcggcagaaguacuu

SEQ ID NO: 804811 - RNA, 19 nt, Homo sapiens
  misc_RNA (1)...(19): siRNA sense strand
gacgagggcaucuucaucu

SEQ ID NO: 804812 - RNA, 19 nt, Homo sapiens
  misc_RNA (1)...(19): siRNA sense strand
ggaugccacgcaccaagaa

SEQ ID NO: 804813 - RNA, 19 nt, Homo sapiens
  misc_RNA (1)...(19): siRNA sense strand
gaccgcauccuggcaguga

SEQ ID NO: 804814 - RNA, 19 nt, Homo sapiens
  misc_RNA (1)...(19): siRNA sense strand
gacgugucccggaacgaua

SEQ ID NO: 804815 - RNA, 19 nt, Homo sapiens
  misc_RNA (1)...(19): siRNA sense strand
gggaggaagacgccgaaga

SEQ ID NO: 804816 - RNA, 19 nt, Homo sapiens
  misc_RNA (1)...(19): siRNA sense strand
gcugacgaccugcggaaga

SEQ ID NO: 804817 - RNA, 19 nt, Homo sapiens
  misc_RNA (1)...(19): siRNA sense strand
cgcguccucucuauuaaug

SEQ ID NO: 804818 - RNA, 19 nt, Homo sapiens
  misc_RNA (1)...(19): siRNA sense strand
gcgaccgcguccucucuau

SEQ ID NO: 804819 - RNA, 19 nt, Homo sapiens
  misc_RNA (1)...(19): siRNA sense strand
uggcucaccuggcccugaa

SEQ ID NO: 804820 - RNA, 19 nt, Homo sapiens
  misc_RNA (1)...(19): siRNA sense strand
ugaagcagcuauccauccu

SEQ ID NO: 804821 - RNA, 19 nt, Homo sapiens
  misc_RNA (1)...(19): siRNA sense strand
gggaugccacgcaccaaga

SEQ ID NO: 804822 - RNA, 19 nt, Homo sapiens
  misc_RNA (1)...(19): siRNA sense strand
cguccucucuauuaaugga

SEQ ID NO: 804823 - RNA, 19 nt, Homo sapiens
  misc_RNA (1)...(19): siRNA sense strand
cgacgagggcauauucauc

SEQ ID NO: 804824 - RNA, 19 nt, Homo sapiens
  misc_RNA (1)...(19): siRNA sense strand
gaagaggaggaggaggaaa

SEQ ID NO: 804825 - RNA, 19 nt, Homo sapiens
  misc_RNA (1)...(19): siRNA sense strand
caaggacacaccucacuac

SEQ ID NO: 804826 - RNA, 19 nt, Homo sapiens
  misc_RNA (1)...(19): siRNA sense strand
aggcaacgaucuggaagug

SEQ ID NO: 804827 - RNA, 19 nt, Homo sapiens
  misc_RNA (1)...(19): siRNA sense strand
gagaacgcggucaccauca

SEQ ID NO: 804828 - RNA, 19 nt, Homo sapiens
  misc_RNA (1)...(19): siRNA sense strand
uccuaaagguagaccagaa

SEQ ID NO: 804829 - RNA, 19 nt, Homo sapiens
  misc_RNA (1)...(19): siRNA sense strand
uccgggagcggcagaagua

SEQ ID NO: 804830 - RNA, 19 nt, Homo sapiens
  misc_RNA (1)...(19): siRNA sense strand
ggagggaagauggcugaau

SEQ ID NO: 804831 - RNA, 19 nt, Homo sapiens
  misc_RNA (1)...(19): siRNA sense strand
ccaucgcccugcuguugga

SEQ ID NO: 804832 - RNA, 19 nt, Homo sapiens
  misc_RNA (1)...(19): siRNA sense strand
cgggagaaccugcucaagu

SEQ ID NO: 804833 - RNA, 19 nt, Homo sapiens
  misc_RNA (1)...(19): siRNA sense strand
caucuucgucucccgcauu

SEQ ID NO: 804834 - RNA, 19 nt, Homo sapiens
  misc_RNA (1)...(19): siRNA sense strand
ggaggaggaggaggaggaa

SEQ ID NO: 804835 - RNA, 19 nt, Homo sapiens
  misc_RNA (1)...(19): siRNA sense strand
gcugugggcccugaagaug

SEQ ID NO: 804836 - RNA, 19 nt, Homo sapiens
  misc_RNA (1)...(19): siRNA sense strand
aggaggaacaggaggauga

SEQ ID NO: 804837 - RNA, 19 nt, Homo sapiens
  misc_RNA (1)...(19): siRNA sense strand
gcagaagagagcgcagaug

SEQ ID NO: 804838 - RNA, 19 nt, Homo sapiens
  misc_RNA (1)...(19): siRNA sense strand
ggccaauaaccugcugaua

SEQ ID NO: 804839 - RNA, 19 nt, Homo sapiens
  misc_RNA (1)...(19): siRNA sense strand
cggcaucggucagcugaag

SEQ ID NO: 804840 - RNA, 19 nt, Homo sapiens
  misc_RNA (1)...(19): siRNA sense strand
caccuggcccugaaugaug

SEQ ID NO: 804841 - RNA, 19 nt, Homo sapiens
  misc_RNA (1)...(19): siRNA sense strand
ugucauuucuggucaagcu

SEQ ID NO: 804842 - RNA, 19 nt, Homo sapiens
  misc_RNA (1)...(19): siRNA sense strand
ugaggacgcugaggaagcu

SEQ ID NO: 804843 - RNA, 19 nt, Homo sapiens
  misc_RNA (1)...(19): siRNA sense strand
cccuguggcuggcagagaa

SEQ ID NO: 804844 - RNA, 19 nt, Homo sapiens
  misc_RNA (1)...(19): siRNA sense strand
aggaagaggccagcacuga

SEQ ID NO: 804845 - RNA, 19 nt, Homo sapiens
  misc_RNA (1)...(19): siRNA sense strand
ugugggcccugaagaugug

SEQ ID NO: 804846 - RNA, 19 nt, Homo sapiens
  misc_RNA (1)...(19): siRNA sense strand
ggagggcagccaggaugaa

SEQ ID NO: 804847 - RNA, 19 nt, Homo sapiens
  misc_RNA (1)...(19): siRNA sense strand
gcaucuucaucuccaaggu

SEQ ID NO: 804848 - RNA, 19 nt, Homo sapiens
  misc_RNA (1)...(19): siRNA sense strand
cggagagcaucaaguucug

SEQ ID NO: 804849 - RNA, 19 nt, Homo sapiens
  misc_RNA (1)...(19): siRNA sense strand
ucacggagaaccugcugau

SEQ ID NO: 804850 - RNA, 19 nt, Homo sapiens
  misc_RNA (1)...(19): siRNA sense strand
gagcggcagaaguacuuug

SEQ ID NO: 804851 - RNA, 19 nt, Homo sapiens
  misc_RNA (1)...(19): siRNA sense strand
cgaccgcguccucucuauu

SEQ ID NO: 804852 - RNA, 19 nt, Homo sapiens
  misc_RNA (1)...(19): siRNA sense strand
agucuggccugagugaaga

SEQ ID NO: 804853 - RNA, 19 nt, Homo sapiens
  misc_RNA (1)...(19): siRNA sense strand
ggaaggcugcgacuuguua

SEQ ID NO: 804854 - RNA, 19 nt, Homo sapiens
  misc_RNA (1)...(19): siRNA sense strand
gcaguggugugacaugcuu

SEQ ID NO: 804855 - RNA, 19 nt, Homo sapiens
  misc_RNA (1)...(19): siRNA sense strand
caagaaucaucaagaccaa

SEQ ID NO: 804856 - RNA, 19 nt, Homo sapiens
  misc_RNA (1)...(19): siRNA sense strand
ccugugagauugugaccuu

SEQ ID NO: 804857 - RNA, 19 nt, Homo sapiens
  misc_RNA (1)...(19): siRNA sense strand
cagcauguccucaacuuuc

SEQ ID NO: 804858 - RNA, 19 nt, Homo sapiens
  misc_RNA (1)...(19): siRNA sense strand
gaaggcugcgacuuguuaa

SEQ ID NO: 804859 - RNA, 19 nt, Homo sapiens
  misc_RNA (1)...(19): siRNA sense strand
gcugcgacuuguuaaucaa

SEQ ID NO: 804860 - RNA, 19 nt, Homo sapiens
  misc_RNA (1)...(19): siRNA sense strand
ggcugcgacuuguuaauca

SEQ ID NO: 804861 - RNA, 19 nt, Homo sapiens
  misc_RNA (1)...(19): siRNA sense strand
gccggcaccugugagauug

SEQ ID NO: 804862 - RNA, 19 nt, Homo sapiens
  misc_RNA (1)...(19): siRNA sense strand
gacgcaagaaucaucaaga

SEQ ID NO: 804863 - RNA, 19 nt, Homo sapiens
  misc_RNA (1)...(19): siRNA sense strand
cccagcauguccucaacuu

SEQ ID NO: 804864 - RNA, 19 nt, Homo sapiens
  misc_RNA (1)...(19): siRNA sense strand
gugagauugugaccuugga

SEQ ID NO: 804865 - RNA, 19 nt, Homo sapiens
  misc_RNA (1)...(19): siRNA sense strand
ggacgcaagaaucaucaag

SEQ ID NO: 804866 - RNA, 19 nt, Homo sapiens
  misc_RNA (1)...(19): siRNA sense strand
ccagcauguccucaacuuu

SEQ ID NO: 804867 - RNA, 19 nt, Homo sapiens
  misc_RNA (1)...(19): siRNA sense strand
ggaagggacugcuuauaua

SEQ ID NO: 804868 - RNA, 19 nt, Homo sapiens
  misc_RNA (1)...(19): siRNA sense strand
gaacggagaucagaaauug

SEQ ID NO: 804869 - RNA, 19 nt, Homo sapiens
  misc_RNA (1)...(19): siRNA sense strand
gaacuggacuucuuuguau

SEQ ID NO: 804870 - RNA, 19 nt, Homo sapiens
  misc_RNA (1)...(19): siRNA sense strand
gaacaugggaugaugauua

SEQ ID NO: 804871 - RNA, 19 nt, Homo sapiens
  misc_RNA (1)...(19): siRNA sense strand
gcacaaacauuucagcaaa

SEQ ID NO: 804872 - RNA, 19 nt, Homo sapiens
  misc_RNA (1)...(19): siRNA sense strand
guuaauagcuguacuagaa

SEQ ID NO: 804873 - RNA, 19 nt, Homo sapiens
  misc_RNA (1)...(19): siRNA sense strand
ggaagaugcucaagaauug

SEQ ID NO: 804874 - RNA, 19 nt, Homo sapiens
  misc_RNA (1)...(19): siRNA sense strand
gaagaaaucuaccuuaugg

SEQ ID NO: 804875 - RNA, 19 nt, Homo sapiens
  misc_RNA (1)...(19): siRNA sense strand
gcagacaacugaucuagaa

SEQ ID NO: 804876 - RNA, 19 nt, Homo sapiens
  misc_RNA (1)...(19): siRNA sense strand
ggacuuaccuauuucuaaa

SEQ ID NO: 804877 - RNA, 19 nt, Homo sapiens
  misc_RNA (1)...(19): siRNA sense strand
ggaagacuuugaauuagua

SEQ ID NO: 804878 - RNA, 19 nt, Homo sapiens
  misc_RNA (1)...(19): siRNA sense strand
gcucagaguuucccuaauu

SEQ ID NO: 804879 - RNA, 19 nt, Homo sapiens
  misc_RNA (1)...(19): siRNA sense strand
gcagaaaacugaaaucuaa

SEQ ID NO: 804880 - RNA, 19 nt, Homo sapiens
  misc_RNA (1)...(19): siRNA sense strand
gaaaucaguucuugagguu

SEQ ID NO: 804881 - RNA, 19 nt, Homo sapiens
  misc_RNA (1)...(19): siRNA sense strand
gaaagcagcuaaagaagca

SEQ ID NO: 804882 - RNA, 19 nt, Homo sapiens
  misc_RNA (1)...(19): siRNA sense strand
gcucauagcugcauauaag

SEQ ID NO: 804883 - RNA, 19 nt, Homo sapiens
  misc_RNA (1)...(19): siRNA sense strand
gaucagaaauuguaaugga

SEQ ID NO: 804884 - RNA, 19 nt, Homo sapiens
  misc_RNA (1)...(19): siRNA sense strand
cauagaggauuuagguuua

SEQ ID NO: 804885 - RNA, 19 nt, Homo sapiens
  misc_RNA (1)...(19): siRNA sense strand
gaaagggacaugcaacuaa

SEQ ID NO: 804886 - RNA, 19 nt, Homo sapiens
  misc_RNA (1)...(19): siRNA sense strand
agacuggugugaacaauua

SEQ ID NO: 804887 - RNA, 19 nt, Homo sapiens
  misc_RNA (1)...(19): siRNA sense strand
gcaacaagguaaaccauau

SEQ ID NO: 804888 - RNA, 19 nt, Homo sapiens
  misc_RNA (1)...(19): siRNA sense strand
gaucauaagggauauagua

SEQ ID NO: 804889 - RNA, 19 nt, Homo sapiens
  misc_RNA (1)...(19): siRNA sense strand
gcaauaguaugguuacaga

SEQ ID NO: 804890 - RNA, 19 nt, Homo sapiens
  misc_RNA (1)...(19): siRNA sense strand
uaaccuaccugcagaagaa

SEQ ID NO: 804891 - RNA, 19 nt, Homo sapiens
  misc_RNA (1)...(19): siRNA sense strand
gaaaugaaggauucugaua

SEQ ID NO: 804892 - RNA, 19 nt, Homo sapiens
  misc_RNA (1)...(19): siRNA sense strand
gacaacugaucuagaaaua

SEQ ID NO: 804893 - RNA, 19 nt, Homo sapiens
  misc_RNA (1)...(19): siRNA sense strand
gcagggagccgaccuauug

SEQ ID NO: 804894 - RNA, 19 nt, Homo sapiens
  misc_RNA (1)...(19): siRNA sense strand
ggucggagcuuccagauuc

SEQ ID NO: 804895 - RNA, 19 nt, Homo sapiens
  misc_RNA (1)...(19): siRNA sense strand
agauaaagguggugauaua

SEQ ID NO: 804896 - RNA, 19 nt, Homo sapiens
  misc_RNA (1)...(19): siRNA sense strand
ggagacaugugagaauuaa

SEQ ID NO: 804897 - RNA, 19 nt, Homo sapiens
  misc_RNA (1)...(19): siRNA sense strand
gaacaaagucuggguuaaa

SEQ ID NO: 804898 - RNA, 19 nt, Homo sapiens
  misc_RNA (1)...(19): siRNA sense strand
gaaguugaauuaccacuca

SEQ ID NO: 804899 - RNA, 19 nt, Homo sapiens
  misc_RNA (1)...(19): siRNA sense strand
caaaggagauccggaaaug

SEQ ID NO: 804900 - RNA, 19 nt, Homo sapiens
  misc_RNA (1)...(19): siRNA sense strand
gagcuuggcuuugugauga

SEQ ID NO: 804901 - RNA, 19 nt, Homo sapiens
  misc_RNA (1)...(19): siRNA sense strand
agacuuagcugaacagugu

SEQ ID NO: 804902 - RNA, 19 nt, Homo sapiens
  misc_RNA (1)...(19): siRNA sense strand
ggaaagcauucuugcaguu

SEQ ID NO: 804903 - RNA, 19 nt, Homo sapiens
  misc_RNA (1)...(19): siRNA sense strand
gaaacuagacagcuuuauu

SEQ ID NO: 804904 - RNA, 19 nt, Homo sapiens
  misc_RNA (1)...(19): siRNA sense strand
ugaagaagaugaugagaau

SEQ ID NO: 804905 - RNA, 19 nt, Homo sapiens
  misc_RNA (1)...(19): siRNA sense strand
ucaaaggucaucaucauua

SEQ ID NO: 804906 - RNA, 19 nt, Homo sapiens
  misc_RNA (1)...(19): siRNA sense strand
gaacuuaacaacaggacua

SEQ ID NO: 804907 - RNA, 19 nt, Homo sapiens
  misc_RNA (1)...(19): siRNA sense strand
gaaaggaucacgaaacugu

SEQ ID NO: 804908 - RNA, 19 nt, Homo sapiens
  misc_RNA (1)...(19): siRNA sense strand
guaaagguauuagaacuga

SEQ ID NO: 804909 - RNA, 19 nt, Homo sapiens
  misc_RNA (1)...(19): siRNA sense strand
caauagacuuguggacuua

SEQ ID NO: 804910 - RNA, 19 nt, Homo sapiens
  misc_RNA (1)...(19): siRNA sense strand
gaagaagaguacgaaacua

SEQ ID NO: 804911 - RNA, 19 nt, Homo sapiens
  misc_RNA (1)...(19): siRNA sense strand
ggagaaauugcuauucaua

SEQ ID NO: 804912 - RNA, 19 nt, Homo sapiens
  misc_RNA (1)...(19): siRNA sense strand
guaaucaggugucaacaau

SEQ ID NO: 804913 - RNA, 19 nt, Homo sapiens
  misc_RNA (1)...(19): siRNA sense strand
gaauguacccgaaggauug

SEQ ID NO: 804914 - RNA, 19 nt, Homo sapiens
  misc_RNA (1)...(19): siRNA sense strand
gaaaucagauaaacuuagg

SEQ ID NO: 804915 - RNA, 19 nt, Homo sapiens
  misc_RNA (1)...(19): siRNA sense strand
ucagcaagcuacaauauug

SEQ ID NO: 804916 - RNA, 19 nt, Homo sapiens
  misc_RNA (1)...(19): siRNA sense strand
gaugugugcuugauacuau

SEQ ID NO: 804917 - RNA, 19 nt, Homo sapiens
  misc_RNA (1)...(19): siRNA sense strand
gagaacacuuggagagauu

SEQ ID NO: 804918 - RNA, 19 nt, Homo sapiens
  misc_RNA (1)...(19): siRNA sense strand
uuaaagaccuugcuaucaa

SEQ ID NO: 804919 - RNA, 19 nt, Homo sapiens
  misc_RNA (1)...(19): siRNA sense strand
gaaaguaacaggucuugga

SEQ ID NO: 804920 - RNA, 19 nt, Homo sapiens
  misc_RNA (1)...(19): siRNA sense strand
gaaccagggucaacugcaa

SEQ ID NO: 804921 - RNA, 19 nt, Homo sapiens
  misc_RNA (1)...(19): siRNA sense strand
aaacaaggguggagacaug

SEQ ID NO: 804922 - RNA, 19 nt, Homo sapiens
  misc_RNA (1)...(19): siRNA sense strand
gauuagcucucacuuugaa

SEQ ID NO: 804923 - RNA, 19 nt, Homo sapiens
  misc_RNA (1)...(19): siRNA sense strand
ugagagaggugcagauguu

SEQ ID NO: 804924 - RNA, 19 nt, Homo sapiens
  misc_RNA (1)...(19): siRNA sense strand
gaagaaguccaaaugauuc

SEQ ID NO: 804925 - RNA, 19 nt, Homo sapiens
  misc_RNA (1)...(19): siRNA sense strand
gaucggaaaucaguucuug

SEQ ID NO: 804926 - RNA, 19 nt, Homo sapiens
  misc_RNA (1)...(19): siRNA sense strand
ccaggaagauggugaugaa

SEQ ID NO: 804927 - RNA, 19 nt, Homo sapiens
  misc_RNA (1)...(19): siRNA sense strand
ggaacaaagucuggguuaa

SEQ ID NO: 804928 - RNA, 19 nt, Homo sapiens
  misc_RNA (1)...(19): siRNA sense strand
guucccagguucugaaaua

SEQ ID NO: 804929 - RNA, 19 nt, Homo sapiens
  misc_RNA (1)...(19): siRNA sense strand
gaaacugcauugauugaca

SEQ ID NO: 804930 - RNA, 19 nt, Homo sapiens
  misc_RNA (1)...(19): siRNA sense strand
acaaggagauuacgauuuc

SEQ ID NO: 804931 - RNA, 19 nt, Homo sapiens
  misc_RNA (1)...(19): siRNA sense strand
gcaguugcguuaauucgaa

SEQ ID NO: 804932 - RNA, 19 nt, Homo sapiens
  misc_RNA (1)...(19): siRNA sense strand
guaaagccaucuacuucaa

SEQ ID NO: 804933 - RNA, 19 nt, Homo sapiens
  misc_RNA (1)...(19): siRNA sense strand
caauuugccuacaauacua

SEQ ID NO: 804934 - RNA, 19 nt, Homo sapiens
  misc_RNA (1)...(19): siRNA sense strand
agaagaaggucaugauuca

SEQ ID NO: 804935 - RNA, 19 nt, Homo sapiens
  misc_RNA (1)...(19): siRNA sense strand
gaaaccuccuggauauuau

SEQ ID NO: 804936 - RNA, 19 nt, Homo sapiens
  misc_RNA (1)...(19): siRNA sense strand
uggcugagcucgaugauga

SEQ ID NO: 804937 - RNA, 19 nt, Homo sapiens
  misc_RNA (1)...(19): siRNA sense strand
aaacgucccucaaacagaa

SEQ ID NO: 804938 - RNA, 19 nt, Homo sapiens
  misc_RNA (1)...(19): siRNA sense strand
gcugcaggcuccucaagua

SEQ ID NO: 804939 - RNA, 19 nt, Homo sapiens
  misc_RNA (1)...(19): siRNA sense strand
gaagguggaucugacaguu

SEQ ID NO: 804940 - RNA, 19 nt, Homo sapiens
  misc_RNA (1)...(19): siRNA sense strand
ggucaaaggucaucaucau

SEQ ID NO: 804941 - RNA, 19 nt, Homo sapiens
  misc_RNA (1)...(19): siRNA sense strand
gcauagaggauuuagguuu

SEQ ID NO: 804942 - RNA, 19 nt, Homo sapiens
  misc_RNA (1)...(19): siRNA sense strand
gaaauuaaagaccuugcua

SEQ ID NO: 804943 - RNA, 19 nt, Homo sapiens
  misc_RNA (1)...(19): siRNA sense strand
gugaugagcuugaaaggau

SEQ ID NO: 804944 - RNA, 19 nt, Homo sapiens
  misc_RNA (1)...(19): siRNA sense strand
ggacuuaccugagccagau

SEQ ID NO: 804945 - RNA, 19 nt, Homo sapiens
  misc_RNA (1)...(19): siRNA sense strand
ugaccgaucuucauuuguu

SEQ ID NO: 804946 - RNA, 19 nt, Homo sapiens
  misc_RNA (1)...(19): siRNA sense strand
ugacaggacuggcagaaug

SEQ ID NO: 804947 - RNA, 19 nt, Homo sapiens
  misc_RNA (1)...(19): siRNA sense strand
cacaggagccuuugaagua

SEQ ID NO: 804948 - RNA, 19 nt, Homo sapiens
  misc_RNA (1)...(19): siRNA sense strand
ugaaagugcuccagacaau

SEQ ID NO: 804949 - RNA, 19 nt, Homo sapiens
  misc_RNA (1)...(19): siRNA sense strand
ccaaaugcauucaagacaa

SEQ ID NO: 804950 - RNA, 19 nt, Homo sapiens
  misc_RNA (1)...(19): siRNA sense strand
ccuuggcacugaugaauua

SEQ ID NO: 804951 - RNA, 19 nt, Homo sapiens
  misc_RNA (1)...(19): siRNA sense strand
ucgauuagcucucacuuug

SEQ ID NO: 804952 - RNA, 19 nt, Homo sapiens
  misc_RNA (1)...(19): siRNA sense strand
gguacuacaucaacaguga

SEQ ID NO: 804953 - RNA, 19 nt, Homo sapiens
  misc_RNA (1)...(19): siRNA sense strand
gaagcagaagcuaaucuua

SEQ ID NO: 804954 - RNA, 19 nt, Homo sapiens
  misc_RNA (1)...(19): siRNA sense strand
ggaaccaaacauucauuua

SEQ ID NO: 804955 - RNA, 19 nt, Homo sapiens
  misc_RNA (1)...(19): siRNA sense strand
guaggaaauuggucacuga

SEQ ID NO: 804956 - RNA, 19 nt, Homo sapiens
  misc_RNA (1)...(19): siRNA sense strand
acaggaagaugcucaagaa

SEQ ID NO: 804957 - RNA, 19 nt, Homo sapiens
  misc_RNA (1)...(19): siRNA sense strand
ggauguaucugcggaaugu

SEQ ID NO: 804958 - RNA, 19 nt, Homo sapiens
  misc_RNA (1)...(19): siRNA sense strand
gagaugauaacaauggaua

SEQ ID NO: 804959 - RNA, 19 nt, Homo sapiens
  misc_RNA (1)...(19): siRNA sense strand
ggucugcacugagaaauug

SEQ ID NO: 804960 - RNA, 19 nt, Homo sapiens
  misc_RNA (1)...(19): siRNA sense strand
cgaagugaauucuuagaga

SEQ ID NO: 804961 - RNA, 19 nt, Homo sapiens
  misc_RNA (1)...(19): siRNA sense strand
aagccgaagugaauucuua

SEQ ID NO: 804962 - RNA, 19 nt, Homo sapiens
  misc_RNA (1)...(19): siRNA sense strand
gaaagaugugugcuugaua

SEQ ID NO: 804963 - RNA, 19 nt, Homo sapiens
  misc_RNA (1)...(19): siRNA sense strand
guggacaucuaguucauaa

SEQ ID NO: 804964 - RNA, 19 nt, Homo sapiens
  misc_RNA (1)...(19): siRNA sense strand
ccuaugagcucuagugcaa

SEQ ID NO: 804965 - RNA, 19 nt, Homo sapiens
  misc_RNA (1)...(19): siRNA sense strand
gaaugaagaugacaaucag

SEQ ID NO: 804966 - RNA, 19 nt, Homo sapiens
  misc_RNA (1)...(19): siRNA sense strand
ggacuaaugccacgaacaa

SEQ ID NO: 804967 - RNA, 19 nt, Homo sapiens
  misc_RNA (1)...(19): siRNA sense strand
gaaaccagcucaacaauug

SEQ ID NO: 804968 - RNA, 19 nt, Homo sapiens
  misc_RNA (1)...(19): siRNA sense strand
gagaagauguccuuugaaa

SEQ ID NO: 804969 - RNA, 19 nt, Homo sapiens
  misc_RNA (1)...(19): siRNA sense strand
gaaggaauaugaaguagau

SEQ ID NO: 804970 - RNA, 19 nt, Homo sapiens
  misc_RNA (1)...(19): siRNA sense strand
gaagauaaagggacaagua

SEQ ID NO: 804971 - RNA, 19 nt, Homo sapiens
  misc_RNA (1)...(19): siRNA sense strand
ggagagagaacgacuagua

SEQ ID NO: 804972 - RNA, 19 nt, Homo sapiens
  misc_RNA (1)...(19): siRNA sense strand
aaacacagcuuucuuaguc

SEQ ID NO: 804973 - RNA, 19 nt, Homo sapiens
  misc_RNA (1)...(19): siRNA sense strand
ucagaagcgucaacaguua

SEQ ID NO: 804974 - RNA, 19 nt, Homo sapiens
  misc_RNA (1)...(19): siRNA sense strand
aaacgaaccuugcuacaga

SEQ ID NO: 804975 - RNA, 19 nt, Homo sapiens
  misc_RNA (1)...(19): siRNA sense strand
cagagaagauguccuuuga

SEQ ID NO: 804976 - RNA, 19 nt, Homo sapiens
  misc_RNA (1)...(19): siRNA sense strand
ggaagaaacugcuuaucca

SEQ ID NO: 804977 - RNA, 19 nt, Homo sapiens
  misc_RNA (1)...(19): siRNA sense strand
ucacugacuuuguuaauga

SEQ ID NO: 804978 - RNA, 19 nt, Homo sapiens
  misc_RNA (1)...(19): siRNA sense strand
gacaaguacugaauuaguu

SEQ ID NO: 804979 - RNA, 19 nt, Homo sapiens
  misc_RNA (1)...(19): siRNA sense strand
gaagacaguaucuauauug

SEQ ID NO: 804980 - RNA, 19 nt, Homo sapiens
  misc_RNA (1)...(19): siRNA sense strand
gacaguaucuauauuggaa

SEQ ID NO: 804981 - RNA, 19 nt, Homo sapiens
  misc_RNA (1)...(19): siRNA sense strand
aaagauaccaccaagaaua

SEQ ID NO: 804982 - RNA, 19 nt, Homo sapiens
  misc_RNA (1)...(19): siRNA sense strand
ggaugaauuuagacagaua

SEQ ID NO: 804983 - RNA, 19 nt, Homo sapiens
  misc_RNA (1)...(19): siRNA sense strand
ggucagauauagaaauguu

SEQ ID NO: 804984 - RNA, 19 nt, Homo sapiens
  misc_RNA (1)...(19): siRNA sense strand
caaagaugcuaaagagaga

SEQ ID NO: 804985 - RNA, 19 nt, Homo sapiens
  misc_RNA (1)...(19): siRNA sense strand
ucagaaagauacaugaaga

SEQ ID NO: 804986 - RNA, 19 nt, Homo sapiens
  misc_RNA (1)...(19): siRNA sense strand
ucaagaaguugucauuguu

SEQ ID NO: 804987 - RNA, 19 nt, Homo sapiens
  misc_RNA (1)...(19): siRNA sense strand
guuaagugguagucaguua

SEQ ID NO: 804988 - RNA, 19 nt, Homo sapiens
  misc_RNA (1)...(19): siRNA sense strand
gaaagauacaugaagauga

SEQ ID NO: 804989 - RNA, 19 nt, Homo sapiens
  misc_RNA (1)...(19): siRNA sense strand
guaguggucucaauaagug

SEQ ID NO: 804990 - RNA, 19 nt, Homo sapiens
  misc_RNA (1)...(19): siRNA sense strand
gcucuucacugacuuuguu

SEQ ID NO: 804991 - RNA, 19 nt, Homo sapiens
  misc_RNA (1)...(19): siRNA sense strand
agagagaacuggagagaga

SEQ ID NO: 804992 - RNA, 19 nt, Homo sapiens
  misc_RNA (1)...(19): siRNA sense strand
gcagauagagcaaggagaa

SEQ ID NO: 804993 - RNA, 19 nt, Homo sapiens
  misc_RNA (1)...(19): siRNA sense strand
ccaguucacuuuaaagaau

SEQ ID NO: 804994 - RNA, 19 nt, Homo sapiens
  misc_RNA (1)...(19): siRNA sense strand
gaagauguccuuugaaacu

SEQ ID NO: 804995 - RNA, 19 nt, Homo sapiens
  misc_RNA (1)...(19): siRNA sense strand
ugggaaagauuguauguug

SEQ ID NO: 804996 - RNA, 19 nt, Homo sapiens
  misc_RNA (1)...(19): siRNA sense strand
gggcaugauuguagagaaa

SEQ ID NO: 804997 - RNA, 19 nt, Homo sapiens
  misc_RNA (1)...(19): siRNA sense strand
cccagaauguucaucuuua

SEQ ID NO: 804998 - RNA, 19 nt, Homo sapiens
  misc_RNA (1)...(19): siRNA sense strand
ugaaguagauaaugaugga

SEQ ID NO: 804999 - RNA, 19 nt, Homo sapiens
  misc_RNA (1)...(19): siRNA sense strand
gaaacaugaaggaauauga

SEQ ID NO: 805000 - RNA, 19 nt, Homo sapiens
  misc_RNA (1)...(19): siRNA sense strand
cgaagacaguaucuauauu

SEQ ID NO: 805001 - RNA, 19 nt, Homo sapiens
  misc_RNA (1)...(19): siRNA sense strand
gauuguauguugaggcaaa

SEQ ID NO: 805002 - RNA, 19 nt, Homo sapiens
  misc_RNA (1)...(19): siRNA sense strand
ggaaaccagcucaacaauu

SEQ ID NO: 805003 - RNA, 19 nt, Homo sapiens
  misc_RNA (1)...(19): siRNA sense strand
gacagauaauucaaaggua

SEQ ID NO: 805004 - RNA, 19 nt, Homo sapiens
  misc_RNA (1)...(19): siRNA sense strand
cuauaaggauggaugaauu

SEQ ID NO: 805005 - RNA, 19 nt, Homo sapiens
  misc_RNA (1)...(19): siRNA sense strand
gggaaagauuguauguuga

SEQ ID NO: 805006 - RNA, 19 nt, Homo sapiens
  misc_RNA (1)...(19): siRNA sense strand
gagagagaacgacuaguaa

SEQ ID NO: 805007 - RNA, 19 nt, Homo sapiens
  misc_RNA (1)...(19): siRNA sense strand
gaacagauuagaauauugg

SEQ ID NO: 805008 - RNA, 19 nt, Homo sapiens
  misc_RNA (1)...(19): siRNA sense strand
caagucagauucucccaau

SEQ ID NO: 805009 - RNA, 19 nt, Homo sapiens
  misc_RNA (1)...(19): siRNA sense strand
ucaguuaaauccacuuuca

SEQ ID NO: 805010 - RNA, 19 nt, Homo sapiens
  misc_RNA (1)...(19): siRNA sense strand
gcacaauucagauucagaa

SEQ ID NO: 805011 - RNA, 19 nt, Homo sapiens
  misc_RNA (1)...(19): siRNA sense strand
gcacagaguucagaagacu

SEQ ID NO: 805012 - RNA, 19 nt, Homo sapiens
  misc_RNA (1)...(19): siRNA sense strand
uugagaaguuggaugaaua

SEQ ID NO: 805013 - RNA, 19 nt, Homo sapiens
  misc_RNA (1)...(19): siRNA sense strand
ggacaaguacugaauuagu

SEQ ID NO: 805014 - RNA, 19 nt, Homo sapiens
  misc_RNA (1)...(19): siRNA sense strand
gaggaaaccagcucaacaa

SEQ ID NO: 805015 - RNA, 19 nt, Homo sapiens
  misc_RNA (1)...(19): siRNA sense strand
cagauucucccaauguaua

SEQ ID NO: 805016 - RNA, 19 nt, Homo sapiens
  misc_RNA (1)...(19): siRNA sense strand
aaacgucaguucaguagug

SEQ ID NO: 805017 - RNA, 19 nt, Homo sapiens
  misc_RNA (1)...(19): siRNA sense strand
gcagagaagauguccuuug

SEQ ID NO: 805018 - RNA, 19 nt, Homo sapiens
  misc_RNA (1)...(19): siRNA sense strand
caugaaggaauaugaagua

SEQ ID NO: 805019 - RNA, 19 nt, Homo sapiens
  misc_RNA (1)...(19): siRNA sense strand
uuaaagauaccaccaagaa

SEQ ID NO: 805020 - RNA, 19 nt, Homo sapiens
  misc_RNA (1)...(19): siRNA sense strand
ucaguuacauggcaaguca

SEQ ID NO: 805021 - RNA, 19 nt, Homo sapiens
  misc_RNA (1)...(19): siRNA sense strand
gaagaaauuggaaaucaag

SEQ ID NO: 805022 - RNA, 19 nt, Homo sapiens
  misc_RNA (1)...(19): siRNA sense strand
caaacuaagagaacagauu

SEQ ID NO: 805023 - RNA, 19 nt, Homo sapiens
  misc_RNA (1)...(19): siRNA sense strand
aaggauggaugaauuuaga

SEQ ID NO: 805024 - RNA, 19 nt, Homo sapiens
  misc_RNA (1)...(19): siRNA sense strand
aaauuaagcaggcuaaaga

SEQ ID NO: 805025 - RNA, 19 nt, Homo sapiens
  misc_RNA (1)...(19): siRNA sense strand
agggacaaguacugaauua

SEQ ID NO: 805026 - RNA, 19 nt, Homo sapiens
  misc_RNA (1)...(19): siRNA sense strand
ugacagugauucaucuugu

SEQ ID NO: 805027 - RNA, 19 nt, Homo sapiens
  misc_RNA (1)...(19): siRNA sense strand
gaaauuggaaaucaagaag

SEQ ID NO: 805028 - RNA, 19 nt, Homo sapiens
  misc_RNA (1)...(19): siRNA sense strand
cuauuuacauccacaguau

SEQ ID NO: 805029 - RNA, 19 nt, Homo sapiens
  misc_RNA (1)...(19): siRNA sense strand
ggagaaagcagccaaaaug

SEQ ID NO: 805030 - RNA, 19 nt, Homo sapiens
  misc_RNA (1)...(19): siRNA sense strand
gaaacugcuuauccagcuu

SEQ ID NO: 805031 - RNA, 19 nt, Homo sapiens
  misc_RNA (1)...(19): siRNA sense strand
gaaauguugaauucuguga

SEQ ID NO: 805032 - RNA, 19 nt, Homo sapiens
  misc_RNA (1)...(19): siRNA sense strand
ggcuuguucugguguauuu

SEQ ID NO: 805033 - RNA, 19 nt, Homo sapiens
  misc_RNA (1)...(19): siRNA sense strand
guauaaggcaccuacagaa

SEQ ID NO: 805034 - RNA, 19 nt, Homo sapiens
  misc_RNA (1)...(19): siRNA sense strand
ccagaauguucaucuuuag

SEQ ID NO: 805035 - RNA, 19 nt, Homo sapiens
  misc_RNA (1)...(19): siRNA sense strand
gauaaagggacaaguacug

SEQ ID NO: 805036 - RNA, 19 nt, Homo sapiens
  misc_RNA (1)...(19): siRNA sense strand
caacaguuagucagaaaga

SEQ ID NO: 805037 - RNA, 19 nt, Homo sapiens
  misc_RNA (1)...(19): siRNA sense strand
aaagauacccgaagacagu

SEQ ID NO: 805038 - RNA, 19 nt, Homo sapiens
  misc_RNA (1)...(19): siRNA sense strand
gaaccuugcuacagaaaau

SEQ ID NO: 805039 - RNA, 19 nt, Homo sapiens
  misc_RNA (1)...(19): siRNA sense strand
gaucaguucaucaauaagu

SEQ ID NO: 805040 - RNA, 19 nt, Homo sapiens
  misc_RNA (1)...(19): siRNA sense strand
guucugguguauuugauug

SEQ ID NO: 805041 - RNA, 19 nt, Homo sapiens
  misc_RNA (1)...(19): siRNA sense strand
ggaggaaaccagcucaaca

SEQ ID NO: 805042 - RNA, 19 nt, Homo sapiens
  misc_RNA (1)...(19): siRNA sense strand
gucagauucucccaaugua

SEQ ID NO: 805043 - RNA, 19 nt, Homo sapiens
  misc_RNA (1)...(19): siRNA sense strand
gaacaagaaacugaaccuu

SEQ ID NO: 805044 - RNA, 19 nt, Homo sapiens
  misc_RNA (1)...(19): siRNA sense strand
gcccaguccugccuuuaga

SEQ ID NO: 805045 - RNA, 19 nt, Homo sapiens
  misc_RNA (1)...(19): siRNA sense strand
guagugaugaaaccaguaa

SEQ ID NO: 805046 - RNA, 19 nt, Homo sapiens
  misc_RNA (1)...(19): siRNA sense strand
ccgaagacaguaucuauau

SEQ ID NO: 805047 - RNA, 19 nt, Homo sapiens
  misc_RNA (1)...(19): siRNA sense strand
gucaacaguuagucagaaa

SEQ ID NO: 805048 - RNA, 19 nt, Homo sapiens
  misc_RNA (1)...(19): siRNA sense strand
acaggaagaguuaaacaaa

SEQ ID NO: 805049 - RNA, 19 nt, Homo sapiens
  misc_RNA (1)...(19): siRNA sense strand
acaguuagucagaaagaua

SEQ ID NO: 805050 - RNA, 19 nt, Homo sapiens
  misc_RNA (1)...(19): siRNA sense strand
caagaguccaugagccuuu

SEQ ID NO: 805051 - RNA, 19 nt, Homo sapiens
  misc_RNA (1)...(19): siRNA sense strand
uaaggcaucauaaagagaa

SEQ ID NO: 805052 - RNA, 19 nt, Homo sapiens
  misc_RNA (1)...(19): siRNA sense strand
ggaaagauuguauguugag

SEQ ID NO: 805053 - RNA, 19 nt, Homo sapiens
  misc_RNA (1)...(19): siRNA sense strand
auagcaaucuuacgggaaa

SEQ ID NO: 805054 - RNA, 19 nt, Homo sapiens
  misc_RNA (1)...(19): siRNA sense strand
cccaauguauauacugaaa

SEQ ID NO: 805055 - RNA, 19 nt, Homo sapiens
  misc_RNA (1)...(19): siRNA sense strand
gauacaugaagaugaauug

SEQ ID NO: 805056 - RNA, 19 nt, Homo sapiens
  misc_RNA (1)...(19): siRNA sense strand
caagaaguugucauuguug

SEQ ID NO: 805057 - RNA, 19 nt, Homo sapiens
  misc_RNA (1)...(19): siRNA sense strand
uauaaggcaccuacagaaa

SEQ ID NO: 805058 - RNA, 19 nt, Homo sapiens
  misc_RNA (1)...(19): siRNA sense strand
guaaacgucaguucaguag

SEQ ID NO: 805059 - RNA, 19 nt, Homo sapiens
  misc_RNA (1)...(19): siRNA sense strand
aacaugggcucuuccucua

SEQ ID NO: 805060 - RNA, 19 nt, Homo sapiens
  misc_RNA (1)...(19): siRNA sense strand
ggcaaaagaucaaaaugga

SEQ ID NO: 805061 - RNA, 19 nt, Homo sapiens
  misc_RNA (1)...(19): siRNA sense strand
uuacauggcaagucagauu

SEQ ID NO: 805062 - RNA, 19 nt, Homo sapiens
  misc_RNA (1)...(19): siRNA sense strand
ggauuuggccauuucuaug

SEQ ID NO: 805063 - RNA, 19 nt, Homo sapiens
  misc_RNA (1)...(19): siRNA sense strand
ucaguaguggucucaauaa

SEQ ID NO: 805064 - RNA, 19 nt, Homo sapiens
  misc_RNA (1)...(19): siRNA sense strand
gaguaaacgucaguucagu

SEQ ID NO: 805065 - RNA, 19 nt, Homo sapiens
  misc_RNA (1)...(19): siRNA sense strand
aagaaguugucauuguuga

SEQ ID NO: 805066 - RNA, 19 nt, Homo sapiens
  misc_RNA (1)...(19): siRNA sense strand
ucagacacuuuaaagauac

SEQ ID NO: 805067 - RNA, 19 nt, Homo sapiens
  misc_RNA (1)...(19): siRNA sense strand
gaaaccagcucaacaauug

SEQ ID NO: 805068 - RNA, 19 nt, Homo sapiens
  misc_RNA (1)...(19): siRNA sense strand
gagaagauguccuuugaaa

SEQ ID NO: 805069 - RNA, 19 nt, Homo sapiens
  misc_RNA (1)...(19): siRNA sense strand
gaaggaauaugaaguagau

SEQ ID NO: 805070 - RNA, 19 nt, Homo sapiens
  misc_RNA (1)...(19): siRNA sense strand
gaagauaaagggacaagua

SEQ ID NO: 805071 - RNA, 19 nt, Homo sapiens
  misc_RNA (1)...(19): siRNA sense strand
ggagagagaacgacuagua

SEQ ID NO: 805072 - RNA, 19 nt, Homo sapiens
  misc_RNA (1)...(19): siRNA sense strand
aaacacagcuuucuuaguc

SEQ ID NO: 805073 - RNA, 19 nt, Homo sapiens
  misc_RNA (1)...(19): siRNA sense strand
ucagaagcgucaacaguua

SEQ ID NO: 805074 - RNA, 19 nt, Homo sapiens
  misc_RNA (1)...(19): siRNA sense strand
aaacgaaccuugcuacaga

SEQ ID NO: 805075 - RNA, 19 nt, Homo sapiens
  misc_RNA (1)...(19): siRNA sense strand
cagagaagauguccuuuga

SEQ ID NO: 805076 - RNA, 19 nt, Homo sapiens
  misc_RNA (1)...(19): siRNA sense strand
ggaagaaacugcuuaucca

SEQ ID NO: 805077 - RNA, 19 nt, Homo sapiens
  misc_RNA (1)...(19): siRNA sense strand
ucacugacuuuguuaauga

SEQ ID NO: 805078 - RNA, 19 nt, Homo sapiens
  misc_RNA (1)...(19): siRNA sense strand
gacaaguacugaauuaguu

SEQ ID NO: 805079 - RNA, 19 nt, Homo sapiens
  misc_RNA (1)...(19): siRNA sense strand
gaagacaguaucuauauug

SEQ ID NO: 805080 - RNA, 19 nt, Homo sapiens
  misc_RNA (1)...(19): siRNA sense strand
gacaguaucuauauuggaa

SEQ ID NO: 805081 - RNA, 19 nt, Homo sapiens
  misc_RNA (1)...(19): siRNA sense strand
aaagauaccaccaagaaua

SEQ ID NO: 805082 - RNA, 19 nt, Homo sapiens
  misc_RNA (1)...(19): siRNA sense strand
ggaugaauuuagacagaua

SEQ ID NO: 805083 - RNA, 19 nt, Homo sapiens
  misc_RNA (1)...(19): siRNA sense strand
ggucagauauagaaauguu

SEQ ID NO: 805084 - RNA, 19 nt, Homo sapiens
  misc_RNA (1)...(19): siRNA sense strand
caaagaugcuaaagagaga

SEQ ID NO: 805085 - RNA, 19 nt, Homo sapiens
  misc_RNA (1)...(19): siRNA sense strand
ucagaaagauacaugaaga

SEQ ID NO: 805086 - RNA, 19 nt, Homo sapiens
  misc_RNA (1)...(19): siRNA sense strand
ucaagaaguugucauuguu

SEQ ID NO: 805087 - RNA, 19 nt, Homo sapiens
  misc_RNA (1)...(19): siRNA sense strand
guuaagugguagucaguua

SEQ ID NO: 805088 - RNA, 19 nt, Homo sapiens
  misc_RNA (1)...(19): siRNA sense strand
gaaagauacaugaagauga

SEQ ID NO: 805089 - RNA, 19 nt, Homo sapiens
  misc_RNA (1)...(19): siRNA sense strand
guaguggucucaauaagug

SEQ ID NO: 805090 - RNA, 19 nt, Homo sapiens
  misc_RNA (1)...(19): siRNA sense strand
gcucuucacugacuuuguu

SEQ ID NO: 805091 - RNA, 19 nt, Homo sapiens
  misc_RNA (1)...(19): siRNA sense strand
agagagaacuggagagaga

SEQ ID NO: 805092 - RNA, 19 nt, Homo sapiens
  misc_RNA (1)...(19): siRNA sense strand
gcagauagagcaaggagaa

SEQ ID NO: 805093 - RNA, 19 nt, Homo sapiens
  misc_RNA (1)...(19): siRNA sense strand
ccaguucacuuuaaagaau

SEQ ID NO: 805094 - RNA, 19 nt, Homo sapiens
  misc_RNA (1)...(19): siRNA sense strand
gaagauguccuuugaaacu

SEQ ID NO: 805095 - RNA, 19 nt, Homo sapiens
  misc_RNA (1)...(19): siRNA sense strand
ugggaaagauuguauguug

SEQ ID NO: 805096 - RNA, 19 nt, Homo sapiens
  misc_RNA (1)...(19): siRNA sense strand
gggcaugauuguagagaaa

SEQ ID NO: 805097 - RNA, 19 nt, Homo sapiens
  misc_RNA (1)...(19): siRNA sense strand
cccagaauguucaucuuua

SEQ ID NO: 805098 - RNA, 19 nt, Homo sapiens
  misc_RNA (1)...(19): siRNA sense strand
ugaaguagauaaugaugga

SEQ ID NO: 805099 - RNA, 19 nt, Homo sapiens
  misc_RNA (1)...(19): siRNA sense strand
gaaacaugaaggaauauga

SEQ ID NO: 805100 - RNA, 19 nt, Homo sapiens
  misc_RNA (1)...(19): siRNA sense strand
cgaagacaguaucuauauu

SEQ ID NO: 805101 - RNA, 19 nt, Homo sapiens
  misc_RNA (1)...(19): siRNA sense strand
gauuguauguugaggcaaa

SEQ ID NO: 805102 - RNA, 19 nt, Homo sapiens
  misc_RNA (1)...(19): siRNA sense strand
ggaaaccagcucaacaauu

SEQ ID NO: 805103 - RNA, 19 nt, Homo sapiens
  misc_RNA (1)...(19): siRNA sense strand
gacagauaauucaaaggua

SEQ ID NO: 805104 - RNA, 19 nt, Homo sapiens
  misc_RNA (1)...(19): siRNA sense strand
cuauaaggauggaugaauu

SEQ ID NO: 805105 - RNA, 19 nt, Homo sapiens
  misc_RNA (1)...(19): siRNA sense strand
gggaaagauuguauguuga

SEQ ID NO: 805106 - RNA, 19 nt, Homo sapiens
  misc_RNA (1)...(19): siRNA sense strand
gagagagaacgacuaguaa

SEQ ID NO: 805107 - RNA, 19 nt, Homo sapiens
  misc_RNA (1)...(19): siRNA sense strand
gaacagauuagaauauugg

SEQ ID NO: 805108 - RNA, 19 nt, Homo sapiens
  misc_RNA (1)...(19): siRNA sense strand
caagucagauucucccaau

SEQ ID NO: 805109 - RNA, 19 nt, Homo sapiens
  misc_RNA (1)...(19): siRNA sense strand
ucaguuaaauccacuuuca

SEQ ID NO: 805110 - RNA, 19 nt, Homo sapiens
  misc_RNA (1)...(19): siRNA sense strand
gcacaauucagauucagaa

SEQ ID NO: 805111 - RNA, 19 nt, Homo sapiens
  misc_RNA (1)...(19): siRNA sense strand
gcacagaguucagaagacu

SEQ ID NO: 805112 - RNA, 19 nt, Homo sapiens
  misc_RNA (1)...(19): siRNA sense strand
uugagaaguuggaugaaua

SEQ ID NO: 805113 - RNA, 19 nt, Homo sapiens
  misc_RNA (1)...(19): siRNA sense strand
ggacaaguacugaauuagu

SEQ ID NO: 805114 - RNA, 19 nt, Homo sapiens
  misc_RNA (1)...(19): siRNA sense strand
gaggaaaccagcucaacaa

SEQ ID NO: 805115 - RNA, 19 nt, Homo sapiens
  misc_RNA (1)...(19): siRNA sense strand
cagauucucccaauguaua

SEQ ID NO: 805116 - RNA, 19 nt, Homo sapiens
  misc_RNA (1)...(19): siRNA sense strand
aaacgucaguucaguagug

SEQ ID NO: 805117 - RNA, 19 nt, Homo sapiens
  misc_RNA (1)...(19): siRNA sense strand
gcagagaagauguccuuug

SEQ ID NO: 805118 - RNA, 19 nt, Homo sapiens
  misc_RNA (1)...(19): siRNA sense strand
caugaaggaauaugaagua

SEQ ID NO: 805119 - RNA, 19 nt, Homo sapiens
  misc_RNA (1)...(19): siRNA sense strand
uuaaagauaccaccaagaa

SEQ ID NO: 805120 - RNA, 19 nt, Homo sapiens
  misc_RNA (1)...(19): siRNA sense strand
ucaguuacauggcaaguca

SEQ ID NO: 805121 - RNA, 19 nt, Homo sapiens
  misc_RNA (1)...(19): siRNA sense strand
gaagaaauuggaaaucaag

SEQ ID NO: 805122 - RNA, 19 nt, Homo sapiens
  misc_RNA (1)...(19): siRNA sense strand
caaacuaagagaacagauu

SEQ ID NO: 805123 - RNA, 19 nt, Homo sapiens
  misc_RNA (1)...(19): siRNA sense strand
aaggauggaugaauuuaga

SEQ ID NO: 805124 - RNA, 19 nt, Homo sapiens
  misc_RNA (1)...(19): siRNA sense strand
aaauuaagcaggcuaaaga

SEQ ID NO: 805125 - RNA, 19 nt, Homo sapiens
  misc_RNA (1)...(19): siRNA sense strand
agggacaaguacugaauua

SEQ ID NO: 805126 - RNA, 19 nt, Homo sapiens
  misc_RNA (1)...(19): siRNA sense strand
ugacagugauucaucuugu

SEQ ID NO: 805127 - RNA, 19 nt, Homo sapiens
  misc_RNA (1)...(19): siRNA sense strand
gaaauuggaaaucaagaag

SEQ ID NO: 805128 - RNA, 19 nt, Homo sapiens
  misc_RNA (1)...(19): siRNA sense strand
cuauuuacauccacaguau

SEQ ID NO: 805129 - RNA, 19 nt, Homo sapiens
  misc_RNA (1)...(19): siRNA sense strand
ggagaaagcagccaaaaug

SEQ ID NO: 805130 - RNA, 19 nt, Homo sapiens
  misc_RNA (1)...(19): siRNA sense strand
gaaacugcuuauccagcuu

SEQ ID NO: 805131 - RNA, 19 nt, Homo sapiens
  misc_RNA (1)...(19): siRNA sense strand
gaaauguugaauucuguga

SEQ ID NO: 805132 - RNA, 19 nt, Homo sapiens
  misc_RNA (1)...(19): siRNA sense strand
ggcuuguucugguguauuu

SEQ ID NO: 805133 - RNA, 19 nt, Homo sapiens
  misc_RNA (1)...(19): siRNA sense strand
guauaaggcaccuacagaa

SEQ ID NO: 805134 - RNA, 19 nt, Homo sapiens
  misc_RNA (1)...(19): siRNA sense strand
ccagaauguucaucuuuag

SEQ ID NO: 805135 - RNA, 19 nt, Homo sapiens
  misc_RNA (1)...(19): siRNA sense strand
gauaaagggacaaguacug

SEQ ID NO: 805136 - RNA, 19 nt, Homo sapiens
  misc_RNA (1)...(19): siRNA sense strand
caacaguuagucagaaaga

SEQ ID NO: 805137 - RNA, 19 nt, Homo sapiens
  misc_RNA (1)...(19): siRNA sense strand
aaagauacccgaagacagu

SEQ ID NO: 805138 - RNA, 19 nt, Homo sapiens
  misc_RNA (1)...(19): siRNA sense strand
gaaccuugcuacagaaaau

SEQ ID NO: 805139 - RNA, 19 nt, Homo sapiens
  misc_RNA (1)...(19): siRNA sense strand
gaucaguucaucaauaagu

SEQ ID NO: 805140 - RNA, 19 nt, Homo sapiens
  misc_RNA (1)...(19): siRNA sense strand
guucugguguauuugauug

SEQ ID NO: 805141 - RNA, 19 nt, Homo sapiens
  misc_RNA (1)...(19): siRNA sense strand
ggaggaaaccagcucaaca

SEQ ID NO: 805142 - RNA, 19 nt, Homo sapiens
  misc_RNA (1)...(19): siRNA sense strand
gucagauucucccaaugua

SEQ ID NO: 805143 - RNA, 19 nt, Homo sapiens
  misc_RNA (1)...(19): siRNA sense strand
gaacaagaaacugaaccuu

SEQ ID NO: 805144 - RNA, 19 nt, Homo sapiens
  misc_RNA (1)...(19): siRNA sense strand
gcccaguccugccuuuaga

SEQ ID NO: 805145 - RNA, 19 nt, Homo sapiens
  misc_RNA (1)...(19): siRNA sense strand
guagugaugaaaccaguaa

SEQ ID NO: 805146 - RNA, 19 nt, Homo sapiens
  misc_RNA (1)...(19): siRNA sense strand
ccgaagacaguaucuauau

SEQ ID NO: 805147 - RNA, 19 nt, Homo sapiens
  misc_RNA (1)...(19): siRNA sense strand
gucaacaguuagucagaaa

SEQ ID NO: 805148 - RNA, 19 nt, Homo sapiens
  misc_RNA (1)...(19): siRNA sense strand
acaggaagaguuaaacaaa

SEQ ID NO: 805149 - RNA, 19 nt, Homo sapiens
  misc_RNA (1)...(19): siRNA sense strand
acaguuagucagaaagaua

SEQ ID NO: 805150 - RNA, 19 nt, Homo sapiens
  misc_RNA (1)...(19): siRNA sense strand
caagaguccaugagccuuu

SEQ ID NO: 805151 - RNA, 19 nt, Homo sapiens
  misc_RNA (1)...(19): siRNA sense strand
uaaggcaucauaaagagaa

SEQ ID NO: 805152 - RNA, 19 nt, Homo sapiens
  misc_RNA (1)...(19): siRNA sense strand
ggaaagauuguauguugag

SEQ ID NO: 805153 - RNA, 19 nt, Homo sapiens
  misc_RNA (1)...(19): siRNA sense strand
auagcaaucuuacgggaaa

SEQ ID NO: 805154 - RNA, 19 nt, Homo sapiens
  misc_RNA (1)...(19): siRNA sense strand
cccaauguauauacugaaa

SEQ ID NO: 805155 - RNA, 19 nt, Homo sapiens
  misc_RNA (1)...(19): siRNA sense strand
gauacaugaagaugaauug

SEQ ID NO: 805156 - RNA, 19 nt, Homo sapiens
  misc_RNA (1)...(19): siRNA sense strand
caagaaguugucauuguug

SEQ ID NO: 805157 - RNA, 19 nt, Homo sapiens
  misc_RNA (1)...(19): siRNA sense strand
uauaaggcaccuacagaaa

SEQ ID NO: 805158 - RNA, 19 nt, Homo sapiens
  misc_RNA (1)...(19): siRNA sense strand
guaaacgucaguucaguag

SEQ ID NO: 805159 - RNA, 19 nt, Homo sapiens
  misc_RNA (1)...(19): siRNA sense strand
aacaugggcucuuccucua

SEQ ID NO: 805160 - RNA, 19 nt, Homo sapiens
  misc_RNA (1)...(19): siRNA sense strand
ggcaaaagaucaaaaugga

SEQ ID NO: 805161 - RNA, 19 nt, Homo sapiens
  misc_RNA (1)...(19): siRNA sense strand
uuacauggcaagucagauu

SEQ ID NO: 805162 - RNA, 19 nt, Homo sapiens
  misc_RNA (1)...(19): siRNA sense strand
ggauuuggccauuucuaug

SEQ ID NO: 805163 - RNA, 19 nt, Homo sapiens
  misc_RNA (1)...(19): siRNA sense strand
ucaguaguggucucaauaa

SEQ ID NO: 805164 - RNA, 19 nt, Homo sapiens
  misc_RNA (1)...(19): siRNA sense strand
gaguaaacgucaguucagu

SEQ ID NO: 805165 - RNA, 19 nt, Homo sapiens
  misc_RNA (1)...(19): siRNA sense strand
aagaaguugucauuguuga

SEQ ID NO: 805166 - RNA, 19 nt, Homo sapiens
  misc_RNA (1)...(19): siRNA sense strand
ucagacacuuuaaagauac

SEQ ID NO: 805167 - RNA, 19 nt, Homo sapiens
  misc_RNA (1)...(19): siRNA sense strand
ggaggaagcugcagaugua

SEQ ID NO: 805168 - RNA, 19 nt, Homo sapiens
  misc_RNA (1)...(19): siRNA sense strand
ccagauagcuuguuaagaa

SEQ ID NO: 805169 - RNA, 19 nt, Homo sapiens
  misc_RNA (1)...(19): siRNA sense strand
agaagaagcugagcaauua

SEQ ID NO: 805170 - RNA, 19 nt, Homo sapiens
  misc_RNA (1)...(19): siRNA sense strand
gaaagccagugcacucuua

SEQ ID NO: 805171 - RNA, 19 nt, Homo sapiens
  misc_RNA (1)...(19): siRNA sense strand
ggaagaagcugauguggau

SEQ ID NO: 805172 - RNA, 19 nt, Homo sapiens
  misc_RNA (1)...(19): siRNA sense strand
aaagaaagcccaaaucaua

SEQ ID NO: 805173 - RNA, 19 nt, Homo sapiens
  misc_RNA (1)...(19): siRNA sense strand
ccagugaacuuauaccaua

SEQ ID NO: 805174 - RNA, 19 nt, Homo sapiens
  misc_RNA (1)...(19): siRNA sense strand
gaacaggagauacucaaua

SEQ ID NO: 805175 - RNA, 19 nt, Homo sapiens
  misc_RNA (1)...(19): siRNA sense strand
gaaagcaaauggugucaau

SEQ ID NO: 805176 - RNA, 19 nt, Homo sapiens
  misc_RNA (1)...(19): siRNA sense strand
gcagauguacuuuguauuu

SEQ ID NO: 805177 - RNA, 19 nt, Homo sapiens
  misc_RNA (1)...(19): siRNA sense strand
gaagacaauuugcucugua

SEQ ID NO: 805178 - RNA, 19 nt, Homo sapiens
  misc_RNA (1)...(19): siRNA sense strand
gaacagcagcuuaggcaua

SEQ ID NO: 805179 - RNA, 19 nt, Homo sapiens
  misc_RNA (1)...(19): siRNA sense strand
caaaccaacugaagaagaa

SEQ ID NO: 805180 - RNA, 19 nt, Homo sapiens
  misc_RNA (1)...(19): siRNA sense strand
gaaugcuccugacuaauaa

SEQ ID NO: 805181 - RNA, 19 nt, Homo sapiens
  misc_RNA (1)...(19): siRNA sense strand
guaagaagcacccgaauug

SEQ ID NO: 805182 - RNA, 19 nt, Homo sapiens
  misc_RNA (1)...(19): siRNA sense strand
gcacuucagccuucaauaa

SEQ ID NO: 805183 - RNA, 19 nt, Homo sapiens
  misc_RNA (1)...(19): siRNA sense strand
cgaaugcuccugacuaaua

SEQ ID NO: 805184 - RNA, 19 nt, Homo sapiens
  misc_RNA (1)...(19): siRNA sense strand
ggacuugguuuggaacuuu

SEQ ID NO: 805185 - RNA, 19 nt, Homo sapiens
  misc_RNA (1)...(19): siRNA sense strand
gauaucuucuugcaucuaa

SEQ ID NO: 805186 - RNA, 19 nt, Homo sapiens
  misc_RNA (1)...(19): siRNA sense strand
ggacuuucaugcuuuagaa

SEQ ID NO: 805187 - RNA, 19 nt, Homo sapiens
  misc_RNA (1)...(19): siRNA sense strand
ccaaguggauggucucaaa

SEQ ID NO: 805188 - RNA, 19 nt, Homo sapiens
  misc_RNA (1)...(19): siRNA sense strand
gaaauggacagcagagaaa

SEQ ID NO: 805189 - RNA, 19 nt, Homo sapiens
  misc_RNA (1)...(19): siRNA sense strand
ggaaggagaagacaauuug

SEQ ID NO: 805190 - RNA, 19 nt, Homo sapiens
  misc_RNA (1)...(19): siRNA sense strand
guaagugguuugcuucuug

SEQ ID NO: 805191 - RNA, 19 nt, Homo sapiens
  misc_RNA (1)...(19): siRNA sense strand
agaaugaccugaugauaga

SEQ ID NO: 805192 - RNA, 19 nt, Homo sapiens
  misc_RNA (1)...(19): siRNA sense strand
gcaaagaaagcccaaauca

SEQ ID NO: 805193 - RNA, 19 nt, Homo sapiens
  misc_RNA (1)...(19): siRNA sense strand
gacauuggaucauacuaaa

SEQ ID NO: 805194 - RNA, 19 nt, Homo sapiens
  misc_RNA (1)...(19): siRNA sense strand
gauaggccuucccagaaua

SEQ ID NO: 805195 - RNA, 19 nt, Homo sapiens
  misc_RNA (1)...(19): siRNA sense strand
gcaaacagucaauaaacua

SEQ ID NO: 805196 - RNA, 19 nt, Homo sapiens
  misc_RNA (1)...(19): siRNA sense strand
gaaguucagugccuuaucu

SEQ ID NO: 805197 - RNA, 19 nt, Homo sapiens
  misc_RNA (1)...(19): siRNA sense strand
ggagagagcauccugguau

SEQ ID NO: 805198 - RNA, 19 nt, Homo sapiens
  misc_RNA (1)...(19): siRNA sense strand
gaaagaagagcauguugug

SEQ ID NO: 805199 - RNA, 19 nt, Homo sapiens
  misc_RNA (1)...(19): siRNA sense strand
ggacugacguuagaguuug

SEQ ID NO: 805200 - RNA, 19 nt, Homo sapiens
  misc_RNA (1)...(19): siRNA sense strand
gauauuacccuacacaugu

SEQ ID NO: 805201 - RNA, 19 nt, Homo sapiens
  misc_RNA (1)...(19): siRNA sense strand
caggagauacucaauauuu

SEQ ID NO: 805202 - RNA, 19 nt, Homo sapiens
  misc_RNA (1)...(19): siRNA sense strand
caauccagauagcuuguua

SEQ ID NO: 805203 - RNA, 19 nt, Homo sapiens
  misc_RNA (1)...(19): siRNA sense strand
gcaaccagcuuagugcuau

SEQ ID NO: 805204 - RNA, 19 nt, Homo sapiens
  misc_RNA (1)...(19): siRNA sense strand
gcuacuaacuacccacauu

SEQ ID NO: 805205 - RNA, 19 nt, Homo sapiens
  misc_RNA (1)...(19): siRNA sense strand
aagcauggauccugaugua

SEQ ID NO: 805206 - RNA, 19 nt, Homo sapiens
  misc_RNA (1)...(19): siRNA sense strand
gaagguggauguuguuugc

SEQ ID NO: 805207 - RNA, 19 nt, Homo sapiens
  misc_RNA (1)...(19): siRNA sense strand
ggagaauucugcaaacagu

SEQ ID NO: 805208 - RNA, 19 nt, Homo sapiens
  misc_RNA (1)...(19): siRNA sense strand
gcaaagaacagcagcuuag

SEQ ID NO: 805209 - RNA, 19 nt, Homo sapiens
  misc_RNA (1)...(19): siRNA sense strand
gagcauuuccuccauugua

SEQ ID NO: 805210 - RNA, 19 nt, Homo sapiens
  misc_RNA (1)...(19): siRNA sense strand
gaauggauaucuucuugca

SEQ ID NO: 805211 - RNA, 19 nt, Homo sapiens
  misc_RNA (1)...(19): siRNA sense strand
ggcgaaugcuccugacuaa

SEQ ID NO: 805212 - RNA, 19 nt, Homo sapiens
  misc_RNA (1)...(19): siRNA sense strand
aagcagagcucccuuccuu

SEQ ID NO: 805213 - RNA, 19 nt, Homo sapiens
  misc_RNA (1)...(19): siRNA sense strand
uggcuaaguuggaugauaa

SEQ ID NO: 805214 - RNA, 19 nt, Homo sapiens
  misc_RNA (1)...(19): siRNA sense strand
ugagugacuugguuuguuu

SEQ ID NO: 805215 - RNA, 19 nt, Homo sapiens
  misc_RNA (1)...(19): siRNA sense strand
gaacuguuggcaauuauga

SEQ ID NO: 805216 - RNA, 19 nt, Homo sapiens
  misc_RNA (1)...(19): siRNA sense strand
caaccugagugccaacauu

SEQ ID NO: 805217 - RNA, 19 nt, Homo sapiens
  misc_RNA (1)...(19): siRNA sense strand
gggaugaagauuguaauua

SEQ ID NO: 805218 - RNA, 19 nt, Homo sapiens
  misc_RNA (1)...(19): siRNA sense strand
gaagcuuugcuacauguua

SEQ ID NO: 805219 - RNA, 19 nt, Homo sapiens
  misc_RNA (1)...(19): siRNA sense strand
aaaugaagcuugugaggau

SEQ ID NO: 805220 - RNA, 19 nt, Homo sapiens
  misc_RNA (1)...(19): siRNA sense strand
caauaugcauuaccaaagu

SEQ ID NO: 805221 - RNA, 19 nt, Homo sapiens
  misc_RNA (1)...(19): siRNA sense strand
gcauucagcuuuacuacgu

SEQ ID NO: 805222 - RNA, 19 nt, Homo sapiens
  misc_RNA (1)...(19): siRNA sense strand
ugucacagcucaugcaguu

SEQ ID NO: 805223 - RNA, 19 nt, Homo sapiens
  misc_RNA (1)...(19): siRNA sense strand
gauccagaauuaagacuuc

SEQ ID NO: 805224 - RNA, 19 nt, Homo sapiens
  misc_RNA (1)...(19): siRNA sense strand
guguuaacauccaauauga

SEQ ID NO: 805225 - RNA, 19 nt, Homo sapiens
  misc_RNA (1)...(19): siRNA sense strand
gaaguguuaacauccaaua

SEQ ID NO: 805226 - RNA, 19 nt, Homo sapiens
  misc_RNA (1)...(19): siRNA sense strand
gacuuuagcugccaugcaa

SEQ ID NO: 805227 - RNA, 19 nt, Homo sapiens
  misc_RNA (1)...(19): siRNA sense strand
uagcaaacacgaagacuuu

SEQ ID NO: 805228 - RNA, 19 nt, Homo sapiens
  misc_RNA (1)...(19): siRNA sense strand
agaacaagaugccagcaaa

SEQ ID NO: 805229 - RNA, 19 nt, Homo sapiens
  misc_RNA (1)...(19): siRNA sense strand
gaucagauuccuaucaaau

SEQ ID NO: 805230 - RNA, 19 nt, Homo sapiens
  misc_RNA (1)...(19): siRNA sense strand
caaaucagccagucacaga

SEQ ID NO: 805231 - RNA, 19 nt, Homo sapiens
  misc_RNA (1)...(19): siRNA sense strand
agaagagcauguugugaaa

SEQ ID NO: 805232 - RNA, 19 nt, Homo sapiens
  misc_RNA (1)...(19): siRNA sense strand
gcgcaggacagaugccuua

SEQ ID NO: 805233 - RNA, 19 nt, Homo sapiens
  misc_RNA (1)...(19): siRNA sense strand
ccaauguuccugauaguuu

SEQ ID NO: 805234 - RNA, 19 nt, Homo sapiens
  misc_RNA (1)...(19): siRNA sense strand
ggaugguucuuaauacugu

SEQ ID NO: 805235 - RNA, 19 nt, Homo sapiens
  misc_RNA (1)...(19): siRNA sense strand
ggaaggcgcaggacagaug

SEQ ID NO: 805236 - RNA, 19 nt, Homo sapiens
  misc_RNA (1)...(19): siRNA sense strand
gagaaacagauauuugcua

SEQ ID NO: 805237 - RNA, 19 nt, Homo sapiens
  misc_RNA (1)...(19): siRNA sense strand
gauagcuuguuaagaaaug

SEQ ID NO: 805238 - RNA, 19 nt, Homo sapiens
  misc_RNA (1)...(19): siRNA sense strand
gcacaaagugucaauaaaa

SEQ ID NO: 805239 - RNA, 19 nt, Homo sapiens
  misc_RNA (1)...(19): siRNA sense strand
gcuuugacauuggaucaua

SEQ ID NO: 805240 - RNA, 19 nt, Homo sapiens
  misc_RNA (1)...(19): siRNA sense strand
ucagauuccuaucaaauuc

SEQ ID NO: 805241 - RNA, 19 nt, Homo sapiens
  misc_RNA (1)...(19): siRNA sense strand
gaguguuaguggaauuuaa

SEQ ID NO: 805242 - RNA, 19 nt, Homo sapiens
  misc_RNA (1)...(19): siRNA sense strand
gaacuugagaaacagauau

SEQ ID NO: 805243 - RNA, 19 nt, Homo sapiens
  misc_RNA (1)...(19): siRNA sense strand
cagauagcuuguuaagaaa

SEQ ID NO: 805244 - RNA, 19 nt, Homo sapiens
  misc_RNA (1)...(19): siRNA sense strand
acacaagugaugcagauua

SEQ ID NO: 805245 - RNA, 19 nt, Homo sapiens
  misc_RNA (1)...(19): siRNA sense strand
ugacuggauuugugaagaa

SEQ ID NO: 805246 - RNA, 19 nt, Homo sapiens
  misc_RNA (1)...(19): siRNA sense strand
ccuaucaaauuccuuauuc

SEQ ID NO: 805247 - RNA, 19 nt, Homo sapiens
  misc_RNA (1)...(19): siRNA sense strand
aaucagcguuucaguauca

SEQ ID NO: 805248 - RNA, 19 nt, Homo sapiens
  misc_RNA (1)...(19): siRNA sense strand
ggucucaaaucuguaaaga

SEQ ID NO: 805249 - RNA, 19 nt, Homo sapiens
  misc_RNA (1)...(19): siRNA sense strand
uuacacgucuucaacaaau

SEQ ID NO: 805250 - RNA, 19 nt, Homo sapiens
  misc_RNA (1)...(19): siRNA sense strand
caacaaaaguauacucaga

SEQ ID NO: 805251 - RNA, 19 nt, Homo sapiens
  misc_RNA (1)...(19): siRNA sense strand
ggugacaacauccgccuua

SEQ ID NO: 805252 - RNA, 19 nt, Homo sapiens
  misc_RNA (1)...(19): siRNA sense strand
gaucagaggguucacagau

SEQ ID NO: 805253 - RNA, 19 nt, Homo sapiens
  misc_RNA (1)...(19): siRNA sense strand
gucgaaaucuaauccagaa

SEQ ID NO: 805254 - RNA, 19 nt, Homo sapiens
  misc_RNA (1)...(19): siRNA sense strand
ggaggaaggagaagacaau

SEQ ID NO: 805255 - RNA, 19 nt, Homo sapiens
  misc_RNA (1)...(19): siRNA sense strand
caccagcgcuccaaauaag

SEQ ID NO: 805256 - RNA, 19 nt, Homo sapiens
  misc_RNA (1)...(19): siRNA sense strand
ugagccagcuauugaauuc

SEQ ID NO: 805257 - RNA, 19 nt, Homo sapiens
  misc_RNA (1)...(19): siRNA sense strand
gacaacauccgccuuaauc

SEQ ID NO: 805258 - RNA, 19 nt, Homo sapiens
  misc_RNA (1)...(19): siRNA sense strand
aacaggagauacucaauau

SEQ ID NO: 805259 - RNA, 19 nt, Homo sapiens
  misc_RNA (1)...(19): siRNA sense strand
gauagauccucucauuguc

SEQ ID NO: 805260 - RNA, 19 nt, Homo sapiens
  misc_RNA (1)...(19): siRNA sense strand
caugggaacuuuguuaaca

SEQ ID NO: 805261 - RNA, 19 nt, Homo sapiens
  misc_RNA (1)...(19): siRNA sense strand
uuucauaccugagcuuauu

SEQ ID NO: 805262 - RNA, 19 nt, Homo sapiens
  misc_RNA (1)...(19): siRNA sense strand
uugcuaagcuuguucacuu

SEQ ID NO: 805263 - RNA, 19 nt, Homo sapiens
  misc_RNA (1)...(19): siRNA sense strand
uuagagauuugccuaccua

SEQ ID NO: 805264 - RNA, 19 nt, Homo sapiens
  misc_RNA (1)...(19): siRNA sense strand
gaaguuaccagggaagaau

SEQ ID NO: 805265 - RNA, 19 nt, Homo sapiens
  misc_RNA (1)...(19): siRNA sense strand
gaaggaaacagagcaagau

SEQ ID NO: 805266 - RNA, 19 nt, Homo sapiens
  misc_RNA (1)...(19): siRNA sense strand
cuacacauguugaauggau

SEQ ID NO: 805267 - RNA, 19 nt, Homo sapiens
  misc_RNA (1)...(19): siRNA sense strand
gaaaauaccuggaaucuuu

SEQ ID NO: 805268 - RNA, 19 nt, Homo sapiens
  misc_RNA (1)...(19): siRNA sense strand
gagaagaaauuccuguuaa

SEQ ID NO: 805269 - RNA, 19 nt, Homo sapiens
  misc_RNA (1)...(19): siRNA sense strand
gcaaaugucugaugaagca

SEQ ID NO: 805270 - RNA, 19 nt, Homo sapiens
  misc_RNA (1)...(19): siRNA sense strand
gaaauccaaucuuccguaa

SEQ ID NO: 805271 - RNA, 19 nt, Homo sapiens
  misc_RNA (1)...(19): siRNA sense strand
ggacauccagcaaacauua

SEQ ID NO: 805272 - RNA, 19 nt, Homo sapiens
  misc_RNA (1)...(19): siRNA sense strand
ucucagaaauggcaaguua

SEQ ID NO: 805273 - RNA, 19 nt, Homo sapiens
  misc_RNA (1)...(19): siRNA sense strand
ggaacacguugucaaguuu

SEQ ID NO: 805274 - RNA, 19 nt, Homo sapiens
  misc_RNA (1)...(19): siRNA sense strand
gcaaucagcugugugcauu

SEQ ID NO: 805275 - RNA, 19 nt, Homo sapiens
  misc_RNA (1)...(19): siRNA sense strand
gaagaggagaaccauauua

SEQ ID NO: 805276 - RNA, 19 nt, Homo sapiens
  misc_RNA (1)...(19): siRNA sense strand
gcaaaucccugaaauacag

SEQ ID NO: 805277 - RNA, 19 nt, Homo sapiens
  misc_RNA (1)...(19): siRNA sense strand
gcuaaaguaucaacuauca

SEQ ID NO: 805278 - RNA, 19 nt, Homo sapiens
  misc_RNA (1)...(19): siRNA sense strand
ggacuucaaugcuuucuuc

SEQ ID NO: 805279 - RNA, 19 nt, Homo sapiens
  misc_RNA (1)...(19): siRNA sense strand
guacagcgcuauuaauuac

SEQ ID NO: 805280 - RNA, 19 nt, Homo sapiens
  misc_RNA (1)...(19): siRNA sense strand
gcaaccaauuuaagaacua

SEQ ID NO: 805281 - RNA, 19 nt, Homo sapiens
  misc_RNA (1)...(19): siRNA sense strand
uaaugucucugcacucuuu

SEQ ID NO: 805282 - RNA, 19 nt, Homo sapiens
  misc_RNA (1)...(19): siRNA sense strand
gaugaggacuucaaugcuu

SEQ ID NO: 805283 - RNA, 19 nt, Homo sapiens
  misc_RNA (1)...(19): siRNA sense strand
gggaguggcuaaaguauca

SEQ ID NO: 805284 - RNA, 19 nt, Homo sapiens
  misc_RNA (1)...(19): siRNA sense strand
uggaaaggaucuucaguuu

SEQ ID NO: 805285 - RNA, 19 nt, Homo sapiens
  misc_RNA (1)...(19): siRNA sense strand
gcuggaagcccucaaguuu

SEQ ID NO: 805286 - RNA, 19 nt, Homo sapiens
  misc_RNA (1)...(19): siRNA sense strand
gaacccacaauacauuaua

SEQ ID NO: 805287 - RNA, 19 nt, Homo sapiens
  misc_RNA (1)...(19): siRNA sense strand
ggagaaccauauuaaagau

SEQ ID NO: 805288 - RNA, 19 nt, Homo sapiens
  misc_RNA (1)...(19): siRNA sense strand
ucauggagcugauugcaaa

SEQ ID NO: 805289 - RNA, 19 nt, Homo sapiens
  misc_RNA (1)...(19): siRNA sense strand
cgaaugagcuuuuguguau

SEQ ID NO: 805290 - RNA, 19 nt, Homo sapiens
  misc_RNA (1)...(19): siRNA sense strand
ggagaagugugcccucaug

SEQ ID NO: 805291 - RNA, 19 nt, Homo sapiens
  misc_RNA (1)...(19): siRNA sense strand
ggucuucucuaagcuauuu

SEQ ID NO: 805292 - RNA, 19 nt, Homo sapiens
  misc_RNA (1)...(19): siRNA sense strand
caagcaaacugucgaguag

SEQ ID NO: 805293 - RNA, 19 nt, Homo sapiens
  misc_RNA (1)...(19): siRNA sense strand
gcaucuggcuuucucaaga

SEQ ID NO: 805294 - RNA, 19 nt, Homo sapiens
  misc_RNA (1)...(19): siRNA sense strand
gagaagguguaucugaaga

SEQ ID NO: 805295 - RNA, 19 nt, Homo sapiens
  misc_RNA (1)...(19): siRNA sense strand
gaagggugcugaccacagu

SEQ ID NO: 805296 - RNA, 19 nt, Homo sapiens
  misc_RNA (1)...(19): siRNA sense strand
gaaacuucuugacaauuug

SEQ ID NO: 805297 - RNA, 19 nt, Homo sapiens
  misc_RNA (1)...(19): siRNA sense strand
gcaagcaaacugucgagua

SEQ ID NO: 805298 - RNA, 19 nt, Homo sapiens
  misc_RNA (1)...(19): siRNA sense strand
cagaauuggugauguuuau

SEQ ID NO: 805299 - RNA, 19 nt, Homo sapiens
  misc_RNA (1)...(19): siRNA sense strand
ggagauaagagcuguaaug

SEQ ID NO: 805300 - RNA, 19 nt, Homo sapiens
  misc_RNA (1)...(19): siRNA sense strand
gaacaauauuccugacuac

SEQ ID NO: 805301 - RNA, 19 nt, Homo sapiens
  misc_RNA (1)...(19): siRNA sense strand
ugaacaauauuccugacua

SEQ ID NO: 805302 - RNA, 19 nt, Homo sapiens
  misc_RNA (1)...(19): siRNA sense strand
ugucagauguugaugcuuu

SEQ ID NO: 805303 - RNA, 19 nt, Homo sapiens
  misc_RNA (1)...(19): siRNA sense strand
gaacuuugauaccaaggau

SEQ ID NO: 805304 - RNA, 19 nt, Homo sapiens
  misc_RNA (1)...(19): siRNA sense strand
gaagaaauuccuguuaaug

SEQ ID NO: 805305 - RNA, 19 nt, Homo sapiens
  misc_RNA (1)...(19): siRNA sense strand
cagaggauguagugacuuu

SEQ ID NO: 805306 - RNA, 19 nt, Homo sapiens
  misc_RNA (1)...(19): siRNA sense strand
gaagggacauccagcaaac

SEQ ID NO: 805307 - RNA, 19 nt, Homo sapiens
  misc_RNA (1)...(19): siRNA sense strand
ggagcaaaucccugaaaua

SEQ ID NO: 805308 - RNA, 19 nt, Homo sapiens
  misc_RNA (1)...(19): siRNA sense strand
cagcaagacuucuauacug

SEQ ID NO: 805309 - RNA, 19 nt, Homo sapiens
  misc_RNA (1)...(19): siRNA sense strand
gagcuacuccugacacaaa

SEQ ID NO: 805310 - RNA, 19 nt, Homo sapiens
  misc_RNA (1)...(19): siRNA sense strand
ugacacaaauggagaagug

SEQ ID NO: 805311 - RNA, 19 nt, Homo sapiens
  misc_RNA (1)...(19): siRNA sense strand
ggucuuauuuggagauguu

SEQ ID NO: 805312 - RNA, 19 nt, Homo sapiens
  misc_RNA (1)...(19): siRNA sense strand
uuacagaccugggcaaaug

SEQ ID NO: 805313 - RNA, 19 nt, Homo sapiens
  misc_RNA (1)...(19): siRNA sense strand
aagaugggcuuuccuucua

SEQ ID NO: 805314 - RNA, 19 nt, Homo sapiens
  misc_RNA (1)...(19): siRNA sense strand
gaaauccugucccgugauc

SEQ ID NO: 805315 - RNA, 19 nt, Homo sapiens
  misc_RNA (1)...(19): siRNA sense strand
ggaacggcaugucucgauu

SEQ ID NO: 805316 - RNA, 19 nt, Homo sapiens
  misc_RNA (1)...(19): siRNA sense strand
gaagugugcccucauggaa

SEQ ID NO: 805317 - RNA, 19 nt, Homo sapiens
  misc_RNA (1)...(19): siRNA sense strand
gauguugccaugcauuaua

SEQ ID NO: 805318 - RNA, 19 nt, Homo sapiens
  misc_RNA (1)...(19): siRNA sense strand
ggaaacacagacagaauug

SEQ ID NO: 805319 - RNA, 19 nt, Homo sapiens
  misc_RNA (1)...(19): siRNA sense strand
agacagaauuggugauguu

SEQ ID NO: 805320 - RNA, 19 nt, Homo sapiens
  misc_RNA (1)...(19): siRNA sense strand
caaugacucuccugucuuc

SEQ ID NO: 805321 - RNA, 19 nt, Homo sapiens
  misc_RNA (1)...(19): siRNA sense strand
gagauguugccaugcauua

SEQ ID NO: 805322 - RNA, 19 nt, Homo sapiens
  misc_RNA (1)...(19): siRNA sense strand
gaugcucugucucgaauug

SEQ ID NO: 805323 - RNA, 19 nt, Homo sapiens
  misc_RNA (1)...(19): siRNA sense strand
gaaguucacauuaagaauc

SEQ ID NO: 805324 - RNA, 19 nt, Homo sapiens
  misc_RNA (1)...(19): siRNA sense strand
gagcaaaucccugaaauac

SEQ ID NO: 805325 - RNA, 19 nt, Homo sapiens
  misc_RNA (1)...(19): siRNA sense strand
agaaacaccaucaaacuuu

SEQ ID NO: 805326 - RNA, 19 nt, Homo sapiens
  misc_RNA (1)...(19): siRNA sense strand
ggaggagguuugguagaaa

SEQ ID NO: 805327 - RNA, 19 nt, Homo sapiens
  misc_RNA (1)...(19): siRNA sense strand
gaggagaaccauauuaaag

SEQ ID NO: 805328 - RNA, 19 nt, Homo sapiens
  misc_RNA (1)...(19): siRNA sense strand
uaagaacccacaauacauu

SEQ ID NO: 805329 - RNA, 19 nt, Homo sapiens
  misc_RNA (1)...(19): siRNA sense strand
gaaaugaucaagcgagagu

SEQ ID NO: 805330 - RNA, 19 nt, Homo sapiens
  misc_RNA (1)...(19): siRNA sense strand
caagaugugucgugacuac

SEQ ID NO: 805331 - RNA, 19 nt, Homo sapiens
  misc_RNA (1)...(19): siRNA sense strand
cggaggugcuggacaauga

SEQ ID NO: 805332 - RNA, 19 nt, Homo sapiens
  misc_RNA (1)...(19): siRNA sense strand
ccucauugcugguugcauu

SEQ ID NO: 805333 - RNA, 19 nt, Homo sapiens
  misc_RNA (1)...(19): siRNA sense strand
ugaagcaacuccucuccaa

SEQ ID NO: 805334 - RNA, 19 nt, Homo sapiens
  misc_RNA (1)...(19): siRNA sense strand
gagaguggccacagcauug

SEQ ID NO: 805335 - RNA, 19 nt, Homo sapiens
  misc_RNA (1)...(19): siRNA sense strand
gcugaaaggcuuacagaug

SEQ ID NO: 805336 - RNA, 19 nt, Homo sapiens
  misc_RNA (1)...(19): siRNA sense strand
acaauuugcuugcgcuuau

SEQ ID NO: 805337 - RNA, 19 nt, Homo sapiens
  misc_RNA (1)...(19): siRNA sense strand
ggaguugcagcacugaaua

SEQ ID NO: 805338 - RNA, 19 nt, Homo sapiens
  misc_RNA (1)...(19): siRNA sense strand
gggaaacacagacagaauu

SEQ ID NO: 805339 - RNA, 19 nt, Homo sapiens
  misc_RNA (1)...(19): siRNA sense strand
ggccugacaugcuaauaga

SEQ ID NO: 805340 - RNA, 19 nt, Homo sapiens
  misc_RNA (1)...(19): siRNA sense strand
aaggagaggugaugagguu

SEQ ID NO: 805341 - RNA, 19 nt, Homo sapiens
  misc_RNA (1)...(19): siRNA sense strand
gaaauuccuguuaaugaug

SEQ ID NO: 805342 - RNA, 19 nt, Homo sapiens
  misc_RNA (1)...(19): siRNA sense strand
ggaagaggagaaccauauu

SEQ ID NO: 805343 - RNA, 19 nt, Homo sapiens
  misc_RNA (1)...(19): siRNA sense strand
gcucagccuuugucaacuu

SEQ ID NO: 805344 - RNA, 19 nt, Homo sapiens
  misc_RNA (1)...(19): siRNA sense strand
gaggauccguguggcuuaa

SEQ ID NO: 805345 - RNA, 19 nt, Homo sapiens
  misc_RNA (1)...(19): siRNA sense strand
uguguuugcuguugaauga

SEQ ID NO: 805346 - RNA, 19 nt, Homo sapiens
  misc_RNA (1)...(19): siRNA sense strand
aaacaaguaucagcaagug

SEQ ID NO: 805347 - RNA, 19 nt, Homo sapiens
  misc_RNA (1)...(19): siRNA sense strand
ggacacucuuuccaaacaa

SEQ ID NO: 805348 - RNA, 19 nt, Homo sapiens
  misc_RNA (1)...(19): siRNA sense strand
caaccucucuuggaacuca

SEQ ID NO: 805349 - RNA, 19 nt, Homo sapiens
  misc_RNA (1)...(19): siRNA sense strand
agacggaggugcuggacaa

SEQ ID NO: 805350 - RNA, 19 nt, Homo sapiens
  misc_RNA (1)...(19): siRNA sense strand
gcaugaggauguuuguaca

SEQ ID NO: 805351 - RNA, 19 nt, Homo sapiens
  misc_RNA (1)...(19): siRNA sense strand
uauaagaacccacaauaca

SEQ ID NO: 805352 - RNA, 19 nt, Homo sapiens
  misc_RNA (1)...(19): siRNA sense strand
gaugaagcaugaggauguu

SEQ ID NO: 805353 - RNA, 19 nt, Homo sapiens
  misc_RNA (1)...(19): siRNA sense strand
uggagacgaugaagaaaug

SEQ ID NO: 805354 - RNA, 19 nt, Homo sapiens
  misc_RNA (1)...(19): siRNA sense strand
gagaagucauggaccuaau

SEQ ID NO: 805355 - RNA, 19 nt, Homo sapiens
  misc_RNA (1)...(19): siRNA sense strand
uggaaagaaugcagcguuu

SEQ ID NO: 805356 - RNA, 19 nt, Homo sapiens
  misc_RNA (1)...(19): siRNA sense strand
uacauuauaugcaccagaa

SEQ ID NO: 805357 - RNA, 19 nt, Homo sapiens
  misc_RNA (1)...(19): siRNA sense strand
uggaacacguugucaaguu

SEQ ID NO: 805358 - RNA, 19 nt, Homo sapiens
  misc_RNA (1)...(19): siRNA sense strand
gagcuguaauggagcaaau

SEQ ID NO: 805359 - RNA, 19 nt, Homo sapiens
  misc_RNA (1)...(19): siRNA sense strand
gauguuaacccgagaaguc

SEQ ID NO: 805360 - RNA, 19 nt, Homo sapiens
  misc_RNA (1)...(19): siRNA sense strand
gcacuaugaagcccuggua

SEQ ID NO: 805361 - RNA, 19 nt, Homo sapiens
  misc_RNA (1)...(19): siRNA sense strand
ugacucuccugucuucaaa

SEQ ID NO: 805362 - RNA, 19 nt, Homo sapiens
  misc_RNA (1)...(19): siRNA sense strand
gaacuacgagcgucagaag

SEQ ID NO: 805363 - RNA, 19 nt, Homo sapiens
  misc_RNA (1)...(19): siRNA sense strand
gaagcccugguucucauua

SEQ ID NO: 805364 - RNA, 19 nt, Homo sapiens
  misc_RNA (1)...(19): siRNA sense strand
agagaagaaauuccuguua

SEQ ID NO: 805365 - RNA, 19 nt, Homo sapiens
  misc_RNA (1)...(19): siRNA sense strand
gggcaaaugucugaugaag

SEQ ID NO: 805366 - RNA, 19 nt, Homo sapiens
  misc_RNA (1)...(19): siRNA sense strand
gaacggcaugucucgauug

SEQ ID NO: 805367 - RNA, 19 nt, Homo sapiens
  misc_RNA (1)...(19): siRNA sense strand
gaaauggagugguuuaaua

SEQ ID NO: 805368 - RNA, 19 nt, Homo sapiens
  misc_RNA (1)...(19): siRNA sense strand
gaugaaagcuuuguaugaa

SEQ ID NO: 805369 - RNA, 19 nt, Homo sapiens
  misc_RNA (1)...(19): siRNA sense strand
ucacauggcugcugaagaa

SEQ ID NO: 805370 - RNA, 19 nt, Homo sapiens
  misc_RNA (1)...(19): siRNA sense strand
gcacuucaguccuauuaaa

SEQ ID NO: 805371 - RNA, 19 nt, Homo sapiens
  misc_RNA (1)...(19): siRNA sense strand
gaugaagguuuggacauua

SEQ ID NO: 805372 - RNA, 19 nt, Homo sapiens
  misc_RNA (1)...(19): siRNA sense strand
gaagaaauggagugguuua

SEQ ID NO: 805373 - RNA, 19 nt, Homo sapiens
  misc_RNA (1)...(19): siRNA sense strand
caacgaggauggacucaga

SEQ ID NO: 805374 - RNA, 19 nt, Homo sapiens
  misc_RNA (1)...(19): siRNA sense strand
gggaggagaugaagguuug

SEQ ID NO: 805375 - RNA, 19 nt, Homo sapiens
  misc_RNA (1)...(19): siRNA sense strand
gcacucagaugggaauaug

SEQ ID NO: 805376 - RNA, 19 nt, Homo sapiens
  misc_RNA (1)...(19): siRNA sense strand
ggaauaugguagcgucuug

SEQ ID NO: 805377 - RNA, 19 nt, Homo sapiens
  misc_RNA (1)...(19): siRNA sense strand
uggaggagaugaaagcuuu

SEQ ID NO: 805378 - RNA, 19 nt, Homo sapiens
  misc_RNA (1)...(19): siRNA sense strand
gguagcgucuugccaaaug

SEQ ID NO: 805379 - RNA, 19 nt, Homo sapiens
  misc_RNA (1)...(19): siRNA sense strand
aaaccagucugaugugaau

SEQ ID NO: 805380 - RNA, 19 nt, Homo sapiens
  misc_RNA (1)...(19): siRNA sense strand
uaucaaauuucgacacugu

SEQ ID NO: 805381 - RNA, 19 nt, Homo sapiens
  misc_RNA (1)...(19): siRNA sense strand
uggacgaagugauuugaua

SEQ ID NO: 805382 - RNA, 19 nt, Homo sapiens
  misc_RNA (1)...(19): siRNA sense strand
ggagaugaaagcuuuguau

SEQ ID NO: 805383 - RNA, 19 nt, Homo sapiens
  misc_RNA (1)...(19): siRNA sense strand
cgacacuguucucuguuaa

SEQ ID NO: 805384 - RNA, 19 nt, Homo sapiens
  misc_RNA (1)...(19): siRNA sense strand
gaacaaaaccagucugaug

SEQ ID NO: 805385 - RNA, 19 nt, Homo sapiens
  misc_RNA (1)...(19): siRNA sense strand
gugagcagcugaucagaca

SEQ ID NO: 805386 - RNA, 19 nt, Homo sapiens
  misc_RNA (1)...(19): siRNA sense strand
ugaaagcuuuguaugaaca

SEQ ID NO: 805387 - RNA, 19 nt, Homo sapiens
  misc_RNA (1)...(19): siRNA sense strand
gcaacugccugccuucaac

SEQ ID NO: 805388 - RNA, 19 nt, Homo sapiens
  misc_RNA (1)...(19): siRNA sense strand
ucgacacuguucucuguua

SEQ ID NO: 805389 - RNA, 19 nt, Homo sapiens
  misc_RNA (1)...(19): siRNA sense strand
cugaagaaauggagugguu

SEQ ID NO: 805390 - RNA, 19 nt, Homo sapiens
  misc_RNA (1)...(19): siRNA sense strand
gacaaguucuggaggagau

SEQ ID NO: 805391 - RNA, 19 nt, Homo sapiens
  misc_RNA (1)...(19): siRNA sense strand
cgaagugauuugauaccaa

SEQ ID NO: 805392 - RNA, 19 nt, Homo sapiens
  misc_RNA (1)...(19): siRNA sense strand
aaucgacgcugcacuguag

SEQ ID NO: 805393 - RNA, 19 nt, Homo sapiens
  misc_RNA (1)...(19): siRNA sense strand
ugauggcacuucaguccua

SEQ ID NO: 805394 - RNA, 19 nt, Homo sapiens
  misc_RNA (1)...(19): siRNA sense strand
gagaugaaagcuuuguaug

SEQ ID NO: 805395 - RNA, 19 nt, Homo sapiens
  misc_RNA (1)...(19): siRNA sense strand
aaagucagguggacgaagu

SEQ ID NO: 805396 - RNA, 19 nt, Homo sapiens
  misc_RNA (1)...(19): siRNA sense strand
agaugaagguuuggacauu

SEQ ID NO: 805397 - RNA, 19 nt, Homo sapiens
  misc_RNA (1)...(19): siRNA sense strand
cauggcugcugaagaaaug

SEQ ID NO: 805398 - RNA, 19 nt, Homo sapiens
  misc_RNA (1)...(19): siRNA sense strand
gugauuugauaccaacuau

SEQ ID NO: 805399 - RNA, 19 nt, Homo sapiens
  misc_RNA (1)...(19): siRNA sense strand
acacuguucucuguuaaga

SEQ ID NO: 805400 - RNA, 19 nt, Homo sapiens
  misc_RNA (1)...(19): siRNA sense strand
agaugaaagcuuuguauga

SEQ ID NO: 805401 - RNA, 19 nt, Homo sapiens
  misc_RNA (1)...(19): siRNA sense strand
gaggauggacucagacaag

SEQ ID NO: 805402 - RNA, 19 nt, Homo sapiens
  misc_RNA (1)...(19): siRNA sense strand
gacauuacacaggauauga

SEQ ID NO: 805403 - RNA, 19 nt, Homo sapiens
  misc_RNA (1)...(19): siRNA sense strand
ggacauuacacaggauaug

SEQ ID NO: 805404 - RNA, 19 nt, Homo sapiens
  misc_RNA (1)...(19): siRNA sense strand
gaucucuugcuacuuauau

SEQ ID NO: 805405 - RNA, 19 nt, Homo sapiens
  misc_RNA (1)...(19): siRNA sense strand
cgucuugccaaaugcauua

SEQ ID NO: 805406 - RNA, 19 nt, Homo sapiens
  misc_RNA (1)...(19): siRNA sense strand
ucagguggacgaagugauu

SEQ ID NO: 805407 - RNA, 19 nt, Homo sapiens
  misc_RNA (1)...(19): siRNA sense strand
ggacgaagugauuugauac

SEQ ID NO: 805408 - RNA, 19 nt, Homo sapiens
  misc_RNA (1)...(19): siRNA sense strand
gauggacucagacaaguuc

SEQ ID NO: 805409 - RNA, 19 nt, Homo sapiens
  misc_RNA (1)...(19): siRNA sense strand
gagaauuugaaguugauga

SEQ ID NO: 805410 - RNA, 19 nt, Homo sapiens
  misc_RNA (1)...(19): siRNA sense strand
gaaguccggugucuaaaag

SEQ ID NO: 805411 - RNA, 19 nt, Homo sapiens
  misc_RNA (1)...(19): siRNA sense strand
gcacuguagcauaccugua

SEQ ID NO: 805412 - RNA, 19 nt, Homo sapiens
  misc_RNA (1)...(19): siRNA sense strand
ggaaaugugagcagcugau

SEQ ID NO: 805413 - RNA, 19 nt, Homo sapiens
  misc_RNA (1)...(19): siRNA sense strand
gaaaucgacgcugcacugu

SEQ ID NO: 805414 - RNA, 19 nt, Homo sapiens
  misc_RNA (1)...(19): siRNA sense strand
uuaccucgauggaaaugug

SEQ ID NO: 805415 - RNA, 19 nt, Homo sapiens
  misc_RNA (1)...(19): siRNA sense strand
uggcacuucaguccuauua

SEQ ID NO: 805416 - RNA, 19 nt, Homo sapiens
  misc_RNA (1)...(19): siRNA sense strand
uauggagaauuugaaguug

SEQ ID NO: 805417 - RNA, 19 nt, Homo sapiens
  misc_RNA (1)...(19): siRNA sense strand
cuauggagaauuugaaguu

SEQ ID NO: 805418 - RNA, 19 nt, Homo sapiens
  misc_RNA (1)...(19): siRNA sense strand
ggauggacucagacaaguu

SEQ ID NO: 805419 - RNA, 19 nt, Homo sapiens
  misc_RNA (1)...(19): siRNA sense strand
uuucgacacuguucucugu

SEQ ID NO: 805420 - RNA, 19 nt, Homo sapiens
  misc_RNA (1)...(19): siRNA sense strand
gagaugaagguuuggacau

SEQ ID NO: 805421 - RNA, 19 nt, Homo sapiens
  misc_RNA (1)...(19): siRNA sense strand
uggagaauuugaaguugau

SEQ ID NO: 805422 - RNA, 19 nt, Homo sapiens
  misc_RNA (1)...(19): siRNA sense strand
caaaaccagucugauguga

SEQ ID NO: 805423 - RNA, 19 nt, Homo sapiens
  misc_RNA (1)...(19): siRNA sense strand
gaauuugaaguugaugaug

SEQ ID NO: 805424 - RNA, 19 nt, Homo sapiens
  misc_RNA (1)...(19): siRNA sense strand
cuacuuauaugaggucacu

SEQ ID NO: 805425 - RNA, 19 nt, Homo sapiens
  misc_RNA (1)...(19): siRNA sense strand
uggagcacauccugucaug

SEQ ID NO: 805426 - RNA, 19 nt, Homo sapiens
  misc_RNA (1)...(19): siRNA sense strand
gagcagcugaucagacaag

SEQ ID NO: 805427 - RNA, 19 nt, Homo sapiens
  misc_RNA (1)...(19): siRNA sense strand
gaaaugugagcagcugauc

SEQ ID NO: 805428 - RNA, 19 nt, Homo sapiens
  misc_RNA (1)...(19): siRNA sense strand
uaccaacuaucaaauuucg

SEQ ID NO: 805429 - RNA, 19 nt, Homo sapiens
  misc_RNA (1)...(19): siRNA sense strand
gauggcacuucaguccuau

SEQ ID NO: 805430 - RNA, 19 nt, Homo sapiens
  misc_RNA (1)...(19): siRNA sense strand
ugaugugaaugaagcaaag

SEQ ID NO: 805431 - RNA, 19 nt, Homo sapiens
  misc_RNA (1)...(19): siRNA sense strand
ucaaauuucgacacuguuc

SEQ ID NO: 805432 - RNA, 19 nt, Homo sapiens
  misc_RNA (1)...(19): siRNA sense strand
auggagaauuugaaguuga

SEQ ID NO: 805433 - RNA, 19 nt, Homo sapiens
  misc_RNA (1)...(19): siRNA sense strand
aagccuauauauugaaguc

SEQ ID NO: 805434 - RNA, 19 nt, Homo sapiens
  misc_RNA (1)...(19): siRNA sense strand
cauuacacaggauaugaaa

SEQ ID NO: 805435 - RNA, 19 nt, Homo sapiens
  misc_RNA (1)...(19): siRNA sense strand
ccagucugaugugaaugaa

SEQ ID NO: 805436 - RNA, 19 nt, Homo sapiens
  misc_RNA (1)...(19): siRNA sense strand
gcaaagucagguggacgaa

SEQ ID NO: 805437 - RNA, 19 nt, Homo sapiens
  misc_RNA (1)...(19): siRNA sense strand
acgcugcacuguagcauac

SEQ ID NO: 805438 - RNA, 19 nt, Homo sapiens
  misc_RNA (1)...(19): siRNA sense strand
auugaaguccggugucuaa

SEQ ID NO: 805439 - RNA, 19 nt, Homo sapiens
  misc_RNA (1)...(19): siRNA sense strand
agaaauggagugguuuaau

SEQ ID NO: 805440 - RNA, 19 nt, Homo sapiens
  misc_RNA (1)...(19): siRNA sense strand
gacgcugcacuguagcaua

SEQ ID NO: 805441 - RNA, 19 nt, Homo sapiens
  misc_RNA (1)...(19): siRNA sense strand
ugaagaaauggagugguuu

SEQ ID NO: 805442 - RNA, 19 nt, Homo sapiens
  misc_RNA (1)...(19): siRNA sense strand
agacuauggagaauuugaa

SEQ ID NO: 805443 - RNA, 19 nt, Homo sapiens
  misc_RNA (1)...(19): siRNA sense strand
ccaaggagauuuaacugaa

SEQ ID NO: 805444 - RNA, 19 nt, Homo sapiens
  misc_RNA (1)...(19): siRNA sense strand
gacgagagcucagacugua

SEQ ID NO: 805445 - RNA, 19 nt, Homo sapiens
  misc_RNA (1)...(19): siRNA sense strand
gugcacaacuggcaaagaa

SEQ ID NO: 805446 - RNA, 19 nt, Homo sapiens
  misc_RNA (1)...(19): siRNA sense strand
gcaaucauaugaaguuucu

SEQ ID NO: 805447 - RNA, 19 nt, Homo sapiens
  misc_RNA (1)...(19): siRNA sense strand
ggagagaagcccuuuaugu

SEQ ID NO: 805448 - RNA, 19 nt, Homo sapiens
  misc_RNA (1)...(19): siRNA sense strand
gagagaagcccuuuaugug

SEQ ID NO: 805449 - RNA, 19 nt, Homo sapiens
  misc_RNA (1)...(19): siRNA sense strand
ggaaugugcauaugagaaa

SEQ ID NO: 805450 - RNA, 19 nt, Homo sapiens
  misc_RNA (1)...(19): siRNA sense strand
gcaaacugcugagccacua

SEQ ID NO: 805451 - RNA, 19 nt, Homo sapiens
  misc_RNA (1)...(19): siRNA sense strand
gaaaacaucuggugguuca

SEQ ID NO: 805452 - RNA, 19 nt, Homo sapiens
  misc_RNA (1)...(19): siRNA sense strand
caaggagauuuaacugaaa

SEQ ID NO: 805453 - RNA, 19 nt, Homo sapiens
  misc_RNA (1)...(19): siRNA sense strand
ugucuuaacugcaguaaau

SEQ ID NO: 805454 - RNA, 19 nt, Homo sapiens
  misc_RNA (1)...(19): siRNA sense strand
gaucuacagccaagugaua

SEQ ID NO: 805455 - RNA, 19 nt, Homo sapiens
  misc_RNA (1)...(19): siRNA sense strand
ggccagcucacuuuaaaua

SEQ ID NO: 805456 - RNA, 19 nt, Homo sapiens
  misc_RNA (1)...(19): siRNA sense strand
gaaaagaagcucaagugua

SEQ ID NO: 805457 - RNA, 19 nt, Homo sapiens
  misc_RNA (1)...(19): siRNA sense strand
gcaguaguuugcuugaaga

SEQ ID NO: 805458 - RNA, 19 nt, Homo sapiens
  misc_RNA (1)...(19): siRNA sense strand
ccucaagacucaucgaaau

SEQ ID NO: 805459 - RNA, 19 nt, Homo sapiens
  misc_RNA (1)...(19): siRNA sense strand
gcaggaaugugcauaugag

SEQ ID NO: 805460 - RNA, 19 nt, Homo sapiens
  misc_RNA (1)...(19): siRNA sense strand
guuaucagaugaguuagaa

SEQ ID NO: 805461 - RNA, 19 nt, Homo sapiens
  misc_RNA (1)...(19): siRNA sense strand
gagcucagacuguacagaa

SEQ ID NO: 805462 - RNA, 19 nt, Homo sapiens
  misc_RNA (1)...(19): siRNA sense strand
gcacaacuggcaaagaaug

SEQ ID NO: 805463 - RNA, 19 nt, Homo sapiens
  misc_RNA (1)...(19): siRNA sense strand
cauaugaaguuucugucuu

SEQ ID NO: 805464 - RNA, 19 nt, Homo sapiens
  misc_RNA (1)...(19): siRNA sense strand
gaaucagaagcuaaagaua

SEQ ID NO: 805465 - RNA, 19 nt, Homo sapiens
  misc_RNA (1)...(19): siRNA sense strand
gagcacagacaguagcauu

SEQ ID NO: 805466 - RNA, 19 nt, Homo sapiens
  misc_RNA (1)...(19): siRNA sense strand
ggagagaagccucaucagu

SEQ ID NO: 805467 - RNA, 19 nt, Homo sapiens
  misc_RNA (1)...(19): siRNA sense strand
cggcuaauguuaccagaug

SEQ ID NO: 805468 - RNA, 19 nt, Homo sapiens
  misc_RNA (1)...(19): siRNA sense strand
gaggcaaucauaugaaguu

SEQ ID NO: 805469 - RNA, 19 nt, Homo sapiens
  misc_RNA (1)...(19): siRNA sense strand
gaaccuaccaaauaccaau

SEQ ID NO: 805470 - RNA, 19 nt, Homo sapiens
  misc_RNA (1)...(19): siRNA sense strand
gaagcaggaaugugcauau

SEQ ID NO: 805471 - RNA, 19 nt, Homo sapiens
  misc_RNA (1)...(19): siRNA sense strand
gaauacguccaucccauug

SEQ ID NO: 805472 - RNA, 19 nt, Homo sapiens
  misc_RNA (1)...(19): siRNA sense strand
ggauguggccguuccuuug

SEQ ID NO: 805473 - RNA, 19 nt, Homo sapiens
  misc_RNA (1)...(19): siRNA sense strand
ggaguuggcccaugacagu

SEQ ID NO: 805474 - RNA, 19 nt, Homo sapiens
  misc_RNA (1)...(19): siRNA sense strand
aaaagaagcucaaguguac

SEQ ID NO: 805475 - RNA, 19 nt, Homo sapiens
  misc_RNA (1)...(19): siRNA sense strand
cagaugaguuagaauccaa

SEQ ID NO: 805476 - RNA, 19 nt, Homo sapiens
  misc_RNA (1)...(19): siRNA sense strand
guacaguuuguucagaaua

SEQ ID NO: 805477 - RNA, 19 nt, Homo sapiens
  misc_RNA (1)...(19): siRNA sense strand
gaaugcagucggcuaaugu

SEQ ID NO: 805478 - RNA, 19 nt, Homo sapiens
  misc_RNA (1)...(19): siRNA sense strand
cgaaaugaccgcuccuuca

SEQ ID NO: 805479 - RNA, 19 nt, Homo sapiens
  misc_RNA (1)...(19): siRNA sense strand
ggaugaggcagaagauuca

SEQ ID NO: 805480 - RNA, 19 nt, Homo sapiens
  misc_RNA (1)...(19): siRNA sense strand
gggaggcaaucauaugaag

SEQ ID NO: 805481 - RNA, 19 nt, Homo sapiens
  misc_RNA (1)...(19): siRNA sense strand
ggcaguaguuugcuugaag

SEQ ID NO: 805482 - RNA, 19 nt, Homo sapiens
  misc_RNA (1)...(19): siRNA sense strand
aagcucaaguguacaguug

SEQ ID NO: 805483 - RNA, 19 nt, Homo sapiens
  misc_RNA (1)...(19): siRNA sense strand
gaaaauguccaccuugguu

SEQ ID NO: 805484 - RNA, 19 nt, Homo sapiens
  misc_RNA (1)...(19): siRNA sense strand
cuacaaaucauucuaacuc

SEQ ID NO: 805485 - RNA, 19 nt, Homo sapiens
  misc_RNA (1)...(19): siRNA sense strand
ccacaagaguuacuaaacc

SEQ ID NO: 805486 - RNA, 19 nt, Homo sapiens
  misc_RNA (1)...(19): siRNA sense strand
ugcagaagguugugggaaa

SEQ ID NO: 805487 - RNA, 19 nt, Homo sapiens
  misc_RNA (1)...(19): siRNA sense strand
gcccaugacaguuugauug

SEQ ID NO: 805488 - RNA, 19 nt, Homo sapiens
  misc_RNA (1)...(19): siRNA sense strand
ggaagcaggaaugugcaua

SEQ ID NO: 805489 - RNA, 19 nt, Homo sapiens
  misc_RNA (1)...(19): siRNA sense strand
acaguagcauuccaugguu

SEQ ID NO: 805490 - RNA, 19 nt, Homo sapiens
  misc_RNA (1)...(19): siRNA sense strand
gcaguaaauccacaagagu

SEQ ID NO: 805491 - RNA, 19 nt, Homo sapiens
  misc_RNA (1)...(19): siRNA sense strand
ucagaaugcagucggcuaa

SEQ ID NO: 805492 - RNA, 19 nt, Homo sapiens
  misc_RNA (1)...(19): siRNA sense strand
aguaaauccacaagaguua

SEQ ID NO: 805493 - RNA, 19 nt, Homo sapiens
  misc_RNA (1)...(19): siRNA sense strand
gggagcagcugggagucaa

SEQ ID NO: 805494 - RNA, 19 nt, Homo sapiens
  misc_RNA (1)...(19): siRNA sense strand
gaagcucaaguguacaguu

SEQ ID NO: 805495 - RNA, 19 nt, Homo sapiens
  misc_RNA (1)...(19): siRNA sense strand
gauagcacuucuuuuauuc

SEQ ID NO: 805496 - RNA, 19 nt, Homo sapiens
  misc_RNA (1)...(19): siRNA sense strand
gguacaguuuguucagaau

SEQ ID NO: 805497 - RNA, 19 nt, Homo sapiens
  misc_RNA (1)...(19): siRNA sense strand
aauaccaccucaagacuca

SEQ ID NO: 805498 - RNA, 19 nt, Homo sapiens
  misc_RNA (1)...(19): siRNA sense strand
gacaguagcauuccauggu

SEQ ID NO: 805499 - RNA, 19 nt, Homo sapiens
  misc_RNA (1)...(19): siRNA sense strand
uaccagaugauacuacaaa

SEQ ID NO: 805500 - RNA, 19 nt, Homo sapiens
  misc_RNA (1)...(19): siRNA sense strand
cacaagaguuacuaaacca

SEQ ID NO: 805501 - RNA, 19 nt, Homo sapiens
  misc_RNA (1)...(19): siRNA sense strand
agaaugcagucggcuaaug

SEQ ID NO: 805502 - RNA, 19 nt, Homo sapiens
  misc_RNA (1)...(19): siRNA sense strand
aaccuggugucuaugaauu

SEQ ID NO: 805503 - RNA, 19 nt, Homo sapiens
  misc_RNA (1)...(19): siRNA sense strand
gggcaguaguuugcuugaa

SEQ ID NO: 805504 - RNA, 19 nt, Homo sapiens
  misc_RNA (1)...(19): siRNA sense strand
gcacaugaggacccacaau

SEQ ID NO: 805505 - RNA, 19 nt, Homo sapiens
  misc_RNA (1)...(19): siRNA sense strand
caagaucuacagccaagug

SEQ ID NO: 805506 - RNA, 19 nt, Homo sapiens
  misc_RNA (1)...(19): siRNA sense strand
gcucagacuguacagaaau

SEQ ID NO: 805507 - RNA, 19 nt, Homo sapiens
  misc_RNA (1)...(19): siRNA sense strand
caguaaauccacaagaguu

SEQ ID NO: 805508 - RNA, 19 nt, Homo sapiens
  misc_RNA (1)...(19): siRNA sense strand
cagggaggcaaucauauga

SEQ ID NO: 805509 - RNA, 19 nt, Homo sapiens
  misc_RNA (1)...(19): siRNA sense strand
ccaaauaccaauucuaucc

SEQ ID NO: 805510 - RNA, 19 nt, Homo sapiens
  misc_RNA (1)...(19): siRNA sense strand
uccuugaaccuaccaaaua

SEQ ID NO: 805511 - RNA, 19 nt, Homo sapiens
  misc_RNA (1)...(19): siRNA sense strand
gccguuccuuugcugagua

SEQ ID NO: 805512 - RNA, 19 nt, Homo sapiens
  misc_RNA (1)...(19): siRNA sense strand
gcagaagguugugggaaaa

SEQ ID NO: 805513 - RNA, 19 nt, Homo sapiens
  misc_RNA (1)...(19): siRNA sense strand
uguagaaucagaagcuaaa

SEQ ID NO: 805514 - RNA, 19 nt, Homo sapiens
  misc_RNA (1)...(19): siRNA sense strand
gaaugugcauaugagaaag

SEQ ID NO: 805515 - RNA, 19 nt, Homo sapiens
  misc_RNA (1)...(19): siRNA sense strand
caggagagaagccucauca

SEQ ID NO: 805516 - RNA, 19 nt, Homo sapiens
  misc_RNA (1)...(19): siRNA sense strand
acacaggagagaaaccuuu

SEQ ID NO: 805517 - RNA, 19 nt, Homo sapiens
  misc_RNA (1)...(19): siRNA sense strand
cuggaaaccugaagaacca

SEQ ID NO: 805518 - RNA, 19 nt, Homo sapiens
  misc_RNA (1)...(19): siRNA sense strand
gaugggcagucaaaagauu

SEQ ID NO: 805519 - RNA, 19 nt, Homo sapiens
  misc_RNA (1)...(19): siRNA sense strand
cagagcuccugguacaguu

SEQ ID NO: 805520 - RNA, 19 nt, Homo sapiens
  misc_RNA (1)...(19): siRNA sense strand
agucagggaggcaaucaua

SEQ ID NO: 805521 - RNA, 19 nt, Homo sapiens
  misc_RNA (1)...(19): siRNA sense strand
guuaccagaugauacuaca

SEQ ID NO: 805522 - RNA, 19 nt, Homo sapiens
  misc_RNA (1)...(19): siRNA sense strand
guauggccagcucacuuua

SEQ ID NO: 805523 - RNA, 19 nt, Homo sapiens
  misc_RNA (1)...(19): siRNA sense strand
uaucagaugaguuagaauc

SEQ ID NO: 805524 - RNA, 19 nt, Homo sapiens
  misc_RNA (1)...(19): siRNA sense strand
uuacuaaaccaaggagauu

SEQ ID NO: 805525 - RNA, 19 nt, Homo sapiens
  misc_RNA (1)...(19): siRNA sense strand
ccucaucagugccaagucu

SEQ ID NO: 805526 - RNA, 19 nt, Homo sapiens
  misc_RNA (1)...(19): siRNA sense strand
gacaggggcuuguagaauc

SEQ ID NO: 805527 - RNA, 19 nt, Homo sapiens
  misc_RNA (1)...(19): siRNA sense strand
gguugugaccggacauuug

SEQ ID NO: 805528 - RNA, 19 nt, Homo sapiens
  misc_RNA (1)...(19): siRNA sense strand
ucagggaggcaaucauaug

SEQ ID NO: 805529 - RNA, 19 nt, Homo sapiens
  misc_RNA (1)...(19): siRNA sense strand
ccuugaaccuaccaaauac

SEQ ID NO: 805530 - RNA, 19 nt, Homo sapiens
  misc_RNA (1)...(19): siRNA sense strand
cucuucagcugagcacuua

SEQ ID NO: 805531 - RNA, 19 nt, Homo sapiens
  misc_RNA (1)...(19): siRNA sense strand
aggcuucaguacccaguaa

SEQ ID NO: 805532 - RNA, 19 nt, Homo sapiens
  misc_RNA (1)...(19): siRNA sense strand
aagcaggaaugugcauaug

SEQ ID NO: 805533 - RNA, 19 nt, Homo sapiens
  misc_RNA (1)...(19): siRNA sense strand
agaaucagaagcuaaagau

SEQ ID NO: 805534 - RNA, 19 nt, Homo sapiens
  misc_RNA (1)...(19): siRNA sense strand
gugguucacucaggagaga

SEQ ID NO: 805535 - RNA, 19 nt, Homo sapiens
  misc_RNA (1)...(19): siRNA sense strand
caugaggacccacaaugga

SEQ ID NO: 805536 - RNA, 19 nt, Homo sapiens
  misc_RNA (1)...(19): siRNA sense strand
cagcagcaauggagaaaau

SEQ ID NO: 805537 - RNA, 19 nt, Homo sapiens
  misc_RNA (1)...(19): siRNA sense strand
ugguacaguuuguucagaa

SEQ ID NO: 805538 - RNA, 19 nt, Homo sapiens
  misc_RNA (1)...(19): siRNA sense strand
aaaccaaggagauuuaacu

SEQ ID NO: 805539 - RNA, 19 nt, Homo sapiens
  misc_RNA (1)...(19): siRNA sense strand
gacccacaauggagagaag

SEQ ID NO: 805540 - RNA, 19 nt, Homo sapiens
  misc_RNA (1)...(19): siRNA sense strand
uuaaauaccaccucaagac

SEQ ID NO: 805541 - RNA, 19 nt, Homo sapiens
  misc_RNA (1)...(19): siRNA sense strand
cagcucacuuuaaauacca

SEQ ID NO: 805542 - RNA, 19 nt, Homo sapiens
  misc_RNA (1)...(19): siRNA sense strand
agaauacguccaucccauu

SEQ ID NO: 805543 - RNA, 19 nt, Homo sapiens
  misc_RNA (1)...(19): siRNA sense strand
gaagagagcagaccaggua

SEQ ID NO: 805544 - RNA, 19 nt, Homo sapiens
  misc_RNA (1)...(19): siRNA sense strand
ggaacuauauuugggcuuu

SEQ ID NO: 805545 - RNA, 19 nt, Homo sapiens
  misc_RNA (1)...(19): siRNA sense strand
gaacuauauuugggcuuua

SEQ ID NO: 805546 - RNA, 19 nt, Homo sapiens
  misc_RNA (1)...(19): siRNA sense strand
ggaagaagaagaagaggaa

SEQ ID NO: 805547 - RNA, 19 nt, Homo sapiens
  misc_RNA (1)...(19): siRNA sense strand
gaccaaagcucgccuugag

SEQ ID NO: 805548 - RNA, 19 nt, Homo sapiens
  misc_RNA (1)...(19): siRNA sense strand
ccagacaccugaagggaaa

SEQ ID NO: 805549 - RNA, 19 nt, Homo sapiens
  misc_RNA (1)...(19): siRNA sense strand
ggaaacacaucuccuucau

SEQ ID NO: 805550 - RNA, 19 nt, Homo sapiens
  misc_RNA (1)...(19): siRNA sense strand
aaacacaucuccuucaucu

SEQ ID NO: 805551 - RNA, 19 nt, Homo sapiens
  misc_RNA (1)...(19): siRNA sense strand
ggacccaacucaauacagu

SEQ ID NO: 805552 - RNA, 19 nt, Homo sapiens
  misc_RNA (1)...(19): siRNA sense strand
guuaugauguuccuauaga

SEQ ID NO: 805553 - RNA, 19 nt, Homo sapiens
  misc_RNA (1)...(19): siRNA sense strand
gagcagaccagguacuuau

SEQ ID NO: 805554 - RNA, 19 nt, Homo sapiens
  misc_RNA (1)...(19): siRNA sense strand
ugaagagcaugacaguauu

SEQ ID NO: 805555 - RNA, 19 nt, Homo sapiens
  misc_RNA (1)...(19): siRNA sense strand
ugaaugacgcccuggauaa

SEQ ID NO: 805556 - RNA, 19 nt, Homo sapiens
  misc_RNA (1)...(19): siRNA sense strand
cagcuuaacugaagagcau

SEQ ID NO: 805557 - RNA, 19 nt, Homo sapiens
  misc_RNA (1)...(19): siRNA sense strand
ggaagaagauggggagaaa

SEQ ID NO: 805558 - RNA, 19 nt, Homo sapiens
  misc_RNA (1)...(19): siRNA sense strand
gagaaggggucccaagaaa

SEQ ID NO: 805559 - RNA, 19 nt, Homo sapiens
  misc_RNA (1)...(19): siRNA sense strand
gagcaucagugggaacuuc

SEQ ID NO: 805560 - RNA, 19 nt, Homo sapiens
  misc_RNA (1)...(19): siRNA sense strand
gaagagcaugacaguauug

SEQ ID NO: 805561 - RNA, 19 nt, Homo sapiens
  misc_RNA (1)...(19): siRNA sense strand
gcaugacaguauugaggaa

SEQ ID NO: 805562 - RNA, 19 nt, Homo sapiens
  misc_RNA (1)...(19): siRNA sense strand
gcucagggcaugugcauuc

SEQ ID NO: 805563 - RNA, 19 nt, Homo sapiens
  misc_RNA (1)...(19): siRNA sense strand
uggagaagcacgaggauaa

SEQ ID NO: 805564 - RNA, 19 nt, Homo sapiens
  misc_RNA (1)...(19): siRNA sense strand
gggagaaaccuaagagaag

SEQ ID NO: 805565 - RNA, 19 nt, Homo sapiens
  misc_RNA (1)...(19): siRNA sense strand
acacaucuccuucaucuca

SEQ ID NO: 805566 - RNA, 19 nt, Homo sapiens
  misc_RNA (1)...(19): siRNA sense strand
uauuugggcuuuaucugaa

SEQ ID NO: 805567 - RNA, 19 nt, Homo sapiens
  misc_RNA (1)...(19): siRNA sense strand
ggagaagcacgaggauaaa

SEQ ID NO: 805568 - RNA, 19 nt, Homo sapiens
  misc_RNA (1)...(19): siRNA sense strand
cugaagagcaugacaguau

SEQ ID NO: 805569 - RNA, 19 nt, Homo sapiens
  misc_RNA (1)...(19): siRNA sense strand
aagcucgccuugagagauu

SEQ ID NO: 805570 - RNA, 19 nt, Homo sapiens
  misc_RNA (1)...(19): siRNA sense strand
ccacauuacccuucuucaa

SEQ ID NO: 805571 - RNA, 19 nt, Homo sapiens
  misc_RNA (1)...(19): siRNA sense strand
acagcuucaugccacauua

SEQ ID NO: 805572 - RNA, 19 nt, Homo sapiens
  misc_RNA (1)...(19): siRNA sense strand
guccacaacuucaacuauc

SEQ ID NO: 805573 - RNA, 19 nt, Homo sapiens
  misc_RNA (1)...(19): siRNA sense strand
gaagcacgaggauaaaucu

SEQ ID NO: 805574 - RNA, 19 nt, Homo sapiens
  misc_RNA (1)...(19): siRNA sense strand
caacuucaacuaucagucu

SEQ ID NO: 805575 - RNA, 19 nt, Homo sapiens
  misc_RNA (1)...(19): siRNA sense strand
ccaacucaauacagucuuc

SEQ ID NO: 805576 - RNA, 19 nt, Homo sapiens
  misc_RNA (1)...(19): siRNA sense strand
agugggaacuucuccuuga

SEQ ID NO: 805577 - RNA, 19 nt, Homo sapiens
  misc_RNA (1)...(19): siRNA sense strand
uuguggagaugcuguguaa

SEQ ID NO: 805578 - RNA, 19 nt, Homo sapiens
  misc_RNA (1)...(19): siRNA sense strand
agaagaagaggaagaagau

SEQ ID NO: 805579 - RNA, 19 nt, Homo sapiens
  misc_RNA (1)...(19): siRNA sense strand
gaaacacaucuccuucauc

SEQ ID NO: 805580 - RNA, 19 nt, Homo sapiens
  misc_RNA (1)...(19): siRNA sense strand
ggaugcauggccugaauga

SEQ ID NO: 805581 - RNA, 19 nt, Homo sapiens
  misc_RNA (1)...(19): siRNA sense strand
agacuggccaggaacuaua

SEQ ID NO: 805582 - RNA, 19 nt, Homo sapiens
  misc_RNA (1)...(19): siRNA sense strand
ugacaguauugaggaagaa

SEQ ID NO: 805583 - RNA, 19 nt, Homo sapiens
  misc_RNA (1)...(19): siRNA sense strand
gugggaacuucuccuugaa

SEQ ID NO: 805584 - RNA, 19 nt, Homo sapiens
  misc_RNA (1)...(19): siRNA sense strand
caaggcuaaugccagagaa

SEQ ID NO: 805585 - RNA, 19 nt, Homo sapiens
  misc_RNA (1)...(19): siRNA sense strand
gagaagcacgaggauaaau

SEQ ID NO: 805586 - RNA, 19 nt, Homo sapiens
  misc_RNA (1)...(19): siRNA sense strand
cccaaguauucaagaguuu

SEQ ID NO: 805587 - RNA, 19 nt, Homo sapiens
  misc_RNA (1)...(19): siRNA sense strand
agaagaagaagaggaagaa

SEQ ID NO: 805588 - RNA, 19 nt, Homo sapiens
  misc_RNA (1)...(19): siRNA sense strand
ccguuaugauguuccuaua

SEQ ID NO: 805589 - RNA, 19 nt, Homo sapiens
  misc_RNA (1)...(19): siRNA sense strand
gagagcagaccagguacuu

SEQ ID NO: 805590 - RNA, 19 nt, Homo sapiens
  misc_RNA (1)...(19): siRNA sense strand
gagauucagggcucgaaga

SEQ ID NO: 805591 - RNA, 19 nt, Homo sapiens
  misc_RNA (1)...(19): siRNA sense strand
acauuacccuucuucaagu

SEQ ID NO: 805592 - RNA, 19 nt, Homo sapiens
  misc_RNA (1)...(19): siRNA sense strand
gaagaagaggaagaagaug

SEQ ID NO: 805593 - RNA, 19 nt, Homo sapiens
  misc_RNA (1)...(19): siRNA sense strand
cacauuacccuucuucaag

SEQ ID NO: 805594 - RNA, 19 nt, Homo sapiens
  misc_RNA (1)...(19): siRNA sense strand
aagaagaagaggaagaaga

SEQ ID NO: 805595 - RNA, 19 nt, Homo sapiens
  misc_RNA (1)...(19): siRNA sense strand
ggucauauggaaacacauc

SEQ ID NO: 805596 - RNA, 19 nt, Homo sapiens
  misc_RNA (1)...(19): siRNA sense strand
guauugaggaagaagaaga

SEQ ID NO: 805597 - RNA, 19 nt, Homo sapiens
  misc_RNA (1)...(19): siRNA sense strand
aaaagaagaugaccaaagc

SEQ ID NO: 805598 - RNA, 19 nt, Homo sapiens
  misc_RNA (1)...(19): siRNA sense strand
guggagaugcuguguaaag

SEQ ID NO: 805599 - RNA, 19 nt, Homo sapiens
  misc_RNA (1)...(19): siRNA sense strand
gagaugggagagcuaguca

SEQ ID NO: 805600 - RNA, 19 nt, Homo sapiens
  misc_RNA (1)...(19): siRNA sense strand
gaagagucaaggcuaaugc

SEQ ID NO: 805601 - RNA, 19 nt, Homo sapiens
  misc_RNA (1)...(19): siRNA sense strand
ccggaugcauggccugaau

SEQ ID NO: 805602 - RNA, 19 nt, Homo sapiens
  misc_RNA (1)...(19): siRNA sense strand
gcagaccagguacuuaugg

SEQ ID NO: 805603 - RNA, 19 nt, Homo sapiens
  misc_RNA (1)...(19): siRNA sense strand
cugaaugacgcccuggaua

SEQ ID NO: 805604 - RNA, 19 nt, Homo sapiens
  misc_RNA (1)...(19): siRNA sense strand
ccaucucuguccacaacuu

SEQ ID NO: 805605 - RNA, 19 nt, Homo sapiens
  misc_RNA (1)...(19): siRNA sense strand
gauaaccugaggcgaguca

SEQ ID NO: 805606 - RNA, 19 nt, Homo sapiens
  misc_RNA (1)...(19): siRNA sense strand
gaaugacgcccuggauaac

SEQ ID NO: 805607 - RNA, 19 nt, Homo sapiens
  misc_RNA (1)...(19): siRNA sense strand
cucgaagagucaaggcuaa

SEQ ID NO: 805608 - RNA, 19 nt, Homo sapiens
  misc_RNA (1)...(19): siRNA sense strand
caugugcauucaacuccuu

SEQ ID NO: 805609 - RNA, 19 nt, Homo sapiens
  misc_RNA (1)...(19): siRNA sense strand
ugaggaagaagaagaagag

SEQ ID NO: 805610 - RNA, 19 nt, Homo sapiens
  misc_RNA (1)...(19): siRNA sense strand
gaugggagagcuagucaac

SEQ ID NO: 805611 - RNA, 19 nt, Homo sapiens
  misc_RNA (1)...(19): siRNA sense strand
gaagauggggagaaaccua

SEQ ID NO: 805612 - RNA, 19 nt, Homo sapiens
  misc_RNA (1)...(19): siRNA sense strand
ggagaugggagagcuaguc

SEQ ID NO: 805613 - RNA, 19 nt, Homo sapiens
  misc_RNA (1)...(19): siRNA sense strand
cuuccuagcccuccuuaug

SEQ ID NO: 805614 - RNA, 19 nt, Homo sapiens
  misc_RNA (1)...(19): siRNA sense strand
ugggagagcuagucaacac

SEQ ID NO: 805615 - RNA, 19 nt, Homo sapiens
  misc_RNA (1)...(19): siRNA sense strand
ucucucagcccacaagcaa

SEQ ID NO: 805616 - RNA, 19 nt, Homo sapiens
  misc_RNA (1)...(19): siRNA sense strand
uauggaaacacaucuccuu

SEQ ID NO: 805617 - RNA, 19 nt, Homo sapiens
  misc_RNA (1)...(19): siRNA sense strand
uccacaacuucaacuauca

SEQ ID NO: 805618 - RNA, 19 nt, Homo sapiens
  misc_RNA (1)...(19): siRNA sense strand
ucaaggcuaaugccagaga

SEQ ID NO: 805619 - RNA, 19 nt, Homo sapiens
  misc_RNA (1)...(19): siRNA sense strand
ucaagaguuugggagaauc

SEQ ID NO: 805620 - RNA, 19 nt, Homo sapiens
  misc_RNA (1)...(19): siRNA sense strand
ggccaggaacuauauuugg

SEQ ID NO: 805621 - RNA, 19 nt, Homo sapiens
  misc_RNA (1)...(19): siRNA sense strand
aaacuuuccaagauagaga

SEQ ID NO: 805622 - RNA, 19 nt, Homo sapiens
  misc_RNA (1)...(19): siRNA sense strand
cgaagagucaaggcuaaug

SEQ ID NO: 805623 - RNA, 19 nt, Homo sapiens
  misc_RNA (1)...(19): siRNA sense strand
gaagaagaagaggaagaag

SEQ ID NO: 805624 - RNA, 19 nt, Homo sapiens
  misc_RNA (1)...(19): siRNA sense strand
caaagcucgccuugagaga

SEQ ID NO: 805625 - RNA, 19 nt, Homo sapiens
  misc_RNA (1)...(19): siRNA sense strand
auauuugggcuuuaucuga

SEQ ID NO: 805626 - RNA, 19 nt, Homo sapiens
  misc_RNA (1)...(19): siRNA sense strand
caaggagaugggagagcua

SEQ ID NO: 805627 - RNA, 19 nt, Homo sapiens
  misc_RNA (1)...(19): siRNA sense strand
ugccaucucuguccacaac

SEQ ID NO: 805628 - RNA, 19 nt, Homo sapiens
  misc_RNA (1)...(19): siRNA sense strand
agacauguccuaugauucc

SEQ ID NO: 805629 - RNA, 19 nt, Homo sapiens
  misc_RNA (1)...(19): siRNA sense strand
uuacccuucuucaagucua

SEQ ID NO: 805630 - RNA, 19 nt, Homo sapiens
  misc_RNA (1)...(19): siRNA sense strand
ccaaguauucaagaguuug

SEQ ID NO: 805631 - RNA, 19 nt, Homo sapiens
  misc_RNA (1)...(19): siRNA sense strand
aagaagaagaagaggaaga

SEQ ID NO: 805632 - RNA, 19 nt, Homo sapiens
  misc_RNA (1)...(19): siRNA sense strand
gaggagaacuugcucaaua

SEQ ID NO: 805633 - RNA, 19 nt, Homo sapiens
  misc_RNA (1)...(19): siRNA sense strand
ggaguucccugaagcaaua

SEQ ID NO: 805634 - RNA, 19 nt, Homo sapiens
  misc_RNA (1)...(19): siRNA sense strand
ggacaucauuuauagagua

SEQ ID NO: 805635 - RNA, 19 nt, Homo sapiens
  misc_RNA (1)...(19): siRNA sense strand
ggagucagcuggcauagaa

SEQ ID NO: 805636 - RNA, 19 nt, Homo sapiens
  misc_RNA (1)...(19): siRNA sense strand
gaagaaauccaguaucuga

SEQ ID NO: 805637 - RNA, 19 nt, Homo sapiens
  misc_RNA (1)...(19): siRNA sense strand
aaacggaacugucugauug

SEQ ID NO: 805638 - RNA, 19 nt, Homo sapiens
  misc_RNA (1)...(19): siRNA sense strand
ugacauagauuccggcaaa

SEQ ID NO: 805639 - RNA, 19 nt, Homo sapiens
  misc_RNA (1)...(19): siRNA sense strand
gaagcaaacugguuguguu

SEQ ID NO: 805640 - RNA, 19 nt, Homo sapiens
  misc_RNA (1)...(19): siRNA sense strand
ccacaucacucuugaaauc

SEQ ID NO: 805641 - RNA, 19 nt, Homo sapiens
  misc_RNA (1)...(19): siRNA sense strand
gaaauccaguaucugagua

SEQ ID NO: 805642 - RNA, 19 nt, Homo sapiens
  misc_RNA (1)...(19): siRNA sense strand
ggaacugucugauuguuga

SEQ ID NO: 805643 - RNA, 19 nt, Homo sapiens
  misc_RNA (1)...(19): siRNA sense strand
agaaacagcuccauugguu

SEQ ID NO: 805644 - RNA, 19 nt, Homo sapiens
  misc_RNA (1)...(19): siRNA sense strand
cagaaacugucccuugaua

SEQ ID NO: 805645 - RNA, 19 nt, Homo sapiens
  misc_RNA (1)...(19): siRNA sense strand
ugaguuaacugaaauggaa

SEQ ID NO: 805646 - RNA, 19 nt, Homo sapiens
  misc_RNA (1)...(19): siRNA sense strand
ucaaggaacuuuaucuuuc

SEQ ID NO: 805647 - RNA, 19 nt, Homo sapiens
  misc_RNA (1)...(19): siRNA sense strand
gaagagaucauuagcuuuc

SEQ ID NO: 805648 - RNA, 19 nt, Homo sapiens
  misc_RNA (1)...(19): siRNA sense strand
ggugagcugucaaaccuua

SEQ ID NO: 805649 - RNA, 19 nt, Homo sapiens
  misc_RNA (1)...(19): siRNA sense strand
caacaacaauauugagaug

SEQ ID NO: 805650 - RNA, 19 nt, Homo sapiens
  misc_RNA (1)...(19): siRNA sense strand
cagcaguacuccuauauug

SEQ ID NO: 805651 - RNA, 19 nt, Homo sapiens
  misc_RNA (1)...(19): siRNA sense strand
gcaaacugguuguguugaa

SEQ ID NO: 805652 - RNA, 19 nt, Homo sapiens
  misc_RNA (1)...(19): siRNA sense strand
ucaaggagcuucgugugua

SEQ ID NO: 805653 - RNA, 19 nt, Homo sapiens
  misc_RNA (1)...(19): siRNA sense strand
aaacagaucaaccucaaua

SEQ ID NO: 805654 - RNA, 19 nt, Homo sapiens
  misc_RNA (1)...(19): siRNA sense strand
guaauuaccuggaaacacu

SEQ ID NO: 805655 - RNA, 19 nt, Homo sapiens
  misc_RNA (1)...(19): siRNA sense strand
gaucagcugugaccuggaa

SEQ ID NO: 805656 - RNA, 19 nt, Homo sapiens
  misc_RNA (1)...(19): siRNA sense strand
agaaggacaucauuuauag

SEQ ID NO: 805657 - RNA, 19 nt, Homo sapiens
  misc_RNA (1)...(19): siRNA sense strand
cgacagcaguacuccuaua

SEQ ID NO: 805658 - RNA, 19 nt, Homo sapiens
  misc_RNA (1)...(19): siRNA sense strand
cagaagaaauccaguaucu

SEQ ID NO: 805659 - RNA, 19 nt, Homo sapiens
  misc_RNA (1)...(19): siRNA sense strand
uaaggacccuguacuugaa

SEQ ID NO: 805660 - RNA, 19 nt, Homo sapiens
  misc_RNA (1)...(19): siRNA sense strand
guuccaggcucgagcauuu

SEQ ID NO: 805661 - RNA, 19 nt, Homo sapiens
  misc_RNA (1)...(19): siRNA sense strand
gaaacugucccuugauaau

SEQ ID NO: 805662 - RNA, 19 nt, Homo sapiens
  misc_RNA (1)...(19): siRNA sense strand
cagaaggacaucauuuaua

SEQ ID NO: 805663 - RNA, 19 nt, Homo sapiens
  misc_RNA (1)...(19): siRNA sense strand
ggagggcuuucaggacuua

SEQ ID NO: 805664 - RNA, 19 nt, Homo sapiens
  misc_RNA (1)...(19): siRNA sense strand
ggugggacgucuucuggua

SEQ ID NO: 805665 - RNA, 19 nt, Homo sapiens
  misc_RNA (1)...(19): siRNA sense strand
gaagcaauauuccuuugag

SEQ ID NO: 805666 - RNA, 19 nt, Homo sapiens
  misc_RNA (1)...(19): siRNA sense strand
gcagaaggacaucauuuau

SEQ ID NO: 805667 - RNA, 19 nt, Homo sapiens
  misc_RNA (1)...(19): siRNA sense strand
agaucaaccucaauaauga

SEQ ID NO: 805668 - RNA, 19 nt, Homo sapiens
  misc_RNA (1)...(19): siRNA sense strand
ugaaacagaucaaccucaa

SEQ ID NO: 805669 - RNA, 19 nt, Homo sapiens
  misc_RNA (1)...(19): siRNA sense strand
gagcagaaggacaucauuu

SEQ ID NO: 805670 - RNA, 19 nt, Homo sapiens
  misc_RNA (1)...(19): siRNA sense strand
cagaaucuuuccugcuuaa

SEQ ID NO: 805671 - RNA, 19 nt, Homo sapiens
  misc_RNA (1)...(19): siRNA sense strand
gagaacaaacugaaacaga

SEQ ID NO: 805672 - RNA, 19 nt, Homo sapiens
  misc_RNA (1)...(19): siRNA sense strand
uggaagagaucauuagcuu

SEQ ID NO: 805673 - RNA, 19 nt, Homo sapiens
  misc_RNA (1)...(19): siRNA sense strand
ucaagaaucucaaggaacu

SEQ ID NO: 805674 - RNA, 19 nt, Homo sapiens
  misc_RNA (1)...(19): siRNA sense strand
aauaaugaauggacaguug

SEQ ID NO: 805675 - RNA, 19 nt, Homo sapiens
  misc_RNA (1)...(19): siRNA sense strand
uaucagaggucagugagaa

SEQ ID NO: 805676 - RNA, 19 nt, Homo sapiens
  misc_RNA (1)...(19): siRNA sense strand
uccaguaucugaguaauuu

SEQ ID NO: 805677 - RNA, 19 nt, Homo sapiens
  misc_RNA (1)...(19): siRNA sense strand
uccaaacgcuucuccauau

SEQ ID NO: 805678 - RNA, 19 nt, Homo sapiens
  misc_RNA (1)...(19): siRNA sense strand
ccagucaucuuaucacauc

SEQ ID NO: 805679 - RNA, 19 nt, Homo sapiens
  misc_RNA (1)...(19): siRNA sense strand
ugucaaaccuuacucaucu

SEQ ID NO: 805680 - RNA, 19 nt, Homo sapiens
  misc_RNA (1)...(19): siRNA sense strand
ccaaacgcuucuccauauu

SEQ ID NO: 805681 - RNA, 19 nt, Homo sapiens
  misc_RNA (1)...(19): siRNA sense strand
agaacaaacugaaacagau

SEQ ID NO: 805682 - RNA, 19 nt, Homo sapiens
  misc_RNA (1)...(19): siRNA sense strand
ucagaaucuuuccugcuua

SEQ ID NO: 805683 - RNA, 19 nt, Homo sapiens
  misc_RNA (1)...(19): siRNA sense strand
aagcugcaguguuuacuuu

SEQ ID NO: 805684 - RNA, 19 nt, Homo sapiens
  misc_RNA (1)...(19): siRNA sense strand
gcaugaacacauccucuaa

SEQ ID NO: 805685 - RNA, 19 nt, Homo sapiens
  misc_RNA (1)...(19): siRNA sense strand
uuacagacgugcuuagaca

SEQ ID NO: 805686 - RNA, 19 nt, Homo sapiens
  misc_RNA (1)...(19): siRNA sense strand
ccugaacaguugaguacua

SEQ ID NO: 805687 - RNA, 19 nt, Homo sapiens
  misc_RNA (1)...(19): siRNA sense strand
cgccugaaauuuacugaaa

SEQ ID NO: 805688 - RNA, 19 nt, Homo sapiens
  misc_RNA (1)...(19): siRNA sense strand
uaacccacaucacucuuga

SEQ ID NO: 805689 - RNA, 19 nt, Homo sapiens
  misc_RNA (1)...(19): siRNA sense strand
gcaugcauguggagcagaa

SEQ ID NO: 805690 - RNA, 19 nt, Homo sapiens
  misc_RNA (1)...(19): siRNA sense strand
gcaguacuccuauauugau

SEQ ID NO: 805691 - RNA, 19 nt, Homo sapiens
  misc_RNA (1)...(19): siRNA sense strand
caacaauauugagaugcua

SEQ ID NO: 805692 - RNA, 19 nt, Homo sapiens
  misc_RNA (1)...(19): siRNA sense strand
ccucaagaaucucaaggaa

SEQ ID NO: 805693 - RNA, 19 nt, Homo sapiens
  misc_RNA (1)...(19): siRNA sense strand
cagaucaaccucaauaaug

SEQ ID NO: 805694 - RNA, 19 nt, Homo sapiens
  misc_RNA (1)...(19): siRNA sense strand
gaacaaacugaaacagauc

SEQ ID NO: 805695 - RNA, 19 nt, Homo sapiens
  misc_RNA (1)...(19): siRNA sense strand
gaacacauccucuaauccu

SEQ ID NO: 805696 - RNA, 19 nt, Homo sapiens
  misc_RNA (1)...(19): siRNA sense strand
ucaguaugauccucuuuau

SEQ ID NO: 805697 - RNA, 19 nt, Homo sapiens
  misc_RNA (1)...(19): siRNA sense strand
uaacugagcuaaaaugcuu

SEQ ID NO: 805698 - RNA, 19 nt, Homo sapiens
  misc_RNA (1)...(19): siRNA sense strand
ccauugguuugcaaaguuu

SEQ ID NO: 805699 - RNA, 19 nt, Homo sapiens
  misc_RNA (1)...(19): siRNA sense strand
gcuaccagaugggcuguuu

SEQ ID NO: 805700 - RNA, 19 nt, Homo sapiens
  misc_RNA (1)...(19): siRNA sense strand
gcugugaccaacaacaaua

SEQ ID NO: 805701 - RNA, 19 nt, Homo sapiens
  misc_RNA (1)...(19): siRNA sense strand
cuaaggacccuguacuuga

SEQ ID NO: 805702 - RNA, 19 nt, Homo sapiens
  misc_RNA (1)...(19): siRNA sense strand
ucccugaugucaagaauga

SEQ ID NO: 805703 - RNA, 19 nt, Homo sapiens
  misc_RNA (1)...(19): siRNA sense strand
ucaucuggcugaucaguau

SEQ ID NO: 805704 - RNA, 19 nt, Homo sapiens
  misc_RNA (1)...(19): siRNA sense strand
caaccucaauaaugaaugg

SEQ ID NO: 805705 - RNA, 19 nt, Homo sapiens
  misc_RNA (1)...(19): siRNA sense strand
uuaagguccuggcuucauu

SEQ ID NO: 805706 - RNA, 19 nt, Homo sapiens
  misc_RNA (1)...(19): siRNA sense strand
uauaaccacuugaccuuca

SEQ ID NO: 805707 - RNA, 19 nt, Homo sapiens
  misc_RNA (1)...(19): siRNA sense strand
ggaagagaucauuagcuuu

SEQ ID NO: 805708 - RNA, 19 nt, Homo sapiens
  misc_RNA (1)...(19): siRNA sense strand
gaacgcaucccacauucca

SEQ ID NO: 805709 - RNA, 19 nt, Homo sapiens
  misc_RNA (1)...(19): siRNA sense strand
ccauucaucucuggucgua

SEQ ID NO: 805710 - RNA, 19 nt, Homo sapiens
  misc_RNA (1)...(19): siRNA sense strand
caguugaugugcaggcuuu

SEQ ID NO: 805711 - RNA, 19 nt, Homo sapiens
  misc_RNA (1)...(19): siRNA sense strand
gaacuagaaggaugucagu

SEQ ID NO: 805712 - RNA, 19 nt, Homo sapiens
  misc_RNA (1)...(19): siRNA sense strand
ugaauggacaguugagaaa

SEQ ID NO: 805713 - RNA, 19 nt, Homo sapiens
  misc_RNA (1)...(19): siRNA sense strand
uggcagaaaucuuuaaggu

SEQ ID NO: 805714 - RNA, 19 nt, Homo sapiens
  misc_RNA (1)...(19): siRNA sense strand
gcauagaaagcccaacuuc

SEQ ID NO: 805715 - RNA, 19 nt, Homo sapiens
  misc_RNA (1)...(19): siRNA sense strand
caaggaacuuuaucuuucg

SEQ ID NO: 805716 - RNA, 19 nt, Homo sapiens
  misc_RNA (1)...(19): siRNA sense strand
guguucagcugacauagau

SEQ ID NO: 805717 - RNA, 19 nt, Homo sapiens
  misc_RNA (1)...(19): siRNA sense strand
ugcagaaacugucccuuga

SEQ ID NO: 805718 - RNA, 19 nt, Homo sapiens
  misc_RNA (1)...(19): siRNA sense strand
gucaucuuaucacaucuua

SEQ ID NO: 805719 - RNA, 19 nt, Homo sapiens
  misc_RNA (1)...(19): siRNA sense strand
gaaggacaucauuuauaga

SEQ ID NO: 805720 - RNA, 19 nt, Homo sapiens
  misc_RNA (1)...(19): siRNA sense strand
gcuauaaccacuugaccuu

SEQ ID NO: 805721 - RNA, 19 nt, Homo sapiens
  misc_RNA (1)...(19): siRNA sense strand
ucuaagcuauaaccacuug

SEQ ID NO: 805722 - RNA, 19 nt, Homo sapiens
  misc_RNA (1)...(19): siRNA sense strand
uuauauuccugcacagauu

SEQ ID NO: 805723 - RNA, 19 nt, Homo sapiens
  misc_RNA (1)...(19): siRNA sense strand
aguaugauccucuuuauuc

SEQ ID NO: 805724 - RNA, 19 nt, Homo sapiens
  misc_RNA (1)...(19): siRNA sense strand
ggaauuugacaaucacugu

SEQ ID NO: 805725 - RNA, 19 nt, Homo sapiens
  misc_RNA (1)...(19): siRNA sense strand
gaucaaccucaauaaugaa

SEQ ID NO: 805726 - RNA, 19 nt, Homo sapiens
  misc_RNA (1)...(19): siRNA sense strand
gaacaguugaguacuaugc

SEQ ID NO: 805727 - RNA, 19 nt, Homo sapiens
  misc_RNA (1)...(19): siRNA sense strand
gugcuuagacaaauguuga

SEQ ID NO: 805728 - RNA, 19 nt, Homo sapiens
  misc_RNA (1)...(19): siRNA sense strand
gguccuggcuucauuuuau

SEQ ID NO: 805729 - RNA, 19 nt, Homo sapiens
  misc_RNA (1)...(19): siRNA sense strand
gaaggaugucagucccuaa

SEQ ID NO: 805730 - RNA, 19 nt, Homo sapiens
  misc_RNA (1)...(19): siRNA sense strand
caucuggagcucauuggua

SEQ ID NO: 805731 - RNA, 19 nt, Homo sapiens
  misc_RNA (1)...(19): siRNA sense strand
ugaguacuaugcaguugga

SEQ ID NO: 805732 - RNA, 19 nt, Homo sapiens
  misc_RNA (1)...(19): siRNA sense strand
gaacagggcucuuuagcua

SEQ ID NO: 805733 - RNA, 19 nt, Homo sapiens
  misc_RNA (1)...(19): siRNA sense strand
ggaacagacucaagauuua

SEQ ID NO: 805734 - RNA, 19 nt, Homo sapiens
  misc_RNA (1)...(19): siRNA sense strand
ccacuaagcuucaaucuga

SEQ ID NO: 805735 - RNA, 19 nt, Homo sapiens
  misc_RNA (1)...(19): siRNA sense strand
gagcaagccucuuauguuu

SEQ ID NO: 805736 - RNA, 19 nt, Homo sapiens
  misc_RNA (1)...(19): siRNA sense strand
gauaagagcucaaguugca

SEQ ID NO: 805737 - RNA, 19 nt, Homo sapiens
  misc_RNA (1)...(19): siRNA sense strand
cagcugaacuuucuucuaa

SEQ ID NO: 805738 - RNA, 19 nt, Homo sapiens
  misc_RNA (1)...(19): siRNA sense strand
uaaaugagcaagccucuua

SEQ ID NO: 805739 - RNA, 19 nt, Homo sapiens
  misc_RNA (1)...(19): siRNA sense strand
ggaggaacuugaaagcaua

SEQ ID NO: 805740 - RNA, 19 nt, Homo sapiens
  misc_RNA (1)...(19): siRNA sense strand
agaaacggcuuaugaaaga

SEQ ID NO: 805741 - RNA, 19 nt, Homo sapiens
  misc_RNA (1)...(19): siRNA sense strand
gcaacugcauuauugacua

SEQ ID NO: 805742 - RNA, 19 nt, Homo sapiens
  misc_RNA (1)...(19): siRNA sense strand
gcaagccucuuauguuuua

SEQ ID NO: 805743 - RNA, 19 nt, Homo sapiens
  misc_RNA (1)...(19): siRNA sense strand
ggaccaaguucugcacuaa

SEQ ID NO: 805744 - RNA, 19 nt, Homo sapiens
  misc_RNA (1)...(19): siRNA sense strand
gaacagauggccuuacuuc

SEQ ID NO: 805745 - RNA, 19 nt, Homo sapiens
  misc_RNA (1)...(19): siRNA sense strand
gagaaggacccauuacuga

SEQ ID NO: 805746 - RNA, 19 nt, Homo sapiens
  misc_RNA (1)...(19): siRNA sense strand
ugacguaucuccgguauug

SEQ ID NO: 805747 - RNA, 19 nt, Homo sapiens
  misc_RNA (1)...(19): siRNA sense strand
caaccuagauucugugaca

SEQ ID NO: 805748 - RNA, 19 nt, Homo sapiens
  misc_RNA (1)...(19): siRNA sense strand
gaacagacucaagauuuaa

SEQ ID NO: 805749 - RNA, 19 nt, Homo sapiens
  misc_RNA (1)...(19): siRNA sense strand
guggagauauugaacguaa

SEQ ID NO: 805750 - RNA, 19 nt, Homo sapiens
  misc_RNA (1)...(19): siRNA sense strand
cagcugacauggccacuuu

SEQ ID NO: 805751 - RNA, 19 nt, Homo sapiens
  misc_RNA (1)...(19): siRNA sense strand
gcagaacauugacacaaga

SEQ ID NO: 805752 - RNA, 19 nt, Homo sapiens
  misc_RNA (1)...(19): siRNA sense strand
gaagacaacauuagcucua

SEQ ID NO: 805753 - RNA, 19 nt, Homo sapiens
  misc_RNA (1)...(19): siRNA sense strand
ugaaagagcagaucguaaa

SEQ ID NO: 805754 - RNA, 19 nt, Homo sapiens
  misc_RNA (1)...(19): siRNA sense strand
gcgaagauguucaagcaau

SEQ ID NO: 805755 - RNA, 19 nt, Homo sapiens
  misc_RNA (1)...(19): siRNA sense strand
ucacgauucuucaguugua

SEQ ID NO: 805756 - RNA, 19 nt, Homo sapiens
  misc_RNA (1)...(19): siRNA sense strand
caauugaaaugcauucuca

SEQ ID NO: 805757 - RNA, 19 nt, Homo sapiens
  misc_RNA (1)...(19): siRNA sense strand
caacugacuucugaugaaa

SEQ ID NO: 805758 - RNA, 19 nt, Homo sapiens
  misc_RNA (1)...(19): siRNA sense strand
gagauaagagcucaaguug

SEQ ID NO: 805759 - RNA, 19 nt, Homo sapiens
  misc_RNA (1)...(19): siRNA sense strand
caaaggaacagacucaaga

SEQ ID NO: 805760 - RNA, 19 nt, Homo sapiens
  misc_RNA (1)...(19): siRNA sense strand
ggaacagccagaagaagua

SEQ ID NO: 805761 - RNA, 19 nt, Homo sapiens
  misc_RNA (1)...(19): siRNA sense strand
gcagaugccuucuuaucca

SEQ ID NO: 805762 - RNA, 19 nt, Homo sapiens
  misc_RNA (1)...(19): siRNA sense strand
caagaaacggcuuaugaaa

SEQ ID NO: 805763 - RNA, 19 nt, Homo sapiens
  misc_RNA (1)...(19): siRNA sense strand
aaaguucucuugcguacaa

SEQ ID NO: 805764 - RNA, 19 nt, Homo sapiens
  misc_RNA (1)...(19): siRNA sense strand
ccaacugacuucugaugaa

SEQ ID NO: 805765 - RNA, 19 nt, Homo sapiens
  misc_RNA (1)...(19): siRNA sense strand
caaagugaaugcagaacau

SEQ ID NO: 805766 - RNA, 19 nt, Homo sapiens
  misc_RNA (1)...(19): siRNA sense strand
cagaagaaguacaguuguu

SEQ ID NO: 805767 - RNA, 19 nt, Homo sapiens
  misc_RNA (1)...(19): siRNA sense strand
gugcaggccucuaaagguu

SEQ ID NO: 805768 - RNA, 19 nt, Homo sapiens
  misc_RNA (1)...(19): siRNA sense strand
guucguggauuuauugaug

SEQ ID NO: 805769 - RNA, 19 nt, Homo sapiens
  misc_RNA (1)...(19): siRNA sense strand
gcacauuuggacacacuua

SEQ ID NO: 805770 - RNA, 19 nt, Homo sapiens
  misc_RNA (1)...(19): siRNA sense strand
caacauuagcucuauuuga

SEQ ID NO: 805771 - RNA, 19 nt, Homo sapiens
  misc_RNA (1)...(19): siRNA sense strand
cauggucaauucacuauau

SEQ ID NO: 805772 - RNA, 19 nt, Homo sapiens
  misc_RNA (1)...(19): siRNA sense strand
guaaauuaauggacaaggu

SEQ ID NO: 805773 - RNA, 19 nt, Homo sapiens
  misc_RNA (1)...(19): siRNA sense strand
uggacacacuuauaaauga

SEQ ID NO: 805774 - RNA, 19 nt, Homo sapiens
  misc_RNA (1)...(19): siRNA sense strand
gaacauugacacaagaauc

SEQ ID NO: 805775 - RNA, 19 nt, Homo sapiens
  misc_RNA (1)...(19): siRNA sense strand
ugacuaccauugaagaaau

SEQ ID NO: 805776 - RNA, 19 nt, Homo sapiens
  misc_RNA (1)...(19): siRNA sense strand
acaagaaucaugugacgua

SEQ ID NO: 805777 - RNA, 19 nt, Homo sapiens
  misc_RNA (1)...(19): siRNA sense strand
ccacuuucauggucaauuc

SEQ ID NO: 805778 - RNA, 19 nt, Homo sapiens
  misc_RNA (1)...(19): siRNA sense strand
agccaucaaugaagaauuu

SEQ ID NO: 805779 - RNA, 19 nt, Homo sapiens
  misc_RNA (1)...(19): siRNA sense strand
uguaucagccagcaauuua

SEQ ID NO: 805780 - RNA, 19 nt, Homo sapiens
  misc_RNA (1)...(19): siRNA sense strand
gaauugagcaaguaauagu

SEQ ID NO: 805781 - RNA, 19 nt, Homo sapiens
  misc_RNA (1)...(19): siRNA sense strand
uaccuuagaugaauuugga

SEQ ID NO: 805782 - RNA, 19 nt, Homo sapiens
  misc_RNA (1)...(19): siRNA sense strand
caacgacaaggagauguua

SEQ ID NO: 805783 - RNA, 19 nt, Homo sapiens
  misc_RNA (1)...(19): siRNA sense strand
gacaacauuagcucuauuu

SEQ ID NO: 805784 - RNA, 19 nt, Homo sapiens
  misc_RNA (1)...(19): siRNA sense strand
gaaauuuacguggagauau

SEQ ID NO: 805785 - RNA, 19 nt, Homo sapiens
  misc_RNA (1)...(19): siRNA sense strand
ggacacacuuauaaaugag

SEQ ID NO: 805786 - RNA, 19 nt, Homo sapiens
  misc_RNA (1)...(19): siRNA sense strand
ccuugaagcucucuuaaag

SEQ ID NO: 805787 - RNA, 19 nt, Homo sapiens
  misc_RNA (1)...(19): siRNA sense strand
ccgaugggcucaaagugaa

SEQ ID NO: 805788 - RNA, 19 nt, Homo sapiens
  misc_RNA (1)...(19): siRNA sense strand
ucaagaaacggcuuaugaa

SEQ ID NO: 805789 - RNA, 19 nt, Homo sapiens
  misc_RNA (1)...(19): siRNA sense strand
ucagugguauuguuggaaa

SEQ ID NO: 805790 - RNA, 19 nt, Homo sapiens
  misc_RNA (1)...(19): siRNA sense strand
auacaaagauccagagaac

SEQ ID NO: 805791 - RNA, 19 nt, Homo sapiens
  misc_RNA (1)...(19): siRNA sense strand
ccaacggccucaacaaugg

SEQ ID NO: 805792 - RNA, 19 nt, Homo sapiens
  misc_RNA (1)...(19): siRNA sense strand
aagcgaagauguucaagca

SEQ ID NO: 805793 - RNA, 19 nt, Homo sapiens
  misc_RNA (1)...(19): siRNA sense strand
uaccacagcugaacuuucu

SEQ ID NO: 805794 - RNA, 19 nt, Homo sapiens
  misc_RNA (1)...(19): siRNA sense strand
cagauggccuuacuucaag

SEQ ID NO: 805795 - RNA, 19 nt, Homo sapiens
  misc_RNA (1)...(19): siRNA sense strand
gaagauguucaagcaauga

SEQ ID NO: 805796 - RNA, 19 nt, Homo sapiens
  misc_RNA (1)...(19): siRNA sense strand
cgaagauguucaagcaaug

SEQ ID NO: 805797 - RNA, 19 nt, Homo sapiens
  misc_RNA (1)...(19): siRNA sense strand
acaccuagaccaauugaaa

SEQ ID NO: 805798 - RNA, 19 nt, Homo sapiens
  misc_RNA (1)...(19): siRNA sense strand
cuauaacacuguacagcaa

SEQ ID NO: 805799 - RNA, 19 nt, Homo sapiens
  misc_RNA (1)...(19): siRNA sense strand
guauguaggagauauguug

SEQ ID NO: 805800 - RNA, 19 nt, Homo sapiens
  misc_RNA (1)...(19): siRNA sense strand
guacaguuguucguggauu

SEQ ID NO: 805801 - RNA, 19 nt, Homo sapiens
  misc_RNA (1)...(19): siRNA sense strand
acugaaggcugcaaugguu

SEQ ID NO: 805802 - RNA, 19 nt, Homo sapiens
  misc_RNA (1)...(19): siRNA sense strand
uaaaucagacacucauguu

SEQ ID NO: 805803 - RNA, 19 nt, Homo sapiens
  misc_RNA (1)...(19): siRNA sense strand
gcacuaaaucagacacuca

SEQ ID NO: 805804 - RNA, 19 nt, Homo sapiens
  misc_RNA (1)...(19): siRNA sense strand
ugucuuggauccucuccua

SEQ ID NO: 805805 - RNA, 19 nt, Homo sapiens
  misc_RNA (1)...(19): siRNA sense strand
ugagcaagccucuuauguu

SEQ ID NO: 805806 - RNA, 19 nt, Homo sapiens
  misc_RNA (1)...(19): siRNA sense strand
aguugcagaugccuucuua

SEQ ID NO: 805807 - RNA, 19 nt, Homo sapiens
  misc_RNA (1)...(19): siRNA sense strand
gaaguuguugggcauauca

SEQ ID NO: 805808 - RNA, 19 nt, Homo sapiens
  misc_RNA (1)...(19): siRNA sense strand
agaaucaugugacguaucu

SEQ ID NO: 805809 - RNA, 19 nt, Homo sapiens
  misc_RNA (1)...(19): siRNA sense strand
acaagagaaggacccauua

SEQ ID NO: 805810 - RNA, 19 nt, Homo sapiens
  misc_RNA (1)...(19): siRNA sense strand
aggaacagacucaagauuu

SEQ ID NO: 805811 - RNA, 19 nt, Homo sapiens
  misc_RNA (1)...(19): siRNA sense strand
cugcaaugguucaguuuga

SEQ ID NO: 805812 - RNA, 19 nt, Homo sapiens
  misc_RNA (1)...(19): siRNA sense strand
ggacaacgacaaggagaug

SEQ ID NO: 805813 - RNA, 19 nt, Homo sapiens
  misc_RNA (1)...(19): siRNA sense strand
aacggcagguuuagaaauu

SEQ ID NO: 805814 - RNA, 19 nt, Homo sapiens
  misc_RNA (1)...(19): siRNA sense strand
caagaaucaugugacguau

SEQ ID NO: 805815 - RNA, 19 nt, Homo sapiens
  misc_RNA (1)...(19): siRNA sense strand
caagugcagacgcuucuuu

SEQ ID NO: 805816 - RNA, 19 nt, Homo sapiens
  misc_RNA (1)...(19): siRNA sense strand
ccagacaaccuauugauac

SEQ ID NO: 805817 - RNA, 19 nt, Homo sapiens
  misc_RNA (1)...(19): siRNA sense strand
ggcuugaguuacaucuaua

SEQ ID NO: 805818 - RNA, 19 nt, Homo sapiens
  misc_RNA (1)...(19): siRNA sense strand
caacugcauuauugacuac

SEQ ID NO: 805819 - RNA, 19 nt, Homo sapiens
  misc_RNA (1)...(19): siRNA sense strand
ucgaauugagcaaguaaua

SEQ ID NO: 805820 - RNA, 19 nt, Homo sapiens
  misc_RNA (1)...(19): siRNA sense strand
gccagaagaaguacaguug

SEQ ID NO: 805821 - RNA, 19 nt, Homo sapiens
  misc_RNA (1)...(19): siRNA sense strand
gcaaaggaacagacucaag

SEQ ID NO: 805822 - RNA, 19 nt, Homo sapiens
  misc_RNA (1)...(19): siRNA sense strand
cauuuggacacacuuauaa

SEQ ID NO: 805823 - RNA, 19 nt, Homo sapiens
  misc_RNA (1)...(19): siRNA sense strand
agacaacauuagcucuauu

SEQ ID NO: 805824 - RNA, 19 nt, Homo sapiens
  misc_RNA (1)...(19): siRNA sense strand
gaaagcauaagcgaagaug

SEQ ID NO: 805825 - RNA, 19 nt, Homo sapiens
  misc_RNA (1)...(19): siRNA sense strand
ggucaauucacuauauaug

SEQ ID NO: 805826 - RNA, 19 nt, Homo sapiens
  misc_RNA (1)...(19): siRNA sense strand
gauccucuccuacagaugu

SEQ ID NO: 805827 - RNA, 19 nt, Homo sapiens
  misc_RNA (1)...(19): siRNA sense strand
acagauggccuuacuucaa

SEQ ID NO: 805828 - RNA, 19 nt, Homo sapiens
  misc_RNA (1)...(19): siRNA sense strand
ugaaaugcauucucaugac

SEQ ID NO: 805829 - RNA, 19 nt, Homo sapiens
  misc_RNA (1)...(19): siRNA sense strand
gaauacaaagauccagaga

SEQ ID NO: 805830 - RNA, 19 nt, Homo sapiens
  misc_RNA (1)...(19): siRNA sense strand
uagauucugugacacugaa

SEQ ID NO: 805831 - RNA, 19 nt, Homo sapiens
  misc_RNA (1)...(19): siRNA sense strand
ucagaucgaagcacauuug

SEQ ID NO: 805832 - RNA, 19 nt, Homo sapiens
  misc_RNA (1)...(19): siRNA sense strand
ggaauugguugaaguugaa

SEQ ID NO: 805833 - RNA, 19 nt, Homo sapiens
  misc_RNA (1)...(19): siRNA sense strand
gcucuucccugacuuauag

SEQ ID NO: 805834 - RNA, 19 nt, Homo sapiens
  misc_RNA (1)...(19): siRNA sense strand
gcacagcucuucccugacu

SEQ ID NO: 805835 - RNA, 19 nt, Homo sapiens
  misc_RNA (1)...(19): siRNA sense strand
cggaauugguugaaguuga

SEQ ID NO: 805836 - RNA, 19 nt, Homo sapiens
  misc_RNA (1)...(19): siRNA sense strand
ggaagucggaauugguuga

SEQ ID NO: 805837 - RNA, 19 nt, Homo sapiens
  misc_RNA (1)...(19): siRNA sense strand
gguugaaguugaagaugau

SEQ ID NO: 805838 - RNA, 19 nt, Homo sapiens
  misc_RNA (1)...(19): siRNA sense strand
aguugaagaugauguguau

SEQ ID NO: 805839 - RNA, 19 nt, Homo sapiens
  misc_RNA (1)...(19): siRNA sense strand
ugguugaaguugaagauga

SEQ ID NO: 805840 - RNA, 19 nt, Homo sapiens
  misc_RNA (1)...(19): siRNA sense strand
gcagccagaaugcagagaa

SEQ ID NO: 805841 - RNA, 19 nt, Homo sapiens
  misc_RNA (1)...(19): siRNA sense strand
ccagaaugcagagaagaaa

SEQ ID NO: 805842 - RNA, 19 nt, Homo sapiens
  misc_RNA (1)...(19): siRNA sense strand
gaagucggaauugguugaa

SEQ ID NO: 805843 - RNA, 19 nt, Homo sapiens
  misc_RNA (1)...(19): siRNA sense strand
gccagaaugcagagaagaa

SEQ ID NO: 805844 - RNA, 19 nt, Homo sapiens
  misc_RNA (1)...(19): siRNA sense strand
cagccagaaugcagagaag

SEQ ID NO: 805845 - RNA, 19 nt, Homo sapiens
  misc_RNA (1)...(19): siRNA sense strand
gaaguugaagaugaugugu

SEQ ID NO: 805846 - RNA, 19 nt, Homo sapiens
  misc_RNA (1)...(19): siRNA sense strand
ucccugacuuauaggcuuu

SEQ ID NO: 805847 - RNA, 19 nt, Homo sapiens
  misc_RNA (1)...(19): siRNA sense strand
acagcucuucccugacuua

SEQ ID NO: 805848 - RNA, 19 nt, Homo sapiens
  misc_RNA (1)...(19): siRNA sense strand
gcacuucgccugccucuuu

SEQ ID NO: 805849 - RNA, 19 nt, Homo sapiens
  misc_RNA (1)...(19): siRNA sense strand
ggaagugacugggauagug

SEQ ID NO: 805850 - RNA, 19 nt, Homo sapiens
  misc_RNA (1)...(19): siRNA sense strand
gaagagagugugggcuuua

SEQ ID NO: 805851 - RNA, 19 nt, Homo sapiens
  misc_RNA (1)...(19): siRNA sense strand
cagaaaccauggaagaugu

SEQ ID NO: 805852 - RNA, 19 nt, Homo sapiens
  misc_RNA (1)...(19): siRNA sense strand
aaacucagaugggaucaug

SEQ ID NO: 805853 - RNA, 19 nt, Homo sapiens
  misc_RNA (1)...(19): siRNA sense strand
ggcaaagggugaagagagu

SEQ ID NO: 805854 - RNA, 19 nt, Homo sapiens
  misc_RNA (1)...(19): siRNA sense strand
gaugggaucauguggauuc

SEQ ID NO: 805855 - RNA, 19 nt, Homo sapiens
  misc_RNA (1)...(19): siRNA sense strand
guucugagccuacuuacug

SEQ ID NO: 805856 - RNA, 19 nt, Homo sapiens
  misc_RNA (1)...(19): siRNA sense strand
cagaugggaucauguggau

SEQ ID NO: 805857 - RNA, 19 nt, Homo sapiens
  misc_RNA (1)...(19): siRNA sense strand
ugaagagagugugggcuuu

SEQ ID NO: 805858 - RNA, 19 nt, Homo sapiens
  misc_RNA (1)...(19): siRNA sense strand
gcuguucugagccuacuua

SEQ ID NO: 805859 - RNA, 19 nt, Homo sapiens
  misc_RNA (1)...(19): siRNA sense strand
agugugggcuuuaggagaa

SEQ ID NO: 805860 - RNA, 19 nt, Homo sapiens
  misc_RNA (1)...(19): siRNA sense strand
gaagagugucugcagaucu

SEQ ID NO: 805861 - RNA, 19 nt, Homo sapiens
  misc_RNA (1)...(19): siRNA sense strand
ccagaaaccauggaagaug

SEQ ID NO: 805862 - RNA, 19 nt, Homo sapiens
  misc_RNA (1)...(19): siRNA sense strand
ugacccgccuuacccagaa

SEQ ID NO: 805863 - RNA, 19 nt, Homo sapiens
  misc_RNA (1)...(19): siRNA sense strand
gggaccagccuaucucuag

SEQ ID NO: 805864 - RNA, 19 nt, Homo sapiens
  misc_RNA (1)...(19): siRNA sense strand
gagagugugggcuuuagga

SEQ ID NO: 805865 - RNA, 19 nt, Homo sapiens
  misc_RNA (1)...(19): siRNA sense strand
gggcauugaggguuucuag

SEQ ID NO: 805866 - RNA, 19 nt, Homo sapiens
  misc_RNA (1)...(19): siRNA sense strand
ucaggaagugacugggaua

SEQ ID NO: 805867 - RNA, 19 nt, Homo sapiens
  misc_RNA (1)...(19): siRNA sense strand
gggcagccuuggacacacu

SEQ ID NO: 805868 - RNA, 19 nt, Homo sapiens
  misc_RNA (1)...(19): siRNA sense strand
aagagugucugcagaucuc

SEQ ID NO: 805869 - RNA, 19 nt, Homo sapiens
  misc_RNA (1)...(19): siRNA sense strand
caaagggugaagagagugu

SEQ ID NO: 805870 - RNA, 19 nt, Homo sapiens
  misc_RNA (1)...(19): siRNA sense strand
uacauggccuacuguccuu

SEQ ID NO: 805871 - RNA, 19 nt, Homo sapiens
  misc_RNA (1)...(19): siRNA sense strand
agaagagugucugcagauc

SEQ ID NO: 805872 - RNA, 19 nt, Homo sapiens
  misc_RNA (1)...(19): siRNA sense strand
aaccugacccugcaucuuc

SEQ ID NO: 805873 - RNA, 19 nt, Homo sapiens
  misc_RNA (1)...(19): siRNA sense strand
gccuaucucuagcacucaa

SEQ ID NO: 805874 - RNA, 19 nt, Homo sapiens
  misc_RNA (1)...(19): siRNA sense strand
caaccugacccugcaucuu

SEQ ID NO: 805875 - RNA, 19 nt, Homo sapiens
  misc_RNA (1)...(19): siRNA sense strand
gcugcugugucccaauuug

SEQ ID NO: 805876 - RNA, 19 nt, Homo sapiens
  misc_RNA (1)...(19): siRNA sense strand
gggaggcugugguucuugu

SEQ ID NO: 805877 - RNA, 19 nt, Homo sapiens
  misc_RNA (1)...(19): siRNA sense strand
caagggaggcugugguucu

SEQ ID NO: 805878 - RNA, 19 nt, Homo sapiens
  misc_RNA (1)...(19): siRNA sense strand
cagugcagcugcuauaagc

SEQ ID NO: 805879 - RNA, 19 nt, Homo sapiens
  misc_RNA (1)...(19): siRNA sense strand
gcugcaagcccugcuguuc

SEQ ID NO: 805880 - RNA, 19 nt, Homo sapiens
  misc_RNA (1)...(19): siRNA sense strand
gcugcaagcccugcuguuc

SEQ ID NO: 805881 - RNA, 19 nt, Homo sapiens
  misc_RNA (1)...(19): siRNA sense strand
aagggaggcugugguucuu

SEQ ID NO: 805882 - RNA, 19 nt, Homo sapiens
  misc_RNA (1)...(19): siRNA sense strand
gaagguugaugcuguaaga

SEQ ID NO: 805883 - RNA, 19 nt, Homo sapiens
  misc_RNA (1)...(19): siRNA sense strand
gaaaugaaagcuucugaaa

SEQ ID NO: 805884 - RNA, 19 nt, Homo sapiens
  misc_RNA (1)...(19): siRNA sense strand
gcaguuacaugcauagaga

SEQ ID NO: 805885 - RNA, 19 nt, Homo sapiens
  misc_RNA (1)...(19): siRNA sense strand
gaggagaauuugaagauga

SEQ ID NO: 805886 - RNA, 19 nt, Homo sapiens
  misc_RNA (1)...(19): siRNA sense strand
ggagaagguugaugcugua

SEQ ID NO: 805887 - RNA, 19 nt, Homo sapiens
  misc_RNA (1)...(19): siRNA sense strand
cagcagaaaugguuauuau

SEQ ID NO: 805888 - RNA, 19 nt, Homo sapiens
  misc_RNA (1)...(19): siRNA sense strand
guagugaacuuugacauga

SEQ ID NO: 805889 - RNA, 19 nt, Homo sapiens
  misc_RNA (1)...(19): siRNA sense strand
gguugaugcuguaagauua

SEQ ID NO: 805890 - RNA, 19 nt, Homo sapiens
  misc_RNA (1)...(19): siRNA sense strand
gaggaaagucuuagaguuu

SEQ ID NO: 805891 - RNA, 19 nt, Homo sapiens
  misc_RNA (1)...(19): siRNA sense strand
cgccuuggcuugauaauaa

SEQ ID NO: 805892 - RNA, 19 nt, Homo sapiens
  misc_RNA (1)...(19): siRNA sense strand
ggacugggccuccucauga

SEQ ID NO: 805893 - RNA, 19 nt, Homo sapiens
  misc_RNA (1)...(19): siRNA sense strand
caaugaagguguuugaugu

SEQ ID NO: 805894 - RNA, 19 nt, Homo sapiens
  misc_RNA (1)...(19): siRNA sense strand
gaagguguuugauguagug

SEQ ID NO: 805895 - RNA, 19 nt, Homo sapiens
  misc_RNA (1)...(19): siRNA sense strand
gcgcuggguuggaccuuua

SEQ ID NO: 805896 - RNA, 19 nt, Homo sapiens
  misc_RNA (1)...(19): siRNA sense strand
ugaaggaccuaaacgaguu

SEQ ID NO: 805897 - RNA, 19 nt, Homo sapiens
  misc_RNA (1)...(19): siRNA sense strand
gagcgcaguuacaugcaua

SEQ ID NO: 805898 - RNA, 19 nt, Homo sapiens
  misc_RNA (1)...(19): siRNA sense strand
cuccauacaucaccucuua

SEQ ID NO: 805899 - RNA, 19 nt, Homo sapiens
  misc_RNA (1)...(19): siRNA sense strand
ggaaagucuuagaguuuga

SEQ ID NO: 805900 - RNA, 19 nt, Homo sapiens
  misc_RNA (1)...(19): siRNA sense strand
aaacagauaagcccuauga

SEQ ID NO: 805901 - RNA, 19 nt, Homo sapiens
  misc_RNA (1)...(19): siRNA sense strand
ggagauaaccagccacuuc

SEQ ID NO: 805902 - RNA, 19 nt, Homo sapiens
  misc_RNA (1)...(19): siRNA sense strand
gauaaccagccacuucaua

SEQ ID NO: 805903 - RNA, 19 nt, Homo sapiens
  misc_RNA (1)...(19): siRNA sense strand
aaacagaacucagcgaaag

SEQ ID NO: 805904 - RNA, 19 nt, Homo sapiens
  misc_RNA (1)...(19): siRNA sense strand
gcaaugaagguguuugaug

SEQ ID NO: 805905 - RNA, 19 nt, Homo sapiens
  misc_RNA (1)...(19): siRNA sense strand
aaugugaacugggaauaua

SEQ ID NO: 805906 - RNA, 19 nt, Homo sapiens
  misc_RNA (1)...(19): siRNA sense strand
gaugcaauuucuucaguug

SEQ ID NO: 805907 - RNA, 19 nt, Homo sapiens
  misc_RNA (1)...(19): siRNA sense strand
gaauuuggccgacgaaugg

SEQ ID NO: 805908 - RNA, 19 nt, Homo sapiens
  misc_RNA (1)...(19): siRNA sense strand
uuacugaacugcaacagau

SEQ ID NO: 805909 - RNA, 19 nt, Homo sapiens
  misc_RNA (1)...(19): siRNA sense strand
ugaugaaacuggacacuuc

SEQ ID NO: 805910 - RNA, 19 nt, Homo sapiens
  misc_RNA (1)...(19): siRNA sense strand
gacauucacaccaaacuuu

SEQ ID NO: 805911 - RNA, 19 nt, Homo sapiens
  misc_RNA (1)...(19): siRNA sense strand
gaagaagucauggcagcua

SEQ ID NO: 805912 - RNA, 19 nt, Homo sapiens
  misc_RNA (1)...(19): siRNA sense strand
ggaggagaauuugaagaug

SEQ ID NO: 805913 - RNA, 19 nt, Homo sapiens
  misc_RNA (1)...(19): siRNA sense strand
agaggaaagucuuagaguu

SEQ ID NO: 805914 - RNA, 19 nt, Homo sapiens
  misc_RNA (1)...(19): siRNA sense strand
auuaagggcuuuaugauuc

SEQ ID NO: 805915 - RNA, 19 nt, Homo sapiens
  misc_RNA (1)...(19): siRNA sense strand
ggaaagugguagcgauuuu

SEQ ID NO: 805916 - RNA, 19 nt, Homo sapiens
  misc_RNA (1)...(19): siRNA sense strand
ggaugcaauuucuucaguu

SEQ ID NO: 805917 - RNA, 19 nt, Homo sapiens
  misc_RNA (1)...(19): siRNA sense strand
gaggaucuccaacgucaaa

SEQ ID NO: 805918 - RNA, 19 nt, Homo sapiens
  misc_RNA (1)...(19): siRNA sense strand
uaaaggaauggaaguugua

SEQ ID NO: 805919 - RNA, 19 nt, Homo sapiens
  misc_RNA (1)...(19): siRNA sense strand
ucacuaagcauguuuacug

SEQ ID NO: 805920 - RNA, 19 nt, Homo sapiens
  misc_RNA (1)...(19): siRNA sense strand
cgaaagagagcuggcagua

SEQ ID NO: 805921 - RNA, 19 nt, Homo sapiens
  misc_RNA (1)...(19): siRNA sense strand
gagauguuaucacccaugu

SEQ ID NO: 805922 - RNA, 19 nt, Homo sapiens
  misc_RNA (1)...(19): siRNA sense strand
cuaaaggaauggaaguugu

SEQ ID NO: 805923 - RNA, 19 nt, Homo sapiens
  misc_RNA (1)...(19): siRNA sense strand
gaaucacuaagcauguuua

SEQ ID NO: 805924 - RNA, 19 nt, Homo sapiens
  misc_RNA (1)...(19): siRNA sense strand
uauaugaauuugccaagug

SEQ ID NO: 805925 - RNA, 19 nt, Homo sapiens
  misc_RNA (1)...(19): siRNA sense strand
caucaccucuuacucagau

SEQ ID NO: 805926 - RNA, 19 nt, Homo sapiens
  misc_RNA (1)...(19): siRNA sense strand
gcugggcauuaaaguuaua

SEQ ID NO: 805927 - RNA, 19 nt, Homo sapiens
  misc_RNA (1)...(19): siRNA sense strand
aggcaacacuggccaagaa

SEQ ID NO: 805928 - RNA, 19 nt, Homo sapiens
  misc_RNA (1)...(19): siRNA sense strand
gcuaacgcgggaucaaaua

SEQ ID NO: 805929 - RNA, 19 nt, Homo sapiens
  misc_RNA (1)...(19): siRNA sense strand
ggaguuauugagaguauug

SEQ ID NO: 805930 - RNA, 19 nt, Homo sapiens
  misc_RNA (1)...(19): siRNA sense strand
ggaauuuggccgacgaaug

SEQ ID NO: 805931 - RNA, 19 nt, Homo sapiens
  misc_RNA (1)...(19): siRNA sense strand
gagauaaccagccacuuca

SEQ ID NO: 805932 - RNA, 19 nt, Homo sapiens
  misc_RNA (1)...(19): siRNA sense strand
gggaugcaauuucuucagu

SEQ ID NO: 805933 - RNA, 19 nt, Homo sapiens
  misc_RNA (1)...(19): siRNA sense strand
ggagaacgaugaggagaac

SEQ ID NO: 805934 - RNA, 19 nt, Homo sapiens
  misc_RNA (1)...(19): siRNA sense strand
gagggagcauuguucuguu

SEQ ID NO: 805935 - RNA, 19 nt, Homo sapiens
  misc_RNA (1)...(19): siRNA sense strand
guagucaccugggaguuau

SEQ ID NO: 805936 - RNA, 19 nt, Homo sapiens
  misc_RNA (1)...(19): siRNA sense strand
gauccaacagguacuggua

SEQ ID NO: 805937 - RNA, 19 nt, Homo sapiens
  misc_RNA (1)...(19): siRNA sense strand
guucacagcagaaaugguu

SEQ ID NO: 805938 - RNA, 19 nt, Homo sapiens
  misc_RNA (1)...(19): siRNA sense strand
gggagacauucacaccaaa

SEQ ID NO: 805939 - RNA, 19 nt, Homo sapiens
  misc_RNA (1)...(19): siRNA sense strand
acaauagucuguacaucau

SEQ ID NO: 805940 - RNA, 19 nt, Homo sapiens
  misc_RNA (1)...(19): siRNA sense strand
caacaauagucuguacauc

SEQ ID NO: 805941 - RNA, 19 nt, Homo sapiens
  misc_RNA (1)...(19): siRNA sense strand
ugauggacaugucaaguuc

SEQ ID NO: 805942 - RNA, 19 nt, Homo sapiens
  misc_RNA (1)...(19): siRNA sense strand
ggacgagugacuaaaggaa

SEQ ID NO: 805943 - RNA, 19 nt, Homo sapiens
  misc_RNA (1)...(19): siRNA sense strand
caaacgagaaccagaagau

SEQ ID NO: 805944 - RNA, 19 nt, Homo sapiens
  misc_RNA (1)...(19): siRNA sense strand
caacagaugaggcaacagu

SEQ ID NO: 805945 - RNA, 19 nt, Homo sapiens
  misc_RNA (1)...(19): siRNA sense strand
acaaagcaguagugucuuc

SEQ ID NO: 805946 - RNA, 19 nt, Homo sapiens
  misc_RNA (1)...(19): siRNA sense strand
ugacaaacuccauacauca

SEQ ID NO: 805947 - RNA, 19 nt, Homo sapiens
  misc_RNA (1)...(19): siRNA sense strand
gagcauuguucuguucugu

SEQ ID NO: 805948 - RNA, 19 nt, Homo sapiens
  misc_RNA (1)...(19): siRNA sense strand
gggaucaaauacuaaugga

SEQ ID NO: 805949 - RNA, 19 nt, Homo sapiens
  misc_RNA (1)...(19): siRNA sense strand
gggaggagaauuugaagau

SEQ ID NO: 805950 - RNA, 19 nt, Homo sapiens
  misc_RNA (1)...(19): siRNA sense strand
gcaacuacuauagaaauga

SEQ ID NO: 805951 - RNA, 19 nt, Homo sapiens
  misc_RNA (1)...(19): siRNA sense strand
acagaugaggcaacaguua

SEQ ID NO: 805952 - RNA, 19 nt, Homo sapiens
  misc_RNA (1)...(19): siRNA sense strand
caugagagucuuugaugaa

SEQ ID NO: 805953 - RNA, 19 nt, Homo sapiens
  misc_RNA (1)...(19): siRNA sense strand
uaugauggccgaggagaua

SEQ ID NO: 805954 - RNA, 19 nt, Homo sapiens
  misc_RNA (1)...(19): siRNA sense strand
auaaagcaaugaagguguu

SEQ ID NO: 805955 - RNA, 19 nt, Homo sapiens
  misc_RNA (1)...(19): siRNA sense strand
uuacaaagcaguagugucu

SEQ ID NO: 805956 - RNA, 19 nt, Homo sapiens
  misc_RNA (1)...(19): siRNA sense strand
gcugaaacuuggcuauuuu

SEQ ID NO: 805957 - RNA, 19 nt, Homo sapiens
  misc_RNA (1)...(19): siRNA sense strand
uaaccagccacuucauauu

SEQ ID NO: 805958 - RNA, 19 nt, Homo sapiens
  misc_RNA (1)...(19): siRNA sense strand
aaacgagaaccagaagaua

SEQ ID NO: 805959 - RNA, 19 nt, Homo sapiens
  misc_RNA (1)...(19): siRNA sense strand
caagcugacccaacaauag

SEQ ID NO: 805960 - RNA, 19 nt, Homo sapiens
  misc_RNA (1)...(19): siRNA sense strand
aagcaguagugucuucuga

SEQ ID NO: 805961 - RNA, 19 nt, Homo sapiens
  misc_RNA (1)...(19): siRNA sense strand
gaaagagagcuggcaguag

SEQ ID NO: 805962 - RNA, 19 nt, Homo sapiens
  misc_RNA (1)...(19): siRNA sense strand
uaccagacauggaauuugg

SEQ ID NO: 805963 - RNA, 19 nt, Homo sapiens
  misc_RNA (1)...(19): siRNA sense strand
cacuaagcauguuuacuga

SEQ ID NO: 805964 - RNA, 19 nt, Homo sapiens
  misc_RNA (1)...(19): siRNA sense strand
gcuacuauugguucugaua

SEQ ID NO: 805965 - RNA, 19 nt, Homo sapiens
  misc_RNA (1)...(19): siRNA sense strand
guauugcaguuagcucuga

SEQ ID NO: 805966 - RNA, 19 nt, Homo sapiens
  misc_RNA (1)...(19): siRNA sense strand
uagcuacuauugguucuga

SEQ ID NO: 805967 - RNA, 19 nt, Homo sapiens
  misc_RNA (1)...(19): siRNA sense strand
ggccuccucaugaauauaa

SEQ ID NO: 805968 - RNA, 19 nt, Homo sapiens
  misc_RNA (1)...(19): siRNA sense strand
gacugggccuccucaugaa

SEQ ID NO: 805969 - RNA, 19 nt, Homo sapiens
  misc_RNA (1)...(19): siRNA sense strand
caaagucaaucccaaaaca

SEQ ID NO: 805970 - RNA, 19 nt, Homo sapiens
  misc_RNA (1)...(19): siRNA sense strand
cguagucaccugggaguua

SEQ ID NO: 805971 - RNA, 19 nt, Homo sapiens
  misc_RNA (1)...(19): siRNA sense strand
gaaagucuuagaguuugaa

SEQ ID NO: 805972 - RNA, 19 nt, Homo sapiens
  misc_RNA (1)...(19): siRNA sense strand
ucaagcugacccaacaaua

SEQ ID NO: 805973 - RNA, 19 nt, Homo sapiens
  misc_RNA (1)...(19): siRNA sense strand
cauguuuacugaacugcaa

SEQ ID NO: 805974 - RNA, 19 nt, Homo sapiens
  misc_RNA (1)...(19): siRNA sense strand
ucagauuuguaacuggaaa

SEQ ID NO: 805975 - RNA, 19 nt, Homo sapiens
  misc_RNA (1)...(19): siRNA sense strand
auacaucaccucuuacuca

SEQ ID NO: 805976 - RNA, 19 nt, Homo sapiens
  misc_RNA (1)...(19): siRNA sense strand
aaccagccacuucauauuu

SEQ ID NO: 805977 - RNA, 19 nt, Homo sapiens
  misc_RNA (1)...(19): siRNA sense strand
cgaaaagaguacaggaaaa

SEQ ID NO: 805978 - RNA, 19 nt, Homo sapiens
  misc_RNA (1)...(19): siRNA sense strand
gaacgaugaggagaacgaa

SEQ ID NO: 805979 - RNA, 19 nt, Homo sapiens
  misc_RNA (1)...(19): siRNA sense strand
uuaagggcuuuaugauuca

SEQ ID NO: 805980 - RNA, 19 nt, Homo sapiens
  misc_RNA (1)...(19): siRNA sense strand
guggaaaacuucuguguuc

SEQ ID NO: 805981 - RNA, 19 nt, Homo sapiens
  misc_RNA (1)...(19): siRNA sense strand
uauucaagcugacccaaca

SEQ ID NO: 805982 - RNA, 19 nt, Homo sapiens
  misc_RNA (1)...(19): siRNA sense strand
ggacaaacauuuagacuuc

SEQ ID NO: 805983 - RNA, 19 nt, Homo sapiens
  misc_RNA (1)...(19): siRNA sense strand
gcaauaaaccggcuaaauu

SEQ ID NO: 805984 - RNA, 19 nt, Homo sapiens
  misc_RNA (1)...(19): siRNA sense strand
caauaaaccggcuaaauua

SEQ ID NO: 805985 - RNA, 19 nt, Homo sapiens
  misc_RNA (1)...(19): siRNA sense strand
ggaaugagauugaugacau

SEQ ID NO: 805986 - RNA, 19 nt, Homo sapiens
  misc_RNA (1)...(19): siRNA sense strand
ggacacagccuaugagguu

SEQ ID NO: 805987 - RNA, 19 nt, Homo sapiens
  misc_RNA (1)...(19): siRNA sense strand
caacgagaaugaagugaaa

SEQ ID NO: 805988 - RNA, 19 nt, Homo sapiens
  misc_RNA (1)...(19): siRNA sense strand
ugaccugucugcuaaauuu

SEQ ID NO: 805989 - RNA, 19 nt, Homo sapiens
  misc_RNA (1)...(19): siRNA sense strand
caagagugcuucccagaug

SEQ ID NO: 805990 - RNA, 19 nt, Homo sapiens
  misc_RNA (1)...(19): siRNA sense strand
uaaaccggcuaaauuauug

SEQ ID NO: 805991 - RNA, 19 nt, Homo sapiens
  misc_RNA (1)...(19): siRNA sense strand
uagcagaacuggagaagga

SEQ ID NO: 805992 - RNA, 19 nt, Homo sapiens
  misc_RNA (1)...(19): siRNA sense strand
gaacuucaaugucaagaac

SEQ ID NO: 805993 - RNA, 19 nt, Homo sapiens
  misc_RNA (1)...(19): siRNA sense strand
gcagagaaguuccggaaag

SEQ ID NO: 805994 - RNA, 19 nt, Homo sapiens
  misc_RNA (1)...(19): siRNA sense strand
ccagcuggccugacuauua

SEQ ID NO: 805995 - RNA, 19 nt, Homo sapiens
  misc_RNA (1)...(19): siRNA sense strand
cgaauucuuuggcaucuuu

SEQ ID NO: 805996 - RNA, 19 nt, Homo sapiens
  misc_RNA (1)...(19): siRNA sense strand
gcacaagcaugaaauugag

SEQ ID NO: 805997 - RNA, 19 nt, Homo sapiens
  misc_RNA (1)...(19): siRNA sense strand
uugcagagcugguggauga

SEQ ID NO: 805998 - RNA, 19 nt, Homo sapiens
  misc_RNA (1)...(19): siRNA sense strand
ucaaagagcugucggucau

SEQ ID NO: 805999 - RNA, 19 nt, Homo sapiens
  misc_RNA (1)...(19): siRNA sense strand
gaaaagaaauggcagaucu

SEQ ID NO: 806000 - RNA, 19 nt, Homo sapiens
  misc_RNA (1)...(19): siRNA sense strand
caucaaugcuguccucaau

SEQ ID NO: 806001 - RNA, 19 nt, Homo sapiens
  misc_RNA (1)...(19): siRNA sense strand
gggaugaagugaaucugaa

SEQ ID NO: 806002 - RNA, 19 nt, Homo sapiens
  misc_RNA (1)...(19): siRNA sense strand
ggaaccaagucguggaaga

SEQ ID NO: 806003 - RNA, 19 nt, Homo sapiens
  misc_RNA (1)...(19): siRNA sense strand
caaagacauuggagaagga

SEQ ID NO: 806004 - RNA, 19 nt, Homo sapiens
  misc_RNA (1)...(19): siRNA sense strand
gaaugagauugaugacaug

SEQ ID NO: 806005 - RNA, 19 nt, Homo sapiens
  misc_RNA (1)...(19): siRNA sense strand
gcagccagacgaauucuuu

SEQ ID NO: 806006 - RNA, 19 nt, Homo sapiens
  misc_RNA (1)...(19): siRNA sense strand
guaccgggaugaagugaau

SEQ ID NO: 806007 - RNA, 19 nt, Homo sapiens
  misc_RNA (1)...(19): siRNA sense strand
aaacagccaucauguccuu

SEQ ID NO: 806008 - RNA, 19 nt, Homo sapiens
  misc_RNA (1)...(19): siRNA sense strand
ucaagaacaucgucaacau

SEQ ID NO: 806009 - RNA, 19 nt, Homo sapiens
  misc_RNA (1)...(19): siRNA sense strand
gcaaccagcuggccugacu

SEQ ID NO: 806010 - RNA, 19 nt, Homo sapiens
  misc_RNA (1)...(19): siRNA sense strand
ggagcccagugacaaguuu

SEQ ID NO: 806011 - RNA, 19 nt, Homo sapiens
  misc_RNA (1)...(19): siRNA sense strand
cuucagagcugcaacaucu

SEQ ID NO: 806012 - RNA, 19 nt, Homo sapiens
  misc_RNA (1)...(19): siRNA sense strand
gagaagcauuuuccugaua

SEQ ID NO: 806013 - RNA, 19 nt, Homo sapiens
  misc_RNA (1)...(19): siRNA sense strand
acaucucucugcuccauua

SEQ ID NO: 806014 - RNA, 19 nt, Homo sapiens
  misc_RNA (1)...(19): siRNA sense strand
acaagaagcugaaguacac

SEQ ID NO: 806015 - RNA, 19 nt, Homo sapiens
  misc_RNA (1)...(19): siRNA sense strand
ggcuugaccugucugcuaa

SEQ ID NO: 806016 - RNA, 19 nt, Homo sapiens
  misc_RNA (1)...(19): siRNA sense strand
gcugaccgcuuccucuaug

SEQ ID NO: 806017 - RNA, 19 nt, Homo sapiens
  misc_RNA (1)...(19): siRNA sense strand
cagagaaguuccggaaaga

SEQ ID NO: 806018 - RNA, 19 nt, Homo sapiens
  misc_RNA (1)...(19): siRNA sense strand
caaagucaaccuagcagaa

SEQ ID NO: 806019 - RNA, 19 nt, Homo sapiens
  misc_RNA (1)...(19): siRNA sense strand
caucauguccuucaucaau

SEQ ID NO: 806020 - RNA, 19 nt, Homo sapiens
  misc_RNA (1)...(19): siRNA sense strand
cagagaagagugacauuga

SEQ ID NO: 806021 - RNA, 19 nt, Homo sapiens
  misc_RNA (1)...(19): siRNA sense strand
agacaaagacauuggagaa

SEQ ID NO: 806022 - RNA, 19 nt, Homo sapiens
  misc_RNA (1)...(19): siRNA sense strand
caccuugucuuccucaaug

SEQ ID NO: 806023 - RNA, 19 nt, Homo sapiens
  misc_RNA (1)...(19): siRNA sense strand
gagcaggauugaccacuac

SEQ ID NO: 806024 - RNA, 19 nt, Homo sapiens
  misc_RNA (1)...(19): siRNA sense strand
gagaggauaaucuggaguu

SEQ ID NO: 806025 - RNA, 19 nt, Homo sapiens
  misc_RNA (1)...(19): siRNA sense strand
caucuuugauaccuucuug

SEQ ID NO: 806026 - RNA, 19 nt, Homo sapiens
  misc_RNA (1)...(19): siRNA sense strand
gcugcaacaucuuccagaa

SEQ ID NO: 806027 - RNA, 19 nt, Homo sapiens
  misc_RNA (1)...(19): siRNA sense strand
uuggagaacuucaauguca

SEQ ID NO: 806028 - RNA, 19 nt, Homo sapiens
  misc_RNA (1)...(19): siRNA sense strand
gacaagcuccggcaacaug

SEQ ID NO: 806029 - RNA, 19 nt, Homo sapiens
  misc_RNA (1)...(19): siRNA sense strand
caaccacccucugcaguuc

SEQ ID NO: 806030 - RNA, 19 nt, Homo sapiens
  misc_RNA (1)...(19): siRNA sense strand
ccaaguugaagcuuucuaa

SEQ ID NO: 806031 - RNA, 19 nt, Homo sapiens
  misc_RNA (1)...(19): siRNA sense strand
cauccuggacaaacauuua

SEQ ID NO: 806032 - RNA, 19 nt, Homo sapiens
  misc_RNA (1)...(19): siRNA sense strand
ggaguuccgccuacaucua

SEQ ID NO: 806033 - RNA, 19 nt, Homo sapiens
  misc_RNA (1)...(19): siRNA sense strand
gcugguggaugaauuggau

SEQ ID NO: 806034 - RNA, 19 nt, Homo sapiens
  misc_RNA (1)...(19): siRNA sense strand
ugagcaggauugaccacua

SEQ ID NO: 806035 - RNA, 19 nt, Homo sapiens
  misc_RNA (1)...(19): siRNA sense strand
aaagagcugucggucauug

SEQ ID NO: 806036 - RNA, 19 nt, Homo sapiens
  misc_RNA (1)...(19): siRNA sense strand
ucaacaugcucaucaacga

SEQ ID NO: 806037 - RNA, 19 nt, Homo sapiens
  misc_RNA (1)...(19): siRNA sense strand
cagcuggccugacuauuac

SEQ ID NO: 806038 - RNA, 19 nt, Homo sapiens
  misc_RNA (1)...(19): siRNA sense strand
ggucuucgacaaggacuua

SEQ ID NO: 806039 - RNA, 19 nt, Homo sapiens
  misc_RNA (1)...(19): siRNA sense strand
gggcuugaccugucugcua

SEQ ID NO: 806040 - RNA, 19 nt, Homo sapiens
  misc_RNA (1)...(19): siRNA sense strand
gccaucauguccuucauca

SEQ ID NO: 806041 - RNA, 19 nt, Homo sapiens
  misc_RNA (1)...(19): siRNA sense strand
aaacaucucucugcuccau

SEQ ID NO: 806042 - RNA, 19 nt, Homo sapiens
  misc_RNA (1)...(19): siRNA sense strand
gcaacuucaugaacaaagg

SEQ ID NO: 806043 - RNA, 19 nt, Homo sapiens
  misc_RNA (1)...(19): siRNA sense strand
gagcacaagcaugaaauug

SEQ ID NO: 806044 - RNA, 19 nt, Homo sapiens
  misc_RNA (1)...(19): siRNA sense strand
ucaacugggugaagcugaa

SEQ ID NO: 806045 - RNA, 19 nt, Homo sapiens
  misc_RNA (1)...(19): siRNA sense strand
gaaagaacacauggagcuu

SEQ ID NO: 806046 - RNA, 19 nt, Homo sapiens
  misc_RNA (1)...(19): siRNA sense strand
ggagcuagccaggagguuu

SEQ ID NO: 806047 - RNA, 19 nt, Homo sapiens
  misc_RNA (1)...(19): siRNA sense strand
uggaggugcuggaguauca

SEQ ID NO: 806048 - RNA, 19 nt, Homo sapiens
  misc_RNA (1)...(19): siRNA sense strand
cgguggaggugcuggagua

SEQ ID NO: 806049 - RNA, 19 nt, Homo sapiens
  misc_RNA (1)...(19): siRNA sense strand
gagcucaacauccgcuuug

SEQ ID NO: 806050 - RNA, 19 nt, Homo sapiens
  misc_RNA (1)...(19): siRNA sense strand
ggagcacaagcaugaaauu

SEQ ID NO: 806051 - RNA, 19 nt, Homo sapiens
  misc_RNA (1)...(19): siRNA sense strand
gaggagcacaagcaugaaa

SEQ ID NO: 806052 - RNA, 19 nt, Homo sapiens
  misc_RNA (1)...(19): siRNA sense strand
ucaaguucaucccagagaa

SEQ ID NO: 806053 - RNA, 19 nt, Homo sapiens
  misc_RNA (1)...(19): siRNA sense strand
gggcuccacugaagacauc

SEQ ID NO: 806054 - RNA, 19 nt, Homo sapiens
  misc_RNA (1)...(19): siRNA sense strand
ggaugaagugaaucugaaa

SEQ ID NO: 806055 - RNA, 19 nt, Homo sapiens
  misc_RNA (1)...(19): siRNA sense strand
agaaauggcagaucuacug

SEQ ID NO: 806056 - RNA, 19 nt, Homo sapiens
  misc_RNA (1)...(19): siRNA sense strand
gcaucauccuucuuuccaa

SEQ ID NO: 806057 - RNA, 19 nt, Homo sapiens
  misc_RNA (1)...(19): siRNA sense strand
cagagcugguggaugaauu

SEQ ID NO: 806058 - RNA, 19 nt, Homo sapiens
  misc_RNA (1)...(19): siRNA sense strand
caagaacaucgucaacaug

SEQ ID NO: 806059 - RNA, 19 nt, Homo sapiens
  misc_RNA (1)...(19): siRNA sense strand
ucaaugcuguccucaaugc

SEQ ID NO: 806060 - RNA, 19 nt, Homo sapiens
  misc_RNA (1)...(19): siRNA sense strand
gagcuagccaggagguuug

SEQ ID NO: 806061 - RNA, 19 nt, Homo sapiens
  misc_RNA (1)...(19): siRNA sense strand
uggaggaccagcuaaauga

SEQ ID NO: 806062 - RNA, 19 nt, Homo sapiens
  misc_RNA (1)...(19): siRNA sense strand
uggaggagcacaagcauga

SEQ ID NO: 806063 - RNA, 19 nt, Homo sapiens
  misc_RNA (1)...(19): siRNA sense strand
ggagaaggaagagaugaug

SEQ ID NO: 806064 - RNA, 19 nt, Homo sapiens
  misc_RNA (1)...(19): siRNA sense strand
gagaaugaagugaaacagu

SEQ ID NO: 806065 - RNA, 19 nt, Homo sapiens
  misc_RNA (1)...(19): siRNA sense strand
aguugaagcuuucuaacga

SEQ ID NO: 806066 - RNA, 19 nt, Homo sapiens
  misc_RNA (1)...(19): siRNA sense strand
uggaagccaugcugaagga

SEQ ID NO: 806067 - RNA, 19 nt, Homo sapiens
  misc_RNA (1)...(19): siRNA sense strand
uaaaugaggccagggacaa

SEQ ID NO: 806068 - RNA, 19 nt, Homo sapiens
  misc_RNA (1)...(19): siRNA sense strand
uccauuaccugaucaugau

SEQ ID NO: 806069 - RNA, 19 nt, Homo sapiens
  misc_RNA (1)...(19): siRNA sense strand
gcacagagaacagcaagac

SEQ ID NO: 806070 - RNA, 19 nt, Homo sapiens
  misc_RNA (1)...(19): siRNA sense strand
aauuggaucucacugacaa

SEQ ID NO: 806071 - RNA, 19 nt, Homo sapiens
  misc_RNA (1)...(19): siRNA sense strand
gaggagcgugucccuggua

SEQ ID NO: 806072 - RNA, 19 nt, Homo sapiens
  misc_RNA (1)...(19): siRNA sense strand
cagaucuacugcagcaaga

SEQ ID NO: 806073 - RNA, 19 nt, Homo sapiens
  misc_RNA (1)...(19): siRNA sense strand
gcagugacauccccgaaau

SEQ ID NO: 806074 - RNA, 19 nt, Homo sapiens
  misc_RNA (1)...(19): siRNA sense strand
cuacaucuacgguaugaau

SEQ ID NO: 806075 - RNA, 19 nt, Homo sapiens
  misc_RNA (1)...(19): siRNA sense strand
gagcgggaaugcgagacaa

SEQ ID NO: 806076 - RNA, 19 nt, Homo sapiens
  misc_RNA (1)...(19): siRNA sense strand
ggaggagggaggagaguuc

SEQ ID NO: 806077 - RNA, 19 nt, Homo sapiens
  misc_RNA (1)...(19): siRNA sense strand
gagcagagggaacgugagu

SEQ ID NO: 806078 - RNA, 19 nt, Homo sapiens
  misc_RNA (1)...(19): siRNA sense strand
caagaugcagccagacgaa

SEQ ID NO: 806079 - RNA, 19 nt, Homo sapiens
  misc_RNA (1)...(19): siRNA sense strand
uuacaucgaccgcaucaau

SEQ ID NO: 806080 - RNA, 19 nt, Homo sapiens
  misc_RNA (1)...(19): siRNA sense strand
uugaugacaugcagguauu

SEQ ID NO: 806081 - RNA, 19 nt, Homo sapiens
  misc_RNA (1)...(19): siRNA sense strand
ggaaugcgagacaaagaca

SEQ ID NO: 806082 - RNA, 19 nt, Homo sapiens
  misc_RNA (1)...(19): siRNA sense strand
ggaagaagaucgccucaga

SEQ ID NO: 806083 - RNA, 19 nt, Homo sapiens
  misc_RNA (1)...(19): siRNA sense strand
caaagaggcucaacgugaa

SEQ ID NO: 806084 - RNA, 19 nt, Homo sapiens
  misc_RNA (1)...(19): siRNA sense strand
ggaccuggccugugaauuu

SEQ ID NO: 806085 - RNA, 19 nt, Homo sapiens
  misc_RNA (1)...(19): siRNA sense strand
gcaccuggcugcacaguau

SEQ ID NO: 806086 - RNA, 19 nt, Homo sapiens
  misc_RNA (1)...(19): siRNA sense strand
gaagggaaccugaccauca

SEQ ID NO: 806087 - RNA, 19 nt, Homo sapiens
  misc_RNA (1)...(19): siRNA sense strand
gggaggagcugcaggagau

SEQ ID NO: 806088 - RNA, 19 nt, Homo sapiens
  misc_RNA (1)...(19): siRNA sense strand
ccaagcacauucuggauga

SEQ ID NO: 806089 - RNA, 19 nt, Homo sapiens
  misc_RNA (1)...(19): siRNA sense strand
ggaauagugugggcaguga

SEQ ID NO: 806090 - RNA, 19 nt, Homo sapiens
  misc_RNA (1)...(19): siRNA sense strand
gcagcacccuaggcaguua

SEQ ID NO: 806091 - RNA, 19 nt, Homo sapiens
  misc_RNA (1)...(19): siRNA sense strand
ggacauagugaaucaguuc

SEQ ID NO: 806092 - RNA, 19 nt, Homo sapiens
  misc_RNA (1)...(19): siRNA sense strand
ccaggaugcugauggauuc

SEQ ID NO: 806093 - RNA, 19 nt, Homo sapiens
  misc_RNA (1)...(19): siRNA sense strand
gacgugaacauccggaaua

SEQ ID NO: 806094 - RNA, 19 nt, Homo sapiens
  misc_RNA (1)...(19): siRNA sense strand
gcccuggccuccugauuga

SEQ ID NO: 806095 - RNA, 19 nt, Homo sapiens
  misc_RNA (1)...(19): siRNA sense strand
gaccuggccugugaauuug

SEQ ID NO: 806096 - RNA, 19 nt, Homo sapiens
  misc_RNA (1)...(19): siRNA sense strand
ucaacaagcucgggcauca

SEQ ID NO: 806097 - RNA, 19 nt, Homo sapiens
  misc_RNA (1)...(19): siRNA sense strand
uccgagcgcucaaggauuu

SEQ ID NO: 806098 - RNA, 19 nt, Homo sapiens
  misc_RNA (1)...(19): siRNA sense strand
ccacgaggccgcacuguau

SEQ ID NO: 806099 - RNA, 19 nt, Homo sapiens
  misc_RNA (1)...(19): siRNA sense strand
gaacauccggaauacguau

SEQ ID NO: 806100 - RNA, 19 nt, Homo sapiens
  misc_RNA (1)...(19): siRNA sense strand
agacggcgcuggacauagu

SEQ ID NO: 806101 - RNA, 19 nt, Homo sapiens
  misc_RNA (1)...(19): siRNA sense strand
gcuaugaugugccuaccau

SEQ ID NO: 806102 - RNA, 19 nt, Homo sapiens
  misc_RNA (1)...(19): siRNA sense strand
gauccucgccgucaagaau

SEQ ID NO: 806103 - RNA, 19 nt, Homo sapiens
  misc_RNA (1)...(19): siRNA sense strand
gcacccagcuggcauuuuc

SEQ ID NO: 806104 - RNA, 19 nt, Homo sapiens
  misc_RNA (1)...(19): siRNA sense strand
caagaauggccacagagaa

SEQ ID NO: 806105 - RNA, 19 nt, Homo sapiens
  misc_RNA (1)...(19): siRNA sense strand
ggaaucagacacuguuaag

SEQ ID NO: 806106 - RNA, 19 nt, Homo sapiens
  misc_RNA (1)...(19): siRNA sense strand
gcaggugacaggaauagug

SEQ ID NO: 806107 - RNA, 19 nt, Homo sapiens
  misc_RNA (1)...(19): siRNA sense strand
ccuggcagcugcacugaga

SEQ ID NO: 806108 - RNA, 19 nt, Homo sapiens
  misc_RNA (1)...(19): siRNA sense strand
gaaggacgcgcaggccauu

SEQ ID NO: 806109 - RNA, 19 nt, Homo sapiens
  misc_RNA (1)...(19): siRNA sense strand
gcacugagagccgcagaga

SEQ ID NO: 806110 - RNA, 19 nt, Homo sapiens
  misc_RNA (1)...(19): siRNA sense strand
ggucaaggccacaaagaca

SEQ ID NO: 806111 - RNA, 19 nt, Homo sapiens
  misc_RNA (1)...(19): siRNA sense strand
cgucaagaauggagaugug

SEQ ID NO: 806112 - RNA, 19 nt, Homo sapiens
  misc_RNA (1)...(19): siRNA sense strand
aagggaaccugaccaucaa

SEQ ID NO: 806113 - RNA, 19 nt, Homo sapiens
  misc_RNA (1)...(19): siRNA sense strand
cuccugggcuccacaaaga

SEQ ID NO: 806114 - RNA, 19 nt, Homo sapiens
  misc_RNA (1)...(19): siRNA sense strand
gcagcuagucgguggaaug

SEQ ID NO: 806115 - RNA, 19 nt, Homo sapiens
  misc_RNA (1)...(19): siRNA sense strand
cgaacuaagcccagagcua

SEQ ID NO: 806116 - RNA, 19 nt, Homo sapiens
  misc_RNA (1)...(19): siRNA sense strand
auuaugaggugucagaaau

SEQ ID NO: 806117 - RNA, 19 nt, Homo sapiens
  misc_RNA (1)...(19): siRNA sense strand
ccaagaauggccacagaga

SEQ ID NO: 806118 - RNA, 19 nt, Homo sapiens
  misc_RNA (1)...(19): siRNA sense strand
gcaguuaugcuacccuuac

SEQ ID NO: 806119 - RNA, 19 nt, Homo sapiens
  misc_RNA (1)...(19): siRNA sense strand
ccacaaagaggcucaacgu

SEQ ID NO: 806120 - RNA, 19 nt, Homo sapiens
  misc_RNA (1)...(19): siRNA sense strand
aagaagaucgccucagaga

SEQ ID NO: 806121 - RNA, 19 nt, Homo sapiens
  misc_RNA (1)...(19): siRNA sense strand
gcucugagggcacuaaugg

SEQ ID NO: 806122 - RNA, 19 nt, Homo sapiens
  misc_RNA (1)...(19): siRNA sense strand
caacgugaacuaccaggau

SEQ ID NO: 806123 - RNA, 19 nt, Homo sapiens
  misc_RNA (1)...(19): siRNA sense strand
cuaccaggaugcugaugga

SEQ ID NO: 806124 - RNA, 19 nt, Homo sapiens
  misc_RNA (1)...(19): siRNA sense strand
gaacuaccaggaugcugau

SEQ ID NO: 806125 - RNA, 19 nt, Homo sapiens
  misc_RNA (1)...(19): siRNA sense strand
gaaccugaccaucaaacag

SEQ ID NO: 806126 - RNA, 19 nt, Homo sapiens
  misc_RNA (1)...(19): siRNA sense strand
gcacaguauggacauuaug

SEQ ID NO: 806127 - RNA, 19 nt, Homo sapiens
  misc_RNA (1)...(19): siRNA sense strand
ucgagggacuggagaaugg

SEQ ID NO: 806128 - RNA, 19 nt, Homo sapiens
  misc_RNA (1)...(19): siRNA sense strand
ucaggccacuguugacauc

SEQ ID NO: 806129 - RNA, 19 nt, Homo sapiens
  misc_RNA (1)...(19): siRNA sense strand
ccaagugccgggagagaga

SEQ ID NO: 806130 - RNA, 19 nt, Homo sapiens
  misc_RNA (1)...(19): siRNA sense strand
ggagaaggcccagcuacag

SEQ ID NO: 806131 - RNA, 19 nt, Homo sapiens
  misc_RNA (1)...(19): siRNA sense strand
gcuggagggugaggccaaa

SEQ ID NO: 806132 - RNA, 19 nt, Homo sapiens
  misc_RNA (1)...(19): siRNA sense strand
acccaugccuggucaacaa

SEQ ID NO: 806133 - RNA, 19 nt, Homo sapiens
  misc_RNA (1)...(19): siRNA sense strand
gaaggucaaggccacaaag

SEQ ID NO: 806134 - RNA, 19 nt, Homo sapiens
  misc_RNA (1)...(19): siRNA sense strand
ggaaaucaagcagcuacug

SEQ ID NO: 806135 - RNA, 19 nt, Homo sapiens
  misc_RNA (1)...(19): siRNA sense strand
ucaaggccacaaagacaaa

SEQ ID NO: 806136 - RNA, 19 nt, Homo sapiens
  misc_RNA (1)...(19): siRNA sense strand
cacaguauggacauuauga

SEQ ID NO: 806137 - RNA, 19 nt, Homo sapiens
  misc_RNA (1)...(19): siRNA sense strand
uaagcuuuguucuucacuu

SEQ ID NO: 806138 - RNA, 19 nt, Homo sapiens
  misc_RNA (1)...(19): siRNA sense strand
ggacgugaacauccggaau

SEQ ID NO: 806139 - RNA, 19 nt, Homo sapiens
  misc_RNA (1)...(19): siRNA sense strand
uggcccagcugcuucugaa

SEQ ID NO: 806140 - RNA, 19 nt, Homo sapiens
  misc_RNA (1)...(19): siRNA sense strand
ggaugcugauggauucucu

SEQ ID NO: 806141 - RNA, 19 nt, Homo sapiens
  misc_RNA (1)...(19): siRNA sense strand
cggaaucagacacuguuaa

SEQ ID NO: 806142 - RNA, 19 nt, Homo sapiens
  misc_RNA (1)...(19): siRNA sense strand
gauuucaaccucacggaau

SEQ ID NO: 806143 - RNA, 19 nt, Homo sapiens
  misc_RNA (1)...(19): siRNA sense strand
gcgcaggccauucauaacu

SEQ ID NO: 806144 - RNA, 19 nt, Homo sapiens
  misc_RNA (1)...(19): siRNA sense strand
caagguggcccagcugcuu

SEQ ID NO: 806145 - RNA, 19 nt, Homo sapiens
  misc_RNA (1)...(19): siRNA sense strand
ggaaccugaccaucaaaca

SEQ ID NO: 806146 - RNA, 19 nt, Homo sapiens
  misc_RNA (1)...(19): siRNA sense strand
aagcuuuguucuucacuuc

SEQ ID NO: 806147 - RNA, 19 nt, Homo sapiens
  misc_RNA (1)...(19): siRNA sense strand
gguccgagcgcucaaggau

SEQ ID NO: 806148 - RNA, 19 nt, Homo sapiens
  misc_RNA (1)...(19): siRNA sense strand
acgcgcaggccauucauaa

SEQ ID NO: 806149 - RNA, 19 nt, Homo sapiens
  misc_RNA (1)...(19): siRNA sense strand
gugaacauccggaauacgu

SEQ ID NO: 806150 - RNA, 19 nt, Homo sapiens
  misc_RNA (1)...(19): siRNA sense strand
agaaacugguggcgaaggu

SEQ ID NO: 806151 - RNA, 19 nt, Homo sapiens
  misc_RNA (1)...(19): siRNA sense strand
ugaacauccggaauacgua

SEQ ID NO: 806152 - RNA, 19 nt, Homo sapiens
  misc_RNA (1)...(19): siRNA sense strand
ugacaucaaggacagcaau

SEQ ID NO: 806153 - RNA, 19 nt, Homo sapiens
  misc_RNA (1)...(19): siRNA sense strand
gcucgggcaucagaagaag

SEQ ID NO: 806154 - RNA, 19 nt, Homo sapiens
  misc_RNA (1)...(19): siRNA sense strand
ugaccggugugcagaaacu

SEQ ID NO: 806155 - RNA, 19 nt, Homo sapiens
  misc_RNA (1)...(19): siRNA sense strand
cauuaugaggugucagaaa

SEQ ID NO: 806156 - RNA, 19 nt, Homo sapiens
  misc_RNA (1)...(19): siRNA sense strand
ccaaggguccggagcugau

SEQ ID NO: 806157 - RNA, 19 nt, Homo sapiens
  misc_RNA (1)...(19): siRNA sense strand
ucaucacggugcuagaaca

SEQ ID NO: 806158 - RNA, 19 nt, Homo sapiens
  misc_RNA (1)...(19): siRNA sense strand
cgaucccacugcucucaau

SEQ ID NO: 806159 - RNA, 19 nt, Homo sapiens
  misc_RNA (1)...(19): siRNA sense strand
gaauggccacagagaaguc

SEQ ID NO: 806160 - RNA, 19 nt, Homo sapiens
  misc_RNA (1)...(19): siRNA sense strand
aagaauggccacagagaag

SEQ ID NO: 806161 - RNA, 19 nt, Homo sapiens
  misc_RNA (1)...(19): siRNA sense strand
ugaacagccacuuaugugu

SEQ ID NO: 806162 - RNA, 19 nt, Homo sapiens
  misc_RNA (1)...(19): siRNA sense strand
ucaacaaggccaagaagac

SEQ ID NO: 806163 - RNA, 19 nt, Homo sapiens
  misc_RNA (1)...(19): siRNA sense strand
ggucaacaaggccaagaag

SEQ ID NO: 806164 - RNA, 19 nt, Homo sapiens
  misc_RNA (1)...(19): siRNA sense strand
cccagcaggugacaggaau

SEQ ID NO: 806165 - RNA, 19 nt, Homo sapiens
  misc_RNA (1)...(19): siRNA sense strand
cugcacaguauggacauua

SEQ ID NO: 806166 - RNA, 19 nt, Homo sapiens
  misc_RNA (1)...(19): siRNA sense strand
acugagagccgcagagaag

SEQ ID NO: 806167 - RNA, 19 nt, Homo sapiens
  misc_RNA (1)...(19): siRNA sense strand
cgaaggucaaggccacaaa

SEQ ID NO: 806168 - RNA, 19 nt, Homo sapiens
  misc_RNA (1)...(19): siRNA sense strand
ccucgcagccaguccuuug

SEQ ID NO: 806169 - RNA, 19 nt, Homo sapiens
  misc_RNA (1)...(19): siRNA sense strand
ugugaccggugugcagaaa

SEQ ID NO: 806170 - RNA, 19 nt, Homo sapiens
  misc_RNA (1)...(19): siRNA sense strand
gcuucugaacagccacuua

SEQ ID NO: 806171 - RNA, 19 nt, Homo sapiens
  misc_RNA (1)...(19): siRNA sense strand
ggaaacaacuccacuguaa

SEQ ID NO: 806172 - RNA, 19 nt, Homo sapiens
  misc_RNA (1)...(19): siRNA sense strand
caacuagucuuacuuauug

SEQ ID NO: 806173 - RNA, 19 nt, Homo sapiens
  misc_RNA (1)...(19): siRNA sense strand
ugaauuaucugcugucuuu

SEQ ID NO: 806174 - RNA, 19 nt, Homo sapiens
  misc_RNA (1)...(19): siRNA sense strand
gaagggaacucgagauguu

SEQ ID NO: 806175 - RNA, 19 nt, Homo sapiens
  misc_RNA (1)...(19): siRNA sense strand
gaagaacaacugaauaaga

SEQ ID NO: 806176 - RNA, 19 nt, Homo sapiens
  misc_RNA (1)...(19): siRNA sense strand
ucaccgagcuguagauaau

SEQ ID NO: 806177 - RNA, 19 nt, Homo sapiens
  misc_RNA (1)...(19): siRNA sense strand
cuacagcucugaauuaucu

SEQ ID NO: 806178 - RNA, 19 nt, Homo sapiens
  misc_RNA (1)...(19): siRNA sense strand
caacuccacuguaacuaga

SEQ ID NO: 806179 - RNA, 19 nt, Homo sapiens
  misc_RNA (1)...(19): siRNA sense strand
cuucuucucucuuuacuaa

SEQ ID NO: 806180 - RNA, 19 nt, Homo sapiens
  misc_RNA (1)...(19): siRNA sense strand
ccaaugaaccagaaacaaa

SEQ ID NO: 806181 - RNA, 19 nt, Homo sapiens
  misc_RNA (1)...(19): siRNA sense strand
ccucauacaacuagucuua

SEQ ID NO: 806182 - RNA, 19 nt, Homo sapiens
  misc_RNA (1)...(19): siRNA sense strand
ccaagucuacuaagcauaa

SEQ ID NO: 806183 - RNA, 19 nt, Homo sapiens
  misc_RNA (1)...(19): siRNA sense strand
uaaacugacucuaacaagu

SEQ ID NO: 806184 - RNA, 19 nt, Homo sapiens
  misc_RNA (1)...(19): siRNA sense strand
guauaucguuugugcuuug

SEQ ID NO: 806185 - RNA, 19 nt, Homo sapiens
  misc_RNA (1)...(19): siRNA sense strand
caacaagcacugucccaaa

SEQ ID NO: 806186 - RNA, 19 nt, Homo sapiens
  misc_RNA (1)...(19): siRNA sense strand
ggauuggcaucgugcugua

SEQ ID NO: 806187 - RNA, 19 nt, Homo sapiens
  misc_RNA (1)...(19): siRNA sense strand
guucaucagugucaacaug

SEQ ID NO: 806188 - RNA, 19 nt, Homo sapiens
  misc_RNA (1)...(19): siRNA sense strand
aaagggauggugucacuua

SEQ ID NO: 806189 - RNA, 19 nt, Homo sapiens
  misc_RNA (1)...(19): siRNA sense strand
caaacaauagucagguuaa

SEQ ID NO: 806190 - RNA, 19 nt, Homo sapiens
  misc_RNA (1)...(19): siRNA sense strand
ucaaggaauuauaggacua

SEQ ID NO: 806191 - RNA, 19 nt, Homo sapiens
  misc_RNA (1)...(19): siRNA sense strand
ccaagaaucacaaccaaga

SEQ ID NO: 806192 - RNA, 19 nt, Homo sapiens
  misc_RNA (1)...(19): siRNA sense strand
uaucugcugucuuuaguug

SEQ ID NO: 806193 - RNA, 19 nt, Homo sapiens
  misc_RNA (1)...(19): siRNA sense strand
uggaagaacaacugaauaa

SEQ ID NO: 806194 - RNA, 19 nt, Homo sapiens
  misc_RNA (1)...(19): siRNA sense strand
gcaucgugcuguauguuug

SEQ ID NO: 806195 - RNA, 19 nt, Homo sapiens
  misc_RNA (1)...(19): siRNA sense strand
gcacuuuucuugcuuguug

SEQ ID NO: 806196 - RNA, 19 nt, Homo sapiens
  misc_RNA (1)...(19): siRNA sense strand
cgagcuggauaccauguuu

SEQ ID NO: 806197 - RNA, 19 nt, Homo sapiens
  misc_RNA (1)...(19): siRNA sense strand
gcuauguucuaucuucuuc

SEQ ID NO: 806198 - RNA, 19 nt, Homo sapiens
  misc_RNA (1)...(19): siRNA sense strand
ucaaacaauagucagguua

SEQ ID NO: 806199 - RNA, 19 nt, Homo sapiens
  misc_RNA (1)...(19): siRNA sense strand
gugaaaaucucuuccaguu

SEQ ID NO: 806200 - RNA, 19 nt, Homo sapiens
  misc_RNA (1)...(19): siRNA sense strand
ugaaagggauggugucacu

SEQ ID NO: 806201 - RNA, 19 nt, Homo sapiens
  misc_RNA (1)...(19): siRNA sense strand
guaauuacagucuacacaa

SEQ ID NO: 806202 - RNA, 19 nt, Homo sapiens
  misc_RNA (1)...(19): siRNA sense strand
ggaauggaagaacaacuga

SEQ ID NO: 806203 - RNA, 19 nt, Homo sapiens
  misc_RNA (1)...(19): siRNA sense strand
gaagaugguggagcuagaa

SEQ ID NO: 806204 - RNA, 19 nt, Homo sapiens
  misc_RNA (1)...(19): siRNA sense strand
aaacaaggcguucaucagu

SEQ ID NO: 806205 - RNA, 19 nt, Homo sapiens
  misc_RNA (1)...(19): siRNA sense strand
ccagccaguuguucagaaa

SEQ ID NO: 806206 - RNA, 19 nt, Homo sapiens
  misc_RNA (1)...(19): siRNA sense strand
gaguagcagugauccuaga

SEQ ID NO: 806207 - RNA, 19 nt, Homo sapiens
  misc_RNA (1)...(19): siRNA sense strand
gaaugaaucguggguugaa

SEQ ID NO: 806208 - RNA, 19 nt, Homo sapiens
  misc_RNA (1)...(19): siRNA sense strand
caagcacugucccaaagga

SEQ ID NO: 806209 - RNA, 19 nt, Homo sapiens
  misc_RNA (1)...(19): siRNA sense strand
caaugaaccagaaacaaau

SEQ ID NO: 806210 - RNA, 19 nt, Homo sapiens
  misc_RNA (1)...(19): siRNA sense strand
caagugaugaaucuacauu

SEQ ID NO: 806211 - RNA, 19 nt, Homo sapiens
  misc_RNA (1)...(19): siRNA sense strand
ucuaucuucuucucucuuu

SEQ ID NO: 806212 - RNA, 19 nt, Homo sapiens
  misc_RNA (1)...(19): siRNA sense strand
ucuaacaagugaugaaucu

SEQ ID NO: 806213 - RNA, 19 nt, Homo sapiens
  misc_RNA (1)...(19): siRNA sense strand
gcaggugccuuuuguuuca

SEQ ID NO: 806214 - RNA, 19 nt, Homo sapiens
  misc_RNA (1)...(19): siRNA sense strand
gaguauguguagcuugugu

SEQ ID NO: 806215 - RNA, 19 nt, Homo sapiens
  misc_RNA (1)...(19): siRNA sense strand
gugcuucuguaaugucuau

SEQ ID NO: 806216 - RNA, 19 nt, Homo sapiens
  misc_RNA (1)...(19): siRNA sense strand
gaacucgagauguugguau

SEQ ID NO: 806217 - RNA, 19 nt, Homo sapiens
  misc_RNA (1)...(19): siRNA sense strand
gaaggaacuuuuacaacug

SEQ ID NO: 806218 - RNA, 19 nt, Homo sapiens
  misc_RNA (1)...(19): siRNA sense strand
ggaaugaaucguggguuga

SEQ ID NO: 806219 - RNA, 19 nt, Homo sapiens
  misc_RNA (1)...(19): siRNA sense strand
guacuucaaacaauaguca

SEQ ID NO: 806220 - RNA, 19 nt, Homo sapiens
  misc_RNA (1)...(19): siRNA sense strand
acaaggcguucaucagugu

SEQ ID NO: 806221 - RNA, 19 nt, Homo sapiens
  misc_RNA (1)...(19): siRNA sense strand
gaagaagggaacucgagau

SEQ ID NO: 806222 - RNA, 19 nt, Homo sapiens
  misc_RNA (1)...(19): siRNA sense strand
guugauaccaggaauggaa

SEQ ID NO: 806223 - RNA, 19 nt, Homo sapiens
  misc_RNA (1)...(19): siRNA sense strand
gauggugucacuuacaguu

SEQ ID NO: 806224 - RNA, 19 nt, Homo sapiens
  misc_RNA (1)...(19): siRNA sense strand
aaacugacucuaacaagug

SEQ ID NO: 806225 - RNA, 19 nt, Homo sapiens
  misc_RNA (1)...(19): siRNA sense strand
uaaugucuauacugccaaa

SEQ ID NO: 806226 - RNA, 19 nt, Homo sapiens
  misc_RNA (1)...(19): siRNA sense strand
auguguagcuuguguaaug

SEQ ID NO: 806227 - RNA, 19 nt, Homo sapiens
  misc_RNA (1)...(19): siRNA sense strand
uuuccuggcuucacuuuau

SEQ ID NO: 806228 - RNA, 19 nt, Homo sapiens
  misc_RNA (1)...(19): siRNA sense strand
caaggaauuauaggacuaa

SEQ ID NO: 806229 - RNA, 19 nt, Homo sapiens
  misc_RNA (1)...(19): siRNA sense strand
guggcaugcucaaggaauu

SEQ ID NO: 806230 - RNA, 19 nt, Homo sapiens
  misc_RNA (1)...(19): siRNA sense strand
caacccaagucuacuaagc

SEQ ID NO: 806231 - RNA, 19 nt, Homo sapiens
  misc_RNA (1)...(19): siRNA sense strand
ggugucacuuacaguuauu

SEQ ID NO: 806232 - RNA, 19 nt, Homo sapiens
  misc_RNA (1)...(19): siRNA sense strand
cauccguacuucaaacaau

SEQ ID NO: 806233 - RNA, 19 nt, Homo sapiens
  misc_RNA (1)...(19): siRNA sense strand
uaugaccaaugaaccagaa

SEQ ID NO: 806234 - RNA, 19 nt, Homo sapiens
  misc_RNA (1)...(19): siRNA sense strand
uaacaagugaugaaucuac

SEQ ID NO: 806235 - RNA, 19 nt, Homo sapiens
  misc_RNA (1)...(19): siRNA sense strand
guauguguagcuuguguaa

SEQ ID NO: 806236 - RNA, 19 nt, Homo sapiens
  misc_RNA (1)...(19): siRNA sense strand
ugaugacccuuaccaacug

SEQ ID NO: 806237 - RNA, 19 nt, Homo sapiens
  misc_RNA (1)...(19): siRNA sense strand
guuauuccuucuuucacuu

SEQ ID NO: 806238 - RNA, 19 nt, Homo sapiens
  misc_RNA (1)...(19): siRNA sense strand
gcuaucguccuguucuuug

SEQ ID NO: 806239 - RNA, 19 nt, Homo sapiens
  misc_RNA (1)...(19): siRNA sense strand
ggaagaacaacugaauaag

SEQ ID NO: 806240 - RNA, 19 nt, Homo sapiens
  misc_RNA (1)...(19): siRNA sense strand
ucacuuacaguuauuccuu

SEQ ID NO: 806241 - RNA, 19 nt, Homo sapiens
  misc_RNA (1)...(19): siRNA sense strand
agaagaugguggagcuaga

SEQ ID NO: 806242 - RNA, 19 nt, Homo sapiens
  misc_RNA (1)...(19): siRNA sense strand
caaaggaagggcagucagu

SEQ ID NO: 806243 - RNA, 19 nt, Homo sapiens
  misc_RNA (1)...(19): siRNA sense strand
aaacaacuccacuguaacu

SEQ ID NO: 806244 - RNA, 19 nt, Homo sapiens
  misc_RNA (1)...(19): siRNA sense strand
uggaguauguguagcuugu

SEQ ID NO: 806245 - RNA, 19 nt, Homo sapiens
  misc_RNA (1)...(19): siRNA sense strand
caagaucugguuuguuaca

SEQ ID NO: 806246 - RNA, 19 nt, Homo sapiens
  misc_RNA (1)...(19): siRNA sense strand
cguuggugcuucuguaaug

SEQ ID NO: 806247 - RNA, 19 nt, Homo sapiens
  misc_RNA (1)...(19): siRNA sense strand
uuacaacugugugguuuua

SEQ ID NO: 806248 - RNA, 19 nt, Homo sapiens
  misc_RNA (1)...(19): siRNA sense strand
ugaucaaagugaagaguag

SEQ ID NO: 806249 - RNA, 19 nt, Homo sapiens
  misc_RNA (1)...(19): siRNA sense strand
guugucccuuguaacauuu

SEQ ID NO: 806250 - RNA, 19 nt, Homo sapiens
  misc_RNA (1)...(19): siRNA sense strand
gaauggaagaacaacugaa

SEQ ID NO: 806251 - RNA, 19 nt, Homo sapiens
  misc_RNA (1)...(19): siRNA sense strand
uggcuucacuuuauaucau

SEQ ID NO: 806252 - RNA, 19 nt, Homo sapiens
  misc_RNA (1)...(19): siRNA sense strand
gggauggugucacuuacag

SEQ ID NO: 806253 - RNA, 19 nt, Homo sapiens
  misc_RNA (1)...(19): siRNA sense strand
uaucguuugugcuuugguu

SEQ ID NO: 806254 - RNA, 19 nt, Homo sapiens
  misc_RNA (1)...(19): siRNA sense strand
uaccaggaauggaagaaca

SEQ ID NO: 806255 - RNA, 19 nt, Homo sapiens
  misc_RNA (1)...(19): siRNA sense strand
gaugguggagcuagaagug

SEQ ID NO: 806256 - RNA, 19 nt, Homo sapiens
  misc_RNA (1)...(19): siRNA sense strand
aacaagcacugucccaaag

SEQ ID NO: 806257 - RNA, 19 nt, Homo sapiens
  misc_RNA (1)...(19): siRNA sense strand
gaaccagaaacaaauugca

SEQ ID NO: 806258 - RNA, 19 nt, Homo sapiens
  misc_RNA (1)...(19): siRNA sense strand
gaaaacaaggcguucauca

SEQ ID NO: 806259 - RNA, 19 nt, Homo sapiens
  misc_RNA (1)...(19): siRNA sense strand
gguuggcuauaaagcugua

SEQ ID NO: 806260 - RNA, 19 nt, Homo sapiens
  misc_RNA (1)...(19): siRNA sense strand
uaagauuccuggauuuugu

SEQ ID NO: 806261 - RNA, 19 nt, Homo sapiens
  misc_RNA (1)...(19): siRNA sense strand
auccguacuucaaacaaua

SEQ ID NO: 806262 - RNA, 19 nt, Homo sapiens
  misc_RNA (1)...(19): siRNA sense strand
gaaacaacuccacuguaac

SEQ ID NO: 806263 - RNA, 19 nt, Homo sapiens
  misc_RNA (1)...(19): siRNA sense strand
ggaacucgagauguuggua

SEQ ID NO: 806264 - RNA, 19 nt, Homo sapiens
  misc_RNA (1)...(19): siRNA sense strand
ucuucucucuuuacuaaug

SEQ ID NO: 806265 - RNA, 19 nt, Homo sapiens
  misc_RNA (1)...(19): siRNA sense strand
gugguggcaugcucaagga

SEQ ID NO: 806266 - RNA, 19 nt, Homo sapiens
  misc_RNA (1)...(19): siRNA sense strand
gaccaaugaaccagaaaca

SEQ ID NO: 806267 - RNA, 19 nt, Homo sapiens
  misc_RNA (1)...(19): siRNA sense strand
cuucaguaauuacagucua

SEQ ID NO: 806268 - RNA, 19 nt, Homo sapiens
  misc_RNA (1)...(19): siRNA sense strand
acacucauccagccaguug

SEQ ID NO: 806269 - RNA, 19 nt, Homo sapiens
  misc_RNA (1)...(19): siRNA sense strand
ucauacaacuagucuuacu

SEQ ID NO: 806270 - RNA, 19 nt, Homo sapiens
  misc_RNA (1)...(19): siRNA sense strand
uuucuugcuuguuggagua

SEQ ID NO: 806271 - RNA, 19 nt, Homo sapiens
  misc_RNA (1)...(19): siRNA sense strand
gcaguccggugaagagcua

SEQ ID NO: 806272 - RNA, 19 nt, Homo sapiens
  misc_RNA (1)...(19): siRNA sense strand
guaacgggaucgacuacaa

SEQ ID NO: 806273 - RNA, 19 nt, Homo sapiens
  misc_RNA (1)...(19): siRNA sense strand
cagaacugcucgcggagua

SEQ ID NO: 806274 - RNA, 19 nt, Homo sapiens
  misc_RNA (1)...(19): siRNA sense strand
gaacugcaugaccuucuuu

SEQ ID NO: 806275 - RNA, 19 nt, Homo sapiens
  misc_RNA (1)...(19): siRNA sense strand
ggagaucgaugagcaugca

SEQ ID NO: 806276 - RNA, 19 nt, Homo sapiens
  misc_RNA (1)...(19): siRNA sense strand
cggaguaacugcaagaucu

SEQ ID NO: 806277 - RNA, 19 nt, Homo sapiens
  misc_RNA (1)...(19): siRNA sense strand
acgacuaccugcucaaguu

SEQ ID NO: 806278 - RNA, 19 nt, Homo sapiens
  misc_RNA (1)...(19): siRNA sense strand
gcgcguacgcagagaagaa

SEQ ID NO: 806279 - RNA, 19 nt, Homo sapiens
  misc_RNA (1)...(19): siRNA sense strand
gggauccucuugguguaug

SEQ ID NO: 806280 - RNA, 19 nt, Homo sapiens
  misc_RNA (1)...(19): siRNA sense strand
ugaacgcggucaugaugca

SEQ ID NO: 806281 - RNA, 19 nt, Homo sapiens
  misc_RNA (1)...(19): siRNA sense strand
ccacugcccgucaccauca

SEQ ID NO: 806282 - RNA, 19 nt, Homo sapiens
  misc_RNA (1)...(19): siRNA sense strand
guaacugcaagaucuccua

SEQ ID NO: 806283 - RNA, 19 nt, Homo sapiens
  misc_RNA (1)...(19): siRNA sense strand
gcaccaucuucagguccua

SEQ ID NO: 806284 - RNA, 19 nt, Homo sapiens
  misc_RNA (1)...(19): siRNA sense strand
ggauccucuugguguauga

SEQ ID NO: 806285 - RNA, 19 nt, Homo sapiens
  misc_RNA (1)...(19): siRNA sense strand
agagccaccucaaguccuu

SEQ ID NO: 806286 - RNA, 19 nt, Homo sapiens
  misc_RNA (1)...(19): siRNA sense strand
ggcacggcauggagaagau

SEQ ID NO: 806287 - RNA, 19 nt, Homo sapiens
  misc_RNA (1)...(19): siRNA sense strand
gcaccucaucgacaagcuu

SEQ ID NO: 806288 - RNA, 19 nt, Homo sapiens
  misc_RNA (1)...(19): siRNA sense strand
acaguaacgggaucgacua

SEQ ID NO: 806289 - RNA, 19 nt, Homo sapiens
  misc_RNA (1)...(19): siRNA sense strand
ucaagagccaccucaaguc

SEQ ID NO: 806290 - RNA, 19 nt, Homo sapiens
  misc_RNA (1)...(19): siRNA sense strand
caucaagagccaccucaag

SEQ ID NO: 806291 - RNA, 19 nt, Homo sapiens
  misc_RNA (1)...(19): siRNA sense strand
ggccgguucugcaccaucu

SEQ ID NO: 806292 - RNA, 19 nt, Homo sapiens
  misc_RNA (1)...(19): siRNA sense strand
ggugaagagcuacgacuac

SEQ ID NO: 806293 - RNA, 19 nt, Homo sapiens
  misc_RNA (1)...(19): siRNA sense strand
ggcugcaccuggccuucaa

SEQ ID NO: 806294 - RNA, 19 nt, Homo sapiens
  misc_RNA (1)...(19): siRNA sense strand
ucaacgucaucgaguccuu

SEQ ID NO: 806295 - RNA, 19 nt, Homo sapiens
  misc_RNA (1)...(19): siRNA sense strand
ggaagcggcucaucacuga

SEQ ID NO: 806296 - RNA, 19 nt, Homo sapiens
  misc_RNA (1)...(19): siRNA sense strand
gcaucucuauccccuauga

SEQ ID NO: 806297 - RNA, 19 nt, Homo sapiens
  misc_RNA (1)...(19): siRNA sense strand
gcacugagcucccagaucu

SEQ ID NO: 806298 - RNA, 19 nt, Homo sapiens
  misc_RNA (1)...(19): siRNA sense strand
caacagacgggacaacuug

SEQ ID NO: 806299 - RNA, 19 nt, Homo sapiens
  misc_RNA (1)...(19): siRNA sense strand
ccagcuggaugcccauguu

SEQ ID NO: 806300 - RNA, 19 nt, Homo sapiens
  misc_RNA (1)...(19): siRNA sense strand
cggcugcugucaucgauca

SEQ ID NO: 806301 - RNA, 19 nt, Homo sapiens
  misc_RNA (1)...(19): siRNA sense strand
ugugggaugugcugcaaga

SEQ ID NO: 806302 - RNA, 19 nt, Homo sapiens
  misc_RNA (1)...(19): siRNA sense strand
gaucaaagugugggaugug

SEQ ID NO: 806303 - RNA, 19 nt, Homo sapiens
  misc_RNA (1)...(19): siRNA sense strand
ggaugugcugcaagacgua

SEQ ID NO: 806304 - RNA, 19 nt, Homo sapiens
  misc_RNA (1)...(19): siRNA sense strand
gaggcgagacacccacuuc

SEQ ID NO: 806305 - RNA, 19 nt, Homo sapiens
  misc_RNA (1)...(19): siRNA sense strand
cgaucaaagugugggaugu

SEQ ID NO: 806306 - RNA, 19 nt, Homo sapiens
  misc_RNA (1)...(19): siRNA sense strand
ggaaauaacuacacacuga

SEQ ID NO: 806307 - RNA, 19 nt, Homo sapiens
  misc_RNA (1)...(19): siRNA sense strand
aaacucagauuuacccaaa

SEQ ID NO: 806308 - RNA, 19 nt, Homo sapiens
  misc_RNA (1)...(19): siRNA sense strand
ggaauggagugcucauaau

SEQ ID NO: 806309 - RNA, 19 nt, Homo sapiens
  misc_RNA (1)...(19): siRNA sense strand
aaacaaagcggaaagaaga

SEQ ID NO: 806310 - RNA, 19 nt, Homo sapiens
  misc_RNA (1)...(19): siRNA sense strand
ucacgaagagcauuuauuu

SEQ ID NO: 806311 - RNA, 19 nt, Homo sapiens
  misc_RNA (1)...(19): siRNA sense strand
gcaaucaacucagagaugu

SEQ ID NO: 806312 - RNA, 19 nt, Homo sapiens
  misc_RNA (1)...(19): siRNA sense strand
gaauggagugcucauaauu

SEQ ID NO: 806313 - RNA, 19 nt, Homo sapiens
  misc_RNA (1)...(19): siRNA sense strand
ccaaaucacucaaguccau

SEQ ID NO: 806314 - RNA, 19 nt, Homo sapiens
  misc_RNA (1)...(19): siRNA sense strand
gcucauaauucagcauuug

SEQ ID NO: 806315 - RNA, 19 nt, Homo sapiens
  misc_RNA (1)...(19): siRNA sense strand
gauauuauuuggucaucga

SEQ ID NO: 806316 - RNA, 19 nt, Homo sapiens
  misc_RNA (1)...(19): siRNA sense strand
ccaagaaacucagauuuac

SEQ ID NO: 806317 - RNA, 19 nt, Homo sapiens
  misc_RNA (1)...(19): siRNA sense strand
gcagaggccuuugaacaca

SEQ ID NO: 806318 - RNA, 19 nt, Homo sapiens
  misc_RNA (1)...(19): siRNA sense strand
ugaaacagguccaggaagu

SEQ ID NO: 806319 - RNA, 19 nt, Homo sapiens
  misc_RNA (1)...(19): siRNA sense strand
cuacucuguucauauguua

SEQ ID NO: 806320 - RNA, 19 nt, Homo sapiens
  misc_RNA (1)...(19): siRNA sense strand
ugacaauacugcagcucua

SEQ ID NO: 806321 - RNA, 19 nt, Homo sapiens
  misc_RNA (1)...(19): siRNA sense strand
gaaacaaagcggaaagaag

SEQ ID NO: 806322 - RNA, 19 nt, Homo sapiens
  misc_RNA (1)...(19): siRNA sense strand
uccaagaaacucagauuua

SEQ ID NO: 806323 - RNA, 19 nt, Homo sapiens
  misc_RNA (1)...(19): siRNA sense strand
guccaugccuugaacaguu

SEQ ID NO: 806324 - RNA, 19 nt, Homo sapiens
  misc_RNA (1)...(19): siRNA sense strand
uacugcagcucuaccauuu

SEQ ID NO: 806325 - RNA, 19 nt, Homo sapiens
  misc_RNA (1)...(19): siRNA sense strand
cuaccgagcuuacuacacu

SEQ ID NO: 806326 - RNA, 19 nt, Homo sapiens
  misc_RNA (1)...(19): siRNA sense strand
ggucauuucuuuggagugu

SEQ ID NO: 806327 - RNA, 19 nt, Homo sapiens
  misc_RNA (1)...(19): siRNA sense strand
cagaaggacuaccgagcuu

SEQ ID NO: 806328 - RNA, 19 nt, Homo sapiens
  misc_RNA (1)...(19): siRNA sense strand
ugucugguaugucauggua

SEQ ID NO: 806329 - RNA, 19 nt, Homo sapiens
  misc_RNA (1)...(19): siRNA sense strand
ggauggauaaguucucuau

SEQ ID NO: 806330 - RNA, 19 nt, Homo sapiens
  misc_RNA (1)...(19): siRNA sense strand
ucauuucuuuggaguguuu

SEQ ID NO: 806331 - RNA, 19 nt, Homo sapiens
  misc_RNA (1)...(19): siRNA sense strand
gauauggguagcagucauu

SEQ ID NO: 806332 - RNA, 19 nt, Homo sapiens
  misc_RNA (1)...(19): siRNA sense strand
uaacugugguugcuuucau

SEQ ID NO: 806333 - RNA, 19 nt, Homo sapiens
  misc_RNA (1)...(19): siRNA sense strand
ucugugggauggauaaguu

SEQ ID NO: 806334 - RNA, 19 nt, Homo sapiens
  misc_RNA (1)...(19): siRNA sense strand
gcggaaagaagagucagua

SEQ ID NO: 806335 - RNA, 19 nt, Homo sapiens
  misc_RNA (1)...(19): siRNA sense strand
ccgacuggauccacauuga

SEQ ID NO: 806336 - RNA, 19 nt, Homo sapiens
  misc_RNA (1)...(19): siRNA sense strand
uaauucagcauuugcagaa

SEQ ID NO: 806337 - RNA, 19 nt, Homo sapiens
  misc_RNA (1)...(19): siRNA sense strand
gccuugaccucauugacaa

SEQ ID NO: 806338 - RNA, 19 nt, Homo sapiens
  misc_RNA (1)...(19): siRNA sense strand
gcuuugcaaucaacucaga

SEQ ID NO: 806339 - RNA, 19 nt, Homo sapiens
  misc_RNA (1)...(19): siRNA sense strand
caacacauuuuccucauca

SEQ ID NO: 806340 - RNA, 19 nt, Homo sapiens
  misc_RNA (1)...(19): siRNA sense strand
uugcuggacucgugagaaa

SEQ ID NO: 806341 - RNA, 19 nt, Homo sapiens
  misc_RNA (1)...(19): siRNA sense strand
acaguucccuacuacaugu

SEQ ID NO: 806342 - RNA, 19 nt, Homo sapiens
  misc_RNA (1)...(19): siRNA sense strand
gaucccgacucacgaagag

SEQ ID NO: 806343 - RNA, 19 nt, Homo sapiens
  misc_RNA (1)...(19): siRNA sense strand
caauuuaaucagacaguug

SEQ ID NO: 806344 - RNA, 19 nt, Homo sapiens
  misc_RNA (1)...(19): siRNA sense strand
ucccuacucuguucauaug

SEQ ID NO: 806345 - RNA, 19 nt, Homo sapiens
  misc_RNA (1)...(19): siRNA sense strand
gguccaagaaacucagauu

SEQ ID NO: 806346 - RNA, 19 nt, Homo sapiens
  misc_RNA (1)...(19): siRNA sense strand
ccuacucuguucauauguu

SEQ ID NO: 806347 - RNA, 19 nt, Homo sapiens
  misc_RNA (1)...(19): siRNA sense strand
ggcuugggcuuugcaauca

SEQ ID NO: 806348 - RNA, 19 nt, Homo sapiens
  misc_RNA (1)...(19): siRNA sense strand
gaaggacuaccgagcuuac

SEQ ID NO: 806349 - RNA, 19 nt, Homo sapiens
  misc_RNA (1)...(19): siRNA sense strand
aggaauggagugcucauaa

SEQ ID NO: 806350 - RNA, 19 nt, Homo sapiens
  misc_RNA (1)...(19): siRNA sense strand
guccaagaaacucagauuu

SEQ ID NO: 806351 - RNA, 19 nt, Homo sapiens
  misc_RNA (1)...(19): siRNA sense strand
cgacucacgaagagcauuu

SEQ ID NO: 806352 - RNA, 19 nt, Homo sapiens
  misc_RNA (1)...(19): siRNA sense strand
caucuccagaguauucaua

SEQ ID NO: 806353 - RNA, 19 nt, Homo sapiens
  misc_RNA (1)...(19): siRNA sense strand
gcgcauccugugucuggua

SEQ ID NO: 806354 - RNA, 19 nt, Homo sapiens
  misc_RNA (1)...(19): siRNA sense strand
guauucauagcaacacauu

SEQ ID NO: 806355 - RNA, 19 nt, Homo sapiens
  misc_RNA (1)...(19): siRNA sense strand
ggacuaccgagcuuacuac

SEQ ID NO: 806356 - RNA, 19 nt, Homo sapiens
  misc_RNA (1)...(19): siRNA sense strand
ugaaacaaagcggaaagaa

SEQ ID NO: 806357 - RNA, 19 nt, Homo sapiens
  misc_RNA (1)...(19): siRNA sense strand
caaaucagugucugcaucu

SEQ ID NO: 806358 - RNA, 19 nt, Homo sapiens
  misc_RNA (1)...(19): siRNA sense strand
uggcagaggccuuugaaca

SEQ ID NO: 806359 - RNA, 19 nt, Homo sapiens
  misc_RNA (1)...(19): siRNA sense strand
gaguauucauagcaacaca

SEQ ID NO: 806360 - RNA, 19 nt, Homo sapiens
  misc_RNA (1)...(19): siRNA sense strand
gaaacagguccaggaaguc

SEQ ID NO: 806361 - RNA, 19 nt, Homo sapiens
  misc_RNA (1)...(19): siRNA sense strand
auggagugcucauaauuca

SEQ ID NO: 806362 - RNA, 19 nt, Homo sapiens
  misc_RNA (1)...(19): siRNA sense strand
cauccugugucugguaugu

SEQ ID NO: 806363 - RNA, 19 nt, Homo sapiens
  misc_RNA (1)...(19): siRNA sense strand
cccuaacugugguugcuuu

SEQ ID NO: 806364 - RNA, 19 nt, Homo sapiens
  misc_RNA (1)...(19): siRNA sense strand
ccagaucccgacucacgaa

SEQ ID NO: 806365 - RNA, 19 nt, Homo sapiens
  misc_RNA (1)...(19): siRNA sense strand
gcugugguccgugcccaua

SEQ ID NO: 806366 - RNA, 19 nt, Homo sapiens
  misc_RNA (1)...(19): siRNA sense strand
uuacccaaaucacucaagu

SEQ ID NO: 806367 - RNA, 19 nt, Homo sapiens
  misc_RNA (1)...(19): siRNA sense strand
gcccugagccacacugucu

SEQ ID NO: 806368 - RNA, 19 nt, Homo sapiens
  misc_RNA (1)...(19): siRNA sense strand
cugcaucuccagaguauuc

SEQ ID NO: 806369 - RNA, 19 nt, Homo sapiens
  misc_RNA (1)...(19): siRNA sense strand
gggcuuugcaaucaacuca

SEQ ID NO: 806370 - RNA, 19 nt, Homo sapiens
  misc_RNA (1)...(19): siRNA sense strand
uccagaguauucauagcaa

SEQ ID NO: 806371 - RNA, 19 nt, Homo sapiens
  misc_RNA (1)...(19): siRNA sense strand
gguggcagaggccuuugaa

SEQ ID NO: 806372 - RNA, 19 nt, Homo sapiens
  misc_RNA (1)...(19): siRNA sense strand
gcugguggcagaggccuuu

SEQ ID NO: 806373 - RNA, 19 nt, Homo sapiens
  misc_RNA (1)...(19): siRNA sense strand
agaaggacuaccgagcuua

SEQ ID NO: 806374 - RNA, 19 nt, Homo sapiens
  misc_RNA (1)...(19): siRNA sense strand
ucugugccuugaccucauu

SEQ ID NO: 806375 - RNA, 19 nt, Homo sapiens
  misc_RNA (1)...(19): siRNA sense strand
ggagauauauuauggagaa

SEQ ID NO: 806376 - RNA, 19 nt, Homo sapiens
  misc_RNA (1)...(19): siRNA sense strand
gaccuggagugguuaauua

SEQ ID NO: 806377 - RNA, 19 nt, Homo sapiens
  misc_RNA (1)...(19): siRNA sense strand
aaacagagauccacaacaa

SEQ ID NO: 806378 - RNA, 19 nt, Homo sapiens
  misc_RNA (1)...(19): siRNA sense strand
gagagagaaugacauagua

SEQ ID NO: 806379 - RNA, 19 nt, Homo sapiens
  misc_RNA (1)...(19): siRNA sense strand
ggaagaggaugaggaagua

SEQ ID NO: 806380 - RNA, 19 nt, Homo sapiens
  misc_RNA (1)...(19): siRNA sense strand
gagcaggucuuagaaauga

SEQ ID NO: 806381 - RNA, 19 nt, Homo sapiens
  misc_RNA (1)...(19): siRNA sense strand
uaauagagauggcuuguga

SEQ ID NO: 806382 - RNA, 19 nt, Homo sapiens
  misc_RNA (1)...(19): siRNA sense strand
caacucagaucgaaguaaa

SEQ ID NO: 806383 - RNA, 19 nt, Homo sapiens
  misc_RNA (1)...(19): siRNA sense strand
guaaggagauauauuaugg

SEQ ID NO: 806384 - RNA, 19 nt, Homo sapiens
  misc_RNA (1)...(19): siRNA sense strand
gagaaggaagagaauauua

SEQ ID NO: 806385 - RNA, 19 nt, Homo sapiens
  misc_RNA (1)...(19): siRNA sense strand
aaacaaggauaggacaaua

SEQ ID NO: 806386 - RNA, 19 nt, Homo sapiens
  misc_RNA (1)...(19): siRNA sense strand
gaaagcaagaggaauguuu

SEQ ID NO: 806387 - RNA, 19 nt, Homo sapiens
  misc_RNA (1)...(19): siRNA sense strand
gggaaacugucacaauuau

SEQ ID NO: 806388 - RNA, 19 nt, Homo sapiens
  misc_RNA (1)...(19): siRNA sense strand
gagagcaggucuuagaaau

SEQ ID NO: 806389 - RNA, 19 nt, Homo sapiens
  misc_RNA (1)...(19): siRNA sense strand
gaugugcuccugucacuua

SEQ ID NO: 806390 - RNA, 19 nt, Homo sapiens
  misc_RNA (1)...(19): siRNA sense strand
caaaggaaauugaagacau

SEQ ID NO: 806391 - RNA, 19 nt, Homo sapiens
  misc_RNA (1)...(19): siRNA sense strand
aaacaaugguuaagaagga

SEQ ID NO: 806392 - RNA, 19 nt, Homo sapiens
  misc_RNA (1)...(19): siRNA sense strand
acaacaagcuuuucgauua

SEQ ID NO: 806393 - RNA, 19 nt, Homo sapiens
  misc_RNA (1)...(19): siRNA sense strand
ccaguuaguugauuuggaa

SEQ ID NO: 806394 - RNA, 19 nt, Homo sapiens
  misc_RNA (1)...(19): siRNA sense strand
ggaagagaauauuaaccaa

SEQ ID NO: 806395 - RNA, 19 nt, Homo sapiens
  misc_RNA (1)...(19): siRNA sense strand
gaagagcagaugaaagaaa

SEQ ID NO: 806396 - RNA, 19 nt, Homo sapiens
  misc_RNA (1)...(19): siRNA sense strand
gaaacugucacaauuaugu

SEQ ID NO: 806397 - RNA, 19 nt, Homo sapiens
  misc_RNA (1)...(19): siRNA sense strand
ggacacagucugcacauau

SEQ ID NO: 806398 - RNA, 19 nt, Homo sapiens
  misc_RNA (1)...(19): siRNA sense strand
uaagcguucuaaacaguua

SEQ ID NO: 806399 - RNA, 19 nt, Homo sapiens
  misc_RNA (1)...(19): siRNA sense strand
aagaaccggugaaugauaa

SEQ ID NO: 806400 - RNA, 19 nt, Homo sapiens
  misc_RNA (1)...(19): siRNA sense strand
auacgaagaugacuuugaa

SEQ ID NO: 806401 - RNA, 19 nt, Homo sapiens
  misc_RNA (1)...(19): siRNA sense strand
agagagagauggaaaauuu

SEQ ID NO: 806402 - RNA, 19 nt, Homo sapiens
  misc_RNA (1)...(19): siRNA sense strand
uagaagacacuacuacuuu

SEQ ID NO: 806403 - RNA, 19 nt, Homo sapiens
  misc_RNA (1)...(19): siRNA sense strand
aaagagagagaaugacaua

SEQ ID NO: 806404 - RNA, 19 nt, Homo sapiens
  misc_RNA (1)...(19): siRNA sense strand
ggaaguaaggagauauauu

SEQ ID NO: 806405 - RNA, 19 nt, Homo sapiens
  misc_RNA (1)...(19): siRNA sense strand
caagaaccggugaaugaua

SEQ ID NO: 806406 - RNA, 19 nt, Homo sapiens
  misc_RNA (1)...(19): siRNA sense strand
gacaugaacaguagagaaa

SEQ ID NO: 806407 - RNA, 19 nt, Homo sapiens
  misc_RNA (1)...(19): siRNA sense strand
gagcaaaggaaauugaaga

SEQ ID NO: 806408 - RNA, 19 nt, Homo sapiens
  misc_RNA (1)...(19): siRNA sense strand
gcacgaagagcagaugaaa

SEQ ID NO: 806409 - RNA, 19 nt, Homo sapiens
  misc_RNA (1)...(19): siRNA sense strand
gaggaaguaaggagauaua

SEQ ID NO: 806410 - RNA, 19 nt, Homo sapiens
  misc_RNA (1)...(19): siRNA sense strand
uaagaaagcaagaggaaug

SEQ ID NO: 806411 - RNA, 19 nt, Homo sapiens
  misc_RNA (1)...(19): siRNA sense strand
aauggaagcugugaagaaa

SEQ ID NO: 806412 - RNA, 19 nt, Homo sapiens
  misc_RNA (1)...(19): siRNA sense strand
gcuaagcguucuaaacagu

SEQ ID NO: 806413 - RNA, 19 nt, Homo sapiens
  misc_RNA (1)...(19): siRNA sense strand
gaaagaaagacagacagaa

SEQ ID NO: 806414 - RNA, 19 nt, Homo sapiens
  misc_RNA (1)...(19): siRNA sense strand
ggaggaagaggaugaggaa

SEQ ID NO: 806415 - RNA, 19 nt, Homo sapiens
  misc_RNA (1)...(19): siRNA sense strand
aaaggaaauugaagacaug

SEQ ID NO: 806416 - RNA, 19 nt, Homo sapiens
  misc_RNA (1)...(19): siRNA sense strand
ggaaugggaaaucuaauca

SEQ ID NO: 806417 - RNA, 19 nt, Homo sapiens
  misc_RNA (1)...(19): siRNA sense strand
agagauggcuugugagaag

SEQ ID NO: 806418 - RNA, 19 nt, Homo sapiens
  misc_RNA (1)...(19): siRNA sense strand
uaaguucaaggaccaguua

SEQ ID NO: 806419 - RNA, 19 nt, Homo sapiens
  misc_RNA (1)...(19): siRNA sense strand
gagagaaugacauaguauu

SEQ ID NO: 806420 - RNA, 19 nt, Homo sapiens
  misc_RNA (1)...(19): siRNA sense strand
aaagcaagaggaauguuua

SEQ ID NO: 806421 - RNA, 19 nt, Homo sapiens
  misc_RNA (1)...(19): siRNA sense strand
gcauucugauccugacaaa

SEQ ID NO: 806422 - RNA, 19 nt, Homo sapiens
  misc_RNA (1)...(19): siRNA sense strand
uuacagcaccaccuauaua

SEQ ID NO: 806423 - RNA, 19 nt, Homo sapiens
  misc_RNA (1)...(19): siRNA sense strand
cgacagaaagaacuacaaa

SEQ ID NO: 806424 - RNA, 19 nt, Homo sapiens
  misc_RNA (1)...(19): siRNA sense strand
ccaggaauccaaacuagaa

SEQ ID NO: 806425 - RNA, 19 nt, Homo sapiens
  misc_RNA (1)...(19): siRNA sense strand
uacaagacauugccaguca

SEQ ID NO: 806426 - RNA, 19 nt, Homo sapiens
  misc_RNA (1)...(19): siRNA sense strand
cagaagaacuaagaaagca

SEQ ID NO: 806427 - RNA, 19 nt, Homo sapiens
  misc_RNA (1)...(19): siRNA sense strand
caaacuagaaagccagaaa

SEQ ID NO: 806428 - RNA, 19 nt, Homo sapiens
  misc_RNA (1)...(19): siRNA sense strand
ggauaggacaauacuggua

SEQ ID NO: 806429 - RNA, 19 nt, Homo sapiens
  misc_RNA (1)...(19): siRNA sense strand
gcuaacaagcuucuacaga

SEQ ID NO: 806430 - RNA, 19 nt, Homo sapiens
  misc_RNA (1)...(19): siRNA sense strand
agaauacgaagaugacuuu

SEQ ID NO: 806431 - RNA, 19 nt, Homo sapiens
  misc_RNA (1)...(19): siRNA sense strand
uugggaaacugucacaauu

SEQ ID NO: 806432 - RNA, 19 nt, Homo sapiens
  misc_RNA (1)...(19): siRNA sense strand
gaaggaaacggauggaaaa

SEQ ID NO: 806433 - RNA, 19 nt, Homo sapiens
  misc_RNA (1)...(19): siRNA sense strand
acgaagagcagaugaaaga

SEQ ID NO: 806434 - RNA, 19 nt, Homo sapiens
  misc_RNA (1)...(19): siRNA sense strand
gaauucagcgagcaaagga

SEQ ID NO: 806435 - RNA, 19 nt, Homo sapiens
  misc_RNA (1)...(19): siRNA sense strand
gcaccaagaaagaagauuc

SEQ ID NO: 806436 - RNA, 19 nt, Homo sapiens
  misc_RNA (1)...(19): siRNA sense strand
uggagugguuaauuaauga

SEQ ID NO: 806437 - RNA, 19 nt, Homo sapiens
  misc_RNA (1)...(19): siRNA sense strand
gaagcuaagcguucuaaac

SEQ ID NO: 806438 - RNA, 19 nt, Homo sapiens
  misc_RNA (1)...(19): siRNA sense strand
caacaagcuuuucgauuau

SEQ ID NO: 806439 - RNA, 19 nt, Homo sapiens
  misc_RNA (1)...(19): siRNA sense strand
gaaggaagagaauauuaac

SEQ ID NO: 806440 - RNA, 19 nt, Homo sapiens
  misc_RNA (1)...(19): siRNA sense strand
gacacagucugcacauauc

SEQ ID NO: 806441 - RNA, 19 nt, Homo sapiens
  misc_RNA (1)...(19): siRNA sense strand
gaagacacuacuacuuuua

SEQ ID NO: 806442 - RNA, 19 nt, Homo sapiens
  misc_RNA (1)...(19): siRNA sense strand
uaauggaagcugugaagaa

SEQ ID NO: 806443 - RNA, 19 nt, Homo sapiens
  misc_RNA (1)...(19): siRNA sense strand
gaaauugaagacaugaaca

SEQ ID NO: 806444 - RNA, 19 nt, Homo sapiens
  misc_RNA (1)...(19): siRNA sense strand
uaaagggaaugggaaaucu

SEQ ID NO: 806445 - RNA, 19 nt, Homo sapiens
  misc_RNA (1)...(19): siRNA sense strand
gcugucaacucagaucgaa

SEQ ID NO: 806446 - RNA, 19 nt, Homo sapiens
  misc_RNA (1)...(19): siRNA sense strand
aaaaggaccuggagugguu

SEQ ID NO: 806447 - RNA, 19 nt, Homo sapiens
  misc_RNA (1)...(19): siRNA sense strand
cagcaccaccuauauaugu

SEQ ID NO: 806448 - RNA, 19 nt, Homo sapiens
  misc_RNA (1)...(19): siRNA sense strand
caccagugacuucaacaua

SEQ ID NO: 806449 - RNA, 19 nt, Homo sapiens
  misc_RNA (1)...(19): siRNA sense strand
gugcuccugucacuuacua

SEQ ID NO: 806450 - RNA, 19 nt, Homo sapiens
  misc_RNA (1)...(19): siRNA sense strand
ugggaaacugucacaauua

SEQ ID NO: 806451 - RNA, 19 nt, Homo sapiens
  misc_RNA (1)...(19): siRNA sense strand
uugaagacaugaacaguag

SEQ ID NO: 806452 - RNA, 19 nt, Homo sapiens
  misc_RNA (1)...(19): siRNA sense strand
ggaccuggagugguuaauu

SEQ ID NO: 806453 - RNA, 19 nt, Homo sapiens
  misc_RNA (1)...(19): siRNA sense strand
guuaguugauuuggaaguu

SEQ ID NO: 806454 - RNA, 19 nt, Homo sapiens
  misc_RNA (1)...(19): siRNA sense strand
ugucagaagccaaaccuuu

SEQ ID NO: 806455 - RNA, 19 nt, Homo sapiens
  misc_RNA (1)...(19): siRNA sense strand
aagcuaagcguucuaaaca

SEQ ID NO: 806456 - RNA, 19 nt, Homo sapiens
  misc_RNA (1)...(19): siRNA sense strand
gaugaaagaaagacagaca

SEQ ID NO: 806457 - RNA, 19 nt, Homo sapiens
  misc_RNA (1)...(19): siRNA sense strand
gaacuucugaauuuacaag

SEQ ID NO: 806458 - RNA, 19 nt, Homo sapiens
  misc_RNA (1)...(19): siRNA sense strand
ugacaucauuucuguacca

SEQ ID NO: 806459 - RNA, 19 nt, Homo sapiens
  misc_RNA (1)...(19): siRNA sense strand
ccaccuauauaugucagaa

SEQ ID NO: 806460 - RNA, 19 nt, Homo sapiens
  misc_RNA (1)...(19): siRNA sense strand
agacagaagaacuaagaaa

SEQ ID NO: 806461 - RNA, 19 nt, Homo sapiens
  misc_RNA (1)...(19): siRNA sense strand
gagcacaccaaacggcauu

SEQ ID NO: 806462 - RNA, 19 nt, Homo sapiens
  misc_RNA (1)...(19): siRNA sense strand
gcaaagauucaugcuguca

SEQ ID NO: 806463 - RNA, 19 nt, Homo sapiens
  misc_RNA (1)...(19): siRNA sense strand
ccacucaaccgcaagacuu

SEQ ID NO: 806464 - RNA, 19 nt, Homo sapiens
  misc_RNA (1)...(19): siRNA sense strand
agaaggaaacggauggaaa

SEQ ID NO: 806465 - RNA, 19 nt, Homo sapiens
  misc_RNA (1)...(19): siRNA sense strand
gugagaaggaagagaauau

SEQ ID NO: 806466 - RNA, 19 nt, Homo sapiens
  misc_RNA (1)...(19): siRNA sense strand
gacagaagaacuaagaaag

SEQ ID NO: 806467 - RNA, 19 nt, Homo sapiens
  misc_RNA (1)...(19): siRNA sense strand
aagagcagaugaaagaaag

SEQ ID NO: 806468 - RNA, 19 nt, Homo sapiens
  misc_RNA (1)...(19): siRNA sense strand
gcuuuucgauuauggcuua

SEQ ID NO: 806469 - RNA, 19 nt, Homo sapiens
  misc_RNA (1)...(19): siRNA sense strand
aaagagaaugagacaguaa

SEQ ID NO: 806470 - RNA, 19 nt, Homo sapiens
  misc_RNA (1)...(19): siRNA sense strand
ugaaagaaagacagacaga

SEQ ID NO: 806471 - RNA, 19 nt, Homo sapiens
  misc_RNA (1)...(19): siRNA sense strand
caacaagcugucagagaga

SEQ ID NO: 806472 - RNA, 19 nt, Homo sapiens
  misc_RNA (1)...(19): siRNA sense strand
acagacagaagaacuaaga

SEQ ID NO: 806473 - RNA, 19 nt, Homo sapiens
  misc_RNA (1)...(19): siRNA sense strand
agaaagacagacagaagaa

SEQ ID NO: 806474 - RNA, 19 nt, Homo sapiens
  misc_RNA (1)...(19): siRNA sense strand
aaagaaagacagacagaag

SEQ ID NO: 806475 - RNA, 19 nt, Homo sapiens
  misc_RNA (1)...(19): siRNA sense strand
ccacacaccucaugaaauu

SEQ ID NO: 806476 - RNA, 19 nt, Homo sapiens
  misc_RNA (1)...(19): siRNA sense strand
ccacugauauguaugauaa

SEQ ID NO: 806477 - RNA, 19 nt, Homo sapiens
  misc_RNA (1)...(19): siRNA sense strand
gaagagaacauuuacaaag

SEQ ID NO: 806478 - RNA, 19 nt, Homo sapiens
  misc_RNA (1)...(19): siRNA sense strand
gauaauggcucccucaacu

SEQ ID NO: 806479 - RNA, 19 nt, Homo sapiens
  misc_RNA (1)...(19): siRNA sense strand
cagauuugcucaagaagaa

SEQ ID NO: 806480 - RNA, 19 nt, Homo sapiens
  misc_RNA (1)...(19): siRNA sense strand
ugacguggcugacugcaaa

SEQ ID NO: 806481 - RNA, 19 nt, Homo sapiens
  misc_RNA (1)...(19): siRNA sense strand
ugaaauuccugacagagaa

SEQ ID NO: 806482 - RNA, 19 nt, Homo sapiens
  misc_RNA (1)...(19): siRNA sense strand
agaauaaccugaugagcuu

SEQ ID NO: 806483 - RNA, 19 nt, Homo sapiens
  misc_RNA (1)...(19): siRNA sense strand
gacagcaccuucaaagaug

SEQ ID NO: 806484 - RNA, 19 nt, Homo sapiens
  misc_RNA (1)...(19): siRNA sense strand
caagaagaauaaccugaug

SEQ ID NO: 806485 - RNA, 19 nt, Homo sapiens
  misc_RNA (1)...(19): siRNA sense strand
ucgaugcucuucccagaua

SEQ ID NO: 806486 - RNA, 19 nt, Homo sapiens
  misc_RNA (1)...(19): siRNA sense strand
uugaggagguggccuauaa

SEQ ID NO: 806487 - RNA, 19 nt, Homo sapiens
  misc_RNA (1)...(19): siRNA sense strand
ccaaagccauccacaucaa

SEQ ID NO: 806488 - RNA, 19 nt, Homo sapiens
  misc_RNA (1)...(19): siRNA sense strand
gggcaggaaugaccaagga

SEQ ID NO: 806489 - RNA, 19 nt, Homo sapiens
  misc_RNA (1)...(19): siRNA sense strand
ccaacaaagucaagagugu

SEQ ID NO: 806490 - RNA, 19 nt, Homo sapiens
  misc_RNA (1)...(19): siRNA sense strand
acaacaucauucagcauua

SEQ ID NO: 806491 - RNA, 19 nt, Homo sapiens
  misc_RNA (1)...(19): siRNA sense strand
ccaagcagcgggucauuga

SEQ ID NO: 806492 - RNA, 19 nt, Homo sapiens
  misc_RNA (1)...(19): siRNA sense strand
cgaggaaucuuagucaaca

SEQ ID NO: 806493 - RNA, 19 nt, Homo sapiens
  misc_RNA (1)...(19): siRNA sense strand
gcccuucacugaggaguuu

SEQ ID NO: 806494 - RNA, 19 nt, Homo sapiens
  misc_RNA (1)...(19): siRNA sense strand
gcacugagcgccugguaca

SEQ ID NO: 806495 - RNA, 19 nt, Homo sapiens
  misc_RNA (1)...(19): siRNA sense strand
caacaaaggccaguucuac

SEQ ID NO: 806496 - RNA, 19 nt, Homo sapiens
  misc_RNA (1)...(19): siRNA sense strand
caacauggacaacaacauc

SEQ ID NO: 806497 - RNA, 19 nt, Homo sapiens
  misc_RNA (1)...(19): siRNA sense strand
agagaguucugcuguaugu

SEQ ID NO: 806498 - RNA, 19 nt, Homo sapiens
  misc_RNA (1)...(19): siRNA sense strand
gagaacauuuacaaagucu

SEQ ID NO: 806499 - RNA, 19 nt, Homo sapiens
  misc_RNA (1)...(19): siRNA sense strand
gcaggaaugaccaaggaaa

SEQ ID NO: 806500 - RNA, 19 nt, Homo sapiens
  misc_RNA (1)...(19): siRNA sense strand
ggagguggccuauaaugca

SEQ ID NO: 806501 - RNA, 19 nt, Homo sapiens
  misc_RNA (1)...(19): siRNA sense strand
auaaugcacuguccuuugu

SEQ ID NO: 806502 - RNA, 19 nt, Homo sapiens
  misc_RNA (1)...(19): siRNA sense strand
gaaaugcaagcgaggaauc

SEQ ID NO: 806503 - RNA, 19 nt, Homo sapiens
  misc_RNA (1)...(19): siRNA sense strand
gaacauuuacaaagucuac

SEQ ID NO: 806504 - RNA, 19 nt, Homo sapiens
  misc_RNA (1)...(19): siRNA sense strand
agaggaagaugcgcgauga

SEQ ID NO: 806505 - RNA, 19 nt, Homo sapiens
  misc_RNA (1)...(19): siRNA sense strand
caacaucauucagcauuac

SEQ ID NO: 806506 - RNA, 19 nt, Homo sapiens
  misc_RNA (1)...(19): siRNA sense strand
gauuugcucaagaagaaua

SEQ ID NO: 806507 - RNA, 19 nt, Homo sapiens
  misc_RNA (1)...(19): siRNA sense strand
gcaaugagacgaccuaccu

SEQ ID NO: 806508 - RNA, 19 nt, Homo sapiens
  misc_RNA (1)...(19): siRNA sense strand
gcacagacuuuuccucaca

SEQ ID NO: 806509 - RNA, 19 nt, Homo sapiens
  misc_RNA (1)...(19): siRNA sense strand
guggcugacugcaaagaaa

SEQ ID NO: 806510 - RNA, 19 nt, Homo sapiens
  misc_RNA (1)...(19): siRNA sense strand
agacagcaccuucaaagau

SEQ ID NO: 806511 - RNA, 19 nt, Homo sapiens
  misc_RNA (1)...(19): siRNA sense strand
agacugaggagguguuuga

SEQ ID NO: 806512 - RNA, 19 nt, Homo sapiens
  misc_RNA (1)...(19): siRNA sense strand
ugaggaaugcgaucucuga

SEQ ID NO: 806513 - RNA, 19 nt, Homo sapiens
  misc_RNA (1)...(19): siRNA sense strand
ucaugaaauuccugacaga

SEQ ID NO: 806514 - RNA, 19 nt, Homo sapiens
  misc_RNA (1)...(19): siRNA sense strand
gaaucuuagucaacaugga

SEQ ID NO: 806515 - RNA, 19 nt, Homo sapiens
  misc_RNA (1)...(19): siRNA sense strand
cagcaacaguggcgucaag

SEQ ID NO: 806516 - RNA, 19 nt, Homo sapiens
  misc_RNA (1)...(19): siRNA sense strand
ccaaggagaagcggauauu

SEQ ID NO: 806517 - RNA, 19 nt, Homo sapiens
  misc_RNA (1)...(19): siRNA sense strand
gaggagguggccuauaaug

SEQ ID NO: 806518 - RNA, 19 nt, Homo sapiens
  misc_RNA (1)...(19): siRNA sense strand
guucaucggcguaaacugu

SEQ ID NO: 806519 - RNA, 19 nt, Homo sapiens
  misc_RNA (1)...(19): siRNA sense strand
uguggaacgugaaugaaga

SEQ ID NO: 806520 - RNA, 19 nt, Homo sapiens
  misc_RNA (1)...(19): siRNA sense strand
ggacccagcagcuccaaca

SEQ ID NO: 806521 - RNA, 19 nt, Homo sapiens
  misc_RNA (1)...(19): siRNA sense strand
agagaacauuuacaaaguc

SEQ ID NO: 806522 - RNA, 19 nt, Homo sapiens
  misc_RNA (1)...(19): siRNA sense strand
ggaccucacuccccuugaa

SEQ ID NO: 806523 - RNA, 19 nt, Homo sapiens
  misc_RNA (1)...(19): siRNA sense strand
ccaccacugauauguauga

SEQ ID NO: 806524 - RNA, 19 nt, Homo sapiens
  misc_RNA (1)...(19): siRNA sense strand
guacccagauuugcucaag

SEQ ID NO: 806525 - RNA, 19 nt, Homo sapiens
  misc_RNA (1)...(19): siRNA sense strand
cugaagagaacauuuacaa

SEQ ID NO: 806526 - RNA, 19 nt, Homo sapiens
  misc_RNA (1)...(19): siRNA sense strand
gaaguauggguucccugaa

SEQ ID NO: 806527 - RNA, 19 nt, Homo sapiens
  misc_RNA (1)...(19): siRNA sense strand
gauugacaccuaugacugu

SEQ ID NO: 806528 - RNA, 19 nt, Homo sapiens
  misc_RNA (1)...(19): siRNA sense strand
cccugaaccugcagauuga

SEQ ID NO: 806529 - RNA, 19 nt, Homo sapiens
  misc_RNA (1)...(19): siRNA sense strand
ccagacagcaccuucaaag

SEQ ID NO: 806530 - RNA, 19 nt, Homo sapiens
  misc_RNA (1)...(19): siRNA sense strand
uauaaugcacuguccuuug

SEQ ID NO: 806531 - RNA, 19 nt, Homo sapiens
  misc_RNA (1)...(19): siRNA sense strand
acccagauuugcucaagaa

SEQ ID NO: 806532 - RNA, 19 nt, Homo sapiens
  misc_RNA (1)...(19): siRNA sense strand
caucaagucaggcgaguca

SEQ ID NO: 806533 - RNA, 19 nt, Homo sapiens
  misc_RNA (1)...(19): siRNA sense strand
ucccucaacuccuuguuug

SEQ ID NO: 806534 - RNA, 19 nt, Homo sapiens
  misc_RNA (1)...(19): siRNA sense strand
ucccugaagagaacauuua

SEQ ID NO: 806535 - RNA, 19 nt, Homo sapiens
  misc_RNA (1)...(19): siRNA sense strand
ucaagaagaauaaccugau

SEQ ID NO: 806536 - RNA, 19 nt, Homo sapiens
  misc_RNA (1)...(19): siRNA sense strand
ucaagaguguggugauggu

SEQ ID NO: 806537 - RNA, 19 nt, Homo sapiens
  misc_RNA (1)...(19): siRNA sense strand
aucaagaucuucugugaca

SEQ ID NO: 806538 - RNA, 19 nt, Homo sapiens
  misc_RNA (1)...(19): siRNA sense strand
acccaccacugauauguau

SEQ ID NO: 806539 - RNA, 19 nt, Homo sapiens
  misc_RNA (1)...(19): siRNA sense strand
uugacgcgcucauguugaa

SEQ ID NO: 806540 - RNA, 19 nt, Homo sapiens
  misc_RNA (1)...(19): siRNA sense strand
caaugagaaggucccagua

SEQ ID NO: 806541 - RNA, 19 nt, Homo sapiens
  misc_RNA (1)...(19): siRNA sense strand
ggaaugaccaaggaaagag

SEQ ID NO: 806542 - RNA, 19 nt, Homo sapiens
  misc_RNA (1)...(19): siRNA sense strand
uggccuaccucaacaaagg

SEQ ID NO: 806543 - RNA, 19 nt, Homo sapiens
  misc_RNA (1)...(19): siRNA sense strand
ggacaacaacaucauucag

SEQ ID NO: 806544 - RNA, 19 nt, Homo sapiens
  misc_RNA (1)...(19): siRNA sense strand
ccagauuugcucaagaaga

SEQ ID NO: 806545 - RNA, 19 nt, Homo sapiens
  misc_RNA (1)...(19): siRNA sense strand
caagaucuucugugacaag

SEQ ID NO: 806546 - RNA, 19 nt, Homo sapiens
  misc_RNA (1)...(19): siRNA sense strand
caaggagaagcggauauug

SEQ ID NO: 806547 - RNA, 19 nt, Homo sapiens
  misc_RNA (1)...(19): siRNA sense strand
ucaacaaaggccaguucua

SEQ ID NO: 806548 - RNA, 19 nt, Homo sapiens
  misc_RNA (1)...(19): siRNA sense strand
acagcaccuucaaagauga

SEQ ID NO: 806549 - RNA, 19 nt, Homo sapiens
  misc_RNA (1)...(19): siRNA sense strand
uagucaacauggacaacaa

SEQ ID NO: 806550 - RNA, 19 nt, Homo sapiens
  misc_RNA (1)...(19): siRNA sense strand
ggagacugaggagguguuu

SEQ ID NO: 806551 - RNA, 19 nt, Homo sapiens
  misc_RNA (1)...(19): siRNA sense strand
gaagaggccaagguguuca

SEQ ID NO: 806552 - RNA, 19 nt, Homo sapiens
  misc_RNA (1)...(19): siRNA sense strand
augagaaggucccaguaga

SEQ ID NO: 806553 - RNA, 19 nt, Homo sapiens
  misc_RNA (1)...(19): siRNA sense strand
cuucccagauauccugaaa

SEQ ID NO: 806554 - RNA, 19 nt, Homo sapiens
  misc_RNA (1)...(19): siRNA sense strand
aguauggguucccugaaga

SEQ ID NO: 806555 - RNA, 19 nt, Homo sapiens
  misc_RNA (1)...(19): siRNA sense strand
uagagcagcugcgcuucug

SEQ ID NO: 806556 - RNA, 19 nt, Homo sapiens
  misc_RNA (1)...(19): siRNA sense strand
gaggaaucuuagucaacau

SEQ ID NO: 806557 - RNA, 19 nt, Homo sapiens
  misc_RNA (1)...(19): siRNA sense strand
cagacagcaccuucaaaga

SEQ ID NO: 806558 - RNA, 19 nt, Homo sapiens
  misc_RNA (1)...(19): siRNA sense strand
gcugaggaaugcgaucucu

SEQ ID NO: 806559 - RNA, 19 nt, Homo sapiens
  misc_RNA (1)...(19): siRNA sense strand
ggacuaccccagccucaaa

SEQ ID NO: 806560 - RNA, 19 nt, Homo sapiens
  misc_RNA (1)...(19): siRNA sense strand
aaggagaagcggauauugu

SEQ ID NO: 806561 - RNA, 19 nt, Homo sapiens
  misc_RNA (1)...(19): siRNA sense strand
ucauucagcauuacagcaa

SEQ ID NO: 806562 - RNA, 19 nt, Homo sapiens
  misc_RNA (1)...(19): siRNA sense strand
aacaacaucauucagcauu

SEQ ID NO: 806563 - RNA, 19 nt, Homo sapiens
  misc_RNA (1)...(19): siRNA sense strand
caacaacaucauucagcau

SEQ ID NO: 806564 - RNA, 19 nt, Homo sapiens
  misc_RNA (1)...(19): siRNA sense strand
ugaagaggccaagguguuc

SEQ ID NO: 806565 - RNA, 19 nt, Homo sapiens
  misc_RNA (1)...(19): siRNA sense strand
agaguguggugaugguugu

SEQ ID NO: 806566 - RNA, 19 nt, Homo sapiens
  misc_RNA (1)...(19): siRNA sense strand
ggagcuggacggcaaaauu

SEQ ID NO: 806567 - RNA, 19 nt, Homo sapiens
  misc_RNA (1)...(19): siRNA sense strand
aaguauggguucccugaag

SEQ ID NO: 806568 - RNA, 19 nt, Homo sapiens
  misc_RNA (1)...(19): siRNA sense strand
ccuccaagcaggccaagga

SEQ ID NO: 806569 - RNA, 19 nt, Homo sapiens
  misc_RNA (1)...(19): siRNA sense strand
acaagggagcugagaggaa

SEQ ID NO: 806570 - RNA, 19 nt, Homo sapiens
  misc_RNA (1)...(19): siRNA sense strand
ugaaugaagaggccaaggu

SEQ ID NO: 806571 - RNA, 19 nt, Homo sapiens
  misc_RNA (1)...(19): siRNA sense strand
cauggacaacaacaucauu

SEQ ID NO: 806572 - RNA, 19 nt, Homo sapiens
  misc_RNA (1)...(19): siRNA sense strand
augcaagcgaggaaucuua

SEQ ID NO: 806573 - RNA, 19 nt, Homo sapiens
  misc_RNA (1)...(19): siRNA sense strand
aagaagaauaaccugauga

SEQ ID NO: 806574 - RNA, 19 nt, Homo sapiens
  misc_RNA (1)...(19): siRNA sense strand
guuugacgcgcucauguug

SEQ ID NO: 806575 - RNA, 19 nt, Homo sapiens
  misc_RNA (1)...(19): siRNA sense strand
ccacacaccucaugaaauu

SEQ ID NO: 806576 - RNA, 19 nt, Homo sapiens
  misc_RNA (1)...(19): siRNA sense strand
ccacugauauguaugauaa

SEQ ID NO: 806577 - RNA, 19 nt, Homo sapiens
  misc_RNA (1)...(19): siRNA sense strand
gaagagaacauuuacaaag

SEQ ID NO: 806578 - RNA, 19 nt, Homo sapiens
  misc_RNA (1)...(19): siRNA sense strand
gauaauggcucccucaacu

SEQ ID NO: 806579 - RNA, 19 nt, Homo sapiens
  misc_RNA (1)...(19): siRNA sense strand
cagauuugcucaagaagaa

SEQ ID NO: 806580 - RNA, 19 nt, Homo sapiens
  misc_RNA (1)...(19): siRNA sense strand
ugacguggcugacugcaaa

SEQ ID NO: 806581 - RNA, 19 nt, Homo sapiens
  misc_RNA (1)...(19): siRNA sense strand
ugaaauuccugacagagaa

SEQ ID NO: 806582 - RNA, 19 nt, Homo sapiens
  misc_RNA (1)...(19): siRNA sense strand
agaauaaccugaugagcuu

SEQ ID NO: 806583 - RNA, 19 nt, Homo sapiens
  misc_RNA (1)...(19): siRNA sense strand
gacagcaccuucaaagaug

SEQ ID NO: 806584 - RNA, 19 nt, Homo sapiens
  misc_RNA (1)...(19): siRNA sense strand
caagaagaauaaccugaug

SEQ ID NO: 806585 - RNA, 19 nt, Homo sapiens
  misc_RNA (1)...(19): siRNA sense strand
ucgaugcucuucccagaua

SEQ ID NO: 806586 - RNA, 19 nt, Homo sapiens
  misc_RNA (1)...(19): siRNA sense strand
uugaggagguggccuauaa

SEQ ID NO: 806587 - RNA, 19 nt, Homo sapiens
  misc_RNA (1)...(19): siRNA sense strand
ccaaagccauccacaucaa

SEQ ID NO: 806588 - RNA, 19 nt, Homo sapiens
  misc_RNA (1)...(19): siRNA sense strand
gggcaggaaugaccaagga

SEQ ID NO: 806589 - RNA, 19 nt, Homo sapiens
  misc_RNA (1)...(19): siRNA sense strand
ccaacaaagucaagagugu

SEQ ID NO: 806590 - RNA, 19 nt, Homo sapiens
  misc_RNA (1)...(19): siRNA sense strand
acaacaucauucagcauua

SEQ ID NO: 806591 - RNA, 19 nt, Homo sapiens
  misc_RNA (1)...(19): siRNA sense strand
ccaagcagcgggucauuga

SEQ ID NO: 806592 - RNA, 19 nt, Homo sapiens
  misc_RNA (1)...(19): siRNA sense strand
cgaggaaucuuagucaaca

SEQ ID NO: 806593 - RNA, 19 nt, Homo sapiens
  misc_RNA (1)...(19): siRNA sense strand
gcccuucacugaggaguuu

SEQ ID NO: 806594 - RNA, 19 nt, Homo sapiens
  misc_RNA (1)...(19): siRNA sense strand
gcacugagcgccugguaca

SEQ ID NO: 806595 - RNA, 19 nt, Homo sapiens
  misc_RNA (1)...(19): siRNA sense strand
caacaaaggccaguucuac

SEQ ID NO: 806596 - RNA, 19 nt, Homo sapiens
  misc_RNA (1)...(19): siRNA sense strand
caacauggacaacaacauc

SEQ ID NO: 806597 - RNA, 19 nt, Homo sapiens
  misc_RNA (1)...(19): siRNA sense strand
agagaguucugcuguaugu

SEQ ID NO: 806598 - RNA, 19 nt, Homo sapiens
  misc_RNA (1)...(19): siRNA sense strand
gagaacauuuacaaagucu

SEQ ID NO: 806599 - RNA, 19 nt, Homo sapiens
  misc_RNA (1)...(19): siRNA sense strand
gcaggaaugaccaaggaaa

SEQ ID NO: 806600 - RNA, 19 nt, Homo sapiens
  misc_RNA (1)...(19): siRNA sense strand
ggagguggccuauaaugca

SEQ ID NO: 806601 - RNA, 19 nt, Homo sapiens
  misc_RNA (1)...(19): siRNA sense strand
auaaugcacuguccuuugu

SEQ ID NO: 806602 - RNA, 19 nt, Homo sapiens
  misc_RNA (1)...(19): siRNA sense strand
gaaaugcaagcgaggaauc

SEQ ID NO: 806603 - RNA, 19 nt, Homo sapiens
  misc_RNA (1)...(19): siRNA sense strand
gaacauuuacaaagucuac

SEQ ID NO: 806604 - RNA, 19 nt, Homo sapiens
  misc_RNA (1)...(19): siRNA sense strand
agaggaagaugcgcgauga

SEQ ID NO: 806605 - RNA, 19 nt, Homo sapiens
  misc_RNA (1)...(19): siRNA sense strand
caacaucauucagcauuac

SEQ ID NO: 806606 - RNA, 19 nt, Homo sapiens
  misc_RNA (1)...(19): siRNA sense strand
gauuugcucaagaagaaua

SEQ ID NO: 806607 - RNA, 19 nt, Homo sapiens
  misc_RNA (1)...(19): siRNA sense strand
gcaaugagacgaccuaccu

SEQ ID NO: 806608 - RNA, 19 nt, Homo sapiens
  misc_RNA (1)...(19): siRNA sense strand
gcacagacuuuuccucaca

SEQ ID NO: 806609 - RNA, 19 nt, Homo sapiens
  misc_RNA (1)...(19): siRNA sense strand
guggcugacugcaaagaaa

SEQ ID NO: 806610 - RNA, 19 nt, Homo sapiens
  misc_RNA (1)...(19): siRNA sense strand
agacagcaccuucaaagau

SEQ ID NO: 806611 - RNA, 19 nt, Homo sapiens
  misc_RNA (1)...(19): siRNA sense strand
agacugaggagguguuuga

SEQ ID NO: 806612 - RNA, 19 nt, Homo sapiens
  misc_RNA (1)...(19): siRNA sense strand
ugaggaaugcgaucucuga

SEQ ID NO: 806613 - RNA, 19 nt, Homo sapiens
  misc_RNA (1)...(19): siRNA sense strand
ucaugaaauuccugacaga

SEQ ID NO: 806614 - RNA, 19 nt, Homo sapiens
  misc_RNA (1)...(19): siRNA sense strand
gaaucuuagucaacaugga

SEQ ID NO: 806615 - RNA, 19 nt, Homo sapiens
  misc_RNA (1)...(19): siRNA sense strand
cagcaacaguggcgucaag

SEQ ID NO: 806616 - RNA, 19 nt, Homo sapiens
  misc_RNA (1)...(19): siRNA sense strand
ccaaggagaagcggauauu

SEQ ID NO: 806617 - RNA, 19 nt, Homo sapiens
  misc_RNA (1)...(19): siRNA sense strand
gaggagguggccuauaaug

SEQ ID NO: 806618 - RNA, 19 nt, Homo sapiens
  misc_RNA (1)...(19): siRNA sense strand
guucaucggcguaaacugu

SEQ ID NO: 806619 - RNA, 19 nt, Homo sapiens
  misc_RNA (1)...(19): siRNA sense strand
uguggaacgugaaugaaga

SEQ ID NO: 806620 - RNA, 19 nt, Homo sapiens
  misc_RNA (1)...(19): siRNA sense strand
ggacccagcagcuccaaca

SEQ ID NO: 806621 - RNA, 19 nt, Homo sapiens
  misc_RNA (1)...(19): siRNA sense strand
agagaacauuuacaaaguc

SEQ ID NO: 806622 - RNA, 19 nt, Homo sapiens
  misc_RNA (1)...(19): siRNA sense strand
ggaccucacuccccuugaa

SEQ ID NO: 806623 - RNA, 19 nt, Homo sapiens
  misc_RNA (1)...(19): siRNA sense strand
ccaccacugauauguauga

SEQ ID NO: 806624 - RNA, 19 nt, Homo sapiens
  misc_RNA (1)...(19): siRNA sense strand
guacccagauuugcucaag

SEQ ID NO: 806625 - RNA, 19 nt, Homo sapiens
  misc_RNA (1)...(19): siRNA sense strand
cugaagagaacauuuacaa

SEQ ID NO: 806626 - RNA, 19 nt, Homo sapiens
  misc_RNA (1)...(19): siRNA sense strand
gaaguauggguucccugaa

SEQ ID NO: 806627 - RNA, 19 nt, Homo sapiens
  misc_RNA (1)...(19): siRNA sense strand
gauugacaccuaugacugu

SEQ ID NO: 806628 - RNA, 19 nt, Homo sapiens
  misc_RNA (1)...(19): siRNA sense strand
cccugaaccugcagauuga

SEQ ID NO: 806629 - RNA, 19 nt, Homo sapiens
  misc_RNA (1)...(19): siRNA sense strand
ccagacagcaccuucaaag

SEQ ID NO: 806630 - RNA, 19 nt, Homo sapiens
  misc_RNA (1)...(19): siRNA sense strand
uauaaugcacuguccuuug

SEQ ID NO: 806631 - RNA, 19 nt, Homo sapiens
  misc_RNA (1)...(19): siRNA sense strand
acccagauuugcucaagaa

SEQ ID NO: 806632 - RNA, 19 nt, Homo sapiens
  misc_RNA (1)...(19): siRNA sense strand
caucaagucaggcgaguca

SEQ ID NO: 806633 - RNA, 19 nt, Homo sapiens
  misc_RNA (1)...(19): siRNA sense strand
ucccucaacuccuuguuug

SEQ ID NO: 806634 - RNA, 19 nt, Homo sapiens
  misc_RNA (1)...(19): siRNA sense strand
ucccugaagagaacauuua

SEQ ID NO: 806635 - RNA, 19 nt, Homo sapiens
  misc_RNA (1)...(19): siRNA sense strand
ucaagaagaauaaccugau

SEQ ID NO: 806636 - RNA, 19 nt, Homo sapiens
  misc_RNA (1)...(19): siRNA sense strand
ucaagaguguggugauggu

SEQ ID NO: 806637 - RNA, 19 nt, Homo sapiens
  misc_RNA (1)...(19): siRNA sense strand
aucaagaucuucugugaca

SEQ ID NO: 806638 - RNA, 19 nt, Homo sapiens
  misc_RNA (1)...(19): siRNA sense strand
acccaccacugauauguau

SEQ ID NO: 806639 - RNA, 19 nt, Homo sapiens
  misc_RNA (1)...(19): siRNA sense strand
uugacgcgcucauguugaa

SEQ ID NO: 806640 - RNA, 19 nt, Homo sapiens
  misc_RNA (1)...(19): siRNA sense strand
caaugagaaggucccagua

SEQ ID NO: 806641 - RNA, 19 nt, Homo sapiens
  misc_RNA (1)...(19): siRNA sense strand
ggaaugaccaaggaaagag

SEQ ID NO: 806642 - RNA, 19 nt, Homo sapiens
  misc_RNA (1)...(19): siRNA sense strand
uggccuaccucaacaaagg

SEQ ID NO: 806643 - RNA, 19 nt, Homo sapiens
  misc_RNA (1)...(19): siRNA sense strand
ggacaacaacaucauucag

SEQ ID NO: 806644 - RNA, 19 nt, Homo sapiens
  misc_RNA (1)...(19): siRNA sense strand
ccagauuugcucaagaaga

SEQ ID NO: 806645 - RNA, 19 nt, Homo sapiens
  misc_RNA (1)...(19): siRNA sense strand
caagaucuucugugacaag

SEQ ID NO: 806646 - RNA, 19 nt, Homo sapiens
  misc_RNA (1)...(19): siRNA sense strand
caaggagaagcggauauug

SEQ ID NO: 806647 - RNA, 19 nt, Homo sapiens
  misc_RNA (1)...(19): siRNA sense strand
ucaacaaaggccaguucua

SEQ ID NO: 806648 - RNA, 19 nt, Homo sapiens
  misc_RNA (1)...(19): siRNA sense strand
acagcaccuucaaagauga

SEQ ID NO: 806649 - RNA, 19 nt, Homo sapiens
  misc_RNA (1)...(19): siRNA sense strand
uagucaacauggacaacaa

SEQ ID NO: 806650 - RNA, 19 nt, Homo sapiens
  misc_RNA (1)...(19): siRNA sense strand
ggagacugaggagguguuu

SEQ ID NO: 806651 - RNA, 19 nt, Homo sapiens
  misc_RNA (1)...(19): siRNA sense strand
gaagaggccaagguguuca

SEQ ID NO: 806652 - RNA, 19 nt, Homo sapiens
  misc_RNA (1)...(19): siRNA sense strand
augagaaggucccaguaga

SEQ ID NO: 806653 - RNA, 19 nt, Homo sapiens
  misc_RNA (1)...(19): siRNA sense strand
cuucccagauauccugaaa

SEQ ID NO: 806654 - RNA, 19 nt, Homo sapiens
  misc_RNA (1)...(19): siRNA sense strand
aguauggguucccugaaga

SEQ ID NO: 806655 - RNA, 19 nt, Homo sapiens
  misc_RNA (1)...(19): siRNA sense strand
uagagcagcugcgcuucug

SEQ ID NO: 806656 - RNA, 19 nt, Homo sapiens
  misc_RNA (1)...(19): siRNA sense strand
gaggaaucuuagucaacau

SEQ ID NO: 806657 - RNA, 19 nt, Homo sapiens
  misc_RNA (1)...(19): siRNA sense strand
cagacagcaccuucaaaga

SEQ ID NO: 806658 - RNA, 19 nt, Homo sapiens
  misc_RNA (1)...(19): siRNA sense strand
gcugaggaaugcgaucucu

SEQ ID NO: 806659 - RNA, 19 nt, Homo sapiens
  misc_RNA (1)...(19): siRNA sense strand
ggacuaccccagccucaaa

SEQ ID NO: 806660 - RNA, 19 nt, Homo sapiens
  misc_RNA (1)...(19): siRNA sense strand
aaggagaagcggauauugu

SEQ ID NO: 806661 - RNA, 19 nt, Homo sapiens
  misc_RNA (1)...(19): siRNA sense strand
ucauucagcauuacagcaa

SEQ ID NO: 806662 - RNA, 19 nt, Homo sapiens
  misc_RNA (1)...(19): siRNA sense strand
aacaacaucauucagcauu

SEQ ID NO: 806663 - RNA, 19 nt, Homo sapiens
  misc_RNA (1)...(19): siRNA sense strand
caacaacaucauucagcau

SEQ ID NO: 806664 - RNA, 19 nt, Homo sapiens
  misc_RNA (1)...(19): siRNA sense strand
ugaagaggccaagguguuc

SEQ ID NO: 806665 - RNA, 19 nt, Homo sapiens
  misc_RNA (1)...(19): siRNA sense strand
agaguguggugaugguugu

SEQ ID NO: 806666 - RNA, 19 nt, Homo sapiens
  misc_RNA (1)...(19): siRNA sense strand
ggagcuggacggcaaaauu

SEQ ID NO: 806667 - RNA, 19 nt, Homo sapiens
  misc_RNA (1)...(19): siRNA sense strand
aaguauggguucccugaag

SEQ ID NO: 806668 - RNA, 19 nt, Homo sapiens
  misc_RNA (1)...(19): siRNA sense strand
ccuccaagcaggccaagga

SEQ ID NO: 806669 - RNA, 19 nt, Homo sapiens
  misc_RNA (1)...(19): siRNA sense strand
acaagggagcugagaggaa

SEQ ID NO: 806670 - RNA, 19 nt, Homo sapiens
  misc_RNA (1)...(19): siRNA sense strand
ugaaugaagaggccaaggu

SEQ ID NO: 806671 - RNA, 19 nt, Homo sapiens
  misc_RNA (1)...(19): siRNA sense strand
cauggacaacaacaucauu

SEQ ID NO: 806672 - RNA, 19 nt, Homo sapiens
  misc_RNA (1)...(19): siRNA sense strand
augcaagcgaggaaucuua

SEQ ID NO: 806673 - RNA, 19 nt, Homo sapiens
  misc_RNA (1)...(19): siRNA sense strand
aagaagaauaaccugauga

SEQ ID NO: 806674 - RNA, 19 nt, Homo sapiens
  misc_RNA (1)...(19): siRNA sense strand
guuugacgcgcucauguug

SEQ ID NO: 806675 - RNA, 19 nt, Homo sapiens
  misc_RNA (1)...(19): siRNA sense strand
ccacugauauguaugauaa

SEQ ID NO: 806676 - RNA, 19 nt, Homo sapiens
  misc_RNA (1)...(19): siRNA sense strand
gaagagaacauuuacaaag

SEQ ID NO: 806677 - RNA, 19 nt, Homo sapiens
  misc_RNA (1)...(19): siRNA sense strand
gauaauggcucccucaacu

SEQ ID NO: 806678 - RNA, 19 nt, Homo sapiens
  misc_RNA (1)...(19): siRNA sense strand
cagauuugcucaagaagaa

SEQ ID NO: 806679 - RNA, 19 nt, Homo sapiens
  misc_RNA (1)...(19): siRNA sense strand
ugacguggcugacugcaaa

SEQ ID NO: 806680 - RNA, 19 nt, Homo sapiens
  misc_RNA (1)...(19): siRNA sense strand
agaauaaccugaugagcuu

SEQ ID NO: 806681 - RNA, 19 nt, Homo sapiens
  misc_RNA (1)...(19): siRNA sense strand
gacagcaccuucaaagaug

SEQ ID NO: 806682 - RNA, 19 nt, Homo sapiens
  misc_RNA (1)...(19): siRNA sense strand
caagaagaauaaccugaug

SEQ ID NO: 806683 - RNA, 19 nt, Homo sapiens
  misc_RNA (1)...(19): siRNA sense strand
ucgaugcucuucccagaua

SEQ ID NO: 806684 - RNA, 19 nt, Homo sapiens
  misc_RNA (1)...(19): siRNA sense strand
uugaggagguggccuauaa

SEQ ID NO: 806685 - RNA, 19 nt, Homo sapiens
  misc_RNA (1)...(19): siRNA sense strand
ccaaagccauccacaucaa

SEQ ID NO: 806686 - RNA, 19 nt, Homo sapiens
  misc_RNA (1)...(19): siRNA sense strand
ccaacaaagucaagagugu

SEQ ID NO: 806687 - RNA, 19 nt, Homo sapiens
  misc_RNA (1)...(19): siRNA sense strand
acaacaucauucagcauua

SEQ ID NO: 806688 - RNA, 19 nt, Homo sapiens
  misc_RNA (1)...(19): siRNA sense strand
ccaagcagcgggucauuga

SEQ ID NO: 806689 - RNA, 19 nt, Homo sapiens
  misc_RNA (1)...(19): siRNA sense strand
cgaggaaucuuagucaaca

SEQ ID NO: 806690 - RNA, 19 nt, Homo sapiens
  misc_RNA (1)...(19): siRNA sense strand
gcccuucacugaggaguuu

SEQ ID NO: 806691 - RNA, 19 nt, Homo sapiens
  misc_RNA (1)...(19): siRNA sense strand
gcacugagcgccugguaca

SEQ ID NO: 806692 - RNA, 19 nt, Homo sapiens
  misc_RNA (1)...(19): siRNA sense strand
caacaaaggccaguucuac

SEQ ID NO: 806693 - RNA, 19 nt, Homo sapiens
  misc_RNA (1)...(19): siRNA sense strand
caacauggacaacaacauc

SEQ ID NO: 806694 - RNA, 19 nt, Homo sapiens
  misc_RNA (1)...(19): siRNA sense strand
agagaguucugcuguaugu

SEQ ID NO: 806695 - RNA, 19 nt, Homo sapiens
  misc_RNA (1)...(19): siRNA sense strand
gagaacauuuacaaagucu

SEQ ID NO: 806696 - RNA, 19 nt, Homo sapiens
  misc_RNA (1)...(19): siRNA sense strand
ggagguggccuauaaugca

SEQ ID NO: 806697 - RNA, 19 nt, Homo sapiens
  misc_RNA (1)...(19): siRNA sense strand
auaaugcacuguccuuugu

SEQ ID NO: 806698 - RNA, 19 nt, Homo sapiens
  misc_RNA (1)...(19): siRNA sense strand
gaaaugcaagcgaggaauc

SEQ ID NO: 806699 - RNA, 19 nt, Homo sapiens
  misc_RNA (1)...(19): siRNA sense strand
gaacauuuacaaagucuac

SEQ ID NO: 806700 - RNA, 19 nt, Homo sapiens
  misc_RNA (1)...(19): siRNA sense strand
agaggaagaugcgcgauga

SEQ ID NO: 806701 - RNA, 19 nt, Homo sapiens
  misc_RNA (1)...(19): siRNA sense strand
caacaucauucagcauuac

SEQ ID NO: 806702 - RNA, 19 nt, Homo sapiens
  misc_RNA (1)...(19): siRNA sense strand
agacagcaccuucaaagau

SEQ ID NO: 806703 - RNA, 19 nt, Homo sapiens
  misc_RNA (1)...(19): siRNA sense strand
gauuugcucaagaagaaua

SEQ ID NO: 806704 - RNA, 19 nt, Homo sapiens
  misc_RNA (1)...(19): siRNA sense strand
gcaaugagacgaccuaccu

SEQ ID NO: 806705 - RNA, 19 nt, Homo sapiens
  misc_RNA (1)...(19): siRNA sense strand
gcacagacuuuuccucaca

SEQ ID NO: 806706 - RNA, 19 nt, Homo sapiens
  misc_RNA (1)...(19): siRNA sense strand
guggcugacugcaaagaaa

SEQ ID NO: 806707 - RNA, 19 nt, Homo sapiens
  misc_RNA (1)...(19): siRNA sense strand
agacugaggagguguuuga

SEQ ID NO: 806708 - RNA, 19 nt, Homo sapiens
  misc_RNA (1)...(19): siRNA sense strand
ugaggaaugcgaucucuga

SEQ ID NO: 806709 - RNA, 19 nt, Homo sapiens
  misc_RNA (1)...(19): siRNA sense strand
gaaucuuagucaacaugga

SEQ ID NO: 806710 - RNA, 19 nt, Homo sapiens
  misc_RNA (1)...(19): siRNA sense strand
cagcaacaguggcgucaag

SEQ ID NO: 806711 - RNA, 19 nt, Homo sapiens
  misc_RNA (1)...(19): siRNA sense strand
gaggagguggccuauaaug

SEQ ID NO: 806712 - RNA, 19 nt, Homo sapiens
  misc_RNA (1)...(19): siRNA sense strand
guucaucggcguaaacugu

SEQ ID NO: 806713 - RNA, 19 nt, Homo sapiens
  misc_RNA (1)...(19): siRNA sense strand
uguggaacgugaaugaaga

SEQ ID NO: 806714 - RNA, 19 nt, Homo sapiens
  misc_RNA (1)...(19): siRNA sense strand
ggacccagcagcuccaaca

SEQ ID NO: 806715 - RNA, 19 nt, Homo sapiens
  misc_RNA (1)...(19): siRNA sense strand
agagaacauuuacaaaguc

SEQ ID NO: 806716 - RNA, 19 nt, Homo sapiens
  misc_RNA (1)...(19): siRNA sense strand
ccagacagcaccuucaaag

SEQ ID NO: 806717 - RNA, 19 nt, Homo sapiens
  misc_RNA (1)...(19): siRNA sense strand
cugaagagaacauuuacaa

SEQ ID NO: 806718 - RNA, 19 nt, Homo sapiens
  misc_RNA (1)...(19): siRNA sense strand
gaaguauggguucccugaa

SEQ ID NO: 806719 - RNA, 19 nt, Homo sapiens
  misc_RNA (1)...(19): siRNA sense strand
ccaccacugauauguauga

SEQ ID NO: 806720 - RNA, 19 nt, Homo sapiens
  misc_RNA (1)...(19): siRNA sense strand
gauugacaccuaugacugu

SEQ ID NO: 806721 - RNA, 19 nt, Homo sapiens
  misc_RNA (1)...(19): siRNA sense strand
cccugaaccugcagauuga

SEQ ID NO: 806722 - RNA, 19 nt, Homo sapiens
  misc_RNA (1)...(19): siRNA sense strand
guacccagauuugcucaag

SEQ ID NO: 806723 - RNA, 19 nt, Homo sapiens
  misc_RNA (1)...(19): siRNA sense strand
acccagauuugcucaagaa

SEQ ID NO: 806724 - RNA, 19 nt, Homo sapiens
  misc_RNA (1)...(19): siRNA sense strand
uauaaugcacuguccuuug

SEQ ID NO: 806725 - RNA, 19 nt, Homo sapiens
  misc_RNA (1)...(19): siRNA sense strand
caucaagucaggcgaguca

SEQ ID NO: 806726 - RNA, 19 nt, Homo sapiens
  misc_RNA (1)...(19): siRNA sense strand
ucccucaacuccuuguuug

SEQ ID NO: 806727 - RNA, 19 nt, Homo sapiens
  misc_RNA (1)...(19): siRNA sense strand
ucccugaagagaacauuua

SEQ ID NO: 806728 - RNA, 19 nt, Homo sapiens
  misc_RNA (1)...(19): siRNA sense strand
ucaagaagaauaaccugau

SEQ ID NO: 806729 - RNA, 19 nt, Homo sapiens
  misc_RNA (1)...(19): siRNA sense strand
ucaagaguguggugauggu

SEQ ID NO: 806730 - RNA, 19 nt, Homo sapiens
  misc_RNA (1)...(19): siRNA sense strand
aucaagaucuucugugaca

SEQ ID NO: 806731 - RNA, 19 nt, Homo sapiens
  misc_RNA (1)...(19): siRNA sense strand
acccaccacugauauguau

SEQ ID NO: 806732 - RNA, 19 nt, Homo sapiens
  misc_RNA (1)...(19): siRNA sense strand
uugacgcgcucauguugaa

SEQ ID NO: 806733 - RNA, 19 nt, Homo sapiens
  misc_RNA (1)...(19): siRNA sense strand
caaugagaaggucccagua

SEQ ID NO: 806734 - RNA, 19 nt, Homo sapiens
  misc_RNA (1)...(19): siRNA sense strand
uggccuaccucaacaaagg

SEQ ID NO: 806735 - RNA, 19 nt, Homo sapiens
  misc_RNA (1)...(19): siRNA sense strand
ggacaacaacaucauucag

SEQ ID NO: 806736 - RNA, 19 nt, Homo sapiens
  misc_RNA (1)...(19): siRNA sense strand
caagaucuucugugacaag

SEQ ID NO: 806737 - RNA, 19 nt, Homo sapiens
  misc_RNA (1)...(19): siRNA sense strand
ccagauuugcucaagaaga

SEQ ID NO: 806738 - RNA, 19 nt, Homo sapiens
  misc_RNA (1)...(19): siRNA sense strand
ucaacaaaggccaguucua

SEQ ID NO: 806739 - RNA, 19 nt, Homo sapiens
  misc_RNA (1)...(19): siRNA sense strand
acagcaccuucaaagauga

SEQ ID NO: 806740 - RNA, 19 nt, Homo sapiens
  misc_RNA (1)...(19): siRNA sense strand
uagucaacauggacaacaa

SEQ ID NO: 806741 - RNA, 19 nt, Homo sapiens
  misc_RNA (1)...(19): siRNA sense strand
ggagacugaggagguguuu

SEQ ID NO: 806742 - RNA, 19 nt, Homo sapiens
  misc_RNA (1)...(19): siRNA sense strand
gaagaggccaagguguuca

SEQ ID NO: 806743 - RNA, 19 nt, Homo sapiens
  misc_RNA (1)...(19): siRNA sense strand
augagaaggucccaguaga

SEQ ID NO: 806744 - RNA, 19 nt, Homo sapiens
  misc_RNA (1)...(19): siRNA sense strand
cuucccagauauccugaaa

SEQ ID NO: 806745 - RNA, 19 nt, Homo sapiens
  misc_RNA (1)...(19): siRNA sense strand
aguauggguucccugaaga

SEQ ID NO: 806746 - RNA, 19 nt, Homo sapiens
  misc_RNA (1)...(19): siRNA sense strand
uagagcagcugcgcuucug

SEQ ID NO: 806747 - RNA, 19 nt, Homo sapiens
  misc_RNA (1)...(19): siRNA sense strand
gaggaaucuuagucaacau

SEQ ID NO: 806748 - RNA, 19 nt, Homo sapiens
  misc_RNA (1)...(19): siRNA sense strand
ggacuaccccagccucaaa

SEQ ID NO: 806749 - RNA, 19 nt, Homo sapiens
  misc_RNA (1)...(19): siRNA sense strand
cagacagcaccuucaaaga

SEQ ID NO: 806750 - RNA, 19 nt, Homo sapiens
  misc_RNA (1)...(19): siRNA sense strand
gcugaggaaugcgaucucu

SEQ ID NO: 806751 - RNA, 19 nt, Homo sapiens
  misc_RNA (1)...(19): siRNA sense strand
ugaagaggccaagguguuc

SEQ ID NO: 806752 - RNA, 19 nt, Homo sapiens
  misc_RNA (1)...(19): siRNA sense strand
ucauucagcauuacagcaa

SEQ ID NO: 806753 - RNA, 19 nt, Homo sapiens
  misc_RNA (1)...(19): siRNA sense strand
aacaacaucauucagcauu

SEQ ID NO: 806754 - RNA, 19 nt, Homo sapiens
  misc_RNA (1)...(19): siRNA sense strand
caacaacaucauucagcau

SEQ ID NO: 806755 - RNA, 19 nt, Homo sapiens
  misc_RNA (1)...(19): siRNA sense strand
agaguguggugaugguugu

SEQ ID NO: 806756 - RNA, 19 nt, Homo sapiens
  misc_RNA (1)...(19): siRNA sense strand
ggagcuggacggcaaaauu

SEQ ID NO: 806757 - RNA, 19 nt, Homo sapiens
  misc_RNA (1)...(19): siRNA sense strand
aaguauggguucccugaag

SEQ ID NO: 806758 - RNA, 19 nt, Homo sapiens
  misc_RNA (1)...(19): siRNA sense strand
ccuccaagcaggccaagga

SEQ ID NO: 806759 - RNA, 19 nt, Homo sapiens
  misc_RNA (1)...(19): siRNA sense strand
acaagggagcugagaggaa

SEQ ID NO: 806760 - RNA, 19 nt, Homo sapiens
  misc_RNA (1)...(19): siRNA sense strand
ugaaugaagaggccaaggu

SEQ ID NO: 806761 - RNA, 19 nt, Homo sapiens
  misc_RNA (1)...(19): siRNA sense strand
cauggacaacaacaucauu

SEQ ID NO: 806762 - RNA, 19 nt, Homo sapiens
  misc_RNA (1)...(19): siRNA sense strand
augcaagcgaggaaucuua

SEQ ID NO: 806763 - RNA, 19 nt, Homo sapiens
  misc_RNA (1)...(19): siRNA sense strand
aagaagaauaaccugauga

SEQ ID NO: 806764 - RNA, 19 nt, Homo sapiens
  misc_RNA (1)...(19): siRNA sense strand
guuugacgcgcucauguug

SEQ ID NO: 806765 - RNA, 19 nt, Homo sapiens
  misc_RNA (1)...(19): siRNA sense strand
ccugcucgcccuucacuga

SEQ ID NO: 806766 - RNA, 19 nt, Homo sapiens
  misc_RNA (1)...(19): siRNA sense strand
caagcgaggaaucuuaguc

SEQ ID NO: 806767 - RNA, 19 nt, Homo sapiens
  misc_RNA (1)...(19): siRNA sense strand
gagaagagcccaucgacau

SEQ ID NO: 806768 - RNA, 19 nt, Homo sapiens
  misc_RNA (1)...(19): siRNA sense strand
gaagagcccaucgacauug

SEQ ID NO: 806769 - RNA, 19 nt, Homo sapiens
  misc_RNA (1)...(19): siRNA sense strand
ggucacaggacuauacuga

SEQ ID NO: 806770 - RNA, 19 nt, Homo sapiens
  misc_RNA (1)...(19): siRNA sense strand
uccaugagaugcugaagaa

SEQ ID NO: 806771 - RNA, 19 nt, Homo sapiens
  misc_RNA (1)...(19): siRNA sense strand
gaucaacacugagaguucu

SEQ ID NO: 806772 - RNA, 19 nt, Homo sapiens
  misc_RNA (1)...(19): siRNA sense strand
gcaaggugggcgaguauug

SEQ ID NO: 806773 - RNA, 19 nt, Homo sapiens
  misc_RNA (1)...(19): siRNA sense strand
uggacaggcuuaccuuuga

SEQ ID NO: 806774 - RNA, 19 nt, Homo sapiens
  misc_RNA (1)...(19): siRNA sense strand
aagggaagcucacccacaa

SEQ ID NO: 806775 - RNA, 19 nt, Homo sapiens
  misc_RNA (1)...(19): siRNA sense strand
cccacaagaucaacacuga

SEQ ID NO: 806776 - RNA, 19 nt, Homo sapiens
  misc_RNA (1)...(19): siRNA sense strand
gagcugaaaguccaugaga

SEQ ID NO: 806777 - RNA, 19 nt, Homo sapiens
  misc_RNA (1)...(19): siRNA sense strand
gcugaaaguccaugagaug

SEQ ID NO: 806778 - RNA, 19 nt, Homo sapiens
  misc_RNA (1)...(19): siRNA sense strand
gaagcucacccacaagauc

SEQ ID NO: 806779 - RNA, 19 nt, Homo sapiens
  misc_RNA (1)...(19): siRNA sense strand
ugagcaaggugggcgagua

SEQ ID NO: 806780 - RNA, 19 nt, Homo sapiens
  misc_RNA (1)...(19): siRNA sense strand
gggaagcucacccacaaga

SEQ ID NO: 806781 - RNA, 19 nt, Homo sapiens
  misc_RNA (1)...(19): siRNA sense strand
gagcaaggugggcgaguau

SEQ ID NO: 806782 - RNA, 19 nt, Homo sapiens
  misc_RNA (1)...(19): siRNA sense strand
ccaucgacauugacaagau

SEQ ID NO: 806783 - RNA, 19 nt, Homo sapiens
  misc_RNA (1)...(19): siRNA sense strand
gaagggaaagcaggucuca

SEQ ID NO: 806784 - RNA, 19 nt, Homo sapiens
  misc_RNA (1)...(19): siRNA sense strand
acagagccaugagcugaaa

SEQ ID NO: 806785 - RNA, 19 nt, Homo sapiens
  misc_RNA (1)...(19): siRNA sense strand
ggaagugcguuuuggugaa

SEQ ID NO: 806786 - RNA, 19 nt, Homo sapiens
  misc_RNA (1)...(19): siRNA sense strand
caccaauucuucccaggau

SEQ ID NO: 806787 - RNA, 19 nt, Homo sapiens
  misc_RNA (1)...(19): siRNA sense strand
ggacaggcuuaccuuugac

SEQ ID NO: 806788 - RNA, 19 nt, Homo sapiens
  misc_RNA (1)...(19): siRNA sense strand
caucgacauugacaagauc

SEQ ID NO: 806789 - RNA, 19 nt, Homo sapiens
  misc_RNA (1)...(19): siRNA sense strand
gcaagccacagagccauga

SEQ ID NO: 806790 - RNA, 19 nt, Homo sapiens
  misc_RNA (1)...(19): siRNA sense strand
cacaagaucaacacugaga

SEQ ID NO: 806791 - RNA, 19 nt, Homo sapiens
  misc_RNA (1)...(19): siRNA sense strand
gauucgacccugccauguu

SEQ ID NO: 806792 - RNA, 19 nt, Homo sapiens
  misc_RNA (1)...(19): siRNA sense strand
agaagagcccaucgacauu

SEQ ID NO: 806793 - RNA, 19 nt, Homo sapiens
  misc_RNA (1)...(19): siRNA sense strand
aagagcccaucgacauuga

SEQ ID NO: 806794 - RNA, 19 nt, Homo sapiens
  misc_RNA (1)...(19): siRNA sense strand
ccaauucuucccaggauuc

SEQ ID NO: 806795 - RNA, 19 nt, Homo sapiens
  misc_RNA (1)...(19): siRNA sense strand
caagaucaacacugagagu

SEQ ID NO: 806796 - RNA, 19 nt, Homo sapiens
  misc_RNA (1)...(19): siRNA sense strand
ggagcgcguccucauggaa

SEQ ID NO: 806797 - RNA, 19 nt, Homo sapiens
  misc_RNA (1)...(19): siRNA sense strand
caccguggaugaggaggaa

SEQ ID NO: 806798 - RNA, 19 nt, Homo sapiens
  misc_RNA (1)...(19): siRNA sense strand
ggaggucagggugccagua

SEQ ID NO: 806799 - RNA, 19 nt, Homo sapiens
  misc_RNA (1)...(19): siRNA sense strand
ggaagcucacccacaagau

SEQ ID NO: 806800 - RNA, 19 nt, Homo sapiens
  misc_RNA (1)...(19): siRNA sense strand
caggagcaguuccagaaaa

SEQ ID NO: 806801 - RNA, 19 nt, Homo sapiens
  misc_RNA (1)...(19): siRNA sense strand
ccuagggaaccaccaauuc

SEQ ID NO: 806802 - RNA, 19 nt, Homo sapiens
  misc_RNA (1)...(19): siRNA sense strand
auucgacccugccauguuc

SEQ ID NO: 806803 - RNA, 19 nt, Homo sapiens
  misc_RNA (1)...(19): siRNA sense strand
ucaggagcaguuccagaaa

SEQ ID NO: 806804 - RNA, 19 nt, Homo sapiens
  misc_RNA (1)...(19): siRNA sense strand
gugggaugcugaagguucu

SEQ ID NO: 806805 - RNA, 19 nt, Homo sapiens
  misc_RNA (1)...(19): siRNA sense strand
ggacauaccucaauuguug

SEQ ID NO: 806806 - RNA, 19 nt, Homo sapiens
  misc_RNA (1)...(19): siRNA sense strand
ggaagcagguuaugaugua

SEQ ID NO: 806807 - RNA, 19 nt, Homo sapiens
  misc_RNA (1)...(19): siRNA sense strand
gcugaaagcugauaaggaa

SEQ ID NO: 806808 - RNA, 19 nt, Homo sapiens
  misc_RNA (1)...(19): siRNA sense strand
ggacauacauuacucagau

SEQ ID NO: 806809 - RNA, 19 nt, Homo sapiens
  misc_RNA (1)...(19): siRNA sense strand
ggagaaggauguagcugua

SEQ ID NO: 806810 - RNA, 19 nt, Homo sapiens
  misc_RNA (1)...(19): siRNA sense strand
gcagauccuucauuaauug

SEQ ID NO: 806811 - RNA, 19 nt, Homo sapiens
  misc_RNA (1)...(19): siRNA sense strand
gacaauccguccuuccuua

SEQ ID NO: 806812 - RNA, 19 nt, Homo sapiens
  misc_RNA (1)...(19): siRNA sense strand
uagcagaccuaaauauuga

SEQ ID NO: 806813 - RNA, 19 nt, Homo sapiens
  misc_RNA (1)...(19): siRNA sense strand
ggagauacaagcacuuuaa

SEQ ID NO: 806814 - RNA, 19 nt, Homo sapiens
  misc_RNA (1)...(19): siRNA sense strand
gaaaggugcuauuguggau

SEQ ID NO: 806815 - RNA, 19 nt, Homo sapiens
  misc_RNA (1)...(19): siRNA sense strand
gaaagcugauaaggaauuu

SEQ ID NO: 806816 - RNA, 19 nt, Homo sapiens
  misc_RNA (1)...(19): siRNA sense strand
ggaaugacgccuuuaaugu

SEQ ID NO: 806817 - RNA, 19 nt, Homo sapiens
  misc_RNA (1)...(19): siRNA sense strand
gggaauaccacagucauua

SEQ ID NO: 806818 - RNA, 19 nt, Homo sapiens
  misc_RNA (1)...(19): siRNA sense strand
ggauguaugugacgugguu

SEQ ID NO: 806819 - RNA, 19 nt, Homo sapiens
  misc_RNA (1)...(19): siRNA sense strand
gcaaccaaauucuggaugu

SEQ ID NO: 806820 - RNA, 19 nt, Homo sapiens
  misc_RNA (1)...(19): siRNA sense strand
uuaaagggcuaauguaugg

SEQ ID NO: 806821 - RNA, 19 nt, Homo sapiens
  misc_RNA (1)...(19): siRNA sense strand
acaacaacgucuauugaaa

SEQ ID NO: 806822 - RNA, 19 nt, Homo sapiens
  misc_RNA (1)...(19): siRNA sense strand
agucaaggcuacacaauau

SEQ ID NO: 806823 - RNA, 19 nt, Homo sapiens
  misc_RNA (1)...(19): siRNA sense strand
gaaugaaugccaggagaua

SEQ ID NO: 806824 - RNA, 19 nt, Homo sapiens
  misc_RNA (1)...(19): siRNA sense strand
gcauauagaacacauagug

SEQ ID NO: 806825 - RNA, 19 nt, Homo sapiens
  misc_RNA (1)...(19): siRNA sense strand
gaaugacgccuuuaaugug

SEQ ID NO: 806826 - RNA, 19 nt, Homo sapiens
  misc_RNA (1)...(19): siRNA sense strand
ccucaauuguuguugcuua

SEQ ID NO: 806827 - RNA, 19 nt, Homo sapiens
  misc_RNA (1)...(19): siRNA sense strand
uaugaacgcugucgagaau

SEQ ID NO: 806828 - RNA, 19 nt, Homo sapiens
  misc_RNA (1)...(19): siRNA sense strand
ccaacuagauugcuuuuaa

SEQ ID NO: 806829 - RNA, 19 nt, Homo sapiens
  misc_RNA (1)...(19): siRNA sense strand
caaccaaauucuggaugua

SEQ ID NO: 806830 - RNA, 19 nt, Homo sapiens
  misc_RNA (1)...(19): siRNA sense strand
gcuaauguauggugguguu

SEQ ID NO: 806831 - RNA, 19 nt, Homo sapiens
  misc_RNA (1)...(19): siRNA sense strand
uuuaugaucugcuggauga

SEQ ID NO: 806832 - RNA, 19 nt, Homo sapiens
  misc_RNA (1)...(19): siRNA sense strand
cagauaucauguuuaggua

SEQ ID NO: 806833 - RNA, 19 nt, Homo sapiens
  misc_RNA (1)...(19): siRNA sense strand
gugcagauccuucauuaau

SEQ ID NO: 806834 - RNA, 19 nt, Homo sapiens
  misc_RNA (1)...(19): siRNA sense strand
gcaggcaaccauagauauu

SEQ ID NO: 806835 - RNA, 19 nt, Homo sapiens
  misc_RNA (1)...(19): siRNA sense strand
agaauggaaugacgccuuu

SEQ ID NO: 806836 - RNA, 19 nt, Homo sapiens
  misc_RNA (1)...(19): siRNA sense strand
ugaacgcugucgagaauug

SEQ ID NO: 806837 - RNA, 19 nt, Homo sapiens
  misc_RNA (1)...(19): siRNA sense strand
gaccaggcaguauacaaua

SEQ ID NO: 806838 - RNA, 19 nt, Homo sapiens
  misc_RNA (1)...(19): siRNA sense strand
uaccagauaucauguuuag

SEQ ID NO: 806839 - RNA, 19 nt, Homo sapiens
  misc_RNA (1)...(19): siRNA sense strand
ccggugagguccaaacauu

SEQ ID NO: 806840 - RNA, 19 nt, Homo sapiens
  misc_RNA (1)...(19): siRNA sense strand
caguacaguuucuuucaaa

SEQ ID NO: 806841 - RNA, 19 nt, Homo sapiens
  misc_RNA (1)...(19): siRNA sense strand
guucggacauaccucaauu

SEQ ID NO: 806842 - RNA, 19 nt, Homo sapiens
  misc_RNA (1)...(19): siRNA sense strand
ucacaacaacgucuauuga

SEQ ID NO: 806843 - RNA, 19 nt, Homo sapiens
  misc_RNA (1)...(19): siRNA sense strand
gcacugggccacaagacaa

SEQ ID NO: 806844 - RNA, 19 nt, Homo sapiens
  misc_RNA (1)...(19): siRNA sense strand
ggcaguauacaauagaaua

SEQ ID NO: 806845 - RNA, 19 nt, Homo sapiens
  misc_RNA (1)...(19): siRNA sense strand
ccauggauguguaagaaau

SEQ ID NO: 806846 - RNA, 19 nt, Homo sapiens
  misc_RNA (1)...(19): siRNA sense strand
gaauaucaagggcgaauca

SEQ ID NO: 806847 - RNA, 19 nt, Homo sapiens
  misc_RNA (1)...(19): siRNA sense strand
uggugcagauccuucauua

SEQ ID NO: 806848 - RNA, 19 nt, Homo sapiens
  misc_RNA (1)...(19): siRNA sense strand
ggaccaggcaguauacaau

SEQ ID NO: 806849 - RNA, 19 nt, Homo sapiens
  misc_RNA (1)...(19): siRNA sense strand
caacaacgucuauugaaag

SEQ ID NO: 806850 - RNA, 19 nt, Homo sapiens
  misc_RNA (1)...(19): siRNA sense strand
gagauacaagcacuuuaaa

SEQ ID NO: 806851 - RNA, 19 nt, Homo sapiens
  misc_RNA (1)...(19): siRNA sense strand
ugacgugguucuucugguu

SEQ ID NO: 806852 - RNA, 19 nt, Homo sapiens
  misc_RNA (1)...(19): siRNA sense strand
gauccuucauuaauugaug

SEQ ID NO: 806853 - RNA, 19 nt, Homo sapiens
  misc_RNA (1)...(19): siRNA sense strand
ugucagauguaccagauau

SEQ ID NO: 806854 - RNA, 19 nt, Homo sapiens
  misc_RNA (1)...(19): siRNA sense strand
guaccuguuugauacgaaa

SEQ ID NO: 806855 - RNA, 19 nt, Homo sapiens
  misc_RNA (1)...(19): siRNA sense strand
gaugaucaaccacuuacaa

SEQ ID NO: 806856 - RNA, 19 nt, Homo sapiens
  misc_RNA (1)...(19): siRNA sense strand
agaaggauguagcuguauu

SEQ ID NO: 806857 - RNA, 19 nt, Homo sapiens
  misc_RNA (1)...(19): siRNA sense strand
gcacaugggacauagucaa

SEQ ID NO: 806858 - RNA, 19 nt, Homo sapiens
  misc_RNA (1)...(19): siRNA sense strand
gacauacauuacucagauu

SEQ ID NO: 806859 - RNA, 19 nt, Homo sapiens
  misc_RNA (1)...(19): siRNA sense strand
uguuguugcuuaucucaua

SEQ ID NO: 806860 - RNA, 19 nt, Homo sapiens
  misc_RNA (1)...(19): siRNA sense strand
gaaauauggugcagauccu

SEQ ID NO: 806861 - RNA, 19 nt, Homo sapiens
  misc_RNA (1)...(19): siRNA sense strand
gacaggauguagauaugau

SEQ ID NO: 806862 - RNA, 19 nt, Homo sapiens
  misc_RNA (1)...(19): siRNA sense strand
ggacaggauguagauauga

SEQ ID NO: 806863 - RNA, 19 nt, Homo sapiens
  misc_RNA (1)...(19): siRNA sense strand
ugccaucaauaacagaaua

SEQ ID NO: 806864 - RNA, 19 nt, Homo sapiens
  misc_RNA (1)...(19): siRNA sense strand
ccagauaucauguuuaggu

SEQ ID NO: 806865 - RNA, 19 nt, Homo sapiens
  misc_RNA (1)...(19): siRNA sense strand
gcacuuuucuacaauuuug

SEQ ID NO: 806866 - RNA, 19 nt, Homo sapiens
  misc_RNA (1)...(19): siRNA sense strand
ggauguagauaugauggau

SEQ ID NO: 806867 - RNA, 19 nt, Homo sapiens
  misc_RNA (1)...(19): siRNA sense strand
gaccaaauaucaggaucug

SEQ ID NO: 806868 - RNA, 19 nt, Homo sapiens
  misc_RNA (1)...(19): siRNA sense strand
uaccuauucuucuugcuuu

SEQ ID NO: 806869 - RNA, 19 nt, Homo sapiens
  misc_RNA (1)...(19): siRNA sense strand
cucaguauauucugcagua

SEQ ID NO: 806870 - RNA, 19 nt, Homo sapiens
  misc_RNA (1)...(19): siRNA sense strand
ugaaagcugauaaggaauu

SEQ ID NO: 806871 - RNA, 19 nt, Homo sapiens
  misc_RNA (1)...(19): siRNA sense strand
gaucaaccacuuacaagag

SEQ ID NO: 806872 - RNA, 19 nt, Homo sapiens
  misc_RNA (1)...(19): siRNA sense strand
gaacuugcagagacaggaa

SEQ ID NO: 806873 - RNA, 19 nt, Homo sapiens
  misc_RNA (1)...(19): siRNA sense strand
gaaaguaauguuaggaacu

SEQ ID NO: 806874 - RNA, 19 nt, Homo sapiens
  misc_RNA (1)...(19): siRNA sense strand
aaugaaauauggugcagau

SEQ ID NO: 806875 - RNA, 19 nt, Homo sapiens
  misc_RNA (1)...(19): siRNA sense strand
uguaccagauaucauguuu

SEQ ID NO: 806876 - RNA, 19 nt, Homo sapiens
  misc_RNA (1)...(19): siRNA sense strand
ggaagucuggaccucagua

SEQ ID NO: 806877 - RNA, 19 nt, Homo sapiens
  misc_RNA (1)...(19): siRNA sense strand
ugcagauccuucauuaauu

SEQ ID NO: 806878 - RNA, 19 nt, Homo sapiens
  misc_RNA (1)...(19): siRNA sense strand
ucgaugcuguggccucuuu

SEQ ID NO: 806879 - RNA, 19 nt, Homo sapiens
  misc_RNA (1)...(19): siRNA sense strand
uuacucaugugucagaugu

SEQ ID NO: 806880 - RNA, 19 nt, Homo sapiens
  misc_RNA (1)...(19): siRNA sense strand
cauguggguggcuguauua

SEQ ID NO: 806881 - RNA, 19 nt, Homo sapiens
  misc_RNA (1)...(19): siRNA sense strand
ggaauaccacagucauuag

SEQ ID NO: 806882 - RNA, 19 nt, Homo sapiens
  misc_RNA (1)...(19): siRNA sense strand
gaaggauguagcuguauuc

SEQ ID NO: 806883 - RNA, 19 nt, Homo sapiens
  misc_RNA (1)...(19): siRNA sense strand
uaaagcaacagaagagcaa

SEQ ID NO: 806884 - RNA, 19 nt, Homo sapiens
  misc_RNA (1)...(19): siRNA sense strand
ggauccaacuagauugcuu

SEQ ID NO: 806885 - RNA, 19 nt, Homo sapiens
  misc_RNA (1)...(19): siRNA sense strand
ggacggaaaacucauauug

SEQ ID NO: 806886 - RNA, 19 nt, Homo sapiens
  misc_RNA (1)...(19): siRNA sense strand
aaccauggauguguaagaa

SEQ ID NO: 806887 - RNA, 19 nt, Homo sapiens
  misc_RNA (1)...(19): siRNA sense strand
guaccagauaucauguuua

SEQ ID NO: 806888 - RNA, 19 nt, Homo sapiens
  misc_RNA (1)...(19): siRNA sense strand
ucauguggguggcuguauu

SEQ ID NO: 806889 - RNA, 19 nt, Homo sapiens
  misc_RNA (1)...(19): siRNA sense strand
gugcaggcaaccauagaua

SEQ ID NO: 806890 - RNA, 19 nt, Homo sapiens
  misc_RNA (1)...(19): siRNA sense strand
uuggaaugaucucaacuuu

SEQ ID NO: 806891 - RNA, 19 nt, Homo sapiens
  misc_RNA (1)...(19): siRNA sense strand
gauaugacaauccguccuu

SEQ ID NO: 806892 - RNA, 19 nt, Homo sapiens
  misc_RNA (1)...(19): siRNA sense strand
gaccugaauucaacuccau

SEQ ID NO: 806893 - RNA, 19 nt, Homo sapiens
  misc_RNA (1)...(19): siRNA sense strand
gcagaccuaaauauugauu

SEQ ID NO: 806894 - RNA, 19 nt, Homo sapiens
  misc_RNA (1)...(19): siRNA sense strand
uaauguugaugcccagaau

SEQ ID NO: 806895 - RNA, 19 nt, Homo sapiens
  misc_RNA (1)...(19): siRNA sense strand
ucaucuggcugcucaguuc

SEQ ID NO: 806896 - RNA, 19 nt, Homo sapiens
  misc_RNA (1)...(19): siRNA sense strand
caauuguuguugcuuaucu

SEQ ID NO: 806897 - RNA, 19 nt, Homo sapiens
  misc_RNA (1)...(19): siRNA sense strand
guggguggcuguauuacuc

SEQ ID NO: 806898 - RNA, 19 nt, Homo sapiens
  misc_RNA (1)...(19): siRNA sense strand
guguucaccuuggauguuu

SEQ ID NO: 806899 - RNA, 19 nt, Homo sapiens
  misc_RNA (1)...(19): siRNA sense strand
caacagaagagcaaaagaa

SEQ ID NO: 806900 - RNA, 19 nt, Homo sapiens
  misc_RNA (1)...(19): siRNA sense strand
acaguacaguuucuuucaa

SEQ ID NO: 806901 - RNA, 19 nt, Homo sapiens
  misc_RNA (1)...(19): siRNA sense strand
gauccaacuagauugcuuu

SEQ ID NO: 806902 - RNA, 19 nt, Homo sapiens
  misc_RNA (1)...(19): siRNA sense strand
gcagaaaguaauguuagga

SEQ ID NO: 806903 - RNA, 19 nt, Homo sapiens
  misc_RNA (1)...(19): siRNA sense strand
caaaugaaagaaugaaugc

SEQ ID NO: 806904 - RNA, 19 nt, Homo sapiens
  misc_RNA (1)...(19): siRNA sense strand
cagaaaguaauguuaggaa

SEQ ID NO: 806905 - RNA, 19 nt, Homo sapiens
  misc_RNA (1)...(19): siRNA sense strand
gggagaagcuggauuauuu

SEQ ID NO: 806906 - RNA, 19 nt, Homo sapiens
  misc_RNA (1)...(19): siRNA sense strand
ggacagcgcucaugagaag

SEQ ID NO: 806907 - RNA, 19 nt, Homo sapiens
  misc_RNA (1)...(19): siRNA sense strand
gcggagagcucaucaacaa

SEQ ID NO: 806908 - RNA, 19 nt, Homo sapiens
  misc_RNA (1)...(19): siRNA sense strand
ggacuugcuuggaagauuu

SEQ ID NO: 806909 - RNA, 19 nt, Homo sapiens
  misc_RNA (1)...(19): siRNA sense strand
guacaucccucuguccaua

SEQ ID NO: 806910 - RNA, 19 nt, Homo sapiens
  misc_RNA (1)...(19): siRNA sense strand
ggagguagcugcaaucaac

SEQ ID NO: 806911 - RNA, 19 nt, Homo sapiens
  misc_RNA (1)...(19): siRNA sense strand
gcuagucuguuucgaaauu

SEQ ID NO: 806912 - RNA, 19 nt, Homo sapiens
  misc_RNA (1)...(19): siRNA sense strand
gaccaaauauuucugaaca

SEQ ID NO: 806913 - RNA, 19 nt, Homo sapiens
  misc_RNA (1)...(19): siRNA sense strand
gacagucaguguugccuua

SEQ ID NO: 806914 - RNA, 19 nt, Homo sapiens
  misc_RNA (1)...(19): siRNA sense strand
aaccaucggugcaaauuua

SEQ ID NO: 806915 - RNA, 19 nt, Homo sapiens
  misc_RNA (1)...(19): siRNA sense strand
ggaccuggcuguugacauc

SEQ ID NO: 806916 - RNA, 19 nt, Homo sapiens
  misc_RNA (1)...(19): siRNA sense strand
ucaacaacaucaaguacua

SEQ ID NO: 806917 - RNA, 19 nt, Homo sapiens
  misc_RNA (1)...(19): siRNA sense strand
gcugguggcuagucuguuu

SEQ ID NO: 806918 - RNA, 19 nt, Homo sapiens
  misc_RNA (1)...(19): siRNA sense strand
ggagaagcgugucagauag

SEQ ID NO: 806919 - RNA, 19 nt, Homo sapiens
  misc_RNA (1)...(19): siRNA sense strand
ugacgagucuguccuguga

SEQ ID NO: 806920 - RNA, 19 nt, Homo sapiens
  misc_RNA (1)...(19): siRNA sense strand
gcauuggacuugcuuggaa

SEQ ID NO: 806921 - RNA, 19 nt, Homo sapiens
  misc_RNA (1)...(19): siRNA sense strand
ggaagaauuuugcugauuu

SEQ ID NO: 806922 - RNA, 19 nt, Homo sapiens
  misc_RNA (1)...(19): siRNA sense strand
ggacacagaccgugagaug

SEQ ID NO: 806923 - RNA, 19 nt, Homo sapiens
  misc_RNA (1)...(19): siRNA sense strand
ggacguggccaugaaagua

SEQ ID NO: 806924 - RNA, 19 nt, Homo sapiens
  misc_RNA (1)...(19): siRNA sense strand
gaaccuaccuuuggcuuuu

SEQ ID NO: 806925 - RNA, 19 nt, Homo sapiens
  misc_RNA (1)...(19): siRNA sense strand
ccaggagccucaacaaauc

SEQ ID NO: 806926 - RNA, 19 nt, Homo sapiens
  misc_RNA (1)...(19): siRNA sense strand
caaauuuacagaagcagua

SEQ ID NO: 806927 - RNA, 19 nt, Homo sapiens
  misc_RNA (1)...(19): siRNA sense strand
gaaaccaucggugcaaauu

SEQ ID NO: 806928 - RNA, 19 nt, Homo sapiens
  misc_RNA (1)...(19): siRNA sense strand
ucaugaagaucccagaaga

SEQ ID NO: 806929 - RNA, 19 nt, Homo sapiens
  misc_RNA (1)...(19): siRNA sense strand
ucugugagcuccuauggaa

SEQ ID NO: 806930 - RNA, 19 nt, Homo sapiens
  misc_RNA (1)...(19): siRNA sense strand
ggacaacggccacaaguac

SEQ ID NO: 806931 - RNA, 19 nt, Homo sapiens
  misc_RNA (1)...(19): siRNA sense strand
agaagggcauuacgagauu

SEQ ID NO: 806932 - RNA, 19 nt, Homo sapiens
  misc_RNA (1)...(19): siRNA sense strand
gagcgucaauggagaugug

SEQ ID NO: 806933 - RNA, 19 nt, Homo sapiens
  misc_RNA (1)...(19): siRNA sense strand
uggagaagcgugucagaua

SEQ ID NO: 806934 - RNA, 19 nt, Homo sapiens
  misc_RNA (1)...(19): siRNA sense strand
acacuggauuugauagaaa

SEQ ID NO: 806935 - RNA, 19 nt, Homo sapiens
  misc_RNA (1)...(19): siRNA sense strand
ccgagcagcugaccgcauu

SEQ ID NO: 806936 - RNA, 19 nt, Homo sapiens
  misc_RNA (1)...(19): siRNA sense strand
gaauuuugcugauuuggaa

SEQ ID NO: 806937 - RNA, 19 nt, Homo sapiens
  misc_RNA (1)...(19): siRNA sense strand
agaaagcucuggaaaccau

SEQ ID NO: 806938 - RNA, 19 nt, Homo sapiens
  misc_RNA (1)...(19): siRNA sense strand
ggaggaagaugaggcugau

SEQ ID NO: 806939 - RNA, 19 nt, Homo sapiens
  misc_RNA (1)...(19): siRNA sense strand
gcugaacaccggaccauga

SEQ ID NO: 806940 - RNA, 19 nt, Homo sapiens
  misc_RNA (1)...(19): siRNA sense strand
guacuacgacggcuucaug

SEQ ID NO: 806941 - RNA, 19 nt, Homo sapiens
  misc_RNA (1)...(19): siRNA sense strand
uaaaugugcuucagaucgu

SEQ ID NO: 806942 - RNA, 19 nt, Homo sapiens
  misc_RNA (1)...(19): siRNA sense strand
gccaggagccucaacaaau

SEQ ID NO: 806943 - RNA, 19 nt, Homo sapiens
  misc_RNA (1)...(19): siRNA sense strand
gaugaaggaucggaugaag

SEQ ID NO: 806944 - RNA, 19 nt, Homo sapiens
  misc_RNA (1)...(19): siRNA sense strand
ggagagcucaucaacaaca

SEQ ID NO: 806945 - RNA, 19 nt, Homo sapiens
  misc_RNA (1)...(19): siRNA sense strand
gcauguggcuccgucaauc

SEQ ID NO: 806946 - RNA, 19 nt, Homo sapiens
  misc_RNA (1)...(19): siRNA sense strand
uggcuagucuguuucgaaa

SEQ ID NO: 806947 - RNA, 19 nt, Homo sapiens
  misc_RNA (1)...(19): siRNA sense strand
gucgauggguccucagaaa

SEQ ID NO: 806948 - RNA, 19 nt, Homo sapiens
  misc_RNA (1)...(19): siRNA sense strand
acacagaccgugagaugaa

SEQ ID NO: 806949 - RNA, 19 nt, Homo sapiens
  misc_RNA (1)...(19): siRNA sense strand
gaagggcauuacgagauug

SEQ ID NO: 806950 - RNA, 19 nt, Homo sapiens
  misc_RNA (1)...(19): siRNA sense strand
ugaaaguacucaacagcau

SEQ ID NO: 806951 - RNA, 19 nt, Homo sapiens
  misc_RNA (1)...(19): siRNA sense strand
gcugagagcauuggacuug

SEQ ID NO: 806952 - RNA, 19 nt, Homo sapiens
  misc_RNA (1)...(19): siRNA sense strand
gaacuacgccuugccuucu

SEQ ID NO: 806953 - RNA, 19 nt, Homo sapiens
  misc_RNA (1)...(19): siRNA sense strand
ggauggcacucagcgaaug

SEQ ID NO: 806954 - RNA, 19 nt, Homo sapiens
  misc_RNA (1)...(19): siRNA sense strand
gagcuccuauggaaacauc

SEQ ID NO: 806955 - RNA, 19 nt, Homo sapiens
  misc_RNA (1)...(19): siRNA sense strand
gcccgucgaucuucgucua

SEQ ID NO: 806956 - RNA, 19 nt, Homo sapiens
  misc_RNA (1)...(19): siRNA sense strand
gaagaauuuugcugauuug

SEQ ID NO: 806957 - RNA, 19 nt, Homo sapiens
  misc_RNA (1)...(19): siRNA sense strand
ucacugccauggaguaucu

SEQ ID NO: 806958 - RNA, 19 nt, Homo sapiens
  misc_RNA (1)...(19): siRNA sense strand
ccugggaccuggcuguuga

SEQ ID NO: 806959 - RNA, 19 nt, Homo sapiens
  misc_RNA (1)...(19): siRNA sense strand
uagcugcaaucaacccaaa

SEQ ID NO: 806960 - RNA, 19 nt, Homo sapiens
  misc_RNA (1)...(19): siRNA sense strand
ucaaguccuucaagcaguu

SEQ ID NO: 806961 - RNA, 19 nt, Homo sapiens
  misc_RNA (1)...(19): siRNA sense strand
gaacuacacgcaguacauc

SEQ ID NO: 806962 - RNA, 19 nt, Homo sapiens
  misc_RNA (1)...(19): siRNA sense strand
aaagaggcacugugagaaa

SEQ ID NO: 806963 - RNA, 19 nt, Homo sapiens
  misc_RNA (1)...(19): siRNA sense strand
ccaacgauguggccaagca

SEQ ID NO: 806964 - RNA, 19 nt, Homo sapiens
  misc_RNA (1)...(19): siRNA sense strand
gcagugagccuggccuugu

SEQ ID NO: 806965 - RNA, 19 nt, Homo sapiens
  misc_RNA (1)...(19): siRNA sense strand
gagaccggccuccucauga

SEQ ID NO: 806966 - RNA, 19 nt, Homo sapiens
  misc_RNA (1)...(19): siRNA sense strand
cacggaagauguucgacaa

SEQ ID NO: 806967 - RNA, 19 nt, Homo sapiens
  misc_RNA (1)...(19): siRNA sense strand
caucggaguuuccuuuaac

SEQ ID NO: 806968 - RNA, 19 nt, Homo sapiens
  misc_RNA (1)...(19): siRNA sense strand
caacccaaaucacccucuu

SEQ ID NO: 806969 - RNA, 19 nt, Homo sapiens
  misc_RNA (1)...(19): siRNA sense strand
ggaugaagacagucagugu

SEQ ID NO: 806970 - RNA, 19 nt, Homo sapiens
  misc_RNA (1)...(19): siRNA sense strand
cgaugcugcuggacacaaa

SEQ ID NO: 806971 - RNA, 19 nt, Homo sapiens
  misc_RNA (1)...(19): siRNA sense strand
gaugaagacagucaguguu

SEQ ID NO: 806972 - RNA, 19 nt, Homo sapiens
  misc_RNA (1)...(19): siRNA sense strand
ucaucggaguuuccuuuaa

SEQ ID NO: 806973 - RNA, 19 nt, Homo sapiens
  misc_RNA (1)...(19): siRNA sense strand
uugcagaaccugaguuuga

SEQ ID NO: 806974 - RNA, 19 nt, Homo sapiens
  misc_RNA (1)...(19): siRNA sense strand
gugcaaauuuacagaagca

SEQ ID NO: 806975 - RNA, 19 nt, Homo sapiens
  misc_RNA (1)...(19): siRNA sense strand
gcuccagccugaccaacga

SEQ ID NO: 806976 - RNA, 19 nt, Homo sapiens
  misc_RNA (1)...(19): siRNA sense strand
ucaacagcaucgccuacaa

SEQ ID NO: 806977 - RNA, 19 nt, Homo sapiens
  misc_RNA (1)...(19): siRNA sense strand
ccacagagggagggaguuu

SEQ ID NO: 806978 - RNA, 19 nt, Homo sapiens
  misc_RNA (1)...(19): siRNA sense strand
cgaggaaggcacugcguuu

SEQ ID NO: 806979 - RNA, 19 nt, Homo sapiens
  misc_RNA (1)...(19): siRNA sense strand
aggcggaccucgugaagga

SEQ ID NO: 806980 - RNA, 19 nt, Homo sapiens
  misc_RNA (1)...(19): siRNA sense strand
ggaaccuaccuuuggcuuu

SEQ ID NO: 806981 - RNA, 19 nt, Homo sapiens
  misc_RNA (1)...(19): siRNA sense strand
ggaaaccaucggugcaaau

SEQ ID NO: 806982 - RNA, 19 nt, Homo sapiens
  misc_RNA (1)...(19): siRNA sense strand
ggagaagcuggauuauuuc

SEQ ID NO: 806983 - RNA, 19 nt, Homo sapiens
  misc_RNA (1)...(19): siRNA sense strand
gaguuuccuuuaacagugu

SEQ ID NO: 806984 - RNA, 19 nt, Homo sapiens
  misc_RNA (1)...(19): siRNA sense strand
gcagagccuugacccaacu

SEQ ID NO: 806985 - RNA, 19 nt, Homo sapiens
  misc_RNA (1)...(19): siRNA sense strand
ugacccaacuguggaugaa

SEQ ID NO: 806986 - RNA, 19 nt, Homo sapiens
  misc_RNA (1)...(19): siRNA sense strand
gagcucaucaacaacauca

SEQ ID NO: 806987 - RNA, 19 nt, Homo sapiens
  misc_RNA (1)...(19): siRNA sense strand
cagaagggcauuacgagau

SEQ ID NO: 806988 - RNA, 19 nt, Homo sapiens
  misc_RNA (1)...(19): siRNA sense strand
gaaggacaacggccacaag

SEQ ID NO: 806989 - RNA, 19 nt, Homo sapiens
  misc_RNA (1)...(19): siRNA sense strand
gaucuucacagccaucaca

SEQ ID NO: 806990 - RNA, 19 nt, Homo sapiens
  misc_RNA (1)...(19): siRNA sense strand
uacagaagcaguacgagaa

SEQ ID NO: 806991 - RNA, 19 nt, Homo sapiens
  misc_RNA (1)...(19): siRNA sense strand
gaagcaacgacuacuacau

SEQ ID NO: 806992 - RNA, 19 nt, Homo sapiens
  misc_RNA (1)...(19): siRNA sense strand
caacaagggcgugcacauc

SEQ ID NO: 806993 - RNA, 19 nt, Homo sapiens
  misc_RNA (1)...(19): siRNA sense strand
ucucggacguggccaugaa

SEQ ID NO: 806994 - RNA, 19 nt, Homo sapiens
  misc_RNA (1)...(19): siRNA sense strand
ugucucagcugccgacgau

SEQ ID NO: 806995 - RNA, 19 nt, Homo sapiens
  misc_RNA (1)...(19): siRNA sense strand
ccucccggcugaccuauuc

SEQ ID NO: 806996 - RNA, 19 nt, Homo sapiens
  misc_RNA (1)...(19): siRNA sense strand
acaucccucuguccauaua

SEQ ID NO: 806997 - RNA, 19 nt, Homo sapiens
  misc_RNA (1)...(19): siRNA sense strand
cgaguccucuuucacuaca

SEQ ID NO: 806998 - RNA, 19 nt, Homo sapiens
  misc_RNA (1)...(19): siRNA sense strand
ggacacggaagauguucga

SEQ ID NO: 806999 - RNA, 19 nt, Homo sapiens
  misc_RNA (1)...(19): siRNA sense strand
ccucaucggaguuuccuuu

SEQ ID NO: 807000 - RNA, 19 nt, Homo sapiens
  misc_RNA (1)...(19): siRNA sense strand
ccaccaccaucgaccacaa

SEQ ID NO: 807001 - RNA, 19 nt, Homo sapiens
  misc_RNA (1)...(19): siRNA sense strand
aaaggauuaugaggucgua

SEQ ID NO: 807002 - RNA, 19 nt, Homo sapiens
  misc_RNA (1)...(19): siRNA sense strand
ugggugaacugaacuggau

SEQ ID NO: 807003 - RNA, 19 nt, Homo sapiens
  misc_RNA (1)...(19): siRNA sense strand
cacacuggauuugauagaa

SEQ ID NO: 807004 - RNA, 19 nt, Homo sapiens
  misc_RNA (1)...(19): siRNA sense strand
ucaagcaguucgcacuaca

SEQ ID NO: 807005 - RNA, 19 nt, Homo sapiens
  misc_RNA (1)...(19): siRNA sense strand
gaccgaagcggcagcauua

SEQ ID NO: 807006 - RNA, 19 nt, Homo sapiens
  misc_RNA (1)...(19): siRNA sense strand
caacggugcuuucccagaa

SEQ ID NO: 807007 - RNA, 19 nt, Homo sapiens
  misc_RNA (1)...(19): siRNA sense strand
ccaagaagaucaaugucaa

SEQ ID NO: 807008 - RNA, 19 nt, Homo sapiens
  misc_RNA (1)...(19): siRNA sense strand
ggacaucaaggacaacaaa

SEQ ID NO: 807009 - RNA, 19 nt, Homo sapiens
  misc_RNA (1)...(19): siRNA sense strand
ccaugaagcuggugcugaa

SEQ ID NO: 807010 - RNA, 19 nt, Homo sapiens
  misc_RNA (1)...(19): siRNA sense strand
ggaaggagcccaugaagcu

SEQ ID NO: 807011 - RNA, 19 nt, Homo sapiens
  misc_RNA (1)...(19): siRNA sense strand
gggaggaccugcaggagau

SEQ ID NO: 807012 - RNA, 19 nt, Homo sapiens
  misc_RNA (1)...(19): siRNA sense strand
gcuacgagaacauugauuu

SEQ ID NO: 807013 - RNA, 19 nt, Homo sapiens
  misc_RNA (1)...(19): siRNA sense strand
gcagagaucagcggccuaa

SEQ ID NO: 807014 - RNA, 19 nt, Homo sapiens
  misc_RNA (1)...(19): siRNA sense strand
gacaauggcuacgagaaca

SEQ ID NO: 807015 - RNA, 19 nt, Homo sapiens
  misc_RNA (1)...(19): siRNA sense strand
gaacggcaacacggaauug

SEQ ID NO: 807016 - RNA, 19 nt, Homo sapiens
  misc_RNA (1)...(19): siRNA sense strand
cgagaacauugauuucauc

SEQ ID NO: 807017 - RNA, 19 nt, Homo sapiens
  misc_RNA (1)...(19): siRNA sense strand
ggacaucgugcaccaguuc

SEQ ID NO: 807018 - RNA, 19 nt, Homo sapiens
  misc_RNA (1)...(19): siRNA sense strand
gaagccagcgccacacuca

SEQ ID NO: 807019 - RNA, 19 nt, Homo sapiens
  misc_RNA (1)...(19): siRNA sense strand
ccaccaagaagaucaaugu

SEQ ID NO: 807020 - RNA, 19 nt, Homo sapiens
  misc_RNA (1)...(19): siRNA sense strand
ggaccgaagcggcagcauu

SEQ ID NO: 807021 - RNA, 19 nt, Homo sapiens
  misc_RNA (1)...(19): siRNA sense strand
ugaccagccucaacgugaa

SEQ ID NO: 807022 - RNA, 19 nt, Homo sapiens
  misc_RNA (1)...(19): siRNA sense strand
gagaucagcggccuaagca

SEQ ID NO: 807023 - RNA, 19 nt, Homo sapiens
  misc_RNA (1)...(19): siRNA sense strand
gcuacgaccugcccaccau

SEQ ID NO: 807024 - RNA, 19 nt, Homo sapiens
  misc_RNA (1)...(19): siRNA sense strand
caacggcaccagcccuuug

SEQ ID NO: 807025 - RNA, 19 nt, Homo sapiens
  misc_RNA (1)...(19): siRNA sense strand
ggacaauggcuacgagaac

SEQ ID NO: 807026 - RNA, 19 nt, Homo sapiens
  misc_RNA (1)...(19): siRNA sense strand
ggaagggcugcauccauga

SEQ ID NO: 807027 - RNA, 19 nt, Homo sapiens
  misc_RNA (1)...(19): siRNA sense strand
gaacaccuacagccagaca

SEQ ID NO: 807028 - RNA, 19 nt, Homo sapiens
  misc_RNA (1)...(19): siRNA sense strand
aagccggcaucgacauuaa

SEQ ID NO: 807029 - RNA, 19 nt, Homo sapiens
  misc_RNA (1)...(19): siRNA sense strand
ccacacccaccuccaagaa

SEQ ID NO: 807030 - RNA, 19 nt, Homo sapiens
  misc_RNA (1)...(19): siRNA sense strand
ccacuguccguguaccaua

SEQ ID NO: 807031 - RNA, 19 nt, Homo sapiens
  misc_RNA (1)...(19): siRNA sense strand
gguagugccggcaguguga

SEQ ID NO: 807032 - RNA, 19 nt, Homo sapiens
  misc_RNA (1)...(19): siRNA sense strand
ugucugagaugcugcuaca

SEQ ID NO: 807033 - RNA, 19 nt, Homo sapiens
  misc_RNA (1)...(19): siRNA sense strand
gggcgaccaaggauuauug

SEQ ID NO: 807034 - RNA, 19 nt, Homo sapiens
  misc_RNA (1)...(19): siRNA sense strand
caagccggcaucgacauua

SEQ ID NO: 807035 - RNA, 19 nt, Homo sapiens
  misc_RNA (1)...(19): siRNA sense strand
ggagaucaagcagcuguug

SEQ ID NO: 807036 - RNA, 19 nt, Homo sapiens
  misc_RNA (1)...(19): siRNA sense strand
ggugaaggcggaggacgua

SEQ ID NO: 807037 - RNA, 19 nt, Homo sapiens
  misc_RNA (1)...(19): siRNA sense strand
cgaccaaggauuauugcaa

SEQ ID NO: 807038 - RNA, 19 nt, Homo sapiens
  misc_RNA (1)...(19): siRNA sense strand
ccgugaacaucccgucuga

SEQ ID NO: 807039 - RNA, 19 nt, Homo sapiens
  misc_RNA (1)...(19): siRNA sense strand
cacuguccguguaccauaa

SEQ ID NO: 807040 - RNA, 19 nt, Homo sapiens
  misc_RNA (1)...(19): siRNA sense strand
caccgccacuguccgugua

SEQ ID NO: 807041 - RNA, 19 nt, Homo sapiens
  misc_RNA (1)...(19): siRNA sense strand
agacagcccuggacaucgu

SEQ ID NO: 807042 - RNA, 19 nt, Homo sapiens
  misc_RNA (1)...(19): siRNA sense strand
acuaugaugugucugagau

SEQ ID NO: 807043 - RNA, 19 nt, Homo sapiens
  misc_RNA (1)...(19): siRNA sense strand
ggcccagcauggucacuau

SEQ ID NO: 807044 - RNA, 19 nt, Homo sapiens
  misc_RNA (1)...(19): siRNA sense strand
ucaaugcccacgugaggaa

SEQ ID NO: 807045 - RNA, 19 nt, Homo sapiens
  misc_RNA (1)...(19): siRNA sense strand
gcugcgcucugcggaaaga

SEQ ID NO: 807046 - RNA, 19 nt, Homo sapiens
  misc_RNA (1)...(19): siRNA sense strand
gcagcauccuggacgacau

SEQ ID NO: 807047 - RNA, 19 nt, Homo sapiens
  misc_RNA (1)...(19): siRNA sense strand
cuggauagcgggaucaaug

SEQ ID NO: 807048 - RNA, 19 nt, Homo sapiens
  misc_RNA (1)...(19): siRNA sense strand
ccaagccggcaucgacauu

SEQ ID NO: 807049 - RNA, 19 nt, Homo sapiens
  misc_RNA (1)...(19): siRNA sense strand
acgagaacauugauuucau

SEQ ID NO: 807050 - RNA, 19 nt, Homo sapiens
  misc_RNA (1)...(19): siRNA sense strand
cagcauggucacuaugaug

SEQ ID NO: 807051 - RNA, 19 nt, Homo sapiens
  misc_RNA (1)...(19): siRNA sense strand
ccgcaggugccgacaagaa

SEQ ID NO: 807052 - RNA, 19 nt, Homo sapiens
  misc_RNA (1)...(19): siRNA sense strand
acaagguguugguggacaa

SEQ ID NO: 807053 - RNA, 19 nt, Homo sapiens
  misc_RNA (1)...(19): siRNA sense strand
gggcgaggccauugucaag

SEQ ID NO: 807054 - RNA, 19 nt, Homo sapiens
  misc_RNA (1)...(19): siRNA sense strand
gugcggcugcugcuggaua

SEQ ID NO: 807055 - RNA, 19 nt, Homo sapiens
  misc_RNA (1)...(19): siRNA sense strand
cuuugcaccucgcagcuaa

SEQ ID NO: 807056 - RNA, 19 nt, Homo sapiens
  misc_RNA (1)...(19): siRNA sense strand
cauggucacuaugaugugu

SEQ ID NO: 807057 - RNA, 19 nt, Homo sapiens
  misc_RNA (1)...(19): siRNA sense strand
ccagcauggucacuaugau

SEQ ID NO: 807058 - RNA, 19 nt, Homo sapiens
  misc_RNA (1)...(19): siRNA sense strand
cagcuacggccaaggugaa

SEQ ID NO: 807059 - RNA, 19 nt, Homo sapiens
  misc_RNA (1)...(19): siRNA sense strand
aggcugcgcucugcggaaa

SEQ ID NO: 807060 - RNA, 19 nt, Homo sapiens
  misc_RNA (1)...(19): siRNA sense strand
ccguguggcuguccaugau

SEQ ID NO: 807061 - RNA, 19 nt, Homo sapiens
  misc_RNA (1)...(19): siRNA sense strand
agaucugggugcugaggaa

SEQ ID NO: 807062 - RNA, 19 nt, Homo sapiens
  misc_RNA (1)...(19): siRNA sense strand
ugcaggcgguggaggagaa

SEQ ID NO: 807063 - RNA, 19 nt, Homo sapiens
  misc_RNA (1)...(19): siRNA sense strand
cgugcuggccucagugaaa

SEQ ID NO: 807064 - RNA, 19 nt, Homo sapiens
  misc_RNA (1)...(19): siRNA sense strand
caaccgcagccaguccuuu

SEQ ID NO: 807065 - RNA, 19 nt, Homo sapiens
  misc_RNA (1)...(19): siRNA sense strand
cccagucucuugaagugau

SEQ ID NO: 807066 - RNA, 19 nt, Homo sapiens
  misc_RNA (1)...(19): siRNA sense strand
ggccacaucgacaucauca

SEQ ID NO: 807067 - RNA, 19 nt, Homo sapiens
  misc_RNA (1)...(19): siRNA sense strand
cuacgagaacauugauuuc

SEQ ID NO: 807068 - RNA, 19 nt, Homo sapiens
  misc_RNA (1)...(19): siRNA sense strand
ccaaggauuauugcaacaa

SEQ ID NO: 807069 - RNA, 19 nt, Homo sapiens
  misc_RNA (1)...(19): siRNA sense strand
cggcaacacggaauugauc

SEQ ID NO: 807070 - RNA, 19 nt, Homo sapiens
  misc_RNA (1)...(19): siRNA sense strand
gcagaaacuggaggagaca

SEQ ID NO: 807071 - RNA, 19 nt, Homo sapiens
  misc_RNA (1)...(19): siRNA sense strand
ggccuaagcaucccugacu

SEQ ID NO: 807072 - RNA, 19 nt, Homo sapiens
  misc_RNA (1)...(19): siRNA sense strand
gcaaagaguuguuggaaua

SEQ ID NO: 807073 - RNA, 19 nt, Homo sapiens
  misc_RNA (1)...(19): siRNA sense strand
gcaauaaacucugcacuuu

SEQ ID NO: 807074 - RNA, 19 nt, Homo sapiens
  misc_RNA (1)...(19): siRNA sense strand
ggaccaagcugaucgauga

SEQ ID NO: 807075 - RNA, 19 nt, Homo sapiens
  misc_RNA (1)...(19): siRNA sense strand
gaaguaccguucuguuaua

SEQ ID NO: 807076 - RNA, 19 nt, Homo sapiens
  misc_RNA (1)...(19): siRNA sense strand
caaagaagaugacuaugaa

SEQ ID NO: 807077 - RNA, 19 nt, Homo sapiens
  misc_RNA (1)...(19): siRNA sense strand
ucaaaucacugcuggaaua

SEQ ID NO: 807078 - RNA, 19 nt, Homo sapiens
  misc_RNA (1)...(19): siRNA sense strand
gaaccucucugcuaaauuc

SEQ ID NO: 807079 - RNA, 19 nt, Homo sapiens
  misc_RNA (1)...(19): siRNA sense strand
ggacaaagauggacucaag

SEQ ID NO: 807080 - RNA, 19 nt, Homo sapiens
  misc_RNA (1)...(19): siRNA sense strand
gaucacagcucgcuccauu

SEQ ID NO: 807081 - RNA, 19 nt, Homo sapiens
  misc_RNA (1)...(19): siRNA sense strand
gcugugagcuucucuugua

SEQ ID NO: 807082 - RNA, 19 nt, Homo sapiens
  misc_RNA (1)...(19): siRNA sense strand
caacauccaugacaucaaa

SEQ ID NO: 807083 - RNA, 19 nt, Homo sapiens
  misc_RNA (1)...(19): siRNA sense strand
gcaaagagggcaaggauuu

SEQ ID NO: 807084 - RNA, 19 nt, Homo sapiens
  misc_RNA (1)...(19): siRNA sense strand
gcuaauuccuucuucauaa

SEQ ID NO: 807085 - RNA, 19 nt, Homo sapiens
  misc_RNA (1)...(19): siRNA sense strand
gaacaaauuugccgauaag

SEQ ID NO: 807086 - RNA, 19 nt, Homo sapiens
  misc_RNA (1)...(19): siRNA sense strand
ucaagaagcugcuagaaga

SEQ ID NO: 807087 - RNA, 19 nt, Homo sapiens
  misc_RNA (1)...(19): siRNA sense strand
gcaaagauccugaguuguu

SEQ ID NO: 807088 - RNA, 19 nt, Homo sapiens
  misc_RNA (1)...(19): siRNA sense strand
gaacguggcuagucuucaa

SEQ ID NO: 807089 - RNA, 19 nt, Homo sapiens
  misc_RNA (1)...(19): siRNA sense strand
guacugugcugaauggaua

SEQ ID NO: 807090 - RNA, 19 nt, Homo sapiens
  misc_RNA (1)...(19): siRNA sense strand
ccacaaggaucaugagauu

SEQ ID NO: 807091 - RNA, 19 nt, Homo sapiens
  misc_RNA (1)...(19): siRNA sense strand
caacauggaugcucagaug

SEQ ID NO: 807092 - RNA, 19 nt, Homo sapiens
  misc_RNA (1)...(19): siRNA sense strand
caaguagccugcaguauga

SEQ ID NO: 807093 - RNA, 19 nt, Homo sapiens
  misc_RNA (1)...(19): siRNA sense strand
gcaagcagauuccagcaaa

SEQ ID NO: 807094 - RNA, 19 nt, Homo sapiens
  misc_RNA (1)...(19): siRNA sense strand
gaacuggcauccaccacua

SEQ ID NO: 807095 - RNA, 19 nt, Homo sapiens
  misc_RNA (1)...(19): siRNA sense strand
agacagaggugaagauuga

SEQ ID NO: 807096 - RNA, 19 nt, Homo sapiens
  misc_RNA (1)...(19): siRNA sense strand
ggagauugcuguaguuuca

SEQ ID NO: 807097 - RNA, 19 nt, Homo sapiens
  misc_RNA (1)...(19): siRNA sense strand
cauaaugccugcaacagua

SEQ ID NO: 807098 - RNA, 19 nt, Homo sapiens
  misc_RNA (1)...(19): siRNA sense strand
cuacgaagcugccgacaaa

SEQ ID NO: 807099 - RNA, 19 nt, Homo sapiens
  misc_RNA (1)...(19): siRNA sense strand
gagcaaagcugugcagugu

SEQ ID NO: 807100 - RNA, 19 nt, Homo sapiens
  misc_RNA (1)...(19): siRNA sense strand
ccaucaaccuguauuauaa

SEQ ID NO: 807101 - RNA, 19 nt, Homo sapiens
  misc_RNA (1)...(19): siRNA sense strand
agaagaagaugaagaagaa

SEQ ID NO: 807102 - RNA, 19 nt, Homo sapiens
  misc_RNA (1)...(19): siRNA sense strand
gaaagcaugugaugaucuu

SEQ ID NO: 807103 - RNA, 19 nt, Homo sapiens
  misc_RNA (1)...(19): siRNA sense strand
ccaccaggcugacagauaa

SEQ ID NO: 807104 - RNA, 19 nt, Homo sapiens
  misc_RNA (1)...(19): siRNA sense strand
gcauggagcuucuagugaa

SEQ ID NO: 807105 - RNA, 19 nt, Homo sapiens
  misc_RNA (1)...(19): siRNA sense strand
ugaaccagcugaacaaauu

SEQ ID NO: 807106 - RNA, 19 nt, Homo sapiens
  misc_RNA (1)...(19): siRNA sense strand
ggacaacccuggagguguu

SEQ ID NO: 807107 - RNA, 19 nt, Homo sapiens
  misc_RNA (1)...(19): siRNA sense strand
ucaaggagguggacaaaga

SEQ ID NO: 807108 - RNA, 19 nt, Homo sapiens
  misc_RNA (1)...(19): siRNA sense strand
gaaagccugugcagagauu

SEQ ID NO: 807109 - RNA, 19 nt, Homo sapiens
  misc_RNA (1)...(19): siRNA sense strand
ccaaugaauuucccaauau

SEQ ID NO: 807110 - RNA, 19 nt, Homo sapiens
  misc_RNA (1)...(19): siRNA sense strand
agaaaugucucgaaaucua

SEQ ID NO: 807111 - RNA, 19 nt, Homo sapiens
  misc_RNA (1)...(19): siRNA sense strand
ccugugcccuucaauauua

SEQ ID NO: 807112 - RNA, 19 nt, Homo sapiens
  misc_RNA (1)...(19): siRNA sense strand
cgacacugguucagaauuu

SEQ ID NO: 807113 - RNA, 19 nt, Homo sapiens
  misc_RNA (1)...(19): siRNA sense strand
uaaacaagcucuaauucga

SEQ ID NO: 807114 - RNA, 19 nt, Homo sapiens
  misc_RNA (1)...(19): siRNA sense strand
gaaacuccaugcauccaaa

SEQ ID NO: 807115 - RNA, 19 nt, Homo sapiens
  misc_RNA (1)...(19): siRNA sense strand
ggaaggagauugcuguagu

SEQ ID NO: 807116 - RNA, 19 nt, Homo sapiens
  misc_RNA (1)...(19): siRNA sense strand
gaagaugacuaugaaagug

SEQ ID NO: 807117 - RNA, 19 nt, Homo sapiens
  misc_RNA (1)...(19): siRNA sense strand
caaagguccugggcauuua

SEQ ID NO: 807118 - RNA, 19 nt, Homo sapiens
  misc_RNA (1)...(19): siRNA sense strand
gcaaguagccugcaguaug

SEQ ID NO: 807119 - RNA, 19 nt, Homo sapiens
  misc_RNA (1)...(19): siRNA sense strand
gaucaagccucagcuauca

SEQ ID NO: 807120 - RNA, 19 nt, Homo sapiens
  misc_RNA (1)...(19): siRNA sense strand
gcuacaaucuggaugacua

SEQ ID NO: 807121 - RNA, 19 nt, Homo sapiens
  misc_RNA (1)...(19): siRNA sense strand
gaaggagauugcuguaguu

SEQ ID NO: 807122 - RNA, 19 nt, Homo sapiens
  misc_RNA (1)...(19): siRNA sense strand
gaagagaagcccaagaaga

SEQ ID NO: 807123 - RNA, 19 nt, Homo sapiens
  misc_RNA (1)...(19): siRNA sense strand
guaaagcuauggaggaguu

SEQ ID NO: 807124 - RNA, 19 nt, Homo sapiens
  misc_RNA (1)...(19): siRNA sense strand
caacaucaauaccaaugaa

SEQ ID NO: 807125 - RNA, 19 nt, Homo sapiens
  misc_RNA (1)...(19): siRNA sense strand
ggaacaacaucaauaccaa

SEQ ID NO: 807126 - RNA, 19 nt, Homo sapiens
  misc_RNA (1)...(19): siRNA sense strand
cagaaugccuuaaaguuug

SEQ ID NO: 807127 - RNA, 19 nt, Homo sapiens
  misc_RNA (1)...(19): siRNA sense strand
gaguguaucucuuucagaa

SEQ ID NO: 807128 - RNA, 19 nt, Homo sapiens
  misc_RNA (1)...(19): siRNA sense strand
guuugaaccugccauauuu

SEQ ID NO: 807129 - RNA, 19 nt, Homo sapiens
  misc_RNA (1)...(19): siRNA sense strand
agaagaaguugaaggagua

SEQ ID NO: 807130 - RNA, 19 nt, Homo sapiens
  misc_RNA (1)...(19): siRNA sense strand
cuacagaaauuccagcaaa

SEQ ID NO: 807131 - RNA, 19 nt, Homo sapiens
  misc_RNA (1)...(19): siRNA sense strand
caucaaagccgugugguua

SEQ ID NO: 807132 - RNA, 19 nt, Homo sapiens
  misc_RNA (1)...(19): siRNA sense strand
gcaguuggcucaggaguau

SEQ ID NO: 807133 - RNA, 19 nt, Homo sapiens
  misc_RNA (1)...(19): siRNA sense strand
caagcugucuuccauuaaa

SEQ ID NO: 807134 - RNA, 19 nt, Homo sapiens
  misc_RNA (1)...(19): siRNA sense strand
ccagaaaugucucgaaauc

SEQ ID NO: 807135 - RNA, 19 nt, Homo sapiens
  misc_RNA (1)...(19): siRNA sense strand
gaauuccacuggcauguau

SEQ ID NO: 807136 - RNA, 19 nt, Homo sapiens
  misc_RNA (1)...(19): siRNA sense strand
gcugaugguucccaccuua

SEQ ID NO: 807137 - RNA, 19 nt, Homo sapiens
  misc_RNA (1)...(19): siRNA sense strand
gaaacuaucugaguguauc

SEQ ID NO: 807138 - RNA, 19 nt, Homo sapiens
  misc_RNA (1)...(19): siRNA sense strand
cgucugagauuaccaagaa

SEQ ID NO: 807139 - RNA, 19 nt, Homo sapiens
  misc_RNA (1)...(19): siRNA sense strand
uccgggagcucuuugauua

SEQ ID NO: 807140 - RNA, 19 nt, Homo sapiens
  misc_RNA (1)...(19): siRNA sense strand
ggaagcagccacuaaauca

SEQ ID NO: 807141 - RNA, 19 nt, Homo sapiens
  misc_RNA (1)...(19): siRNA sense strand
guucuuggcucguguuuau

SEQ ID NO: 807142 - RNA, 19 nt, Homo sapiens
  misc_RNA (1)...(19): siRNA sense strand
ccaaagaagaugacuauga

SEQ ID NO: 807143 - RNA, 19 nt, Homo sapiens
  misc_RNA (1)...(19): siRNA sense strand
ugaaugaccugauuauugg

SEQ ID NO: 807144 - RNA, 19 nt, Homo sapiens
  misc_RNA (1)...(19): siRNA sense strand
gcacaaagccaagaagguu

SEQ ID NO: 807145 - RNA, 19 nt, Homo sapiens
  misc_RNA (1)...(19): siRNA sense strand
gaaugaaguccaucuggua

SEQ ID NO: 807146 - RNA, 19 nt, Homo sapiens
  misc_RNA (1)...(19): siRNA sense strand
caacacaucuagcaaagag

SEQ ID NO: 807147 - RNA, 19 nt, Homo sapiens
  misc_RNA (1)...(19): siRNA sense strand
cgacagaucucauccuucu

SEQ ID NO: 807148 - RNA, 19 nt, Homo sapiens
  misc_RNA (1)...(19): siRNA sense strand
ucgcaaagauccugaguug

SEQ ID NO: 807149 - RNA, 19 nt, Homo sapiens
  misc_RNA (1)...(19): siRNA sense strand
ugaagucacugaguucuuu

SEQ ID NO: 807150 - RNA, 19 nt, Homo sapiens
  misc_RNA (1)...(19): siRNA sense strand
ggaagaaggcuguauccaa

SEQ ID NO: 807151 - RNA, 19 nt, Homo sapiens
  misc_RNA (1)...(19): siRNA sense strand
gcagauccaucaacuacga

SEQ ID NO: 807152 - RNA, 19 nt, Homo sapiens
  misc_RNA (1)...(19): siRNA sense strand
ccagaaugccuuaaaguuu

SEQ ID NO: 807153 - RNA, 19 nt, Homo sapiens
  misc_RNA (1)...(19): siRNA sense strand
acacuuaccuccaggaaug

SEQ ID NO: 807154 - RNA, 19 nt, Homo sapiens
  misc_RNA (1)...(19): siRNA sense strand
ggaaguaccguucuguuau

SEQ ID NO: 807155 - RNA, 19 nt, Homo sapiens
  misc_RNA (1)...(19): siRNA sense strand
gaaggaguauucacagaag

SEQ ID NO: 807156 - RNA, 19 nt, Homo sapiens
  misc_RNA (1)...(19): siRNA sense strand
gcaaagcugugcagugucu

SEQ ID NO: 807157 - RNA, 19 nt, Homo sapiens
  misc_RNA (1)...(19): siRNA sense strand
ucacuaauguguuggaaau

SEQ ID NO: 807158 - RNA, 19 nt, Homo sapiens
  misc_RNA (1)...(19): siRNA sense strand
cugccaagcucaaagauaa

SEQ ID NO: 807159 - RNA, 19 nt, Homo sapiens
  misc_RNA (1)...(19): siRNA sense strand
gaacuuguacagaucauga

SEQ ID NO: 807160 - RNA, 19 nt, Homo sapiens
  misc_RNA (1)...(19): siRNA sense strand
ggugagcacuaucagaauu

SEQ ID NO: 807161 - RNA, 19 nt, Homo sapiens
  misc_RNA (1)...(19): siRNA sense strand
gagcagguguccagugaug

SEQ ID NO: 807162 - RNA, 19 nt, Homo sapiens
  misc_RNA (1)...(19): siRNA sense strand
gaccacagguacagaauca

SEQ ID NO: 807163 - RNA, 19 nt, Homo sapiens
  misc_RNA (1)...(19): siRNA sense strand
ugaacaaauuugccgauaa

SEQ ID NO: 807164 - RNA, 19 nt, Homo sapiens
  misc_RNA (1)...(19): siRNA sense strand
gcacaugguccgucuaaug

SEQ ID NO: 807165 - RNA, 19 nt, Homo sapiens
  misc_RNA (1)...(19): siRNA sense strand
ccugugagcuggauuguau

SEQ ID NO: 807166 - RNA, 19 nt, Homo sapiens
  misc_RNA (1)...(19): siRNA sense strand
guagcucagugaaauauga

SEQ ID NO: 807167 - RNA, 19 nt, Homo sapiens
  misc_RNA (1)...(19): siRNA sense strand
ccacagaggaguucauuga

SEQ ID NO: 807168 - RNA, 19 nt, Homo sapiens
  misc_RNA (1)...(19): siRNA sense strand
gcaagaagaacaaggaugu

SEQ ID NO: 807169 - RNA, 19 nt, Homo sapiens
  misc_RNA (1)...(19): siRNA sense strand
ggaaccaacuucagucagu

SEQ ID NO: 807170 - RNA, 19 nt, Homo sapiens
  misc_RNA (1)...(19): siRNA sense strand
cagaaauccugcaccauga

SEQ ID NO: 807171 - RNA, 19 nt, Homo sapiens
  misc_RNA (1)...(19): siRNA sense strand
gcagcagccuguaaaguuc

SEQ ID NO: 807172 - RNA, 19 nt, Homo sapiens
  misc_RNA (1)...(19): siRNA sense strand
guacggcacucauuucuua

SEQ ID NO: 807173 - RNA, 19 nt, Homo sapiens
  misc_RNA (1)...(19): siRNA sense strand
gaauuuggguuacaugaaa

SEQ ID NO: 807174 - RNA, 19 nt, Homo sapiens
  misc_RNA (1)...(19): siRNA sense strand
gaugacagcuccaaugaga

SEQ ID NO: 807175 - RNA, 19 nt, Homo sapiens
  misc_RNA (1)...(19): siRNA sense strand
ggacuuaauucuccaguug

SEQ ID NO: 807176 - RNA, 19 nt, Homo sapiens
  misc_RNA (1)...(19): siRNA sense strand
gcugggagcuggcuugaaa

SEQ ID NO: 807177 - RNA, 19 nt, Homo sapiens
  misc_RNA (1)...(19): siRNA sense strand
gggaauagguggaagacuu

SEQ ID NO: 807178 - RNA, 19 nt, Homo sapiens
  misc_RNA (1)...(19): siRNA sense strand
gaagagucccugaccauuu

SEQ ID NO: 807179 - RNA, 19 nt, Homo sapiens
  misc_RNA (1)...(19): siRNA sense strand
ggaguaugcugacuucaug

SEQ ID NO: 807180 - RNA, 19 nt, Homo sapiens
  misc_RNA (1)...(19): siRNA sense strand
ggaaaggacuaacguggau

SEQ ID NO: 807181 - RNA, 19 nt, Homo sapiens
  misc_RNA (1)...(19): siRNA sense strand
gaaugcaacugcccugaug

SEQ ID NO: 807182 - RNA, 19 nt, Homo sapiens
  misc_RNA (1)...(19): siRNA sense strand
gcacucagcuacaucacau

SEQ ID NO: 807183 - RNA, 19 nt, Homo sapiens
  misc_RNA (1)...(19): siRNA sense strand
ccaaugagacaaucuacua

SEQ ID NO: 807184 - RNA, 19 nt, Homo sapiens
  misc_RNA (1)...(19): siRNA sense strand
gcacucauuucuuacuuuc

SEQ ID NO: 807185 - RNA, 19 nt, Homo sapiens
  misc_RNA (1)...(19): siRNA sense strand
caaacccuguggaauauga

SEQ ID NO: 807186 - RNA, 19 nt, Homo sapiens
  misc_RNA (1)...(19): siRNA sense strand
ugacugaucccucuaagaa

SEQ ID NO: 807187 - RNA, 19 nt, Homo sapiens
  misc_RNA (1)...(19): siRNA sense strand
ccacagcuaucucccaguu

SEQ ID NO: 807188 - RNA, 19 nt, Homo sapiens
  misc_RNA (1)...(19): siRNA sense strand
ggaauagguggaagacuuu

SEQ ID NO: 807189 - RNA, 19 nt, Homo sapiens
  misc_RNA (1)...(19): siRNA sense strand
ccaggacucugcacucuug

SEQ ID NO: 807190 - RNA, 19 nt, Homo sapiens
  misc_RNA (1)...(19): siRNA sense strand
caacuuggcucuggaaagg

SEQ ID NO: 807191 - RNA, 19 nt, Homo sapiens
  misc_RNA (1)...(19): siRNA sense strand
gccaaacccuguggaauau

SEQ ID NO: 807192 - RNA, 19 nt, Homo sapiens
  misc_RNA (1)...(19): siRNA sense strand
gaagcaggauagccgcauu

SEQ ID NO: 807193 - RNA, 19 nt, Homo sapiens
  misc_RNA (1)...(19): siRNA sense strand
ccacugugcuccagacaau

SEQ ID NO: 807194 - RNA, 19 nt, Homo sapiens
  misc_RNA (1)...(19): siRNA sense strand
gagguacacuccaucuuca

SEQ ID NO: 807195 - RNA, 19 nt, Homo sapiens
  misc_RNA (1)...(19): siRNA sense strand
gaagaaagacagagacaac

SEQ ID NO: 807196 - RNA, 19 nt, Homo sapiens
  misc_RNA (1)...(19): siRNA sense strand
gcuacagccugcccuuuga

SEQ ID NO: 807197 - RNA, 19 nt, Homo sapiens
  misc_RNA (1)...(19): siRNA sense strand
ccucuaagaauuuggguua

SEQ ID NO: 807198 - RNA, 19 nt, Homo sapiens
  misc_RNA (1)...(19): siRNA sense strand
gaacaacuuggcucuggaa

SEQ ID NO: 807199 - RNA, 19 nt, Homo sapiens
  misc_RNA (1)...(19): siRNA sense strand
ugagggcuuucaauucuaa

SEQ ID NO: 807200 - RNA, 19 nt, Homo sapiens
  misc_RNA (1)...(19): siRNA sense strand
ggcuuaagcuggccaacaa

SEQ ID NO: 807201 - RNA, 19 nt, Homo sapiens
  misc_RNA (1)...(19): siRNA sense strand
ugaaaaggcugcccgauga

SEQ ID NO: 807202 - RNA, 19 nt, Homo sapiens
  misc_RNA (1)...(19): siRNA sense strand
gaaucaagucccuggauga

SEQ ID NO: 807203 - RNA, 19 nt, Homo sapiens
  misc_RNA (1)...(19): siRNA sense strand
gacaguucauguuuaccua

SEQ ID NO: 807204 - RNA, 19 nt, Homo sapiens
  misc_RNA (1)...(19): siRNA sense strand
gaguuuauccggaacauuc

SEQ ID NO: 807205 - RNA, 19 nt, Homo sapiens
  misc_RNA (1)...(19): siRNA sense strand
ugccaaacccuguggaaua

SEQ ID NO: 807206 - RNA, 19 nt, Homo sapiens
  misc_RNA (1)...(19): siRNA sense strand
caguuggacuacccauaua

SEQ ID NO: 807207 - RNA, 19 nt, Homo sapiens
  misc_RNA (1)...(19): siRNA sense strand
acugaucccucuaagaauu

SEQ ID NO: 807208 - RNA, 19 nt, Homo sapiens
  misc_RNA (1)...(19): siRNA sense strand
gagggcagcuuuccugacu

SEQ ID NO: 807209 - RNA, 19 nt, Homo sapiens
  misc_RNA (1)...(19): siRNA sense strand
agagaacaaaguacaguua

SEQ ID NO: 807210 - RNA, 19 nt, Homo sapiens
  misc_RNA (1)...(19): siRNA sense strand
gaacauucgccuccuugga

SEQ ID NO: 807211 - RNA, 19 nt, Homo sapiens
  misc_RNA (1)...(19): siRNA sense strand
agucaguucugucuuggua

SEQ ID NO: 807212 - RNA, 19 nt, Homo sapiens
  misc_RNA (1)...(19): siRNA sense strand
uugagacaguucauguuua

SEQ ID NO: 807213 - RNA, 19 nt, Homo sapiens
  misc_RNA (1)...(19): siRNA sense strand
ccaccgcgcucaggaguau

SEQ ID NO: 807214 - RNA, 19 nt, Homo sapiens
  misc_RNA (1)...(19): siRNA sense strand
gcauugagguacacuccau

SEQ ID NO: 807215 - RNA, 19 nt, Homo sapiens
  misc_RNA (1)...(19): siRNA sense strand
ccugagggcuuucaauucu

SEQ ID NO: 807216 - RNA, 19 nt, Homo sapiens
  misc_RNA (1)...(19): siRNA sense strand
ugagacaguucauguuuac

SEQ ID NO: 807217 - RNA, 19 nt, Homo sapiens
  misc_RNA (1)...(19): siRNA sense strand
ggacuacccauauacucaa

SEQ ID NO: 807218 - RNA, 19 nt, Homo sapiens
  misc_RNA (1)...(19): siRNA sense strand
ggcacucauuucuuacuuu

SEQ ID NO: 807219 - RNA, 19 nt, Homo sapiens
  misc_RNA (1)...(19): siRNA sense strand
cuacggagccgaaucaagu

SEQ ID NO: 807220 - RNA, 19 nt, Homo sapiens
  misc_RNA (1)...(19): siRNA sense strand
cagcaacuaugacaaucug

SEQ ID NO: 807221 - RNA, 19 nt, Homo sapiens
  misc_RNA (1)...(19): siRNA sense strand
ccaguuggacuacccauau

SEQ ID NO: 807222 - RNA, 19 nt, Homo sapiens
  misc_RNA (1)...(19): siRNA sense strand
gagaagagucccugaccau

SEQ ID NO: 807223 - RNA, 19 nt, Homo sapiens
  misc_RNA (1)...(19): siRNA sense strand
ggauagccgcauugaggua

SEQ ID NO: 807224 - RNA, 19 nt, Homo sapiens
  misc_RNA (1)...(19): siRNA sense strand
gcaugcugcucacccugaa

SEQ ID NO: 807225 - RNA, 19 nt, Homo sapiens
  misc_RNA (1)...(19): siRNA sense strand
gaugcuauccgggacuuaa

SEQ ID NO: 807226 - RNA, 19 nt, Homo sapiens
  misc_RNA (1)...(19): siRNA sense strand
cagaaacugggaagaaaga

SEQ ID NO: 807227 - RNA, 19 nt, Homo sapiens
  misc_RNA (1)...(19): siRNA sense strand
augagacaaucuacuauga

SEQ ID NO: 807228 - RNA, 19 nt, Homo sapiens
  misc_RNA (1)...(19): siRNA sense strand
gcaccuuuccuggcacuuu

SEQ ID NO: 807229 - RNA, 19 nt, Homo sapiens
  misc_RNA (1)...(19): siRNA sense strand
ccagguacaggauuuauag

SEQ ID NO: 807230 - RNA, 19 nt, Homo sapiens
  misc_RNA (1)...(19): siRNA sense strand
guacagaguccagagaaca

SEQ ID NO: 807231 - RNA, 19 nt, Homo sapiens
  misc_RNA (1)...(19): siRNA sense strand
uggacuggcugcucacaga

SEQ ID NO: 807232 - RNA, 19 nt, Homo sapiens
  misc_RNA (1)...(19): siRNA sense strand
cggcaaacucuguagcuaa

SEQ ID NO: 807233 - RNA, 19 nt, Homo sapiens
  misc_RNA (1)...(19): siRNA sense strand
agaucugucucaccaagaa

SEQ ID NO: 807234 - RNA, 19 nt, Homo sapiens
  misc_RNA (1)...(19): siRNA sense strand
ggaagaaagacagagacaa

SEQ ID NO: 807235 - RNA, 19 nt, Homo sapiens
  misc_RNA (1)...(19): siRNA sense strand
gcagaaacugggaagaaag

SEQ ID NO: 807236 - RNA, 19 nt, Homo sapiens
  misc_RNA (1)...(19): siRNA sense strand
acaaugaggugggcaggau

SEQ ID NO: 807237 - RNA, 19 nt, Homo sapiens
  misc_RNA (1)...(19): siRNA sense strand
uuccugaacuccacagcua

SEQ ID NO: 807238 - RNA, 19 nt, Homo sapiens
  misc_RNA (1)...(19): siRNA sense strand
ugaagagucagaagaguuc

SEQ ID NO: 807239 - RNA, 19 nt, Homo sapiens
  misc_RNA (1)...(19): siRNA sense strand
agggugagcucgucugcaa

SEQ ID NO: 807240 - RNA, 19 nt, Homo sapiens
  misc_RNA (1)...(19): siRNA sense strand
gaaacugggaagaaagaca

SEQ ID NO: 807241 - RNA, 19 nt, Homo sapiens
  misc_RNA (1)...(19): siRNA sense strand
gggacuuaauucuccaguu

SEQ ID NO: 807242 - RNA, 19 nt, Homo sapiens
  misc_RNA (1)...(19): siRNA sense strand
agcagaaacugggaagaaa

SEQ ID NO: 807243 - RNA, 19 nt, Homo sapiens
  misc_RNA (1)...(19): siRNA sense strand
ggaauaugagaccggcaaa

SEQ ID NO: 807244 - RNA, 19 nt, Homo sapiens
  misc_RNA (1)...(19): siRNA sense strand
ugagguacacuccaucuuc

SEQ ID NO: 807245 - RNA, 19 nt, Homo sapiens
  misc_RNA (1)...(19): siRNA sense strand
gcagcacucagcuacauca

SEQ ID NO: 807246 - RNA, 19 nt, Homo sapiens
  misc_RNA (1)...(19): siRNA sense strand
gagaacaaaguacaguuac

SEQ ID NO: 807247 - RNA, 19 nt, Homo sapiens
  misc_RNA (1)...(19): siRNA sense strand
gaugacugaucccucuaag

SEQ ID NO: 807248 - RNA, 19 nt, Homo sapiens
  misc_RNA (1)...(19): siRNA sense strand
caaugagacaaucuacuau

SEQ ID NO: 807249 - RNA, 19 nt, Homo sapiens
  misc_RNA (1)...(19): siRNA sense strand
gcuccaaugagacaaucua

SEQ ID NO: 807250 - RNA, 19 nt, Homo sapiens
  misc_RNA (1)...(19): siRNA sense strand
ugacagcuccaaugagaca

SEQ ID NO: 807251 - RNA, 19 nt, Homo sapiens
  misc_RNA (1)...(19): siRNA sense strand
guacacuccaucuucauca

SEQ ID NO: 807252 - RNA, 19 nt, Homo sapiens
  misc_RNA (1)...(19): siRNA sense strand
gagagguccuuguccuacu

SEQ ID NO: 807253 - RNA, 19 nt, Homo sapiens
  misc_RNA (1)...(19): siRNA sense strand
aaagacccaucggauccua

SEQ ID NO: 807254 - RNA, 19 nt, Homo sapiens
  misc_RNA (1)...(19): siRNA sense strand
ccucugggcugcagcaacu

SEQ ID NO: 807255 - RNA, 19 nt, Homo sapiens
  misc_RNA (1)...(19): siRNA sense strand
cuaagaauuuggguuacau

SEQ ID NO: 807256 - RNA, 19 nt, Homo sapiens
  misc_RNA (1)...(19): siRNA sense strand
ggaccuggagcuaaaguac

SEQ ID NO: 807257 - RNA, 19 nt, Homo sapiens
  misc_RNA (1)...(19): siRNA sense strand
aagagucccugaccauuuu

SEQ ID NO: 807258 - RNA, 19 nt, Homo sapiens
  misc_RNA (1)...(19): siRNA sense strand
gcaacagguuacagaaaau

SEQ ID NO: 807259 - RNA, 19 nt, Homo sapiens
  misc_RNA (1)...(19): siRNA sense strand
caggauuuauagggaguuu

SEQ ID NO: 807260 - RNA, 19 nt, Homo sapiens
  misc_RNA (1)...(19): siRNA sense strand
gaagagcaacaaguacaag

SEQ ID NO: 807261 - RNA, 19 nt, Homo sapiens
  misc_RNA (1)...(19): siRNA sense strand
ucaguucugucuugguaca

SEQ ID NO: 807262 - RNA, 19 nt, Homo sapiens
  misc_RNA (1)...(19): siRNA sense strand
aagcagaaacugggaagaa

SEQ ID NO: 807263 - RNA, 19 nt, Homo sapiens
  misc_RNA (1)...(19): siRNA sense strand
ccggcaaacucuguagcua

SEQ ID NO: 807264 - RNA, 19 nt, Homo sapiens
  misc_RNA (1)...(19): siRNA sense strand
ucaauucuaagcugccaaa

SEQ ID NO: 807265 - RNA, 19 nt, Homo sapiens
  misc_RNA (1)...(19): siRNA sense strand
ugccaaaacuggacuauca

SEQ ID NO: 807266 - RNA, 19 nt, Homo sapiens
  misc_RNA (1)...(19): siRNA sense strand
ugcgacggcugcaccauau

SEQ ID NO: 807267 - RNA, 19 nt, Homo sapiens
  misc_RNA (1)...(19): siRNA sense strand
acagcuaucucccaguucu

SEQ ID NO: 807268 - RNA, 19 nt, Homo sapiens
  misc_RNA (1)...(19): siRNA sense strand
acucauuucuuacuuucug

SEQ ID NO: 807269 - RNA, 19 nt, Homo sapiens
  misc_RNA (1)...(19): siRNA sense strand
ccaccagguacaggauuua

SEQ ID NO: 807270 - RNA, 19 nt, Homo sapiens
  misc_RNA (1)...(19): siRNA sense strand
gcagcugcccagugccaaa

SEQ ID NO: 807271 - RNA, 19 nt, Homo sapiens
  misc_RNA (1)...(19): siRNA sense strand
ugaagagcaacaaguacaa

SEQ ID NO: 807272 - RNA, 19 nt, Homo sapiens
  misc_RNA (1)...(19): siRNA sense strand
ggagaaagguauacuauga

SEQ ID NO: 807273 - RNA, 19 nt, Homo sapiens
  misc_RNA (1)...(19): siRNA sense strand
gaaacagacucggaaauga

SEQ ID NO: 807274 - RNA, 19 nt, Homo sapiens
  misc_RNA (1)...(19): siRNA sense strand
gaaacugucuccuggcaaa

SEQ ID NO: 807275 - RNA, 19 nt, Homo sapiens
  misc_RNA (1)...(19): siRNA sense strand
gaucagacuuggaagauau

SEQ ID NO: 807276 - RNA, 19 nt, Homo sapiens
  misc_RNA (1)...(19): siRNA sense strand
ggaacaggcucaugagaga

SEQ ID NO: 807277 - RNA, 19 nt, Homo sapiens
  misc_RNA (1)...(19): siRNA sense strand
ugaauuagcuggcguagau

SEQ ID NO: 807278 - RNA, 19 nt, Homo sapiens
  misc_RNA (1)...(19): siRNA sense strand
gcgcagagcucucaaaguc

SEQ ID NO: 807279 - RNA, 19 nt, Homo sapiens
  misc_RNA (1)...(19): siRNA sense strand
gaaguuauccagcuuauca

SEQ ID NO: 807280 - RNA, 19 nt, Homo sapiens
  misc_RNA (1)...(19): siRNA sense strand
ggacauggcucuucguaac

SEQ ID NO: 807281 - RNA, 19 nt, Homo sapiens
  misc_RNA (1)...(19): siRNA sense strand
ccacagacgcuuuaacuuu

SEQ ID NO: 807282 - RNA, 19 nt, Homo sapiens
  misc_RNA (1)...(19): siRNA sense strand
caaggaaccuguggagaaa

SEQ ID NO: 807283 - RNA, 19 nt, Homo sapiens
  misc_RNA (1)...(19): siRNA sense strand
gucaguagcuccucagauu

SEQ ID NO: 807284 - RNA, 19 nt, Homo sapiens
  misc_RNA (1)...(19): siRNA sense strand
caacaaaacugcuuaucaa

SEQ ID NO: 807285 - RNA, 19 nt, Homo sapiens
  misc_RNA (1)...(19): siRNA sense strand
ccacaggccuugcgucaau

SEQ ID NO: 807286 - RNA, 19 nt, Homo sapiens
  misc_RNA (1)...(19): siRNA sense strand
gcagaugccuggacucucu

SEQ ID NO: 807287 - RNA, 19 nt, Homo sapiens
  misc_RNA (1)...(19): siRNA sense strand
gggcacagauggcauguca

SEQ ID NO: 807288 - RNA, 19 nt, Homo sapiens
  misc_RNA (1)...(19): siRNA sense strand
gaucagaggcucccgauuc

SEQ ID NO: 807289 - RNA, 19 nt, Homo sapiens
  misc_RNA (1)...(19): siRNA sense strand
gcaguacagugcagccauu

SEQ ID NO: 807290 - RNA, 19 nt, Homo sapiens
  misc_RNA (1)...(19): siRNA sense strand
cagcaucuccuucucuaua

SEQ ID NO: 807291 - RNA, 19 nt, Homo sapiens
  misc_RNA (1)...(19): siRNA sense strand
cacagacgcuuuaacuuug

SEQ ID NO: 807292 - RNA, 19 nt, Homo sapiens
  misc_RNA (1)...(19): siRNA sense strand
caaaaguccuccacacuaa

SEQ ID NO: 807293 - RNA, 19 nt, Homo sapiens
  misc_RNA (1)...(19): siRNA sense strand
gcaccugguugcugguauu

SEQ ID NO: 807294 - RNA, 19 nt, Homo sapiens
  misc_RNA (1)...(19): siRNA sense strand
caaaacugcuuaucaagaa

SEQ ID NO: 807295 - RNA, 19 nt, Homo sapiens
  misc_RNA (1)...(19): siRNA sense strand
gcagcgagcccgaagcaaa

SEQ ID NO: 807296 - RNA, 19 nt, Homo sapiens
  misc_RNA (1)...(19): siRNA sense strand
ccaaggaaccuguggagaa

SEQ ID NO: 807297 - RNA, 19 nt, Homo sapiens
  misc_RNA (1)...(19): siRNA sense strand
caaguacuauaauguggaa

SEQ ID NO: 807298 - RNA, 19 nt, Homo sapiens
  misc_RNA (1)...(19): siRNA sense strand
cgacuugaccucauccuuu

SEQ ID NO: 807299 - RNA, 19 nt, Homo sapiens
  misc_RNA (1)...(19): siRNA sense strand
ucaaggauguucuggacuu

SEQ ID NO: 807300 - RNA, 19 nt, Homo sapiens
  misc_RNA (1)...(19): siRNA sense strand
gacaguggcucugacaaga

SEQ ID NO: 807301 - RNA, 19 nt, Homo sapiens
  misc_RNA (1)...(19): siRNA sense strand
gcagaaagagccguaaguu

SEQ ID NO: 807302 - RNA, 19 nt, Homo sapiens
  misc_RNA (1)...(19): siRNA sense strand
gcaggcagcaaguacuaua

SEQ ID NO: 807303 - RNA, 19 nt, Homo sapiens
  misc_RNA (1)...(19): siRNA sense strand
gguauacuaugaaguuauc

SEQ ID NO: 807304 - RNA, 19 nt, Homo sapiens
  misc_RNA (1)...(19): siRNA sense strand
gacuugaccucauccuuug

SEQ ID NO: 807305 - RNA, 19 nt, Homo sapiens
  misc_RNA (1)...(19): siRNA sense strand
caaaguuggugaugacagu

SEQ ID NO: 807306 - RNA, 19 nt, Homo sapiens
  misc_RNA (1)...(19): siRNA sense strand
agucagaaguguccuuuga

SEQ ID NO: 807307 - RNA, 19 nt, Homo sapiens
  misc_RNA (1)...(19): siRNA sense strand
uggaagauauggaggaaga

SEQ ID NO: 807308 - RNA, 19 nt, Homo sapiens
  misc_RNA (1)...(19): siRNA sense strand
cuagugaacuuuauguauc

SEQ ID NO: 807309 - RNA, 19 nt, Homo sapiens
  misc_RNA (1)...(19): siRNA sense strand
ucaagcggcuguaugacaa

SEQ ID NO: 807310 - RNA, 19 nt, Homo sapiens
  misc_RNA (1)...(19): siRNA sense strand
ggacgcuccugucggaaug

SEQ ID NO: 807311 - RNA, 19 nt, Homo sapiens
  misc_RNA (1)...(19): siRNA sense strand
gagaaagguauacuaugaa

SEQ ID NO: 807312 - RNA, 19 nt, Homo sapiens
  misc_RNA (1)...(19): siRNA sense strand
gucaucaucugccuuaugu

SEQ ID NO: 807313 - RNA, 19 nt, Homo sapiens
  misc_RNA (1)...(19): siRNA sense strand
ggaaccgccugucuguguu

SEQ ID NO: 807314 - RNA, 19 nt, Homo sapiens
  misc_RNA (1)...(19): siRNA sense strand
gagcaggauccaagcagua

SEQ ID NO: 807315 - RNA, 19 nt, Homo sapiens
  misc_RNA (1)...(19): siRNA sense strand
gaaguauucaaaccagaaa

SEQ ID NO: 807316 - RNA, 19 nt, Homo sapiens
  misc_RNA (1)...(19): siRNA sense strand
agacauggcucagcuacga

SEQ ID NO: 807317 - RNA, 19 nt, Homo sapiens
  misc_RNA (1)...(19): siRNA sense strand
ggacucaagccaugacuca

SEQ ID NO: 807318 - RNA, 19 nt, Homo sapiens
  misc_RNA (1)...(19): siRNA sense strand
gauggcaugucaccgaugu

SEQ ID NO: 807319 - RNA, 19 nt, Homo sapiens
  misc_RNA (1)...(19): siRNA sense strand
aaacagacucggaaaugaa

SEQ ID NO: 807320 - RNA, 19 nt, Homo sapiens
  misc_RNA (1)...(19): siRNA sense strand
gaccuucucaucuuucaaa

SEQ ID NO: 807321 - RNA, 19 nt, Homo sapiens
  misc_RNA (1)...(19): siRNA sense strand
uggaagccauguauugcua

SEQ ID NO: 807322 - RNA, 19 nt, Homo sapiens
  misc_RNA (1)...(19): siRNA sense strand
agaaagaggugggaaagag

SEQ ID NO: 807323 - RNA, 19 nt, Homo sapiens
  misc_RNA (1)...(19): siRNA sense strand
ugaccugagugaaggcuuu

SEQ ID NO: 807324 - RNA, 19 nt, Homo sapiens
  misc_RNA (1)...(19): siRNA sense strand
gcuagugaacuuuauguau

SEQ ID NO: 807325 - RNA, 19 nt, Homo sapiens
  misc_RNA (1)...(19): siRNA sense strand
aaagguugcuagugaacuu

SEQ ID NO: 807326 - RNA, 19 nt, Homo sapiens
  misc_RNA (1)...(19): siRNA sense strand
gagcugcuguggagaaagg

SEQ ID NO: 807327 - RNA, 19 nt, Homo sapiens
  misc_RNA (1)...(19): siRNA sense strand
cgaucagacuuggaagaua

SEQ ID NO: 807328 - RNA, 19 nt, Homo sapiens
  misc_RNA (1)...(19): siRNA sense strand
gcagcuccguggacucaga

SEQ ID NO: 807329 - RNA, 19 nt, Homo sapiens
  misc_RNA (1)...(19): siRNA sense strand
gcaaaaguccuccacacua

SEQ ID NO: 807330 - RNA, 19 nt, Homo sapiens
  misc_RNA (1)...(19): siRNA sense strand
gcagcaaguacuauaaugu

SEQ ID NO: 807331 - RNA, 19 nt, Homo sapiens
  misc_RNA (1)...(19): siRNA sense strand
guacauucgcugccagaaa

SEQ ID NO: 807332 - RNA, 19 nt, Homo sapiens
  misc_RNA (1)...(19): siRNA sense strand
uggauuugcugaagaagga

SEQ ID NO: 807333 - RNA, 19 nt, Homo sapiens
  misc_RNA (1)...(19): siRNA sense strand
gcugcuagccgagagauuu

SEQ ID NO: 807334 - RNA, 19 nt, Homo sapiens
  misc_RNA (1)...(19): siRNA sense strand
gauccuagacagcugcaaa

SEQ ID NO: 807335 - RNA, 19 nt, Homo sapiens
  misc_RNA (1)...(19): siRNA sense strand
aaaggaaacagguacauuc

SEQ ID NO: 807336 - RNA, 19 nt, Homo sapiens
  misc_RNA (1)...(19): siRNA sense strand
guaccuggaggcagaguuu

SEQ ID NO: 807337 - RNA, 19 nt, Homo sapiens
  misc_RNA (1)...(19): siRNA sense strand
gaggacauggcucuucgua

SEQ ID NO: 807338 - RNA, 19 nt, Homo sapiens
  misc_RNA (1)...(19): siRNA sense strand
ugaaacagacucggaaaug

SEQ ID NO: 807339 - RNA, 19 nt, Homo sapiens
  misc_RNA (1)...(19): siRNA sense strand
gaaagagccguaaguucuc

SEQ ID NO: 807340 - RNA, 19 nt, Homo sapiens
  misc_RNA (1)...(19): siRNA sense strand
ggcagcaaguacuauaaug

SEQ ID NO: 807341 - RNA, 19 nt, Homo sapiens
  misc_RNA (1)...(19): siRNA sense strand
cuucucaucuuucaaaugg

SEQ ID NO: 807342 - RNA, 19 nt, Homo sapiens
  misc_RNA (1)...(19): siRNA sense strand
uacaagcaguggaaggaaa

SEQ ID NO: 807343 - RNA, 19 nt, Homo sapiens
  misc_RNA (1)...(19): siRNA sense strand
agaaagguauacuaugaag

SEQ ID NO: 807344 - RNA, 19 nt, Homo sapiens
  misc_RNA (1)...(19): siRNA sense strand
ccuggacucucuauaagau

SEQ ID NO: 807345 - RNA, 19 nt, Homo sapiens
  misc_RNA (1)...(19): siRNA sense strand
ccagagugauggcacagau

SEQ ID NO: 807346 - RNA, 19 nt, Homo sapiens
  misc_RNA (1)...(19): siRNA sense strand
caacugaagaagugugaga

SEQ ID NO: 807347 - RNA, 19 nt, Homo sapiens
  misc_RNA (1)...(19): siRNA sense strand
cuaccaagcccugucagua

SEQ ID NO: 807348 - RNA, 19 nt, Homo sapiens
  misc_RNA (1)...(19): siRNA sense strand
cagcuuuggucauuucauc

SEQ ID NO: 807349 - RNA, 19 nt, Homo sapiens
  misc_RNA (1)...(19): siRNA sense strand
gaagaggcaggaugcagau

SEQ ID NO: 807350 - RNA, 19 nt, Homo sapiens
  misc_RNA (1)...(19): siRNA sense strand
uacauucgcugccagaaag

SEQ ID NO: 807351 - RNA, 19 nt, Homo sapiens
  misc_RNA (1)...(19): siRNA sense strand
gaccucacuuugccaguca

SEQ ID NO: 807352 - RNA, 19 nt, Homo sapiens
  misc_RNA (1)...(19): siRNA sense strand
ggccuuugaugcugaaaca

SEQ ID NO: 807353 - RNA, 19 nt, Homo sapiens
  misc_RNA (1)...(19): siRNA sense strand
gaggagcugcuguggagaa

SEQ ID NO: 807354 - RNA, 19 nt, Homo sapiens
  misc_RNA (1)...(19): siRNA sense strand
acagacgcuuuaacuuuga

SEQ ID NO: 807355 - RNA, 19 nt, Homo sapiens
  misc_RNA (1)...(19): siRNA sense strand
acccagauguuccagacua

SEQ ID NO: 807356 - RNA, 19 nt, Homo sapiens
  misc_RNA (1)...(19): siRNA sense strand
gagauggauugggcacaga

SEQ ID NO: 807357 - RNA, 19 nt, Homo sapiens
  misc_RNA (1)...(19): siRNA sense strand
guccugagguccaagaucu

SEQ ID NO: 807358 - RNA, 19 nt, Homo sapiens
  misc_RNA (1)...(19): siRNA sense strand
ccggagcacuuuggaaugu

SEQ ID NO: 807359 - RNA, 19 nt, Homo sapiens
  misc_RNA (1)...(19): siRNA sense strand
gaccucauccuuugcaaca

SEQ ID NO: 807360 - RNA, 19 nt, Homo sapiens
  misc_RNA (1)...(19): siRNA sense strand
cagaaagagccguaaguuc

SEQ ID NO: 807361 - RNA, 19 nt, Homo sapiens
  misc_RNA (1)...(19): siRNA sense strand
caucaucugccuuaugugu

SEQ ID NO: 807362 - RNA, 19 nt, Homo sapiens
  misc_RNA (1)...(19): siRNA sense strand
cagcaaguacuauaaugug

SEQ ID NO: 807363 - RNA, 19 nt, Homo sapiens
  misc_RNA (1)...(19): siRNA sense strand
guggagaaagguauacuau

SEQ ID NO: 807364 - RNA, 19 nt, Homo sapiens
  misc_RNA (1)...(19): siRNA sense strand
gcaucgacuugaccucauc

SEQ ID NO: 807365 - RNA, 19 nt, Homo sapiens
  misc_RNA (1)...(19): siRNA sense strand
gaaccgccugucuguguug

SEQ ID NO: 807366 - RNA, 19 nt, Homo sapiens
  misc_RNA (1)...(19): siRNA sense strand
gaaagaggaggagccagau

SEQ ID NO: 807367 - RNA, 19 nt, Homo sapiens
  misc_RNA (1)...(19): siRNA sense strand
gaacuuuauguaucugcaa

SEQ ID NO: 807368 - RNA, 19 nt, Homo sapiens
  misc_RNA (1)...(19): siRNA sense strand
ccaguggacuaugggagaa

SEQ ID NO: 807369 - RNA, 19 nt, Homo sapiens
  misc_RNA (1)...(19): siRNA sense strand
gccuggauuugcugaagaa

SEQ ID NO: 807370 - RNA, 19 nt, Homo sapiens
  misc_RNA (1)...(19): siRNA sense strand
cgucggaacaggcucauga

SEQ ID NO: 807371 - RNA, 19 nt, Homo sapiens
  misc_RNA (1)...(19): siRNA sense strand
ccgcagcuuuggucauuuc

SEQ ID NO: 807372 - RNA, 19 nt, Homo sapiens
  misc_RNA (1)...(19): siRNA sense strand
gaagagagcucaaggagaa

SEQ ID NO: 807373 - RNA, 19 nt, Homo sapiens
  misc_RNA (1)...(19): siRNA sense strand
ugacagagcugacagauga

SEQ ID NO: 807374 - RNA, 19 nt, Homo sapiens
  misc_RNA (1)...(19): siRNA sense strand
ccaagaagauggaugagua

SEQ ID NO: 807375 - RNA, 19 nt, Homo sapiens
  misc_RNA (1)...(19): siRNA sense strand
aagaauagcugcaucguuu

SEQ ID NO: 807376 - RNA, 19 nt, Homo sapiens
  misc_RNA (1)...(19): siRNA sense strand
caacaaacgucccaccaaa

SEQ ID NO: 807377 - RNA, 19 nt, Homo sapiens
  misc_RNA (1)...(19): siRNA sense strand
ugaaauugcugaacaagaa

SEQ ID NO: 807378 - RNA, 19 nt, Homo sapiens
  misc_RNA (1)...(19): siRNA sense strand
gaagauggaugaguaugug

SEQ ID NO: 807379 - RNA, 19 nt, Homo sapiens
  misc_RNA (1)...(19): siRNA sense strand
gaucuuacccacuggauuu

SEQ ID NO: 807380 - RNA, 19 nt, Homo sapiens
  misc_RNA (1)...(19): siRNA sense strand
gaagcaagaauucaacaaa

SEQ ID NO: 807381 - RNA, 19 nt, Homo sapiens
  misc_RNA (1)...(19): siRNA sense strand
ggacgaagagaaauugaaa

SEQ ID NO: 807382 - RNA, 19 nt, Homo sapiens
  misc_RNA (1)...(19): siRNA sense strand
caaacaugaucuuggauga

SEQ ID NO: 807383 - RNA, 19 nt, Homo sapiens
  misc_RNA (1)...(19): siRNA sense strand
ugauagagcuuuacaaugc

SEQ ID NO: 807384 - RNA, 19 nt, Homo sapiens
  misc_RNA (1)...(19): siRNA sense strand
caaguggacauuguuauua

SEQ ID NO: 807385 - RNA, 19 nt, Homo sapiens
  misc_RNA (1)...(19): siRNA sense strand
ugaaguggcugcugcucua

SEQ ID NO: 807386 - RNA, 19 nt, Homo sapiens
  misc_RNA (1)...(19): siRNA sense strand
gcagugacuucuguguuaa

SEQ ID NO: 807387 - RNA, 19 nt, Homo sapiens
  misc_RNA (1)...(19): siRNA sense strand
gaagggagagucagaagau

SEQ ID NO: 807388 - RNA, 19 nt, Homo sapiens
  misc_RNA (1)...(19): siRNA sense strand
cagaugaacaggccaagua

SEQ ID NO: 807389 - RNA, 19 nt, Homo sapiens
  misc_RNA (1)...(19): siRNA sense strand
gcuauaagcaggaugucua

SEQ ID NO: 807390 - RNA, 19 nt, Homo sapiens
  misc_RNA (1)...(19): siRNA sense strand
ucaagaagcagauccaguu

SEQ ID NO: 807391 - RNA, 19 nt, Homo sapiens
  misc_RNA (1)...(19): siRNA sense strand
agcagugacuucuguguua

SEQ ID NO: 807392 - RNA, 19 nt, Homo sapiens
  misc_RNA (1)...(19): siRNA sense strand
gaaaaucaagggcauagua

SEQ ID NO: 807393 - RNA, 19 nt, Homo sapiens
  misc_RNA (1)...(19): siRNA sense strand
gugcugugcugcccugaaa

SEQ ID NO: 807394 - RNA, 19 nt, Homo sapiens
  misc_RNA (1)...(19): siRNA sense strand
gaagaauagcugcaucguu

SEQ ID NO: 807395 - RNA, 19 nt, Homo sapiens
  misc_RNA (1)...(19): siRNA sense strand
gaaauugcugaacaagaaa

SEQ ID NO: 807396 - RNA, 19 nt, Homo sapiens
  misc_RNA (1)...(19): siRNA sense strand
ccacagugccuacauuugu

SEQ ID NO: 807397 - RNA, 19 nt, Homo sapiens
  misc_RNA (1)...(19): siRNA sense strand
guacagguaacaagaaugu

SEQ ID NO: 807398 - RNA, 19 nt, Homo sapiens
  misc_RNA (1)...(19): siRNA sense strand
ggagaguguuacuggaguu

SEQ ID NO: 807399 - RNA, 19 nt, Homo sapiens
  misc_RNA (1)...(19): siRNA sense strand
guauguaacugaaauugac

SEQ ID NO: 807400 - RNA, 19 nt, Homo sapiens
  misc_RNA (1)...(19): siRNA sense strand
caugugauauggccugaug

SEQ ID NO: 807401 - RNA, 19 nt, Homo sapiens
  misc_RNA (1)...(19): siRNA sense strand
gcacuuggaccguaugaag

SEQ ID NO: 807402 - RNA, 19 nt, Homo sapiens
  misc_RNA (1)...(19): siRNA sense strand
gauguuugguggaaagcaa

SEQ ID NO: 807403 - RNA, 19 nt, Homo sapiens
  misc_RNA (1)...(19): siRNA sense strand
gagagcacuuggaccguau

SEQ ID NO: 807404 - RNA, 19 nt, Homo sapiens
  misc_RNA (1)...(19): siRNA sense strand
gcuccacagugccuacauu

SEQ ID NO: 807405 - RNA, 19 nt, Homo sapiens
  misc_RNA (1)...(19): siRNA sense strand
ggugguguaucgauagaug

SEQ ID NO: 807406 - RNA, 19 nt, Homo sapiens
  misc_RNA (1)...(19): siRNA sense strand
gcucagcggcuucauauac

SEQ ID NO: 807407 - RNA, 19 nt, Homo sapiens
  misc_RNA (1)...(19): siRNA sense strand
gguagucuguggcuaugga

SEQ ID NO: 807408 - RNA, 19 nt, Homo sapiens
  misc_RNA (1)...(19): siRNA sense strand
gaguuuggacgaagagaaa

SEQ ID NO: 807409 - RNA, 19 nt, Homo sapiens
  misc_RNA (1)...(19): siRNA sense strand
ccuaauuacuacagguauu

SEQ ID NO: 807410 - RNA, 19 nt, Homo sapiens
  misc_RNA (1)...(19): siRNA sense strand
caagaagcagauccaguuu

SEQ ID NO: 807411 - RNA, 19 nt, Homo sapiens
  misc_RNA (1)...(19): siRNA sense strand
cuacauuugugcucucaau

SEQ ID NO: 807412 - RNA, 19 nt, Homo sapiens
  misc_RNA (1)...(19): siRNA sense strand
ccaguuugcugaccagaag

SEQ ID NO: 807413 - RNA, 19 nt, Homo sapiens
  misc_RNA (1)...(19): siRNA sense strand
gaaauuugacaaccucuac

SEQ ID NO: 807414 - RNA, 19 nt, Homo sapiens
  misc_RNA (1)...(19): siRNA sense strand
acacaucacugcucagacu

SEQ ID NO: 807415 - RNA, 19 nt, Homo sapiens
  misc_RNA (1)...(19): siRNA sense strand
ggaagggagagucagaaga

SEQ ID NO: 807416 - RNA, 19 nt, Homo sapiens
  misc_RNA (1)...(19): siRNA sense strand
ggacauuccaacacagaga

SEQ ID NO: 807417 - RNA, 19 nt, Homo sapiens
  misc_RNA (1)...(19): siRNA sense strand
cuuacccacuggauuuaua

SEQ ID NO: 807418 - RNA, 19 nt, Homo sapiens
  misc_RNA (1)...(19): siRNA sense strand
caugggacauuccaacaca

SEQ ID NO: 807419 - RNA, 19 nt, Homo sapiens
  misc_RNA (1)...(19): siRNA sense strand
cagcucagcggcuucauau

SEQ ID NO: 807420 - RNA, 19 nt, Homo sapiens
  misc_RNA (1)...(19): siRNA sense strand
gaauagcugcaucguuugu

SEQ ID NO: 807421 - RNA, 19 nt, Homo sapiens
  misc_RNA (1)...(19): siRNA sense strand
cgauagaugugugaaugug

SEQ ID NO: 807422 - RNA, 19 nt, Homo sapiens
  misc_RNA (1)...(19): siRNA sense strand
cugcaucguuuguaacaug

SEQ ID NO: 807423 - RNA, 19 nt, Homo sapiens
  misc_RNA (1)...(19): siRNA sense strand
agacugcugugcuuaugga

SEQ ID NO: 807424 - RNA, 19 nt, Homo sapiens
  misc_RNA (1)...(19): siRNA sense strand
ccuucaagccuaauuacua

SEQ ID NO: 807425 - RNA, 19 nt, Homo sapiens
  misc_RNA (1)...(19): siRNA sense strand
caagaagauggaugaguau

SEQ ID NO: 807426 - RNA, 19 nt, Homo sapiens
  misc_RNA (1)...(19): siRNA sense strand
gcucagacugcugugcuua

SEQ ID NO: 807427 - RNA, 19 nt, Homo sapiens
  misc_RNA (1)...(19): siRNA sense strand
aacaugaucuuggaugaug

SEQ ID NO: 807428 - RNA, 19 nt, Homo sapiens
  misc_RNA (1)...(19): siRNA sense strand
aaaguaucccaacauguuu

SEQ ID NO: 807429 - RNA, 19 nt, Homo sapiens
  misc_RNA (1)...(19): siRNA sense strand
agaagcagauccaguuugc

SEQ ID NO: 807430 - RNA, 19 nt, Homo sapiens
  misc_RNA (1)...(19): siRNA sense strand
cuauuccacucucaaugaa

SEQ ID NO: 807431 - RNA, 19 nt, Homo sapiens
  misc_RNA (1)...(19): siRNA sense strand
auagcugcaucguuuguaa

SEQ ID NO: 807432 - RNA, 19 nt, Homo sapiens
  misc_RNA (1)...(19): siRNA sense strand
gcggcuucauauacagaua

SEQ ID NO: 807433 - RNA, 19 nt, Homo sapiens
  misc_RNA (1)...(19): siRNA sense strand
uaccuuugaugcccacuug

SEQ ID NO: 807434 - RNA, 19 nt, Homo sapiens
  misc_RNA (1)...(19): siRNA sense strand
aagcaagaauucaacaaac

SEQ ID NO: 807435 - RNA, 19 nt, Homo sapiens
  misc_RNA (1)...(19): siRNA sense strand
caaguugaccaugugauau

SEQ ID NO: 807436 - RNA, 19 nt, Homo sapiens
  misc_RNA (1)...(19): siRNA sense strand
ggcagaguuuggacgaaga

SEQ ID NO: 807437 - RNA, 19 nt, Homo sapiens
  misc_RNA (1)...(19): siRNA sense strand
cuucaagccuaauuacuac

SEQ ID NO: 807438 - RNA, 19 nt, Homo sapiens
  misc_RNA (1)...(19): siRNA sense strand
gauagagcuuuacaaugcu

SEQ ID NO: 807439 - RNA, 19 nt, Homo sapiens
  misc_RNA (1)...(19): siRNA sense strand
gcaagaauucaacaaacgu

SEQ ID NO: 807440 - RNA, 19 nt, Homo sapiens
  misc_RNA (1)...(19): siRNA sense strand
ucuauuccacucucaauga

SEQ ID NO: 807441 - RNA, 19 nt, Homo sapiens
  misc_RNA (1)...(19): siRNA sense strand
ucagacugcugugcuuaug

SEQ ID NO: 807442 - RNA, 19 nt, Homo sapiens
  misc_RNA (1)...(19): siRNA sense strand
gaggcggagucgcaacuag

SEQ ID NO: 807443 - RNA, 19 nt, Homo sapiens
  misc_RNA (1)...(19): siRNA sense strand
gccuacaccugccuaccuu

SEQ ID NO: 807444 - RNA, 19 nt, Homo sapiens
  misc_RNA (1)...(19): siRNA sense strand
uaacaagaaugugguaacc

SEQ ID NO: 807445 - RNA, 19 nt, Homo sapiens
  misc_RNA (1)...(19): siRNA sense strand
cauuguguauguaacugaa

SEQ ID NO: 807446 - RNA, 19 nt, Homo sapiens
  misc_RNA (1)...(19): siRNA sense strand
aaaaguaucccaacauguu

SEQ ID NO: 807447 - RNA, 19 nt, Homo sapiens
  misc_RNA (1)...(19): siRNA sense strand
gaggaagagagcucaagga

SEQ ID NO: 807448 - RNA, 19 nt, Homo sapiens
  misc_RNA (1)...(19): siRNA sense strand
agauagcucugaugaugag

SEQ ID NO: 807449 - RNA, 19 nt, Homo sapiens
  misc_RNA (1)...(19): siRNA sense strand
cgacuggugaaauuaaaug

SEQ ID NO: 807450 - RNA, 19 nt, Homo sapiens
  misc_RNA (1)...(19): siRNA sense strand
gggcuccauuguguaugua

SEQ ID NO: 807451 - RNA, 19 nt, Homo sapiens
  misc_RNA (1)...(19): siRNA sense strand
caugauguuugguggaaag

SEQ ID NO: 807452 - RNA, 19 nt, Homo sapiens
  misc_RNA (1)...(19): siRNA sense strand
gcugggaagcuguguguuc

SEQ ID NO: 807453 - RNA, 19 nt, Homo sapiens
  misc_RNA (1)...(19): siRNA sense strand
gcacagucaagaagcagau

SEQ ID NO: 807454 - RNA, 19 nt, Homo sapiens
  misc_RNA (1)...(19): siRNA sense strand
ccucuacuguugccgugaa

SEQ ID NO: 807455 - RNA, 19 nt, Homo sapiens
  misc_RNA (1)...(19): siRNA sense strand
uaucccaacauguuuaaga

SEQ ID NO: 807456 - RNA, 19 nt, Homo sapiens
  misc_RNA (1)...(19): siRNA sense strand
ugccugagguggagcugaa

SEQ ID NO: 807457 - RNA, 19 nt, Homo sapiens
  misc_RNA (1)...(19): siRNA sense strand
gcaagccuguauggaugga

SEQ ID NO: 807458 - RNA, 19 nt, Homo sapiens
  misc_RNA (1)...(19): siRNA sense strand
gaccagaagcaagaauuca

SEQ ID NO: 807459 - RNA, 19 nt, Homo sapiens
  misc_RNA (1)...(19): siRNA sense strand
gacauuguuauuaccugua

SEQ ID NO: 807460 - RNA, 19 nt, Homo sapiens
  misc_RNA (1)...(19): siRNA sense strand
ucaacaaacgucccaccaa

SEQ ID NO: 807461 - RNA, 19 nt, Homo sapiens
  misc_RNA (1)...(19): siRNA sense strand
ggaaagcaagugguagucu

SEQ ID NO: 807462 - RNA, 19 nt, Homo sapiens
  misc_RNA (1)...(19): siRNA sense strand
agacaucgcccagggacaa

SEQ ID NO: 807463 - RNA, 19 nt, Homo sapiens
  misc_RNA (1)...(19): siRNA sense strand
aagccuguauggauggauu

SEQ ID NO: 807464 - RNA, 19 nt, Homo sapiens
  misc_RNA (1)...(19): siRNA sense strand
aauuggacgucgcucuuug

SEQ ID NO: 807465 - RNA, 19 nt, Homo sapiens
  misc_RNA (1)...(19): siRNA sense strand
gaccugggagcgagugaga

SEQ ID NO: 807466 - RNA, 19 nt, Homo sapiens
  misc_RNA (1)...(19): siRNA sense strand
cuugauagagcuuuacaau

SEQ ID NO: 807467 - RNA, 19 nt, Homo sapiens
  misc_RNA (1)...(19): siRNA sense strand
aaguggacauuguuauuac

SEQ ID NO: 807468 - RNA, 19 nt, Homo sapiens
  misc_RNA (1)...(19): siRNA sense strand
ggcccuucaagccuaauua

SEQ ID NO: 807469 - RNA, 19 nt, Homo sapiens
  misc_RNA (1)...(19): siRNA sense strand
acaccugccuaccuuugau

SEQ ID NO: 807470 - RNA, 19 nt, Homo sapiens
  misc_RNA (1)...(19): siRNA sense strand
guaacaagaaugugguaac

SEQ ID NO: 807471 - RNA, 19 nt, Homo sapiens
  misc_RNA (1)...(19): siRNA sense strand
gguaacaagaaugugguaa

SEQ ID NO: 807472 - RNA, 19 nt, Homo sapiens
  misc_RNA (1)...(19): siRNA sense strand
gcaaagagcuugaguugau

SEQ ID NO: 807473 - RNA, 19 nt, Homo sapiens
  misc_RNA (1)...(19): siRNA sense strand
gagagccgcuggaaagaua

SEQ ID NO: 807474 - RNA, 19 nt, Homo sapiens
  misc_RNA (1)...(19): siRNA sense strand
ccacuuauguuguacagua

SEQ ID NO: 807475 - RNA, 19 nt, Homo sapiens
  misc_RNA (1)...(19): siRNA sense strand
gcaccaaccuucccacuau

SEQ ID NO: 807476 - RNA, 19 nt, Homo sapiens
  misc_RNA (1)...(19): siRNA sense strand
acaaggaucuguaugagua

SEQ ID NO: 807477 - RNA, 19 nt, Homo sapiens
  misc_RNA (1)...(19): siRNA sense strand
gcaaugguuuggcuuauga

SEQ ID NO: 807478 - RNA, 19 nt, Homo sapiens
  misc_RNA (1)...(19): siRNA sense strand
caaguaaagucccaaguga

SEQ ID NO: 807479 - RNA, 19 nt, Homo sapiens
  misc_RNA (1)...(19): siRNA sense strand
gcagagaaauacaguggaa

SEQ ID NO: 807480 - RNA, 19 nt, Homo sapiens
  misc_RNA (1)...(19): siRNA sense strand
caaagcaccuucagcauca

SEQ ID NO: 807481 - RNA, 19 nt, Homo sapiens
  misc_RNA (1)...(19): siRNA sense strand
caacgccacucaucagauu

SEQ ID NO: 807482 - RNA, 19 nt, Homo sapiens
  misc_RNA (1)...(19): siRNA sense strand
gaagaggaccugaacuuug

SEQ ID NO: 807483 - RNA, 19 nt, Homo sapiens
  misc_RNA (1)...(19): siRNA sense strand
aaauacaacugggacauua

SEQ ID NO: 807484 - RNA, 19 nt, Homo sapiens
  misc_RNA (1)...(19): siRNA sense strand
gaaacucaguggagaggaa

SEQ ID NO: 807485 - RNA, 19 nt, Homo sapiens
  misc_RNA (1)...(19): siRNA sense strand
ggaauucgcugggcaaugg

SEQ ID NO: 807486 - RNA, 19 nt, Homo sapiens
  misc_RNA (1)...(19): siRNA sense strand
gaacuucauuagagcuuug

SEQ ID NO: 807487 - RNA, 19 nt, Homo sapiens
  misc_RNA (1)...(19): siRNA sense strand
gcuaaagccuauaaauaca

SEQ ID NO: 807488 - RNA, 19 nt, Homo sapiens
  misc_RNA (1)...(19): siRNA sense strand
guacagugcccaaaugaug

SEQ ID NO: 807489 - RNA, 19 nt, Homo sapiens
  misc_RNA (1)...(19): siRNA sense strand
gauuaaagccaacaacuca

SEQ ID NO: 807490 - RNA, 19 nt, Homo sapiens
  misc_RNA (1)...(19): siRNA sense strand
ggacagguggccuuaagaa

SEQ ID NO: 807491 - RNA, 19 nt, Homo sapiens
  misc_RNA (1)...(19): siRNA sense strand
cuuaagaacuucauuagag

SEQ ID NO: 807492 - RNA, 19 nt, Homo sapiens
  misc_RNA (1)...(19): siRNA sense strand
ggccuugucuccugccuuu

SEQ ID NO: 807493 - RNA, 19 nt, Homo sapiens
  misc_RNA (1)...(19): siRNA sense strand
ccaaggcccuggcagaugu

SEQ ID NO: 807494 - RNA, 19 nt, Homo sapiens
  misc_RNA (1)...(19): siRNA sense strand
caucuucccugcagcgauu

SEQ ID NO: 807495 - RNA, 19 nt, Homo sapiens
  misc_RNA (1)...(19): siRNA sense strand
cgacacugcugagaacauu

SEQ ID NO: 807496 - RNA, 19 nt, Homo sapiens
  misc_RNA (1)...(19): siRNA sense strand
gggagaaccagccgaauug

SEQ ID NO: 807497 - RNA, 19 nt, Homo sapiens
  misc_RNA (1)...(19): siRNA sense strand
cagcaaagagcuugaguug

SEQ ID NO: 807498 - RNA, 19 nt, Homo sapiens
  misc_RNA (1)...(19): siRNA sense strand
aagaggaccugaacuuugu

SEQ ID NO: 807499 - RNA, 19 nt, Homo sapiens
  misc_RNA (1)...(19): siRNA sense strand
ugucauguuugucuucuuu

SEQ ID NO: 807500 - RNA, 19 nt, Homo sapiens
  misc_RNA (1)...(19): siRNA sense strand
ugccaaagcugauguccuu

SEQ ID NO: 807501 - RNA, 19 nt, Homo sapiens
  misc_RNA (1)...(19): siRNA sense strand
gcugggacgugcucuguau

SEQ ID NO: 807502 - RNA, 19 nt, Homo sapiens
  misc_RNA (1)...(19): siRNA sense strand
ggaaccagguggaggaucu

SEQ ID NO: 807503 - RNA, 19 nt, Homo sapiens
  misc_RNA (1)...(19): siRNA sense strand
cagaauggcucagcaccaa

SEQ ID NO: 807504 - RNA, 19 nt, Homo sapiens
  misc_RNA (1)...(19): siRNA sense strand
gcaaugucauguuugucuu

SEQ ID NO: 807505 - RNA, 19 nt, Homo sapiens
  misc_RNA (1)...(19): siRNA sense strand
cggcgcagcuccauccaaa

SEQ ID NO: 807506 - RNA, 19 nt, Homo sapiens
  misc_RNA (1)...(19): siRNA sense strand
ucuauggguuccugauuaa

SEQ ID NO: 807507 - RNA, 19 nt, Homo sapiens
  misc_RNA (1)...(19): siRNA sense strand
gcucgaggauggucuacga

SEQ ID NO: 807508 - RNA, 19 nt, Homo sapiens
  misc_RNA (1)...(19): siRNA sense strand
gcaguggcuuccuuuguca

SEQ ID NO: 807509 - RNA, 19 nt, Homo sapiens
  misc_RNA (1)...(19): siRNA sense strand
aaaccaaagucaucaagca

SEQ ID NO: 807510 - RNA, 19 nt, Homo sapiens
  misc_RNA (1)...(19): siRNA sense strand
ggagcaugcuaaagccuau

SEQ ID NO: 807511 - RNA, 19 nt, Homo sapiens
  misc_RNA (1)...(19): siRNA sense strand
gcguucuacugcacgauua

SEQ ID NO: 807512 - RNA, 19 nt, Homo sapiens
  misc_RNA (1)...(19): siRNA sense strand
cagguggccuuaagaacuu

SEQ ID NO: 807513 - RNA, 19 nt, Homo sapiens
  misc_RNA (1)...(19): siRNA sense strand
gcaaguuucccgugcaguu

SEQ ID NO: 807514 - RNA, 19 nt, Homo sapiens
  misc_RNA (1)...(19): siRNA sense strand
cgaggauggucuacgauau

SEQ ID NO: 807515 - RNA, 19 nt, Homo sapiens
  misc_RNA (1)...(19): siRNA sense strand
aaugauggguuugguguuu

SEQ ID NO: 807516 - RNA, 19 nt, Homo sapiens
  misc_RNA (1)...(19): siRNA sense strand
guuagagaauguugacuca

SEQ ID NO: 807517 - RNA, 19 nt, Homo sapiens
  misc_RNA (1)...(19): siRNA sense strand
caaguuucccgugcaguua

SEQ ID NO: 807518 - RNA, 19 nt, Homo sapiens
  misc_RNA (1)...(19): siRNA sense strand
ugacgggccucuucaacau

SEQ ID NO: 807519 - RNA, 19 nt, Homo sapiens
  misc_RNA (1)...(19): siRNA sense strand
guggagaggaagauauaua

SEQ ID NO: 807520 - RNA, 19 nt, Homo sapiens
  misc_RNA (1)...(19): siRNA sense strand
ggcugccagucuucaauua

SEQ ID NO: 807521 - RNA, 19 nt, Homo sapiens
  misc_RNA (1)...(19): siRNA sense strand
ggccuuaagaacuucauua

SEQ ID NO: 807522 - RNA, 19 nt, Homo sapiens
  misc_RNA (1)...(19): siRNA sense strand
gaccuacaguggguauuga

SEQ ID NO: 807523 - RNA, 19 nt, Homo sapiens
  misc_RNA (1)...(19): siRNA sense strand
gaccugaacuuuguaacag

SEQ ID NO: 807524 - RNA, 19 nt, Homo sapiens
  misc_RNA (1)...(19): siRNA sense strand
acacaugcaugcugucauc

SEQ ID NO: 807525 - RNA, 19 nt, Homo sapiens
  misc_RNA (1)...(19): siRNA sense strand
ccagggauuuaauggagaa

SEQ ID NO: 807526 - RNA, 19 nt, Homo sapiens
  misc_RNA (1)...(19): siRNA sense strand
gccaggagcugugucauac

SEQ ID NO: 807527 - RNA, 19 nt, Homo sapiens
  misc_RNA (1)...(19): siRNA sense strand
aaacaaggaucuguaugag

SEQ ID NO: 807528 - RNA, 19 nt, Homo sapiens
  misc_RNA (1)...(19): siRNA sense strand
cucuauggguuccugauua

SEQ ID NO: 807529 - RNA, 19 nt, Homo sapiens
  misc_RNA (1)...(19): siRNA sense strand
ggaccugaacuuuguaaca

SEQ ID NO: 807530 - RNA, 19 nt, Homo sapiens
  misc_RNA (1)...(19): siRNA sense strand
acgggccucuucaacauua

SEQ ID NO: 807531 - RNA, 19 nt, Homo sapiens
  misc_RNA (1)...(19): siRNA sense strand
gaaagaggaggaccuacag

SEQ ID NO: 807532 - RNA, 19 nt, Homo sapiens
  misc_RNA (1)...(19): siRNA sense strand
ggacugagagccgcuggaa

SEQ ID NO: 807533 - RNA, 19 nt, Homo sapiens
  misc_RNA (1)...(19): siRNA sense strand
gagcucuacugaauacucu

SEQ ID NO: 807534 - RNA, 19 nt, Homo sapiens
  misc_RNA (1)...(19): siRNA sense strand
gugccaggauccaaguaaa

SEQ ID NO: 807535 - RNA, 19 nt, Homo sapiens
  misc_RNA (1)...(19): siRNA sense strand
ugaagaggaccugaacuuu

SEQ ID NO: 807536 - RNA, 19 nt, Homo sapiens
  misc_RNA (1)...(19): siRNA sense strand
gaggauggucuacgauaug

SEQ ID NO: 807537 - RNA, 19 nt, Homo sapiens
  misc_RNA (1)...(19): siRNA sense strand
ggaccuacaguggguauug

SEQ ID NO: 807538 - RNA, 19 nt, Homo sapiens
  misc_RNA (1)...(19): siRNA sense strand
ccaccaacaccacuuaugu

SEQ ID NO: 807539 - RNA, 19 nt, Homo sapiens
  misc_RNA (1)...(19): siRNA sense strand
cauuagagcuuuggaugca

SEQ ID NO: 807540 - RNA, 19 nt, Homo sapiens
  misc_RNA (1)...(19): siRNA sense strand
gcuggauagucguuccuuu

SEQ ID NO: 807541 - RNA, 19 nt, Homo sapiens
  misc_RNA (1)...(19): siRNA sense strand
gggcaaugguuuggcuuau

SEQ ID NO: 807542 - RNA, 19 nt, Homo sapiens
  misc_RNA (1)...(19): siRNA sense strand
aggcuucucuccuagugua

SEQ ID NO: 807543 - RNA, 19 nt, Homo sapiens
  misc_RNA (1)...(19): siRNA sense strand
agagaaauacaguggaauu

SEQ ID NO: 807544 - RNA, 19 nt, Homo sapiens
  misc_RNA (1)...(19): siRNA sense strand
guggagcucuacugaauac

SEQ ID NO: 807545 - RNA, 19 nt, Homo sapiens
  misc_RNA (1)...(19): siRNA sense strand
ccaaguaaagucccaagug

SEQ ID NO: 807546 - RNA, 19 nt, Homo sapiens
  misc_RNA (1)...(19): siRNA sense strand
acucaugguuccagucuau

SEQ ID NO: 807547 - RNA, 19 nt, Homo sapiens
  misc_RNA (1)...(19): siRNA sense strand
caguggagaggaagauaua

SEQ ID NO: 807548 - RNA, 19 nt, Homo sapiens
  misc_RNA (1)...(19): siRNA sense strand
uaaauacaacugggacauu

SEQ ID NO: 807549 - RNA, 19 nt, Homo sapiens
  misc_RNA (1)...(19): siRNA sense strand
gagaaauacaguggaauuc

SEQ ID NO: 807550 - RNA, 19 nt, Homo sapiens
  misc_RNA (1)...(19): siRNA sense strand
aguaaagucccaagugaaa

SEQ ID NO: 807551 - RNA, 19 nt, Homo sapiens
  misc_RNA (1)...(19): siRNA sense strand
aaugugagcuaucccgaau

SEQ ID NO: 807552 - RNA, 19 nt, Homo sapiens
  misc_RNA (1)...(19): siRNA sense strand
gaaaaugaaaccaaaguca

SEQ ID NO: 807553 - RNA, 19 nt, Homo sapiens
  misc_RNA (1)...(19): siRNA sense strand
caaagagcuugaguugauc

SEQ ID NO: 807554 - RNA, 19 nt, Homo sapiens
  misc_RNA (1)...(19): siRNA sense strand
ccgaauugcuggucuugca

SEQ ID NO: 807555 - RNA, 19 nt, Homo sapiens
  misc_RNA (1)...(19): siRNA sense strand
caggagcugugucauacug

SEQ ID NO: 807556 - RNA, 19 nt, Homo sapiens
  misc_RNA (1)...(19): siRNA sense strand
ggcaaugguuuggcuuaug

SEQ ID NO: 807557 - RNA, 19 nt, Homo sapiens
  misc_RNA (1)...(19): siRNA sense strand
guccagggcccuuugcauu

SEQ ID NO: 807558 - RNA, 19 nt, Homo sapiens
  misc_RNA (1)...(19): siRNA sense strand
cagcaucaacccagaaauc

SEQ ID NO: 807559 - RNA, 19 nt, Homo sapiens
  misc_RNA (1)...(19): siRNA sense strand
acacugcugagaacauuaa

SEQ ID NO: 807560 - RNA, 19 nt, Homo sapiens
  misc_RNA (1)...(19): siRNA sense strand
uaugaagacuuuaguuucc

SEQ ID NO: 807561 - RNA, 19 nt, Homo sapiens
  misc_RNA (1)...(19): siRNA sense strand
gcaggaggaaccaacuuca

SEQ ID NO: 807562 - RNA, 19 nt, Homo sapiens
  misc_RNA (1)...(19): siRNA sense strand
ggaaacuuuugacuacauu

SEQ ID NO: 807563 - RNA, 19 nt, Homo sapiens
  misc_RNA (1)...(19): siRNA sense strand
gcagugcuaucaagaucac

SEQ ID NO: 807564 - RNA, 19 nt, Homo sapiens
  misc_RNA (1)...(19): siRNA sense strand
uuacgacacugcugagaac

SEQ ID NO: 807565 - RNA, 19 nt, Homo sapiens
  misc_RNA (1)...(19): siRNA sense strand
gugccuuccauaacaaaua

SEQ ID NO: 807566 - RNA, 19 nt, Homo sapiens
  misc_RNA (1)...(19): siRNA sense strand
ucuggugccuuccauaaca

SEQ ID NO: 807567 - RNA, 19 nt, Homo sapiens
  misc_RNA (1)...(19): siRNA sense strand
gcaaaaggcaccugaugug

SEQ ID NO: 807568 - RNA, 19 nt, Homo sapiens
  misc_RNA (1)...(19): siRNA sense strand
uggagaggaagauauauau

SEQ ID NO: 807569 - RNA, 19 nt, Homo sapiens
  misc_RNA (1)...(19): siRNA sense strand
gaggaccugaacuuuguaa

SEQ ID NO: 807570 - RNA, 19 nt, Homo sapiens
  misc_RNA (1)...(19): siRNA sense strand
ugccuuccauaacaaauau

SEQ ID NO: 807571 - RNA, 19 nt, Homo sapiens
  misc_RNA (1)...(19): siRNA sense strand
gcucuauggguuccugauu

SEQ ID NO: 807572 - RNA, 19 nt, Homo sapiens
  misc_RNA (1)...(19): siRNA sense strand
ggaauaaugucaucgcuuu

SEQ ID NO: 807573 - RNA, 19 nt, Homo sapiens
  misc_RNA (1)...(19): siRNA sense strand
gaaccucucucacaugaaa

SEQ ID NO: 807574 - RNA, 19 nt, Homo sapiens
  misc_RNA (1)...(19): siRNA sense strand
gaucuagacucuggaauaa

SEQ ID NO: 807575 - RNA, 19 nt, Homo sapiens
  misc_RNA (1)...(19): siRNA sense strand
gaacaaugcccaugccuuu

SEQ ID NO: 807576 - RNA, 19 nt, Homo sapiens
  misc_RNA (1)...(19): siRNA sense strand
gaagcaauauccucacuga

SEQ ID NO: 807577 - RNA, 19 nt, Homo sapiens
  misc_RNA (1)...(19): siRNA sense strand
ucacugcgauucaacaaua

SEQ ID NO: 807578 - RNA, 19 nt, Homo sapiens
  misc_RNA (1)...(19): siRNA sense strand
caaagugucuggaaagaug

SEQ ID NO: 807579 - RNA, 19 nt, Homo sapiens
  misc_RNA (1)...(19): siRNA sense strand
gcauccaccucucacauua

SEQ ID NO: 807580 - RNA, 19 nt, Homo sapiens
  misc_RNA (1)...(19): siRNA sense strand
gcagagaggugguucaucu

SEQ ID NO: 807581 - RNA, 19 nt, Homo sapiens
  misc_RNA (1)...(19): siRNA sense strand
gcagagauaucaccauugg

SEQ ID NO: 807582 - RNA, 19 nt, Homo sapiens
  misc_RNA (1)...(19): siRNA sense strand
gcaagguccacaucauuua

SEQ ID NO: 807583 - RNA, 19 nt, Homo sapiens
  misc_RNA (1)...(19): siRNA sense strand
gcacaugacugccacaacu

SEQ ID NO: 807584 - RNA, 19 nt, Homo sapiens
  misc_RNA (1)...(19): siRNA sense strand
gagaagaucccagggcaua

SEQ ID NO: 807585 - RNA, 19 nt, Homo sapiens
  misc_RNA (1)...(19): siRNA sense strand
gaagaucccagggcauaua

SEQ ID NO: 807586 - RNA, 19 nt, Homo sapiens
  misc_RNA (1)...(19): siRNA sense strand
gagccaaagugucuggaaa

SEQ ID NO: 807587 - RNA, 19 nt, Homo sapiens
  misc_RNA (1)...(19): siRNA sense strand
gcaccagcauguuuccaaa

SEQ ID NO: 807588 - RNA, 19 nt, Homo sapiens
  misc_RNA (1)...(19): siRNA sense strand
gcaaauggagguaggagaa

SEQ ID NO: 807589 - RNA, 19 nt, Homo sapiens
  misc_RNA (1)...(19): siRNA sense strand
aggaagagauggagauuga

SEQ ID NO: 807590 - RNA, 19 nt, Homo sapiens
  misc_RNA (1)...(19): siRNA sense strand
gcccaugccuuuaauguca

SEQ ID NO: 807591 - RNA, 19 nt, Homo sapiens
  misc_RNA (1)...(19): siRNA sense strand
gcacaggccaucaucagaa

SEQ ID NO: 807592 - RNA, 19 nt, Homo sapiens
  misc_RNA (1)...(19): siRNA sense strand
gcaaugcccacacugcuaa

SEQ ID NO: 807593 - RNA, 19 nt, Homo sapiens
  misc_RNA (1)...(19): siRNA sense strand
acucugaaaugaugucuaa

SEQ ID NO: 807594 - RNA, 19 nt, Homo sapiens
  misc_RNA (1)...(19): siRNA sense strand
ggagacaugugcacacuac

SEQ ID NO: 807595 - RNA, 19 nt, Homo sapiens
  misc_RNA (1)...(19): siRNA sense strand
gcaacagccucugaaacaa

SEQ ID NO: 807596 - RNA, 19 nt, Homo sapiens
  misc_RNA (1)...(19): siRNA sense strand
ggagggacauccacacagu

SEQ ID NO: 807597 - RNA, 19 nt, Homo sapiens
  misc_RNA (1)...(19): siRNA sense strand
ccaaaccucuggaucaaca

SEQ ID NO: 807598 - RNA, 19 nt, Homo sapiens
  misc_RNA (1)...(19): siRNA sense strand
agagauaucuucgcugcua

SEQ ID NO: 807599 - RNA, 19 nt, Homo sapiens
  misc_RNA (1)...(19): siRNA sense strand
gagcagacguacagauucu

SEQ ID NO: 807600 - RNA, 19 nt, Homo sapiens
  misc_RNA (1)...(19): siRNA sense strand
gagcaagguccacaucauu

SEQ ID NO: 807601 - RNA, 19 nt, Homo sapiens
  misc_RNA (1)...(19): siRNA sense strand
gcaauguccaugccacuaa

SEQ ID NO: 807602 - RNA, 19 nt, Homo sapiens
  misc_RNA (1)...(19): siRNA sense strand
cacggacucugaagcaaua

SEQ ID NO: 807603 - RNA, 19 nt, Homo sapiens
  misc_RNA (1)...(19): siRNA sense strand
gccacagccucuagaguaa

SEQ ID NO: 807604 - RNA, 19 nt, Homo sapiens
  misc_RNA (1)...(19): siRNA sense strand
gaagagauggagauugaug

SEQ ID NO: 807605 - RNA, 19 nt, Homo sapiens
  misc_RNA (1)...(19): siRNA sense strand
gagaugucccuaccacuaa

SEQ ID NO: 807606 - RNA, 19 nt, Homo sapiens
  misc_RNA (1)...(19): siRNA sense strand
caauguccaugccacaauu

SEQ ID NO: 807607 - RNA, 19 nt, Homo sapiens
  misc_RNA (1)...(19): siRNA sense strand
ccaauucuaaugcaagaua

SEQ ID NO: 807608 - RNA, 19 nt, Homo sapiens
  misc_RNA (1)...(19): siRNA sense strand
ucuagacucuggaauaaug

SEQ ID NO: 807609 - RNA, 19 nt, Homo sapiens
  misc_RNA (1)...(19): siRNA sense strand
ugaugacaauuccugauuu

SEQ ID NO: 807610 - RNA, 19 nt, Homo sapiens
  misc_RNA (1)...(19): siRNA sense strand
gaggagcaccagcauguuu

SEQ ID NO: 807611 - RNA, 19 nt, Homo sapiens
  misc_RNA (1)...(19): siRNA sense strand
gaaaccaccaccaaaggaa

SEQ ID NO: 807612 - RNA, 19 nt, Homo sapiens
  misc_RNA (1)...(19): siRNA sense strand
ccacacugcuaaugagaga

SEQ ID NO: 807613 - RNA, 19 nt, Homo sapiens
  misc_RNA (1)...(19): siRNA sense strand
aguaauguccgcacaguua

SEQ ID NO: 807614 - RNA, 19 nt, Homo sapiens
  misc_RNA (1)...(19): siRNA sense strand
gagauaucuucgcugcuaa

SEQ ID NO: 807615 - RNA, 19 nt, Homo sapiens
  misc_RNA (1)...(19): siRNA sense strand
caucacagccucuggauca

SEQ ID NO: 807616 - RNA, 19 nt, Homo sapiens
  misc_RNA (1)...(19): siRNA sense strand
ggagcaagguccacaucau

SEQ ID NO: 807617 - RNA, 19 nt, Homo sapiens
  misc_RNA (1)...(19): siRNA sense strand
guugcgaacucuagaucua

SEQ ID NO: 807618 - RNA, 19 nt, Homo sapiens
  misc_RNA (1)...(19): siRNA sense strand
gcucaagacccaggaguaa

SEQ ID NO: 807619 - RNA, 19 nt, Homo sapiens
  misc_RNA (1)...(19): siRNA sense strand
ccuguaagcggaauaauga

SEQ ID NO: 807620 - RNA, 19 nt, Homo sapiens
  misc_RNA (1)...(19): siRNA sense strand
ggagggaugcagaugaauu

SEQ ID NO: 807621 - RNA, 19 nt, Homo sapiens
  misc_RNA (1)...(19): siRNA sense strand
ugacaucuccagucuuuga

SEQ ID NO: 807622 - RNA, 19 nt, Homo sapiens
  misc_RNA (1)...(19): siRNA sense strand
gauguccuguccacaaaug

SEQ ID NO: 807623 - RNA, 19 nt, Homo sapiens
  misc_RNA (1)...(19): siRNA sense strand
gcaauguccaugccacaaa

SEQ ID NO: 807624 - RNA, 19 nt, Homo sapiens
  misc_RNA (1)...(19): siRNA sense strand
ggagugaugcccacccaaa

SEQ ID NO: 807625 - RNA, 19 nt, Homo sapiens
  misc_RNA (1)...(19): siRNA sense strand
gcuguccacuucagaguau

SEQ ID NO: 807626 - RNA, 19 nt, Homo sapiens
  misc_RNA (1)...(19): siRNA sense strand
gauucugcauucucaugua

SEQ ID NO: 807627 - RNA, 19 nt, Homo sapiens
  misc_RNA (1)...(19): siRNA sense strand
caccaugucugcaccucua

SEQ ID NO: 807628 - RNA, 19 nt, Homo sapiens
  misc_RNA (1)...(19): siRNA sense strand
uaucuucgcugcuaauguc

SEQ ID NO: 807629 - RNA, 19 nt, Homo sapiens
  misc_RNA (1)...(19): siRNA sense strand
cagaagcuguuaccaccaa

SEQ ID NO: 807630 - RNA, 19 nt, Homo sapiens
  misc_RNA (1)...(19): siRNA sense strand
caaaugaugcccacagcuu

SEQ ID NO: 807631 - RNA, 19 nt, Homo sapiens
  misc_RNA (1)...(19): siRNA sense strand
ccaaugagcacccaagauc

SEQ ID NO: 807632 - RNA, 19 nt, Homo sapiens
  misc_RNA (1)...(19): siRNA sense strand
aguaaugccugccucacua

SEQ ID NO: 807633 - RNA, 19 nt, Homo sapiens
  misc_RNA (1)...(19): siRNA sense strand
gugauguccuguccacaaa

SEQ ID NO: 807634 - RNA, 19 nt, Homo sapiens
  misc_RNA (1)...(19): siRNA sense strand
gcccaaaccucuggaucaa

SEQ ID NO: 807635 - RNA, 19 nt, Homo sapiens
  misc_RNA (1)...(19): siRNA sense strand
uguagacucugaaaugaug

SEQ ID NO: 807636 - RNA, 19 nt, Homo sapiens
  misc_RNA (1)...(19): siRNA sense strand
aaauguagacucugaaaug

SEQ ID NO: 807637 - RNA, 19 nt, Homo sapiens
  misc_RNA (1)...(19): siRNA sense strand
cugcagagauaucaccauu

SEQ ID NO: 807638 - RNA, 19 nt, Homo sapiens
  misc_RNA (1)...(19): siRNA sense strand
gaucccagggcauauauga

SEQ ID NO: 807639 - RNA, 19 nt, Homo sapiens
  misc_RNA (1)...(19): siRNA sense strand
ggcaacagccucugaaaca

SEQ ID NO: 807640 - RNA, 19 nt, Homo sapiens
  misc_RNA (1)...(19): siRNA sense strand
gcaauguccacaccgcuaa

SEQ ID NO: 807641 - RNA, 19 nt, Homo sapiens
  misc_RNA (1)...(19): siRNA sense strand
gucaauacccuuacauuca

SEQ ID NO: 807642 - RNA, 19 nt, Homo sapiens
  misc_RNA (1)...(19): siRNA sense strand
gcacucugcuaccucuuag

SEQ ID NO: 807643 - RNA, 19 nt, Homo sapiens
  misc_RNA (1)...(19): siRNA sense strand
gagauagccacgccucuga

SEQ ID NO: 807644 - RNA, 19 nt, Homo sapiens
  misc_RNA (1)...(19): siRNA sense strand
cugcaucgcuaaugagaga

SEQ ID NO: 807645 - RNA, 19 nt, Homo sapiens
  misc_RNA (1)...(19): siRNA sense strand
cuaaugagagacacaguuu

SEQ ID NO: 807646 - RNA, 19 nt, Homo sapiens
  misc_RNA (1)...(19): siRNA sense strand
cauugcaaauuacagauga

SEQ ID NO: 807647 - RNA, 19 nt, Homo sapiens
  misc_RNA (1)...(19): siRNA sense strand
cuggaaagaugcucaguca

SEQ ID NO: 807648 - RNA, 19 nt, Homo sapiens
  misc_RNA (1)...(19): siRNA sense strand
gcacagaugaaagccauga

SEQ ID NO: 807649 - RNA, 19 nt, Homo sapiens
  misc_RNA (1)...(19): siRNA sense strand
caauguccaugccacaaau

SEQ ID NO: 807650 - RNA, 19 nt, Homo sapiens
  misc_RNA (1)...(19): siRNA sense strand
caauguccaugcugcaaau

SEQ ID NO: 807651 - RNA, 19 nt, Homo sapiens
  misc_RNA (1)...(19): siRNA sense strand
gcccacaggcucuaugaaa

SEQ ID NO: 807652 - RNA, 19 nt, Homo sapiens
  misc_RNA (1)...(19): siRNA sense strand
aauguagacucugaaauga

SEQ ID NO: 807653 - RNA, 19 nt, Homo sapiens
  misc_RNA (1)...(19): siRNA sense strand
gaaccauggccucaggauu

SEQ ID NO: 807654 - RNA, 19 nt, Homo sapiens
  misc_RNA (1)...(19): siRNA sense strand
ggagauugaugaggagaag

SEQ ID NO: 807655 - RNA, 19 nt, Homo sapiens
  misc_RNA (1)...(19): siRNA sense strand
gccaaagugucuggaaaga

SEQ ID NO: 807656 - RNA, 19 nt, Homo sapiens
  misc_RNA (1)...(19): siRNA sense strand
cauguacaguugccuauag

SEQ ID NO: 807657 - RNA, 19 nt, Homo sapiens
  misc_RNA (1)...(19): siRNA sense strand
gaugacaauuccugauuuu

SEQ ID NO: 807658 - RNA, 19 nt, Homo sapiens
  misc_RNA (1)...(19): siRNA sense strand
caacagccucugaaacaau

SEQ ID NO: 807659 - RNA, 19 nt, Homo sapiens
  misc_RNA (1)...(19): siRNA sense strand
gaagacaccgaagcaaugu

SEQ ID NO: 807660 - RNA, 19 nt, Homo sapiens
  misc_RNA (1)...(19): siRNA sense strand
acaaugcccaugccuuuaa

SEQ ID NO: 807661 - RNA, 19 nt, Homo sapiens
  misc_RNA (1)...(19): siRNA sense strand
caugucugcuccacaaaug

SEQ ID NO: 807662 - RNA, 19 nt, Homo sapiens
  misc_RNA (1)...(19): siRNA sense strand
cagagcagacguacagauu

SEQ ID NO: 807663 - RNA, 19 nt, Homo sapiens
  misc_RNA (1)...(19): siRNA sense strand
ggauguccaugccacuaau

SEQ ID NO: 807664 - RNA, 19 nt, Homo sapiens
  misc_RNA (1)...(19): siRNA sense strand
guaauguccgcacaguuaa

SEQ ID NO: 807665 - RNA, 19 nt, Homo sapiens
  misc_RNA (1)...(19): siRNA sense strand
ccgaagcaauguccaaagu

SEQ ID NO: 807666 - RNA, 19 nt, Homo sapiens
  misc_RNA (1)...(19): siRNA sense strand
uaugaauccuggagugaug

SEQ ID NO: 807667 - RNA, 19 nt, Homo sapiens
  misc_RNA (1)...(19): siRNA sense strand
guauguccaugccacaaau

SEQ ID NO: 807668 - RNA, 19 nt, Homo sapiens
  misc_RNA (1)...(19): siRNA sense strand
gcauucucauguacaguug

SEQ ID NO: 807669 - RNA, 19 nt, Homo sapiens
  misc_RNA (1)...(19): siRNA sense strand
cccaagcucuggagugaug

SEQ ID NO: 807670 - RNA, 19 nt, Homo sapiens
  misc_RNA (1)...(19): siRNA sense strand
ucuccaggcucugaaguaa

SEQ ID NO: 807671 - RNA, 19 nt, Homo sapiens
  misc_RNA (1)...(19): siRNA sense strand
ugaagacaccgaagcaaug

SEQ ID NO: 807672 - RNA, 19 nt, Homo sapiens
  misc_RNA (1)...(19): siRNA sense strand
ggaccagggugaagauuua

SEQ ID NO: 807673 - RNA, 19 nt, Homo sapiens
  misc_RNA (1)...(19): siRNA sense strand
gaacaaggaggaucuuaga

SEQ ID NO: 807674 - RNA, 19 nt, Homo sapiens
  misc_RNA (1)...(19): siRNA sense strand
gagggaagcucagaaagug

SEQ ID NO: 807675 - RNA, 19 nt, Homo sapiens
  misc_RNA (1)...(19): siRNA sense strand
agaacaagcugaaacaugu

SEQ ID NO: 807676 - RNA, 19 nt, Homo sapiens
  misc_RNA (1)...(19): siRNA sense strand
gaacaugaagcgccucuug

SEQ ID NO: 807677 - RNA, 19 nt, Homo sapiens
  misc_RNA (1)...(19): siRNA sense strand
ggacacaggaggagcuuaa

SEQ ID NO: 807678 - RNA, 19 nt, Homo sapiens
  misc_RNA (1)...(19): siRNA sense strand
gaaagugaaaccucuguga

SEQ ID NO: 807679 - RNA, 19 nt, Homo sapiens
  misc_RNA (1)...(19): siRNA sense strand
acaaggagcuccagaacau

SEQ ID NO: 807680 - RNA, 19 nt, Homo sapiens
  misc_RNA (1)...(19): siRNA sense strand
ugauggagcugcagaacaa

SEQ ID NO: 807681 - RNA, 19 nt, Homo sapiens
  misc_RNA (1)...(19): siRNA sense strand
cuaaggagguguuacugaa

SEQ ID NO: 807682 - RNA, 19 nt, Homo sapiens
  misc_RNA (1)...(19): siRNA sense strand
cagaguauguuccagaaga

SEQ ID NO: 807683 - RNA, 19 nt, Homo sapiens
  misc_RNA (1)...(19): siRNA sense strand
gaacuauccauccagauug

SEQ ID NO: 807684 - RNA, 19 nt, Homo sapiens
  misc_RNA (1)...(19): siRNA sense strand
gcuggaggauuauaaggaa

SEQ ID NO: 807685 - RNA, 19 nt, Homo sapiens
  misc_RNA (1)...(19): siRNA sense strand
gcugaagggucucgaggaa

SEQ ID NO: 807686 - RNA, 19 nt, Homo sapiens
  misc_RNA (1)...(19): siRNA sense strand
ggaugaagcagaagaggaa

SEQ ID NO: 807687 - RNA, 19 nt, Homo sapiens
  misc_RNA (1)...(19): siRNA sense strand
aggcccagcuggaggauua

SEQ ID NO: 807688 - RNA, 19 nt, Homo sapiens
  misc_RNA (1)...(19): siRNA sense strand
cuacuggaauggaaagcua

SEQ ID NO: 807689 - RNA, 19 nt, Homo sapiens
  misc_RNA (1)...(19): siRNA sense strand
gcuaacagaucgggugaau

SEQ ID NO: 807690 - RNA, 19 nt, Homo sapiens
  misc_RNA (1)...(19): siRNA sense strand
acaaggaguuggagaagau

SEQ ID NO: 807691 - RNA, 19 nt, Homo sapiens
  misc_RNA (1)...(19): siRNA sense strand
ggaggaaaaugacgaauuc

SEQ ID NO: 807692 - RNA, 19 nt, Homo sapiens
  misc_RNA (1)...(19): siRNA sense strand
gaagaugucagcccuugug

SEQ ID NO: 807693 - RNA, 19 nt, Homo sapiens
  misc_RNA (1)...(19): siRNA sense strand
ggaggaagguuaguuuggu

SEQ ID NO: 807694 - RNA, 19 nt, Homo sapiens
  misc_RNA (1)...(19): siRNA sense strand
ucagguggaugaagcagaa

SEQ ID NO: 807695 - RNA, 19 nt, Homo sapiens
  misc_RNA (1)...(19): siRNA sense strand
gaugcagccucuagugaug

SEQ ID NO: 807696 - RNA, 19 nt, Homo sapiens
  misc_RNA (1)...(19): siRNA sense strand
gcaacaaggagcuccagaa

SEQ ID NO: 807697 - RNA, 19 nt, Homo sapiens
  misc_RNA (1)...(19): siRNA sense strand
aagaggagcuuggagagaa

SEQ ID NO: 807698 - RNA, 19 nt, Homo sapiens
  misc_RNA (1)...(19): siRNA sense strand
gaagaugcagccucuagug

SEQ ID NO: 807699 - RNA, 19 nt, Homo sapiens
  misc_RNA (1)...(19): siRNA sense strand
cuagagccaucccaaguug

SEQ ID NO: 807700 - RNA, 19 nt, Homo sapiens
  misc_RNA (1)...(19): siRNA sense strand
uggaggagcuacagcgaaa

SEQ ID NO: 807701 - RNA, 19 nt, Homo sapiens
  misc_RNA (1)...(19): siRNA sense strand
ggagggaagcucagaaagu

SEQ ID NO: 807702 - RNA, 19 nt, Homo sapiens
  misc_RNA (1)...(19): siRNA sense strand
ggaccuggagugugacaaa

SEQ ID NO: 807703 - RNA, 19 nt, Homo sapiens
  misc_RNA (1)...(19): siRNA sense strand
uaacagaucgggugaaucg

SEQ ID NO: 807704 - RNA, 19 nt, Homo sapiens
  misc_RNA (1)...(19): siRNA sense strand
ggaaacagaguuagaugag

SEQ ID NO: 807705 - RNA, 19 nt, Homo sapiens
  misc_RNA (1)...(19): siRNA sense strand
ucucacggcuggaaacaga

SEQ ID NO: 807706 - RNA, 19 nt, Homo sapiens
  misc_RNA (1)...(19): siRNA sense strand
ggugaagauuuacgacaug

SEQ ID NO: 807707 - RNA, 19 nt, Homo sapiens
  misc_RNA (1)...(19): siRNA sense strand
agcgaaagcuggaugaaga

SEQ ID NO: 807708 - RNA, 19 nt, Homo sapiens
  misc_RNA (1)...(19): siRNA sense strand
gaacaaggaguuggagaag

SEQ ID NO: 807709 - RNA, 19 nt, Homo sapiens
  misc_RNA (1)...(19): siRNA sense strand
ccguggagcugcuaacaga

SEQ ID NO: 807710 - RNA, 19 nt, Homo sapiens
  misc_RNA (1)...(19): siRNA sense strand
ccaccaugcugcaguucaa

SEQ ID NO: 807711 - RNA, 19 nt, Homo sapiens
  misc_RNA (1)...(19): siRNA sense strand
uuaaagaacuauccaucca

SEQ ID NO: 807712 - RNA, 19 nt, Homo sapiens
  misc_RNA (1)...(19): siRNA sense strand
gaagaggagcuuggagaga

SEQ ID NO: 807713 - RNA, 19 nt, Homo sapiens
  misc_RNA (1)...(19): siRNA sense strand
ggcagaguauguuccagaa

SEQ ID NO: 807714 - RNA, 19 nt, Homo sapiens
  misc_RNA (1)...(19): siRNA sense strand
gagaagaugcagccucuag

SEQ ID NO: 807715 - RNA, 19 nt, Homo sapiens
  misc_RNA (1)...(19): siRNA sense strand
gagauacucgccagguuga

SEQ ID NO: 807716 - RNA, 19 nt, Homo sapiens
  misc_RNA (1)...(19): siRNA sense strand
gcuaaggagguguuacuga

SEQ ID NO: 807717 - RNA, 19 nt, Homo sapiens
  misc_RNA (1)...(19): siRNA sense strand
uccauugcaucacugcuua

SEQ ID NO: 807718 - RNA, 19 nt, Homo sapiens
  misc_RNA (1)...(19): siRNA sense strand
gagcucagauuuggaacuc

SEQ ID NO: 807719 - RNA, 19 nt, Homo sapiens
  misc_RNA (1)...(19): siRNA sense strand
gaauggagaaggaggagau

SEQ ID NO: 807720 - RNA, 19 nt, Homo sapiens
  misc_RNA (1)...(19): siRNA sense strand
gggugaagauuuacgacau

SEQ ID NO: 807721 - RNA, 19 nt, Homo sapiens
  misc_RNA (1)...(19): siRNA sense strand
gaccagaaagaccagcuaa

SEQ ID NO: 807722 - RNA, 19 nt, Homo sapiens
  misc_RNA (1)...(19): siRNA sense strand
gucgggagcuggaagaaca

SEQ ID NO: 807723 - RNA, 19 nt, Homo sapiens
  misc_RNA (1)...(19): siRNA sense strand
ccagguagcaccauugaca

SEQ ID NO: 807724 - RNA, 19 nt, Homo sapiens
  misc_RNA (1)...(19): siRNA sense strand
gcuagagccaucccaaguu

SEQ ID NO: 807725 - RNA, 19 nt, Homo sapiens
  misc_RNA (1)...(19): siRNA sense strand
gaagaagcggcagaagcua

SEQ ID NO: 807726 - RNA, 19 nt, Homo sapiens
  misc_RNA (1)...(19): siRNA sense strand
gggaagcucagaaagugaa

SEQ ID NO: 807727 - RNA, 19 nt, Homo sapiens
  misc_RNA (1)...(19): siRNA sense strand
cagaacaagcugaaacaug

SEQ ID NO: 807728 - RNA, 19 nt, Homo sapiens
  misc_RNA (1)...(19): siRNA sense strand
ugaggaggaagguuaguuu

SEQ ID NO: 807729 - RNA, 19 nt, Homo sapiens
  misc_RNA (1)...(19): siRNA sense strand
ggagaaggaggagauggaa

SEQ ID NO: 807730 - RNA, 19 nt, Homo sapiens
  misc_RNA (1)...(19): siRNA sense strand
agaacuauccauccagauu

SEQ ID NO: 807731 - RNA, 19 nt, Homo sapiens
  misc_RNA (1)...(19): siRNA sense strand
ugaagggucucgaggaaaa

SEQ ID NO: 807732 - RNA, 19 nt, Homo sapiens
  misc_RNA (1)...(19): siRNA sense strand
ugagccgacuucaggauga

SEQ ID NO: 807733 - RNA, 19 nt, Homo sapiens
  misc_RNA (1)...(19): siRNA sense strand
uggaggagcagaagcguuu

SEQ ID NO: 807734 - RNA, 19 nt, Homo sapiens
  misc_RNA (1)...(19): siRNA sense strand
uaugaaggccaccaucuau

SEQ ID NO: 807735 - RNA, 19 nt, Homo sapiens
  misc_RNA (1)...(19): siRNA sense strand
aagcagaagaggaaauuga

SEQ ID NO: 807736 - RNA, 19 nt, Homo sapiens
  misc_RNA (1)...(19): siRNA sense strand
cagcuugagucccagaauc

SEQ ID NO: 807737 - RNA, 19 nt, Homo sapiens
  misc_RNA (1)...(19): siRNA sense strand
gcaagaggcagagaacaag

SEQ ID NO: 807738 - RNA, 19 nt, Homo sapiens
  misc_RNA (1)...(19): siRNA sense strand
aggaggagcuuaaggaacu

SEQ ID NO: 807739 - RNA, 19 nt, Homo sapiens
  misc_RNA (1)...(19): siRNA sense strand
agaguauguuccagaagaa

SEQ ID NO: 807740 - RNA, 19 nt, Homo sapiens
  misc_RNA (1)...(19): siRNA sense strand
ggagcaggcacccaacaug

SEQ ID NO: 807741 - RNA, 19 nt, Homo sapiens
  misc_RNA (1)...(19): siRNA sense strand
gaugguuucuucugguucu

SEQ ID NO: 807742 - RNA, 19 nt, Homo sapiens
  misc_RNA (1)...(19): siRNA sense strand
gugaugguuucuucugguu

SEQ ID NO: 807743 - RNA, 19 nt, Homo sapiens
  misc_RNA (1)...(19): siRNA sense strand
uggacucacucaucaacaa

SEQ ID NO: 807744 - RNA, 19 nt, Homo sapiens
  misc_RNA (1)...(19): siRNA sense strand
ggagcggaaaguuaaagaa

SEQ ID NO: 807745 - RNA, 19 nt, Homo sapiens
  misc_RNA (1)...(19): siRNA sense strand
guucugcagucuaccaauc

SEQ ID NO: 807746 - RNA, 19 nt, Homo sapiens
  misc_RNA (1)...(19): siRNA sense strand
uggaucagcugaggacaga

SEQ ID NO: 807747 - RNA, 19 nt, Homo sapiens
  misc_RNA (1)...(19): siRNA sense strand
agaaggaggagauggaaga

SEQ ID NO: 807748 - RNA, 19 nt, Homo sapiens
  misc_RNA (1)...(19): siRNA sense strand
gaggaggaagguuaguuug

SEQ ID NO: 807749 - RNA, 19 nt, Homo sapiens
  misc_RNA (1)...(19): siRNA sense strand
ugaagcagaagaggaaauu

SEQ ID NO: 807750 - RNA, 19 nt, Homo sapiens
  misc_RNA (1)...(19): siRNA sense strand
gaacaccguggagcugcua

SEQ ID NO: 807751 - RNA, 19 nt, Homo sapiens
  misc_RNA (1)...(19): siRNA sense strand
ugaacaaggaguuggagaa

SEQ ID NO: 807752 - RNA, 19 nt, Homo sapiens
  misc_RNA (1)...(19): siRNA sense strand
acagggcauuggcagagua

SEQ ID NO: 807753 - RNA, 19 nt, Homo sapiens
  misc_RNA (1)...(19): siRNA sense strand
acucucaggucaagggauu

SEQ ID NO: 807754 - RNA, 19 nt, Homo sapiens
  misc_RNA (1)...(19): siRNA sense strand
caacaaggagcuccagaac

SEQ ID NO: 807755 - RNA, 19 nt, Homo sapiens
  misc_RNA (1)...(19): siRNA sense strand
cagaaccuccagcuacaaa

SEQ ID NO: 807756 - RNA, 19 nt, Homo sapiens
  misc_RNA (1)...(19): siRNA sense strand
agaguuagaugaggagaag

SEQ ID NO: 807757 - RNA, 19 nt, Homo sapiens
  misc_RNA (1)...(19): siRNA sense strand
gcaguguggaccauaugaa

SEQ ID NO: 807758 - RNA, 19 nt, Homo sapiens
  misc_RNA (1)...(19): siRNA sense strand
ggagcagcaugaggucaau

SEQ ID NO: 807759 - RNA, 19 nt, Homo sapiens
  misc_RNA (1)...(19): siRNA sense strand
ggucuugcagagggaauua

SEQ ID NO: 807760 - RNA, 19 nt, Homo sapiens
  misc_RNA (1)...(19): siRNA sense strand
guuacugaaggaccuguua

SEQ ID NO: 807761 - RNA, 19 nt, Homo sapiens
  misc_RNA (1)...(19): siRNA sense strand
ucugugaggaggaagguua

SEQ ID NO: 807762 - RNA, 19 nt, Homo sapiens
  misc_RNA (1)...(19): siRNA sense strand
gcccaguggauccuaguaa

SEQ ID NO: 807763 - RNA, 19 nt, Homo sapiens
  misc_RNA (1)...(19): siRNA sense strand
gcagggcagggugagcuua

SEQ ID NO: 807764 - RNA, 19 nt, Homo sapiens
  misc_RNA (1)...(19): siRNA sense strand
uuaguuuggugcuggagaa

SEQ ID NO: 807765 - RNA, 19 nt, Homo sapiens
  misc_RNA (1)...(19): siRNA sense strand
ggaccucuagcacaaaaua

SEQ ID NO: 807766 - RNA, 19 nt, Homo sapiens
  misc_RNA (1)...(19): siRNA sense strand
gagcggaaaguuaaagaac

SEQ ID NO: 807767 - RNA, 19 nt, Homo sapiens
  misc_RNA (1)...(19): siRNA sense strand
gagcuuggagagaagauag

SEQ ID NO: 807768 - RNA, 19 nt, Homo sapiens
  misc_RNA (1)...(19): siRNA sense strand
ggaguugacagcccugaag

SEQ ID NO: 807769 - RNA, 19 nt, Homo sapiens
  misc_RNA (1)...(19): siRNA sense strand
gaacaagcugaaacauguc

SEQ ID NO: 807770 - RNA, 19 nt, Homo sapiens
  misc_RNA (1)...(19): siRNA sense strand
ugaagaagcggcagaagcu

SEQ ID NO: 807771 - RNA, 19 nt, Homo sapiens
  misc_RNA (1)...(19): siRNA sense strand
caaaauaugacaaccaugu

SEQ ID NO: 807772 - RNA, 19 nt, Homo sapiens
  misc_RNA (1)...(19): siRNA sense strand
gaagaaaccuccagucugu

SEQ ID NO: 807773 - RNA, 19 nt, Homo sapiens
  misc_RNA (1)...(19): siRNA sense strand
caaaggcgaugucauggua

SEQ ID NO: 807774 - RNA, 19 nt, Homo sapiens
  misc_RNA (1)...(19): siRNA sense strand
ccaaagcaaugucaaguuu

SEQ ID NO: 807775 - RNA, 19 nt, Homo sapiens
  misc_RNA (1)...(19): siRNA sense strand
gaggagcaguucccaguua

SEQ ID NO: 807776 - RNA, 19 nt, Homo sapiens
  misc_RNA (1)...(19): siRNA sense strand
gcaaagauccucuggaaga

SEQ ID NO: 807777 - RNA, 19 nt, Homo sapiens
  misc_RNA (1)...(19): siRNA sense strand
gaaugugugucaccucuuu

SEQ ID NO: 807778 - RNA, 19 nt, Homo sapiens
  misc_RNA (1)...(19): siRNA sense strand
cagcaaagauccucuggaa

SEQ ID NO: 807779 - RNA, 19 nt, Homo sapiens
  misc_RNA (1)...(19): siRNA sense strand
cuacacaucuggagucuau

SEQ ID NO: 807780 - RNA, 19 nt, Homo sapiens
  misc_RNA (1)...(19): siRNA sense strand
caagagagccaaagcaaug

SEQ ID NO: 807781 - RNA, 19 nt, Homo sapiens
  misc_RNA (1)...(19): siRNA sense strand
ggacagucauucauuccaa

SEQ ID NO: 807782 - RNA, 19 nt, Homo sapiens
  misc_RNA (1)...(19): siRNA sense strand
gaacagcagcccucucuuc

SEQ ID NO: 807783 - RNA, 19 nt, Homo sapiens
  misc_RNA (1)...(19): siRNA sense strand
acaaguaccugcucuucaa

SEQ ID NO: 807784 - RNA, 19 nt, Homo sapiens
  misc_RNA (1)...(19): siRNA sense strand
gcauuacacugacggacaa

SEQ ID NO: 807785 - RNA, 19 nt, Homo sapiens
  misc_RNA (1)...(19): siRNA sense strand
ggagaagggugggcaagug

SEQ ID NO: 807786 - RNA, 19 nt, Homo sapiens
  misc_RNA (1)...(19): siRNA sense strand
gaacagcugguccgccauu

SEQ ID NO: 807787 - RNA, 19 nt, Homo sapiens
  misc_RNA (1)...(19): siRNA sense strand
gacgaggccuggacugaug

SEQ ID NO: 807788 - RNA, 19 nt, Homo sapiens
  misc_RNA (1)...(19): siRNA sense strand
ccaagcaccgggacaagua

SEQ ID NO: 807789 - RNA, 19 nt, Homo sapiens
  misc_RNA (1)...(19): siRNA sense strand
uaccugcucuucaaccuuu

SEQ ID NO: 807790 - RNA, 19 nt, Homo sapiens
  misc_RNA (1)...(19): siRNA sense strand
aaagcaaugucaaguuugu

SEQ ID NO: 807791 - RNA, 19 nt, Homo sapiens
  misc_RNA (1)...(19): siRNA sense strand
ggacaagguggccacagaa

SEQ ID NO: 807792 - RNA, 19 nt, Homo sapiens
  misc_RNA (1)...(19): siRNA sense strand
gaucagggacagucauuca

SEQ ID NO: 807793 - RNA, 19 nt, Homo sapiens
  misc_RNA (1)...(19): siRNA sense strand
ggacuccuaugagaacuuc

SEQ ID NO: 807794 - RNA, 19 nt, Homo sapiens
  misc_RNA (1)...(19): siRNA sense strand
ccucagagcucaccuacac

SEQ ID NO: 807795 - RNA, 19 nt, Homo sapiens
  misc_RNA (1)...(19): siRNA sense strand
gcacguggucguacuauac

SEQ ID NO: 807796 - RNA, 19 nt, Homo sapiens
  misc_RNA (1)...(19): siRNA sense strand
ggagagggaggcuggagaa

SEQ ID NO: 807797 - RNA, 19 nt, Homo sapiens
  misc_RNA (1)...(19): siRNA sense strand
caucguuucugccuacaug

SEQ ID NO: 807798 - RNA, 19 nt, Homo sapiens
  misc_RNA (1)...(19): siRNA sense strand
gacaagcugugcuccaucu

SEQ ID NO: 807799 - RNA, 19 nt, Homo sapiens
  misc_RNA (1)...(19): siRNA sense strand
ccauugcccugcugaagga

SEQ ID NO: 807800 - RNA, 19 nt, Homo sapiens
  misc_RNA (1)...(19): siRNA sense strand
gagaagggugggcaaguga

SEQ ID NO: 807801 - RNA, 19 nt, Homo sapiens
  misc_RNA (1)...(19): siRNA sense strand
ggacaaguaccugcucuuc

SEQ ID NO: 807802 - RNA, 19 nt, Homo sapiens
  misc_RNA (1)...(19): siRNA sense strand
ccagugagcccuacuuugg

SEQ ID NO: 807803 - RNA, 19 nt, Homo sapiens
  misc_RNA (1)...(19): siRNA sense strand
ccucaaaggcgaugucaug

SEQ ID NO: 807804 - RNA, 19 nt, Homo sapiens
  misc_RNA (1)...(19): siRNA sense strand
uauguaaggugaccaucga

SEQ ID NO: 807805 - RNA, 19 nt, Homo sapiens
  misc_RNA (1)...(19): siRNA sense strand
ccuccacgcugaccacaga

SEQ ID NO: 807806 - RNA, 19 nt, Homo sapiens
  misc_RNA (1)...(19): siRNA sense strand
caccugggauccaccaaau

SEQ ID NO: 807807 - RNA, 19 nt, Homo sapiens
  misc_RNA (1)...(19): siRNA sense strand
caucgagacugggcccaaa

SEQ ID NO: 807808 - RNA, 19 nt, Homo sapiens
  misc_RNA (1)...(19): siRNA sense strand
cagggacagucauucauuc

SEQ ID NO: 807809 - RNA, 19 nt, Homo sapiens
  misc_RNA (1)...(19): siRNA sense strand
gcaccugggauccaccaaa

SEQ ID NO: 807810 - RNA, 19 nt, Homo sapiens
  misc_RNA (1)...(19): siRNA sense strand
ugaccucaguggagacaga

SEQ ID NO: 807811 - RNA, 19 nt, Homo sapiens
  misc_RNA (1)...(19): siRNA sense strand
gcccagagcaggcaucauc

SEQ ID NO: 807812 - RNA, 19 nt, Homo sapiens
  misc_RNA (1)...(19): siRNA sense strand
acccugcccuggugacaua

SEQ ID NO: 807813 - RNA, 19 nt, Homo sapiens
  misc_RNA (1)...(19): siRNA sense strand
cgauauaucagcuacuuca

SEQ ID NO: 807814 - RNA, 19 nt, Homo sapiens
  misc_RNA (1)...(19): siRNA sense strand
gaaauucugcgaggacaag

SEQ ID NO: 807815 - RNA, 19 nt, Homo sapiens
  misc_RNA (1)...(19): siRNA sense strand
gggaccaccuccaagaucu

SEQ ID NO: 807816 - RNA, 19 nt, Homo sapiens
  misc_RNA (1)...(19): siRNA sense strand
ccaaaggggugaagaucaa

SEQ ID NO: 807817 - RNA, 19 nt, Homo sapiens
  misc_RNA (1)...(19): siRNA sense strand
cauccaaguucugguacaa

SEQ ID NO: 807818 - RNA, 19 nt, Homo sapiens
  misc_RNA (1)...(19): siRNA sense strand
uacaugcacuacagcaaga

SEQ ID NO: 807819 - RNA, 19 nt, Homo sapiens
  misc_RNA (1)...(19): siRNA sense strand
caccagcuguuguccacuu

SEQ ID NO: 807820 - RNA, 19 nt, Homo sapiens
  misc_RNA (1)...(19): siRNA sense strand
ucuggagucuaucacauug

SEQ ID NO: 807821 - RNA, 19 nt, Homo sapiens
  misc_RNA (1)...(19): siRNA sense strand
caagguggccacagaacug

SEQ ID NO: 807822 - RNA, 19 nt, Homo sapiens
  misc_RNA (1)...(19): siRNA sense strand
gcacuggccacucuuacca

SEQ ID NO: 807823 - RNA, 19 nt, Homo sapiens
  misc_RNA (1)...(19): siRNA sense strand
ccagugcccaccaacauga

SEQ ID NO: 807824 - RNA, 19 nt, Homo sapiens
  misc_RNA (1)...(19): siRNA sense strand
ucagggacagucauucauu

SEQ ID NO: 807825 - RNA, 19 nt, Homo sapiens
  misc_RNA (1)...(19): siRNA sense strand
cagcuugucuacacaucug

SEQ ID NO: 807826 - RNA, 19 nt, Homo sapiens
  misc_RNA (1)...(19): siRNA sense strand
gucgauauaucagcuacuu

SEQ ID NO: 807827 - RNA, 19 nt, Homo sapiens
  misc_RNA (1)...(19): siRNA sense strand
cuacuucagugggcugcua

SEQ ID NO: 807828 - RNA, 19 nt, Homo sapiens
  misc_RNA (1)...(19): siRNA sense strand
ugacggacaaccaaaggaa

SEQ ID NO: 807829 - RNA, 19 nt, Homo sapiens
  misc_RNA (1)...(19): siRNA sense strand
gccaaagcaaugucaaguu

SEQ ID NO: 807830 - RNA, 19 nt, Homo sapiens
  misc_RNA (1)...(19): siRNA sense strand
gcagugcuucgucagaguu

SEQ ID NO: 807831 - RNA, 19 nt, Homo sapiens
  misc_RNA (1)...(19): siRNA sense strand
cacgagggcugcuccuaca

SEQ ID NO: 807832 - RNA, 19 nt, Homo sapiens
  misc_RNA (1)...(19): siRNA sense strand
caucuggagucuaucacau

SEQ ID NO: 807833 - RNA, 19 nt, Homo sapiens
  misc_RNA (1)...(19): siRNA sense strand
gacaaguaccugcucuuca

SEQ ID NO: 807834 - RNA, 19 nt, Homo sapiens
  misc_RNA (1)...(19): siRNA sense strand
gcagcgugcucuacuugac

SEQ ID NO: 807835 - RNA, 19 nt, Homo sapiens
  misc_RNA (1)...(19): siRNA sense strand
gagaagguuuuccggaaga

SEQ ID NO: 807836 - RNA, 19 nt, Homo sapiens
  misc_RNA (1)...(19): siRNA sense strand
ccaugcagcuugucuacac

SEQ ID NO: 807837 - RNA, 19 nt, Homo sapiens
  misc_RNA (1)...(19): siRNA sense strand
ucuucaaccuuucagagaa

SEQ ID NO: 807838 - RNA, 19 nt, Homo sapiens
  misc_RNA (1)...(19): siRNA sense strand
gcuuccagcccuuccuuaa

SEQ ID NO: 807839 - RNA, 19 nt, Homo sapiens
  misc_RNA (1)...(19): siRNA sense strand
gaccaccuccaagaucuuu

SEQ ID NO: 807840 - RNA, 19 nt, Homo sapiens
  misc_RNA (1)...(19): siRNA sense strand
gguccgccauuuccucauc

SEQ ID NO: 807841 - RNA, 19 nt, Homo sapiens
  misc_RNA (1)...(19): siRNA sense strand
ucaaguuuguccaggauac

SEQ ID NO: 807842 - RNA, 19 nt, Homo sapiens
  misc_RNA (1)...(19): siRNA sense strand
cacaagagagccaaagcaa

SEQ ID NO: 807843 - RNA, 19 nt, Homo sapiens
  misc_RNA (1)...(19): siRNA sense strand
ugacuggccucaggaaagg

SEQ ID NO: 807844 - RNA, 19 nt, Homo sapiens
  misc_RNA (1)...(19): siRNA sense strand
ggaggagcaguucccaguu

SEQ ID NO: 807845 - RNA, 19 nt, Homo sapiens
  misc_RNA (1)...(19): siRNA sense strand
cagaaaaugugaagcaaag

SEQ ID NO: 807846 - RNA, 19 nt, Homo sapiens
  misc_RNA (1)...(19): siRNA sense strand
aggacaagguggccacaga

SEQ ID NO: 807847 - RNA, 19 nt, Homo sapiens
  misc_RNA (1)...(19): siRNA sense strand
auacauccaaguucuggua

SEQ ID NO: 807848 - RNA, 19 nt, Homo sapiens
  misc_RNA (1)...(19): siRNA sense strand
gcgagacggccauccuaga

SEQ ID NO: 807849 - RNA, 19 nt, Homo sapiens
  misc_RNA (1)...(19): siRNA sense strand
gacgggaccaccuccaaga

SEQ ID NO: 807850 - RNA, 19 nt, Homo sapiens
  misc_RNA (1)...(19): siRNA sense strand
cgagacggccauccuagau

SEQ ID NO: 807851 - RNA, 19 nt, Homo sapiens
  misc_RNA (1)...(19): siRNA sense strand
cccaugugcugcaauccaa

SEQ ID NO: 807852 - RNA, 19 nt, Homo sapiens
  misc_RNA (1)...(19): siRNA sense strand
cagcuguuguccacuucaa

SEQ ID NO: 807853 - RNA, 19 nt, Homo sapiens
  misc_RNA (1)...(19): siRNA sense strand
cccagagccuccuacacaa

SEQ ID NO: 807854 - RNA, 19 nt, Homo sapiens
  misc_RNA (1)...(19): siRNA sense strand
acgaagagcagcccacugu

SEQ ID NO: 807855 - RNA, 19 nt, Homo sapiens
  misc_RNA (1)...(19): siRNA sense strand
cuucaucaccaaaguucua

SEQ ID NO: 807856 - RNA, 19 nt, Homo sapiens
  misc_RNA (1)...(19): siRNA sense strand
ucaccuucaucaccaaagu

SEQ ID NO: 807857 - RNA, 19 nt, Homo sapiens
  misc_RNA (1)...(19): siRNA sense strand
ccucaagaccggagaugga

SEQ ID NO: 807858 - RNA, 19 nt, Homo sapiens
  misc_RNA (1)...(19): siRNA sense strand
cagagccuccuacacaaga

SEQ ID NO: 807859 - RNA, 19 nt, Homo sapiens
  misc_RNA (1)...(19): siRNA sense strand
gcucaccuacaccugcuuu

SEQ ID NO: 807860 - RNA, 19 nt, Homo sapiens
  misc_RNA (1)...(19): siRNA sense strand
ggccucagcaggaccuuug

SEQ ID NO: 807861 - RNA, 19 nt, Homo sapiens
  misc_RNA (1)...(19): siRNA sense strand
ggagagggcagaggguauc

SEQ ID NO: 807862 - RNA, 19 nt, Homo sapiens
  misc_RNA (1)...(19): siRNA sense strand
gcugugcuccaucugcaaa

SEQ ID NO: 807863 - RNA, 19 nt, Homo sapiens
  misc_RNA (1)...(19): siRNA sense strand
gccauugucaccuucauca

SEQ ID NO: 807864 - RNA, 19 nt, Homo sapiens
  misc_RNA (1)...(19): siRNA sense strand
caaagcagcgcagcacucu

SEQ ID NO: 807865 - RNA, 19 nt, Homo sapiens
  misc_RNA (1)...(19): siRNA sense strand
gcugggacuccuaugagaa

SEQ ID NO: 807866 - RNA, 19 nt, Homo sapiens
  misc_RNA (1)...(19): siRNA sense strand
ccuccagucugugcaguau

SEQ ID NO: 807867 - RNA, 19 nt, Homo sapiens
  misc_RNA (1)...(19): siRNA sense strand
ggaaauucugcgaggacaa

SEQ ID NO: 807868 - RNA, 19 nt, Homo sapiens
  misc_RNA (1)...(19): siRNA sense strand
ccacgggcuggcuccauuu

SEQ ID NO: 807869 - RNA, 19 nt, Homo sapiens
  misc_RNA (1)...(19): siRNA sense strand
gcgcauucccagcaaagau

SEQ ID NO: 807870 - RNA, 19 nt, Homo sapiens
  misc_RNA (1)...(19): siRNA sense strand
uccagucugugcaguaugu

SEQ ID NO: 807871 - RNA, 19 nt, Homo sapiens
  misc_RNA (1)...(19): siRNA sense strand
ggauccaccaaaucucuga

SEQ ID NO: 807872 - RNA, 19 nt, Homo sapiens
  misc_RNA (1)...(19): siRNA sense strand
gaagaaaccuccagucugu

SEQ ID NO: 807873 - RNA, 19 nt, Homo sapiens
  misc_RNA (1)...(19): siRNA sense strand
caaaggcgaugucauggua

SEQ ID NO: 807874 - RNA, 19 nt, Homo sapiens
  misc_RNA (1)...(19): siRNA sense strand
ccaaagcaaugucaaguuu

SEQ ID NO: 807875 - RNA, 19 nt, Homo sapiens
  misc_RNA (1)...(19): siRNA sense strand
gaggagcaguucccaguua

SEQ ID NO: 807876 - RNA, 19 nt, Homo sapiens
  misc_RNA (1)...(19): siRNA sense strand
gcaaagauccucuggaaga

SEQ ID NO: 807877 - RNA, 19 nt, Homo sapiens
  misc_RNA (1)...(19): siRNA sense strand
gaaugugugucaccucuuu

SEQ ID NO: 807878 - RNA, 19 nt, Homo sapiens
  misc_RNA (1)...(19): siRNA sense strand
cagcaaagauccucuggaa

SEQ ID NO: 807879 - RNA, 19 nt, Homo sapiens
  misc_RNA (1)...(19): siRNA sense strand
cuacacaucuggagucuau

SEQ ID NO: 807880 - RNA, 19 nt, Homo sapiens
  misc_RNA (1)...(19): siRNA sense strand
caagagagccaaagcaaug

SEQ ID NO: 807881 - RNA, 19 nt, Homo sapiens
  misc_RNA (1)...(19): siRNA sense strand
ggacagucauucauuccaa

SEQ ID NO: 807882 - RNA, 19 nt, Homo sapiens
  misc_RNA (1)...(19): siRNA sense strand
gaacagcagcccucucuuc

SEQ ID NO: 807883 - RNA, 19 nt, Homo sapiens
  misc_RNA (1)...(19): siRNA sense strand
acaaguaccugcucuucaa

SEQ ID NO: 807884 - RNA, 19 nt, Homo sapiens
  misc_RNA (1)...(19): siRNA sense strand
gcauuacacugacggacaa

SEQ ID NO: 807885 - RNA, 19 nt, Homo sapiens
  misc_RNA (1)...(19): siRNA sense strand
ggagaagggugggcaagug

SEQ ID NO: 807886 - RNA, 19 nt, Homo sapiens
  misc_RNA (1)...(19): siRNA sense strand
gaacagcugguccgccauu

SEQ ID NO: 807887 - RNA, 19 nt, Homo sapiens
  misc_RNA (1)...(19): siRNA sense strand
gacgaggccuggacugaug

SEQ ID NO: 807888 - RNA, 19 nt, Homo sapiens
  misc_RNA (1)...(19): siRNA sense strand
ccaagcaccgggacaagua

SEQ ID NO: 807889 - RNA, 19 nt, Homo sapiens
  misc_RNA (1)...(19): siRNA sense strand
uaccugcucuucaaccuuu

SEQ ID NO: 807890 - RNA, 19 nt, Homo sapiens
  misc_RNA (1)...(19): siRNA sense strand
aaagcaaugucaaguuugu

SEQ ID NO: 807891 - RNA, 19 nt, Homo sapiens
  misc_RNA (1)...(19): siRNA sense strand
ggacaagguggccacagaa

SEQ ID NO: 807892 - RNA, 19 nt, Homo sapiens
  misc_RNA (1)...(19): siRNA sense strand
gaucagggacagucauuca

SEQ ID NO: 807893 - RNA, 19 nt, Homo sapiens
  misc_RNA (1)...(19): siRNA sense strand
ggacuccuaugagaacuuc

SEQ ID NO: 807894 - RNA, 19 nt, Homo sapiens
  misc_RNA (1)...(19): siRNA sense strand
ccucagagcucaccuacac

SEQ ID NO: 807895 - RNA, 19 nt, Homo sapiens
  misc_RNA (1)...(19): siRNA sense strand
gcacguggucguacuauac

SEQ ID NO: 807896 - RNA, 19 nt, Homo sapiens
  misc_RNA (1)...(19): siRNA sense strand
ggagagggaggcuggagaa

SEQ ID NO: 807897 - RNA, 19 nt, Homo sapiens
  misc_RNA (1)...(19): siRNA sense strand
caucguuucugccuacaug

SEQ ID NO: 807898 - RNA, 19 nt, Homo sapiens
  misc_RNA (1)...(19): siRNA sense strand
gacaagcugugcuccaucu

SEQ ID NO: 807899 - RNA, 19 nt, Homo sapiens
  misc_RNA (1)...(19): siRNA sense strand
ccauugcccugcugaagga

SEQ ID NO: 807900 - RNA, 19 nt, Homo sapiens
  misc_RNA (1)...(19): siRNA sense strand
gagaagggugggcaaguga

SEQ ID NO: 807901 - RNA, 19 nt, Homo sapiens
  misc_RNA (1)...(19): siRNA sense strand
ggacaaguaccugcucuuc

SEQ ID NO: 807902 - RNA, 19 nt, Homo sapiens
  misc_RNA (1)...(19): siRNA sense strand
ccagugagcccuacuuugg

SEQ ID NO: 807903 - RNA, 19 nt, Homo sapiens
  misc_RNA (1)...(19): siRNA sense strand
ccucaaaggcgaugucaug

SEQ ID NO: 807904 - RNA, 19 nt, Homo sapiens
  misc_RNA (1)...(19): siRNA sense strand
uauguaaggugaccaucga

SEQ ID NO: 807905 - RNA, 19 nt, Homo sapiens
  misc_RNA (1)...(19): siRNA sense strand
ccuccacgcugaccacaga

SEQ ID NO: 807906 - RNA, 19 nt, Homo sapiens
  misc_RNA (1)...(19): siRNA sense strand
caccugggauccaccaaau

SEQ ID NO: 807907 - RNA, 19 nt, Homo sapiens
  misc_RNA (1)...(19): siRNA sense strand
caucgagacugggcccaaa

SEQ ID NO: 807908 - RNA, 19 nt, Homo sapiens
  misc_RNA (1)...(19): siRNA sense strand
cagggacagucauucauuc

SEQ ID NO: 807909 - RNA, 19 nt, Homo sapiens
  misc_RNA (1)...(19): siRNA sense strand
gcaccugggauccaccaaa

SEQ ID NO: 807910 - RNA, 19 nt, Homo sapiens
  misc_RNA (1)...(19): siRNA sense strand
ugaccucaguggagacaga

SEQ ID NO: 807911 - RNA, 19 nt, Homo sapiens
  misc_RNA (1)...(19): siRNA sense strand
gcccagagcaggcaucauc

SEQ ID NO: 807912 - RNA, 19 nt, Homo sapiens
  misc_RNA (1)...(19): siRNA sense strand
acccugcccuggugacaua

SEQ ID NO: 807913 - RNA, 19 nt, Homo sapiens
  misc_RNA (1)...(19): siRNA sense strand
cgauauaucagcuacuuca

SEQ ID NO: 807914 - RNA, 19 nt, Homo sapiens
  misc_RNA (1)...(19): siRNA sense strand
gaaauucugcgaggacaag

SEQ ID NO: 807915 - RNA, 19 nt, Homo sapiens
  misc_RNA (1)...(19): siRNA sense strand
gggaccaccuccaagaucu

SEQ ID NO: 807916 - RNA, 19 nt, Homo sapiens
  misc_RNA (1)...(19): siRNA sense strand
ccaaaggggugaagaucaa

SEQ ID NO: 807917 - RNA, 19 nt, Homo sapiens
  misc_RNA (1)...(19): siRNA sense strand
cauccaaguucugguacaa

SEQ ID NO: 807918 - RNA, 19 nt, Homo sapiens
  misc_RNA (1)...(19): siRNA sense strand
uacaugcacuacagcaaga

SEQ ID NO: 807919 - RNA, 19 nt, Homo sapiens
  misc_RNA (1)...(19): siRNA sense strand
caccagcuguuguccacuu

SEQ ID NO: 807920 - RNA, 19 nt, Homo sapiens
  misc_RNA (1)...(19): siRNA sense strand
ucuggagucuaucacauug

SEQ ID NO: 807921 - RNA, 19 nt, Homo sapiens
  misc_RNA (1)...(19): siRNA sense strand
caagguggccacagaacug

SEQ ID NO: 807922 - RNA, 19 nt, Homo sapiens
  misc_RNA (1)...(19): siRNA sense strand
gcacuggccacucuuacca

SEQ ID NO: 807923 - RNA, 19 nt, Homo sapiens
  misc_RNA (1)...(19): siRNA sense strand
ccagugcccaccaacauga

SEQ ID NO: 807924 - RNA, 19 nt, Homo sapiens
  misc_RNA (1)...(19): siRNA sense strand
ucagggacagucauucauu

SEQ ID NO: 807925 - RNA, 19 nt, Homo sapiens
  misc_RNA (1)...(19): siRNA sense strand
cagcuugucuacacaucug

SEQ ID NO: 807926 - RNA, 19 nt, Homo sapiens
  misc_RNA (1)...(19): siRNA sense strand
gucgauauaucagcuacuu

SEQ ID NO: 807927 - RNA, 19 nt, Homo sapiens
  misc_RNA (1)...(19): siRNA sense strand
cuacuucagugggcugcua

SEQ ID NO: 807928 - RNA, 19 nt, Homo sapiens
  misc_RNA (1)...(19): siRNA sense strand
ugacggacaaccaaaggaa

SEQ ID NO: 807929 - RNA, 19 nt, Homo sapiens
  misc_RNA (1)...(19): siRNA sense strand
gccaaagcaaugucaaguu

SEQ ID NO: 807930 - RNA, 19 nt, Homo sapiens
  misc_RNA (1)...(19): siRNA sense strand
gcagugcuucgucagaguu

SEQ ID NO: 807931 - RNA, 19 nt, Homo sapiens
  misc_RNA (1)...(19): siRNA sense strand
cacgagggcugcuccuaca

SEQ ID NO: 807932 - RNA, 19 nt, Homo sapiens
  misc_RNA (1)...(19): siRNA sense strand
caucuggagucuaucacau

SEQ ID NO: 807933 - RNA, 19 nt, Homo sapiens
  misc_RNA (1)...(19): siRNA sense strand
gacaaguaccugcucuuca

SEQ ID NO: 807934 - RNA, 19 nt, Homo sapiens
  misc_RNA (1)...(19): siRNA sense strand
gcagcgugcucuacuugac

SEQ ID NO: 807935 - RNA, 19 nt, Homo sapiens
  misc_RNA (1)...(19): siRNA sense strand
gagaagguuuuccggaaga

SEQ ID NO: 807936 - RNA, 19 nt, Homo sapiens
  misc_RNA (1)...(19): siRNA sense strand
ccaugcagcuugucuacac

SEQ ID NO: 807937 - RNA, 19 nt, Homo sapiens
  misc_RNA (1)...(19): siRNA sense strand
ucuucaaccuuucagagaa

SEQ ID NO: 807938 - RNA, 19 nt, Homo sapiens
  misc_RNA (1)...(19): siRNA sense strand
gcuuccagcccuuccuuaa

SEQ ID NO: 807939 - RNA, 19 nt, Homo sapiens
  misc_RNA (1)...(19): siRNA sense strand
gaccaccuccaagaucuuu

SEQ ID NO: 807940 - RNA, 19 nt, Homo sapiens
  misc_RNA (1)...(19): siRNA sense strand
gguccgccauuuccucauc

SEQ ID NO: 807941 - RNA, 19 nt, Homo sapiens
  misc_RNA (1)...(19): siRNA sense strand
ucaaguuuguccaggauac

SEQ ID NO: 807942 - RNA, 19 nt, Homo sapiens
  misc_RNA (1)...(19): siRNA sense strand
cacaagagagccaaagcaa

SEQ ID NO: 807943 - RNA, 19 nt, Homo sapiens
  misc_RNA (1)...(19): siRNA sense strand
ugacuggccucaggaaagg

SEQ ID NO: 807944 - RNA, 19 nt, Homo sapiens
  misc_RNA (1)...(19): siRNA sense strand
ggaggagcaguucccaguu

SEQ ID NO: 807945 - RNA, 19 nt, Homo sapiens
  misc_RNA (1)...(19): siRNA sense strand
cagaaaaugugaagcaaag

SEQ ID NO: 807946 - RNA, 19 nt, Homo sapiens
  misc_RNA (1)...(19): siRNA sense strand
aggacaagguggccacaga

SEQ ID NO: 807947 - RNA, 19 nt, Homo sapiens
  misc_RNA (1)...(19): siRNA sense strand
auacauccaaguucuggua

SEQ ID NO: 807948 - RNA, 19 nt, Homo sapiens
  misc_RNA (1)...(19): siRNA sense strand
gcgagacggccauccuaga

SEQ ID NO: 807949 - RNA, 19 nt, Homo sapiens
  misc_RNA (1)...(19): siRNA sense strand
gacgggaccaccuccaaga

SEQ ID NO: 807950 - RNA, 19 nt, Homo sapiens
  misc_RNA (1)...(19): siRNA sense strand
cgagacggccauccuagau

SEQ ID NO: 807951 - RNA, 19 nt, Homo sapiens
  misc_RNA (1)...(19): siRNA sense strand
cccaugugcugcaauccaa

SEQ ID NO: 807952 - RNA, 19 nt, Homo sapiens
  misc_RNA (1)...(19): siRNA sense strand
cagcuguuguccacuucaa

SEQ ID NO: 807953 - RNA, 19 nt, Homo sapiens
  misc_RNA (1)...(19): siRNA sense strand
cccagagccuccuacacaa

SEQ ID NO: 807954 - RNA, 19 nt, Homo sapiens
  misc_RNA (1)...(19): siRNA sense strand
acgaagagcagcccacugu

SEQ ID NO: 807955 - RNA, 19 nt, Homo sapiens
  misc_RNA (1)...(19): siRNA sense strand
cuucaucaccaaaguucua

SEQ ID NO: 807956 - RNA, 19 nt, Homo sapiens
  misc_RNA (1)...(19): siRNA sense strand
ucaccuucaucaccaaagu

SEQ ID NO: 807957 - RNA, 19 nt, Homo sapiens
  misc_RNA (1)...(19): siRNA sense strand
ccucaagaccggagaugga

SEQ ID NO: 807958 - RNA, 19 nt, Homo sapiens
  misc_RNA (1)...(19): siRNA sense strand
cagagccuccuacacaaga

SEQ ID NO: 807959 - RNA, 19 nt, Homo sapiens
  misc_RNA (1)...(19): siRNA sense strand
gcucaccuacaccugcuuu

SEQ ID NO: 807960 - RNA, 19 nt, Homo sapiens
  misc_RNA (1)...(19): siRNA sense strand
ggccucagcaggaccuuug

SEQ ID NO: 807961 - RNA, 19 nt, Homo sapiens
  misc_RNA (1)...(19): siRNA sense strand
ggagagggcagaggguauc

SEQ ID NO: 807962 - RNA, 19 nt, Homo sapiens
  misc_RNA (1)...(19): siRNA sense strand
gcugugcuccaucugcaaa

SEQ ID NO: 807963 - RNA, 19 nt, Homo sapiens
  misc_RNA (1)...(19): siRNA sense strand
gccauugucaccuucauca

SEQ ID NO: 807964 - RNA, 19 nt, Homo sapiens
  misc_RNA (1)...(19): siRNA sense strand
caaagcagcgcagcacucu

SEQ ID NO: 807965 - RNA, 19 nt, Homo sapiens
  misc_RNA (1)...(19): siRNA sense strand
gcugggacuccuaugagaa

SEQ ID NO: 807966 - RNA, 19 nt, Homo sapiens
  misc_RNA (1)...(19): siRNA sense strand
ccuccagucugugcaguau

SEQ ID NO: 807967 - RNA, 19 nt, Homo sapiens
  misc_RNA (1)...(19): siRNA sense strand
ggaaauucugcgaggacaa

SEQ ID NO: 807968 - RNA, 19 nt, Homo sapiens
  misc_RNA (1)...(19): siRNA sense strand
ccacgggcuggcuccauuu

SEQ ID NO: 807969 - RNA, 19 nt, Homo sapiens
  misc_RNA (1)...(19): siRNA sense strand
gcgcauucccagcaaagau

SEQ ID NO: 807970 - RNA, 19 nt, Homo sapiens
  misc_RNA (1)...(19): siRNA sense strand
uccagucugugcaguaugu

SEQ ID NO: 807971 - RNA, 19 nt, Homo sapiens
  misc_RNA (1)...(19): siRNA sense strand
ggauccaccaaaucucuga

SEQ ID NO: 807972 - RNA, 19 nt, Homo sapiens
  misc_RNA (1)...(19): siRNA sense strand
caaaggcgaugucauggua

SEQ ID NO: 807973 - RNA, 19 nt, Homo sapiens
  misc_RNA (1)...(19): siRNA sense strand
ccaaagcaaugucaaguuu

SEQ ID NO: 807974 - RNA, 19 nt, Homo sapiens
  misc_RNA (1)...(19): siRNA sense strand
gaggagcaguucccaguua

SEQ ID NO: 807975 - RNA, 19 nt, Homo sapiens
  misc_RNA (1)...(19): siRNA sense strand
gcaaagauccucuggaaga

SEQ ID NO: 807976 - RNA, 19 nt, Homo sapiens
  misc_RNA (1)...(19): siRNA sense strand
gaaugugugucaccucuuu

SEQ ID NO: 807977 - RNA, 19 nt, Homo sapiens
  misc_RNA (1)...(19): siRNA sense strand
cagcaaagauccucuggaa

SEQ ID NO: 807978 - RNA, 19 nt, Homo sapiens
  misc_RNA (1)...(19): siRNA sense strand
cuacacaucuggagucuau

SEQ ID NO: 807979 - RNA, 19 nt, Homo sapiens
  misc_RNA (1)...(19): siRNA sense strand
caagagagccaaagcaaug

SEQ ID NO: 807980 - RNA, 19 nt, Homo sapiens
  misc_RNA (1)...(19): siRNA sense strand
ggacagucauucauuccaa

SEQ ID NO: 807981 - RNA, 19 nt, Homo sapiens
  misc_RNA (1)...(19): siRNA sense strand
gaacagcagcccucucuuc

SEQ ID NO: 807982 - RNA, 19 nt, Homo sapiens
  misc_RNA (1)...(19): siRNA sense strand
acaaguaccugcucuucaa

SEQ ID NO: 807983 - RNA, 19 nt, Homo sapiens
  misc_RNA (1)...(19): siRNA sense strand
gcauuacacugacggacaa

SEQ ID NO: 807984 - RNA, 19 nt, Homo sapiens
  misc_RNA (1)...(19): siRNA sense strand
ggagaagggugggcaagug

SEQ ID NO: 807985 - RNA, 19 nt, Homo sapiens
  misc_RNA (1)...(19): siRNA sense strand
gaacagcugguccgccauu

SEQ ID NO: 807986 - RNA, 19 nt, Homo sapiens
  misc_RNA (1)...(19): siRNA sense strand
gacgaggccuggacugaug

SEQ ID NO: 807987 - RNA, 19 nt, Homo sapiens
  misc_RNA (1)...(19): siRNA sense strand
ccaagcaccgggacaagua

SEQ ID NO: 807988 - RNA, 19 nt, Homo sapiens
  misc_RNA (1)...(19): siRNA sense strand
uaccugcucuucaaccuuu

SEQ ID NO: 807989 - RNA, 19 nt, Homo sapiens
  misc_RNA (1)...(19): siRNA sense strand
aaagcaaugucaaguuugu

SEQ ID NO: 807990 - RNA, 19 nt, Homo sapiens
  misc_RNA (1)...(19): siRNA sense strand
ggacaagguggccacagaa

SEQ ID NO: 807991 - RNA, 19 nt, Homo sapiens
  misc_RNA (1)...(19): siRNA sense strand
gaucagggacagucauuca

SEQ ID NO: 807992 - RNA, 19 nt, Homo sapiens
  misc_RNA (1)...(19): siRNA sense strand
ggacuccuaugagaacuuc

SEQ ID NO: 807993 - RNA, 19 nt, Homo sapiens
  misc_RNA (1)...(19): siRNA sense strand
ccucagagcucaccuacac

SEQ ID NO: 807994 - RNA, 19 nt, Homo sapiens
  misc_RNA (1)...(19): siRNA sense strand
gcacguggucguacuauac

SEQ ID NO: 807995 - RNA, 19 nt, Homo sapiens
  misc_RNA (1)...(19): siRNA sense strand
ggagagggaggcuggagaa

SEQ ID NO: 807996 - RNA, 19 nt, Homo sapiens
  misc_RNA (1)...(19): siRNA sense strand
caucguuucugccuacaug

SEQ ID NO: 807997 - RNA, 19 nt, Homo sapiens
  misc_RNA (1)...(19): siRNA sense strand
gacaagcugugcuccaucu

SEQ ID NO: 807998 - RNA, 19 nt, Homo sapiens
  misc_RNA (1)...(19): siRNA sense strand
ccauugcccugcugaagga

SEQ ID NO: 807999 - RNA, 19 nt, Homo sapiens
  misc_RNA (1)...(19): siRNA sense strand
gagaagggugggcaaguga

SEQ ID NO: 808000 - RNA, 19 nt, Homo sapiens
  misc_RNA (1)...(19): siRNA sense strand
ccucaaaggcgaugucaug

SEQ ID NO: 808001 - RNA, 19 nt, Homo sapiens
  misc_RNA (1)...(19): siRNA sense strand
ccagugagcccuacuuugg

SEQ ID NO: 808002 - RNA, 19 nt, Homo sapiens
  misc_RNA (1)...(19): siRNA sense strand
ggacaaguaccugcucuuc

SEQ ID NO: 808003 - RNA, 19 nt, Homo sapiens
  misc_RNA (1)...(19): siRNA sense strand
ccuccacgcugaccacaga

SEQ ID NO: 808004 - RNA, 19 nt, Homo sapiens
  misc_RNA (1)...(19): siRNA sense strand
cagggacagucauucauuc

SEQ ID NO: 808005 - RNA, 19 nt, Homo sapiens
  misc_RNA (1)...(19): siRNA sense strand
caucgagacugggcccaaa

SEQ ID NO: 808006 - RNA, 19 nt, Homo sapiens
  misc_RNA (1)...(19): siRNA sense strand
cgauauaucagcuacuuca

SEQ ID NO: 808007 - RNA, 19 nt, Homo sapiens
  misc_RNA (1)...(19): siRNA sense strand
ugaccucaguggagacaga

SEQ ID NO: 808008 - RNA, 19 nt, Homo sapiens
  misc_RNA (1)...(19): siRNA sense strand
gcccagagcaggcaucauc

SEQ ID NO: 808009 - RNA, 19 nt, Homo sapiens
  misc_RNA (1)...(19): siRNA sense strand
acccugcccuggugacaua

SEQ ID NO: 808010 - RNA, 19 nt, Homo sapiens
  misc_RNA (1)...(19): siRNA sense strand
gaaauucugcgaggacaag

SEQ ID NO: 808011 - RNA, 19 nt, Homo sapiens
  misc_RNA (1)...(19): siRNA sense strand
gggaccaccuccaagaucu

SEQ ID NO: 808012 - RNA, 19 nt, Homo sapiens
  misc_RNA (1)...(19): siRNA sense strand
ccaaaggggugaagaucaa

SEQ ID NO: 808013 - RNA, 19 nt, Homo sapiens
  misc_RNA (1)...(19): siRNA sense strand
cauccaaguucugguacaa

SEQ ID NO: 808014 - RNA, 19 nt, Homo sapiens
  misc_RNA (1)...(19): siRNA sense strand
uacaugcacuacagcaaga

SEQ ID NO: 808015 - RNA, 19 nt, Homo sapiens
  misc_RNA (1)...(19): siRNA sense strand
caccagcuguuguccacuu

SEQ ID NO: 808016 - RNA, 19 nt, Homo sapiens
  misc_RNA (1)...(19): siRNA sense strand
ucuggagucuaucacauug

SEQ ID NO: 808017 - RNA, 19 nt, Homo sapiens
  misc_RNA (1)...(19): siRNA sense strand
caagguggccacagaacug

SEQ ID NO: 808018 - RNA, 19 nt, Homo sapiens
  misc_RNA (1)...(19): siRNA sense strand
gcacuggccacucuuacca

SEQ ID NO: 808019 - RNA, 19 nt, Homo sapiens
  misc_RNA (1)...(19): siRNA sense strand
ccagugcccaccaacauga

SEQ ID NO: 808020 - RNA, 19 nt, Homo sapiens
  misc_RNA (1)...(19): siRNA sense strand
ucagggacagucauucauu

SEQ ID NO: 808021 - RNA, 19 nt, Homo sapiens
  misc_RNA (1)...(19): siRNA sense strand
cagcuugucuacacaucug

SEQ ID NO: 808022 - RNA, 19 nt, Homo sapiens
  misc_RNA (1)...(19): siRNA sense strand
gucgauauaucagcuacuu

SEQ ID NO: 808023 - RNA, 19 nt, Homo sapiens
  misc_RNA (1)...(19): siRNA sense strand
cuacuucagugggcugcua

SEQ ID NO: 808024 - RNA, 19 nt, Homo sapiens
  misc_RNA (1)...(19): siRNA sense strand
ugacggacaaccaaaggaa

SEQ ID NO: 808025 - RNA, 19 nt, Homo sapiens
  misc_RNA (1)...(19): siRNA sense strand
gccaaagcaaugucaaguu

SEQ ID NO: 808026 - RNA, 19 nt, Homo sapiens
  misc_RNA (1)...(19): siRNA sense strand
gcagugcuucgucagaguu

SEQ ID NO: 808027 - RNA, 19 nt, Homo sapiens
  misc_RNA (1)...(19): siRNA sense strand
cacgagggcugcuccuaca

SEQ ID NO: 808028 - RNA, 19 nt, Homo sapiens
  misc_RNA (1)...(19): siRNA sense strand
caucuggagucuaucacau

SEQ ID NO: 808029 - RNA, 19 nt, Homo sapiens
  misc_RNA (1)...(19): siRNA sense strand
ccaugcagcuugucuacac

SEQ ID NO: 808030 - RNA, 19 nt, Homo sapiens
  misc_RNA (1)...(19): siRNA sense strand
gcagcgugcucuacuugac

SEQ ID NO: 808031 - RNA, 19 nt, Homo sapiens
  misc_RNA (1)...(19): siRNA sense strand
ucuucaaccuuucagagaa

SEQ ID NO: 808032 - RNA, 19 nt, Homo sapiens
  misc_RNA (1)...(19): siRNA sense strand
gacaaguaccugcucuuca

SEQ ID NO: 808033 - RNA, 19 nt, Homo sapiens
  misc_RNA (1)...(19): siRNA sense strand
gcuuccagcccuuccuuaa

SEQ ID NO: 808034 - RNA, 19 nt, Homo sapiens
  misc_RNA (1)...(19): siRNA sense strand
gaccaccuccaagaucuuu

SEQ ID NO: 808035 - RNA, 19 nt, Homo sapiens
  misc_RNA (1)...(19): siRNA sense strand
gguccgccauuuccucauc

SEQ ID NO: 808036 - RNA, 19 nt, Homo sapiens
  misc_RNA (1)...(19): siRNA sense strand
ucaaguuuguccaggauac

SEQ ID NO: 808037 - RNA, 19 nt, Homo sapiens
  misc_RNA (1)...(19): siRNA sense strand
cacaagagagccaaagcaa

SEQ ID NO: 808038 - RNA, 19 nt, Homo sapiens
  misc_RNA (1)...(19): siRNA sense strand
ugacuggccucaggaaagg

SEQ ID NO: 808039 - RNA, 19 nt, Homo sapiens
  misc_RNA (1)...(19): siRNA sense strand
ggaggagcaguucccaguu

SEQ ID NO: 808040 - RNA, 19 nt, Homo sapiens
  misc_RNA (1)...(19): siRNA sense strand
aggacaagguggccacaga

SEQ ID NO: 808041 - RNA, 19 nt, Homo sapiens
  misc_RNA (1)...(19): siRNA sense strand
auacauccaaguucuggua

SEQ ID NO: 808042 - RNA, 19 nt, Homo sapiens
  misc_RNA (1)...(19): siRNA sense strand
gcgagacggccauccuaga

SEQ ID NO: 808043 - RNA, 19 nt, Homo sapiens
  misc_RNA (1)...(19): siRNA sense strand
gacgggaccaccuccaaga

SEQ ID NO: 808044 - RNA, 19 nt, Homo sapiens
  misc_RNA (1)...(19): siRNA sense strand
cccaugugcugcaauccaa

SEQ ID NO: 808045 - RNA, 19 nt, Homo sapiens
  misc_RNA (1)...(19): siRNA sense strand
cagcuguuguccacuucaa

SEQ ID NO: 808046 - RNA, 19 nt, Homo sapiens
  misc_RNA (1)...(19): siRNA sense strand
cccagagccuccuacacaa

SEQ ID NO: 808047 - RNA, 19 nt, Homo sapiens
  misc_RNA (1)...(19): siRNA sense strand
cgagacggccauccuagau

SEQ ID NO: 808048 - RNA, 19 nt, Homo sapiens
  misc_RNA (1)...(19): siRNA sense strand
acgaagagcagcccacugu

SEQ ID NO: 808049 - RNA, 19 nt, Homo sapiens
  misc_RNA (1)...(19): siRNA sense strand
cuucaucaccaaaguucua

SEQ ID NO: 808050 - RNA, 19 nt, Homo sapiens
  misc_RNA (1)...(19): siRNA sense strand
ucaccuucaucaccaaagu

SEQ ID NO: 808051 - RNA, 19 nt, Homo sapiens
  misc_RNA (1)...(19): siRNA sense strand
ccucaagaccggagaugga

SEQ ID NO: 808052 - RNA, 19 nt, Homo sapiens
  misc_RNA (1)...(19): siRNA sense strand
cagagccuccuacacaaga

SEQ ID NO: 808053 - RNA, 19 nt, Homo sapiens
  misc_RNA (1)...(19): siRNA sense strand
gcucaccuacaccugcuuu

SEQ ID NO: 808054 - RNA, 19 nt, Homo sapiens
  misc_RNA (1)...(19): siRNA sense strand
ggccucagcaggaccuuug

SEQ ID NO: 808055 - RNA, 19 nt, Homo sapiens
  misc_RNA (1)...(19): siRNA sense strand
ggagagggcagaggguauc

SEQ ID NO: 808056 - RNA, 19 nt, Homo sapiens
  misc_RNA (1)...(19): siRNA sense strand
ggaaauucugcgaggacaa

SEQ ID NO: 808057 - RNA, 19 nt, Homo sapiens
  misc_RNA (1)...(19): siRNA sense strand
gccauugucaccuucauca

SEQ ID NO: 808058 - RNA, 19 nt, Homo sapiens
  misc_RNA (1)...(19): siRNA sense strand
gcugggacuccuaugagaa

SEQ ID NO: 808059 - RNA, 19 nt, Homo sapiens
  misc_RNA (1)...(19): siRNA sense strand
gcugugcuccaucugcaaa

SEQ ID NO: 808060 - RNA, 19 nt, Homo sapiens
  misc_RNA (1)...(19): siRNA sense strand
ccacgggcuggcuccauuu

SEQ ID NO: 808061 - RNA, 19 nt, Homo sapiens
  misc_RNA (1)...(19): siRNA sense strand
gcgcauucccagcaaagau

SEQ ID NO: 808062 - RNA, 19 nt, Homo sapiens
  misc_RNA (1)...(19): siRNA sense strand
gggaaacaagggcaagcuu

SEQ ID NO: 808063 - RNA, 19 nt, Homo sapiens
  misc_RNA (1)...(19): siRNA sense strand
ugucaaguuuguccaggau

SEQ ID NO: 808064 - RNA, 19 nt, Homo sapiens
  misc_RNA (1)...(19): siRNA sense strand
acacaucuggagucuauca

SEQ ID NO: 808065 - RNA, 19 nt, Homo sapiens
  misc_RNA (1)...(19): siRNA sense strand
ggaccaccuccaagaucuu

SEQ ID NO: 808066 - RNA, 19 nt, Homo sapiens
  misc_RNA (1)...(19): siRNA sense strand
gagccaaagcaaugucaag

SEQ ID NO: 808067 - RNA, 19 nt, Homo sapiens
  misc_RNA (1)...(19): siRNA sense strand
gagagccaaagcaauguca

SEQ ID NO: 808068 - RNA, 19 nt, Homo sapiens
  misc_RNA (1)...(19): siRNA sense strand
gaccugacccgcuuaaacc

SEQ ID NO: 808069 - RNA, 19 nt, Homo sapiens
  misc_RNA (1)...(19): siRNA sense strand
gcaggaccuuuggcaucug

SEQ ID NO: 808070 - RNA, 19 nt, Homo sapiens
  misc_RNA (1)...(19): siRNA sense strand
guggagacagagucacuga

SEQ ID NO: 808071 - RNA, 19 nt, Homo sapiens
  misc_RNA (1)...(19): siRNA sense strand
ugacaccaauggccuuagc

SEQ ID NO: 808072 - RNA, 19 nt, Homo sapiens
  misc_RNA (1)...(19): siRNA sense strand
gacaccagcuggagaagga

SEQ ID NO: 808073 - RNA, 19 nt, Homo sapiens
  misc_RNA (1)...(19): siRNA sense strand
gaacaauccgcggaaauuc

SEQ ID NO: 808074 - RNA, 19 nt, Homo sapiens
  misc_RNA (1)...(19): siRNA sense strand
gaagaucgcgcugcacaau

SEQ ID NO: 808075 - RNA, 19 nt, Homo sapiens
  misc_RNA (1)...(19): siRNA sense strand
ucgaggaggucaugaagga

SEQ ID NO: 808076 - RNA, 19 nt, Homo sapiens
  misc_RNA (1)...(19): siRNA sense strand
cgaacaauccgcggaaauu

SEQ ID NO: 808077 - RNA, 19 nt, Homo sapiens
  misc_RNA (1)...(19): siRNA sense strand
gaaauucagcgagaagauc

SEQ ID NO: 808078 - RNA, 19 nt, Homo sapiens
  misc_RNA (1)...(19): siRNA sense strand
uggaagagaccacaucaga

SEQ ID NO: 808079 - RNA, 19 nt, Homo sapiens
  misc_RNA (1)...(19): siRNA sense strand
ggaaauucagcgagaagau

SEQ ID NO: 808080 - RNA, 19 nt, Homo sapiens
  misc_RNA (1)...(19): siRNA sense strand
agaucgcgcugcacaauca

SEQ ID NO: 808081 - RNA, 19 nt, Homo sapiens
  misc_RNA (1)...(19): siRNA sense strand
gcuccacacucaacuacuc

SEQ ID NO: 808082 - RNA, 19 nt, Homo sapiens
  misc_RNA (1)...(19): siRNA sense strand
gaaaucccaguaccugcaa

SEQ ID NO: 808083 - RNA, 19 nt, Homo sapiens
  misc_RNA (1)...(19): siRNA sense strand
gaauggaagagaccacauc

SEQ ID NO: 808084 - RNA, 19 nt, Homo sapiens
  misc_RNA (1)...(19): siRNA sense strand
cuggagcaguucaacauga

SEQ ID NO: 808085 - RNA, 19 nt, Homo sapiens
  misc_RNA (1)...(19): siRNA sense strand
ccacgcagccagaauccuu

SEQ ID NO: 808086 - RNA, 19 nt, Homo sapiens
  misc_RNA (1)...(19): siRNA sense strand
gcaugggacaccaagaaga

SEQ ID NO: 808087 - RNA, 19 nt, Homo sapiens
  misc_RNA (1)...(19): siRNA sense strand
guuaacagucccaggaaug

SEQ ID NO: 808088 - RNA, 19 nt, Homo sapiens
  misc_RNA (1)...(19): siRNA sense strand
cccaggacgugcaccagaa

SEQ ID NO: 808089 - RNA, 19 nt, Homo sapiens
  misc_RNA (1)...(19): siRNA sense strand
cagccucucuaaagaacug

SEQ ID NO: 808090 - RNA, 19 nt, Homo sapiens
  misc_RNA (1)...(19): siRNA sense strand
aagcaugggacaccaagaa

SEQ ID NO: 808091 - RNA, 19 nt, Homo sapiens
  misc_RNA (1)...(19): siRNA sense strand
ggcuccagcuccagaaauc

SEQ ID NO: 808092 - RNA, 19 nt, Homo sapiens
  misc_RNA (1)...(19): siRNA sense strand
cagccagaauccuuuagca

SEQ ID NO: 808093 - RNA, 19 nt, Homo sapiens
  misc_RNA (1)...(19): siRNA sense strand
gcggacaccagcuggagaa

SEQ ID NO: 808094 - RNA, 19 nt, Homo sapiens
  misc_RNA (1)...(19): siRNA sense strand
ccacaucagaggcagacaa

SEQ ID NO: 808095 - RNA, 19 nt, Homo sapiens
  misc_RNA (1)...(19): siRNA sense strand
ccucgccagucuccaauca

SEQ ID NO: 808096 - RNA, 19 nt, Homo sapiens
  misc_RNA (1)...(19): siRNA sense strand
cacaucagaggcagacaaa

SEQ ID NO: 808097 - RNA, 19 nt, Homo sapiens
  misc_RNA (1)...(19): siRNA sense strand
ccaacaucauccucacagu

SEQ ID NO: 808098 - RNA, 19 nt, Homo sapiens
  misc_RNA (1)...(19): siRNA sense strand
uggagcaguucaacaugau

SEQ ID NO: 808099 - RNA, 19 nt, Homo sapiens
  misc_RNA (1)...(19): siRNA sense strand
ccaggacgugcaccagaaa

SEQ ID NO: 808100 - RNA, 19 nt, Homo sapiens
  misc_RNA (1)...(19): siRNA sense strand
ccaccucgccagucuccaa

SEQ ID NO: 808101 - RNA, 19 nt, Homo sapiens
  misc_RNA (1)...(19): siRNA sense strand
gcuggagaaggaccaauuc

SEQ ID NO: 808102 - RNA, 19 nt, Homo sapiens
  misc_RNA (1)...(19): siRNA sense strand
acccaucacucaggcugua

SEQ ID NO: 808103 - RNA, 19 nt, Homo sapiens
  misc_RNA (1)...(19): siRNA sense strand
gacaccagcuggagaagga

SEQ ID NO: 808104 - RNA, 19 nt, Homo sapiens
  misc_RNA (1)...(19): siRNA sense strand
gaacaauccgcggaaauuc

SEQ ID NO: 808105 - RNA, 19 nt, Homo sapiens
  misc_RNA (1)...(19): siRNA sense strand
gaagaucgcgcugcacaau

SEQ ID NO: 808106 - RNA, 19 nt, Homo sapiens
  misc_RNA (1)...(19): siRNA sense strand
ucgaggaggucaugaagga

SEQ ID NO: 808107 - RNA, 19 nt, Homo sapiens
  misc_RNA (1)...(19): siRNA sense strand
cgaacaauccgcggaaauu

SEQ ID NO: 808108 - RNA, 19 nt, Homo sapiens
  misc_RNA (1)...(19): siRNA sense strand
gaaauucagcgagaagauc

SEQ ID NO: 808109 - RNA, 19 nt, Homo sapiens
  misc_RNA (1)...(19): siRNA sense strand
uggaagagaccacaucaga

SEQ ID NO: 808110 - RNA, 19 nt, Homo sapiens
  misc_RNA (1)...(19): siRNA sense strand
ggaaauucagcgagaagau

SEQ ID NO: 808111 - RNA, 19 nt, Homo sapiens
  misc_RNA (1)...(19): siRNA sense strand
agaucgcgcugcacaauca

SEQ ID NO: 808112 - RNA, 19 nt, Homo sapiens
  misc_RNA (1)...(19): siRNA sense strand
gcuccacacucaacuacuc

SEQ ID NO: 808113 - RNA, 19 nt, Homo sapiens
  misc_RNA (1)...(19): siRNA sense strand
gaaaucccaguaccugcaa

SEQ ID NO: 808114 - RNA, 19 nt, Homo sapiens
  misc_RNA (1)...(19): siRNA sense strand
gaauggaagagaccacauc

SEQ ID NO: 808115 - RNA, 19 nt, Homo sapiens
  misc_RNA (1)...(19): siRNA sense strand
cuggagcaguucaacauga

SEQ ID NO: 808116 - RNA, 19 nt, Homo sapiens
  misc_RNA (1)...(19): siRNA sense strand
ccacgcagccagaauccuu

SEQ ID NO: 808117 - RNA, 19 nt, Homo sapiens
  misc_RNA (1)...(19): siRNA sense strand
gcaugggacaccaagaaga

SEQ ID NO: 808118 - RNA, 19 nt, Homo sapiens
  misc_RNA (1)...(19): siRNA sense strand
guuaacagucccaggaaug

SEQ ID NO: 808119 - RNA, 19 nt, Homo sapiens
  misc_RNA (1)...(19): siRNA sense strand
cccaggacgugcaccagaa

SEQ ID NO: 808120 - RNA, 19 nt, Homo sapiens
  misc_RNA (1)...(19): siRNA sense strand
cagccucucuaaagaacug

SEQ ID NO: 808121 - RNA, 19 nt, Homo sapiens
  misc_RNA (1)...(19): siRNA sense strand
aagcaugggacaccaagaa

SEQ ID NO: 808122 - RNA, 19 nt, Homo sapiens
  misc_RNA (1)...(19): siRNA sense strand
ggcuccagcuccagaaauc

SEQ ID NO: 808123 - RNA, 19 nt, Homo sapiens
  misc_RNA (1)...(19): siRNA sense strand
cagccagaauccuuuagca

SEQ ID NO: 808124 - RNA, 19 nt, Homo sapiens
  misc_RNA (1)...(19): siRNA sense strand
gcggacaccagcuggagaa

SEQ ID NO: 808125 - RNA, 19 nt, Homo sapiens
  misc_RNA (1)...(19): siRNA sense strand
ccacaucagaggcagacaa

SEQ ID NO: 808126 - RNA, 19 nt, Homo sapiens
  misc_RNA (1)...(19): siRNA sense strand
ccucgccagucuccaauca

SEQ ID NO: 808127 - RNA, 19 nt, Homo sapiens
  misc_RNA (1)...(19): siRNA sense strand
cacaucagaggcagacaaa

SEQ ID NO: 808128 - RNA, 19 nt, Homo sapiens
  misc_RNA (1)...(19): siRNA sense strand
ccaacaucauccucacagu

SEQ ID NO: 808129 - RNA, 19 nt, Homo sapiens
  misc_RNA (1)...(19): siRNA sense strand
uggagcaguucaacaugau

SEQ ID NO: 808130 - RNA, 19 nt, Homo sapiens
  misc_RNA (1)...(19): siRNA sense strand
ccaggacgugcaccagaaa

SEQ ID NO: 808131 - RNA, 19 nt, Homo sapiens
  misc_RNA (1)...(19): siRNA sense strand
ccaccucgccagucuccaa

SEQ ID NO: 808132 - RNA, 19 nt, Homo sapiens
  misc_RNA (1)...(19): siRNA sense strand
gcuggagaaggaccaauuc

SEQ ID NO: 808133 - RNA, 19 nt, Homo sapiens
  misc_RNA (1)...(19): siRNA sense strand
acccaucacucaggcugua

SEQ ID NO: 808134 - RNA, 19 nt, Homo sapiens
  misc_RNA (1)...(19): siRNA sense strand
cagaagaggucaaugauaa

SEQ ID NO: 808135 - RNA, 19 nt, Homo sapiens
  misc_RNA (1)...(19): siRNA sense strand
gaacuuucuucauccauua

SEQ ID NO: 808136 - RNA, 19 nt, Homo sapiens
  misc_RNA (1)...(19): siRNA sense strand
gaauggcuaucuagaauuu

SEQ ID NO: 808137 - RNA, 19 nt, Homo sapiens
  misc_RNA (1)...(19): siRNA sense strand
aaacaaaucuccacuuuag

SEQ ID NO: 808138 - RNA, 19 nt, Homo sapiens
  misc_RNA (1)...(19): siRNA sense strand
guaaagagcuucaagaacu

SEQ ID NO: 808139 - RNA, 19 nt, Homo sapiens
  misc_RNA (1)...(19): siRNA sense strand
gcagaagcuugugauauua

SEQ ID NO: 808140 - RNA, 19 nt, Homo sapiens
  misc_RNA (1)...(19): siRNA sense strand
gaacauggguugauauugc

SEQ ID NO: 808141 - RNA, 19 nt, Homo sapiens
  misc_RNA (1)...(19): siRNA sense strand
ggaacuugcugaguacuua

SEQ ID NO: 808142 - RNA, 19 nt, Homo sapiens
  misc_RNA (1)...(19): siRNA sense strand
guaaagaaaugagagauga

SEQ ID NO: 808143 - RNA, 19 nt, Homo sapiens
  misc_RNA (1)...(19): siRNA sense strand
gagcggaacugcauugaga

SEQ ID NO: 808144 - RNA, 19 nt, Homo sapiens
  misc_RNA (1)...(19): siRNA sense strand
caaaguagcucuuacaaaa

SEQ ID NO: 808145 - RNA, 19 nt, Homo sapiens
  misc_RNA (1)...(19): siRNA sense strand
ugaaacaaaucuccacuuu

SEQ ID NO: 808146 - RNA, 19 nt, Homo sapiens
  misc_RNA (1)...(19): siRNA sense strand
gaaacaaaucuccacuuua

SEQ ID NO: 808147 - RNA, 19 nt, Homo sapiens
  misc_RNA (1)...(19): siRNA sense strand
gagcauagaagacuuuauu

SEQ ID NO: 808148 - RNA, 19 nt, Homo sapiens
  misc_RNA (1)...(19): siRNA sense strand
ugaagaugcugccauauug

SEQ ID NO: 808149 - RNA, 19 nt, Homo sapiens
  misc_RNA (1)...(19): siRNA sense strand
cuacagcugugaauucuuu

SEQ ID NO: 808150 - RNA, 19 nt, Homo sapiens
  misc_RNA (1)...(19): siRNA sense strand
cuucuuagcuucggauuua

SEQ ID NO: 808151 - RNA, 19 nt, Homo sapiens
  misc_RNA (1)...(19): siRNA sense strand
ggacauauugaucuugaua

SEQ ID NO: 808152 - RNA, 19 nt, Homo sapiens
  misc_RNA (1)...(19): siRNA sense strand
uaaagcagcuagucaguca

SEQ ID NO: 808153 - RNA, 19 nt, Homo sapiens
  misc_RNA (1)...(19): siRNA sense strand
gcugugaauucuuugauuu

SEQ ID NO: 808154 - RNA, 19 nt, Homo sapiens
  misc_RNA (1)...(19): siRNA sense strand
ggccucaacuguagucuuu

SEQ ID NO: 808155 - RNA, 19 nt, Homo sapiens
  misc_RNA (1)...(19): siRNA sense strand
gguaaaguaucaagguuug

SEQ ID NO: 808156 - RNA, 19 nt, Homo sapiens
  misc_RNA (1)...(19): siRNA sense strand
gaagaagaucugaaacaaa

SEQ ID NO: 808157 - RNA, 19 nt, Homo sapiens
  misc_RNA (1)...(19): siRNA sense strand
ggauaaagcuguguuuguc

SEQ ID NO: 808158 - RNA, 19 nt, Homo sapiens
  misc_RNA (1)...(19): siRNA sense strand
aggaugagauugaagauuu

SEQ ID NO: 808159 - RNA, 19 nt, Homo sapiens
  misc_RNA (1)...(19): siRNA sense strand
cagaauggcuaucuagaau

SEQ ID NO: 808160 - RNA, 19 nt, Homo sapiens
  misc_RNA (1)...(19): siRNA sense strand
gcagaagaggucaaugaua

SEQ ID NO: 808161 - RNA, 19 nt, Homo sapiens
  misc_RNA (1)...(19): siRNA sense strand
uaaagaccuuguucucaaa

SEQ ID NO: 808162 - RNA, 19 nt, Homo sapiens
  misc_RNA (1)...(19): siRNA sense strand
ggaagcaucaguagaagaa

SEQ ID NO: 808163 - RNA, 19 nt, Homo sapiens
  misc_RNA (1)...(19): siRNA sense strand
ggacuauucagugcuauua

SEQ ID NO: 808164 - RNA, 19 nt, Homo sapiens
  misc_RNA (1)...(19): siRNA sense strand
ugaagaagaucugaaacaa

SEQ ID NO: 808165 - RNA, 19 nt, Homo sapiens
  misc_RNA (1)...(19): siRNA sense strand
uuaaagaccuuguucucaa

SEQ ID NO: 808166 - RNA, 19 nt, Homo sapiens
  misc_RNA (1)...(19): siRNA sense strand
gaaagaagaagccagagau

SEQ ID NO: 808167 - RNA, 19 nt, Homo sapiens
  misc_RNA (1)...(19): siRNA sense strand
guacuuggguggauuccuu

SEQ ID NO: 808168 - RNA, 19 nt, Homo sapiens
  misc_RNA (1)...(19): siRNA sense strand
ggaaaggaauacauuacuc

SEQ ID NO: 808169 - RNA, 19 nt, Homo sapiens
  misc_RNA (1)...(19): siRNA sense strand
ggugguacguucaguauuc

SEQ ID NO: 808170 - RNA, 19 nt, Homo sapiens
  misc_RNA (1)...(19): siRNA sense strand
gaacugcauugagauuguu

SEQ ID NO: 808171 - RNA, 19 nt, Homo sapiens
  misc_RNA (1)...(19): siRNA sense strand
ccagaaagcugaaaaggaa

SEQ ID NO: 808172 - RNA, 19 nt, Homo sapiens
  misc_RNA (1)...(19): siRNA sense strand
ggaacugcauugagauugu

SEQ ID NO: 808173 - RNA, 19 nt, Homo sapiens
  misc_RNA (1)...(19): siRNA sense strand
gauggaaaggaauacauua

SEQ ID NO: 808174 - RNA, 19 nt, Homo sapiens
  misc_RNA (1)...(19): siRNA sense strand
ucacaucaguccuguuguu

SEQ ID NO: 808175 - RNA, 19 nt, Homo sapiens
  misc_RNA (1)...(19): siRNA sense strand
gacaagcacuggcugaaca

SEQ ID NO: 808176 - RNA, 19 nt, Homo sapiens
  misc_RNA (1)...(19): siRNA sense strand
gcagaauggcuaucuagaa

SEQ ID NO: 808177 - RNA, 19 nt, Homo sapiens
  misc_RNA (1)...(19): siRNA sense strand
gaaaccaaaguagcucuua

SEQ ID NO: 808178 - RNA, 19 nt, Homo sapiens
  misc_RNA (1)...(19): siRNA sense strand
gaucuacaacagguaauua

SEQ ID NO: 808179 - RNA, 19 nt, Homo sapiens
  misc_RNA (1)...(19): siRNA sense strand
gaaaagaugaugauaguga

SEQ ID NO: 808180 - RNA, 19 nt, Homo sapiens
  misc_RNA (1)...(19): siRNA sense strand
uaaagagcuucaagaacuu

SEQ ID NO: 808181 - RNA, 19 nt, Homo sapiens
  misc_RNA (1)...(19): siRNA sense strand
gaagauguugccaguacua

SEQ ID NO: 808182 - RNA, 19 nt, Homo sapiens
  misc_RNA (1)...(19): siRNA sense strand
uaucaagguuugguuguaa

SEQ ID NO: 808183 - RNA, 19 nt, Homo sapiens
  misc_RNA (1)...(19): siRNA sense strand
agcagaagcuugugauauu

SEQ ID NO: 808184 - RNA, 19 nt, Homo sapiens
  misc_RNA (1)...(19): siRNA sense strand
gaaagcguuaguacaagua

SEQ ID NO: 808185 - RNA, 19 nt, Homo sapiens
  misc_RNA (1)...(19): siRNA sense strand
ucuaggaaaucaucuguga

SEQ ID NO: 808186 - RNA, 19 nt, Homo sapiens
  misc_RNA (1)...(19): siRNA sense strand
ucagaaacagcuagaagua

SEQ ID NO: 808187 - RNA, 19 nt, Homo sapiens
  misc_RNA (1)...(19): siRNA sense strand
ugauaucacuaaccucauu

SEQ ID NO: 808188 - RNA, 19 nt, Homo sapiens
  misc_RNA (1)...(19): siRNA sense strand
uuucggaacuugcugagua

SEQ ID NO: 808189 - RNA, 19 nt, Homo sapiens
  misc_RNA (1)...(19): siRNA sense strand
agaaaagcauguucaguua

SEQ ID NO: 808190 - RNA, 19 nt, Homo sapiens
  misc_RNA (1)...(19): siRNA sense strand
ggagauuaucccuugaaua

SEQ ID NO: 808191 - RNA, 19 nt, Homo sapiens
  misc_RNA (1)...(19): siRNA sense strand
caucaguccuguuguuuca

SEQ ID NO: 808192 - RNA, 19 nt, Homo sapiens
  misc_RNA (1)...(19): siRNA sense strand
gaagaaggaaagcaacaga

SEQ ID NO: 808193 - RNA, 19 nt, Homo sapiens
  misc_RNA (1)...(19): siRNA sense strand
gaugagggcauucagcaaa

SEQ ID NO: 808194 - RNA, 19 nt, Homo sapiens
  misc_RNA (1)...(19): siRNA sense strand
ugggacaacugauagauga

SEQ ID NO: 808195 - RNA, 19 nt, Homo sapiens
  misc_RNA (1)...(19): siRNA sense strand
guaucaagguuugguugua

SEQ ID NO: 808196 - RNA, 19 nt, Homo sapiens
  misc_RNA (1)...(19): siRNA sense strand
uugaggaacuuguuaauag

SEQ ID NO: 808197 - RNA, 19 nt, Homo sapiens
  misc_RNA (1)...(19): siRNA sense strand
gcuacccacuucuuuauca

SEQ ID NO: 808198 - RNA, 19 nt, Homo sapiens
  misc_RNA (1)...(19): siRNA sense strand
ggaaagaagaagccagaga

SEQ ID NO: 808199 - RNA, 19 nt, Homo sapiens
  misc_RNA (1)...(19): siRNA sense strand
gauauaagacuacacaacu

SEQ ID NO: 808200 - RNA, 19 nt, Homo sapiens
  misc_RNA (1)...(19): siRNA sense strand
gcauagaagacuuuauuuc

SEQ ID NO: 808201 - RNA, 19 nt, Homo sapiens
  misc_RNA (1)...(19): siRNA sense strand
guauucaugucuucaacaa

SEQ ID NO: 808202 - RNA, 19 nt, Homo sapiens
  misc_RNA (1)...(19): siRNA sense strand
agaaacagcuagaaguagu

SEQ ID NO: 808203 - RNA, 19 nt, Homo sapiens
  misc_RNA (1)...(19): siRNA sense strand
ucucaaaucuaggaaauca

SEQ ID NO: 808204 - RNA, 19 nt, Homo sapiens
  misc_RNA (1)...(19): siRNA sense strand
guacugauaucacuaaccu

SEQ ID NO: 808205 - RNA, 19 nt, Homo sapiens
  misc_RNA (1)...(19): siRNA sense strand
uuagaaagcguuaguacaa

SEQ ID NO: 808206 - RNA, 19 nt, Homo sapiens
  misc_RNA (1)...(19): siRNA sense strand
gaagaggucaaugauaaau

SEQ ID NO: 808207 - RNA, 19 nt, Homo sapiens
  misc_RNA (1)...(19): siRNA sense strand
cagcuagucagucaaagua

SEQ ID NO: 808208 - RNA, 19 nt, Homo sapiens
  misc_RNA (1)...(19): siRNA sense strand
ccauaacucucugaaugaa

SEQ ID NO: 808209 - RNA, 19 nt, Homo sapiens
  misc_RNA (1)...(19): siRNA sense strand
cuccauaacucucugaaug

SEQ ID NO: 808210 - RNA, 19 nt, Homo sapiens
  misc_RNA (1)...(19): siRNA sense strand
acaaaucuccacuuuagaa

SEQ ID NO: 808211 - RNA, 19 nt, Homo sapiens
  misc_RNA (1)...(19): siRNA sense strand
guggacauauugaucuuga

SEQ ID NO: 808212 - RNA, 19 nt, Homo sapiens
  misc_RNA (1)...(19): siRNA sense strand
agaauuaucaguggacaua

SEQ ID NO: 808213 - RNA, 19 nt, Homo sapiens
  misc_RNA (1)...(19): siRNA sense strand
ucccacagaucauugcuuu

SEQ ID NO: 808214 - RNA, 19 nt, Homo sapiens
  misc_RNA (1)...(19): siRNA sense strand
gcacuaacucagcgacuug

SEQ ID NO: 808215 - RNA, 19 nt, Homo sapiens
  misc_RNA (1)...(19): siRNA sense strand
guucucaaaucuaggaaau

SEQ ID NO: 808216 - RNA, 19 nt, Homo sapiens
  misc_RNA (1)...(19): siRNA sense strand
agacaaagaacaagaagau

SEQ ID NO: 808217 - RNA, 19 nt, Homo sapiens
  misc_RNA (1)...(19): siRNA sense strand
gagcgaagaaggaaagcaa

SEQ ID NO: 808218 - RNA, 19 nt, Homo sapiens
  misc_RNA (1)...(19): siRNA sense strand
ccaaaguagcucuuacaaa

SEQ ID NO: 808219 - RNA, 19 nt, Homo sapiens
  misc_RNA (1)...(19): siRNA sense strand
gaacuugcugaguacuuaa

SEQ ID NO: 808220 - RNA, 19 nt, Homo sapiens
  misc_RNA (1)...(19): siRNA sense strand
uguccgagguggucgagua

SEQ ID NO: 808221 - RNA, 19 nt, Homo sapiens
  misc_RNA (1)...(19): siRNA sense strand
aaucaucugugacggaaga

SEQ ID NO: 808222 - RNA, 19 nt, Homo sapiens
  misc_RNA (1)...(19): siRNA sense strand
gaaacagcuagaaguaguu

SEQ ID NO: 808223 - RNA, 19 nt, Homo sapiens
  misc_RNA (1)...(19): siRNA sense strand
aagaagauguugccaguac

SEQ ID NO: 808224 - RNA, 19 nt, Homo sapiens
  misc_RNA (1)...(19): siRNA sense strand
ucaaaccuguacaauaaca

SEQ ID NO: 808225 - RNA, 19 nt, Homo sapiens
  misc_RNA (1)...(19): siRNA sense strand
ccacuucuuuaucaguuga

SEQ ID NO: 808226 - RNA, 19 nt, Homo sapiens
  misc_RNA (1)...(19): siRNA sense strand
ucaaguggaagcaucagua

SEQ ID NO: 808227 - RNA, 19 nt, Homo sapiens
  misc_RNA (1)...(19): siRNA sense strand
gacaacugauagaugagaa

SEQ ID NO: 808228 - RNA, 19 nt, Homo sapiens
  misc_RNA (1)...(19): siRNA sense strand
ccaugcaccuggaagaugu

SEQ ID NO: 808229 - RNA, 19 nt, Homo sapiens
  misc_RNA (1)...(19): siRNA sense strand
gcagcagaagcuugugaua

SEQ ID NO: 808230 - RNA, 19 nt, Homo sapiens
  misc_RNA (1)...(19): siRNA sense strand
cugcagccauuacaaguga

SEQ ID NO: 808231 - RNA, 19 nt, Homo sapiens
  misc_RNA (1)...(19): siRNA sense strand
auaaaugacuguacagaac

SEQ ID NO: 808232 - RNA, 19 nt, Homo sapiens
  misc_RNA (1)...(19): siRNA sense strand
uagcgacacuguuguaguc

SEQ ID NO: 808233 - RNA, 19 nt, Homo sapiens
  misc_RNA (1)...(19): siRNA sense strand
cagcgacuugguagaauua

SEQ ID NO: 808234 - RNA, 19 nt, Homo sapiens
  misc_RNA (1)...(19): siRNA sense strand
caacagccauuucuucuug

SEQ ID NO: 808235 - RNA, 19 nt, Homo sapiens
  misc_RNA (1)...(19): siRNA sense strand
gaagauguaagaacaaguu

SEQ ID NO: 808236 - RNA, 19 nt, Homo sapiens
  misc_RNA (1)...(19): siRNA sense strand
ggaagaaagggaagaagaa

SEQ ID NO: 808237 - RNA, 19 nt, Homo sapiens
  misc_RNA (1)...(19): siRNA sense strand
gaagaagaaaugccacaaa

SEQ ID NO: 808238 - RNA, 19 nt, Homo sapiens
  misc_RNA (1)...(19): siRNA sense strand
gaagaaagggaagaagaaa

SEQ ID NO: 808239 - RNA, 19 nt, Homo sapiens
  misc_RNA (1)...(19): siRNA sense strand
gaaccaacaucagggacuu

SEQ ID NO: 808240 - RNA, 19 nt, Homo sapiens
  misc_RNA (1)...(19): siRNA sense strand
gaagaaaugccacaaacag

SEQ ID NO: 808241 - RNA, 19 nt, Homo sapiens
  misc_RNA (1)...(19): siRNA sense strand
ccaaggaccugaccaacag

SEQ ID NO: 808242 - RNA, 19 nt, Homo sapiens
  misc_RNA (1)...(19): siRNA sense strand
aagagaagauguaagaaca

SEQ ID NO: 808243 - RNA, 19 nt, Homo sapiens
  misc_RNA (1)...(19): siRNA sense strand
caaaugauccaccaaagca

SEQ ID NO: 808244 - RNA, 19 nt, Homo sapiens
  misc_RNA (1)...(19): siRNA sense strand
gauguaagaacaaguuuca

SEQ ID NO: 808245 - RNA, 19 nt, Homo sapiens
  misc_RNA (1)...(19): siRNA sense strand
gagaagauguaagaacaag

SEQ ID NO: 808246 - RNA, 19 nt, Homo sapiens
  misc_RNA (1)...(19): siRNA sense strand
gaaguagaaaggaagaaga

SEQ ID NO: 808247 - RNA, 19 nt, Homo sapiens
  misc_RNA (1)...(19): siRNA sense strand
gaagaaguagaaaggaaga

SEQ ID NO: 808248 - RNA, 19 nt, Homo sapiens
  misc_RNA (1)...(19): siRNA sense strand
gcccaaggcucagcuuuca

SEQ ID NO: 808249 - RNA, 19 nt, Homo sapiens
  misc_RNA (1)...(19): siRNA sense strand
caacaucagggacuuccua

SEQ ID NO: 808250 - RNA, 19 nt, Homo sapiens
  misc_RNA (1)...(19): siRNA sense strand
cgauuucgcuaccucaaug

SEQ ID NO: 808251 - RNA, 19 nt, Homo sapiens
  misc_RNA (1)...(19): siRNA sense strand
gggaagaagaaaugucaaa

SEQ ID NO: 808252 - RNA, 19 nt, Homo sapiens
  misc_RNA (1)...(19): siRNA sense strand
ggaggcaaauagaguacug

SEQ ID NO: 808253 - RNA, 19 nt, Homo sapiens
  misc_RNA (1)...(19): siRNA sense strand
ccagaaacaugccccuaua

SEQ ID NO: 808254 - RNA, 19 nt, Homo sapiens
  misc_RNA (1)...(19): siRNA sense strand
guagaaaggaagaagaaau

SEQ ID NO: 808255 - RNA, 19 nt, Homo sapiens
  misc_RNA (1)...(19): siRNA sense strand
gggaagaaagggaagaaga

SEQ ID NO: 808256 - RNA, 19 nt, Homo sapiens
  misc_RNA (1)...(19): siRNA sense strand
cuaccucaaugaacaguug

SEQ ID NO: 808257 - RNA, 19 nt, Homo sapiens
  misc_RNA (1)...(19): siRNA sense strand
gaggaaaggaagaagaaau

SEQ ID NO: 808258 - RNA, 19 nt, Homo sapiens
  misc_RNA (1)...(19): siRNA sense strand
agaaagggaagaagaaaug

SEQ ID NO: 808259 - RNA, 19 nt, Homo sapiens
  misc_RNA (1)...(19): siRNA sense strand
cagugccucugcugaagua

SEQ ID NO: 808260 - RNA, 19 nt, Homo sapiens
  misc_RNA (1)...(19): siRNA sense strand
uagaaaggaagaagaaaug

SEQ ID NO: 808261 - RNA, 19 nt, Homo sapiens
  misc_RNA (1)...(19): siRNA sense strand
gcagugacucugaggaaga

SEQ ID NO: 808262 - RNA, 19 nt, Homo sapiens
  misc_RNA (1)...(19): siRNA sense strand
aaacaugccccuauaaauu

SEQ ID NO: 808263 - RNA, 19 nt, Homo sapiens
  misc_RNA (1)...(19): siRNA sense strand
cuacaaaugauccaccaaa

SEQ ID NO: 808264 - RNA, 19 nt, Homo sapiens
  misc_RNA (1)...(19): siRNA sense strand
ggaagacccugaggcuuuu

SEQ ID NO: 808265 - RNA, 19 nt, Homo sapiens
  misc_RNA (1)...(19): siRNA sense strand
ucaagauugucuccaagga

SEQ ID NO: 808266 - RNA, 19 nt, Homo sapiens
  misc_RNA (1)...(19): siRNA sense strand
gcuucaagauugucuccaa

SEQ ID NO: 808267 - RNA, 19 nt, Homo sapiens
  misc_RNA (1)...(19): siRNA sense strand
ggaacccugugcauugcuu

SEQ ID NO: 808268 - RNA, 19 nt, Homo sapiens
  misc_RNA (1)...(19): siRNA sense strand
aggaagaaguagaaaggaa

SEQ ID NO: 808269 - RNA, 19 nt, Homo sapiens
  misc_RNA (1)...(19): siRNA sense strand
gaccaacagccauuucuuc

SEQ ID NO: 808270 - RNA, 19 nt, Homo sapiens
  misc_RNA (1)...(19): siRNA sense strand
ggaugagucuguggaugug

SEQ ID NO: 808271 - RNA, 19 nt, Homo sapiens
  misc_RNA (1)...(19): siRNA sense strand
gaaagaggaaaugccagaa

SEQ ID NO: 808272 - RNA, 19 nt, Homo sapiens
  misc_RNA (1)...(19): siRNA sense strand
aagaagaaaugccacaaac

SEQ ID NO: 808273 - RNA, 19 nt, Homo sapiens
  misc_RNA (1)...(19): siRNA sense strand
aaacagggcccaccuugca

SEQ ID NO: 808274 - RNA, 19 nt, Homo sapiens
  misc_RNA (1)...(19): siRNA sense strand
ugaggauguucgaaccuuu

SEQ ID NO: 808275 - RNA, 19 nt, Homo sapiens
  misc_RNA (1)...(19): siRNA sense strand
aggaagacccugaggcuuu

SEQ ID NO: 808276 - RNA, 19 nt, Homo sapiens
  misc_RNA (1)...(19): siRNA sense strand
gaaagggaagaagaaaugu

SEQ ID NO: 808277 - RNA, 19 nt, Homo sapiens
  misc_RNA (1)...(19): siRNA sense strand
aaagaggaaaugccagaaa

SEQ ID NO: 808278 - RNA, 19 nt, Homo sapiens
  misc_RNA (1)...(19): siRNA sense strand
gaggucagcagccgcuuug

SEQ ID NO: 808279 - RNA, 19 nt, Homo sapiens
  misc_RNA (1)...(19): siRNA sense strand
gaaacaugccccuauaaau

SEQ ID NO: 808280 - RNA, 19 nt, Homo sapiens
  misc_RNA (1)...(19): siRNA sense strand
ggaagaagaaaugccacaa

SEQ ID NO: 808281 - RNA, 19 nt, Homo sapiens
  misc_RNA (1)...(19): siRNA sense strand
gccauuucuucuuguuuga

SEQ ID NO: 808282 - RNA, 19 nt, Homo sapiens
  misc_RNA (1)...(19): siRNA sense strand
gcaaaagaauaagagaaga

SEQ ID NO: 808283 - RNA, 19 nt, Homo sapiens
  misc_RNA (1)...(19): siRNA sense strand
cagugacucugcugaagau

SEQ ID NO: 808284 - RNA, 19 nt, Homo sapiens
  misc_RNA (1)...(19): siRNA sense strand
gaggaggaaaggaagaaga

SEQ ID NO: 808285 - RNA, 19 nt, Homo sapiens
  misc_RNA (1)...(19): siRNA sense strand
aagaagaaaugccccaaaa

SEQ ID NO: 808286 - RNA, 19 nt, Homo sapiens
  misc_RNA (1)...(19): siRNA sense strand
ucaaugaacaguuguacuc

SEQ ID NO: 808287 - RNA, 19 nt, Homo sapiens
  misc_RNA (1)...(19): siRNA sense strand
cagugacucugaggaagaa

SEQ ID NO: 808288 - RNA, 19 nt, Homo sapiens
  misc_RNA (1)...(19): siRNA sense strand
ggaggaaaggaagaagaaa

SEQ ID NO: 808289 - RNA, 19 nt, Homo sapiens
  misc_RNA (1)...(19): siRNA sense strand
uaagagaagauguaagaac

SEQ ID NO: 808290 - RNA, 19 nt, Homo sapiens
  misc_RNA (1)...(19): siRNA sense strand
gaccugaccaacagccauu

SEQ ID NO: 808291 - RNA, 19 nt, Homo sapiens
  misc_RNA (1)...(19): siRNA sense strand
agaggaggcaaauagagua

SEQ ID NO: 808292 - RNA, 19 nt, Homo sapiens
  misc_RNA (1)...(19): siRNA sense strand
caucagggacuuccuagag

SEQ ID NO: 808293 - RNA, 19 nt, Homo sapiens
  misc_RNA (1)...(19): siRNA sense strand
ugacucugcugaagaugag

SEQ ID NO: 808294 - RNA, 19 nt, Homo sapiens
  misc_RNA (1)...(19): siRNA sense strand
uacaaaugauccaccaaag

SEQ ID NO: 808295 - RNA, 19 nt, Homo sapiens
  misc_RNA (1)...(19): siRNA sense strand
gaggaaaugccagaaacau

SEQ ID NO: 808296 - RNA, 19 nt, Homo sapiens
  misc_RNA (1)...(19): siRNA sense strand
ugacucugaggaagaagua

SEQ ID NO: 808297 - RNA, 19 nt, Homo sapiens
  misc_RNA (1)...(19): siRNA sense strand
gauugccgcuuggcuucaa

SEQ ID NO: 808298 - RNA, 19 nt, Homo sapiens
  misc_RNA (1)...(19): siRNA sense strand
aagaggaaaugccagaaac

SEQ ID NO: 808299 - RNA, 19 nt, Homo sapiens
  misc_RNA (1)...(19): siRNA sense strand
agccauuucuucuuguuug

SEQ ID NO: 808300 - RNA, 19 nt, Homo sapiens
  misc_RNA (1)...(19): siRNA sense strand
uuucaggccugcagcuuca

SEQ ID NO: 808301 - RNA, 19 nt, Homo sapiens
  misc_RNA (1)...(19): siRNA sense strand
gaagaugagaaaagaaaga

SEQ ID NO: 808302 - RNA, 19 nt, Homo sapiens
  misc_RNA (1)...(19): siRNA sense strand
gaacccugugcauugcuuu

SEQ ID NO: 808303 - RNA, 19 nt, Homo sapiens
  misc_RNA (1)...(19): siRNA sense strand
aggaaaggaagaagaaaug

SEQ ID NO: 808304 - RNA, 19 nt, Homo sapiens
  misc_RNA (1)...(19): siRNA sense strand
gaggauguucgaaccuuuc

SEQ ID NO: 808305 - RNA, 19 nt, Homo sapiens
  misc_RNA (1)...(19): siRNA sense strand
ggaaccggcaaaagaauaa

SEQ ID NO: 808306 - RNA, 19 nt, Homo sapiens
  misc_RNA (1)...(19): siRNA sense strand
gagaaaagaaagaggaaau

SEQ ID NO: 808307 - RNA, 19 nt, Homo sapiens
  misc_RNA (1)...(19): siRNA sense strand
gaagaagaaaugccccaaa

SEQ ID NO: 808308 - RNA, 19 nt, Homo sapiens
  misc_RNA (1)...(19): siRNA sense strand
gcagccgcuuugaggaugu

SEQ ID NO: 808309 - RNA, 19 nt, Homo sapiens
  misc_RNA (1)...(19): siRNA sense strand
ugaggaagaaguagaaagg

SEQ ID NO: 808310 - RNA, 19 nt, Homo sapiens
  misc_RNA (1)...(19): siRNA sense strand
agagccaagugaagaagug

SEQ ID NO: 808311 - RNA, 19 nt, Homo sapiens
  misc_RNA (1)...(19): siRNA sense strand
ccuggacaauguugaccaa

SEQ ID NO: 808312 - RNA, 19 nt, Homo sapiens
  misc_RNA (1)...(19): siRNA sense strand
ccaacagccauuucuucuu

SEQ ID NO: 808313 - RNA, 19 nt, Homo sapiens
  misc_RNA (1)...(19): siRNA sense strand
gaggaagaaguagaaagga

SEQ ID NO: 808314 - RNA, 19 nt, Homo sapiens
  misc_RNA (1)...(19): siRNA sense strand
ggaagaagaaaugucaaaa

SEQ ID NO: 808315 - RNA, 19 nt, Homo sapiens
  misc_RNA (1)...(19): siRNA sense strand
ucacugaugggaaccaaca

SEQ ID NO: 808316 - RNA, 19 nt, Homo sapiens
  misc_RNA (1)...(19): siRNA sense strand
gcuuugacuuggcuucucu

SEQ ID NO: 808317 - RNA, 19 nt, Homo sapiens
  misc_RNA (1)...(19): siRNA sense strand
ccagcucuuggccacauua

SEQ ID NO: 808318 - RNA, 19 nt, Homo sapiens
  misc_RNA (1)...(19): siRNA sense strand
gaauaagagaagauguaag

SEQ ID NO: 808319 - RNA, 19 nt, Homo sapiens
  misc_RNA (1)...(19): siRNA sense strand
aaguagaaaggaagaagaa

SEQ ID NO: 808320 - RNA, 19 nt, Homo sapiens
  misc_RNA (1)...(19): siRNA sense strand
gaggaggaggaaaggaaga

SEQ ID NO: 808321 - RNA, 19 nt, Homo sapiens
  misc_RNA (1)...(19): siRNA sense strand
uagaggaggcaaauagagu

SEQ ID NO: 808322 - RNA, 19 nt, Homo sapiens
  misc_RNA (1)...(19): siRNA sense strand
gugacucugcugaagauga

SEQ ID NO: 808323 - RNA, 19 nt, Homo sapiens
  misc_RNA (1)...(19): siRNA sense strand
ucagccaugucucuacaag

SEQ ID NO: 808324 - RNA, 19 nt, Homo sapiens
  misc_RNA (1)...(19): siRNA sense strand
agaagaaaugccacaaaca

SEQ ID NO: 808325 - RNA, 19 nt, Homo sapiens
  misc_RNA (1)...(19): siRNA sense strand
cuucuuguuugauuuccaa

SEQ ID NO: 808326 - RNA, 19 nt, Homo sapiens
  misc_RNA (1)...(19): siRNA sense strand
acagccauuucuucuuguu

SEQ ID NO: 808327 - RNA, 19 nt, Homo sapiens
  misc_RNA (1)...(19): siRNA sense strand
gccagugccucugcugaag

SEQ ID NO: 808328 - RNA, 19 nt, Homo sapiens
  misc_RNA (1)...(19): siRNA sense strand
ggaaaggaagaagaaaugc

SEQ ID NO: 808329 - RNA, 19 nt, Homo sapiens
  misc_RNA (1)...(19): siRNA sense strand
aaugauccaccaaagcaaa

SEQ ID NO: 808330 - RNA, 19 nt, Homo sapiens
  misc_RNA (1)...(19): siRNA sense strand
aagggaagaagaaauguca

SEQ ID NO: 808331 - RNA, 19 nt, Homo sapiens
  misc_RNA (1)...(19): siRNA sense strand
ccuagaggaggcaaauaga

SEQ ID NO: 808332 - RNA, 19 nt, Homo sapiens
  misc_RNA (1)...(19): siRNA sense strand
cuucagccaugucucuaca

SEQ ID NO: 808333 - RNA, 19 nt, Homo sapiens
  misc_RNA (1)...(19): siRNA sense strand
cugcugaaguagggaagaa

SEQ ID NO: 808334 - RNA, 19 nt, Homo sapiens
  misc_RNA (1)...(19): siRNA sense strand
caacagagaucacuucuau

SEQ ID NO: 808335 - RNA, 19 nt, Homo sapiens
  misc_RNA (1)...(19): siRNA sense strand
ggacagaacuacuccauga

SEQ ID NO: 808336 - RNA, 19 nt, Homo sapiens
  misc_RNA (1)...(19): siRNA sense strand
cagaagaaauguaugagua

SEQ ID NO: 808337 - RNA, 19 nt, Homo sapiens
  misc_RNA (1)...(19): siRNA sense strand
gagcaaauccuaacuauca

SEQ ID NO: 808338 - RNA, 19 nt, Homo sapiens
  misc_RNA (1)...(19): siRNA sense strand
gaaaugggcagaagaaaug

SEQ ID NO: 808339 - RNA, 19 nt, Homo sapiens
  misc_RNA (1)...(19): siRNA sense strand
guaaagaaauacucaagga

SEQ ID NO: 808340 - RNA, 19 nt, Homo sapiens
  misc_RNA (1)...(19): siRNA sense strand
uuacagggcuuucauaugu

SEQ ID NO: 808341 - RNA, 19 nt, Homo sapiens
  misc_RNA (1)...(19): siRNA sense strand
gcacagauccuacuauuac

SEQ ID NO: 808342 - RNA, 19 nt, Homo sapiens
  misc_RNA (1)...(19): siRNA sense strand
ggaaugacuucaccucguu

SEQ ID NO: 808343 - RNA, 19 nt, Homo sapiens
  misc_RNA (1)...(19): siRNA sense strand
gaaagagaagauccaguua

SEQ ID NO: 808344 - RNA, 19 nt, Homo sapiens
  misc_RNA (1)...(19): siRNA sense strand
gaaagccaguaccuaaaga

SEQ ID NO: 808345 - RNA, 19 nt, Homo sapiens
  misc_RNA (1)...(19): siRNA sense strand
gauauucuguccaaugaga

SEQ ID NO: 808346 - RNA, 19 nt, Homo sapiens
  misc_RNA (1)...(19): siRNA sense strand
uagaagacauuacucaaga

SEQ ID NO: 808347 - RNA, 19 nt, Homo sapiens
  misc_RNA (1)...(19): siRNA sense strand
gauauuaacaggccaaaug

SEQ ID NO: 808348 - RNA, 19 nt, Homo sapiens
  misc_RNA (1)...(19): siRNA sense strand
aagagaagauccaguuauu

SEQ ID NO: 808349 - RNA, 19 nt, Homo sapiens
  misc_RNA (1)...(19): siRNA sense strand
cagcacagauccuacuauu

SEQ ID NO: 808350 - RNA, 19 nt, Homo sapiens
  misc_RNA (1)...(19): siRNA sense strand
gagaagauccaguuauuca

SEQ ID NO: 808351 - RNA, 19 nt, Homo sapiens
  misc_RNA (1)...(19): siRNA sense strand
gcugugaaguugugucaaa

SEQ ID NO: 808352 - RNA, 19 nt, Homo sapiens
  misc_RNA (1)...(19): siRNA sense strand
gcuaagugcugucauucaa

SEQ ID NO: 808353 - RNA, 19 nt, Homo sapiens
  misc_RNA (1)...(19): siRNA sense strand
gcaacuccauuguacuuug

SEQ ID NO: 808354 - RNA, 19 nt, Homo sapiens
  misc_RNA (1)...(19): siRNA sense strand
acaggcagcuggucaauau

SEQ ID NO: 808355 - RNA, 19 nt, Homo sapiens
  misc_RNA (1)...(19): siRNA sense strand
acagagaucacuucuauuu

SEQ ID NO: 808356 - RNA, 19 nt, Homo sapiens
  misc_RNA (1)...(19): siRNA sense strand
uaacuccucuggauuuaug

SEQ ID NO: 808357 - RNA, 19 nt, Homo sapiens
  misc_RNA (1)...(19): siRNA sense strand
gaauugauaugggcuacaa

SEQ ID NO: 808358 - RNA, 19 nt, Homo sapiens
  misc_RNA (1)...(19): siRNA sense strand
ggcaaguucuggagcauuu

SEQ ID NO: 808359 - RNA, 19 nt, Homo sapiens
  misc_RNA (1)...(19): siRNA sense strand
gaaugaagaccuccgagaa

SEQ ID NO: 808360 - RNA, 19 nt, Homo sapiens
  misc_RNA (1)...(19): siRNA sense strand
gaacaacuuuucagccuaa

SEQ ID NO: 808361 - RNA, 19 nt, Homo sapiens
  misc_RNA (1)...(19): siRNA sense strand
caagauauuucaggcugua

SEQ ID NO: 808362 - RNA, 19 nt, Homo sapiens
  misc_RNA (1)...(19): siRNA sense strand
gggcagaucuugggauuag

SEQ ID NO: 808363 - RNA, 19 nt, Homo sapiens
  misc_RNA (1)...(19): siRNA sense strand
gaauauagcgcugauguca

SEQ ID NO: 808364 - RNA, 19 nt, Homo sapiens
  misc_RNA (1)...(19): siRNA sense strand
ucaagaugcugcuuccauu

SEQ ID NO: 808365 - RNA, 19 nt, Homo sapiens
  misc_RNA (1)...(19): siRNA sense strand
uuagaugaauggcuaguuu

SEQ ID NO: 808366 - RNA, 19 nt, Homo sapiens
  misc_RNA (1)...(19): siRNA sense strand
guucaagccucuggaauug

SEQ ID NO: 808367 - RNA, 19 nt, Homo sapiens
  misc_RNA (1)...(19): siRNA sense strand
ggacagccagauucagaua

SEQ ID NO: 808368 - RNA, 19 nt, Homo sapiens
  misc_RNA (1)...(19): siRNA sense strand
caugguggguuugcuaaua

SEQ ID NO: 808369 - RNA, 19 nt, Homo sapiens
  misc_RNA (1)...(19): siRNA sense strand
guucuucucuuacaguuug

SEQ ID NO: 808370 - RNA, 19 nt, Homo sapiens
  misc_RNA (1)...(19): siRNA sense strand
gugcgugagugguuugaua

SEQ ID NO: 808371 - RNA, 19 nt, Homo sapiens
  misc_RNA (1)...(19): siRNA sense strand
ucagugauguugauguuga

SEQ ID NO: 808372 - RNA, 19 nt, Homo sapiens
  misc_RNA (1)...(19): siRNA sense strand
gaaauugaugugagugauu

SEQ ID NO: 808373 - RNA, 19 nt, Homo sapiens
  misc_RNA (1)...(19): siRNA sense strand
uggaagaggugccuuugaa

SEQ ID NO: 808374 - RNA, 19 nt, Homo sapiens
  misc_RNA (1)...(19): siRNA sense strand
caauuaugaugcucaaaug

SEQ ID NO: 808375 - RNA, 19 nt, Homo sapiens
  misc_RNA (1)...(19): siRNA sense strand
gcaauuaugaugcucaaau

SEQ ID NO: 808376 - RNA, 19 nt, Homo sapiens
  misc_RNA (1)...(19): siRNA sense strand
caagaaaugggcagaagaa

SEQ ID NO: 808377 - RNA, 19 nt, Homo sapiens
  misc_RNA (1)...(19): siRNA sense strand
ccagucagcugauggaaca

SEQ ID NO: 808378 - RNA, 19 nt, Homo sapiens
  misc_RNA (1)...(19): siRNA sense strand
cugcaaacaugaugaaguu

SEQ ID NO: 808379 - RNA, 19 nt, Homo sapiens
  misc_RNA (1)...(19): siRNA sense strand
agacaguggugcugauauu

SEQ ID NO: 808380 - RNA, 19 nt, Homo sapiens
  misc_RNA (1)...(19): siRNA sense strand
ggcagcuggucaauauuua

SEQ ID NO: 808381 - RNA, 19 nt, Homo sapiens
  misc_RNA (1)...(19): siRNA sense strand
ugucacgucuuucgaauug

SEQ ID NO: 808382 - RNA, 19 nt, Homo sapiens
  misc_RNA (1)...(19): siRNA sense strand
ggaagccagugcagauugu

SEQ ID NO: 808383 - RNA, 19 nt, Homo sapiens
  misc_RNA (1)...(19): siRNA sense strand
ugaaagagaagauccaguu

SEQ ID NO: 808384 - RNA, 19 nt, Homo sapiens
  misc_RNA (1)...(19): siRNA sense strand
ccugaucacuugaacuauu

SEQ ID NO: 808385 - RNA, 19 nt, Homo sapiens
  misc_RNA (1)...(19): siRNA sense strand
gcaaauugugcaaagcuaa

SEQ ID NO: 808386 - RNA, 19 nt, Homo sapiens
  misc_RNA (1)...(19): siRNA sense strand
gucaggauguuauuucuau

SEQ ID NO: 808387 - RNA, 19 nt, Homo sapiens
  misc_RNA (1)...(19): siRNA sense strand
gagcaacuccauuguacuu

SEQ ID NO: 808388 - RNA, 19 nt, Homo sapiens
  misc_RNA (1)...(19): siRNA sense strand
gaaguuguagaagacauua

SEQ ID NO: 808389 - RNA, 19 nt, Homo sapiens
  misc_RNA (1)...(19): siRNA sense strand
gaacuucgaaugacaagag

SEQ ID NO: 808390 - RNA, 19 nt, Homo sapiens
  misc_RNA (1)...(19): siRNA sense strand
uaagugaucugggucuaga

SEQ ID NO: 808391 - RNA, 19 nt, Homo sapiens
  misc_RNA (1)...(19): siRNA sense strand
gacuucaccucguuucauu

SEQ ID NO: 808392 - RNA, 19 nt, Homo sapiens
  misc_RNA (1)...(19): siRNA sense strand
caauaucacccgaggcuuu

SEQ ID NO: 808393 - RNA, 19 nt, Homo sapiens
  misc_RNA (1)...(19): siRNA sense strand
gaauuggagcuacugcuuu

SEQ ID NO: 808394 - RNA, 19 nt, Homo sapiens
  misc_RNA (1)...(19): siRNA sense strand
caacaaauggucauaaacu

SEQ ID NO: 808395 - RNA, 19 nt, Homo sapiens
  misc_RNA (1)...(19): siRNA sense strand
ggaagaggugccuuugaaa

SEQ ID NO: 808396 - RNA, 19 nt, Homo sapiens
  misc_RNA (1)...(19): siRNA sense strand
uguaaauccugaucacuug

SEQ ID NO: 808397 - RNA, 19 nt, Homo sapiens
  misc_RNA (1)...(19): siRNA sense strand
gggcagaagaaauguauga

SEQ ID NO: 808398 - RNA, 19 nt, Homo sapiens
  misc_RNA (1)...(19): siRNA sense strand
ccauauacuccaaaucuuu

SEQ ID NO: 808399 - RNA, 19 nt, Homo sapiens
  misc_RNA (1)...(19): siRNA sense strand
guucacagagauucuauuu

SEQ ID NO: 808400 - RNA, 19 nt, Homo sapiens
  misc_RNA (1)...(19): siRNA sense strand
ugaaggccuuacagcaaua

SEQ ID NO: 808401 - RNA, 19 nt, Homo sapiens
  misc_RNA (1)...(19): siRNA sense strand
uaacaggccaaauguauca

SEQ ID NO: 808402 - RNA, 19 nt, Homo sapiens
  misc_RNA (1)...(19): siRNA sense strand
ccaaugagauagucaaucc

SEQ ID NO: 808403 - RNA, 19 nt, Homo sapiens
  misc_RNA (1)...(19): siRNA sense strand
gggcuacaaugggaauaaa

SEQ ID NO: 808404 - RNA, 19 nt, Homo sapiens
  misc_RNA (1)...(19): siRNA sense strand
caucaacaugcucaaguua

SEQ ID NO: 808405 - RNA, 19 nt, Homo sapiens
  misc_RNA (1)...(19): siRNA sense strand
gaagauccaguuauucagu

SEQ ID NO: 808406 - RNA, 19 nt, Homo sapiens
  misc_RNA (1)...(19): siRNA sense strand
ugaugugagugauuggaua

SEQ ID NO: 808407 - RNA, 19 nt, Homo sapiens
  misc_RNA (1)...(19): siRNA sense strand
aggaguagcugugaaguug

SEQ ID NO: 808408 - RNA, 19 nt, Homo sapiens
  misc_RNA (1)...(19): siRNA sense strand
gugcagugcuugcuagaca

SEQ ID NO: 808409 - RNA, 19 nt, Homo sapiens
  misc_RNA (1)...(19): siRNA sense strand
gaauacccaaguaaagaaa

SEQ ID NO: 808410 - RNA, 19 nt, Homo sapiens
  misc_RNA (1)...(19): siRNA sense strand
gaguacguccagcuuguua

SEQ ID NO: 808411 - RNA, 19 nt, Homo sapiens
  misc_RNA (1)...(19): siRNA sense strand
guacuuugcuugcagucau

SEQ ID NO: 808412 - RNA, 19 nt, Homo sapiens
  misc_RNA (1)...(19): siRNA sense strand
ccaaauguaucaggagcaa

SEQ ID NO: 808413 - RNA, 19 nt, Homo sapiens
  misc_RNA (1)...(19): siRNA sense strand
gcaagaaaugggcagaaga

SEQ ID NO: 808414 - RNA, 19 nt, Homo sapiens
  misc_RNA (1)...(19): siRNA sense strand
cagcuaugguuacacaaug

SEQ ID NO: 808415 - RNA, 19 nt, Homo sapiens
  misc_RNA (1)...(19): siRNA sense strand
auacacaaguggcuaugaa

SEQ ID NO: 808416 - RNA, 19 nt, Homo sapiens
  misc_RNA (1)...(19): siRNA sense strand
gaugugagugauuggauaa

SEQ ID NO: 808417 - RNA, 19 nt, Homo sapiens
  misc_RNA (1)...(19): siRNA sense strand
cugaucacuugaacuauuu

SEQ ID NO: 808418 - RNA, 19 nt, Homo sapiens
  misc_RNA (1)...(19): siRNA sense strand
ggaccugggagcuaugaaa

SEQ ID NO: 808419 - RNA, 19 nt, Homo sapiens
  misc_RNA (1)...(19): siRNA sense strand
gcaugucagugauguugau

SEQ ID NO: 808420 - RNA, 19 nt, Homo sapiens
  misc_RNA (1)...(19): siRNA sense strand
aaauugaugugagugauug

SEQ ID NO: 808421 - RNA, 19 nt, Homo sapiens
  misc_RNA (1)...(19): siRNA sense strand
gaucugggucuagaacuaa

SEQ ID NO: 808422 - RNA, 19 nt, Homo sapiens
  misc_RNA (1)...(19): siRNA sense strand
gguuugauauucuguccaa

SEQ ID NO: 808423 - RNA, 19 nt, Homo sapiens
  misc_RNA (1)...(19): siRNA sense strand
gcacaggccagugaaugaa

SEQ ID NO: 808424 - RNA, 19 nt, Homo sapiens
  misc_RNA (1)...(19): siRNA sense strand
gauauggagagacuuguga

SEQ ID NO: 808425 - RNA, 19 nt, Homo sapiens
  misc_RNA (1)...(19): siRNA sense strand
ucaagcacaugcaucaaca

SEQ ID NO: 808426 - RNA, 19 nt, Homo sapiens
  misc_RNA (1)...(19): siRNA sense strand
gcuaauaucauggguggaa

SEQ ID NO: 808427 - RNA, 19 nt, Homo sapiens
  misc_RNA (1)...(19): siRNA sense strand
gaagaaggcaugggucaag

SEQ ID NO: 808428 - RNA, 19 nt, Homo sapiens
  misc_RNA (1)...(19): siRNA sense strand
caaauugugcaaagcuaaa

SEQ ID NO: 808429 - RNA, 19 nt, Homo sapiens
  misc_RNA (1)...(19): siRNA sense strand
gaguagcugugaaguugug

SEQ ID NO: 808430 - RNA, 19 nt, Homo sapiens
  misc_RNA (1)...(19): siRNA sense strand
uaaaccagaugcucuugca

SEQ ID NO: 808431 - RNA, 19 nt, Homo sapiens
  misc_RNA (1)...(19): siRNA sense strand
gccaguaccuaaagauucu

SEQ ID NO: 808432 - RNA, 19 nt, Homo sapiens
  misc_RNA (1)...(19): siRNA sense strand
gaagaggugccuuugaaac

SEQ ID NO: 808433 - RNA, 19 nt, Homo sapiens
  misc_RNA (1)...(19): siRNA sense strand
ggaaguuguagaagacauu

SEQ ID NO: 808434 - RNA, 19 nt, Homo sapiens
  misc_RNA (1)...(19): siRNA sense strand
gaagagagauggagaagaa

SEQ ID NO: 808435 - RNA, 19 nt, Homo sapiens
  misc_RNA (1)...(19): siRNA sense strand
gcaaauacccugacaagua

SEQ ID NO: 808436 - RNA, 19 nt, Homo sapiens
  misc_RNA (1)...(19): siRNA sense strand
gaaacuaccuuaaacgaaa

SEQ ID NO: 808437 - RNA, 19 nt, Homo sapiens
  misc_RNA (1)...(19): siRNA sense strand
gaggaaagcuacagaaauu

SEQ ID NO: 808438 - RNA, 19 nt, Homo sapiens
  misc_RNA (1)...(19): siRNA sense strand
ggaaguaaaugaaggaauu

SEQ ID NO: 808439 - RNA, 19 nt, Homo sapiens
  misc_RNA (1)...(19): siRNA sense strand
caaauacccugacaaguaa

SEQ ID NO: 808440 - RNA, 19 nt, Homo sapiens
  misc_RNA (1)...(19): siRNA sense strand
guacagggauuacagcauu

SEQ ID NO: 808441 - RNA, 19 nt, Homo sapiens
  misc_RNA (1)...(19): siRNA sense strand
gaaauaaacgccacuccua

SEQ ID NO: 808442 - RNA, 19 nt, Homo sapiens
  misc_RNA (1)...(19): siRNA sense strand
gaaugagccugcagucaaa

SEQ ID NO: 808443 - RNA, 19 nt, Homo sapiens
  misc_RNA (1)...(19): siRNA sense strand
ggagaucgaugccauaaca

SEQ ID NO: 808444 - RNA, 19 nt, Homo sapiens
  misc_RNA (1)...(19): siRNA sense strand
aaacagaccuugaaagaca

SEQ ID NO: 808445 - RNA, 19 nt, Homo sapiens
  misc_RNA (1)...(19): siRNA sense strand
gagcaaggcugaagagaag

SEQ ID NO: 808446 - RNA, 19 nt, Homo sapiens
  misc_RNA (1)...(19): siRNA sense strand
caacugauauugauaguac

SEQ ID NO: 808447 - RNA, 19 nt, Homo sapiens
  misc_RNA (1)...(19): siRNA sense strand
gaauugagaugggcgauug

SEQ ID NO: 808448 - RNA, 19 nt, Homo sapiens
  misc_RNA (1)...(19): siRNA sense strand
ggaaucaacugcacagaag

SEQ ID NO: 808449 - RNA, 19 nt, Homo sapiens
  misc_RNA (1)...(19): siRNA sense strand
gaaaauggcuccaaacaca

SEQ ID NO: 808450 - RNA, 19 nt, Homo sapiens
  misc_RNA (1)...(19): siRNA sense strand
ggaaagacaaggcaaagaa

SEQ ID NO: 808451 - RNA, 19 nt, Homo sapiens
  misc_RNA (1)...(19): siRNA sense strand
gcagcaacaucuacccuuu

SEQ ID NO: 808452 - RNA, 19 nt, Homo sapiens
  misc_RNA (1)...(19): siRNA sense strand
ggagccaguuucagaagua

SEQ ID NO: 808453 - RNA, 19 nt, Homo sapiens
  misc_RNA (1)...(19): siRNA sense strand
ggaacagacuccacccaaa

SEQ ID NO: 808454 - RNA, 19 nt, Homo sapiens
  misc_RNA (1)...(19): siRNA sense strand
gaauucagauaaagagaug

SEQ ID NO: 808455 - RNA, 19 nt, Homo sapiens
  misc_RNA (1)...(19): siRNA sense strand
ggaauacacaaacaaauga

SEQ ID NO: 808456 - RNA, 19 nt, Homo sapiens
  misc_RNA (1)...(19): siRNA sense strand
gaagcaacaacaauaguaa

SEQ ID NO: 808457 - RNA, 19 nt, Homo sapiens
  misc_RNA (1)...(19): siRNA sense strand
caccugcaauuaugaguua

SEQ ID NO: 808458 - RNA, 19 nt, Homo sapiens
  misc_RNA (1)...(19): siRNA sense strand
ggaaugagccugcagucaa

SEQ ID NO: 808459 - RNA, 19 nt, Homo sapiens
  misc_RNA (1)...(19): siRNA sense strand
caucagacaauaccaguua

SEQ ID NO: 808460 - RNA, 19 nt, Homo sapiens
  misc_RNA (1)...(19): siRNA sense strand
ccaaacagaccuugaaaga

SEQ ID NO: 808461 - RNA, 19 nt, Homo sapiens
  misc_RNA (1)...(19): siRNA sense strand
gaagaggacaauucuaguu

SEQ ID NO: 808462 - RNA, 19 nt, Homo sapiens
  misc_RNA (1)...(19): siRNA sense strand
ggaauaaagaggaaagcua

SEQ ID NO: 808463 - RNA, 19 nt, Homo sapiens
  misc_RNA (1)...(19): siRNA sense strand
gauggaaugcguaggcuua

SEQ ID NO: 808464 - RNA, 19 nt, Homo sapiens
  misc_RNA (1)...(19): siRNA sense strand
gaucauagacgguauuucu

SEQ ID NO: 808465 - RNA, 19 nt, Homo sapiens
  misc_RNA (1)...(19): siRNA sense strand
auaaagagauggaaguaga

SEQ ID NO: 808466 - RNA, 19 nt, Homo sapiens
  misc_RNA (1)...(19): siRNA sense strand
ccaaagagacaaauggaaa

SEQ ID NO: 808467 - RNA, 19 nt, Homo sapiens
  misc_RNA (1)...(19): siRNA sense strand
gacaauccaucuccaacuu

SEQ ID NO: 808468 - RNA, 19 nt, Homo sapiens
  misc_RNA (1)...(19): siRNA sense strand
guaaagccacaggaaauua

SEQ ID NO: 808469 - RNA, 19 nt, Homo sapiens
  misc_RNA (1)...(19): siRNA sense strand
agaagaagcaacaacaaua

SEQ ID NO: 808470 - RNA, 19 nt, Homo sapiens
  misc_RNA (1)...(19): siRNA sense strand
agaaacaaguacaacagua

SEQ ID NO: 808471 - RNA, 19 nt, Homo sapiens
  misc_RNA (1)...(19): siRNA sense strand
gaauucaggcucucucaaa

SEQ ID NO: 808472 - RNA, 19 nt, Homo sapiens
  misc_RNA (1)...(19): siRNA sense strand
gcaauaugauacucagugu

SEQ ID NO: 808473 - RNA, 19 nt, Homo sapiens
  misc_RNA (1)...(19): siRNA sense strand
caucuacccuuucuucuuc

SEQ ID NO: 808474 - RNA, 19 nt, Homo sapiens
  misc_RNA (1)...(19): siRNA sense strand
gcacagaagcgaauugaag

SEQ ID NO: 808475 - RNA, 19 nt, Homo sapiens
  misc_RNA (1)...(19): siRNA sense strand
gcagucaaauuaccuugga

SEQ ID NO: 808476 - RNA, 19 nt, Homo sapiens
  misc_RNA (1)...(19): siRNA sense strand
caacaggaauuggacauca

SEQ ID NO: 808477 - RNA, 19 nt, Homo sapiens
  misc_RNA (1)...(19): siRNA sense strand
gaagaagcaacaacaauag

SEQ ID NO: 808478 - RNA, 19 nt, Homo sapiens
  misc_RNA (1)...(19): siRNA sense strand
ccacacagguacagggauu

SEQ ID NO: 808479 - RNA, 19 nt, Homo sapiens
  misc_RNA (1)...(19): siRNA sense strand
gaggaucuuugcaguguug

SEQ ID NO: 808480 - RNA, 19 nt, Homo sapiens
  misc_RNA (1)...(19): siRNA sense strand
gaaggaaagacaaggcaaa

SEQ ID NO: 808481 - RNA, 19 nt, Homo sapiens
  misc_RNA (1)...(19): siRNA sense strand
caacaucuacccuuucuuc

SEQ ID NO: 808482 - RNA, 19 nt, Homo sapiens
  misc_RNA (1)...(19): siRNA sense strand
gcagagagaaaugcuaauu

SEQ ID NO: 808483 - RNA, 19 nt, Homo sapiens
  misc_RNA (1)...(19): siRNA sense strand
caaagaagaguaagaccaa

SEQ ID NO: 808484 - RNA, 19 nt, Homo sapiens
  misc_RNA (1)...(19): siRNA sense strand
ucaaguuucuucuucauca

SEQ ID NO: 808485 - RNA, 19 nt, Homo sapiens
  misc_RNA (1)...(19): siRNA sense strand
gaagaaagccaagcacaag

SEQ ID NO: 808486 - RNA, 19 nt, Homo sapiens
  misc_RNA (1)...(19): siRNA sense strand
ggaaacuaccuuaaacgaa

SEQ ID NO: 808487 - RNA, 19 nt, Homo sapiens
  misc_RNA (1)...(19): siRNA sense strand
gcugcuugcuccuuuauug

SEQ ID NO: 808488 - RNA, 19 nt, Homo sapiens
  misc_RNA (1)...(19): siRNA sense strand
gaagaagagagauggagaa

SEQ ID NO: 808489 - RNA, 19 nt, Homo sapiens
  misc_RNA (1)...(19): siRNA sense strand
gaaggaaaauggcuccaaa

SEQ ID NO: 808490 - RNA, 19 nt, Homo sapiens
  misc_RNA (1)...(19): siRNA sense strand
ggaugcagcagaacaacua

SEQ ID NO: 808491 - RNA, 19 nt, Homo sapiens
  misc_RNA (1)...(19): siRNA sense strand
gaaacaaguacaacaguag

SEQ ID NO: 808492 - RNA, 19 nt, Homo sapiens
  misc_RNA (1)...(19): siRNA sense strand
ggacccuccuucagucaaa

SEQ ID NO: 808493 - RNA, 19 nt, Homo sapiens
  misc_RNA (1)...(19): siRNA sense strand
gaugagaauucagauaaag

SEQ ID NO: 808494 - RNA, 19 nt, Homo sapiens
  misc_RNA (1)...(19): siRNA sense strand
cuaaaggaauaaagaggaa

SEQ ID NO: 808495 - RNA, 19 nt, Homo sapiens
  misc_RNA (1)...(19): siRNA sense strand
ccacagguucucuuuguaa

SEQ ID NO: 808496 - RNA, 19 nt, Homo sapiens
  misc_RNA (1)...(19): siRNA sense strand
gacgguauuucuauguaaa

SEQ ID NO: 808497 - RNA, 19 nt, Homo sapiens
  misc_RNA (1)...(19): siRNA sense strand
caaguaaauucgaguuucu

SEQ ID NO: 808498 - RNA, 19 nt, Homo sapiens
  misc_RNA (1)...(19): siRNA sense strand
guaaagaggagccaguuuc

SEQ ID NO: 808499 - RNA, 19 nt, Homo sapiens
  misc_RNA (1)...(19): siRNA sense strand
ggaaagcuacagaaauuag

SEQ ID NO: 808500 - RNA, 19 nt, Homo sapiens
  misc_RNA (1)...(19): siRNA sense strand
gaaagccaagcacaagaaa

SEQ ID NO: 808501 - RNA, 19 nt, Homo sapiens
  misc_RNA (1)...(19): siRNA sense strand
ggaaggggcucuuaaugga

SEQ ID NO: 808502 - RNA, 19 nt, Homo sapiens
  misc_RNA (1)...(19): siRNA sense strand
ggaggaagaggaacaagau

SEQ ID NO: 808503 - RNA, 19 nt, Homo sapiens
  misc_RNA (1)...(19): siRNA sense strand
ggagguuccuagaguuguu

SEQ ID NO: 808504 - RNA, 19 nt, Homo sapiens
  misc_RNA (1)...(19): siRNA sense strand
ugcguaggcuuaugucuaa

SEQ ID NO: 808505 - RNA, 19 nt, Homo sapiens
  misc_RNA (1)...(19): siRNA sense strand
ggacgacucgccuucagaa

SEQ ID NO: 808506 - RNA, 19 nt, Homo sapiens
  misc_RNA (1)...(19): siRNA sense strand
gaacagacuccacccaaac

SEQ ID NO: 808507 - RNA, 19 nt, Homo sapiens
  misc_RNA (1)...(19): siRNA sense strand
ugaagaggaucgggaauca

SEQ ID NO: 808508 - RNA, 19 nt, Homo sapiens
  misc_RNA (1)...(19): siRNA sense strand
gccuaccgcuaccauuaua

SEQ ID NO: 808509 - RNA, 19 nt, Homo sapiens
  misc_RNA (1)...(19): siRNA sense strand
gaagaagaacaggauuuga

SEQ ID NO: 808510 - RNA, 19 nt, Homo sapiens
  misc_RNA (1)...(19): siRNA sense strand
cccaauaucuugccacaca

SEQ ID NO: 808511 - RNA, 19 nt, Homo sapiens
  misc_RNA (1)...(19): siRNA sense strand
cacgggauguuauuauuau

SEQ ID NO: 808512 - RNA, 19 nt, Homo sapiens
  misc_RNA (1)...(19): siRNA sense strand
caucgcugcuugcuccuuu

SEQ ID NO: 808513 - RNA, 19 nt, Homo sapiens
  misc_RNA (1)...(19): siRNA sense strand
gaguauccagcgugaguua

SEQ ID NO: 808514 - RNA, 19 nt, Homo sapiens
  misc_RNA (1)...(19): siRNA sense strand
ggaauuggacaucagacaa

SEQ ID NO: 808515 - RNA, 19 nt, Homo sapiens
  misc_RNA (1)...(19): siRNA sense strand
gaguuucuaggcauuaaua

SEQ ID NO: 808516 - RNA, 19 nt, Homo sapiens
  misc_RNA (1)...(19): siRNA sense strand
ccaguaggaguucuaguaa

SEQ ID NO: 808517 - RNA, 19 nt, Homo sapiens
  misc_RNA (1)...(19): siRNA sense strand
gugccuaccgcuaccauua

SEQ ID NO: 808518 - RNA, 19 nt, Homo sapiens
  misc_RNA (1)...(19): siRNA sense strand
acacgggauguuauuauua

SEQ ID NO: 808519 - RNA, 19 nt, Homo sapiens
  misc_RNA (1)...(19): siRNA sense strand
aaauaaacgccacuccuaa

SEQ ID NO: 808520 - RNA, 19 nt, Homo sapiens
  misc_RNA (1)...(19): siRNA sense strand
ggaaugcguaggcuuaugu

SEQ ID NO: 808521 - RNA, 19 nt, Homo sapiens
  misc_RNA (1)...(19): siRNA sense strand
cacaggaaauuauguugga

SEQ ID NO: 808522 - RNA, 19 nt, Homo sapiens
  misc_RNA (1)...(19): siRNA sense strand
gcaggagucggaauugaga

SEQ ID NO: 808523 - RNA, 19 nt, Homo sapiens
  misc_RNA (1)...(19): siRNA sense strand
gaaagacaaggcaaagaag

SEQ ID NO: 808524 - RNA, 19 nt, Homo sapiens
  misc_RNA (1)...(19): siRNA sense strand
aaacuggcacugauucaaa

SEQ ID NO: 808525 - RNA, 19 nt, Homo sapiens
  misc_RNA (1)...(19): siRNA sense strand
agacgguauuucuauguaa

SEQ ID NO: 808526 - RNA, 19 nt, Homo sapiens
  misc_RNA (1)...(19): siRNA sense strand
cagaacaacuaaaacagua

SEQ ID NO: 808527 - RNA, 19 nt, Homo sapiens
  misc_RNA (1)...(19): siRNA sense strand
gagccaguuucagaaguaa

SEQ ID NO: 808528 - RNA, 19 nt, Homo sapiens
  misc_RNA (1)...(19): siRNA sense strand
gaggaagaggaacaagaua

SEQ ID NO: 808529 - RNA, 19 nt, Homo sapiens
  misc_RNA (1)...(19): siRNA sense strand
gaaaauggaagauguuugu

SEQ ID NO: 808530 - RNA, 19 nt, Homo sapiens
  misc_RNA (1)...(19): siRNA sense strand
gggaaucaacugcacagaa

SEQ ID NO: 808531 - RNA, 19 nt, Homo sapiens
  misc_RNA (1)...(19): siRNA sense strand
ugaagaggaagaagaagaa

SEQ ID NO: 808532 - RNA, 19 nt, Homo sapiens
  misc_RNA (1)...(19): siRNA sense strand
caauccaucuccaacuuuc

SEQ ID NO: 808533 - RNA, 19 nt, Homo sapiens
  misc_RNA (1)...(19): siRNA sense strand
aagaagaacaggauuugaa

SEQ ID NO: 808534 - RNA, 19 nt, Homo sapiens
  misc_RNA (1)...(19): siRNA sense strand
caacugaagucacaugaaa

SEQ ID NO: 808535 - RNA, 19 nt, Homo sapiens
  misc_RNA (1)...(19): siRNA sense strand
ggagaaagcuaacggaaca

SEQ ID NO: 808536 - RNA, 19 nt, Homo sapiens
  misc_RNA (1)...(19): siRNA sense strand
gcaaucggcucucagaaga

SEQ ID NO: 808537 - RNA, 19 nt, Homo sapiens
  misc_RNA (1)...(19): siRNA sense strand
gaacaacgaauuuagcaaa

SEQ ID NO: 808538 - RNA, 19 nt, Homo sapiens
  misc_RNA (1)...(19): siRNA sense strand
caaacuaguugcagaagaa

SEQ ID NO: 808539 - RNA, 19 nt, Homo sapiens
  misc_RNA (1)...(19): siRNA sense strand
caacgaauuuagcaaacua

SEQ ID NO: 808540 - RNA, 19 nt, Homo sapiens
  misc_RNA (1)...(19): siRNA sense strand
ccaaggacgucgaugagua

SEQ ID NO: 808541 - RNA, 19 nt, Homo sapiens
  misc_RNA (1)...(19): siRNA sense strand
ucacucagguauuucuuua

SEQ ID NO: 808542 - RNA, 19 nt, Homo sapiens
  misc_RNA (1)...(19): siRNA sense strand
ggacgucgaugaguacaaa

SEQ ID NO: 808543 - RNA, 19 nt, Homo sapiens
  misc_RNA (1)...(19): siRNA sense strand
gaauuuagcaaacuaguug

SEQ ID NO: 808544 - RNA, 19 nt, Homo sapiens
  misc_RNA (1)...(19): siRNA sense strand
aaaguaagcugaagcagau

SEQ ID NO: 808545 - RNA, 19 nt, Homo sapiens
  misc_RNA (1)...(19): siRNA sense strand
gaaaugcaaggguggauaa

SEQ ID NO: 808546 - RNA, 19 nt, Homo sapiens
  misc_RNA (1)...(19): siRNA sense strand
gggagaaacucaagaacga

SEQ ID NO: 808547 - RNA, 19 nt, Homo sapiens
  misc_RNA (1)...(19): siRNA sense strand
ccaaagaccaucagucgua

SEQ ID NO: 808548 - RNA, 19 nt, Homo sapiens
  misc_RNA (1)...(19): siRNA sense strand
guacugaggagaaagcuaa

SEQ ID NO: 808549 - RNA, 19 nt, Homo sapiens
  misc_RNA (1)...(19): siRNA sense strand
ggaaggaggcaaagagcua

SEQ ID NO: 808550 - RNA, 19 nt, Homo sapiens
  misc_RNA (1)...(19): siRNA sense strand
guacaaaaguggauucuug

SEQ ID NO: 808551 - RNA, 19 nt, Homo sapiens
  misc_RNA (1)...(19): siRNA sense strand
gaaaaucucaguaauggua

SEQ ID NO: 808552 - RNA, 19 nt, Homo sapiens
  misc_RNA (1)...(19): siRNA sense strand
gaagucacaugaaaguaag

SEQ ID NO: 808553 - RNA, 19 nt, Homo sapiens
  misc_RNA (1)...(19): siRNA sense strand
gaaaaggccuugucugaag

SEQ ID NO: 808554 - RNA, 19 nt, Homo sapiens
  misc_RNA (1)...(19): siRNA sense strand
ccaaggaucugcugaaagc

SEQ ID NO: 808555 - RNA, 19 nt, Homo sapiens
  misc_RNA (1)...(19): siRNA sense strand
ugaaagcucuguacaacuc

SEQ ID NO: 808556 - RNA, 19 nt, Homo sapiens
  misc_RNA (1)...(19): siRNA sense strand
acaacucaaucaagaauga

SEQ ID NO: 808557 - RNA, 19 nt, Homo sapiens
  misc_RNA (1)...(19): siRNA sense strand
ccugaaacaccaagcauua

SEQ ID NO: 808558 - RNA, 19 nt, Homo sapiens
  misc_RNA (1)...(19): siRNA sense strand
ggacauuccucaugaucca

SEQ ID NO: 808559 - RNA, 19 nt, Homo sapiens
  misc_RNA (1)...(19): siRNA sense strand
gcaagaacaacgaauuuag

SEQ ID NO: 808560 - RNA, 19 nt, Homo sapiens
  misc_RNA (1)...(19): siRNA sense strand
ugaagucacaugaaaguaa

SEQ ID NO: 808561 - RNA, 19 nt, Homo sapiens
  misc_RNA (1)...(19): siRNA sense strand
gaacacauccaaagaccau

SEQ ID NO: 808562 - RNA, 19 nt, Homo sapiens
  misc_RNA (1)...(19): siRNA sense strand
gugcaauaaugcuucuuaa

SEQ ID NO: 808563 - RNA, 19 nt, Homo sapiens
  misc_RNA (1)...(19): siRNA sense strand
gcaaaaggaugaauacaag

SEQ ID NO: 808564 - RNA, 19 nt, Homo sapiens
  misc_RNA (1)...(19): siRNA sense strand
gaccaucagucguauugga

SEQ ID NO: 808565 - RNA, 19 nt, Homo sapiens
  misc_RNA (1)...(19): siRNA sense strand
gaaaauucaugcagauaug

SEQ ID NO: 808566 - RNA, 19 nt, Homo sapiens
  misc_RNA (1)...(19): siRNA sense strand
uuuaucagcuggacagauu

SEQ ID NO: 808567 - RNA, 19 nt, Homo sapiens
  misc_RNA (1)...(19): siRNA sense strand
ggcaguagaugaugaagag

SEQ ID NO: 808568 - RNA, 19 nt, Homo sapiens
  misc_RNA (1)...(19): siRNA sense strand
gcugaaagcucuguacaac

SEQ ID NO: 808569 - RNA, 19 nt, Homo sapiens
  misc_RNA (1)...(19): siRNA sense strand
caagaacgagagagaguuu

SEQ ID NO: 808570 - RNA, 19 nt, Homo sapiens
  misc_RNA (1)...(19): siRNA sense strand
ugccuuaccugugcaauaa

SEQ ID NO: 808571 - RNA, 19 nt, Homo sapiens
  misc_RNA (1)...(19): siRNA sense strand
gagaaaacccgcuaugaaa

SEQ ID NO: 808572 - RNA, 19 nt, Homo sapiens
  misc_RNA (1)...(19): siRNA sense strand
ggaaagaagacuccaagag

SEQ ID NO: 808573 - RNA, 19 nt, Homo sapiens
  misc_RNA (1)...(19): siRNA sense strand
uaauacacuucuccaauag

SEQ ID NO: 808574 - RNA, 19 nt, Homo sapiens
  misc_RNA (1)...(19): siRNA sense strand
caaagaccaucagucguau

SEQ ID NO: 808575 - RNA, 19 nt, Homo sapiens
  misc_RNA (1)...(19): siRNA sense strand
ggcaagaacaacgaauuua

SEQ ID NO: 808576 - RNA, 19 nt, Homo sapiens
  misc_RNA (1)...(19): siRNA sense strand
agaaaguacugaggagaaa

SEQ ID NO: 808577 - RNA, 19 nt, Homo sapiens
  misc_RNA (1)...(19): siRNA sense strand
caaaugcugcuguguacaa

SEQ ID NO: 808578 - RNA, 19 nt, Homo sapiens
  misc_RNA (1)...(19): siRNA sense strand
ggaaaugcaaggguggaua

SEQ ID NO: 808579 - RNA, 19 nt, Homo sapiens
  misc_RNA (1)...(19): siRNA sense strand
uaccauugcuucacaagau

SEQ ID NO: 808580 - RNA, 19 nt, Homo sapiens
  misc_RNA (1)...(19): siRNA sense strand
cuacauggccacgugaaua

SEQ ID NO: 808581 - RNA, 19 nt, Homo sapiens
  misc_RNA (1)...(19): siRNA sense strand
gucaggaguucauugcaaa

SEQ ID NO: 808582 - RNA, 19 nt, Homo sapiens
  misc_RNA (1)...(19): siRNA sense strand
guacaacucaaucaagaau

SEQ ID NO: 808583 - RNA, 19 nt, Homo sapiens
  misc_RNA (1)...(19): siRNA sense strand
ccaaggccacggacuauga

SEQ ID NO: 808584 - RNA, 19 nt, Homo sapiens
  misc_RNA (1)...(19): siRNA sense strand
uuuaaagcauucucucuug

SEQ ID NO: 808585 - RNA, 19 nt, Homo sapiens
  misc_RNA (1)...(19): siRNA sense strand
ccggauacuucuccaauca

SEQ ID NO: 808586 - RNA, 19 nt, Homo sapiens
  misc_RNA (1)...(19): siRNA sense strand
gcaaggguggauaaacaaa

SEQ ID NO: 808587 - RNA, 19 nt, Homo sapiens
  misc_RNA (1)...(19): siRNA sense strand
ggaguucauugcaaaucug

SEQ ID NO: 808588 - RNA, 19 nt, Homo sapiens
  misc_RNA (1)...(19): siRNA sense strand
uaacggaacacauccaaag

SEQ ID NO: 808589 - RNA, 19 nt, Homo sapiens
  misc_RNA (1)...(19): siRNA sense strand
gcagcaaucggcucucaga

SEQ ID NO: 808590 - RNA, 19 nt, Homo sapiens
  misc_RNA (1)...(19): siRNA sense strand
acaccaagcauuaagcaaa

SEQ ID NO: 808591 - RNA, 19 nt, Homo sapiens
  misc_RNA (1)...(19): siRNA sense strand
cagauaccauugcuucaca

SEQ ID NO: 808592 - RNA, 19 nt, Homo sapiens
  misc_RNA (1)...(19): siRNA sense strand
ggaaaacgaggauggaaaa

SEQ ID NO: 808593 - RNA, 19 nt, Homo sapiens
  misc_RNA (1)...(19): siRNA sense strand
gcgacuccaucuacacgaa

SEQ ID NO: 808594 - RNA, 19 nt, Homo sapiens
  misc_RNA (1)...(19): siRNA sense strand
gaucagucacucagguauu

SEQ ID NO: 808595 - RNA, 19 nt, Homo sapiens
  misc_RNA (1)...(19): siRNA sense strand
ggggagcacugaaauuuug

SEQ ID NO: 808596 - RNA, 19 nt, Homo sapiens
  misc_RNA (1)...(19): siRNA sense strand
gcagauauggauggaaaga

SEQ ID NO: 808597 - RNA, 19 nt, Homo sapiens
  misc_RNA (1)...(19): siRNA sense strand
agaaugagaagcuugaaug

SEQ ID NO: 808598 - RNA, 19 nt, Homo sapiens
  misc_RNA (1)...(19): siRNA sense strand
ccacgugaauauuggaaag

SEQ ID NO: 808599 - RNA, 19 nt, Homo sapiens
  misc_RNA (1)...(19): siRNA sense strand
augcagauauggauggaaa

SEQ ID NO: 808600 - RNA, 19 nt, Homo sapiens
  misc_RNA (1)...(19): siRNA sense strand
cagaaaguacugaggagaa

SEQ ID NO: 808601 - RNA, 19 nt, Homo sapiens
  misc_RNA (1)...(19): siRNA sense strand
guaaaugaggguguugauu

SEQ ID NO: 808602 - RNA, 19 nt, Homo sapiens
  misc_RNA (1)...(19): siRNA sense strand
aguagaugaugaagagaaa

SEQ ID NO: 808603 - RNA, 19 nt, Homo sapiens
  misc_RNA (1)...(19): siRNA sense strand
agauauggauggaaagaag

SEQ ID NO: 808604 - RNA, 19 nt, Homo sapiens
  misc_RNA (1)...(19): siRNA sense strand
acacuucuccaauagauau

SEQ ID NO: 808605 - RNA, 19 nt, Homo sapiens
  misc_RNA (1)...(19): siRNA sense strand
gaaaacccgcuaugaaaug

SEQ ID NO: 808606 - RNA, 19 nt, Homo sapiens
  misc_RNA (1)...(19): siRNA sense strand
gcaacugaagucacaugaa

SEQ ID NO: 808607 - RNA, 19 nt, Homo sapiens
  misc_RNA (1)...(19): siRNA sense strand
gaaauggggagcacugaaa

SEQ ID NO: 808608 - RNA, 19 nt, Homo sapiens
  misc_RNA (1)...(19): siRNA sense strand
ucaccaaugggcugaauga

SEQ ID NO: 808609 - RNA, 19 nt, Homo sapiens
  misc_RNA (1)...(19): siRNA sense strand
accacuaucuggaguuuga

SEQ ID NO: 808610 - RNA, 19 nt, Homo sapiens
  misc_RNA (1)...(19): siRNA sense strand
gaaaaggagaccccagaaa

SEQ ID NO: 808611 - RNA, 19 nt, Homo sapiens
  misc_RNA (1)...(19): siRNA sense strand
ccacggacuaugagaagaa

SEQ ID NO: 808612 - RNA, 19 nt, Homo sapiens
  misc_RNA (1)...(19): siRNA sense strand
gaaaacaacacggcuagaa

SEQ ID NO: 808613 - RNA, 19 nt, Homo sapiens
  misc_RNA (1)...(19): siRNA sense strand
ugucaggaguucauugcaa

SEQ ID NO: 808614 - RNA, 19 nt, Homo sapiens
  misc_RNA (1)...(19): siRNA sense strand
gaaacucaagaacgagaga

SEQ ID NO: 808615 - RNA, 19 nt, Homo sapiens
  misc_RNA (1)...(19): siRNA sense strand
uuaaagcauucucucuugu

SEQ ID NO: 808616 - RNA, 19 nt, Homo sapiens
  misc_RNA (1)...(19): siRNA sense strand
uggcaagaacaacgaauuu

SEQ ID NO: 808617 - RNA, 19 nt, Homo sapiens
  misc_RNA (1)...(19): siRNA sense strand
cugccaaagucaagcguaa

SEQ ID NO: 808618 - RNA, 19 nt, Homo sapiens
  misc_RNA (1)...(19): siRNA sense strand
agaccacuaucuggaguuu

SEQ ID NO: 808619 - RNA, 19 nt, Homo sapiens
  misc_RNA (1)...(19): siRNA sense strand
caaacugaaagaccacuau

SEQ ID NO: 808620 - RNA, 19 nt, Homo sapiens
  misc_RNA (1)...(19): siRNA sense strand
gaugaauacaagccagaaa

SEQ ID NO: 808621 - RNA, 19 nt, Homo sapiens
  misc_RNA (1)...(19): siRNA sense strand
cuguacaacucaaucaaga

SEQ ID NO: 808622 - RNA, 19 nt, Homo sapiens
  misc_RNA (1)...(19): siRNA sense strand
ggaaugacgcuggaucagu

SEQ ID NO: 808623 - RNA, 19 nt, Homo sapiens
  misc_RNA (1)...(19): siRNA sense strand
ucagguauuucuuuaaagc

SEQ ID NO: 808624 - RNA, 19 nt, Homo sapiens
  misc_RNA (1)...(19): siRNA sense strand
ggauacuucuccaaucacu

SEQ ID NO: 808625 - RNA, 19 nt, Homo sapiens
  misc_RNA (1)...(19): siRNA sense strand
caaggaaggaggcaaagag

SEQ ID NO: 808626 - RNA, 19 nt, Homo sapiens
  misc_RNA (1)...(19): siRNA sense strand
ugucagcauucucaaggaa

SEQ ID NO: 808627 - RNA, 19 nt, Homo sapiens
  misc_RNA (1)...(19): siRNA sense strand
agaagaaaccaaacguguu

SEQ ID NO: 808628 - RNA, 19 nt, Homo sapiens
  misc_RNA (1)...(19): siRNA sense strand
cauccaaggccacggacua

SEQ ID NO: 808629 - RNA, 19 nt, Homo sapiens
  misc_RNA (1)...(19): siRNA sense strand
gaaugagaagcuugaaugg

SEQ ID NO: 808630 - RNA, 19 nt, Homo sapiens
  misc_RNA (1)...(19): siRNA sense strand
cagaaaaucucaguaaugg

SEQ ID NO: 808631 - RNA, 19 nt, Homo sapiens
  misc_RNA (1)...(19): siRNA sense strand
gugaauauuggaaagaaga

SEQ ID NO: 808632 - RNA, 19 nt, Homo sapiens
  misc_RNA (1)...(19): siRNA sense strand
auacacuucuccaauagau

SEQ ID NO: 808633 - RNA, 19 nt, Homo sapiens
  misc_RNA (1)...(19): siRNA sense strand
uccaaucacugccaaaguc

SEQ ID NO: 808634 - RNA, 19 nt, Homo sapiens
  misc_RNA (1)...(19): siRNA sense strand
gcacacagcgccuuaaaua

SEQ ID NO: 808635 - RNA, 19 nt, Homo sapiens
  misc_RNA (1)...(19): siRNA sense strand
gaaacaaccugucgagaug

SEQ ID NO: 808636 - RNA, 19 nt, Homo sapiens
  misc_RNA (1)...(19): siRNA sense strand
gaacaaagguguggcguau

SEQ ID NO: 808637 - RNA, 19 nt, Homo sapiens
  misc_RNA (1)...(19): siRNA sense strand
gagcaacaaugaacagauu

SEQ ID NO: 808638 - RNA, 19 nt, Homo sapiens
  misc_RNA (1)...(19): siRNA sense strand
gagauaaacguacugaaua

SEQ ID NO: 808639 - RNA, 19 nt, Homo sapiens
  misc_RNA (1)...(19): siRNA sense strand
ccacaccaccuaagaauua

SEQ ID NO: 808640 - RNA, 19 nt, Homo sapiens
  misc_RNA (1)...(19): siRNA sense strand
caaucugucugcugaaaua

SEQ ID NO: 808641 - RNA, 19 nt, Homo sapiens
  misc_RNA (1)...(19): siRNA sense strand
ugaauggguuccagucuua

SEQ ID NO: 808642 - RNA, 19 nt, Homo sapiens
  misc_RNA (1)...(19): siRNA sense strand
ucucagagcuccaagauau

SEQ ID NO: 808643 - RNA, 19 nt, Homo sapiens
  misc_RNA (1)...(19): siRNA sense strand
gaaacuggccaacauuaaa

SEQ ID NO: 808644 - RNA, 19 nt, Homo sapiens
  misc_RNA (1)...(19): siRNA sense strand
gcacugcgcugccucuugu

SEQ ID NO: 808645 - RNA, 19 nt, Homo sapiens
  misc_RNA (1)...(19): siRNA sense strand
ccgaugauauuaacuguuu

SEQ ID NO: 808646 - RNA, 19 nt, Homo sapiens
  misc_RNA (1)...(19): siRNA sense strand
aaauguaccuggagauaaa

SEQ ID NO: 808647 - RNA, 19 nt, Homo sapiens
  misc_RNA (1)...(19): siRNA sense strand
gcaacgaacucagagaaau

SEQ ID NO: 808648 - RNA, 19 nt, Homo sapiens
  misc_RNA (1)...(19): siRNA sense strand
cagaaggaacucuuaaaua

SEQ ID NO: 808649 - RNA, 19 nt, Homo sapiens
  misc_RNA (1)...(19): siRNA sense strand
uaacagaaguuccuauaac

SEQ ID NO: 808650 - RNA, 19 nt, Homo sapiens
  misc_RNA (1)...(19): siRNA sense strand
gaauucaaguuccauauac

SEQ ID NO: 808651 - RNA, 19 nt, Homo sapiens
  misc_RNA (1)...(19): siRNA sense strand
ggagauaaacguacugaau

SEQ ID NO: 808652 - RNA, 19 nt, Homo sapiens
  misc_RNA (1)...(19): siRNA sense strand
ugaaguuccugcuggauuu

SEQ ID NO: 808653 - RNA, 19 nt, Homo sapiens
  misc_RNA (1)...(19): siRNA sense strand
gauggaaacuggccaacau

SEQ ID NO: 808654 - RNA, 19 nt, Homo sapiens
  misc_RNA (1)...(19): siRNA sense strand
uuaaagcaguguaugguaa

SEQ ID NO: 808655 - RNA, 19 nt, Homo sapiens
  misc_RNA (1)...(19): siRNA sense strand
ggaaacuggccaacauuaa

SEQ ID NO: 808656 - RNA, 19 nt, Homo sapiens
  misc_RNA (1)...(19): siRNA sense strand
gaacagcguuuacauuuuc

SEQ ID NO: 808657 - RNA, 19 nt, Homo sapiens
  misc_RNA (1)...(19): siRNA sense strand
ggaaacaaccugucgagau

SEQ ID NO: 808658 - RNA, 19 nt, Homo sapiens
  misc_RNA (1)...(19): siRNA sense strand
caaauccgcuaaugaugga

SEQ ID NO: 808659 - RNA, 19 nt, Homo sapiens
  misc_RNA (1)...(19): siRNA sense strand
gaaauugaaagaacgaguu

SEQ ID NO: 808660 - RNA, 19 nt, Homo sapiens
  misc_RNA (1)...(19): siRNA sense strand
uaaauaagcgcaacaugga

SEQ ID NO: 808661 - RNA, 19 nt, Homo sapiens
  misc_RNA (1)...(19): siRNA sense strand
gcagaaggaacucuuaaau

SEQ ID NO: 808662 - RNA, 19 nt, Homo sapiens
  misc_RNA (1)...(19): siRNA sense strand
gaacgucccauacccuuug

SEQ ID NO: 808663 - RNA, 19 nt, Homo sapiens
  misc_RNA (1)...(19): siRNA sense strand
ggagaguggugccgccauu

SEQ ID NO: 808664 - RNA, 19 nt, Homo sapiens
  misc_RNA (1)...(19): siRNA sense strand
gcaauuggaagauuuaaag

SEQ ID NO: 808665 - RNA, 19 nt, Homo sapiens
  misc_RNA (1)...(19): siRNA sense strand
gaacagauuuuaacagaag

SEQ ID NO: 808666 - RNA, 19 nt, Homo sapiens
  misc_RNA (1)...(19): siRNA sense strand
gaagaaaauucgugcaaug

SEQ ID NO: 808667 - RNA, 19 nt, Homo sapiens
  misc_RNA (1)...(19): siRNA sense strand
gggcugagaguccgguuua

SEQ ID NO: 808668 - RNA, 19 nt, Homo sapiens
  misc_RNA (1)...(19): siRNA sense strand
gagggaagaagugaaauuu

SEQ ID NO: 808669 - RNA, 19 nt, Homo sapiens
  misc_RNA (1)...(19): siRNA sense strand
aaacagaauucuagcucuu

SEQ ID NO: 808670 - RNA, 19 nt, Homo sapiens
  misc_RNA (1)...(19): siRNA sense strand
caacuuaaccaggaacaaa

SEQ ID NO: 808671 - RNA, 19 nt, Homo sapiens
  misc_RNA (1)...(19): siRNA sense strand
gaacaagguggccgucaga

SEQ ID NO: 808672 - RNA, 19 nt, Homo sapiens
  misc_RNA (1)...(19): siRNA sense strand
gaaguacagacugcaauuu

SEQ ID NO: 808673 - RNA, 19 nt, Homo sapiens
  misc_RNA (1)...(19): siRNA sense strand
gucgagauguuguagaauu

SEQ ID NO: 808674 - RNA, 19 nt, Homo sapiens
  misc_RNA (1)...(19): siRNA sense strand
gaauccacguguugaacuu

SEQ ID NO: 808675 - RNA, 19 nt, Homo sapiens
  misc_RNA (1)...(19): siRNA sense strand
ggccuuuccuggcugauaa

SEQ ID NO: 808676 - RNA, 19 nt, Homo sapiens
  misc_RNA (1)...(19): siRNA sense strand
guaccaagaacuacagauu

SEQ ID NO: 808677 - RNA, 19 nt, Homo sapiens
  misc_RNA (1)...(19): siRNA sense strand
ggaaguacagacugcaauu

SEQ ID NO: 808678 - RNA, 19 nt, Homo sapiens
  misc_RNA (1)...(19): siRNA sense strand
caacagcagcagauugaaa

SEQ ID NO: 808679 - RNA, 19 nt, Homo sapiens
  misc_RNA (1)...(19): siRNA sense strand
gaaaauucgugcaaugaga

SEQ ID NO: 808680 - RNA, 19 nt, Homo sapiens
  misc_RNA (1)...(19): siRNA sense strand
gaagauccaaauccgcuaa

SEQ ID NO: 808681 - RNA, 19 nt, Homo sapiens
  misc_RNA (1)...(19): siRNA sense strand
caagaacuacagauucgua

SEQ ID NO: 808682 - RNA, 19 nt, Homo sapiens
  misc_RNA (1)...(19): siRNA sense strand
gagcaacgaacucagagaa

SEQ ID NO: 808683 - RNA, 19 nt, Homo sapiens
  misc_RNA (1)...(19): siRNA sense strand
ccagcaagcccaacgauga

SEQ ID NO: 808684 - RNA, 19 nt, Homo sapiens
  misc_RNA (1)...(19): siRNA sense strand
gcagcagucuauuucugaa

SEQ ID NO: 808685 - RNA, 19 nt, Homo sapiens
  misc_RNA (1)...(19): siRNA sense strand
ggaaaugaacgucccauac

SEQ ID NO: 808686 - RNA, 19 nt, Homo sapiens
  misc_RNA (1)...(19): siRNA sense strand
gauccaaauccgcuaauga

SEQ ID NO: 808687 - RNA, 19 nt, Homo sapiens
  misc_RNA (1)...(19): siRNA sense strand
gcagcagaaggaacucuua

SEQ ID NO: 808688 - RNA, 19 nt, Homo sapiens
  misc_RNA (1)...(19): siRNA sense strand
ggagggaagaagugaaauu

SEQ ID NO: 808689 - RNA, 19 nt, Homo sapiens
  misc_RNA (1)...(19): siRNA sense strand
gaacucagagaaauguaau

SEQ ID NO: 808690 - RNA, 19 nt, Homo sapiens
  misc_RNA (1)...(19): siRNA sense strand
ugccaaugauaaugaguua

SEQ ID NO: 808691 - RNA, 19 nt, Homo sapiens
  misc_RNA (1)...(19): siRNA sense strand
ucgacaagcucccuggaaa

SEQ ID NO: 808692 - RNA, 19 nt, Homo sapiens
  misc_RNA (1)...(19): siRNA sense strand
ggaacagcguuuacauuuu

SEQ ID NO: 808693 - RNA, 19 nt, Homo sapiens
  misc_RNA (1)...(19): siRNA sense strand
cagaaaguacugagaaaga

SEQ ID NO: 808694 - RNA, 19 nt, Homo sapiens
  misc_RNA (1)...(19): siRNA sense strand
ucgagauguuguagaauuu

SEQ ID NO: 808695 - RNA, 19 nt, Homo sapiens
  misc_RNA (1)...(19): siRNA sense strand
caacgugaaugcugcugau

SEQ ID NO: 808696 - RNA, 19 nt, Homo sapiens
  misc_RNA (1)...(19): siRNA sense strand
gcaucgagauugguaaagu

SEQ ID NO: 808697 - RNA, 19 nt, Homo sapiens
  misc_RNA (1)...(19): siRNA sense strand
ggcaacagcagcagauuga

SEQ ID NO: 808698 - RNA, 19 nt, Homo sapiens
  misc_RNA (1)...(19): siRNA sense strand
caagagcaacgaacucaga

SEQ ID NO: 808699 - RNA, 19 nt, Homo sapiens
  misc_RNA (1)...(19): siRNA sense strand
ggaaggagaguucgaucug

SEQ ID NO: 808700 - RNA, 19 nt, Homo sapiens
  misc_RNA (1)...(19): siRNA sense strand
aaacaccaaugccaaugga

SEQ ID NO: 808701 - RNA, 19 nt, Homo sapiens
  misc_RNA (1)...(19): siRNA sense strand
gaacgucucuaugggaaaa

SEQ ID NO: 808702 - RNA, 19 nt, Homo sapiens
  misc_RNA (1)...(19): siRNA sense strand
uaaauguaccuggagauaa

SEQ ID NO: 808703 - RNA, 19 nt, Homo sapiens
  misc_RNA (1)...(19): siRNA sense strand
caacgaacucagagaaaug

SEQ ID NO: 808704 - RNA, 19 nt, Homo sapiens
  misc_RNA (1)...(19): siRNA sense strand
gaaugcugcugauagugau

SEQ ID NO: 808705 - RNA, 19 nt, Homo sapiens
  misc_RNA (1)...(19): siRNA sense strand
cgaacaagcggaccaacuu

SEQ ID NO: 808706 - RNA, 19 nt, Homo sapiens
  misc_RNA (1)...(19): siRNA sense strand
cccauacccuuugaucaua

SEQ ID NO: 808707 - RNA, 19 nt, Homo sapiens
  misc_RNA (1)...(19): siRNA sense strand
uaaccaacuuaaccaggaa

SEQ ID NO: 808708 - RNA, 19 nt, Homo sapiens
  misc_RNA (1)...(19): siRNA sense strand
aggaacagcguuuacauuu

SEQ ID NO: 808709 - RNA, 19 nt, Homo sapiens
  misc_RNA (1)...(19): siRNA sense strand
agaacaagcugaagaaaau

SEQ ID NO: 808710 - RNA, 19 nt, Homo sapiens
  misc_RNA (1)...(19): siRNA sense strand
ggcaaucugucugcugaaa

SEQ ID NO: 808711 - RNA, 19 nt, Homo sapiens
  misc_RNA (1)...(19): siRNA sense strand
ugagaacagugaacaaggu

SEQ ID NO: 808712 - RNA, 19 nt, Homo sapiens
  misc_RNA (1)...(19): siRNA sense strand
gucagcaauuggaagauuu

SEQ ID NO: 808713 - RNA, 19 nt, Homo sapiens
  misc_RNA (1)...(19): siRNA sense strand
gaggacaagucgacuacag

SEQ ID NO: 808714 - RNA, 19 nt, Homo sapiens
  misc_RNA (1)...(19): siRNA sense strand
ugaaugcugcugauaguga

SEQ ID NO: 808715 - RNA, 19 nt, Homo sapiens
  misc_RNA (1)...(19): siRNA sense strand
gaaaugaacgucccauacc

SEQ ID NO: 808716 - RNA, 19 nt, Homo sapiens
  misc_RNA (1)...(19): siRNA sense strand
gcucccaguuucuauaugg

SEQ ID NO: 808717 - RNA, 19 nt, Homo sapiens
  misc_RNA (1)...(19): siRNA sense strand
gagcucaucuguccccaaa

SEQ ID NO: 808718 - RNA, 19 nt, Homo sapiens
  misc_RNA (1)...(19): siRNA sense strand
guuaaagcaguguauggua

SEQ ID NO: 808719 - RNA, 19 nt, Homo sapiens
  misc_RNA (1)...(19): siRNA sense strand
caucgagauugguaaagug

SEQ ID NO: 808720 - RNA, 19 nt, Homo sapiens
  misc_RNA (1)...(19): siRNA sense strand
aacagaaguuccuauaaca

SEQ ID NO: 808721 - RNA, 19 nt, Homo sapiens
  misc_RNA (1)...(19): siRNA sense strand
ggagaacaagcugaagaaa

SEQ ID NO: 808722 - RNA, 19 nt, Homo sapiens
  misc_RNA (1)...(19): siRNA sense strand
cagcagcagucuauuucug

SEQ ID NO: 808723 - RNA, 19 nt, Homo sapiens
  misc_RNA (1)...(19): siRNA sense strand
uggaaacuggccaacauua

SEQ ID NO: 808724 - RNA, 19 nt, Homo sapiens
  misc_RNA (1)...(19): siRNA sense strand
gcagaggacaauaacaaca

SEQ ID NO: 808725 - RNA, 19 nt, Homo sapiens
  misc_RNA (1)...(19): siRNA sense strand
gccacagucucccaggaaa

SEQ ID NO: 808726 - RNA, 19 nt, Homo sapiens
  misc_RNA (1)...(19): siRNA sense strand
cgaacucagagaaauguaa

SEQ ID NO: 808727 - RNA, 19 nt, Homo sapiens
  misc_RNA (1)...(19): siRNA sense strand
acaaagguguggcguaugc

SEQ ID NO: 808728 - RNA, 19 nt, Homo sapiens
  misc_RNA (1)...(19): siRNA sense strand
cagaugccaaugauaauga

SEQ ID NO: 808729 - RNA, 19 nt, Homo sapiens
  misc_RNA (1)...(19): siRNA sense strand
gaaacaccaaugccaaugg

SEQ ID NO: 808730 - RNA, 19 nt, Homo sapiens
  misc_RNA (1)...(19): siRNA sense strand
ggaaacaccaaugccaaug

SEQ ID NO: 808731 - RNA, 19 nt, Homo sapiens
  misc_RNA (1)...(19): siRNA sense strand
ucagccaccuucagaaagu

SEQ ID NO: 808732 - RNA, 19 nt, Homo sapiens
  misc_RNA (1)...(19): siRNA sense strand
cagauucguaaccaacuua

SEQ ID NO: 808733 - RNA, 19 nt, Homo sapiens
  misc_RNA (1)...(19): siRNA sense strand
agacaagugugaggagaug

SEQ ID NO: 808734 - RNA, 19 nt, Homo sapiens
  misc_RNA (1)...(19): siRNA sense strand
gcacuaaucugcaaucuaa

SEQ ID NO: 808735 - RNA, 19 nt, Homo sapiens
  misc_RNA (1)...(19): siRNA sense strand
gcaagcagccuaucaauua

SEQ ID NO: 808736 - RNA, 19 nt, Homo sapiens
  misc_RNA (1)...(19): siRNA sense strand
gaacagaccuuaccuaucu

SEQ ID NO: 808737 - RNA, 19 nt, Homo sapiens
  misc_RNA (1)...(19): siRNA sense strand
ugagagagcuuuacugauu

SEQ ID NO: 808738 - RNA, 19 nt, Homo sapiens
  misc_RNA (1)...(19): siRNA sense strand
gcaacuauguuauacagaa

SEQ ID NO: 808739 - RNA, 19 nt, Homo sapiens
  misc_RNA (1)...(19): siRNA sense strand
gaagaacuccaccaacaua

SEQ ID NO: 808740 - RNA, 19 nt, Homo sapiens
  misc_RNA (1)...(19): siRNA sense strand
ggaagcaguucuuugacua

SEQ ID NO: 808741 - RNA, 19 nt, Homo sapiens
  misc_RNA (1)...(19): siRNA sense strand
acuaauagcucccagagua

SEQ ID NO: 808742 - RNA, 19 nt, Homo sapiens
  misc_RNA (1)...(19): siRNA sense strand
acauauagcugguguauuc

SEQ ID NO: 808743 - RNA, 19 nt, Homo sapiens
  misc_RNA (1)...(19): siRNA sense strand
gaccuuaccuaucuuagaa

SEQ ID NO: 808744 - RNA, 19 nt, Homo sapiens
  misc_RNA (1)...(19): siRNA sense strand
ggaacaaguuggucuggaa

SEQ ID NO: 808745 - RNA, 19 nt, Homo sapiens
  misc_RNA (1)...(19): siRNA sense strand
ccagaguaguucuuuauuu

SEQ ID NO: 808746 - RNA, 19 nt, Homo sapiens
  misc_RNA (1)...(19): siRNA sense strand
cagcacaaauggucuguuu

SEQ ID NO: 808747 - RNA, 19 nt, Homo sapiens
  misc_RNA (1)...(19): siRNA sense strand
gaccucacauuacuacuuu

SEQ ID NO: 808748 - RNA, 19 nt, Homo sapiens
  misc_RNA (1)...(19): siRNA sense strand
gaaagauaaucaugcacaa

SEQ ID NO: 808749 - RNA, 19 nt, Homo sapiens
  misc_RNA (1)...(19): siRNA sense strand
aggcaaggcuucuccauuu

SEQ ID NO: 808750 - RNA, 19 nt, Homo sapiens
  misc_RNA (1)...(19): siRNA sense strand
caagcagccuaucaauuaa

SEQ ID NO: 808751 - RNA, 19 nt, Homo sapiens
  misc_RNA (1)...(19): siRNA sense strand
gagaugaugaugauucuaa

SEQ ID NO: 808752 - RNA, 19 nt, Homo sapiens
  misc_RNA (1)...(19): siRNA sense strand
gaugaugaauggagagaga

SEQ ID NO: 808753 - RNA, 19 nt, Homo sapiens
  misc_RNA (1)...(19): siRNA sense strand
ucaaaugugugaaagauca

SEQ ID NO: 808754 - RNA, 19 nt, Homo sapiens
  misc_RNA (1)...(19): siRNA sense strand
gcaugguucuagauucaua

SEQ ID NO: 808755 - RNA, 19 nt, Homo sapiens
  misc_RNA (1)...(19): siRNA sense strand
gcuaauaaaccacuuguug

SEQ ID NO: 808756 - RNA, 19 nt, Homo sapiens
  misc_RNA (1)...(19): siRNA sense strand
gaaacaaccgcuucccaaa

SEQ ID NO: 808757 - RNA, 19 nt, Homo sapiens
  misc_RNA (1)...(19): siRNA sense strand
gcaguucuuugacuaauag

SEQ ID NO: 808758 - RNA, 19 nt, Homo sapiens
  misc_RNA (1)...(19): siRNA sense strand
uagaagaacuccaccaaca

SEQ ID NO: 808759 - RNA, 19 nt, Homo sapiens
  misc_RNA (1)...(19): siRNA sense strand
ggauuugguucaucaguug

SEQ ID NO: 808760 - RNA, 19 nt, Homo sapiens
  misc_RNA (1)...(19): siRNA sense strand
gcaggucagcguccucuua

SEQ ID NO: 808761 - RNA, 19 nt, Homo sapiens
  misc_RNA (1)...(19): siRNA sense strand
gagagagcuuuacugauug

SEQ ID NO: 808762 - RNA, 19 nt, Homo sapiens
  misc_RNA (1)...(19): siRNA sense strand
ccuuauggcugcagaguaa

SEQ ID NO: 808763 - RNA, 19 nt, Homo sapiens
  misc_RNA (1)...(19): siRNA sense strand
ucacuacaguucaucauug

SEQ ID NO: 808764 - RNA, 19 nt, Homo sapiens
  misc_RNA (1)...(19): siRNA sense strand
gaaucuggaugccauggaa

SEQ ID NO: 808765 - RNA, 19 nt, Homo sapiens
  misc_RNA (1)...(19): siRNA sense strand
gacagaugguauuuaauga

SEQ ID NO: 808766 - RNA, 19 nt, Homo sapiens
  misc_RNA (1)...(19): siRNA sense strand
ugaaagaucagaauggaaa

SEQ ID NO: 808767 - RNA, 19 nt, Homo sapiens
  misc_RNA (1)...(19): siRNA sense strand
agacuugauuggacauaua

SEQ ID NO: 808768 - RNA, 19 nt, Homo sapiens
  misc_RNA (1)...(19): siRNA sense strand
gcucaaaugugugaaagau

SEQ ID NO: 808769 - RNA, 19 nt, Homo sapiens
  misc_RNA (1)...(19): siRNA sense strand
cgacagaugguauuuaaug

SEQ ID NO: 808770 - RNA, 19 nt, Homo sapiens
  misc_RNA (1)...(19): siRNA sense strand
gcagcaauaugcauuagca

SEQ ID NO: 808771 - RNA, 19 nt, Homo sapiens
  misc_RNA (1)...(19): siRNA sense strand
gagguuugcugccagaaug

SEQ ID NO: 808772 - RNA, 19 nt, Homo sapiens
  misc_RNA (1)...(19): siRNA sense strand
ggaacacggucgaccugaa

SEQ ID NO: 808773 - RNA, 19 nt, Homo sapiens
  misc_RNA (1)...(19): siRNA sense strand
gagcaugguagaauaugua

SEQ ID NO: 808774 - RNA, 19 nt, Homo sapiens
  misc_RNA (1)...(19): siRNA sense strand
ucagaggacuaaugcacua

SEQ ID NO: 808775 - RNA, 19 nt, Homo sapiens
  misc_RNA (1)...(19): siRNA sense strand
acaaggagaugaugaugau

SEQ ID NO: 808776 - RNA, 19 nt, Homo sapiens
  misc_RNA (1)...(19): siRNA sense strand
guaaucagguaccaaugga

SEQ ID NO: 808777 - RNA, 19 nt, Homo sapiens
  misc_RNA (1)...(19): siRNA sense strand
guacaucucuuggcuuugg

SEQ ID NO: 808778 - RNA, 19 nt, Homo sapiens
  misc_RNA (1)...(19): siRNA sense strand
gaaaccauguuguacaaaa

SEQ ID NO: 808779 - RNA, 19 nt, Homo sapiens
  misc_RNA (1)...(19): siRNA sense strand
cagcaugguucuagauuca

SEQ ID NO: 808780 - RNA, 19 nt, Homo sapiens
  misc_RNA (1)...(19): siRNA sense strand
uaaaccacuuguugaagaa

SEQ ID NO: 808781 - RNA, 19 nt, Homo sapiens
  misc_RNA (1)...(19): siRNA sense strand
ucagaaagcauuagaaucu

SEQ ID NO: 808782 - RNA, 19 nt, Homo sapiens
  misc_RNA (1)...(19): siRNA sense strand
gggcaaccauuuuacaaua

SEQ ID NO: 808783 - RNA, 19 nt, Homo sapiens
  misc_RNA (1)...(19): siRNA sense strand
caacagcagccaagcacua

SEQ ID NO: 808784 - RNA, 19 nt, Homo sapiens
  misc_RNA (1)...(19): siRNA sense strand
gccaggcuaucaaguacua

SEQ ID NO: 808785 - RNA, 19 nt, Homo sapiens
  misc_RNA (1)...(19): siRNA sense strand
aagauucgaccucacauua

SEQ ID NO: 808786 - RNA, 19 nt, Homo sapiens
  misc_RNA (1)...(19): siRNA sense strand
gcucagagaaagauaauca

SEQ ID NO: 808787 - RNA, 19 nt, Homo sapiens
  misc_RNA (1)...(19): siRNA sense strand
gcugagagagcuuuacuga

SEQ ID NO: 808788 - RNA, 19 nt, Homo sapiens
  misc_RNA (1)...(19): siRNA sense strand
gaagcaguucuuugacuaa

SEQ ID NO: 808789 - RNA, 19 nt, Homo sapiens
  misc_RNA (1)...(19): siRNA sense strand
ucaaugucccagccuauua

SEQ ID NO: 808790 - RNA, 19 nt, Homo sapiens
  misc_RNA (1)...(19): siRNA sense strand
agagugaaaugguaaagga

SEQ ID NO: 808791 - RNA, 19 nt, Homo sapiens
  misc_RNA (1)...(19): siRNA sense strand
gcucagcccucaguggauu

SEQ ID NO: 808792 - RNA, 19 nt, Homo sapiens
  misc_RNA (1)...(19): siRNA sense strand
guucuucuccugcugauaa

SEQ ID NO: 808793 - RNA, 19 nt, Homo sapiens
  misc_RNA (1)...(19): siRNA sense strand
caguauggcaauuauguua

SEQ ID NO: 808794 - RNA, 19 nt, Homo sapiens
  misc_RNA (1)...(19): siRNA sense strand
ggaucaguauggcaauuau

SEQ ID NO: 808795 - RNA, 19 nt, Homo sapiens
  misc_RNA (1)...(19): siRNA sense strand
gcaguagauuauuggaaga

SEQ ID NO: 808796 - RNA, 19 nt, Homo sapiens
  misc_RNA (1)...(19): siRNA sense strand
ggaacugcaaguagccuua

SEQ ID NO: 808797 - RNA, 19 nt, Homo sapiens
  misc_RNA (1)...(19): siRNA sense strand
caacuuauuucagcagcaa

SEQ ID NO: 808798 - RNA, 19 nt, Homo sapiens
  misc_RNA (1)...(19): siRNA sense strand
auaaaccacuuguugaaga

SEQ ID NO: 808799 - RNA, 19 nt, Homo sapiens
  misc_RNA (1)...(19): siRNA sense strand
ggacaggguuuucauggaa

SEQ ID NO: 808800 - RNA, 19 nt, Homo sapiens
  misc_RNA (1)...(19): siRNA sense strand
ggaccaguaugccaauuac

SEQ ID NO: 808801 - RNA, 19 nt, Homo sapiens
  misc_RNA (1)...(19): siRNA sense strand
ugaucagacuggugccuua

SEQ ID NO: 808802 - RNA, 19 nt, Homo sapiens
  misc_RNA (1)...(19): siRNA sense strand
uaacacagccagucagcaa

SEQ ID NO: 808803 - RNA, 19 nt, Homo sapiens
  misc_RNA (1)...(19): siRNA sense strand
gcaaggcuucuccauuuga

SEQ ID NO: 808804 - RNA, 19 nt, Homo sapiens
  misc_RNA (1)...(19): siRNA sense strand
uggaaacagugaaguaaau

SEQ ID NO: 808805 - RNA, 19 nt, Homo sapiens
  misc_RNA (1)...(19): siRNA sense strand
gaagaucuggacaggguuu

SEQ ID NO: 808806 - RNA, 19 nt, Homo sapiens
  misc_RNA (1)...(19): siRNA sense strand
ccaauuacgugguucaaaa

SEQ ID NO: 808807 - RNA, 19 nt, Homo sapiens
  misc_RNA (1)...(19): siRNA sense strand
ggagcuggauggucaugug

SEQ ID NO: 808808 - RNA, 19 nt, Homo sapiens
  misc_RNA (1)...(19): siRNA sense strand
ccagcagagugaaauggua

SEQ ID NO: 808809 - RNA, 19 nt, Homo sapiens
  misc_RNA (1)...(19): siRNA sense strand
ggaugccgauugcaaagau

SEQ ID NO: 808810 - RNA, 19 nt, Homo sapiens
  misc_RNA (1)...(19): siRNA sense strand
gaauagcccggaccuagga

SEQ ID NO: 808811 - RNA, 19 nt, Homo sapiens
  misc_RNA (1)...(19): siRNA sense strand
gaaugaugguccucacagu

SEQ ID NO: 808812 - RNA, 19 nt, Homo sapiens
  misc_RNA (1)...(19): siRNA sense strand
gcuuucaacucauccuuau

SEQ ID NO: 808813 - RNA, 19 nt, Homo sapiens
  misc_RNA (1)...(19): siRNA sense strand
gguauaauaggucugauau

SEQ ID NO: 808814 - RNA, 19 nt, Homo sapiens
  misc_RNA (1)...(19): siRNA sense strand
gcagcaagcagaaucacuu

SEQ ID NO: 808815 - RNA, 19 nt, Homo sapiens
  misc_RNA (1)...(19): siRNA sense strand
guauccagccaacuuauuu

SEQ ID NO: 808816 - RNA, 19 nt, Homo sapiens
  misc_RNA (1)...(19): siRNA sense strand
cuaauaaaccacuuguuga

SEQ ID NO: 808817 - RNA, 19 nt, Homo sapiens
  misc_RNA (1)...(19): siRNA sense strand
gcagaacagaccuuaccua

SEQ ID NO: 808818 - RNA, 19 nt, Homo sapiens
  misc_RNA (1)...(19): siRNA sense strand
uaggaggacugacaaaugg

SEQ ID NO: 808819 - RNA, 19 nt, Homo sapiens
  misc_RNA (1)...(19): siRNA sense strand
aaguacaucucuuggcuuu

SEQ ID NO: 808820 - RNA, 19 nt, Homo sapiens
  misc_RNA (1)...(19): siRNA sense strand
caaauaacacagccaguca

SEQ ID NO: 808821 - RNA, 19 nt, Homo sapiens
  misc_RNA (1)...(19): siRNA sense strand
gcacuaacaguucaacagu

SEQ ID NO: 808822 - RNA, 19 nt, Homo sapiens
  misc_RNA (1)...(19): siRNA sense strand
cacuagagaugcugaaaca

SEQ ID NO: 808823 - RNA, 19 nt, Homo sapiens
  misc_RNA (1)...(19): siRNA sense strand
agagaaagauaaucaugca

SEQ ID NO: 808824 - RNA, 19 nt, Homo sapiens
  misc_RNA (1)...(19): siRNA sense strand
ucaagcacuuccagucuau

SEQ ID NO: 808825 - RNA, 19 nt, Homo sapiens
  misc_RNA (1)...(19): siRNA sense strand
ggaggacugacaaauggua

SEQ ID NO: 808826 - RNA, 19 nt, Homo sapiens
  misc_RNA (1)...(19): siRNA sense strand
uauggaagcaguucuuuga

SEQ ID NO: 808827 - RNA, 19 nt, Homo sapiens
  misc_RNA (1)...(19): siRNA sense strand
gccaagcacuaaucugcaa

SEQ ID NO: 808828 - RNA, 19 nt, Homo sapiens
  misc_RNA (1)...(19): siRNA sense strand
cagcucaacagcagcaaua

SEQ ID NO: 808829 - RNA, 19 nt, Homo sapiens
  misc_RNA (1)...(19): siRNA sense strand
gaauggaugccgauugcaa

SEQ ID NO: 808830 - RNA, 19 nt, Homo sapiens
  misc_RNA (1)...(19): siRNA sense strand
ggcaaggcuucuccauuug

SEQ ID NO: 808831 - RNA, 19 nt, Homo sapiens
  misc_RNA (1)...(19): siRNA sense strand
uggaaaccauguuguacaa

SEQ ID NO: 808832 - RNA, 19 nt, Homo sapiens
  misc_RNA (1)...(19): siRNA sense strand
gagcgacagaugguauuua

SEQ ID NO: 808833 - RNA, 19 nt, Homo sapiens
  misc_RNA (1)...(19): siRNA sense strand
ggacuaaugcacuaacagu

SEQ ID NO: 808834 - RNA, 19 nt, Homo sapiens
  misc_RNA (1)...(19): siRNA sense strand
ggacauuucuagaacauuu

SEQ ID NO: 808835 - RNA, 19 nt, Homo sapiens
  misc_RNA (1)...(19): siRNA sense strand
ccagauaucuaccuaauug

SEQ ID NO: 808836 - RNA, 19 nt, Homo sapiens
  misc_RNA (1)...(19): siRNA sense strand
gaacuuagauacugcagau

SEQ ID NO: 808837 - RNA, 19 nt, Homo sapiens
  misc_RNA (1)...(19): siRNA sense strand
gaacagagcgugcgcaaau

SEQ ID NO: 808838 - RNA, 19 nt, Homo sapiens
  misc_RNA (1)...(19): siRNA sense strand
gaauaaacccugucaaaug

SEQ ID NO: 808839 - RNA, 19 nt, Homo sapiens
  misc_RNA (1)...(19): siRNA sense strand
ggaacuugcuugcuagaaa

SEQ ID NO: 808840 - RNA, 19 nt, Homo sapiens
  misc_RNA (1)...(19): siRNA sense strand
gaaacaauguggugcucua

SEQ ID NO: 808841 - RNA, 19 nt, Homo sapiens
  misc_RNA (1)...(19): siRNA sense strand
gaaggaauaugaagacaag

SEQ ID NO: 808842 - RNA, 19 nt, Homo sapiens
  misc_RNA (1)...(19): siRNA sense strand
gaacgaagaugcugguuuu

SEQ ID NO: 808843 - RNA, 19 nt, Homo sapiens
  misc_RNA (1)...(19): siRNA sense strand
cagcaaaucucccagcaaa

SEQ ID NO: 808844 - RNA, 19 nt, Homo sapiens
  misc_RNA (1)...(19): siRNA sense strand
caaggaaacccguggcuua

SEQ ID NO: 808845 - RNA, 19 nt, Homo sapiens
  misc_RNA (1)...(19): siRNA sense strand
gaauacagaaggaauauga

SEQ ID NO: 808846 - RNA, 19 nt, Homo sapiens
  misc_RNA (1)...(19): siRNA sense strand
ggaagaagcagcuggaaga

SEQ ID NO: 808847 - RNA, 19 nt, Homo sapiens
  misc_RNA (1)...(19): siRNA sense strand
caaccuaacuccagauauc

SEQ ID NO: 808848 - RNA, 19 nt, Homo sapiens
  misc_RNA (1)...(19): siRNA sense strand
ccagaaggauucaaagaga

SEQ ID NO: 808849 - RNA, 19 nt, Homo sapiens
  misc_RNA (1)...(19): siRNA sense strand
gauuggaucuuuaccuuau

SEQ ID NO: 808850 - RNA, 19 nt, Homo sapiens
  misc_RNA (1)...(19): siRNA sense strand
gcgcaaauccuccacguuu

SEQ ID NO: 808851 - RNA, 19 nt, Homo sapiens
  misc_RNA (1)...(19): siRNA sense strand
ggccuuauguugacuuauu

SEQ ID NO: 808852 - RNA, 19 nt, Homo sapiens
  misc_RNA (1)...(19): siRNA sense strand
gaagugggcucagguacug

SEQ ID NO: 808853 - RNA, 19 nt, Homo sapiens
  misc_RNA (1)...(19): siRNA sense strand
gcaggacuguguucaugaa

SEQ ID NO: 808854 - RNA, 19 nt, Homo sapiens
  misc_RNA (1)...(19): siRNA sense strand
caaagagaauacagaagga

SEQ ID NO: 808855 - RNA, 19 nt, Homo sapiens
  misc_RNA (1)...(19): siRNA sense strand
gaccauggccuuauguuga

SEQ ID NO: 808856 - RNA, 19 nt, Homo sapiens
  misc_RNA (1)...(19): siRNA sense strand
gacgaugacccacaguuua

SEQ ID NO: 808857 - RNA, 19 nt, Homo sapiens
  misc_RNA (1)...(19): siRNA sense strand
gugcucaccuggaauaaug

SEQ ID NO: 808858 - RNA, 19 nt, Homo sapiens
  misc_RNA (1)...(19): siRNA sense strand
ccagcaaggugguccauau

SEQ ID NO: 808859 - RNA, 19 nt, Homo sapiens
  misc_RNA (1)...(19): siRNA sense strand
gcaaugaggacaucuugga

SEQ ID NO: 808860 - RNA, 19 nt, Homo sapiens
  misc_RNA (1)...(19): siRNA sense strand
aauaaacccugucaaaugg

SEQ ID NO: 808861 - RNA, 19 nt, Homo sapiens
  misc_RNA (1)...(19): siRNA sense strand
gcucugaaguggagaacga

SEQ ID NO: 808862 - RNA, 19 nt, Homo sapiens
  misc_RNA (1)...(19): siRNA sense strand
gcagcaguguugaucuuga

SEQ ID NO: 808863 - RNA, 19 nt, Homo sapiens
  misc_RNA (1)...(19): siRNA sense strand
gaacuugcuugcuagaaaa

SEQ ID NO: 808864 - RNA, 19 nt, Homo sapiens
  misc_RNA (1)...(19): siRNA sense strand
agaagcagcuggaagaaag

SEQ ID NO: 808865 - RNA, 19 nt, Homo sapiens
  misc_RNA (1)...(19): siRNA sense strand
cagaaggauucaaagagaa

SEQ ID NO: 808866 - RNA, 19 nt, Homo sapiens
  misc_RNA (1)...(19): siRNA sense strand
ggcaacgaguuaaauauca

SEQ ID NO: 808867 - RNA, 19 nt, Homo sapiens
  misc_RNA (1)...(19): siRNA sense strand
gaaacucagggcuuuagaa

SEQ ID NO: 808868 - RNA, 19 nt, Homo sapiens
  misc_RNA (1)...(19): siRNA sense strand
ugacaaacacaaugacuug

SEQ ID NO: 808869 - RNA, 19 nt, Homo sapiens
  misc_RNA (1)...(19): siRNA sense strand
ccuaauugauuggaucuuu

SEQ ID NO: 808870 - RNA, 19 nt, Homo sapiens
  misc_RNA (1)...(19): siRNA sense strand
gagaaugcccagaaggauu

SEQ ID NO: 808871 - RNA, 19 nt, Homo sapiens
  misc_RNA (1)...(19): siRNA sense strand
gagagaaugcccagaagga

SEQ ID NO: 808872 - RNA, 19 nt, Homo sapiens
  misc_RNA (1)...(19): siRNA sense strand
gaccuggccugucguaucu

SEQ ID NO: 808873 - RNA, 19 nt, Homo sapiens
  misc_RNA (1)...(19): siRNA sense strand
gcaaggugguccauaucau

SEQ ID NO: 808874 - RNA, 19 nt, Homo sapiens
  misc_RNA (1)...(19): siRNA sense strand
aaacuggacauuucuagaa

SEQ ID NO: 808875 - RNA, 19 nt, Homo sapiens
  misc_RNA (1)...(19): siRNA sense strand
acaauguggugcucuagaa

SEQ ID NO: 808876 - RNA, 19 nt, Homo sapiens
  misc_RNA (1)...(19): siRNA sense strand
aaugagaucuuaccuaacu

SEQ ID NO: 808877 - RNA, 19 nt, Homo sapiens
  misc_RNA (1)...(19): siRNA sense strand
caaagcagaaugugaggaa

SEQ ID NO: 808878 - RNA, 19 nt, Homo sapiens
  misc_RNA (1)...(19): siRNA sense strand
gaaagacagccgggaaaug

SEQ ID NO: 808879 - RNA, 19 nt, Homo sapiens
  misc_RNA (1)...(19): siRNA sense strand
ucuagaacauuuccuaauc

SEQ ID NO: 808880 - RNA, 19 nt, Homo sapiens
  misc_RNA (1)...(19): siRNA sense strand
ggcaaagucuggagcuuag

SEQ ID NO: 808881 - RNA, 19 nt, Homo sapiens
  misc_RNA (1)...(19): siRNA sense strand
cagcaggacuguguucaug

SEQ ID NO: 808882 - RNA, 19 nt, Homo sapiens
  misc_RNA (1)...(19): siRNA sense strand
gagagguggcggucccuua

SEQ ID NO: 808883 - RNA, 19 nt, Homo sapiens
  misc_RNA (1)...(19): siRNA sense strand
gcacagacagcaguaugaa

SEQ ID NO: 808884 - RNA, 19 nt, Homo sapiens
  misc_RNA (1)...(19): siRNA sense strand
ggacagaccagcaaaucuc

SEQ ID NO: 808885 - RNA, 19 nt, Homo sapiens
  misc_RNA (1)...(19): siRNA sense strand
gcaagccacccucuccaaa

SEQ ID NO: 808886 - RNA, 19 nt, Homo sapiens
  misc_RNA (1)...(19): siRNA sense strand
ggccagauguggguuaugu

SEQ ID NO: 808887 - RNA, 19 nt, Homo sapiens
  misc_RNA (1)...(19): siRNA sense strand
gagaauacagaaggaauau

SEQ ID NO: 808888 - RNA, 19 nt, Homo sapiens
  misc_RNA (1)...(19): siRNA sense strand
gaagaagcagcuggaagaa

SEQ ID NO: 808889 - RNA, 19 nt, Homo sapiens
  misc_RNA (1)...(19): siRNA sense strand
caagaagugggcucaggua

SEQ ID NO: 808890 - RNA, 19 nt, Homo sapiens
  misc_RNA (1)...(19): siRNA sense strand
cagcaguguugaucuugaa

SEQ ID NO: 808891 - RNA, 19 nt, Homo sapiens
  misc_RNA (1)...(19): siRNA sense strand
cuucauagcagcaguguug

SEQ ID NO: 808892 - RNA, 19 nt, Homo sapiens
  misc_RNA (1)...(19): siRNA sense strand
gccauuuaguaacuucuuu

SEQ ID NO: 808893 - RNA, 19 nt, Homo sapiens
  misc_RNA (1)...(19): siRNA sense strand
ugaccaagauggacuucau

SEQ ID NO: 808894 - RNA, 19 nt, Homo sapiens
  misc_RNA (1)...(19): siRNA sense strand
ggaccauggccuuauguug

SEQ ID NO: 808895 - RNA, 19 nt, Homo sapiens
  misc_RNA (1)...(19): siRNA sense strand
gcugugcucaccuggaaua

SEQ ID NO: 808896 - RNA, 19 nt, Homo sapiens
  misc_RNA (1)...(19): siRNA sense strand
aagauggacuucauucaca

SEQ ID NO: 808897 - RNA, 19 nt, Homo sapiens
  misc_RNA (1)...(19): siRNA sense strand
ugaauaaacccugucaaau

SEQ ID NO: 808898 - RNA, 19 nt, Homo sapiens
  misc_RNA (1)...(19): siRNA sense strand
uagcagcaguguugaucuu

SEQ ID NO: 808899 - RNA, 19 nt, Homo sapiens
  misc_RNA (1)...(19): siRNA sense strand
gggcauguccuucauagca

SEQ ID NO: 808900 - RNA, 19 nt, Homo sapiens
  misc_RNA (1)...(19): siRNA sense strand
uuaccuaacugggaaacaa

SEQ ID NO: 808901 - RNA, 19 nt, Homo sapiens
  misc_RNA (1)...(19): siRNA sense strand
gccuuauguugacuuauuu

SEQ ID NO: 808902 - RNA, 19 nt, Homo sapiens
  misc_RNA (1)...(19): siRNA sense strand
guguugaucuugaacuuag

SEQ ID NO: 808903 - RNA, 19 nt, Homo sapiens
  misc_RNA (1)...(19): siRNA sense strand
ugacgaugacccacaguuu

SEQ ID NO: 808904 - RNA, 19 nt, Homo sapiens
  misc_RNA (1)...(19): siRNA sense strand
agacagcaguaugaagaaa

SEQ ID NO: 808905 - RNA, 19 nt, Homo sapiens
  misc_RNA (1)...(19): siRNA sense strand
agagaauacagaaggaaua

SEQ ID NO: 808906 - RNA, 19 nt, Homo sapiens
  misc_RNA (1)...(19): siRNA sense strand
ggacuguguucaugaagcu

SEQ ID NO: 808907 - RNA, 19 nt, Homo sapiens
  misc_RNA (1)...(19): siRNA sense strand
ggaaacccguggcuuacac

SEQ ID NO: 808908 - RNA, 19 nt, Homo sapiens
  misc_RNA (1)...(19): siRNA sense strand
cugaauaaacccugucaaa

SEQ ID NO: 808909 - RNA, 19 nt, Homo sapiens
  misc_RNA (1)...(19): siRNA sense strand
cuagaacauuuccuaaucu

SEQ ID NO: 808910 - RNA, 19 nt, Homo sapiens
  misc_RNA (1)...(19): siRNA sense strand
acagacagcaguaugaaga

SEQ ID NO: 808911 - RNA, 19 nt, Homo sapiens
  misc_RNA (1)...(19): siRNA sense strand
ggaaucccuccaaguguga

SEQ ID NO: 808912 - RNA, 19 nt, Homo sapiens
  misc_RNA (1)...(19): siRNA sense strand
acagcaguaugaagaaaug

SEQ ID NO: 808913 - RNA, 19 nt, Homo sapiens
  misc_RNA (1)...(19): siRNA sense strand
gaaccugcaacacgucaau

SEQ ID NO: 808914 - RNA, 19 nt, Homo sapiens
  misc_RNA (1)...(19): siRNA sense strand
caaggugguccauaucaug

SEQ ID NO: 808915 - RNA, 19 nt, Homo sapiens
  misc_RNA (1)...(19): siRNA sense strand
gucuggagcuuauuaaacu

SEQ ID NO: 808916 - RNA, 19 nt, Homo sapiens
  misc_RNA (1)...(19): siRNA sense strand
guaacuucuuugcaaggaa

SEQ ID NO: 808917 - RNA, 19 nt, Homo sapiens
  misc_RNA (1)...(19): siRNA sense strand
gcacaggaggcucugaagu

SEQ ID NO: 808918 - RNA, 19 nt, Homo sapiens
  misc_RNA (1)...(19): siRNA sense strand
gcaacgaguuaaauaucac

SEQ ID NO: 808919 - RNA, 19 nt, Homo sapiens
  misc_RNA (1)...(19): siRNA sense strand
acucagggcuuuagaagac

SEQ ID NO: 808920 - RNA, 19 nt, Homo sapiens
  misc_RNA (1)...(19): siRNA sense strand
cacaaugacuugggaugga

SEQ ID NO: 808921 - RNA, 19 nt, Homo sapiens
  misc_RNA (1)...(19): siRNA sense strand
cagaaagacagccgggaaa

SEQ ID NO: 808922 - RNA, 19 nt, Homo sapiens
  misc_RNA (1)...(19): siRNA sense strand
gcauuugaaguauucuuug

SEQ ID NO: 808923 - RNA, 19 nt, Homo sapiens
  misc_RNA (1)...(19): siRNA sense strand
gacauguugcacaguauuu

SEQ ID NO: 808924 - RNA, 19 nt, Homo sapiens
  misc_RNA (1)...(19): siRNA sense strand
acaaugacuugggauggaa

SEQ ID NO: 808925 - RNA, 19 nt, Homo sapiens
  misc_RNA (1)...(19): siRNA sense strand
augcagagccgaaacaaga

SEQ ID NO: 808926 - RNA, 19 nt, Homo sapiens
  misc_RNA (1)...(19): siRNA sense strand
gucuggagcuuagccauug

SEQ ID NO: 808927 - RNA, 19 nt, Homo sapiens
  misc_RNA (1)...(19): siRNA sense strand
cuggaauaaugagaucuua

SEQ ID NO: 808928 - RNA, 19 nt, Homo sapiens
  misc_RNA (1)...(19): siRNA sense strand
ggaggggaguaaauugaaa

SEQ ID NO: 808929 - RNA, 19 nt, Homo sapiens
  misc_RNA (1)...(19): siRNA sense strand
gaacaaccuaacuccagau

SEQ ID NO: 808930 - RNA, 19 nt, Homo sapiens
  misc_RNA (1)...(19): siRNA sense strand
cuagaaaaguucgagauuu

SEQ ID NO: 808931 - RNA, 19 nt, Homo sapiens
  misc_RNA (1)...(19): siRNA sense strand
gaggacagaccagcaaauc

SEQ ID NO: 808932 - RNA, 19 nt, Homo sapiens
  misc_RNA (1)...(19): siRNA sense strand
ggacaucuuggaccuugug

SEQ ID NO: 808933 - RNA, 19 nt, Homo sapiens
  misc_RNA (1)...(19): siRNA sense strand
aaagacagccgggaaaugg

SEQ ID NO: 808934 - RNA, 19 nt, Homo sapiens
  misc_RNA (1)...(19): siRNA sense strand
ggacaaagauugaagaaug

SEQ ID NO: 808935 - RNA, 19 nt, Homo sapiens
  misc_RNA (1)...(19): siRNA sense strand
gaagaaagaugaugguuau

SEQ ID NO: 808936 - RNA, 19 nt, Homo sapiens
  misc_RNA (1)...(19): siRNA sense strand
ggauaaagauggugauaga

SEQ ID NO: 808937 - RNA, 19 nt, Homo sapiens
  misc_RNA (1)...(19): siRNA sense strand
agaaaugccucaucuguaa

SEQ ID NO: 808938 - RNA, 19 nt, Homo sapiens
  misc_RNA (1)...(19): siRNA sense strand
gggcaugucugaucugaaa

SEQ ID NO: 808939 - RNA, 19 nt, Homo sapiens
  misc_RNA (1)...(19): siRNA sense strand
gaccugagcauucgaaaua

SEQ ID NO: 808940 - RNA, 19 nt, Homo sapiens
  misc_RNA (1)...(19): siRNA sense strand
ugaaggcgcuguuauagaa

SEQ ID NO: 808941 - RNA, 19 nt, Homo sapiens
  misc_RNA (1)...(19): siRNA sense strand
ugaccucaaugaagaauua

SEQ ID NO: 808942 - RNA, 19 nt, Homo sapiens
  misc_RNA (1)...(19): siRNA sense strand
gaacugugcuaaccugaug

SEQ ID NO: 808943 - RNA, 19 nt, Homo sapiens
  misc_RNA (1)...(19): siRNA sense strand
gcagauuggugaccuggua

SEQ ID NO: 808944 - RNA, 19 nt, Homo sapiens
  misc_RNA (1)...(19): siRNA sense strand
gaagagugccuuucauuau

SEQ ID NO: 808945 - RNA, 19 nt, Homo sapiens
  misc_RNA (1)...(19): siRNA sense strand
gaccauggauuguggauga

SEQ ID NO: 808946 - RNA, 19 nt, Homo sapiens
  misc_RNA (1)...(19): siRNA sense strand
gaaacgugaugauauccua

SEQ ID NO: 808947 - RNA, 19 nt, Homo sapiens
  misc_RNA (1)...(19): siRNA sense strand
caauaaaggucaucuucaa

SEQ ID NO: 808948 - RNA, 19 nt, Homo sapiens
  misc_RNA (1)...(19): siRNA sense strand
gcucagauaugaagagaga

SEQ ID NO: 808949 - RNA, 19 nt, Homo sapiens
  misc_RNA (1)...(19): siRNA sense strand
gguaugcucugacaagaaa

SEQ ID NO: 808950 - RNA, 19 nt, Homo sapiens
  misc_RNA (1)...(19): siRNA sense strand
ggacaaggauaauaccaau

SEQ ID NO: 808951 - RNA, 19 nt, Homo sapiens
  misc_RNA (1)...(19): siRNA sense strand
cagcauacccagauuguua

SEQ ID NO: 808952 - RNA, 19 nt, Homo sapiens
  misc_RNA (1)...(19): siRNA sense strand
gaccagauguggauguaaa

SEQ ID NO: 808953 - RNA, 19 nt, Homo sapiens
  misc_RNA (1)...(19): siRNA sense strand
cgacagacaccacuucaua

SEQ ID NO: 808954 - RNA, 19 nt, Homo sapiens
  misc_RNA (1)...(19): siRNA sense strand
caauggagauguugcuaaa

SEQ ID NO: 808955 - RNA, 19 nt, Homo sapiens
  misc_RNA (1)...(19): siRNA sense strand
agaaguggcugaacuguug

SEQ ID NO: 808956 - RNA, 19 nt, Homo sapiens
  misc_RNA (1)...(19): siRNA sense strand
cagcaucuauugccuguuu

SEQ ID NO: 808957 - RNA, 19 nt, Homo sapiens
  misc_RNA (1)...(19): siRNA sense strand
gugcagaguguacaaauua

SEQ ID NO: 808958 - RNA, 19 nt, Homo sapiens
  misc_RNA (1)...(19): siRNA sense strand
gaacgaagagugccuuuca

SEQ ID NO: 808959 - RNA, 19 nt, Homo sapiens
  misc_RNA (1)...(19): siRNA sense strand
uaagaaacgugaugauauc

SEQ ID NO: 808960 - RNA, 19 nt, Homo sapiens
  misc_RNA (1)...(19): siRNA sense strand
gaagaugccacugaugaua

SEQ ID NO: 808961 - RNA, 19 nt, Homo sapiens
  misc_RNA (1)...(19): siRNA sense strand
caaugcaucuggugaaaga

SEQ ID NO: 808962 - RNA, 19 nt, Homo sapiens
  misc_RNA (1)...(19): siRNA sense strand
gaagaagagugcagcaucu

SEQ ID NO: 808963 - RNA, 19 nt, Homo sapiens
  misc_RNA (1)...(19): siRNA sense strand
guaagaaacgugaugauau

SEQ ID NO: 808964 - RNA, 19 nt, Homo sapiens
  misc_RNA (1)...(19): siRNA sense strand
caagggagguucuuucuac

SEQ ID NO: 808965 - RNA, 19 nt, Homo sapiens
  misc_RNA (1)...(19): siRNA sense strand
gaaagaugaugguuauacu

SEQ ID NO: 808966 - RNA, 19 nt, Homo sapiens
  misc_RNA (1)...(19): siRNA sense strand
gcauauguccucugggaua

SEQ ID NO: 808967 - RNA, 19 nt, Homo sapiens
  misc_RNA (1)...(19): siRNA sense strand
cgaagagugccuuucauua

SEQ ID NO: 808968 - RNA, 19 nt, Homo sapiens
  misc_RNA (1)...(19): siRNA sense strand
caacagauuuauucagaca

SEQ ID NO: 808969 - RNA, 19 nt, Homo sapiens
  misc_RNA (1)...(19): siRNA sense strand
ggaacgaauuaaacuucua

SEQ ID NO: 808970 - RNA, 19 nt, Homo sapiens
  misc_RNA (1)...(19): siRNA sense strand
gugccaagcuugauauuca

SEQ ID NO: 808971 - RNA, 19 nt, Homo sapiens
  misc_RNA (1)...(19): siRNA sense strand
cuaagaaccuuuacagagu

SEQ ID NO: 808972 - RNA, 19 nt, Homo sapiens
  misc_RNA (1)...(19): siRNA sense strand
gacaaagauugaagaaugu

SEQ ID NO: 808973 - RNA, 19 nt, Homo sapiens
  misc_RNA (1)...(19): siRNA sense strand
gaagagugcagcaucuauu

SEQ ID NO: 808974 - RNA, 19 nt, Homo sapiens
  misc_RNA (1)...(19): siRNA sense strand
ucucacaacuccugaagaa

SEQ ID NO: 808975 - RNA, 19 nt, Homo sapiens
  misc_RNA (1)...(19): siRNA sense strand
uaaaggucaucuucaaguu

SEQ ID NO: 808976 - RNA, 19 nt, Homo sapiens
  misc_RNA (1)...(19): siRNA sense strand
uagaucgucugaagaauau

SEQ ID NO: 808977 - RNA, 19 nt, Homo sapiens
  misc_RNA (1)...(19): siRNA sense strand
guuagagucucguaggaaa

SEQ ID NO: 808978 - RNA, 19 nt, Homo sapiens
  misc_RNA (1)...(19): siRNA sense strand
gaacaucuuggacauacaa

SEQ ID NO: 808979 - RNA, 19 nt, Homo sapiens
  misc_RNA (1)...(19): siRNA sense strand
uaagaaccuuuacagaguu

SEQ ID NO: 808980 - RNA, 19 nt, Homo sapiens
  misc_RNA (1)...(19): siRNA sense strand
gaagugagaggguucuguu

SEQ ID NO: 808981 - RNA, 19 nt, Homo sapiens
  misc_RNA (1)...(19): siRNA sense strand
cggaguccuucuaugauua

SEQ ID NO: 808982 - RNA, 19 nt, Homo sapiens
  misc_RNA (1)...(19): siRNA sense strand
gaaguacuacaucgaggua

SEQ ID NO: 808983 - RNA, 19 nt, Homo sapiens
  misc_RNA (1)...(19): siRNA sense strand
guuaugaccuggaacgaau

SEQ ID NO: 808984 - RNA, 19 nt, Homo sapiens
  misc_RNA (1)...(19): siRNA sense strand
ugaagaucaugacauugua

SEQ ID NO: 808985 - RNA, 19 nt, Homo sapiens
  misc_RNA (1)...(19): siRNA sense strand
cguaggaaaucuaagaaga

SEQ ID NO: 808986 - RNA, 19 nt, Homo sapiens
  misc_RNA (1)...(19): siRNA sense strand
caagaaaugccucaucugu

SEQ ID NO: 808987 - RNA, 19 nt, Homo sapiens
  misc_RNA (1)...(19): siRNA sense strand
guccuucuaugauuaguaa

SEQ ID NO: 808988 - RNA, 19 nt, Homo sapiens
  misc_RNA (1)...(19): siRNA sense strand
ggcaaagugucauaaggaa

SEQ ID NO: 808989 - RNA, 19 nt, Homo sapiens
  misc_RNA (1)...(19): siRNA sense strand
gaaauaagaagggucaauc

SEQ ID NO: 808990 - RNA, 19 nt, Homo sapiens
  misc_RNA (1)...(19): siRNA sense strand
gcaagcugcuagucagaau

SEQ ID NO: 808991 - RNA, 19 nt, Homo sapiens
  misc_RNA (1)...(19): siRNA sense strand
ggauguaaaugggcaaugu

SEQ ID NO: 808992 - RNA, 19 nt, Homo sapiens
  misc_RNA (1)...(19): siRNA sense strand
ugucugaucugaaaugugu

SEQ ID NO: 808993 - RNA, 19 nt, Homo sapiens
  misc_RNA (1)...(19): siRNA sense strand
ggacugauggaauguuuga

SEQ ID NO: 808994 - RNA, 19 nt, Homo sapiens
  misc_RNA (1)...(19): siRNA sense strand
gggagguucuuucuacaga

SEQ ID NO: 808995 - RNA, 19 nt, Homo sapiens
  misc_RNA (1)...(19): siRNA sense strand
gagugaauguccuaucugu

SEQ ID NO: 808996 - RNA, 19 nt, Homo sapiens
  misc_RNA (1)...(19): siRNA sense strand
cagaagaugccacugauga

SEQ ID NO: 808997 - RNA, 19 nt, Homo sapiens
  misc_RNA (1)...(19): siRNA sense strand
gggauacuccuuugcauga

SEQ ID NO: 808998 - RNA, 19 nt, Homo sapiens
  misc_RNA (1)...(19): siRNA sense strand
gaagcuggagcagauguua

SEQ ID NO: 808999 - RNA, 19 nt, Homo sapiens
  misc_RNA (1)...(19): siRNA sense strand
uugcuaaaguggaagauuu

SEQ ID NO: 809000 - RNA, 19 nt, Homo sapiens
  misc_RNA (1)...(19): siRNA sense strand
agaagaaagaugaugguua

SEQ ID NO: 809001 - RNA, 19 nt, Homo sapiens
  misc_RNA (1)...(19): siRNA sense strand
gaugauauccuagcaguuc

SEQ ID NO: 809002 - RNA, 19 nt, Homo sapiens
  misc_RNA (1)...(19): siRNA sense strand
aaacguggaugucgaagca

SEQ ID NO: 809003 - RNA, 19 nt, Homo sapiens
  misc_RNA (1)...(19): siRNA sense strand
ucacaacuccugaagaaau

SEQ ID NO: 809004 - RNA, 19 nt, Homo sapiens
  misc_RNA (1)...(19): siRNA sense strand
gauugaagaauguguggua

SEQ ID NO: 809005 - RNA, 19 nt, Homo sapiens
  misc_RNA (1)...(19): siRNA sense strand
uguauggugugcucagaua

SEQ ID NO: 809006 - RNA, 19 nt, Homo sapiens
  misc_RNA (1)...(19): siRNA sense strand
gauuguggaugagaagaaa

SEQ ID NO: 809007 - RNA, 19 nt, Homo sapiens
  misc_RNA (1)...(19): siRNA sense strand
ggagaugaaggcgcuguua

SEQ ID NO: 809008 - RNA, 19 nt, Homo sapiens
  misc_RNA (1)...(19): siRNA sense strand
gugagaggguucuguuaga

SEQ ID NO: 809009 - RNA, 19 nt, Homo sapiens
  misc_RNA (1)...(19): siRNA sense strand
cacaacuccugaagaaauu

SEQ ID NO: 809010 - RNA, 19 nt, Homo sapiens
  misc_RNA (1)...(19): siRNA sense strand
ggaaguuuguggaacaucu

SEQ ID NO: 809011 - RNA, 19 nt, Homo sapiens
  misc_RNA (1)...(19): siRNA sense strand
caacaguuacaagacauua

SEQ ID NO: 809012 - RNA, 19 nt, Homo sapiens
  misc_RNA (1)...(19): siRNA sense strand
gcaggugccaagcuugaua

SEQ ID NO: 809013 - RNA, 19 nt, Homo sapiens
  misc_RNA (1)...(19): siRNA sense strand
uggcugcccuuaauaauca

SEQ ID NO: 809014 - RNA, 19 nt, Homo sapiens
  misc_RNA (1)...(19): siRNA sense strand
gaguacaacagauuuauuc

SEQ ID NO: 809015 - RNA, 19 nt, Homo sapiens
  misc_RNA (1)...(19): siRNA sense strand
cuagaucgucugaagaaua

SEQ ID NO: 809016 - RNA, 19 nt, Homo sapiens
  misc_RNA (1)...(19): siRNA sense strand
cagcaacaguuacaagaca

SEQ ID NO: 809017 - RNA, 19 nt, Homo sapiens
  misc_RNA (1)...(19): siRNA sense strand
aagagugccuuucauuaug

SEQ ID NO: 809018 - RNA, 19 nt, Homo sapiens
  misc_RNA (1)...(19): siRNA sense strand
ggacauauugcuaccuguu

SEQ ID NO: 809019 - RNA, 19 nt, Homo sapiens
  misc_RNA (1)...(19): siRNA sense strand
gguggcaucugcaggauca

SEQ ID NO: 809020 - RNA, 19 nt, Homo sapiens
  misc_RNA (1)...(19): siRNA sense strand
cauauguccucugggauaa

SEQ ID NO: 809021 - RNA, 19 nt, Homo sapiens
  misc_RNA (1)...(19): siRNA sense strand
ccaccggcaucaagcauga

SEQ ID NO: 809022 - RNA, 19 nt, Homo sapiens
  misc_RNA (1)...(19): siRNA sense strand
gauggaauguuugagacuu

SEQ ID NO: 809023 - RNA, 19 nt, Homo sapiens
  misc_RNA (1)...(19): siRNA sense strand
uuggugaccugguaaauau

SEQ ID NO: 809024 - RNA, 19 nt, Homo sapiens
  misc_RNA (1)...(19): siRNA sense strand
gagguucuuucuacagaga

SEQ ID NO: 809025 - RNA, 19 nt, Homo sapiens
  misc_RNA (1)...(19): siRNA sense strand
gugggaagaucaagaugga

SEQ ID NO: 809026 - RNA, 19 nt, Homo sapiens
  misc_RNA (1)...(19): siRNA sense strand
uuaaagagcagacaaugug

SEQ ID NO: 809027 - RNA, 19 nt, Homo sapiens
  misc_RNA (1)...(19): siRNA sense strand
gauaauaccaaugucaaug

SEQ ID NO: 809028 - RNA, 19 nt, Homo sapiens
  misc_RNA (1)...(19): siRNA sense strand
gaaaugccucaucuguaaa

SEQ ID NO: 809029 - RNA, 19 nt, Homo sapiens
  misc_RNA (1)...(19): siRNA sense strand
ucagauaugaagagagaua

SEQ ID NO: 809030 - RNA, 19 nt, Homo sapiens
  misc_RNA (1)...(19): siRNA sense strand
uacgucagcuccaagauau

SEQ ID NO: 809031 - RNA, 19 nt, Homo sapiens
  misc_RNA (1)...(19): siRNA sense strand
gguggaaguuuguggaaca

SEQ ID NO: 809032 - RNA, 19 nt, Homo sapiens
  misc_RNA (1)...(19): siRNA sense strand
acaaagaggacauggagaa

SEQ ID NO: 809033 - RNA, 19 nt, Homo sapiens
  misc_RNA (1)...(19): siRNA sense strand
ggagaccgcaugagugaau

SEQ ID NO: 809034 - RNA, 19 nt, Homo sapiens
  misc_RNA (1)...(19): siRNA sense strand
ccacggagcugccauuuga

SEQ ID NO: 809035 - RNA, 19 nt, Homo sapiens
  misc_RNA (1)...(19): siRNA sense strand
caaaggaggcuaccagaua

SEQ ID NO: 809036 - RNA, 19 nt, Homo sapiens
  misc_RNA (1)...(19): siRNA sense strand
aaaggaggcuaccagauau

SEQ ID NO: 809037 - RNA, 19 nt, Homo sapiens
  misc_RNA (1)...(19): siRNA sense strand
gcaaggacgaggagaagaa

SEQ ID NO: 809038 - RNA, 19 nt, Homo sapiens
  misc_RNA (1)...(19): siRNA sense strand
gcuacuacaugcuggagaa

SEQ ID NO: 809039 - RNA, 19 nt, Homo sapiens
  misc_RNA (1)...(19): siRNA sense strand
cgagaagacuagccgaaug

SEQ ID NO: 809040 - RNA, 19 nt, Homo sapiens
  misc_RNA (1)...(19): siRNA sense strand
caacaagucagccgggauu

SEQ ID NO: 809041 - RNA, 19 nt, Homo sapiens
  misc_RNA (1)...(19): siRNA sense strand
cgagaaggaugaauuugag

SEQ ID NO: 809042 - RNA, 19 nt, Homo sapiens
  misc_RNA (1)...(19): siRNA sense strand
gacagcaacuccagcaaag

SEQ ID NO: 809043 - RNA, 19 nt, Homo sapiens
  misc_RNA (1)...(19): siRNA sense strand
guccuugugugcagacaua

SEQ ID NO: 809044 - RNA, 19 nt, Homo sapiens
  misc_RNA (1)...(19): siRNA sense strand
cagcaaagcccaccaagag

SEQ ID NO: 809045 - RNA, 19 nt, Homo sapiens
  misc_RNA (1)...(19): siRNA sense strand
gagaacagaccgaggaaca

SEQ ID NO: 809046 - RNA, 19 nt, Homo sapiens
  misc_RNA (1)...(19): siRNA sense strand
gaacagaccgaggaacauc

SEQ ID NO: 809047 - RNA, 19 nt, Homo sapiens
  misc_RNA (1)...(19): siRNA sense strand
cagacaacguggugauguu

SEQ ID NO: 809048 - RNA, 19 nt, Homo sapiens
  misc_RNA (1)...(19): siRNA sense strand
gcaccaaagacgaggacua

SEQ ID NO: 809049 - RNA, 19 nt, Homo sapiens
  misc_RNA (1)...(19): siRNA sense strand
ccacugcccugaucauugc

SEQ ID NO: 809050 - RNA, 19 nt, Homo sapiens
  misc_RNA (1)...(19): siRNA sense strand
gcggugagaacgaguacua

SEQ ID NO: 809051 - RNA, 19 nt, Homo sapiens
  misc_RNA (1)...(19): siRNA sense strand
ggagaaugacgcugagugu

SEQ ID NO: 809052 - RNA, 19 nt, Homo sapiens
  misc_RNA (1)...(19): siRNA sense strand
gauaugcaggcgucacaaa

SEQ ID NO: 809053 - RNA, 19 nt, Homo sapiens
  misc_RNA (1)...(19): siRNA sense strand
ucacaaaacuggugcagau

SEQ ID NO: 809054 - RNA, 19 nt, Homo sapiens
  misc_RNA (1)...(19): siRNA sense strand
ccagcacgcccacaaagaa

SEQ ID NO: 809055 - RNA, 19 nt, Homo sapiens
  misc_RNA (1)...(19): siRNA sense strand
ccgagaaggaugaauuuga

SEQ ID NO: 809056 - RNA, 19 nt, Homo sapiens
  misc_RNA (1)...(19): siRNA sense strand
caaaacuggugcagauuga

SEQ ID NO: 809057 - RNA, 19 nt, Homo sapiens
  misc_RNA (1)...(19): siRNA sense strand
ccacguacaacucugagaa

SEQ ID NO: 809058 - RNA, 19 nt, Homo sapiens
  misc_RNA (1)...(19): siRNA sense strand
ugacagcaacuccagcaaa

SEQ ID NO: 809059 - RNA, 19 nt, Homo sapiens
  misc_RNA (1)...(19): siRNA sense strand
ggagaaguuuuccaaagga

SEQ ID NO: 809060 - RNA, 19 nt, Homo sapiens
  misc_RNA (1)...(19): siRNA sense strand
gaaggaugaauuugagaag

SEQ ID NO: 809061 - RNA, 19 nt, Homo sapiens
  misc_RNA (1)...(19): siRNA sense strand
ucuauggcauggucugcua

SEQ ID NO: 809062 - RNA, 19 nt, Homo sapiens
  misc_RNA (1)...(19): siRNA sense strand
gcaauguccaccaucuuca

SEQ ID NO: 809063 - RNA, 19 nt, Homo sapiens
  misc_RNA (1)...(19): siRNA sense strand
ucuacauccugaagacaaa

SEQ ID NO: 809064 - RNA, 19 nt, Homo sapiens
  misc_RNA (1)...(19): siRNA sense strand
caagucagccgggauucaa

SEQ ID NO: 809065 - RNA, 19 nt, Homo sapiens
  misc_RNA (1)...(19): siRNA sense strand
aaagauccucgauguguau

SEQ ID NO: 809066 - RNA, 19 nt, Homo sapiens
  misc_RNA (1)...(19): siRNA sense strand
caaggacgaggagaagaaa

SEQ ID NO: 809067 - RNA, 19 nt, Homo sapiens
  misc_RNA (1)...(19): siRNA sense strand
cagcaucccugagcuacuc

SEQ ID NO: 809068 - RNA, 19 nt, Homo sapiens
  misc_RNA (1)...(19): siRNA sense strand
gagaaggaugaauuugaga

SEQ ID NO: 809069 - RNA, 19 nt, Homo sapiens
  misc_RNA (1)...(19): siRNA sense strand
aaaagauccucgaugugua

SEQ ID NO: 809070 - RNA, 19 nt, Homo sapiens
  misc_RNA (1)...(19): siRNA sense strand
caggggacauggagaauga

SEQ ID NO: 809071 - RNA, 19 nt, Homo sapiens
  misc_RNA (1)...(19): siRNA sense strand
gagaagacuagccgaaugc

SEQ ID NO: 809072 - RNA, 19 nt, Homo sapiens
  misc_RNA (1)...(19): siRNA sense strand
gagcaaggacgaggagaag

SEQ ID NO: 809073 - RNA, 19 nt, Homo sapiens
  misc_RNA (1)...(19): siRNA sense strand
gagcggaauacucaaacug

SEQ ID NO: 809074 - RNA, 19 nt, Homo sapiens
  misc_RNA (1)...(19): siRNA sense strand
gugagaacgaguacuacaa

SEQ ID NO: 809075 - RNA, 19 nt, Homo sapiens
  misc_RNA (1)...(19): siRNA sense strand
gaaagaggccccagacaac

SEQ ID NO: 809076 - RNA, 19 nt, Homo sapiens
  misc_RNA (1)...(19): siRNA sense strand
gaccgaggaacaucuaugg

SEQ ID NO: 809077 - RNA, 19 nt, Homo sapiens
  misc_RNA (1)...(19): siRNA sense strand
cuacagcaucccugagcua

SEQ ID NO: 809078 - RNA, 19 nt, Homo sapiens
  misc_RNA (1)...(19): siRNA sense strand
ccaccaagagcgagaacga

SEQ ID NO: 809079 - RNA, 19 nt, Homo sapiens
  misc_RNA (1)...(19): siRNA sense strand
gccacugcccugaucauug

SEQ ID NO: 809080 - RNA, 19 nt, Homo sapiens
  misc_RNA (1)...(19): siRNA sense strand
agaaggaugaauuugagaa

SEQ ID NO: 809081 - RNA, 19 nt, Homo sapiens
  misc_RNA (1)...(19): siRNA sense strand
ccaaaggaggcuaccagau

SEQ ID NO: 809082 - RNA, 19 nt, Homo sapiens
  misc_RNA (1)...(19): siRNA sense strand
ccagcaaagcccaccaaga

SEQ ID NO: 809083 - RNA, 19 nt, Homo sapiens
  misc_RNA (1)...(19): siRNA sense strand
gcggagaaguuuuccaaag

SEQ ID NO: 809084 - RNA, 19 nt, Homo sapiens
  misc_RNA (1)...(19): siRNA sense strand
ggagucguggaaggucuua

SEQ ID NO: 809085 - RNA, 19 nt, Homo sapiens
  misc_RNA (1)...(19): siRNA sense strand
ggugagaacgaguacuaca

SEQ ID NO: 809086 - RNA, 19 nt, Homo sapiens
  misc_RNA (1)...(19): siRNA sense strand
gccaucguccucaucauca

SEQ ID NO: 809087 - RNA, 19 nt, Homo sapiens
  misc_RNA (1)...(19): siRNA sense strand
uggaugcuguggaguccuu

SEQ ID NO: 809088 - RNA, 19 nt, Homo sapiens
  misc_RNA (1)...(19): siRNA sense strand
uaugcaggcgucacaaaga

SEQ ID NO: 809089 - RNA, 19 nt, Homo sapiens
  misc_RNA (1)...(19): siRNA sense strand
ugagcaaggacgaggagaa

SEQ ID NO: 809090 - RNA, 19 nt, Homo sapiens
  misc_RNA (1)...(19): siRNA sense strand
agacggcaugcaacucuuu

SEQ ID NO: 809091 - RNA, 19 nt, Homo sapiens
  misc_RNA (1)...(19): siRNA sense strand
ugaagagggaugagauugg

SEQ ID NO: 809092 - RNA, 19 nt, Homo sapiens
  misc_RNA (1)...(19): siRNA sense strand
gcuccacguacaacucuga

SEQ ID NO: 809093 - RNA, 19 nt, Homo sapiens
  misc_RNA (1)...(19): siRNA sense strand
gaaugcucagcuccacgua

SEQ ID NO: 809094 - RNA, 19 nt, Homo sapiens
  misc_RNA (1)...(19): siRNA sense strand
ccagacaacguggugaugu

SEQ ID NO: 809095 - RNA, 19 nt, Homo sapiens
  misc_RNA (1)...(19): siRNA sense strand
ggaaggaugugcucaugaa

SEQ ID NO: 809096 - RNA, 19 nt, Homo sapiens
  misc_RNA (1)...(19): siRNA sense strand
caagaaagauuuggaaaca

SEQ ID NO: 809097 - RNA, 19 nt, Homo sapiens
  misc_RNA (1)...(19): siRNA sense strand
gcaaaugagugugaccuaa

SEQ ID NO: 809098 - RNA, 19 nt, Homo sapiens
  misc_RNA (1)...(19): siRNA sense strand
gaacaauggccucaagaug

SEQ ID NO: 809099 - RNA, 19 nt, Homo sapiens
  misc_RNA (1)...(19): siRNA sense strand
agaaagauuuggaaacaug

SEQ ID NO: 809100 - RNA, 19 nt, Homo sapiens
  misc_RNA (1)...(19): siRNA sense strand
caaguuaagucucccuaau

SEQ ID NO: 809101 - RNA, 19 nt, Homo sapiens
  misc_RNA (1)...(19): siRNA sense strand
ggauaucgcaggucaagaa

SEQ ID NO: 809102 - RNA, 19 nt, Homo sapiens
  misc_RNA (1)...(19): siRNA sense strand
uaucgcaggucaagaaaga

SEQ ID NO: 809103 - RNA, 19 nt, Homo sapiens
  misc_RNA (1)...(19): siRNA sense strand
ggagcacgguuucguagga

SEQ ID NO: 809104 - RNA, 19 nt, Homo sapiens
  misc_RNA (1)...(19): siRNA sense strand
ugaaacacauacuugcaaa

SEQ ID NO: 809105 - RNA, 19 nt, Homo sapiens
  misc_RNA (1)...(19): siRNA sense strand
gaagcuaugggugcauuua

SEQ ID NO: 809106 - RNA, 19 nt, Homo sapiens
  misc_RNA (1)...(19): siRNA sense strand
gagaagcuaugggugcauu

SEQ ID NO: 809107 - RNA, 19 nt, Homo sapiens
  misc_RNA (1)...(19): siRNA sense strand
gagggucuauuaccgagaa

SEQ ID NO: 809108 - RNA, 19 nt, Homo sapiens
  misc_RNA (1)...(19): siRNA sense strand
gggaagaccaguaucauca

SEQ ID NO: 809109 - RNA, 19 nt, Homo sapiens
  misc_RNA (1)...(19): siRNA sense strand
gaagaccaguaucaucaag

SEQ ID NO: 809110 - RNA, 19 nt, Homo sapiens
  misc_RNA (1)...(19): siRNA sense strand
gaaagauuuggaaacauga

SEQ ID NO: 809111 - RNA, 19 nt, Homo sapiens
  misc_RNA (1)...(19): siRNA sense strand
acaauggccucaagaugga

SEQ ID NO: 809112 - RNA, 19 nt, Homo sapiens
  misc_RNA (1)...(19): siRNA sense strand
ugaaacaucagcaaaggaa

SEQ ID NO: 809113 - RNA, 19 nt, Homo sapiens
  misc_RNA (1)...(19): siRNA sense strand
acaaggagcaccuguacaa

SEQ ID NO: 809114 - RNA, 19 nt, Homo sapiens
  misc_RNA (1)...(19): siRNA sense strand
aaaugagugugaccuaaug

SEQ ID NO: 809115 - RNA, 19 nt, Homo sapiens
  misc_RNA (1)...(19): siRNA sense strand
gcacaaggagcaccuguac

SEQ ID NO: 809116 - RNA, 19 nt, Homo sapiens
  misc_RNA (1)...(19): siRNA sense strand
caaggagcacgguuucgua

SEQ ID NO: 809117 - RNA, 19 nt, Homo sapiens
  misc_RNA (1)...(19): siRNA sense strand
gaacuucuccucgcacuac

SEQ ID NO: 809118 - RNA, 19 nt, Homo sapiens
  misc_RNA (1)...(19): siRNA sense strand
aggagcaccuguacaaguu

SEQ ID NO: 809119 - RNA, 19 nt, Homo sapiens
  misc_RNA (1)...(19): siRNA sense strand
caaaugagugugaccuaau

SEQ ID NO: 809120 - RNA, 19 nt, Homo sapiens
  misc_RNA (1)...(19): siRNA sense strand
gcuaugggugcauuuauug

SEQ ID NO: 809121 - RNA, 19 nt, Homo sapiens
  misc_RNA (1)...(19): siRNA sense strand
acaaguugcuggugauugg

SEQ ID NO: 809122 - RNA, 19 nt, Homo sapiens
  misc_RNA (1)...(19): siRNA sense strand
acacauacuugcaaaugag

SEQ ID NO: 809123 - RNA, 19 nt, Homo sapiens
  misc_RNA (1)...(19): siRNA sense strand
aaacacauacuugcaaaug

SEQ ID NO: 809124 - RNA, 19 nt, Homo sapiens
  misc_RNA (1)...(19): siRNA sense strand
ggucaagaaagauuuggaa

SEQ ID NO: 809125 - RNA, 19 nt, Homo sapiens
  misc_RNA (1)...(19): siRNA sense strand
gaccuaauggagucuauug

SEQ ID NO: 809126 - RNA, 19 nt, Homo sapiens
  misc_RNA (1)...(19): siRNA sense strand
ggaagaccaguaucaucaa

SEQ ID NO: 809127 - RNA, 19 nt, Homo sapiens
  misc_RNA (1)...(19): siRNA sense strand
acaugacgagggucuauua

SEQ ID NO: 809128 - RNA, 19 nt, Homo sapiens
  misc_RNA (1)...(19): siRNA sense strand
gaugugcucaugaacaaug

SEQ ID NO: 809129 - RNA, 19 nt, Homo sapiens
  misc_RNA (1)...(19): siRNA sense strand
gaaacaucagcaaaggaaa

SEQ ID NO: 809130 - RNA, 19 nt, Homo sapiens
  misc_RNA (1)...(19): siRNA sense strand
gaaacacauacuugcaaau

SEQ ID NO: 809131 - RNA, 19 nt, Homo sapiens
  misc_RNA (1)...(19): siRNA sense strand
aggaugugcucaugaacaa

SEQ ID NO: 809132 - RNA, 19 nt, Homo sapiens
  misc_RNA (1)...(19): siRNA sense strand
caugaacaauggccucaag

SEQ ID NO: 809133 - RNA, 19 nt, Homo sapiens
  misc_RNA (1)...(19): siRNA sense strand
gcaggucaagaaagauuug

SEQ ID NO: 809134 - RNA, 19 nt, Homo sapiens
  misc_RNA (1)...(19): siRNA sense strand
aacacauacuugcaaauga

SEQ ID NO: 809135 - RNA, 19 nt, Homo sapiens
  misc_RNA (1)...(19): siRNA sense strand
gauaucgcaggucaagaaa

SEQ ID NO: 809136 - RNA, 19 nt, Homo sapiens
  misc_RNA (1)...(19): siRNA sense strand
caccaggccagccacauuu

SEQ ID NO: 809137 - RNA, 19 nt, Homo sapiens
  misc_RNA (1)...(19): siRNA sense strand
gugaaacacauacuugcaa

SEQ ID NO: 809138 - RNA, 19 nt, Homo sapiens
  misc_RNA (1)...(19): siRNA sense strand
gagcacgguuucguaggau

SEQ ID NO: 809139 - RNA, 19 nt, Homo sapiens
  misc_RNA (1)...(19): siRNA sense strand
gugcauuuauugucuucga

SEQ ID NO: 809140 - RNA, 19 nt, Homo sapiens
  misc_RNA (1)...(19): siRNA sense strand
gccucaagauggaccaguu

SEQ ID NO: 809141 - RNA, 19 nt, Homo sapiens
  misc_RNA (1)...(19): siRNA sense strand
gaaacaugacgagggucua

SEQ ID NO: 809142 - RNA, 19 nt, Homo sapiens
  misc_RNA (1)...(19): siRNA sense strand
gggaaggaugugcucauga

SEQ ID NO: 809143 - RNA, 19 nt, Homo sapiens
  misc_RNA (1)...(19): siRNA sense strand
ucaccaggccagccacauu

SEQ ID NO: 809144 - RNA, 19 nt, Homo sapiens
  misc_RNA (1)...(19): siRNA sense strand
gcaaggagcacgguuucgu

SEQ ID NO: 809145 - RNA, 19 nt, Homo sapiens
  misc_RNA (1)...(19): siRNA sense strand
uugaagcaguggcaaagug

SEQ ID NO: 809146 - RNA, 19 nt, Homo sapiens
  misc_RNA (1)...(19): siRNA sense strand
gccugcagcucugggauau

SEQ ID NO: 809147 - RNA, 19 nt, Homo sapiens
  misc_RNA (1)...(19): siRNA sense strand
ccaaguuaagucucccuaa

SEQ ID NO: 809148 - RNA, 19 nt, Homo sapiens
  misc_RNA (1)...(19): siRNA sense strand
guacaaguugcuggugauu

SEQ ID NO: 809149 - RNA, 19 nt, Homo sapiens
  misc_RNA (1)...(19): siRNA sense strand
aguuaagucucccuaaugg

SEQ ID NO: 809150 - RNA, 19 nt, Homo sapiens
  misc_RNA (1)...(19): siRNA sense strand
aaacaugacgagggucuau

SEQ ID NO: 809151 - RNA, 19 nt, Homo sapiens
  misc_RNA (1)...(19): siRNA sense strand
uuuauugucuucgauguca

SEQ ID NO: 809152 - RNA, 19 nt, Homo sapiens
  misc_RNA (1)...(19): siRNA sense strand
agcuaugggugcauuuauu

SEQ ID NO: 809153 - RNA, 19 nt, Homo sapiens
  misc_RNA (1)...(19): siRNA sense strand
uucguaggaugguuugaaa

SEQ ID NO: 809154 - RNA, 19 nt, Homo sapiens
  misc_RNA (1)...(19): siRNA sense strand
ucaagaaagauuuggaaac

SEQ ID NO: 809155 - RNA, 19 nt, Homo sapiens
  misc_RNA (1)...(19): siRNA sense strand
gucaagaaagauuuggaaa

SEQ ID NO: 809156 - RNA, 19 nt, Homo sapiens
  misc_RNA (1)...(19): siRNA sense strand
cauuuauugucuucgaugu

SEQ ID NO: 809157 - RNA, 19 nt, Homo sapiens
  misc_RNA (1)...(19): siRNA sense strand
ggugaaacacauacuugca

SEQ ID NO: 809158 - RNA, 19 nt, Homo sapiens
  misc_RNA (1)...(19): siRNA sense strand
ucgcaggucaagaaagauu

SEQ ID NO: 809159 - RNA, 19 nt, Homo sapiens
  misc_RNA (1)...(19): siRNA sense strand
ggagcaccuguacaaguug

SEQ ID NO: 809160 - RNA, 19 nt, Homo sapiens
  misc_RNA (1)...(19): siRNA sense strand
ugaacaauggccucaagau

SEQ ID NO: 809161 - RNA, 19 nt, Homo sapiens
  misc_RNA (1)...(19): siRNA sense strand
ccaggccagccacauuuga

SEQ ID NO: 809162 - RNA, 19 nt, Homo sapiens
  misc_RNA (1)...(19): siRNA sense strand
gcacagcccucgcacaagu

SEQ ID NO: 809163 - RNA, 19 nt, Homo sapiens
  misc_RNA (1)...(19): siRNA sense strand
uaugagagcuacaagaaga

SEQ ID NO: 809164 - RNA, 19 nt, Homo sapiens
  misc_RNA (1)...(19): siRNA sense strand
cagcaacccuggccacauu

SEQ ID NO: 809165 - RNA, 19 nt, Homo sapiens
  misc_RNA (1)...(19): siRNA sense strand
ggacagcucuugugcucau

SEQ ID NO: 809166 - RNA, 19 nt, Homo sapiens
  misc_RNA (1)...(19): siRNA sense strand
gaaugcaucuguggaaaca

SEQ ID NO: 809167 - RNA, 19 nt, Homo sapiens
  misc_RNA (1)...(19): siRNA sense strand
gugguuaacacaacaaaua

SEQ ID NO: 809168 - RNA, 19 nt, Homo sapiens
  misc_RNA (1)...(19): siRNA sense strand
ccaagcacaugcccaguga

SEQ ID NO: 809169 - RNA, 19 nt, Homo sapiens
  misc_RNA (1)...(19): siRNA sense strand
ccacacccaugcccucaaa

SEQ ID NO: 809170 - RNA, 19 nt, Homo sapiens
  misc_RNA (1)...(19): siRNA sense strand
caacgauccacgcaacuuu

SEQ ID NO: 809171 - RNA, 19 nt, Homo sapiens
  misc_RNA (1)...(19): siRNA sense strand
guacaacuguggccuccau

SEQ ID NO: 809172 - RNA, 19 nt, Homo sapiens
  misc_RNA (1)...(19): siRNA sense strand
cagcccaccucaacucuau

SEQ ID NO: 809173 - RNA, 19 nt, Homo sapiens
  misc_RNA (1)...(19): siRNA sense strand
cagguggacuacuuaauca

SEQ ID NO: 809174 - RNA, 19 nt, Homo sapiens
  misc_RNA (1)...(19): siRNA sense strand
cagcuucuccugucacauu

SEQ ID NO: 809175 - RNA, 19 nt, Homo sapiens
  misc_RNA (1)...(19): siRNA sense strand
caugagcacucguccaagu

SEQ ID NO: 809176 - RNA, 19 nt, Homo sapiens
  misc_RNA (1)...(19): siRNA sense strand
guggaaacaguugauaaua

SEQ ID NO: 809177 - RNA, 19 nt, Homo sapiens
  misc_RNA (1)...(19): siRNA sense strand
caagcacaaggucccauua

SEQ ID NO: 809178 - RNA, 19 nt, Homo sapiens
  misc_RNA (1)...(19): siRNA sense strand
ggaagggauuagucaagag

SEQ ID NO: 809179 - RNA, 19 nt, Homo sapiens
  misc_RNA (1)...(19): siRNA sense strand
ggauguaugcggacucaga

SEQ ID NO: 809180 - RNA, 19 nt, Homo sapiens
  misc_RNA (1)...(19): siRNA sense strand
gaggaaugcaucuguggaa

SEQ ID NO: 809181 - RNA, 19 nt, Homo sapiens
  misc_RNA (1)...(19): siRNA sense strand
cuauggaagucacaacaga

SEQ ID NO: 809182 - RNA, 19 nt, Homo sapiens
  misc_RNA (1)...(19): siRNA sense strand
gcuacaagaagaaggacua

SEQ ID NO: 809183 - RNA, 19 nt, Homo sapiens
  misc_RNA (1)...(19): siRNA sense strand
gacacaagcaggacagaug

SEQ ID NO: 809184 - RNA, 19 nt, Homo sapiens
  misc_RNA (1)...(19): siRNA sense strand
ccuaugagagcuacaagaa

SEQ ID NO: 809185 - RNA, 19 nt, Homo sapiens
  misc_RNA (1)...(19): siRNA sense strand
gagcagcgcguugccaaga

SEQ ID NO: 809186 - RNA, 19 nt, Homo sapiens
  misc_RNA (1)...(19): siRNA sense strand
cagcacagcccucgcacaa

SEQ ID NO: 809187 - RNA, 19 nt, Homo sapiens
  misc_RNA (1)...(19): siRNA sense strand
gcaggacagaugugaguga

SEQ ID NO: 809188 - RNA, 19 nt, Homo sapiens
  misc_RNA (1)...(19): siRNA sense strand
cggagcagguagagacuga

SEQ ID NO: 809189 - RNA, 19 nt, Homo sapiens
  misc_RNA (1)...(19): siRNA sense strand
uggaagggauuagucaaga

SEQ ID NO: 809190 - RNA, 19 nt, Homo sapiens
  misc_RNA (1)...(19): siRNA sense strand
uaaaacgucugaggaugua

SEQ ID NO: 809191 - RNA, 19 nt, Homo sapiens
  misc_RNA (1)...(19): siRNA sense strand
gcagcagcuucuccuguca

SEQ ID NO: 809192 - RNA, 19 nt, Homo sapiens
  misc_RNA (1)...(19): siRNA sense strand
ccagguggacuacuuaauc

SEQ ID NO: 809193 - RNA, 19 nt, Homo sapiens
  misc_RNA (1)...(19): siRNA sense strand
caggacagaugugagugaa

SEQ ID NO: 809194 - RNA, 19 nt, Homo sapiens
  misc_RNA (1)...(19): siRNA sense strand
gauguaugcggacucagaa

SEQ ID NO: 809195 - RNA, 19 nt, Homo sapiens
  misc_RNA (1)...(19): siRNA sense strand
ugagugaaccagcaacuuc

SEQ ID NO: 809196 - RNA, 19 nt, Homo sapiens
  misc_RNA (1)...(19): siRNA sense strand
agacaaaacucuccuucug

SEQ ID NO: 809197 - RNA, 19 nt, Homo sapiens
  misc_RNA (1)...(19): siRNA sense strand
ucaagaggaaugcaucugu

SEQ ID NO: 809198 - RNA, 19 nt, Homo sapiens
  misc_RNA (1)...(19): siRNA sense strand
cccaugcccucaaacacaa

SEQ ID NO: 809199 - RNA, 19 nt, Homo sapiens
  misc_RNA (1)...(19): siRNA sense strand
cagcucuugugcucauuug

SEQ ID NO: 809200 - RNA, 19 nt, Homo sapiens
  misc_RNA (1)...(19): siRNA sense strand
ccacugggcauccaucucu

SEQ ID NO: 809201 - RNA, 19 nt, Homo sapiens
  misc_RNA (1)...(19): siRNA sense strand
ggauuagucaagaggaaug

SEQ ID NO: 809202 - RNA, 19 nt, Homo sapiens
  misc_RNA (1)...(19): siRNA sense strand
gcucuugugcucauuugga

SEQ ID NO: 809203 - RNA, 19 nt, Homo sapiens
  misc_RNA (1)...(19): siRNA sense strand
guaugcggacucagaaaug

SEQ ID NO: 809204 - RNA, 19 nt, Homo sapiens
  misc_RNA (1)...(19): siRNA sense strand
ccaccucaacucuauggaa

SEQ ID NO: 809205 - RNA, 19 nt, Homo sapiens
  misc_RNA (1)...(19): siRNA sense strand
gcagcgcguugccaagaac

SEQ ID NO: 809206 - RNA, 19 nt, Homo sapiens
  misc_RNA (1)...(19): siRNA sense strand
cacgcaacuuugucccuaa

SEQ ID NO: 809207 - RNA, 19 nt, Homo sapiens
  misc_RNA (1)...(19): siRNA sense strand
ggaaugcaucuguggaaac

SEQ ID NO: 809208 - RNA, 19 nt, Homo sapiens
  misc_RNA (1)...(19): siRNA sense strand
ccacacgugcucagacugu

SEQ ID NO: 809209 - RNA, 19 nt, Homo sapiens
  misc_RNA (1)...(19): siRNA sense strand
ccucaacucuauggaaguc

SEQ ID NO: 809210 - RNA, 19 nt, Homo sapiens
  misc_RNA (1)...(19): siRNA sense strand
gcagcccaccucaacucua

SEQ ID NO: 809211 - RNA, 19 nt, Homo sapiens
  misc_RNA (1)...(19): siRNA sense strand
ccaagcacaaggucccauu

SEQ ID NO: 809212 - RNA, 19 nt, Homo sapiens
  misc_RNA (1)...(19): siRNA sense strand
ccacaccagguacugauuc

SEQ ID NO: 809213 - RNA, 19 nt, Homo sapiens
  misc_RNA (1)...(19): siRNA sense strand
uaugcggacucagaaaugu

SEQ ID NO: 809214 - RNA, 19 nt, Homo sapiens
  misc_RNA (1)...(19): siRNA sense strand
aggaaugcaucuguggaaa

SEQ ID NO: 809215 - RNA, 19 nt, Homo sapiens
  misc_RNA (1)...(19): siRNA sense strand
ggccacacgugcucagacu

SEQ ID NO: 809216 - RNA, 19 nt, Homo sapiens
  misc_RNA (1)...(19): siRNA sense strand
ggacacaagcaggacagau

SEQ ID NO: 809217 - RNA, 19 nt, Homo sapiens
  misc_RNA (1)...(19): siRNA sense strand
cuccagcacucccaugaca

SEQ ID NO: 809218 - RNA, 19 nt, Homo sapiens
  misc_RNA (1)...(19): siRNA sense strand
acacaagcaggacagaugu

SEQ ID NO: 809219 - RNA, 19 nt, Homo sapiens
  misc_RNA (1)...(19): siRNA sense strand
caaaauguggaagggauua

SEQ ID NO: 809220 - RNA, 19 nt, Homo sapiens
  misc_RNA (1)...(19): siRNA sense strand
uuaaucaacgggauguaug

SEQ ID NO: 809221 - RNA, 19 nt, Homo sapiens
  misc_RNA (1)...(19): siRNA sense strand
guccaaguccuuccaagca

SEQ ID NO: 809222 - RNA, 19 nt, Homo sapiens
  misc_RNA (1)...(19): siRNA sense strand
cacacgugcucagacugua

SEQ ID NO: 809223 - RNA, 19 nt, Homo sapiens
  misc_RNA (1)...(19): siRNA sense strand
cuugugcucauuuggauuu

SEQ ID NO: 809224 - RNA, 19 nt, Homo sapiens
  misc_RNA (1)...(19): siRNA sense strand
uguggaaacaguugauaau

SEQ ID NO: 809225 - RNA, 19 nt, Homo sapiens
  misc_RNA (1)...(19): siRNA sense strand
ccaacgauccacgcaacuu

SEQ ID NO: 809226 - RNA, 19 nt, Homo sapiens
  misc_RNA (1)...(19): siRNA sense strand
gaugugagugaaccagcaa

SEQ ID NO: 809227 - RNA, 19 nt, Homo sapiens
  misc_RNA (1)...(19): siRNA sense strand
ggagaaaguugaccagaaa

SEQ ID NO: 809228 - RNA, 19 nt, Homo sapiens
  misc_RNA (1)...(19): siRNA sense strand
gaaaguguaugagcugaua

SEQ ID NO: 809229 - RNA, 19 nt, Homo sapiens
  misc_RNA (1)...(19): siRNA sense strand
ugaaggaucugcagucuuu

SEQ ID NO: 809230 - RNA, 19 nt, Homo sapiens
  misc_RNA (1)...(19): siRNA sense strand
ccagaaagcuccagaauac

SEQ ID NO: 809231 - RNA, 19 nt, Homo sapiens
  misc_RNA (1)...(19): siRNA sense strand
ggaagaccgugaugucaaa

SEQ ID NO: 809232 - RNA, 19 nt, Homo sapiens
  misc_RNA (1)...(19): siRNA sense strand
uagagaagcucacugcauu

SEQ ID NO: 809233 - RNA, 19 nt, Homo sapiens
  misc_RNA (1)...(19): siRNA sense strand
gauagacgcuuuaaguaag

SEQ ID NO: 809234 - RNA, 19 nt, Homo sapiens
  misc_RNA (1)...(19): siRNA sense strand
acaccgagcugcuagaauu

SEQ ID NO: 809235 - RNA, 19 nt, Homo sapiens
  misc_RNA (1)...(19): siRNA sense strand
ucacuuagcucaacucaac

SEQ ID NO: 809236 - RNA, 19 nt, Homo sapiens
  misc_RNA (1)...(19): siRNA sense strand
caucaaggcauacaucuuu

SEQ ID NO: 809237 - RNA, 19 nt, Homo sapiens
  misc_RNA (1)...(19): siRNA sense strand
gaagcucuacgagaaauua

SEQ ID NO: 809238 - RNA, 19 nt, Homo sapiens
  misc_RNA (1)...(19): siRNA sense strand
gcaaaggacagguuguuga

SEQ ID NO: 809239 - RNA, 19 nt, Homo sapiens
  misc_RNA (1)...(19): siRNA sense strand
gcagaucgauaacaucaag

SEQ ID NO: 809240 - RNA, 19 nt, Homo sapiens
  misc_RNA (1)...(19): siRNA sense strand
gaugucaaagggcaaauua

SEQ ID NO: 809241 - RNA, 19 nt, Homo sapiens
  misc_RNA (1)...(19): siRNA sense strand
gauaugagucuuucagcua

SEQ ID NO: 809242 - RNA, 19 nt, Homo sapiens
  misc_RNA (1)...(19): siRNA sense strand
gagagcagcagauugauga

SEQ ID NO: 809243 - RNA, 19 nt, Homo sapiens
  misc_RNA (1)...(19): siRNA sense strand
uacgagaaauuacgacuuu

SEQ ID NO: 809244 - RNA, 19 nt, Homo sapiens
  misc_RNA (1)...(19): siRNA sense strand
gaagagggccguggagaga

SEQ ID NO: 809245 - RNA, 19 nt, Homo sapiens
  misc_RNA (1)...(19): siRNA sense strand
ucgauaacaucaaggcaua

SEQ ID NO: 809246 - RNA, 19 nt, Homo sapiens
  misc_RNA (1)...(19): siRNA sense strand
gcacccaccuugcuuaugc

SEQ ID NO: 809247 - RNA, 19 nt, Homo sapiens
  misc_RNA (1)...(19): siRNA sense strand
caacaucacaucauucauc

SEQ ID NO: 809248 - RNA, 19 nt, Homo sapiens
  misc_RNA (1)...(19): siRNA sense strand
ccaccuugcuuaugcuuug

SEQ ID NO: 809249 - RNA, 19 nt, Homo sapiens
  misc_RNA (1)...(19): siRNA sense strand
ucacucacauuacgaggaa

SEQ ID NO: 809250 - RNA, 19 nt, Homo sapiens
  misc_RNA (1)...(19): siRNA sense strand
ugauagacgcuuuaaguaa

SEQ ID NO: 809251 - RNA, 19 nt, Homo sapiens
  misc_RNA (1)...(19): siRNA sense strand
gcaaagauucgagcaauag

SEQ ID NO: 809252 - RNA, 19 nt, Homo sapiens
  misc_RNA (1)...(19): siRNA sense strand
agagagagcagcagauuga

SEQ ID NO: 809253 - RNA, 19 nt, Homo sapiens
  misc_RNA (1)...(19): siRNA sense strand
ucagagaaaucggcccuuu

SEQ ID NO: 809254 - RNA, 19 nt, Homo sapiens
  misc_RNA (1)...(19): siRNA sense strand
gcugauagacgcuuuaagu

SEQ ID NO: 809255 - RNA, 19 nt, Homo sapiens
  misc_RNA (1)...(19): siRNA sense strand
caaaggacagguuguugaa

SEQ ID NO: 809256 - RNA, 19 nt, Homo sapiens
  misc_RNA (1)...(19): siRNA sense strand
gaucugcagucuuucuauc

SEQ ID NO: 809257 - RNA, 19 nt, Homo sapiens
  misc_RNA (1)...(19): siRNA sense strand
gaauugaccacuauguugu

SEQ ID NO: 809258 - RNA, 19 nt, Homo sapiens
  misc_RNA (1)...(19): siRNA sense strand
gaguggaagugcagaaagu

SEQ ID NO: 809259 - RNA, 19 nt, Homo sapiens
  misc_RNA (1)...(19): siRNA sense strand
ccaaggauaugagucuuuc

SEQ ID NO: 809260 - RNA, 19 nt, Homo sapiens
  misc_RNA (1)...(19): siRNA sense strand
uagaggugcugacagagaa

SEQ ID NO: 809261 - RNA, 19 nt, Homo sapiens
  misc_RNA (1)...(19): siRNA sense strand
gaucagauacucagcuaca

SEQ ID NO: 809262 - RNA, 19 nt, Homo sapiens
  misc_RNA (1)...(19): siRNA sense strand
caagagagagcagcagauu

SEQ ID NO: 809263 - RNA, 19 nt, Homo sapiens
  misc_RNA (1)...(19): siRNA sense strand
gaccggauccgcugcugua

SEQ ID NO: 809264 - RNA, 19 nt, Homo sapiens
  misc_RNA (1)...(19): siRNA sense strand
gaagcucacugcauuugac

SEQ ID NO: 809265 - RNA, 19 nt, Homo sapiens
  misc_RNA (1)...(19): siRNA sense strand
gcucgguccuggaugagaa

SEQ ID NO: 809266 - RNA, 19 nt, Homo sapiens
  misc_RNA (1)...(19): siRNA sense strand
ugucaaagggcaaauuaaa

SEQ ID NO: 809267 - RNA, 19 nt, Homo sapiens
  misc_RNA (1)...(19): siRNA sense strand
gaggaacccaccuguauca

SEQ ID NO: 809268 - RNA, 19 nt, Homo sapiens
  misc_RNA (1)...(19): siRNA sense strand
ucuaucagcuucacucaca

SEQ ID NO: 809269 - RNA, 19 nt, Homo sapiens
  misc_RNA (1)...(19): siRNA sense strand
gcugugaggagccaucuuu

SEQ ID NO: 809270 - RNA, 19 nt, Homo sapiens
  misc_RNA (1)...(19): siRNA sense strand
uggagaaaguugaccagaa

SEQ ID NO: 809271 - RNA, 19 nt, Homo sapiens
  misc_RNA (1)...(19): siRNA sense strand
cagcagauccacaacauca

SEQ ID NO: 809272 - RNA, 19 nt, Homo sapiens
  misc_RNA (1)...(19): siRNA sense strand
gagaagcucacugcauuug

SEQ ID NO: 809273 - RNA, 19 nt, Homo sapiens
  misc_RNA (1)...(19): siRNA sense strand
ugcagagaaugaucagaua

SEQ ID NO: 809274 - RNA, 19 nt, Homo sapiens
  misc_RNA (1)...(19): siRNA sense strand
caaauacugagucugcaaa

SEQ ID NO: 809275 - RNA, 19 nt, Homo sapiens
  misc_RNA (1)...(19): siRNA sense strand
gcaaggacacgcugcucaa

SEQ ID NO: 809276 - RNA, 19 nt, Homo sapiens
  misc_RNA (1)...(19): siRNA sense strand
ugcaaagauucgagcaaua

SEQ ID NO: 809277 - RNA, 19 nt, Homo sapiens
  misc_RNA (1)...(19): siRNA sense strand
cgaccaggaugucccuuuc

SEQ ID NO: 809278 - RNA, 19 nt, Homo sapiens
  misc_RNA (1)...(19): siRNA sense strand
ucagcucgguccuggauga

SEQ ID NO: 809279 - RNA, 19 nt, Homo sapiens
  misc_RNA (1)...(19): siRNA sense strand
ggucuauuaugugcaagaa

SEQ ID NO: 809280 - RNA, 19 nt, Homo sapiens
  misc_RNA (1)...(19): siRNA sense strand
cagcagaucgauaacauca

SEQ ID NO: 809281 - RNA, 19 nt, Homo sapiens
  misc_RNA (1)...(19): siRNA sense strand
aaaguugcuugguuugaug

SEQ ID NO: 809282 - RNA, 19 nt, Homo sapiens
  misc_RNA (1)...(19): siRNA sense strand
ggaagugcagaaaguguau

SEQ ID NO: 809283 - RNA, 19 nt, Homo sapiens
  misc_RNA (1)...(19): siRNA sense strand
ucuauuaugugcaagaagu

SEQ ID NO: 809284 - RNA, 19 nt, Homo sapiens
  misc_RNA (1)...(19): siRNA sense strand
gcgggucuauuaugugcaa

SEQ ID NO: 809285 - RNA, 19 nt, Homo sapiens
  misc_RNA (1)...(19): siRNA sense strand
guagaggugcugacagaga

SEQ ID NO: 809286 - RNA, 19 nt, Homo sapiens
  misc_RNA (1)...(19): siRNA sense strand
ucccuggacuucagagaaa

SEQ ID NO: 809287 - RNA, 19 nt, Homo sapiens
  misc_RNA (1)...(19): siRNA sense strand
acacgcugcucaagagaga

SEQ ID NO: 809288 - RNA, 19 nt, Homo sapiens
  misc_RNA (1)...(19): siRNA sense strand
gggaagaccgugaugucaa

SEQ ID NO: 809289 - RNA, 19 nt, Homo sapiens
  misc_RNA (1)...(19): siRNA sense strand
agaauugaccacuauguug

SEQ ID NO: 809290 - RNA, 19 nt, Homo sapiens
  misc_RNA (1)...(19): siRNA sense strand
ccagacagcccagcuccua

SEQ ID NO: 809291 - RNA, 19 nt, Homo sapiens
  misc_RNA (1)...(19): siRNA sense strand
gaccagaaagcuccagaau

SEQ ID NO: 809292 - RNA, 19 nt, Homo sapiens
  misc_RNA (1)...(19): siRNA sense strand
cagaacaaauacugagucu

SEQ ID NO: 809293 - RNA, 19 nt, Homo sapiens
  misc_RNA (1)...(19): siRNA sense strand
guggaagucaauaaacuaa

SEQ ID NO: 809294 - RNA, 19 nt, Homo sapiens
  misc_RNA (1)...(19): siRNA sense strand
uuaaaagucuuguccagaa

SEQ ID NO: 809295 - RNA, 19 nt, Homo sapiens
  misc_RNA (1)...(19): siRNA sense strand
uaacaucaaggcauacauc

SEQ ID NO: 809296 - RNA, 19 nt, Homo sapiens
  misc_RNA (1)...(19): siRNA sense strand
gugaagcucuacgagaaau

SEQ ID NO: 809297 - RNA, 19 nt, Homo sapiens
  misc_RNA (1)...(19): siRNA sense strand
aggaggaaauggagaggaa

SEQ ID NO: 809298 - RNA, 19 nt, Homo sapiens
  misc_RNA (1)...(19): siRNA sense strand
gagaaugaucagauacuca

SEQ ID NO: 809299 - RNA, 19 nt, Homo sapiens
  misc_RNA (1)...(19): siRNA sense strand
gagcugauagacgcuuuaa

SEQ ID NO: 809300 - RNA, 19 nt, Homo sapiens
  misc_RNA (1)...(19): siRNA sense strand
gaaagcuccagaauacauc

SEQ ID NO: 809301 - RNA, 19 nt, Homo sapiens
  misc_RNA (1)...(19): siRNA sense strand
uguccagacugugggaaua

SEQ ID NO: 809302 - RNA, 19 nt, Homo sapiens
  misc_RNA (1)...(19): siRNA sense strand
gaggaaauggagaggaaga

SEQ ID NO: 809303 - RNA, 19 nt, Homo sapiens
  misc_RNA (1)...(19): siRNA sense strand
cugcuagaauugaccacua

SEQ ID NO: 809304 - RNA, 19 nt, Homo sapiens
  misc_RNA (1)...(19): siRNA sense strand
cccuugagauggacaguga

SEQ ID NO: 809305 - RNA, 19 nt, Homo sapiens
  misc_RNA (1)...(19): siRNA sense strand
gcagauccacaacaucaca

SEQ ID NO: 809306 - RNA, 19 nt, Homo sapiens
  misc_RNA (1)...(19): siRNA sense strand
caccacauccaagcaauuu

SEQ ID NO: 809307 - RNA, 19 nt, Homo sapiens
  misc_RNA (1)...(19): siRNA sense strand
cugauagacgcuuuaagua

SEQ ID NO: 809308 - RNA, 19 nt, Homo sapiens
  misc_RNA (1)...(19): siRNA sense strand
gcagcagauugaugagaag

SEQ ID NO: 809309 - RNA, 19 nt, Homo sapiens
  misc_RNA (1)...(19): siRNA sense strand
uacugagucugcaaagauu

SEQ ID NO: 809310 - RNA, 19 nt, Homo sapiens
  misc_RNA (1)...(19): siRNA sense strand
uagaauugaccacuauguu

SEQ ID NO: 809311 - RNA, 19 nt, Homo sapiens
  misc_RNA (1)...(19): siRNA sense strand
uccacaacaucacaucauu

SEQ ID NO: 809312 - RNA, 19 nt, Homo sapiens
  misc_RNA (1)...(19): siRNA sense strand
ugaugucacugccgaccaa

SEQ ID NO: 809313 - RNA, 19 nt, Homo sapiens
  misc_RNA (1)...(19): siRNA sense strand
ccaggacccuccaccacau

SEQ ID NO: 809314 - RNA, 19 nt, Homo sapiens
  misc_RNA (1)...(19): siRNA sense strand
cugcaaagauucgagcaau

SEQ ID NO: 809315 - RNA, 19 nt, Homo sapiens
  misc_RNA (1)...(19): siRNA sense strand
gcucacugcauuugacaga

SEQ ID NO: 809316 - RNA, 19 nt, Homo sapiens
  misc_RNA (1)...(19): siRNA sense strand
agguagaggugcugacaga

SEQ ID NO: 809317 - RNA, 19 nt, Homo sapiens
  misc_RNA (1)...(19): siRNA sense strand
gcccucugguuccugguaa

SEQ ID NO: 809318 - RNA, 19 nt, Homo sapiens
  misc_RNA (1)...(19): siRNA sense strand
caaagauucgagcaauaga

SEQ ID NO: 809319 - RNA, 19 nt, Homo sapiens
  misc_RNA (1)...(19): siRNA sense strand
auaugagucuuucagcuau

SEQ ID NO: 809320 - RNA, 19 nt, Homo sapiens
  misc_RNA (1)...(19): siRNA sense strand
ggaguuggaacgagaaagg

SEQ ID NO: 809321 - RNA, 19 nt, Homo sapiens
  misc_RNA (1)...(19): siRNA sense strand
aacaucacaucauucauca

SEQ ID NO: 809322 - RNA, 19 nt, Homo sapiens
  misc_RNA (1)...(19): siRNA sense strand
cacaacaucacaucauuca

SEQ ID NO: 809323 - RNA, 19 nt, Homo sapiens
  misc_RNA (1)...(19): siRNA sense strand
aaaggaaggaggaaaugga

SEQ ID NO: 809324 - RNA, 19 nt, Homo sapiens
  misc_RNA (1)...(19): siRNA sense strand
cagcuucacucacauuacg

SEQ ID NO: 809325 - RNA, 19 nt, Homo sapiens
  misc_RNA (1)...(19): siRNA sense strand
aagauucgagcaauagaaa

SEQ ID NO: 809326 - RNA, 19 nt, Homo sapiens
  misc_RNA (1)...(19): siRNA sense strand
agucagggacccaaggaua

SEQ ID NO: 809327 - RNA, 19 nt, Homo sapiens
  misc_RNA (1)...(19): siRNA sense strand
ggaugaaggugaaugacua

SEQ ID NO: 809328 - RNA, 19 nt, Homo sapiens
  misc_RNA (1)...(19): siRNA sense strand
ucacaaacgucuauuggau

SEQ ID NO: 809329 - RNA, 19 nt, Homo sapiens
  misc_RNA (1)...(19): siRNA sense strand
acaaacgucuauuggauga

SEQ ID NO: 809330 - RNA, 19 nt, Homo sapiens
  misc_RNA (1)...(19): siRNA sense strand
gaugaaggugaaugacuaa

SEQ ID NO: 809331 - RNA, 19 nt, Homo sapiens
  misc_RNA (1)...(19): siRNA sense strand
ucuauuggaugaaggugaa

SEQ ID NO: 809332 - RNA, 19 nt, Homo sapiens
  misc_RNA (1)...(19): siRNA sense strand
aaacgucuauuggaugaag

SEQ ID NO: 809333 - RNA, 19 nt, Homo sapiens
  misc_RNA (1)...(19): siRNA sense strand
agggcugccuguuuauuga

SEQ ID NO: 809334 - RNA, 19 nt, Homo sapiens
  misc_RNA (1)...(19): siRNA sense strand
guucacaaacgucuauugg

SEQ ID NO: 809335 - RNA, 19 nt, Homo sapiens
  misc_RNA (1)...(19): siRNA sense strand
gacagcaggacguucacaa

SEQ ID NO: 809336 - RNA, 19 nt, Homo sapiens
  misc_RNA (1)...(19): siRNA sense strand
acagcaggacguucacaaa

SEQ ID NO: 809337 - RNA, 19 nt, Homo sapiens
  misc_RNA (1)...(19): siRNA sense strand
ggagaggaguugucaauaa

SEQ ID NO: 809338 - RNA, 19 nt, Homo sapiens
  misc_RNA (1)...(19): siRNA sense strand
uggagaagcugcccaguua

SEQ ID NO: 809339 - RNA, 19 nt, Homo sapiens
  misc_RNA (1)...(19): siRNA sense strand
gaaacgcuaucuucacuga

SEQ ID NO: 809340 - RNA, 19 nt, Homo sapiens
  misc_RNA (1)...(19): siRNA sense strand
caaaggaugugguuucuca

SEQ ID NO: 809341 - RNA, 19 nt, Homo sapiens
  misc_RNA (1)...(19): siRNA sense strand
acaaauccaucuugaauga

SEQ ID NO: 809342 - RNA, 19 nt, Homo sapiens
  misc_RNA (1)...(19): siRNA sense strand
ccaaggaggcccugaauuu

SEQ ID NO: 809343 - RNA, 19 nt, Homo sapiens
  misc_RNA (1)...(19): siRNA sense strand
ucaagaaccuggagaagga

SEQ ID NO: 809344 - RNA, 19 nt, Homo sapiens
  misc_RNA (1)...(19): siRNA sense strand
guacaucacuuccaaaauu

SEQ ID NO: 809345 - RNA, 19 nt, Homo sapiens
  misc_RNA (1)...(19): siRNA sense strand
caacaaaucgcucucauuc

SEQ ID NO: 809346 - RNA, 19 nt, Homo sapiens
  misc_RNA (1)...(19): siRNA sense strand
gcacaucaaugccaucaag

SEQ ID NO: 809347 - RNA, 19 nt, Homo sapiens
  misc_RNA (1)...(19): siRNA sense strand
ggaaguacacccucauuga

SEQ ID NO: 809348 - RNA, 19 nt, Homo sapiens
  misc_RNA (1)...(19): siRNA sense strand
ugacuuugcucaugaaaug

SEQ ID NO: 809349 - RNA, 19 nt, Homo sapiens
  misc_RNA (1)...(19): siRNA sense strand
gaaaacaaauccaucuuga

SEQ ID NO: 809350 - RNA, 19 nt, Homo sapiens
  misc_RNA (1)...(19): siRNA sense strand
ggacuugguuuaugagaca

SEQ ID NO: 809351 - RNA, 19 nt, Homo sapiens
  misc_RNA (1)...(19): siRNA sense strand
cagacagacuggucguuua

SEQ ID NO: 809352 - RNA, 19 nt, Homo sapiens
  misc_RNA (1)...(19): siRNA sense strand
guagugagaucaaccgaau

SEQ ID NO: 809353 - RNA, 19 nt, Homo sapiens
  misc_RNA (1)...(19): siRNA sense strand
gcaccuuugugaccuauga

SEQ ID NO: 809354 - RNA, 19 nt, Homo sapiens
  misc_RNA (1)...(19): siRNA sense strand
gaaggaagccaccuacauc

SEQ ID NO: 809355 - RNA, 19 nt, Homo sapiens
  misc_RNA (1)...(19): siRNA sense strand
caaggagucuucauuaagg

SEQ ID NO: 809356 - RNA, 19 nt, Homo sapiens
  misc_RNA (1)...(19): siRNA sense strand
ggugagaccaacaggauua

SEQ ID NO: 809357 - RNA, 19 nt, Homo sapiens
  misc_RNA (1)...(19): siRNA sense strand
ggcaagacauacaccauga

SEQ ID NO: 809358 - RNA, 19 nt, Homo sapiens
  misc_RNA (1)...(19): siRNA sense strand
ccaagaagacauucaaaga

SEQ ID NO: 809359 - RNA, 19 nt, Homo sapiens
  misc_RNA (1)...(19): siRNA sense strand
ccaccuacaucaacaaauc

SEQ ID NO: 809360 - RNA, 19 nt, Homo sapiens
  misc_RNA (1)...(19): siRNA sense strand
gagaggaguugucaauaac

SEQ ID NO: 809361 - RNA, 19 nt, Homo sapiens
  misc_RNA (1)...(19): siRNA sense strand
ggaagaaagccaaguccaa

SEQ ID NO: 809362 - RNA, 19 nt, Homo sapiens
  misc_RNA (1)...(19): siRNA sense strand
ggagaaggaacuagcacua

SEQ ID NO: 809363 - RNA, 19 nt, Homo sapiens
  misc_RNA (1)...(19): siRNA sense strand
gacgggagcuggcaagaca

SEQ ID NO: 809364 - RNA, 19 nt, Homo sapiens
  misc_RNA (1)...(19): siRNA sense strand
uaaguuggauggaguucuu

SEQ ID NO: 809365 - RNA, 19 nt, Homo sapiens
  misc_RNA (1)...(19): siRNA sense strand
ccucaaggagucuucauua

SEQ ID NO: 809366 - RNA, 19 nt, Homo sapiens
  misc_RNA (1)...(19): siRNA sense strand
gaagccaccuacaucaaca

SEQ ID NO: 809367 - RNA, 19 nt, Homo sapiens
  misc_RNA (1)...(19): siRNA sense strand
uaccaaaccugggaagaaa

SEQ ID NO: 809368 - RNA, 19 nt, Homo sapiens
  misc_RNA (1)...(19): siRNA sense strand
ccacugagccugccaucaa

SEQ ID NO: 809369 - RNA, 19 nt, Homo sapiens
  misc_RNA (1)...(19): siRNA sense strand
ggauggaguucuucacgau

SEQ ID NO: 809370 - RNA, 19 nt, Homo sapiens
  misc_RNA (1)...(19): siRNA sense strand
uugaggaguuuaagaauga

SEQ ID NO: 809371 - RNA, 19 nt, Homo sapiens
  misc_RNA (1)...(19): siRNA sense strand
ucaaggagguguucaacca

SEQ ID NO: 809372 - RNA, 19 nt, Homo sapiens
  misc_RNA (1)...(19): siRNA sense strand
ggaacuagcacuacucaag

SEQ ID NO: 809373 - RNA, 19 nt, Homo sapiens
  misc_RNA (1)...(19): siRNA sense strand
caacugagaauuacaagca

SEQ ID NO: 809374 - RNA, 19 nt, Homo sapiens
  misc_RNA (1)...(19): siRNA sense strand
ggauguugauggccaccua

SEQ ID NO: 809375 - RNA, 19 nt, Homo sapiens
  misc_RNA (1)...(19): siRNA sense strand
caaacccaccgaugacuuu

SEQ ID NO: 809376 - RNA, 19 nt, Homo sapiens
  misc_RNA (1)...(19): siRNA sense strand
gagaagcugcccaguuaga

SEQ ID NO: 809377 - RNA, 19 nt, Homo sapiens
  misc_RNA (1)...(19): siRNA sense strand
aaaguaugaugcugagaga

SEQ ID NO: 809378 - RNA, 19 nt, Homo sapiens
  misc_RNA (1)...(19): siRNA sense strand
aaacaucuauggagaagcu

SEQ ID NO: 809379 - RNA, 19 nt, Homo sapiens
  misc_RNA (1)...(19): siRNA sense strand
gacaaaagaagcauugaua

SEQ ID NO: 809380 - RNA, 19 nt, Homo sapiens
  misc_RNA (1)...(19): siRNA sense strand
auuaagggcuugucaguuc

SEQ ID NO: 809381 - RNA, 19 nt, Homo sapiens
  misc_RNA (1)...(19): siRNA sense strand
ugacaggaaugacuuugca

SEQ ID NO: 809382 - RNA, 19 nt, Homo sapiens
  misc_RNA (1)...(19): siRNA sense strand
gaagaacgccccacacaug

SEQ ID NO: 809383 - RNA, 19 nt, Homo sapiens
  misc_RNA (1)...(19): siRNA sense strand
cucaaggagucuucauuaa

SEQ ID NO: 809384 - RNA, 19 nt, Homo sapiens
  misc_RNA (1)...(19): siRNA sense strand
cccaggacuugguuuauga

SEQ ID NO: 809385 - RNA, 19 nt, Homo sapiens
  misc_RNA (1)...(19): siRNA sense strand
ccacacagcacaucaaugc

SEQ ID NO: 809386 - RNA, 19 nt, Homo sapiens
  misc_RNA (1)...(19): siRNA sense strand
caagaagacauucaaagag

SEQ ID NO: 809387 - RNA, 19 nt, Homo sapiens
  misc_RNA (1)...(19): siRNA sense strand
gacgagaucgacauaauca

SEQ ID NO: 809388 - RNA, 19 nt, Homo sapiens
  misc_RNA (1)...(19): siRNA sense strand
gauuauagccucccacacu

SEQ ID NO: 809389 - RNA, 19 nt, Homo sapiens
  misc_RNA (1)...(19): siRNA sense strand
ugagacaguugcaaaggau

SEQ ID NO: 809390 - RNA, 19 nt, Homo sapiens
  misc_RNA (1)...(19): siRNA sense strand
ggacgagaucgacauaauc

SEQ ID NO: 809391 - RNA, 19 nt, Homo sapiens
  misc_RNA (1)...(19): siRNA sense strand
agacagacuggucguuuaa

SEQ ID NO: 809392 - RNA, 19 nt, Homo sapiens
  misc_RNA (1)...(19): siRNA sense strand
caaccgaauuuucaaagaa

SEQ ID NO: 809393 - RNA, 19 nt, Homo sapiens
  misc_RNA (1)...(19): siRNA sense strand
gagccugccaucaaugaaa

SEQ ID NO: 809394 - RNA, 19 nt, Homo sapiens
  misc_RNA (1)...(19): siRNA sense strand
acaaaucgcucucauuccu

SEQ ID NO: 809395 - RNA, 19 nt, Homo sapiens
  misc_RNA (1)...(19): siRNA sense strand
aaugagagccuguuugauc

SEQ ID NO: 809396 - RNA, 19 nt, Homo sapiens
  misc_RNA (1)...(19): siRNA sense strand
auaaucagccuuagacaga

SEQ ID NO: 809397 - RNA, 19 nt, Homo sapiens
  misc_RNA (1)...(19): siRNA sense strand
gagaccaacaggauuauag

SEQ ID NO: 809398 - RNA, 19 nt, Homo sapiens
  misc_RNA (1)...(19): siRNA sense strand
ucaauaaccaacagacaga

SEQ ID NO: 809399 - RNA, 19 nt, Homo sapiens
  misc_RNA (1)...(19): siRNA sense strand
caaggaggcccugaauuuc

SEQ ID NO: 809400 - RNA, 19 nt, Homo sapiens
  misc_RNA (1)...(19): siRNA sense strand
agauugaugugaccaagga

SEQ ID NO: 809401 - RNA, 19 nt, Homo sapiens
  misc_RNA (1)...(19): siRNA sense strand
gaaguacacccucauugac

SEQ ID NO: 809402 - RNA, 19 nt, Homo sapiens
  misc_RNA (1)...(19): siRNA sense strand
cgacauaaucagccuuaga

SEQ ID NO: 809403 - RNA, 19 nt, Homo sapiens
  misc_RNA (1)...(19): siRNA sense strand
guaugaugcugagagaaug

SEQ ID NO: 809404 - RNA, 19 nt, Homo sapiens
  misc_RNA (1)...(19): siRNA sense strand
ccacacaugccaucacugu

SEQ ID NO: 809405 - RNA, 19 nt, Homo sapiens
  misc_RNA (1)...(19): siRNA sense strand
caagacauacaccaugaug

SEQ ID NO: 809406 - RNA, 19 nt, Homo sapiens
  misc_RNA (1)...(19): siRNA sense strand
uggacgagaucgacauaau

SEQ ID NO: 809407 - RNA, 19 nt, Homo sapiens
  misc_RNA (1)...(19): siRNA sense strand
gacaaacaucuauggagaa

SEQ ID NO: 809408 - RNA, 19 nt, Homo sapiens
  misc_RNA (1)...(19): siRNA sense strand
caguucaccucacaaguca

SEQ ID NO: 809409 - RNA, 19 nt, Homo sapiens
  misc_RNA (1)...(19): siRNA sense strand
auaaugagagccuguuuga

SEQ ID NO: 809410 - RNA, 19 nt, Homo sapiens
  misc_RNA (1)...(19): siRNA sense strand
ccaaguccaagaagacauu

SEQ ID NO: 809411 - RNA, 19 nt, Homo sapiens
  misc_RNA (1)...(19): siRNA sense strand
aaagccaaguccaagaaga

SEQ ID NO: 809412 - RNA, 19 nt, Homo sapiens
  misc_RNA (1)...(19): siRNA sense strand
gaaccuggagaaggaacua

SEQ ID NO: 809413 - RNA, 19 nt, Homo sapiens
  misc_RNA (1)...(19): siRNA sense strand
cugagagaauggucaagaa

SEQ ID NO: 809414 - RNA, 19 nt, Homo sapiens
  misc_RNA (1)...(19): siRNA sense strand
agacuggucguuuaaguug

SEQ ID NO: 809415 - RNA, 19 nt, Homo sapiens
  misc_RNA (1)...(19): siRNA sense strand
cagauacggagaugacaaa

SEQ ID NO: 809416 - RNA, 19 nt, Homo sapiens
  misc_RNA (1)...(19): siRNA sense strand
gaggaguugucaauaacca

SEQ ID NO: 809417 - RNA, 19 nt, Homo sapiens
  misc_RNA (1)...(19): siRNA sense strand
gggcaacugagaauuacaa

SEQ ID NO: 809418 - RNA, 19 nt, Homo sapiens
  misc_RNA (1)...(19): siRNA sense strand
gaucagauacggagaugac

SEQ ID NO: 809419 - RNA, 19 nt, Homo sapiens
  misc_RNA (1)...(19): siRNA sense strand
ccaaugaccaucguggaaa

SEQ ID NO: 809420 - RNA, 19 nt, Homo sapiens
  misc_RNA (1)...(19): siRNA sense strand
ucaaggagucuucauuaag

SEQ ID NO: 809421 - RNA, 19 nt, Homo sapiens
  misc_RNA (1)...(19): siRNA sense strand
ugaagcuagucaccacuga

SEQ ID NO: 809422 - RNA, 19 nt, Homo sapiens
  misc_RNA (1)...(19): siRNA sense strand
ggcccucgauggcuauaau

SEQ ID NO: 809423 - RNA, 19 nt, Homo sapiens
  misc_RNA (1)...(19): siRNA sense strand
gcccugaauuuccagaagu

SEQ ID NO: 809424 - RNA, 19 nt, Homo sapiens
  misc_RNA (1)...(19): siRNA sense strand
auacggagaugacaaaaga

SEQ ID NO: 809425 - RNA, 19 nt, Homo sapiens
  misc_RNA (1)...(19): siRNA sense strand
gggugagccugaaggacaa

SEQ ID NO: 809426 - RNA, 19 nt, Homo sapiens
  misc_RNA (1)...(19): siRNA sense strand
acaaacaucuauggagaag

SEQ ID NO: 809427 - RNA, 19 nt, Homo sapiens
  misc_RNA (1)...(19): siRNA sense strand
ucacugugcguguuuccua

SEQ ID NO: 809428 - RNA, 19 nt, Homo sapiens
  misc_RNA (1)...(19): siRNA sense strand
ggaagccaccuacaucaac

SEQ ID NO: 809429 - RNA, 19 nt, Homo sapiens
  misc_RNA (1)...(19): siRNA sense strand
agugagaucaaccgaauuu

SEQ ID NO: 809430 - RNA, 19 nt, Homo sapiens
  misc_RNA (1)...(19): siRNA sense strand
ugagcaagguagugagauc

SEQ ID NO: 809431 - RNA, 19 nt, Homo sapiens
  misc_RNA (1)...(19): siRNA sense strand
agaaagccaaguccaagaa

SEQ ID NO: 809432 - RNA, 19 nt, Homo sapiens
  misc_RNA (1)...(19): siRNA sense strand
ccagauugcugagaucaac

SEQ ID NO: 809433 - RNA, 19 nt, Homo sapiens
  misc_RNA (1)...(19): siRNA sense strand
ggagcuggcuauccaugac

SEQ ID NO: 809434 - RNA, 19 nt, Homo sapiens
  misc_RNA (1)...(19): siRNA sense strand
ucaacaaaucgcucucauu

SEQ ID NO: 809435 - RNA, 19 nt, Homo sapiens
  misc_RNA (1)...(19): siRNA sense strand
gaaagccaaguccaagaag

SEQ ID NO: 809436 - RNA, 19 nt, Homo sapiens
  misc_RNA (1)...(19): siRNA sense strand
agaaugagcaagguaguga

SEQ ID NO: 809437 - RNA, 19 nt, Homo sapiens
  misc_RNA (1)...(19): siRNA sense strand
ggagaggaguugucaauaa

SEQ ID NO: 809438 - RNA, 19 nt, Homo sapiens
  misc_RNA (1)...(19): siRNA sense strand
uggagaagcugcccaguua

SEQ ID NO: 809439 - RNA, 19 nt, Homo sapiens
  misc_RNA (1)...(19): siRNA sense strand
gaaacgcuaucuucacuga

SEQ ID NO: 809440 - RNA, 19 nt, Homo sapiens
  misc_RNA (1)...(19): siRNA sense strand
caaaggaugugguuucuca

SEQ ID NO: 809441 - RNA, 19 nt, Homo sapiens
  misc_RNA (1)...(19): siRNA sense strand
acaaauccaucuugaauga

SEQ ID NO: 809442 - RNA, 19 nt, Homo sapiens
  misc_RNA (1)...(19): siRNA sense strand
ccaaggaggcccugaauuu

SEQ ID NO: 809443 - RNA, 19 nt, Homo sapiens
  misc_RNA (1)...(19): siRNA sense strand
ucaagaaccuggagaagga

SEQ ID NO: 809444 - RNA, 19 nt, Homo sapiens
  misc_RNA (1)...(19): siRNA sense strand
guacaucacuuccaaaauu

SEQ ID NO: 809445 - RNA, 19 nt, Homo sapiens
  misc_RNA (1)...(19): siRNA sense strand
caacaaaucgcucucauuc

SEQ ID NO: 809446 - RNA, 19 nt, Homo sapiens
  misc_RNA (1)...(19): siRNA sense strand
gcacaucaaugccaucaag

SEQ ID NO: 809447 - RNA, 19 nt, Homo sapiens
  misc_RNA (1)...(19): siRNA sense strand
ggaaguacacccucauuga

SEQ ID NO: 809448 - RNA, 19 nt, Homo sapiens
  misc_RNA (1)...(19): siRNA sense strand
ugacuuugcucaugaaaug

SEQ ID NO: 809449 - RNA, 19 nt, Homo sapiens
  misc_RNA (1)...(19): siRNA sense strand
gaaaacaaauccaucuuga

SEQ ID NO: 809450 - RNA, 19 nt, Homo sapiens
  misc_RNA (1)...(19): siRNA sense strand
ggacuugguuuaugagaca

SEQ ID NO: 809451 - RNA, 19 nt, Homo sapiens
  misc_RNA (1)...(19): siRNA sense strand
cagacagacuggucguuua

SEQ ID NO: 809452 - RNA, 19 nt, Homo sapiens
  misc_RNA (1)...(19): siRNA sense strand
guagugagaucaaccgaau

SEQ ID NO: 809453 - RNA, 19 nt, Homo sapiens
  misc_RNA (1)...(19): siRNA sense strand
gcaccuuugugaccuauga

SEQ ID NO: 809454 - RNA, 19 nt, Homo sapiens
  misc_RNA (1)...(19): siRNA sense strand
gaaggaagccaccuacauc

SEQ ID NO: 809455 - RNA, 19 nt, Homo sapiens
  misc_RNA (1)...(19): siRNA sense strand
caaggagucuucauuaagg

SEQ ID NO: 809456 - RNA, 19 nt, Homo sapiens
  misc_RNA (1)...(19): siRNA sense strand
ggugagaccaacaggauua

SEQ ID NO: 809457 - RNA, 19 nt, Homo sapiens
  misc_RNA (1)...(19): siRNA sense strand
ggcaagacauacaccauga

SEQ ID NO: 809458 - RNA, 19 nt, Homo sapiens
  misc_RNA (1)...(19): siRNA sense strand
ccaagaagacauucaaaga

SEQ ID NO: 809459 - RNA, 19 nt, Homo sapiens
  misc_RNA (1)...(19): siRNA sense strand
ccaccuacaucaacaaauc

SEQ ID NO: 809460 - RNA, 19 nt, Homo sapiens
  misc_RNA (1)...(19): siRNA sense strand
gagaggaguugucaauaac

SEQ ID NO: 809461 - RNA, 19 nt, Homo sapiens
  misc_RNA (1)...(19): siRNA sense strand
ggaagaaagccaaguccaa

SEQ ID NO: 809462 - RNA, 19 nt, Homo sapiens
  misc_RNA (1)...(19): siRNA sense strand
ggagaaggaacuagcacua

SEQ ID NO: 809463 - RNA, 19 nt, Homo sapiens
  misc_RNA (1)...(19): siRNA sense strand
gacgggagcuggcaagaca

SEQ ID NO: 809464 - RNA, 19 nt, Homo sapiens
  misc_RNA (1)...(19): siRNA sense strand
uaaguuggauggaguucuu

SEQ ID NO: 809465 - RNA, 19 nt, Homo sapiens
  misc_RNA (1)...(19): siRNA sense strand
ccucaaggagucuucauua

SEQ ID NO: 809466 - RNA, 19 nt, Homo sapiens
  misc_RNA (1)...(19): siRNA sense strand
gaagccaccuacaucaaca

SEQ ID NO: 809467 - RNA, 19 nt, Homo sapiens
  misc_RNA (1)...(19): siRNA sense strand
uaccaaaccugggaagaaa

SEQ ID NO: 809468 - RNA, 19 nt, Homo sapiens
  misc_RNA (1)...(19): siRNA sense strand
ccacugagccugccaucaa

SEQ ID NO: 809469 - RNA, 19 nt, Homo sapiens
  misc_RNA (1)...(19): siRNA sense strand
ggauggaguucuucacgau

SEQ ID NO: 809470 - RNA, 19 nt, Homo sapiens
  misc_RNA (1)...(19): siRNA sense strand
uugaggaguuuaagaauga

SEQ ID NO: 809471 - RNA, 19 nt, Homo sapiens
  misc_RNA (1)...(19): siRNA sense strand
ucaaggagguguucaacca

SEQ ID NO: 809472 - RNA, 19 nt, Homo sapiens
  misc_RNA (1)...(19): siRNA sense strand
ggaacuagcacuacucaag

SEQ ID NO: 809473 - RNA, 19 nt, Homo sapiens
  misc_RNA (1)...(19): siRNA sense strand
caacugagaauuacaagca

SEQ ID NO: 809474 - RNA, 19 nt, Homo sapiens
  misc_RNA (1)...(19): siRNA sense strand
ggauguugauggccaccua

SEQ ID NO: 809475 - RNA, 19 nt, Homo sapiens
  misc_RNA (1)...(19): siRNA sense strand
caaacccaccgaugacuuu

SEQ ID NO: 809476 - RNA, 19 nt, Homo sapiens
  misc_RNA (1)...(19): siRNA sense strand
gagaagcugcccaguuaga

SEQ ID NO: 809477 - RNA, 19 nt, Homo sapiens
  misc_RNA (1)...(19): siRNA sense strand
aaaguaugaugcugagaga

SEQ ID NO: 809478 - RNA, 19 nt, Homo sapiens
  misc_RNA (1)...(19): siRNA sense strand
aaacaucuauggagaagcu

SEQ ID NO: 809479 - RNA, 19 nt, Homo sapiens
  misc_RNA (1)...(19): siRNA sense strand
gacaaaagaagcauugaua

SEQ ID NO: 809480 - RNA, 19 nt, Homo sapiens
  misc_RNA (1)...(19): siRNA sense strand
auuaagggcuugucaguuc

SEQ ID NO: 809481 - RNA, 19 nt, Homo sapiens
  misc_RNA (1)...(19): siRNA sense strand
ugacaggaaugacuuugca

SEQ ID NO: 809482 - RNA, 19 nt, Homo sapiens
  misc_RNA (1)...(19): siRNA sense strand
gaagaacgccccacacaug

SEQ ID NO: 809483 - RNA, 19 nt, Homo sapiens
  misc_RNA (1)...(19): siRNA sense strand
cucaaggagucuucauuaa

SEQ ID NO: 809484 - RNA, 19 nt, Homo sapiens
  misc_RNA (1)...(19): siRNA sense strand
cccaggacuugguuuauga

SEQ ID NO: 809485 - RNA, 19 nt, Homo sapiens
  misc_RNA (1)...(19): siRNA sense strand
ccacacagcacaucaaugc

SEQ ID NO: 809486 - RNA, 19 nt, Homo sapiens
  misc_RNA (1)...(19): siRNA sense strand
caagaagacauucaaagag

SEQ ID NO: 809487 - RNA, 19 nt, Homo sapiens
  misc_RNA (1)...(19): siRNA sense strand
gacgagaucgacauaauca

SEQ ID NO: 809488 - RNA, 19 nt, Homo sapiens
  misc_RNA (1)...(19): siRNA sense strand
gauuauagccucccacacu

SEQ ID NO: 809489 - RNA, 19 nt, Homo sapiens
  misc_RNA (1)...(19): siRNA sense strand
ugagacaguugcaaaggau

SEQ ID NO: 809490 - RNA, 19 nt, Homo sapiens
  misc_RNA (1)...(19): siRNA sense strand
ggacgagaucgacauaauc

SEQ ID NO: 809491 - RNA, 19 nt, Homo sapiens
  misc_RNA (1)...(19): siRNA sense strand
agacagacuggucguuuaa

SEQ ID NO: 809492 - RNA, 19 nt, Homo sapiens
  misc_RNA (1)...(19): siRNA sense strand
caaccgaauuuucaaagaa

SEQ ID NO: 809493 - RNA, 19 nt, Homo sapiens
  misc_RNA (1)...(19): siRNA sense strand
gagccugccaucaaugaaa

SEQ ID NO: 809494 - RNA, 19 nt, Homo sapiens
  misc_RNA (1)...(19): siRNA sense strand
acaaaucgcucucauuccu

SEQ ID NO: 809495 - RNA, 19 nt, Homo sapiens
  misc_RNA (1)...(19): siRNA sense strand
aaugagagccuguuugauc

SEQ ID NO: 809496 - RNA, 19 nt, Homo sapiens
  misc_RNA (1)...(19): siRNA sense strand
auaaucagccuuagacaga

SEQ ID NO: 809497 - RNA, 19 nt, Homo sapiens
  misc_RNA (1)...(19): siRNA sense strand
gagaccaacaggauuauag

SEQ ID NO: 809498 - RNA, 19 nt, Homo sapiens
  misc_RNA (1)...(19): siRNA sense strand
ucaauaaccaacagacaga

SEQ ID NO: 809499 - RNA, 19 nt, Homo sapiens
  misc_RNA (1)...(19): siRNA sense strand
caaggaggcccugaauuuc

SEQ ID NO: 809500 - RNA, 19 nt, Homo sapiens
  misc_RNA (1)...(19): siRNA sense strand
agauugaugugaccaagga

SEQ ID NO: 809501 - RNA, 19 nt, Homo sapiens
  misc_RNA (1)...(19): siRNA sense strand
gaaguacacccucauugac

SEQ ID NO: 809502 - RNA, 19 nt, Homo sapiens
  misc_RNA (1)...(19): siRNA sense strand
cgacauaaucagccuuaga

SEQ ID NO: 809503 - RNA, 19 nt, Homo sapiens
  misc_RNA (1)...(19): siRNA sense strand
guaugaugcugagagaaug

SEQ ID NO: 809504 - RNA, 19 nt, Homo sapiens
  misc_RNA (1)...(19): siRNA sense strand
ccacacaugccaucacugu

SEQ ID NO: 809505 - RNA, 19 nt, Homo sapiens
  misc_RNA (1)...(19): siRNA sense strand
caagacauacaccaugaug

SEQ ID NO: 809506 - RNA, 19 nt, Homo sapiens
  misc_RNA (1)...(19): siRNA sense strand
uggacgagaucgacauaau

SEQ ID NO: 809507 - RNA, 19 nt, Homo sapiens
  misc_RNA (1)...(19): siRNA sense strand
gacaaacaucuauggagaa

SEQ ID NO: 809508 - RNA, 19 nt, Homo sapiens
  misc_RNA (1)...(19): siRNA sense strand
caguucaccucacaaguca

SEQ ID NO: 809509 - RNA, 19 nt, Homo sapiens
  misc_RNA (1)...(19): siRNA sense strand
auaaugagagccuguuuga

SEQ ID NO: 809510 - RNA, 19 nt, Homo sapiens
  misc_RNA (1)...(19): siRNA sense strand
ccaaguccaagaagacauu

SEQ ID NO: 809511 - RNA, 19 nt, Homo sapiens
  misc_RNA (1)...(19): siRNA sense strand
aaagccaaguccaagaaga

SEQ ID NO: 809512 - RNA, 19 nt, Homo sapiens
  misc_RNA (1)...(19): siRNA sense strand
gaaccuggagaaggaacua

SEQ ID NO: 809513 - RNA, 19 nt, Homo sapiens
  misc_RNA (1)...(19): siRNA sense strand
cugagagaauggucaagaa

SEQ ID NO: 809514 - RNA, 19 nt, Homo sapiens
  misc_RNA (1)...(19): siRNA sense strand
agacuggucguuuaaguug

SEQ ID NO: 809515 - RNA, 19 nt, Homo sapiens
  misc_RNA (1)...(19): siRNA sense strand
cagauacggagaugacaaa

SEQ ID NO: 809516 - RNA, 19 nt, Homo sapiens
  misc_RNA (1)...(19): siRNA sense strand
gaggaguugucaauaacca

SEQ ID NO: 809517 - RNA, 19 nt, Homo sapiens
  misc_RNA (1)...(19): siRNA sense strand
gggcaacugagaauuacaa

SEQ ID NO: 809518 - RNA, 19 nt, Homo sapiens
  misc_RNA (1)...(19): siRNA sense strand
gaucagauacggagaugac

SEQ ID NO: 809519 - RNA, 19 nt, Homo sapiens
  misc_RNA (1)...(19): siRNA sense strand
ccaaugaccaucguggaaa

SEQ ID NO: 809520 - RNA, 19 nt, Homo sapiens
  misc_RNA (1)...(19): siRNA sense strand
ucaaggagucuucauuaag

SEQ ID NO: 809521 - RNA, 19 nt, Homo sapiens
  misc_RNA (1)...(19): siRNA sense strand
ugaagcuagucaccacuga

SEQ ID NO: 809522 - RNA, 19 nt, Homo sapiens
  misc_RNA (1)...(19): siRNA sense strand
ggcccucgauggcuauaau

SEQ ID NO: 809523 - RNA, 19 nt, Homo sapiens
  misc_RNA (1)...(19): siRNA sense strand
gcccugaauuuccagaagu

SEQ ID NO: 809524 - RNA, 19 nt, Homo sapiens
  misc_RNA (1)...(19): siRNA sense strand
auacggagaugacaaaaga

SEQ ID NO: 809525 - RNA, 19 nt, Homo sapiens
  misc_RNA (1)...(19): siRNA sense strand
gggugagccugaaggacaa

SEQ ID NO: 809526 - RNA, 19 nt, Homo sapiens
  misc_RNA (1)...(19): siRNA sense strand
acaaacaucuauggagaag

SEQ ID NO: 809527 - RNA, 19 nt, Homo sapiens
  misc_RNA (1)...(19): siRNA sense strand
ucacugugcguguuuccua

SEQ ID NO: 809528 - RNA, 19 nt, Homo sapiens
  misc_RNA (1)...(19): siRNA sense strand
ggaagccaccuacaucaac

SEQ ID NO: 809529 - RNA, 19 nt, Homo sapiens
  misc_RNA (1)...(19): siRNA sense strand
agugagaucaaccgaauuu

SEQ ID NO: 809530 - RNA, 19 nt, Homo sapiens
  misc_RNA (1)...(19): siRNA sense strand
ugagcaagguagugagauc

SEQ ID NO: 809531 - RNA, 19 nt, Homo sapiens
  misc_RNA (1)...(19): siRNA sense strand
agaaagccaaguccaagaa

SEQ ID NO: 809532 - RNA, 19 nt, Homo sapiens
  misc_RNA (1)...(19): siRNA sense strand
ccagauugcugagaucaac

SEQ ID NO: 809533 - RNA, 19 nt, Homo sapiens
  misc_RNA (1)...(19): siRNA sense strand
ggagcuggcuauccaugac

SEQ ID NO: 809534 - RNA, 19 nt, Homo sapiens
  misc_RNA (1)...(19): siRNA sense strand
ucaacaaaucgcucucauu

SEQ ID NO: 809535 - RNA, 19 nt, Homo sapiens
  misc_RNA (1)...(19): siRNA sense strand
gaaagccaaguccaagaag

SEQ ID NO: 809536 - RNA, 19 nt, Homo sapiens
  misc_RNA (1)...(19): siRNA sense strand
agaaugagcaagguaguga

SEQ ID NO: 809537 - RNA, 19 nt, Homo sapiens
  misc_RNA (1)...(19): siRNA sense strand
ggagaggaguugucaauaa

SEQ ID NO: 809538 - RNA, 19 nt, Homo sapiens
  misc_RNA (1)...(19): siRNA sense strand
uggagaagcugcccaguua

SEQ ID NO: 809539 - RNA, 19 nt, Homo sapiens
  misc_RNA (1)...(19): siRNA sense strand
gaaacgcuaucuucacuga

SEQ ID NO: 809540 - RNA, 19 nt, Homo sapiens
  misc_RNA (1)...(19): siRNA sense strand
caaaggaugugguuucuca

SEQ ID NO: 809541 - RNA, 19 nt, Homo sapiens
  misc_RNA (1)...(19): siRNA sense strand
acaaauccaucuugaauga

SEQ ID NO: 809542 - RNA, 19 nt, Homo sapiens
  misc_RNA (1)...(19): siRNA sense strand
ccaaggaggcccugaauuu

SEQ ID NO: 809543 - RNA, 19 nt, Homo sapiens
  misc_RNA (1)...(19): siRNA sense strand
ucaagaaccuggagaagga

SEQ ID NO: 809544 - RNA, 19 nt, Homo sapiens
  misc_RNA (1)...(19): siRNA sense strand
guacaucacuuccaaaauu

SEQ ID NO: 809545 - RNA, 19 nt, Homo sapiens
  misc_RNA (1)...(19): siRNA sense strand
caacaaaucgcucucauuc

SEQ ID NO: 809546 - RNA, 19 nt, Homo sapiens
  misc_RNA (1)...(19): siRNA sense strand
gcacaucaaugccaucaag

SEQ ID NO: 809547 - RNA, 19 nt, Homo sapiens
  misc_RNA (1)...(19): siRNA sense strand
ggaaguacacccucauuga

SEQ ID NO: 809548 - RNA, 19 nt, Homo sapiens
  misc_RNA (1)...(19): siRNA sense strand
ugacuuugcucaugaaaug

SEQ ID NO: 809549 - RNA, 19 nt, Homo sapiens
  misc_RNA (1)...(19): siRNA sense strand
gaaaacaaauccaucuuga

SEQ ID NO: 809550 - RNA, 19 nt, Homo sapiens
  misc_RNA (1)...(19): siRNA sense strand
ggacuugguuuaugagaca

SEQ ID NO: 809551 - RNA, 19 nt, Homo sapiens
  misc_RNA (1)...(19): siRNA sense strand
cagacagacuggucguuua

SEQ ID NO: 809552 - RNA, 19 nt, Homo sapiens
  misc_RNA (1)...(19): siRNA sense strand
guagugagaucaaccgaau

SEQ ID NO: 809553 - RNA, 19 nt, Homo sapiens
  misc_RNA (1)...(19): siRNA sense strand
gcaccuuugugaccuauga

SEQ ID NO: 809554 - RNA, 19 nt, Homo sapiens
  misc_RNA (1)...(19): siRNA sense strand
gaaggaagccaccuacauc

SEQ ID NO: 809555 - RNA, 19 nt, Homo sapiens
  misc_RNA (1)...(19): siRNA sense strand
caaggagucuucauuaagg

SEQ ID NO: 809556 - RNA, 19 nt, Homo sapiens
  misc_RNA (1)...(19): siRNA sense strand
ggugagaccaacaggauua

SEQ ID NO: 809557 - RNA, 19 nt, Homo sapiens
  misc_RNA (1)...(19): siRNA sense strand
ggcaagacauacaccauga

SEQ ID NO: 809558 - RNA, 19 nt, Homo sapiens
  misc_RNA (1)...(19): siRNA sense strand
ccaagaagacauucaaaga

SEQ ID NO: 809559 - RNA, 19 nt, Homo sapiens
  misc_RNA (1)...(19): siRNA sense strand
ccaccuacaucaacaaauc

SEQ ID NO: 809560 - RNA, 19 nt, Homo sapiens
  misc_RNA (1)...(19): siRNA sense strand
gagaggaguugucaauaac

SEQ ID NO: 809561 - RNA, 19 nt, Homo sapiens
  misc_RNA (1)...(19): siRNA sense strand
ggaagaaagccaaguccaa

SEQ ID NO: 809562 - RNA, 19 nt, Homo sapiens
  misc_RNA (1)...(19): siRNA sense strand
ggagaaggaacuagcacua

SEQ ID NO: 809563 - RNA, 19 nt, Homo sapiens
  misc_RNA (1)...(19): siRNA sense strand
gacgggagcuggcaagaca

SEQ ID NO: 809564 - RNA, 19 nt, Homo sapiens
  misc_RNA (1)...(19): siRNA sense strand
uaaguuggauggaguucuu

SEQ ID NO: 809565 - RNA, 19 nt, Homo sapiens
  misc_RNA (1)...(19): siRNA sense strand
ccucaaggagucuucauua

SEQ ID NO: 809566 - RNA, 19 nt, Homo sapiens
  misc_RNA (1)...(19): siRNA sense strand
gaagccaccuacaucaaca

SEQ ID NO: 809567 - RNA, 19 nt, Homo sapiens
  misc_RNA (1)...(19): siRNA sense strand
uaccaaaccugggaagaaa

SEQ ID NO: 809568 - RNA, 19 nt, Homo sapiens
  misc_RNA (1)...(19): siRNA sense strand
ccacugagccugccaucaa

SEQ ID NO: 809569 - RNA, 19 nt, Homo sapiens
  misc_RNA (1)...(19): siRNA sense strand
ggauggaguucuucacgau

SEQ ID NO: 809570 - RNA, 19 nt, Homo sapiens
  misc_RNA (1)...(19): siRNA sense strand
uugaggaguuuaagaauga

SEQ ID NO: 809571 - RNA, 19 nt, Homo sapiens
  misc_RNA (1)...(19): siRNA sense strand
ucaaggagguguucaacca

SEQ ID NO: 809572 - RNA, 19 nt, Homo sapiens
  misc_RNA (1)...(19): siRNA sense strand
ggaacuagcacuacucaag

SEQ ID NO: 809573 - RNA, 19 nt, Homo sapiens
  misc_RNA (1)...(19): siRNA sense strand
caacugagaauuacaagca

SEQ ID NO: 809574 - RNA, 19 nt, Homo sapiens
  misc_RNA (1)...(19): siRNA sense strand
ggauguugauggccaccua

SEQ ID NO: 809575 - RNA, 19 nt, Homo sapiens
  misc_RNA (1)...(19): siRNA sense strand
caaacccaccgaugacuuu

SEQ ID NO: 809576 - RNA, 19 nt, Homo sapiens
  misc_RNA (1)...(19): siRNA sense strand
gagaagcugcccaguuaga

SEQ ID NO: 809577 - RNA, 19 nt, Homo sapiens
  misc_RNA (1)...(19): siRNA sense strand
aaaguaugaugcugagaga

SEQ ID NO: 809578 - RNA, 19 nt, Homo sapiens
  misc_RNA (1)...(19): siRNA sense strand
aaacaucuauggagaagcu

SEQ ID NO: 809579 - RNA, 19 nt, Homo sapiens
  misc_RNA (1)...(19): siRNA sense strand
gacaaaagaagcauugaua

SEQ ID NO: 809580 - RNA, 19 nt, Homo sapiens
  misc_RNA (1)...(19): siRNA sense strand
auuaagggcuugucaguuc

SEQ ID NO: 809581 - RNA, 19 nt, Homo sapiens
  misc_RNA (1)...(19): siRNA sense strand
ugacaggaaugacuuugca

SEQ ID NO: 809582 - RNA, 19 nt, Homo sapiens
  misc_RNA (1)...(19): siRNA sense strand
gaagaacgccccacacaug

SEQ ID NO: 809583 - RNA, 19 nt, Homo sapiens
  misc_RNA (1)...(19): siRNA sense strand
cucaaggagucuucauuaa

SEQ ID NO: 809584 - RNA, 19 nt, Homo sapiens
  misc_RNA (1)...(19): siRNA sense strand
cccaggacuugguuuauga

SEQ ID NO: 809585 - RNA, 19 nt, Homo sapiens
  misc_RNA (1)...(19): siRNA sense strand
ccacacagcacaucaaugc

SEQ ID NO: 809586 - RNA, 19 nt, Homo sapiens
  misc_RNA (1)...(19): siRNA sense strand
caagaagacauucaaagag

SEQ ID NO: 809587 - RNA, 19 nt, Homo sapiens
  misc_RNA (1)...(19): siRNA sense strand
gacgagaucgacauaauca

SEQ ID NO: 809588 - RNA, 19 nt, Homo sapiens
  misc_RNA (1)...(19): siRNA sense strand
gauuauagccucccacacu

SEQ ID NO: 809589 - RNA, 19 nt, Homo sapiens
  misc_RNA (1)...(19): siRNA sense strand
ugagacaguugcaaaggau

SEQ ID NO: 809590 - RNA, 19 nt, Homo sapiens
  misc_RNA (1)...(19): siRNA sense strand
ggacgagaucgacauaauc

SEQ ID NO: 809591 - RNA, 19 nt, Homo sapiens
  misc_RNA (1)...(19): siRNA sense strand
agacagacuggucguuuaa

SEQ ID NO: 809592 - RNA, 19 nt, Homo sapiens
  misc_RNA (1)...(19): siRNA sense strand
caaccgaauuuucaaagaa

SEQ ID NO: 809593 - RNA, 19 nt, Homo sapiens
  misc_RNA (1)...(19): siRNA sense strand
gagccugccaucaaugaaa

SEQ ID NO: 809594 - RNA, 19 nt, Homo sapiens
  misc_RNA (1)...(19): siRNA sense strand
acaaaucgcucucauuccu

SEQ ID NO: 809595 - RNA, 19 nt, Homo sapiens
  misc_RNA (1)...(19): siRNA sense strand
aaugagagccuguuugauc

SEQ ID NO: 809596 - RNA, 19 nt, Homo sapiens
  misc_RNA (1)...(19): siRNA sense strand
auaaucagccuuagacaga

SEQ ID NO: 809597 - RNA, 19 nt, Homo sapiens
  misc_RNA (1)...(19): siRNA sense strand
gagaccaacaggauuauag

SEQ ID NO: 809598 - RNA, 19 nt, Homo sapiens
  misc_RNA (1)...(19): siRNA sense strand
ucaauaaccaacagacaga

SEQ ID NO: 809599 - RNA, 19 nt, Homo sapiens
  misc_RNA (1)...(19): siRNA sense strand
caaggaggcccugaauuuc

SEQ ID NO: 809600 - RNA, 19 nt, Homo sapiens
  misc_RNA (1)...(19): siRNA sense strand
agauugaugugaccaagga

SEQ ID NO: 809601 - RNA, 19 nt, Homo sapiens
  misc_RNA (1)...(19): siRNA sense strand
gaaguacacccucauugac

SEQ ID NO: 809602 - RNA, 19 nt, Homo sapiens
  misc_RNA (1)...(19): siRNA sense strand
cgacauaaucagccuuaga

SEQ ID NO: 809603 - RNA, 19 nt, Homo sapiens
  misc_RNA (1)...(19): siRNA sense strand
guaugaugcugagagaaug

SEQ ID NO: 809604 - RNA, 19 nt, Homo sapiens
  misc_RNA (1)...(19): siRNA sense strand
ccacacaugccaucacugu

SEQ ID NO: 809605 - RNA, 19 nt, Homo sapiens
  misc_RNA (1)...(19): siRNA sense strand
caagacauacaccaugaug

SEQ ID NO: 809606 - RNA, 19 nt, Homo sapiens
  misc_RNA (1)...(19): siRNA sense strand
uggacgagaucgacauaau

SEQ ID NO: 809607 - RNA, 19 nt, Homo sapiens
  misc_RNA (1)...(19): siRNA sense strand
gacaaacaucuauggagaa

SEQ ID NO: 809608 - RNA, 19 nt, Homo sapiens
  misc_RNA (1)...(19): siRNA sense strand
caguucaccucacaaguca

SEQ ID NO: 809609 - RNA, 19 nt, Homo sapiens
  misc_RNA (1)...(19): siRNA sense strand
auaaugagagccuguuuga

SEQ ID NO: 809610 - RNA, 19 nt, Homo sapiens
  misc_RNA (1)...(19): siRNA sense strand
ccaaguccaagaagacauu

SEQ ID NO: 809611 - RNA, 19 nt, Homo sapiens
  misc_RNA (1)...(19): siRNA sense strand
aaagccaaguccaagaaga

SEQ ID NO: 809612 - RNA, 19 nt, Homo sapiens
  misc_RNA (1)...(19): siRNA sense strand
gaaccuggagaaggaacua

SEQ ID NO: 809613 - RNA, 19 nt, Homo sapiens
  misc_RNA (1)...(19): siRNA sense strand
cugagagaauggucaagaa

SEQ ID NO: 809614 - RNA, 19 nt, Homo sapiens
  misc_RNA (1)...(19): siRNA sense strand
agacuggucguuuaaguug

SEQ ID NO: 809615 - RNA, 19 nt, Homo sapiens
  misc_RNA (1)...(19): siRNA sense strand
cagauacggagaugacaaa

SEQ ID NO: 809616 - RNA, 19 nt, Homo sapiens
  misc_RNA (1)...(19): siRNA sense strand
gaggaguugucaauaacca

SEQ ID NO: 809617 - RNA, 19 nt, Homo sapiens
  misc_RNA (1)...(19): siRNA sense strand
gggcaacugagaauuacaa

SEQ ID NO: 809618 - RNA, 19 nt, Homo sapiens
  misc_RNA (1)...(19): siRNA sense strand
gaucagauacggagaugac

SEQ ID NO: 809619 - RNA, 19 nt, Homo sapiens
  misc_RNA (1)...(19): siRNA sense strand
ccaaugaccaucguggaaa

SEQ ID NO: 809620 - RNA, 19 nt, Homo sapiens
  misc_RNA (1)...(19): siRNA sense strand
ucaaggagucuucauuaag

SEQ ID NO: 809621 - RNA, 19 nt, Homo sapiens
  misc_RNA (1)...(19): siRNA sense strand
ugaagcuagucaccacuga

SEQ ID NO: 809622 - RNA, 19 nt, Homo sapiens
  misc_RNA (1)...(19): siRNA sense strand
ggcccucgauggcuauaau

SEQ ID NO: 809623 - RNA, 19 nt, Homo sapiens
  misc_RNA (1)...(19): siRNA sense strand
gcccugaauuuccagaagu

SEQ ID NO: 809624 - RNA, 19 nt, Homo sapiens
  misc_RNA (1)...(19): siRNA sense strand
auacggagaugacaaaaga

SEQ ID NO: 809625 - RNA, 19 nt, Homo sapiens
  misc_RNA (1)...(19): siRNA sense strand
gggugagccugaaggacaa

SEQ ID NO: 809626 - RNA, 19 nt, Homo sapiens
  misc_RNA (1)...(19): siRNA sense strand
acaaacaucuauggagaag

SEQ ID NO: 809627 - RNA, 19 nt, Homo sapiens
  misc_RNA (1)...(19): siRNA sense strand
ucacugugcguguuuccua

SEQ ID NO: 809628 - RNA, 19 nt, Homo sapiens
  misc_RNA (1)...(19): siRNA sense strand
ggaagccaccuacaucaac

SEQ ID NO: 809629 - RNA, 19 nt, Homo sapiens
  misc_RNA (1)...(19): siRNA sense strand
agugagaucaaccgaauuu

SEQ ID NO: 809630 - RNA, 19 nt, Homo sapiens
  misc_RNA (1)...(19): siRNA sense strand
ugagcaagguagugagauc

SEQ ID NO: 809631 - RNA, 19 nt, Homo sapiens
  misc_RNA (1)...(19): siRNA sense strand
agaaagccaaguccaagaa

SEQ ID NO: 809632 - RNA, 19 nt, Homo sapiens
  misc_RNA (1)...(19): siRNA sense strand
ccagauugcugagaucaac

SEQ ID NO: 809633 - RNA, 19 nt, Homo sapiens
  misc_RNA (1)...(19): siRNA sense strand
ggagcuggcuauccaugac

SEQ ID NO: 809634 - RNA, 19 nt, Homo sapiens
  misc_RNA (1)...(19): siRNA sense strand
ucaacaaaucgcucucauu

SEQ ID NO: 809635 - RNA, 19 nt, Homo sapiens
  misc_RNA (1)...(19): siRNA sense strand
gaaagccaaguccaagaag

SEQ ID NO: 809636 - RNA, 19 nt, Homo sapiens
  misc_RNA (1)...(19): siRNA sense strand
agaaugagcaagguaguga

SEQ ID NO: 809637 - RNA, 19 nt, Homo sapiens
  misc_RNA (1)...(19): siRNA sense strand
gaacguaacccuucagaau

SEQ ID NO: 809638 - RNA, 19 nt, Homo sapiens
  misc_RNA (1)...(19): siRNA sense strand
cuggagaacuuuaaacuaa

SEQ ID NO: 809639 - RNA, 19 nt, Homo sapiens
  misc_RNA (1)...(19): siRNA sense strand
gaaacucccucuggugaug

SEQ ID NO: 809640 - RNA, 19 nt, Homo sapiens
  misc_RNA (1)...(19): siRNA sense strand
cuaaagaacugugguagug

SEQ ID NO: 809641 - RNA, 19 nt, Homo sapiens
  misc_RNA (1)...(19): siRNA sense strand
ugacagaggagcagcauaa

SEQ ID NO: 809642 - RNA, 19 nt, Homo sapiens
  misc_RNA (1)...(19): siRNA sense strand
agagagacauuaacagguu

SEQ ID NO: 809643 - RNA, 19 nt, Homo sapiens
  misc_RNA (1)...(19): siRNA sense strand
gacauuaacagguuucuga

SEQ ID NO: 809644 - RNA, 19 nt, Homo sapiens
  misc_RNA (1)...(19): siRNA sense strand
gagcugcgcaguuucauug

SEQ ID NO: 809645 - RNA, 19 nt, Homo sapiens
  misc_RNA (1)...(19): siRNA sense strand
gaacugugguaguggagau

SEQ ID NO: 809646 - RNA, 19 nt, Homo sapiens
  misc_RNA (1)...(19): siRNA sense strand
gagagacauuaacagguuu

SEQ ID NO: 809647 - RNA, 19 nt, Homo sapiens
  misc_RNA (1)...(19): siRNA sense strand
gaaguuaaagaaucagaug

SEQ ID NO: 809648 - RNA, 19 nt, Homo sapiens
  misc_RNA (1)...(19): siRNA sense strand
gauagacucugaacguaac

SEQ ID NO: 809649 - RNA, 19 nt, Homo sapiens
  misc_RNA (1)...(19): siRNA sense strand
gcauaagucuguggucauc

SEQ ID NO: 809650 - RNA, 19 nt, Homo sapiens
  misc_RNA (1)...(19): siRNA sense strand
ucaaggacuuauucaugaa

SEQ ID NO: 809651 - RNA, 19 nt, Homo sapiens
  misc_RNA (1)...(19): siRNA sense strand
gaagggcuggguaauguug

SEQ ID NO: 809652 - RNA, 19 nt, Homo sapiens
  misc_RNA (1)...(19): siRNA sense strand
gcagcugguuugaggaugu

SEQ ID NO: 809653 - RNA, 19 nt, Homo sapiens
  misc_RNA (1)...(19): siRNA sense strand
uuacacuccuguugaaguu

SEQ ID NO: 809654 - RNA, 19 nt, Homo sapiens
  misc_RNA (1)...(19): siRNA sense strand
agccagagcugcgcaguuu

SEQ ID NO: 809655 - RNA, 19 nt, Homo sapiens
  misc_RNA (1)...(19): siRNA sense strand
gaaguaaccgguuuuguga

SEQ ID NO: 809656 - RNA, 19 nt, Homo sapiens
  misc_RNA (1)...(19): siRNA sense strand
ggauggagaugaaaaggaa

SEQ ID NO: 809657 - RNA, 19 nt, Homo sapiens
  misc_RNA (1)...(19): siRNA sense strand
uucaaggacuuauucauga

SEQ ID NO: 809658 - RNA, 19 nt, Homo sapiens
  misc_RNA (1)...(19): siRNA sense strand
acacuccuguugaaguuaa

SEQ ID NO: 809659 - RNA, 19 nt, Homo sapiens
  misc_RNA (1)...(19): siRNA sense strand
caguaacgauagacucuga

SEQ ID NO: 809660 - RNA, 19 nt, Homo sapiens
  misc_RNA (1)...(19): siRNA sense strand
aggauuggaugcaagcuuu

SEQ ID NO: 809661 - RNA, 19 nt, Homo sapiens
  misc_RNA (1)...(19): siRNA sense strand
ccaaaggguuguucuucuc

SEQ ID NO: 809662 - RNA, 19 nt, Homo sapiens
  misc_RNA (1)...(19): siRNA sense strand
ggagauacuuuugaagauu

SEQ ID NO: 809663 - RNA, 19 nt, Homo sapiens
  misc_RNA (1)...(19): siRNA sense strand
gucgauggauggagaugaa

SEQ ID NO: 809664 - RNA, 19 nt, Homo sapiens
  misc_RNA (1)...(19): siRNA sense strand
gcuacaugcugcuuugagu

SEQ ID NO: 809665 - RNA, 19 nt, Homo sapiens
  misc_RNA (1)...(19): siRNA sense strand
uaucugagcagcugguuug

SEQ ID NO: 809666 - RNA, 19 nt, Homo sapiens
  misc_RNA (1)...(19): siRNA sense strand
acguaacccuucagaauau

SEQ ID NO: 809667 - RNA, 19 nt, Homo sapiens
  misc_RNA (1)...(19): siRNA sense strand
uuaccgaguugguuguuau

SEQ ID NO: 809668 - RNA, 19 nt, Homo sapiens
  misc_RNA (1)...(19): siRNA sense strand
acaaagagagacauuaaca

SEQ ID NO: 809669 - RNA, 19 nt, Homo sapiens
  misc_RNA (1)...(19): siRNA sense strand
uacaugcugcuuugaguua

SEQ ID NO: 809670 - RNA, 19 nt, Homo sapiens
  misc_RNA (1)...(19): siRNA sense strand
aacguaacccuucagaaua

SEQ ID NO: 809671 - RNA, 19 nt, Homo sapiens
  misc_RNA (1)...(19): siRNA sense strand
cgauagacucugaacguaa

SEQ ID NO: 809672 - RNA, 19 nt, Homo sapiens
  misc_RNA (1)...(19): siRNA sense strand
uaaacuaaaggccauacaa

SEQ ID NO: 809673 - RNA, 19 nt, Homo sapiens
  misc_RNA (1)...(19): siRNA sense strand
cagaggagcagcauaaguc

SEQ ID NO: 809674 - RNA, 19 nt, Homo sapiens
  misc_RNA (1)...(19): siRNA sense strand
gagauacuuuugaagauug

SEQ ID NO: 809675 - RNA, 19 nt, Homo sapiens
  misc_RNA (1)...(19): siRNA sense strand
uugaagggcuggguaaugu

SEQ ID NO: 809676 - RNA, 19 nt, Homo sapiens
  misc_RNA (1)...(19): siRNA sense strand
uguuacauguuccuaaaga

SEQ ID NO: 809677 - RNA, 19 nt, Homo sapiens
  misc_RNA (1)...(19): siRNA sense strand
acgauagacucugaacgua

SEQ ID NO: 809678 - RNA, 19 nt, Homo sapiens
  misc_RNA (1)...(19): siRNA sense strand
guuacauguuccuaaagaa

SEQ ID NO: 809679 - RNA, 19 nt, Homo sapiens
  misc_RNA (1)...(19): siRNA sense strand
ggaaguaaccgguuuugug

SEQ ID NO: 809680 - RNA, 19 nt, Homo sapiens
  misc_RNA (1)...(19): siRNA sense strand
guuaccgaguugguuguua

SEQ ID NO: 809681 - RNA, 19 nt, Homo sapiens
  misc_RNA (1)...(19): siRNA sense strand
ggguuguucuucucuuuca

SEQ ID NO: 809682 - RNA, 19 nt, Homo sapiens
  misc_RNA (1)...(19): siRNA sense strand
cgaguugguuguuauuacu

SEQ ID NO: 809683 - RNA, 19 nt, Homo sapiens
  misc_RNA (1)...(19): siRNA sense strand
gauguuguaugcccaaucc

SEQ ID NO: 809684 - RNA, 19 nt, Homo sapiens
  misc_RNA (1)...(19): siRNA sense strand
uggguaauguugcaucugu

SEQ ID NO: 809685 - RNA, 19 nt, Homo sapiens
  misc_RNA (1)...(19): siRNA sense strand
cagccucaguucugcaaug

SEQ ID NO: 809686 - RNA, 19 nt, Homo sapiens
  misc_RNA (1)...(19): siRNA sense strand
cacauaaaauccuaucuga

SEQ ID NO: 809687 - RNA, 19 nt, Homo sapiens
  misc_RNA (1)...(19): siRNA sense strand
aaggguuguucuucucuuu

SEQ ID NO: 809688 - RNA, 19 nt, Homo sapiens
  misc_RNA (1)...(19): siRNA sense strand
uuuaaauggugccaaagga

SEQ ID NO: 809689 - RNA, 19 nt, Homo sapiens
  misc_RNA (1)...(19): siRNA sense strand
gcaccaugacuucuuugug

SEQ ID NO: 809690 - RNA, 19 nt, Homo sapiens
  misc_RNA (1)...(19): siRNA sense strand
cugcgcaguuucauugcua

SEQ ID NO: 809691 - RNA, 19 nt, Homo sapiens
  misc_RNA (1)...(19): siRNA sense strand
cauacaagacacaaacaau

SEQ ID NO: 809692 - RNA, 19 nt, Homo sapiens
  misc_RNA (1)...(19): siRNA sense strand
cuaaaggccauacaagaca

SEQ ID NO: 809693 - RNA, 19 nt, Homo sapiens
  misc_RNA (1)...(19): siRNA sense strand
aaggcaccaugacuucuuu

SEQ ID NO: 809694 - RNA, 19 nt, Homo sapiens
  misc_RNA (1)...(19): siRNA sense strand
cuucaaggacuuauucaug

SEQ ID NO: 809695 - RNA, 19 nt, Homo sapiens
  misc_RNA (1)...(19): siRNA sense strand
uuaacagguuucugagugu

SEQ ID NO: 809696 - RNA, 19 nt, Homo sapiens
  misc_RNA (1)...(19): siRNA sense strand
cugaaacaguaacgauaga

SEQ ID NO: 809697 - RNA, 19 nt, Homo sapiens
  misc_RNA (1)...(19): siRNA sense strand
uugcaucuguggagcuaaa

SEQ ID NO: 809698 - RNA, 19 nt, Homo sapiens
  misc_RNA (1)...(19): siRNA sense strand
ugaauuggacaaguacauu

SEQ ID NO: 809699 - RNA, 19 nt, Homo sapiens
  misc_RNA (1)...(19): siRNA sense strand
aaacuaaaggccauacaag

SEQ ID NO: 809700 - RNA, 19 nt, Homo sapiens
  misc_RNA (1)...(19): siRNA sense strand
ccagagcugcgcaguuuca

SEQ ID NO: 809701 - RNA, 19 nt, Homo sapiens
  misc_RNA (1)...(19): siRNA sense strand
agucuguggucaucgauug

SEQ ID NO: 809702 - RNA, 19 nt, Homo sapiens
  misc_RNA (1)...(19): siRNA sense strand
uggcacaaaugcagaaacu

SEQ ID NO: 809703 - RNA, 19 nt, Homo sapiens
  misc_RNA (1)...(19): siRNA sense strand
gagcagcugguuugaggau

SEQ ID NO: 809704 - RNA, 19 nt, Homo sapiens
  misc_RNA (1)...(19): siRNA sense strand
gaaacaguaacgauagacu

SEQ ID NO: 809705 - RNA, 19 nt, Homo sapiens
  misc_RNA (1)...(19): siRNA sense strand
ugcaggaaguaaccgguuu

SEQ ID NO: 809706 - RNA, 19 nt, Homo sapiens
  misc_RNA (1)...(19): siRNA sense strand
ccgaguugguuguuauuac

SEQ ID NO: 809707 - RNA, 19 nt, Homo sapiens
  misc_RNA (1)...(19): siRNA sense strand
gcagcucccagccucaguu

SEQ ID NO: 809708 - RNA, 19 nt, Homo sapiens
  misc_RNA (1)...(19): siRNA sense strand
guuguaugcccaauccaaa

SEQ ID NO: 809709 - RNA, 19 nt, Homo sapiens
  misc_RNA (1)...(19): siRNA sense strand
caaggggccuggagaguca

SEQ ID NO: 809710 - RNA, 19 nt, Homo sapiens
  misc_RNA (1)...(19): siRNA sense strand
gggccuggagagucacaua

SEQ ID NO: 809711 - RNA, 19 nt, Homo sapiens
  misc_RNA (1)...(19): siRNA sense strand
guuugaggauguuguaugc

SEQ ID NO: 809712 - RNA, 19 nt, Homo sapiens
  misc_RNA (1)...(19): siRNA sense strand
ggccuggagagucacauaa

SEQ ID NO: 809713 - RNA, 19 nt, Homo sapiens
  misc_RNA (1)...(19): siRNA sense strand
uaaucuaccauccgaagug

SEQ ID NO: 809714 - RNA, 19 nt, Homo sapiens
  misc_RNA (1)...(19): siRNA sense strand
caaagagagacauuaacag

SEQ ID NO: 809715 - RNA, 19 nt, Homo sapiens
  misc_RNA (1)...(19): siRNA sense strand
ccauacaagacacaaacaa

SEQ ID NO: 809716 - RNA, 19 nt, Homo sapiens
  misc_RNA (1)...(19): siRNA sense strand
gccuggagagucacauaaa

SEQ ID NO: 809717 - RNA, 19 nt, Homo sapiens
  misc_RNA (1)...(19): siRNA sense strand
gaggauuggaugcaagcuu

SEQ ID NO: 809718 - RNA, 19 nt, Homo sapiens
  misc_RNA (1)...(19): siRNA sense strand
gaggacggaagcccaagug

SEQ ID NO: 809719 - RNA, 19 nt, Homo sapiens
  misc_RNA (1)...(19): siRNA sense strand
ucugcuacaugcugcuuug

SEQ ID NO: 809720 - RNA, 19 nt, Homo sapiens
  misc_RNA (1)...(19): siRNA sense strand
aaaggguuguucuucucuu

SEQ ID NO: 809721 - RNA, 19 nt, Homo sapiens
  misc_RNA (1)...(19): siRNA sense strand
gagccagagcugcgcaguu

SEQ ID NO: 809722 - RNA, 19 nt, Homo sapiens
  misc_RNA (1)...(19): siRNA sense strand
cagcugguuugaggauguu

SEQ ID NO: 809723 - RNA, 19 nt, Homo sapiens
  misc_RNA (1)...(19): siRNA sense strand
auaagucuguggucaucga

SEQ ID NO: 809724 - RNA, 19 nt, Homo sapiens
  misc_RNA (1)...(19): siRNA sense strand
uccaaaggguuguucuucu

SEQ ID NO: 809725 - RNA, 19 nt, Homo sapiens
  misc_RNA (1)...(19): siRNA sense strand
gguuugaggauguuguaug

SEQ ID NO: 809726 - RNA, 19 nt, Homo sapiens
  misc_RNA (1)...(19): siRNA sense strand
gcuggguaauguugcaucu

SEQ ID NO: 809727 - RNA, 19 nt, Homo sapiens
  misc_RNA (1)...(19): siRNA sense strand
gacaggcagaaaugaauca

SEQ ID NO: 809728 - RNA, 19 nt, Homo sapiens
  misc_RNA (1)...(19): siRNA sense strand
gcucccagccucaguucug

SEQ ID NO: 809729 - RNA, 19 nt, Homo sapiens
  misc_RNA (1)...(19): siRNA sense strand
cuguugaaguuaaagaauc

SEQ ID NO: 809730 - RNA, 19 nt, Homo sapiens
  misc_RNA (1)...(19): siRNA sense strand
ccugaaacaguaacgauag

SEQ ID NO: 809731 - RNA, 19 nt, Homo sapiens
  misc_RNA (1)...(19): siRNA sense strand
cuacaugcugcuuugaguu

SEQ ID NO: 809732 - RNA, 19 nt, Homo sapiens
  misc_RNA (1)...(19): siRNA sense strand
cgacaggcagaaaugaauc

SEQ ID NO: 809733 - RNA, 19 nt, Homo sapiens
  misc_RNA (1)...(19): siRNA sense strand
aacuaaaggccauacaaga

SEQ ID NO: 809734 - RNA, 19 nt, Homo sapiens
  misc_RNA (1)...(19): siRNA sense strand
cgacaaggauccagauaaa

SEQ ID NO: 809735 - RNA, 19 nt, Homo sapiens
  misc_RNA (1)...(19): siRNA sense strand
guacuuggauucaucagaa

SEQ ID NO: 809736 - RNA, 19 nt, Homo sapiens
  misc_RNA (1)...(19): siRNA sense strand
gccaagagcuagagguuga

SEQ ID NO: 809737 - RNA, 19 nt, Homo sapiens
  misc_RNA (1)...(19): siRNA sense strand
gcuagagguugaagucuuu

SEQ ID NO: 809738 - RNA, 19 nt, Homo sapiens
  misc_RNA (1)...(19): siRNA sense strand
gguaugaccugauggacaa

SEQ ID NO: 809739 - RNA, 19 nt, Homo sapiens
  misc_RNA (1)...(19): siRNA sense strand
ccaagcaccucagcccuua

SEQ ID NO: 809740 - RNA, 19 nt, Homo sapiens
  misc_RNA (1)...(19): siRNA sense strand
ugaccaaccugcuggauau

SEQ ID NO: 809741 - RNA, 19 nt, Homo sapiens
  misc_RNA (1)...(19): siRNA sense strand
gacccugaguccugaauuu

SEQ ID NO: 809742 - RNA, 19 nt, Homo sapiens
  misc_RNA (1)...(19): siRNA sense strand
cccgucagcugccaucuua

SEQ ID NO: 809743 - RNA, 19 nt, Homo sapiens
  misc_RNA (1)...(19): siRNA sense strand
cugaauggcucaauaagau

SEQ ID NO: 809744 - RNA, 19 nt, Homo sapiens
  misc_RNA (1)...(19): siRNA sense strand
guacuacagugaagaacga

SEQ ID NO: 809745 - RNA, 19 nt, Homo sapiens
  misc_RNA (1)...(19): siRNA sense strand
ggaugagagugccuccuuu

SEQ ID NO: 809746 - RNA, 19 nt, Homo sapiens
  misc_RNA (1)...(19): siRNA sense strand
gaaaagccauugcgcauca

SEQ ID NO: 809747 - RNA, 19 nt, Homo sapiens
  misc_RNA (1)...(19): siRNA sense strand
ggacagggaugaccaaccu

SEQ ID NO: 809748 - RNA, 19 nt, Homo sapiens
  misc_RNA (1)...(19): siRNA sense strand
gcagauugauguggaagug

SEQ ID NO: 809749 - RNA, 19 nt, Homo sapiens
  misc_RNA (1)...(19): siRNA sense strand
gcccugcuauccaucuaua

SEQ ID NO: 809750 - RNA, 19 nt, Homo sapiens
  misc_RNA (1)...(19): siRNA sense strand
ggaugucucugucaagucu

SEQ ID NO: 809751 - RNA, 19 nt, Homo sapiens
  misc_RNA (1)...(19): siRNA sense strand
uaggugaugugcagauuga

SEQ ID NO: 809752 - RNA, 19 nt, Homo sapiens
  misc_RNA (1)...(19): siRNA sense strand
uagaauggcugucacuuuu

SEQ ID NO: 809753 - RNA, 19 nt, Homo sapiens
  misc_RNA (1)...(19): siRNA sense strand
gcaggugaauaguuugauc

SEQ ID NO: 809754 - RNA, 19 nt, Homo sapiens
  misc_RNA (1)...(19): siRNA sense strand
gguccaaacuccagacucu

SEQ ID NO: 809755 - RNA, 19 nt, Homo sapiens
  misc_RNA (1)...(19): siRNA sense strand
acaaggauccagauaaaga

SEQ ID NO: 809756 - RNA, 19 nt, Homo sapiens
  misc_RNA (1)...(19): siRNA sense strand
ucccacugcugcugaguua

SEQ ID NO: 809757 - RNA, 19 nt, Homo sapiens
  misc_RNA (1)...(19): siRNA sense strand
gaugauugguucccucuac

SEQ ID NO: 809758 - RNA, 19 nt, Homo sapiens
  misc_RNA (1)...(19): siRNA sense strand
ggacaaggaugauuuucug

SEQ ID NO: 809759 - RNA, 19 nt, Homo sapiens
  misc_RNA (1)...(19): siRNA sense strand
ggauguagggaagguguua

SEQ ID NO: 809760 - RNA, 19 nt, Homo sapiens
  misc_RNA (1)...(19): siRNA sense strand
gggcaagucagacccauau

SEQ ID NO: 809761 - RNA, 19 nt, Homo sapiens
  misc_RNA (1)...(19): siRNA sense strand
ggacguggacagugagaau

SEQ ID NO: 809762 - RNA, 19 nt, Homo sapiens
  misc_RNA (1)...(19): siRNA sense strand
aacaguggcuuccuugaug

SEQ ID NO: 809763 - RNA, 19 nt, Homo sapiens
  misc_RNA (1)...(19): siRNA sense strand
ggacuugaacaucagcuau

SEQ ID NO: 809764 - RNA, 19 nt, Homo sapiens
  misc_RNA (1)...(19): siRNA sense strand
uggcggugcugacuucauu

SEQ ID NO: 809765 - RNA, 19 nt, Homo sapiens
  misc_RNA (1)...(19): siRNA sense strand
ccaagacuauuucgcaaac

SEQ ID NO: 809766 - RNA, 19 nt, Homo sapiens
  misc_RNA (1)...(19): siRNA sense strand
ucaugaggauccuguacuu

SEQ ID NO: 809767 - RNA, 19 nt, Homo sapiens
  misc_RNA (1)...(19): siRNA sense strand
cagcagcucugguccaaac

SEQ ID NO: 809768 - RNA, 19 nt, Homo sapiens
  misc_RNA (1)...(19): siRNA sense strand
ggagcucgaugugcaagug

SEQ ID NO: 809769 - RNA, 19 nt, Homo sapiens
  misc_RNA (1)...(19): siRNA sense strand
acaaggaacccaacccuau

SEQ ID NO: 809770 - RNA, 19 nt, Homo sapiens
  misc_RNA (1)...(19): siRNA sense strand
gaagaacucaacccacagu

SEQ ID NO: 809771 - RNA, 19 nt, Homo sapiens
  misc_RNA (1)...(19): siRNA sense strand
ugaguuccaaggacaaaua

SEQ ID NO: 809772 - RNA, 19 nt, Homo sapiens
  misc_RNA (1)...(19): siRNA sense strand
gcugaauggcucaauaaga

SEQ ID NO: 809773 - RNA, 19 nt, Homo sapiens
  misc_RNA (1)...(19): siRNA sense strand
ucuaauuccuccuucaugu

SEQ ID NO: 809774 - RNA, 19 nt, Homo sapiens
  misc_RNA (1)...(19): siRNA sense strand
gaaacuggagcagguucua

SEQ ID NO: 809775 - RNA, 19 nt, Homo sapiens
  misc_RNA (1)...(19): siRNA sense strand
ggaacccaacccuauggua

SEQ ID NO: 809776 - RNA, 19 nt, Homo sapiens
  misc_RNA (1)...(19): siRNA sense strand
gcgcaucauuggagucaag

SEQ ID NO: 809777 - RNA, 19 nt, Homo sapiens
  misc_RNA (1)...(19): siRNA sense strand
ugaaacugacucuguggua

SEQ ID NO: 809778 - RNA, 19 nt, Homo sapiens
  misc_RNA (1)...(19): siRNA sense strand
cuagaauggcugucacuuu

SEQ ID NO: 809779 - RNA, 19 nt, Homo sapiens
  misc_RNA (1)...(19): siRNA sense strand
ugccugaccuucaagaugu

SEQ ID NO: 809780 - RNA, 19 nt, Homo sapiens
  misc_RNA (1)...(19): siRNA sense strand
gauacuggagccacucauu

SEQ ID NO: 809781 - RNA, 19 nt, Homo sapiens
  misc_RNA (1)...(19): siRNA sense strand
auguggaagugaagaaaua

SEQ ID NO: 809782 - RNA, 19 nt, Homo sapiens
  misc_RNA (1)...(19): siRNA sense strand
gaugaggcccagagacgaa

SEQ ID NO: 809783 - RNA, 19 nt, Homo sapiens
  misc_RNA (1)...(19): siRNA sense strand
ccugaguccugaauuuaau

SEQ ID NO: 809784 - RNA, 19 nt, Homo sapiens
  misc_RNA (1)...(19): siRNA sense strand
cggcagcgccuaacacaug

SEQ ID NO: 809785 - RNA, 19 nt, Homo sapiens
  misc_RNA (1)...(19): siRNA sense strand
caccucagcccuuaugcua

SEQ ID NO: 809786 - RNA, 19 nt, Homo sapiens
  misc_RNA (1)...(19): siRNA sense strand
ccaaacuccagacucuaua

SEQ ID NO: 809787 - RNA, 19 nt, Homo sapiens
  misc_RNA (1)...(19): siRNA sense strand
caaggaacccaacccuaug

SEQ ID NO: 809788 - RNA, 19 nt, Homo sapiens
  misc_RNA (1)...(19): siRNA sense strand
cugcuggacuugaacauca

SEQ ID NO: 809789 - RNA, 19 nt, Homo sapiens
  misc_RNA (1)...(19): siRNA sense strand
gcagaaugaagcuggaugu

SEQ ID NO: 809790 - RNA, 19 nt, Homo sapiens
  misc_RNA (1)...(19): siRNA sense strand
gcagcuacauggcguuuug

SEQ ID NO: 809791 - RNA, 19 nt, Homo sapiens
  misc_RNA (1)...(19): siRNA sense strand
ugguacaacugucaauuca

SEQ ID NO: 809792 - RNA, 19 nt, Homo sapiens
  misc_RNA (1)...(19): siRNA sense strand
cagcugccaucuuaguugu

SEQ ID NO: 809793 - RNA, 19 nt, Homo sapiens
  misc_RNA (1)...(19): siRNA sense strand
gaaagaacggagccuucga

SEQ ID NO: 809794 - RNA, 19 nt, Homo sapiens
  misc_RNA (1)...(19): siRNA sense strand
gcaaagccagacccagguu

SEQ ID NO: 809795 - RNA, 19 nt, Homo sapiens
  misc_RNA (1)...(19): siRNA sense strand
agauugauguggaagugaa

SEQ ID NO: 809796 - RNA, 19 nt, Homo sapiens
  misc_RNA (1)...(19): siRNA sense strand
gaaagcuggaugucucugu

SEQ ID NO: 809797 - RNA, 19 nt, Homo sapiens
  misc_RNA (1)...(19): siRNA sense strand
aaggcugaauggcucaaua

SEQ ID NO: 809798 - RNA, 19 nt, Homo sapiens
  misc_RNA (1)...(19): siRNA sense strand
ggucagcauuguucauggu

SEQ ID NO: 809799 - RNA, 19 nt, Homo sapiens
  misc_RNA (1)...(19): siRNA sense strand
acacugagagccuagaguu

SEQ ID NO: 809800 - RNA, 19 nt, Homo sapiens
  misc_RNA (1)...(19): siRNA sense strand
gccaguauauggagaagcu

SEQ ID NO: 809801 - RNA, 19 nt, Homo sapiens
  misc_RNA (1)...(19): siRNA sense strand
cgaaaacucucuauaugag

SEQ ID NO: 809802 - RNA, 19 nt, Homo sapiens
  misc_RNA (1)...(19): siRNA sense strand
gaauuuaaugaacgguuug

SEQ ID NO: 809803 - RNA, 19 nt, Homo sapiens
  misc_RNA (1)...(19): siRNA sense strand
gaccgcugguuuacacuca

SEQ ID NO: 809804 - RNA, 19 nt, Homo sapiens
  misc_RNA (1)...(19): siRNA sense strand
gaugagagugccuccuuuc

SEQ ID NO: 809805 - RNA, 19 nt, Homo sapiens
  misc_RNA (1)...(19): siRNA sense strand
ccacugcugcugaguuaga

SEQ ID NO: 809806 - RNA, 19 nt, Homo sapiens
  misc_RNA (1)...(19): siRNA sense strand
acaguggcuuccuugauga

SEQ ID NO: 809807 - RNA, 19 nt, Homo sapiens
  misc_RNA (1)...(19): siRNA sense strand
ugaggauccuguacuugga

SEQ ID NO: 809808 - RNA, 19 nt, Homo sapiens
  misc_RNA (1)...(19): siRNA sense strand
uuugucagaugcagagaaa

SEQ ID NO: 809809 - RNA, 19 nt, Homo sapiens
  misc_RNA (1)...(19): siRNA sense strand
cuuaugaggugaugguaca

SEQ ID NO: 809810 - RNA, 19 nt, Homo sapiens
  misc_RNA (1)...(19): siRNA sense strand
gcgaaaacucucuauauga

SEQ ID NO: 809811 - RNA, 19 nt, Homo sapiens
  misc_RNA (1)...(19): siRNA sense strand
cuagcguucuggaugauug

SEQ ID NO: 809812 - RNA, 19 nt, Homo sapiens
  misc_RNA (1)...(19): siRNA sense strand
guuccaaggacaaauaugu

SEQ ID NO: 809813 - RNA, 19 nt, Homo sapiens
  misc_RNA (1)...(19): siRNA sense strand
gggaugagagugccuccuu

SEQ ID NO: 809814 - RNA, 19 nt, Homo sapiens
  misc_RNA (1)...(19): siRNA sense strand
aagacuauuucgcaaacuu

SEQ ID NO: 809815 - RNA, 19 nt, Homo sapiens
  misc_RNA (1)...(19): siRNA sense strand
ggaccugauugccaaagac

SEQ ID NO: 809816 - RNA, 19 nt, Homo sapiens
  misc_RNA (1)...(19): siRNA sense strand
ggauucaucagaaauaugc

SEQ ID NO: 809817 - RNA, 19 nt, Homo sapiens
  misc_RNA (1)...(19): siRNA sense strand
acuccagacucuauaugaa

SEQ ID NO: 809818 - RNA, 19 nt, Homo sapiens
  misc_RNA (1)...(19): siRNA sense strand
caaacuccagacucuauau

SEQ ID NO: 809819 - RNA, 19 nt, Homo sapiens
  misc_RNA (1)...(19): siRNA sense strand
ucaagggcaugcagcuaca

SEQ ID NO: 809820 - RNA, 19 nt, Homo sapiens
  misc_RNA (1)...(19): siRNA sense strand
ggaccucacagaagaagag

SEQ ID NO: 809821 - RNA, 19 nt, Homo sapiens
  misc_RNA (1)...(19): siRNA sense strand
cuuaaacaguggcuuccuu

SEQ ID NO: 809822 - RNA, 19 nt, Homo sapiens
  misc_RNA (1)...(19): siRNA sense strand
ucacacgacuccugauagc

SEQ ID NO: 809823 - RNA, 19 nt, Homo sapiens
  misc_RNA (1)...(19): siRNA sense strand
cuugggacguggacaguga

SEQ ID NO: 809824 - RNA, 19 nt, Homo sapiens
  misc_RNA (1)...(19): siRNA sense strand
ugaaacuagucaugaggau

SEQ ID NO: 809825 - RNA, 19 nt, Homo sapiens
  misc_RNA (1)...(19): siRNA sense strand
cagacucuauaugaaacua

SEQ ID NO: 809826 - RNA, 19 nt, Homo sapiens
  misc_RNA (1)...(19): siRNA sense strand
agauugaaguggagguguu

SEQ ID NO: 809827 - RNA, 19 nt, Homo sapiens
  misc_RNA (1)...(19): siRNA sense strand
caagucagacccauaugca

SEQ ID NO: 809828 - RNA, 19 nt, Homo sapiens
  misc_RNA (1)...(19): siRNA sense strand
uucaagauguggcucaguu

SEQ ID NO: 809829 - RNA, 19 nt, Homo sapiens
  misc_RNA (1)...(19): siRNA sense strand
gcccgacccuagacaucaa

SEQ ID NO: 809830 - RNA, 19 nt, Homo sapiens
  misc_RNA (1)...(19): siRNA sense strand
gcaagucagacccauaugc

SEQ ID NO: 809831 - RNA, 19 nt, Homo sapiens
  misc_RNA (1)...(19): siRNA sense strand
gcuucggauccauguauua

SEQ ID NO: 809832 - RNA, 19 nt, Homo sapiens
  misc_RNA (1)...(19): siRNA sense strand
gaauggcugucacuuuugu

SEQ ID NO: 809833 - RNA, 19 nt, Homo sapiens
  misc_RNA (1)...(19): siRNA sense strand
aggcuagcguucuggauga

SEQ ID NO: 809834 - RNA, 19 nt, Homo sapiens
  misc_RNA (1)...(19): siRNA sense strand
ggaaagauaccauaagaaa

SEQ ID NO: 809835 - RNA, 19 nt, Homo sapiens
  misc_RNA (1)...(19): siRNA sense strand
gaaauugucccuauugauu

SEQ ID NO: 809836 - RNA, 19 nt, Homo sapiens
  misc_RNA (1)...(19): siRNA sense strand
gcaaagcccuggaugauag

SEQ ID NO: 809837 - RNA, 19 nt, Homo sapiens
  misc_RNA (1)...(19): siRNA sense strand
gaagagacguggcgauugu

SEQ ID NO: 809838 - RNA, 19 nt, Homo sapiens
  misc_RNA (1)...(19): siRNA sense strand
gaaauacagagaaagcuua

SEQ ID NO: 809839 - RNA, 19 nt, Homo sapiens
  misc_RNA (1)...(19): siRNA sense strand
ccaaacggcuggugugauu

SEQ ID NO: 809840 - RNA, 19 nt, Homo sapiens
  misc_RNA (1)...(19): siRNA sense strand
acaaacagcuuaugcaaau

SEQ ID NO: 809841 - RNA, 19 nt, Homo sapiens
  misc_RNA (1)...(19): siRNA sense strand
gcagauaauugcccaagga

SEQ ID NO: 809842 - RNA, 19 nt, Homo sapiens
  misc_RNA (1)...(19): siRNA sense strand
gaaaucggcucaaacuucu

SEQ ID NO: 809843 - RNA, 19 nt, Homo sapiens
  misc_RNA (1)...(19): siRNA sense strand
gagaacagcugauagaaaa

SEQ ID NO: 809844 - RNA, 19 nt, Homo sapiens
  misc_RNA (1)...(19): siRNA sense strand
ggagugggaucacgacuau

SEQ ID NO: 809845 - RNA, 19 nt, Homo sapiens
  misc_RNA (1)...(19): siRNA sense strand
ggaaauugcuauugcucaa

SEQ ID NO: 809846 - RNA, 19 nt, Homo sapiens
  misc_RNA (1)...(19): siRNA sense strand
ggagaaacauuugugcuau

SEQ ID NO: 809847 - RNA, 19 nt, Homo sapiens
  misc_RNA (1)...(19): siRNA sense strand
ggaaaucggcucaaacuuc

SEQ ID NO: 809848 - RNA, 19 nt, Homo sapiens
  misc_RNA (1)...(19): siRNA sense strand
gaucugcagcucacuaaua

SEQ ID NO: 809849 - RNA, 19 nt, Homo sapiens
  misc_RNA (1)...(19): siRNA sense strand
gcaaggaguugaggaugaa

SEQ ID NO: 809850 - RNA, 19 nt, Homo sapiens
  misc_RNA (1)...(19): siRNA sense strand
uaaccuugaugcagagaua

SEQ ID NO: 809851 - RNA, 19 nt, Homo sapiens
  misc_RNA (1)...(19): siRNA sense strand
aaauacagcuccaacaaau

SEQ ID NO: 809852 - RNA, 19 nt, Homo sapiens
  misc_RNA (1)...(19): siRNA sense strand
cuacaaaggcuacaugaaa

SEQ ID NO: 809853 - RNA, 19 nt, Homo sapiens
  misc_RNA (1)...(19): siRNA sense strand
gcauguagccucaaacaga

SEQ ID NO: 809854 - RNA, 19 nt, Homo sapiens
  misc_RNA (1)...(19): siRNA sense strand
guggaaagauaccauaaga

SEQ ID NO: 809855 - RNA, 19 nt, Homo sapiens
  misc_RNA (1)...(19): siRNA sense strand
caaggaagaacuaaagaaa

SEQ ID NO: 809856 - RNA, 19 nt, Homo sapiens
  misc_RNA (1)...(19): siRNA sense strand
gauaauugcccaaggagaa

SEQ ID NO: 809857 - RNA, 19 nt, Homo sapiens
  misc_RNA (1)...(19): siRNA sense strand
gaacauugacagaaggaaa

SEQ ID NO: 809858 - RNA, 19 nt, Homo sapiens
  misc_RNA (1)...(19): siRNA sense strand
ggagaacagcugauagaaa

SEQ ID NO: 809859 - RNA, 19 nt, Homo sapiens
  misc_RNA (1)...(19): siRNA sense strand
gcacugacauccagaccau

SEQ ID NO: 809860 - RNA, 19 nt, Homo sapiens
  misc_RNA (1)...(19): siRNA sense strand
gcagcucacuaauauugaa

SEQ ID NO: 809861 - RNA, 19 nt, Homo sapiens
  misc_RNA (1)...(19): siRNA sense strand
cggaagaaauacagagaaa

SEQ ID NO: 809862 - RNA, 19 nt, Homo sapiens
  misc_RNA (1)...(19): siRNA sense strand
ucaaggagcuccagaaagc

SEQ ID NO: 809863 - RNA, 19 nt, Homo sapiens
  misc_RNA (1)...(19): siRNA sense strand
cgaaugcaguagcaguaua

SEQ ID NO: 809864 - RNA, 19 nt, Homo sapiens
  misc_RNA (1)...(19): siRNA sense strand
gagaaacauuugugcuaug

SEQ ID NO: 809865 - RNA, 19 nt, Homo sapiens
  misc_RNA (1)...(19): siRNA sense strand
ccacauagcagguccacaa

SEQ ID NO: 809866 - RNA, 19 nt, Homo sapiens
  misc_RNA (1)...(19): siRNA sense strand
gaaagcaaagcaucugaga

SEQ ID NO: 809867 - RNA, 19 nt, Homo sapiens
  misc_RNA (1)...(19): siRNA sense strand
ggaccuggcucgcucacau

SEQ ID NO: 809868 - RNA, 19 nt, Homo sapiens
  misc_RNA (1)...(19): siRNA sense strand
caaguagucagcaggauuu

SEQ ID NO: 809869 - RNA, 19 nt, Homo sapiens
  misc_RNA (1)...(19): siRNA sense strand
ucacugaaccacaauaaga

SEQ ID NO: 809870 - RNA, 19 nt, Homo sapiens
  misc_RNA (1)...(19): siRNA sense strand
ugaagagacuggagcacaa

SEQ ID NO: 809871 - RNA, 19 nt, Homo sapiens
  misc_RNA (1)...(19): siRNA sense strand
gagaacgacuugcuaaagc

SEQ ID NO: 809872 - RNA, 19 nt, Homo sapiens
  misc_RNA (1)...(19): siRNA sense strand
ggugaaugcugaaggaaca

SEQ ID NO: 809873 - RNA, 19 nt, Homo sapiens
  misc_RNA (1)...(19): siRNA sense strand
caaacagcuuaugcaaaua

SEQ ID NO: 809874 - RNA, 19 nt, Homo sapiens
  misc_RNA (1)...(19): siRNA sense strand
gaccaucacaaacagcuua

SEQ ID NO: 809875 - RNA, 19 nt, Homo sapiens
  misc_RNA (1)...(19): siRNA sense strand
ggaggucagucgucauauc

SEQ ID NO: 809876 - RNA, 19 nt, Homo sapiens
  misc_RNA (1)...(19): siRNA sense strand
gcuaaagccagccaugaaa

SEQ ID NO: 809877 - RNA, 19 nt, Homo sapiens
  misc_RNA (1)...(19): siRNA sense strand
agaaguggcagcaguuuaa

SEQ ID NO: 809878 - RNA, 19 nt, Homo sapiens
  misc_RNA (1)...(19): siRNA sense strand
ugcagcagcuugauaagaa

SEQ ID NO: 809879 - RNA, 19 nt, Homo sapiens
  misc_RNA (1)...(19): siRNA sense strand
ccaaggagaacagcugaua

SEQ ID NO: 809880 - RNA, 19 nt, Homo sapiens
  misc_RNA (1)...(19): siRNA sense strand
gcugugcccucuccaacaa

SEQ ID NO: 809881 - RNA, 19 nt, Homo sapiens
  misc_RNA (1)...(19): siRNA sense strand
agccaugguuugcuucuua

SEQ ID NO: 809882 - RNA, 19 nt, Homo sapiens
  misc_RNA (1)...(19): siRNA sense strand
gaagaaauacagagaaagc

SEQ ID NO: 809883 - RNA, 19 nt, Homo sapiens
  misc_RNA (1)...(19): siRNA sense strand
gaaguuauuagacguguca

SEQ ID NO: 809884 - RNA, 19 nt, Homo sapiens
  misc_RNA (1)...(19): siRNA sense strand
gaaaugagccaugguuugc

SEQ ID NO: 809885 - RNA, 19 nt, Homo sapiens
  misc_RNA (1)...(19): siRNA sense strand
ugacgcagcuggaacugau

SEQ ID NO: 809886 - RNA, 19 nt, Homo sapiens
  misc_RNA (1)...(19): siRNA sense strand
ccaucgagcuccagaucaa

SEQ ID NO: 809887 - RNA, 19 nt, Homo sapiens
  misc_RNA (1)...(19): siRNA sense strand
gaucaucgaggaggaacua

SEQ ID NO: 809888 - RNA, 19 nt, Homo sapiens
  misc_RNA (1)...(19): siRNA sense strand
ccacagugcccuagaguca

SEQ ID NO: 809889 - RNA, 19 nt, Homo sapiens
  misc_RNA (1)...(19): siRNA sense strand
gaagagacuggagcacaaa

SEQ ID NO: 809890 - RNA, 19 nt, Homo sapiens
  misc_RNA (1)...(19): siRNA sense strand
aaauaaagcaugagcuguu

SEQ ID NO: 809891 - RNA, 19 nt, Homo sapiens
  misc_RNA (1)...(19): siRNA sense strand
gggcuugccugccuuguac

SEQ ID NO: 809892 - RNA, 19 nt, Homo sapiens
  misc_RNA (1)...(19): siRNA sense strand
gaagcacaguacagguguu

SEQ ID NO: 809893 - RNA, 19 nt, Homo sapiens
  misc_RNA (1)...(19): siRNA sense strand
gaucgcuugucgcagauga

SEQ ID NO: 809894 - RNA, 19 nt, Homo sapiens
  misc_RNA (1)...(19): siRNA sense strand
agcaggagcuucagagaga

SEQ ID NO: 809895 - RNA, 19 nt, Homo sapiens
  misc_RNA (1)...(19): siRNA sense strand
caaaugggagaacgacuug

SEQ ID NO: 809896 - RNA, 19 nt, Homo sapiens
  misc_RNA (1)...(19): siRNA sense strand
ggagaacgacuugcuaaag

SEQ ID NO: 809897 - RNA, 19 nt, Homo sapiens
  misc_RNA (1)...(19): siRNA sense strand
ggcaaagcccuggaugaua

SEQ ID NO: 809898 - RNA, 19 nt, Homo sapiens
  misc_RNA (1)...(19): siRNA sense strand
aaauugcuauugcucaaga

SEQ ID NO: 809899 - RNA, 19 nt, Homo sapiens
  misc_RNA (1)...(19): siRNA sense strand
gaaauuucuggaugacuau

SEQ ID NO: 809900 - RNA, 19 nt, Homo sapiens
  misc_RNA (1)...(19): siRNA sense strand
cauguagccucaaacagau

SEQ ID NO: 809901 - RNA, 19 nt, Homo sapiens
  misc_RNA (1)...(19): siRNA sense strand
uauuagacgugucaaguag

SEQ ID NO: 809902 - RNA, 19 nt, Homo sapiens
  misc_RNA (1)...(19): siRNA sense strand
gcuagacaccagcuacaaa

SEQ ID NO: 809903 - RNA, 19 nt, Homo sapiens
  misc_RNA (1)...(19): siRNA sense strand
aaauaucauucgcagcaaa

SEQ ID NO: 809904 - RNA, 19 nt, Homo sapiens
  misc_RNA (1)...(19): siRNA sense strand
ggaccacagugcccuagag

SEQ ID NO: 809905 - RNA, 19 nt, Homo sapiens
  misc_RNA (1)...(19): siRNA sense strand
ccacagccuuccuccaauc

SEQ ID NO: 809906 - RNA, 19 nt, Homo sapiens
  misc_RNA (1)...(19): siRNA sense strand
ccaaggaagaacuaaagaa

SEQ ID NO: 809907 - RNA, 19 nt, Homo sapiens
  misc_RNA (1)...(19): siRNA sense strand
ugaaaugagccaugguuug

SEQ ID NO: 809908 - RNA, 19 nt, Homo sapiens
  misc_RNA (1)...(19): siRNA sense strand
caagaggaaauugcuauug

SEQ ID NO: 809909 - RNA, 19 nt, Homo sapiens
  misc_RNA (1)...(19): siRNA sense strand
gaaagauaccauaagaaac

SEQ ID NO: 809910 - RNA, 19 nt, Homo sapiens
  misc_RNA (1)...(19): siRNA sense strand
agugugauguucaagcuaa

SEQ ID NO: 809911 - RNA, 19 nt, Homo sapiens
  misc_RNA (1)...(19): siRNA sense strand
gggagaaccgcacugauuc

SEQ ID NO: 809912 - RNA, 19 nt, Homo sapiens
  misc_RNA (1)...(19): siRNA sense strand
uuuguuaaccugcauagua

SEQ ID NO: 809913 - RNA, 19 nt, Homo sapiens
  misc_RNA (1)...(19): siRNA sense strand
aauaaagcaugagcuguug

SEQ ID NO: 809914 - RNA, 19 nt, Homo sapiens
  misc_RNA (1)...(19): siRNA sense strand
ucacaaacagcuuaugcaa

SEQ ID NO: 809915 - RNA, 19 nt, Homo sapiens
  misc_RNA (1)...(19): siRNA sense strand
cuauacaguugccaaggaa

SEQ ID NO: 809916 - RNA, 19 nt, Homo sapiens
  misc_RNA (1)...(19): siRNA sense strand
ggucagucgucauaucaag

SEQ ID NO: 809917 - RNA, 19 nt, Homo sapiens
  misc_RNA (1)...(19): siRNA sense strand
gaggucagucgucauauca

SEQ ID NO: 809918 - RNA, 19 nt, Homo sapiens
  misc_RNA (1)...(19): siRNA sense strand
cagaaguggcagcaguuua

SEQ ID NO: 809919 - RNA, 19 nt, Homo sapiens
  misc_RNA (1)...(19): siRNA sense strand
gaaugcaguagcaguauag

SEQ ID NO: 809920 - RNA, 19 nt, Homo sapiens
  misc_RNA (1)...(19): siRNA sense strand
ucacgacuaugaccucagu

SEQ ID NO: 809921 - RNA, 19 nt, Homo sapiens
  misc_RNA (1)...(19): siRNA sense strand
agagagacauagagaagca

SEQ ID NO: 809922 - RNA, 19 nt, Homo sapiens
  misc_RNA (1)...(19): siRNA sense strand
agcaugagcuguuggaauc

SEQ ID NO: 809923 - RNA, 19 nt, Homo sapiens
  misc_RNA (1)...(19): siRNA sense strand
gugccaggguuuccaugaa

SEQ ID NO: 809924 - RNA, 19 nt, Homo sapiens
  misc_RNA (1)...(19): siRNA sense strand
ugaaacugcugggcgaaug

SEQ ID NO: 809925 - RNA, 19 nt, Homo sapiens
  misc_RNA (1)...(19): siRNA sense strand
gaaaggaggcugaaaaucg

SEQ ID NO: 809926 - RNA, 19 nt, Homo sapiens
  misc_RNA (1)...(19): siRNA sense strand
gaccuggagucugcaaugu

SEQ ID NO: 809927 - RNA, 19 nt, Homo sapiens
  misc_RNA (1)...(19): siRNA sense strand
ggaccuggagucugcaaug

SEQ ID NO: 809928 - RNA, 19 nt, Homo sapiens
  misc_RNA (1)...(19): siRNA sense strand
gagcacgaccucucagaca

SEQ ID NO: 809929 - RNA, 19 nt, Homo sapiens
  misc_RNA (1)...(19): siRNA sense strand
cagcaggaaauuucacuga

SEQ ID NO: 809930 - RNA, 19 nt, Homo sapiens
  misc_RNA (1)...(19): siRNA sense strand
ucacgaaggcaaccagaga

SEQ ID NO: 809931 - RNA, 19 nt, Homo sapiens
  misc_RNA (1)...(19): siRNA sense strand
ggagaaccgcacugauuca

SEQ ID NO: 809932 - RNA, 19 nt, Homo sapiens
  misc_RNA (1)...(19): siRNA sense strand
gcaaguguagucucucaca

SEQ ID NO: 809933 - RNA, 19 nt, Homo sapiens
  misc_RNA (1)...(19): siRNA sense strand
caacuuugcccggucauuc

SEQ ID NO: 809934 - RNA, 19 nt, Homo sapiens
  misc_RNA (1)...(19): siRNA sense strand
ggaaagauaccauaagaaa

SEQ ID NO: 809935 - RNA, 19 nt, Homo sapiens
  misc_RNA (1)...(19): siRNA sense strand
gaaauugucccuauugauu

SEQ ID NO: 809936 - RNA, 19 nt, Homo sapiens
  misc_RNA (1)...(19): siRNA sense strand
gcaaagcccuggaugauag

SEQ ID NO: 809937 - RNA, 19 nt, Homo sapiens
  misc_RNA (1)...(19): siRNA sense strand
gaagagacguggcgauugu

SEQ ID NO: 809938 - RNA, 19 nt, Homo sapiens
  misc_RNA (1)...(19): siRNA sense strand
gaaauacagagaaagcuua

SEQ ID NO: 809939 - RNA, 19 nt, Homo sapiens
  misc_RNA (1)...(19): siRNA sense strand
ccaaacggcuggugugauu

SEQ ID NO: 809940 - RNA, 19 nt, Homo sapiens
  misc_RNA (1)...(19): siRNA sense strand
acaaacagcuuaugcaaau

SEQ ID NO: 809941 - RNA, 19 nt, Homo sapiens
  misc_RNA (1)...(19): siRNA sense strand
gcagauaauugcccaagga

SEQ ID NO: 809942 - RNA, 19 nt, Homo sapiens
  misc_RNA (1)...(19): siRNA sense strand
gaaaucggcucaaacuucu

SEQ ID NO: 809943 - RNA, 19 nt, Homo sapiens
  misc_RNA (1)...(19): siRNA sense strand
gagaacagcugauagaaaa

SEQ ID NO: 809944 - RNA, 19 nt, Homo sapiens
  misc_RNA (1)...(19): siRNA sense strand
ggagugggaucacgacuau

SEQ ID NO: 809945 - RNA, 19 nt, Homo sapiens
  misc_RNA (1)...(19): siRNA sense strand
ggaaauugcuauugcucaa

SEQ ID NO: 809946 - RNA, 19 nt, Homo sapiens
  misc_RNA (1)...(19): siRNA sense strand
ggagaaacauuugugcuau

SEQ ID NO: 809947 - RNA, 19 nt, Homo sapiens
  misc_RNA (1)...(19): siRNA sense strand
ggaaaucggcucaaacuuc

SEQ ID NO: 809948 - RNA, 19 nt, Homo sapiens
  misc_RNA (1)...(19): siRNA sense strand
gaucugcagcucacuaaua

SEQ ID NO: 809949 - RNA, 19 nt, Homo sapiens
  misc_RNA (1)...(19): siRNA sense strand
gcaaggaguugaggaugaa

SEQ ID NO: 809950 - RNA, 19 nt, Homo sapiens
  misc_RNA (1)...(19): siRNA sense strand
uaaccuugaugcagagaua

SEQ ID NO: 809951 - RNA, 19 nt, Homo sapiens
  misc_RNA (1)...(19): siRNA sense strand
aaauacagcuccaacaaau

SEQ ID NO: 809952 - RNA, 19 nt, Homo sapiens
  misc_RNA (1)...(19): siRNA sense strand
cuacaaaggcuacaugaaa

SEQ ID NO: 809953 - RNA, 19 nt, Homo sapiens
  misc_RNA (1)...(19): siRNA sense strand
gcauguagccucaaacaga

SEQ ID NO: 809954 - RNA, 19 nt, Homo sapiens
  misc_RNA (1)...(19): siRNA sense strand
guggaaagauaccauaaga

SEQ ID NO: 809955 - RNA, 19 nt, Homo sapiens
  misc_RNA (1)...(19): siRNA sense strand
caaggaagaacuaaagaaa

SEQ ID NO: 809956 - RNA, 19 nt, Homo sapiens
  misc_RNA (1)...(19): siRNA sense strand
gauaauugcccaaggagaa

SEQ ID NO: 809957 - RNA, 19 nt, Homo sapiens
  misc_RNA (1)...(19): siRNA sense strand
gaacauugacagaaggaaa

SEQ ID NO: 809958 - RNA, 19 nt, Homo sapiens
  misc_RNA (1)...(19): siRNA sense strand
ggagaacagcugauagaaa

SEQ ID NO: 809959 - RNA, 19 nt, Homo sapiens
  misc_RNA (1)...(19): siRNA sense strand
gcacugacauccagaccau

SEQ ID NO: 809960 - RNA, 19 nt, Homo sapiens
  misc_RNA (1)...(19): siRNA sense strand
gcagcucacuaauauugaa

SEQ ID NO: 809961 - RNA, 19 nt, Homo sapiens
  misc_RNA (1)...(19): siRNA sense strand
cggaagaaauacagagaaa

SEQ ID NO: 809962 - RNA, 19 nt, Homo sapiens
  misc_RNA (1)...(19): siRNA sense strand
ucaaggagcuccagaaagc

SEQ ID NO: 809963 - RNA, 19 nt, Homo sapiens
  misc_RNA (1)...(19): siRNA sense strand
cgaaugcaguagcaguaua

SEQ ID NO: 809964 - RNA, 19 nt, Homo sapiens
  misc_RNA (1)...(19): siRNA sense strand
gagaaacauuugugcuaug

SEQ ID NO: 809965 - RNA, 19 nt, Homo sapiens
  misc_RNA (1)...(19): siRNA sense strand
ccacauagcagguccacaa

SEQ ID NO: 809966 - RNA, 19 nt, Homo sapiens
  misc_RNA (1)...(19): siRNA sense strand
gaaagcaaagcaucugaga

SEQ ID NO: 809967 - RNA, 19 nt, Homo sapiens
  misc_RNA (1)...(19): siRNA sense strand
ggaccuggcucgcucacau

SEQ ID NO: 809968 - RNA, 19 nt, Homo sapiens
  misc_RNA (1)...(19): siRNA sense strand
caaguagucagcaggauuu

SEQ ID NO: 809969 - RNA, 19 nt, Homo sapiens
  misc_RNA (1)...(19): siRNA sense strand
ucacugaaccacaauaaga

SEQ ID NO: 809970 - RNA, 19 nt, Homo sapiens
  misc_RNA (1)...(19): siRNA sense strand
ugaagagacuggagcacaa

SEQ ID NO: 809971 - RNA, 19 nt, Homo sapiens
  misc_RNA (1)...(19): siRNA sense strand
gagaacgacuugcuaaagc

SEQ ID NO: 809972 - RNA, 19 nt, Homo sapiens
  misc_RNA (1)...(19): siRNA sense strand
ggugaaugcugaaggaaca

SEQ ID NO: 809973 - RNA, 19 nt, Homo sapiens
  misc_RNA (1)...(19): siRNA sense strand
caaacagcuuaugcaaaua

SEQ ID NO: 809974 - RNA, 19 nt, Homo sapiens
  misc_RNA (1)...(19): siRNA sense strand
gaccaucacaaacagcuua

SEQ ID NO: 809975 - RNA, 19 nt, Homo sapiens
  misc_RNA (1)...(19): siRNA sense strand
ggaggucagucgucauauc

SEQ ID NO: 809976 - RNA, 19 nt, Homo sapiens
  misc_RNA (1)...(19): siRNA sense strand
gcuaaagccagccaugaaa

SEQ ID NO: 809977 - RNA, 19 nt, Homo sapiens
  misc_RNA (1)...(19): siRNA sense strand
agaaguggcagcaguuuaa

SEQ ID NO: 809978 - RNA, 19 nt, Homo sapiens
  misc_RNA (1)...(19): siRNA sense strand
ugcagcagcuugauaagaa

SEQ ID NO: 809979 - RNA, 19 nt, Homo sapiens
  misc_RNA (1)...(19): siRNA sense strand
ccaaggagaacagcugaua

SEQ ID NO: 809980 - RNA, 19 nt, Homo sapiens
  misc_RNA (1)...(19): siRNA sense strand
gcugugcccucuccaacaa

SEQ ID NO: 809981 - RNA, 19 nt, Homo sapiens
  misc_RNA (1)...(19): siRNA sense strand
agccaugguuugcuucuua

SEQ ID NO: 809982 - RNA, 19 nt, Homo sapiens
  misc_RNA (1)...(19): siRNA sense strand
gaagaaauacagagaaagc

SEQ ID NO: 809983 - RNA, 19 nt, Homo sapiens
  misc_RNA (1)...(19): siRNA sense strand
gaaguuauuagacguguca

SEQ ID NO: 809984 - RNA, 19 nt, Homo sapiens
  misc_RNA (1)...(19): siRNA sense strand
gaaaugagccaugguuugc

SEQ ID NO: 809985 - RNA, 19 nt, Homo sapiens
  misc_RNA (1)...(19): siRNA sense strand
ugacgcagcuggaacugau

SEQ ID NO: 809986 - RNA, 19 nt, Homo sapiens
  misc_RNA (1)...(19): siRNA sense strand
ccaucgagcuccagaucaa

SEQ ID NO: 809987 - RNA, 19 nt, Homo sapiens
  misc_RNA (1)...(19): siRNA sense strand
gaucaucgaggaggaacua

SEQ ID NO: 809988 - RNA, 19 nt, Homo sapiens
  misc_RNA (1)...(19): siRNA sense strand
ccacagugcccuagaguca

SEQ ID NO: 809989 - RNA, 19 nt, Homo sapiens
  misc_RNA (1)...(19): siRNA sense strand
gaagagacuggagcacaaa

SEQ ID NO: 809990 - RNA, 19 nt, Homo sapiens
  misc_RNA (1)...(19): siRNA sense strand
aaauaaagcaugagcuguu

SEQ ID NO: 809991 - RNA, 19 nt, Homo sapiens
  misc_RNA (1)...(19): siRNA sense strand
gggcuugccugccuuguac

SEQ ID NO: 809992 - RNA, 19 nt, Homo sapiens
  misc_RNA (1)...(19): siRNA sense strand
gaagcacaguacagguguu

SEQ ID NO: 809993 - RNA, 19 nt, Homo sapiens
  misc_RNA (1)...(19): siRNA sense strand
gaucgcuugucgcagauga

SEQ ID NO: 809994 - RNA, 19 nt, Homo sapiens
  misc_RNA (1)...(19): siRNA sense strand
agcaggagcuucagagaga

SEQ ID NO: 809995 - RNA, 19 nt, Homo sapiens
  misc_RNA (1)...(19): siRNA sense strand
caaaugggagaacgacuug

SEQ ID NO: 809996 - RNA, 19 nt, Homo sapiens
  misc_RNA (1)...(19): siRNA sense strand
ggagaacgacuugcuaaag

SEQ ID NO: 809997 - RNA, 19 nt, Homo sapiens
  misc_RNA (1)...(19): siRNA sense strand
ggcaaagcccuggaugaua

SEQ ID NO: 809998 - RNA, 19 nt, Homo sapiens
  misc_RNA (1)...(19): siRNA sense strand
aaauugcuauugcucaaga

SEQ ID NO: 809999 - RNA, 19 nt, Homo sapiens
  misc_RNA (1)...(19): siRNA sense strand
gaaauuucuggaugacuau

SEQ ID NO: 810000 - RNA, 19 nt, Homo sapiens
  misc_RNA (1)...(19): siRNA sense strand
cauguagccucaaacagau

SEQ ID NO: 810001 - RNA, 19 nt, Homo sapiens
  misc_RNA (1)...(19): siRNA sense strand
uauuagacgugucaaguag

SEQ ID NO: 810002 - RNA, 19 nt, Homo sapiens
  misc_RNA (1)...(19): siRNA sense strand
gcuagacaccagcuacaaa

SEQ ID NO: 810003 - RNA, 19 nt, Homo sapiens
  misc_RNA (1)...(19): siRNA sense strand
aaauaucauucgcagcaaa

SEQ ID NO: 810004 - RNA, 19 nt, Homo sapiens
  misc_RNA (1)...(19): siRNA sense strand
ggaccacagugcccuagag

SEQ ID NO: 810005 - RNA, 19 nt, Homo sapiens
  misc_RNA (1)...(19): siRNA sense strand
ccacagccuuccuccaauc

SEQ ID NO: 810006 - RNA, 19 nt, Homo sapiens
  misc_RNA (1)...(19): siRNA sense strand
ccaaggaagaacuaaagaa

SEQ ID NO: 810007 - RNA, 19 nt, Homo sapiens
  misc_RNA (1)...(19): siRNA sense strand
ugaaaugagccaugguuug

SEQ ID NO: 810008 - RNA, 19 nt, Homo sapiens
  misc_RNA (1)...(19): siRNA sense strand
caagaggaaauugcuauug

SEQ ID NO: 810009 - RNA, 19 nt, Homo sapiens
  misc_RNA (1)...(19): siRNA sense strand
gaaagauaccauaagaaac

SEQ ID NO: 810010 - RNA, 19 nt, Homo sapiens
  misc_RNA (1)...(19): siRNA sense strand
agugugauguucaagcuaa

SEQ ID NO: 810011 - RNA, 19 nt, Homo sapiens
  misc_RNA (1)...(19): siRNA sense strand
gggagaaccgcacugauuc

SEQ ID NO: 810012 - RNA, 19 nt, Homo sapiens
  misc_RNA (1)...(19): siRNA sense strand
uuuguuaaccugcauagua

SEQ ID NO: 810013 - RNA, 19 nt, Homo sapiens
  misc_RNA (1)...(19): siRNA sense strand
aauaaagcaugagcuguug

SEQ ID NO: 810014 - RNA, 19 nt, Homo sapiens
  misc_RNA (1)...(19): siRNA sense strand
ucacaaacagcuuaugcaa

SEQ ID NO: 810015 - RNA, 19 nt, Homo sapiens
  misc_RNA (1)...(19): siRNA sense strand
cuauacaguugccaaggaa

SEQ ID NO: 810016 - RNA, 19 nt, Homo sapiens
  misc_RNA (1)...(19): siRNA sense strand
ggucagucgucauaucaag

SEQ ID NO: 810017 - RNA, 19 nt, Homo sapiens
  misc_RNA (1)...(19): siRNA sense strand
gaggucagucgucauauca

SEQ ID NO: 810018 - RNA, 19 nt, Homo sapiens
  misc_RNA (1)...(19): siRNA sense strand
cagaaguggcagcaguuua

SEQ ID NO: 810019 - RNA, 19 nt, Homo sapiens
  misc_RNA (1)...(19): siRNA sense strand
gaaugcaguagcaguauag

SEQ ID NO: 810020 - RNA, 19 nt, Homo sapiens
  misc_RNA (1)...(19): siRNA sense strand
ucacgacuaugaccucagu

SEQ ID NO: 810021 - RNA, 19 nt, Homo sapiens
  misc_RNA (1)...(19): siRNA sense strand
agagagacauagagaagca

SEQ ID NO: 810022 - RNA, 19 nt, Homo sapiens
  misc_RNA (1)...(19): siRNA sense strand
agcaugagcuguuggaauc

SEQ ID NO: 810023 - RNA, 19 nt, Homo sapiens
  misc_RNA (1)...(19): siRNA sense strand
gugccaggguuuccaugaa

SEQ ID NO: 810024 - RNA, 19 nt, Homo sapiens
  misc_RNA (1)...(19): siRNA sense strand
ugaaacugcugggcgaaug

SEQ ID NO: 810025 - RNA, 19 nt, Homo sapiens
  misc_RNA (1)...(19): siRNA sense strand
gaaaggaggcugaaaaucg

SEQ ID NO: 810026 - RNA, 19 nt, Homo sapiens
  misc_RNA (1)...(19): siRNA sense strand
gaccuggagucugcaaugu

SEQ ID NO: 810027 - RNA, 19 nt, Homo sapiens
  misc_RNA (1)...(19): siRNA sense strand
ggaccuggagucugcaaug

SEQ ID NO: 810028 - RNA, 19 nt, Homo sapiens
  misc_RNA (1)...(19): siRNA sense strand
gagcacgaccucucagaca

SEQ ID NO: 810029 - RNA, 19 nt, Homo sapiens
  misc_RNA (1)...(19): siRNA sense strand
cagcaggaaauuucacuga

SEQ ID NO: 810030 - RNA, 19 nt, Homo sapiens
  misc_RNA (1)...(19): siRNA sense strand
ucacgaaggcaaccagaga

SEQ ID NO: 810031 - RNA, 19 nt, Homo sapiens
  misc_RNA (1)...(19): siRNA sense strand
ggagaaccgcacugauuca

SEQ ID NO: 810032 - RNA, 19 nt, Homo sapiens
  misc_RNA (1)...(19): siRNA sense strand
gcaaguguagucucucaca

SEQ ID NO: 810033 - RNA, 19 nt, Homo sapiens
  misc_RNA (1)...(19): siRNA sense strand
caacuuugcccggucauuc

SEQ ID NO: 810034 - RNA, 19 nt, Homo sapiens
  misc_RNA (1)...(19): siRNA sense strand
ggaaagauaccauaagaaa

SEQ ID NO: 810035 - RNA, 19 nt, Homo sapiens
  misc_RNA (1)...(19): siRNA sense strand
gaaauugucccuauugauu

SEQ ID NO: 810036 - RNA, 19 nt, Homo sapiens
  misc_RNA (1)...(19): siRNA sense strand
gcaaagcccuggaugauag

SEQ ID NO: 810037 - RNA, 19 nt, Homo sapiens
  misc_RNA (1)...(19): siRNA sense strand
gaagagacguggcgauugu

SEQ ID NO: 810038 - RNA, 19 nt, Homo sapiens
  misc_RNA (1)...(19): siRNA sense strand
gaaauacagagaaagcuua

SEQ ID NO: 810039 - RNA, 19 nt, Homo sapiens
  misc_RNA (1)...(19): siRNA sense strand
ccaaacggcuggugugauu

SEQ ID NO: 810040 - RNA, 19 nt, Homo sapiens
  misc_RNA (1)...(19): siRNA sense strand
acaaacagcuuaugcaaau

SEQ ID NO: 810041 - RNA, 19 nt, Homo sapiens
  misc_RNA (1)...(19): siRNA sense strand
gcagauaauugcccaagga

SEQ ID NO: 810042 - RNA, 19 nt, Homo sapiens
  misc_RNA (1)...(19): siRNA sense strand
gaaaucggcucaaacuucu

SEQ ID NO: 810043 - RNA, 19 nt, Homo sapiens
  misc_RNA (1)...(19): siRNA sense strand
gagaacagcugauagaaaa

SEQ ID NO: 810044 - RNA, 19 nt, Homo sapiens
  misc_RNA (1)...(19): siRNA sense strand
ggagugggaucacgacuau

SEQ ID NO: 810045 - RNA, 19 nt, Homo sapiens
  misc_RNA (1)...(19): siRNA sense strand
ggagaaacauuugugcuau

SEQ ID NO: 810046 - RNA, 19 nt, Homo sapiens
  misc_RNA (1)...(19): siRNA sense strand
ggaaaucggcucaaacuuc

SEQ ID NO: 810047 - RNA, 19 nt, Homo sapiens
  misc_RNA (1)...(19): siRNA sense strand
gaucugcagcucacuaaua

SEQ ID NO: 810048 - RNA, 19 nt, Homo sapiens
  misc_RNA (1)...(19): siRNA sense strand
gcaaggaguugaggaugaa

SEQ ID NO: 810049 - RNA, 19 nt, Homo sapiens
  misc_RNA (1)...(19): siRNA sense strand
uaaccuugaugcagagaua

SEQ ID NO: 810050 - RNA, 19 nt, Homo sapiens
  misc_RNA (1)...(19): siRNA sense strand
cuacaaaggcuacaugaaa

SEQ ID NO: 810051 - RNA, 19 nt, Homo sapiens
  misc_RNA (1)...(19): siRNA sense strand
gcauguagccucaaacaga

SEQ ID NO: 810052 - RNA, 19 nt, Homo sapiens
  misc_RNA (1)...(19): siRNA sense strand
guggaaagauaccauaaga

SEQ ID NO: 810053 - RNA, 19 nt, Homo sapiens
  misc_RNA (1)...(19): siRNA sense strand
caaggaagaacuaaagaaa

SEQ ID NO: 810054 - RNA, 19 nt, Homo sapiens
  misc_RNA (1)...(19): siRNA sense strand
gauaauugcccaaggagaa

SEQ ID NO: 810055 - RNA, 19 nt, Homo sapiens
  misc_RNA (1)...(19): siRNA sense strand
gaacauugacagaaggaaa

SEQ ID NO: 810056 - RNA, 19 nt, Homo sapiens
  misc_RNA (1)...(19): siRNA sense strand
ggagaacagcugauagaaa

SEQ ID NO: 810057 - RNA, 19 nt, Homo sapiens
  misc_RNA (1)...(19): siRNA sense strand
gcacugacauccagaccau

SEQ ID NO: 810058 - RNA, 19 nt, Homo sapiens
  misc_RNA (1)...(19): siRNA sense strand
gcagcucacuaauauugaa

SEQ ID NO: 810059 - RNA, 19 nt, Homo sapiens
  misc_RNA (1)...(19): siRNA sense strand
cggaagaaauacagagaaa

SEQ ID NO: 810060 - RNA, 19 nt, Homo sapiens
  misc_RNA (1)...(19): siRNA sense strand
ucaaggagcuccagaaagc

SEQ ID NO: 810061 - RNA, 19 nt, Homo sapiens
  misc_RNA (1)...(19): siRNA sense strand
cgaaugcaguagcaguaua

SEQ ID NO: 810062 - RNA, 19 nt, Homo sapiens
  misc_RNA (1)...(19): siRNA sense strand
gagaaacauuugugcuaug

SEQ ID NO: 810063 - RNA, 19 nt, Homo sapiens
  misc_RNA (1)...(19): siRNA sense strand
ccacauagcagguccacaa

SEQ ID NO: 810064 - RNA, 19 nt, Homo sapiens
  misc_RNA (1)...(19): siRNA sense strand
gaaagcaaagcaucugaga

SEQ ID NO: 810065 - RNA, 19 nt, Homo sapiens
  misc_RNA (1)...(19): siRNA sense strand
ggaccuggcucgcucacau

SEQ ID NO: 810066 - RNA, 19 nt, Homo sapiens
  misc_RNA (1)...(19): siRNA sense strand
caaguagucagcaggauuu

SEQ ID NO: 810067 - RNA, 19 nt, Homo sapiens
  misc_RNA (1)...(19): siRNA sense strand
ucacugaaccacaauaaga

SEQ ID NO: 810068 - RNA, 19 nt, Homo sapiens
  misc_RNA (1)...(19): siRNA sense strand
ugaagagacuggagcacaa

SEQ ID NO: 810069 - RNA, 19 nt, Homo sapiens
  misc_RNA (1)...(19): siRNA sense strand
gagaacgacuugcuaaagc

SEQ ID NO: 810070 - RNA, 19 nt, Homo sapiens
  misc_RNA (1)...(19): siRNA sense strand
ggugaaugcugaaggaaca

SEQ ID NO: 810071 - RNA, 19 nt, Homo sapiens
  misc_RNA (1)...(19): siRNA sense strand
caaacagcuuaugcaaaua

SEQ ID NO: 810072 - RNA, 19 nt, Homo sapiens
  misc_RNA (1)...(19): siRNA sense strand
gaccaucacaaacagcuua

SEQ ID NO: 810073 - RNA, 19 nt, Homo sapiens
  misc_RNA (1)...(19): siRNA sense strand
ggaggucagucgucauauc

SEQ ID NO: 810074 - RNA, 19 nt, Homo sapiens
  misc_RNA (1)...(19): siRNA sense strand
ugcagcagcuugauaagaa

SEQ ID NO: 810075 - RNA, 19 nt, Homo sapiens
  misc_RNA (1)...(19): siRNA sense strand
agaaguggcagcaguuuaa

SEQ ID NO: 810076 - RNA, 19 nt, Homo sapiens
  misc_RNA (1)...(19): siRNA sense strand
gcuaaagccagccaugaaa

SEQ ID NO: 810077 - RNA, 19 nt, Homo sapiens
  misc_RNA (1)...(19): siRNA sense strand
ccaaggagaacagcugaua

SEQ ID NO: 810078 - RNA, 19 nt, Homo sapiens
  misc_RNA (1)...(19): siRNA sense strand
gcugugcccucuccaacaa

SEQ ID NO: 810079 - RNA, 19 nt, Homo sapiens
  misc_RNA (1)...(19): siRNA sense strand
agccaugguuugcuucuua

SEQ ID NO: 810080 - RNA, 19 nt, Homo sapiens
  misc_RNA (1)...(19): siRNA sense strand
gaagaaauacagagaaagc

SEQ ID NO: 810081 - RNA, 19 nt, Homo sapiens
  misc_RNA (1)...(19): siRNA sense strand
gaaguuauuagacguguca

SEQ ID NO: 810082 - RNA, 19 nt, Homo sapiens
  misc_RNA (1)...(19): siRNA sense strand
gaaaugagccaugguuugc

SEQ ID NO: 810083 - RNA, 19 nt, Homo sapiens
  misc_RNA (1)...(19): siRNA sense strand
ugacgcagcuggaacugau

SEQ ID NO: 810084 - RNA, 19 nt, Homo sapiens
  misc_RNA (1)...(19): siRNA sense strand
ccaucgagcuccagaucaa

SEQ ID NO: 810085 - RNA, 19 nt, Homo sapiens
  misc_RNA (1)...(19): siRNA sense strand
gaucaucgaggaggaacua

SEQ ID NO: 810086 - RNA, 19 nt, Homo sapiens
  misc_RNA (1)...(19): siRNA sense strand
ccacagugcccuagaguca

SEQ ID NO: 810087 - RNA, 19 nt, Homo sapiens
  misc_RNA (1)...(19): siRNA sense strand
gaagagacuggagcacaaa

SEQ ID NO: 810088 - RNA, 19 nt, Homo sapiens
  misc_RNA (1)...(19): siRNA sense strand
aaauaaagcaugagcuguu

SEQ ID NO: 810089 - RNA, 19 nt, Homo sapiens
  misc_RNA (1)...(19): siRNA sense strand
gggcuugccugccuuguac

SEQ ID NO: 810090 - RNA, 19 nt, Homo sapiens
  misc_RNA (1)...(19): siRNA sense strand
gaagcacaguacagguguu

SEQ ID NO: 810091 - RNA, 19 nt, Homo sapiens
  misc_RNA (1)...(19): siRNA sense strand
gaucgcuugucgcagauga

SEQ ID NO: 810092 - RNA, 19 nt, Homo sapiens
  misc_RNA (1)...(19): siRNA sense strand
agcaggagcuucagagaga

SEQ ID NO: 810093 - RNA, 19 nt, Homo sapiens
  misc_RNA (1)...(19): siRNA sense strand
ggcaaagcccuggaugaua

SEQ ID NO: 810094 - RNA, 19 nt, Homo sapiens
  misc_RNA (1)...(19): siRNA sense strand
ggagaacgacuugcuaaag

SEQ ID NO: 810095 - RNA, 19 nt, Homo sapiens
  misc_RNA (1)...(19): siRNA sense strand
gaaauuucuggaugacuau

SEQ ID NO: 810096 - RNA, 19 nt, Homo sapiens
  misc_RNA (1)...(19): siRNA sense strand
cauguagccucaaacagau

SEQ ID NO: 810097 - RNA, 19 nt, Homo sapiens
  misc_RNA (1)...(19): siRNA sense strand
uauuagacgugucaaguag

SEQ ID NO: 810098 - RNA, 19 nt, Homo sapiens
  misc_RNA (1)...(19): siRNA sense strand
gcuagacaccagcuacaaa

SEQ ID NO: 810099 - RNA, 19 nt, Homo sapiens
  misc_RNA (1)...(19): siRNA sense strand
aaauaucauucgcagcaaa

SEQ ID NO: 810100 - RNA, 19 nt, Homo sapiens
  misc_RNA (1)...(19): siRNA sense strand
ggaccacagugcccuagag

SEQ ID NO: 810101 - RNA, 19 nt, Homo sapiens
  misc_RNA (1)...(19): siRNA sense strand
ccacagccuuccuccaauc

SEQ ID NO: 810102 - RNA, 19 nt, Homo sapiens
  misc_RNA (1)...(19): siRNA sense strand
ccaaggaagaacuaaagaa

SEQ ID NO: 810103 - RNA, 19 nt, Homo sapiens
  misc_RNA (1)...(19): siRNA sense strand
ugaaaugagccaugguuug

SEQ ID NO: 810104 - RNA, 19 nt, Homo sapiens
  misc_RNA (1)...(19): siRNA sense strand
gaaagauaccauaagaaac

SEQ ID NO: 810105 - RNA, 19 nt, Homo sapiens
  misc_RNA (1)...(19): siRNA sense strand
agugugauguucaagcuaa

SEQ ID NO: 810106 - RNA, 19 nt, Homo sapiens
  misc_RNA (1)...(19): siRNA sense strand
gggagaaccgcacugauuc

SEQ ID NO: 810107 - RNA, 19 nt, Homo sapiens
  misc_RNA (1)...(19): siRNA sense strand
uuuguuaaccugcauagua

SEQ ID NO: 810108 - RNA, 19 nt, Homo sapiens
  misc_RNA (1)...(19): siRNA sense strand
aauaaagcaugagcuguug

SEQ ID NO: 810109 - RNA, 19 nt, Homo sapiens
  misc_RNA (1)...(19): siRNA sense strand
ucacaaacagcuuaugcaa

SEQ ID NO: 810110 - RNA, 19 nt, Homo sapiens
  misc_RNA (1)...(19): siRNA sense strand
cuauacaguugccaaggaa

SEQ ID NO: 810111 - RNA, 19 nt, Homo sapiens
  misc_RNA (1)...(19): siRNA sense strand
ggucagucgucauaucaag

SEQ ID NO: 810112 - RNA, 19 nt, Homo sapiens
  misc_RNA (1)...(19): siRNA sense strand
gaggucagucgucauauca

SEQ ID NO: 810113 - RNA, 19 nt, Homo sapiens
  misc_RNA (1)...(19): siRNA sense strand
cagaaguggcagcaguuua

SEQ ID NO: 810114 - RNA, 19 nt, Homo sapiens
  misc_RNA (1)...(19): siRNA sense strand
gaaugcaguagcaguauag

SEQ ID NO: 810115 - RNA, 19 nt, Homo sapiens
  misc_RNA (1)...(19): siRNA sense strand
ucacgacuaugaccucagu

SEQ ID NO: 810116 - RNA, 19 nt, Homo sapiens
  misc_RNA (1)...(19): siRNA sense strand
agagagacauagagaagca

SEQ ID NO: 810117 - RNA, 19 nt, Homo sapiens
  misc_RNA (1)...(19): siRNA sense strand
agcaugagcuguuggaauc

SEQ ID NO: 810118 - RNA, 19 nt, Homo sapiens
  misc_RNA (1)...(19): siRNA sense strand
gugccaggguuuccaugaa

SEQ ID NO: 810119 - RNA, 19 nt, Homo sapiens
  misc_RNA (1)...(19): siRNA sense strand
ugaaacugcugggcgaaug

SEQ ID NO: 810120 - RNA, 19 nt, Homo sapiens
  misc_RNA (1)...(19): siRNA sense strand
gaaaggaggcugaaaaucg

SEQ ID NO: 810121 - RNA, 19 nt, Homo sapiens
  misc_RNA (1)...(19): siRNA sense strand
gaccuggagucugcaaugu

SEQ ID NO: 810122 - RNA, 19 nt, Homo sapiens
  misc_RNA (1)...(19): siRNA sense strand
ggaccuggagucugcaaug

SEQ ID NO: 810123 - RNA, 19 nt, Homo sapiens
  misc_RNA (1)...(19): siRNA sense strand
gagcacgaccucucagaca

SEQ ID NO: 810124 - RNA, 19 nt, Homo sapiens
  misc_RNA (1)...(19): siRNA sense strand
cagcaggaaauuucacuga

SEQ ID NO: 810125 - RNA, 19 nt, Homo sapiens
  misc_RNA (1)...(19): siRNA sense strand
ucacgaaggcaaccagaga

SEQ ID NO: 810126 - RNA, 19 nt, Homo sapiens
  misc_RNA (1)...(19): siRNA sense strand
ggagaaccgcacugauuca

SEQ ID NO: 810127 - RNA, 19 nt, Homo sapiens
  misc_RNA (1)...(19): siRNA sense strand
auacagagaaagcuuaaug

SEQ ID NO: 810128 - RNA, 19 nt, Homo sapiens
  misc_RNA (1)...(19): siRNA sense strand
caacuuugcccggucauuc

SEQ ID NO: 810129 - RNA, 19 nt, Homo sapiens
  misc_RNA (1)...(19): siRNA sense strand
gcaaguguagucucucaca

SEQ ID NO: 810130 - RNA, 19 nt, Homo sapiens
  misc_RNA (1)...(19): siRNA sense strand
uacaaaggcuacaugaaac

SEQ ID NO: 810131 - RNA, 19 nt, Homo sapiens
  misc_RNA (1)...(19): siRNA sense strand
ggacacggaggaggaguug

SEQ ID NO: 810132 - RNA, 19 nt, Homo sapiens
  misc_RNA (1)...(19): siRNA sense strand
ggaaggagcaccccaaaca

SEQ ID NO: 810133 - RNA, 19 nt, Homo sapiens
  misc_RNA (1)...(19): siRNA sense strand
gggagaacgacuugcuaaa

SEQ ID NO: 810134 - RNA, 19 nt, Homo sapiens
  misc_RNA (1)...(19): siRNA sense strand
gcacagagcuuguuuguua

SEQ ID NO: 810135 - RNA, 19 nt, Homo sapiens
  misc_RNA (1)...(19): siRNA sense strand
gcaauaagcuauccaauga

SEQ ID NO: 810136 - RNA, 19 nt, Homo sapiens
  misc_RNA (1)...(19): siRNA sense strand
gaacaaggcuucaacaucu

SEQ ID NO: 810137 - RNA, 19 nt, Homo sapiens
  misc_RNA (1)...(19): siRNA sense strand
ccaaucaccuuuacguuua

SEQ ID NO: 810138 - RNA, 19 nt, Homo sapiens
  misc_RNA (1)...(19): siRNA sense strand
caucugaacuuauggauuu

SEQ ID NO: 810139 - RNA, 19 nt, Homo sapiens
  misc_RNA (1)...(19): siRNA sense strand
gaagagggaugucguugaa

SEQ ID NO: 810140 - RNA, 19 nt, Homo sapiens
  misc_RNA (1)...(19): siRNA sense strand
cuaaggaucuggauucuaa

SEQ ID NO: 810141 - RNA, 19 nt, Homo sapiens
  misc_RNA (1)...(19): siRNA sense strand
gaaauuaaauggguagaug

SEQ ID NO: 810142 - RNA, 19 nt, Homo sapiens
  misc_RNA (1)...(19): siRNA sense strand
ucaagaaccugcugauaaa

SEQ ID NO: 810143 - RNA, 19 nt, Homo sapiens
  misc_RNA (1)...(19): siRNA sense strand
ggacacgcuuucucuauuu

SEQ ID NO: 810144 - RNA, 19 nt, Homo sapiens
  misc_RNA (1)...(19): siRNA sense strand
gaacaaaguggucaaguug

SEQ ID NO: 810145 - RNA, 19 nt, Homo sapiens
  misc_RNA (1)...(19): siRNA sense strand
ccucagacuucccuaauua

SEQ ID NO: 810146 - RNA, 19 nt, Homo sapiens
  misc_RNA (1)...(19): siRNA sense strand
gaagauuucugccgauuuc

SEQ ID NO: 810147 - RNA, 19 nt, Homo sapiens
  misc_RNA (1)...(19): siRNA sense strand
cuacaaauguugaaccuuu

SEQ ID NO: 810148 - RNA, 19 nt, Homo sapiens
  misc_RNA (1)...(19): siRNA sense strand
gaagugaagucauuugaag

SEQ ID NO: 810149 - RNA, 19 nt, Homo sapiens
  misc_RNA (1)...(19): siRNA sense strand
caucauacauucccacaaa

SEQ ID NO: 810150 - RNA, 19 nt, Homo sapiens
  misc_RNA (1)...(19): siRNA sense strand
uaaaguaccuuaagagucu

SEQ ID NO: 810151 - RNA, 19 nt, Homo sapiens
  misc_RNA (1)...(19): siRNA sense strand
ucacgaagaugaugaacaa

SEQ ID NO: 810152 - RNA, 19 nt, Homo sapiens
  misc_RNA (1)...(19): siRNA sense strand
gauaagcaccaacaaagua

SEQ ID NO: 810153 - RNA, 19 nt, Homo sapiens
  misc_RNA (1)...(19): siRNA sense strand
gcaauucccuggauaagca

SEQ ID NO: 810154 - RNA, 19 nt, Homo sapiens
  misc_RNA (1)...(19): siRNA sense strand
ucaagcagaucaacaacua

SEQ ID NO: 810155 - RNA, 19 nt, Homo sapiens
  misc_RNA (1)...(19): siRNA sense strand
ggaaaccguuguaaauaug

SEQ ID NO: 810156 - RNA, 19 nt, Homo sapiens
  misc_RNA (1)...(19): siRNA sense strand
gcaaggacauuguuuaagg

SEQ ID NO: 810157 - RNA, 19 nt, Homo sapiens
  misc_RNA (1)...(19): siRNA sense strand
gaacugaccaaauccauga

SEQ ID NO: 810158 - RNA, 19 nt, Homo sapiens
  misc_RNA (1)...(19): siRNA sense strand
caacauugcuacugagguu

SEQ ID NO: 810159 - RNA, 19 nt, Homo sapiens
  misc_RNA (1)...(19): siRNA sense strand
ggacauaauccucucauga

SEQ ID NO: 810160 - RNA, 19 nt, Homo sapiens
  misc_RNA (1)...(19): siRNA sense strand
aaacagauguggagggauu

SEQ ID NO: 810161 - RNA, 19 nt, Homo sapiens
  misc_RNA (1)...(19): siRNA sense strand
uaaagagcaugucugauga

SEQ ID NO: 810162 - RNA, 19 nt, Homo sapiens
  misc_RNA (1)...(19): siRNA sense strand
gccgacaucuacaaacuua

SEQ ID NO: 810163 - RNA, 19 nt, Homo sapiens
  misc_RNA (1)...(19): siRNA sense strand
gaagaaggacccacuacaa

SEQ ID NO: 810164 - RNA, 19 nt, Homo sapiens
  misc_RNA (1)...(19): siRNA sense strand
guaaacgaacgucugauua

SEQ ID NO: 810165 - RNA, 19 nt, Homo sapiens
  misc_RNA (1)...(19): siRNA sense strand
ggaaaggaguauauuuaca

SEQ ID NO: 810166 - RNA, 19 nt, Homo sapiens
  misc_RNA (1)...(19): siRNA sense strand
gaagagcaauucccuggau

SEQ ID NO: 810167 - RNA, 19 nt, Homo sapiens
  misc_RNA (1)...(19): siRNA sense strand
gguaacagccuuccagaaa

SEQ ID NO: 810168 - RNA, 19 nt, Homo sapiens
  misc_RNA (1)...(19): siRNA sense strand
gaacaacuuugauuacacu

SEQ ID NO: 810169 - RNA, 19 nt, Homo sapiens
  misc_RNA (1)...(19): siRNA sense strand
ggcgauggauccuauaauu

SEQ ID NO: 810170 - RNA, 19 nt, Homo sapiens
  misc_RNA (1)...(19): siRNA sense strand
ggucaaugcuggcccacua

SEQ ID NO: 810171 - RNA, 19 nt, Homo sapiens
  misc_RNA (1)...(19): siRNA sense strand
acacaucacucagaaguuu

SEQ ID NO: 810172 - RNA, 19 nt, Homo sapiens
  misc_RNA (1)...(19): siRNA sense strand
cacuugaggucauauguua

SEQ ID NO: 810173 - RNA, 19 nt, Homo sapiens
  misc_RNA (1)...(19): siRNA sense strand
gaaaagaucuccaaagaac

SEQ ID NO: 810174 - RNA, 19 nt, Homo sapiens
  misc_RNA (1)...(19): siRNA sense strand
guugaaccuuucuuuguua

SEQ ID NO: 810175 - RNA, 19 nt, Homo sapiens
  misc_RNA (1)...(19): siRNA sense strand
cagcuugacuacucauuaa

SEQ ID NO: 810176 - RNA, 19 nt, Homo sapiens
  misc_RNA (1)...(19): siRNA sense strand
acucagaaguuucgagaua

SEQ ID NO: 810177 - RNA, 19 nt, Homo sapiens
  misc_RNA (1)...(19): siRNA sense strand
cgaacaaaguggucaaguu

SEQ ID NO: 810178 - RNA, 19 nt, Homo sapiens
  misc_RNA (1)...(19): siRNA sense strand
ggauaaauuugguucugaa

SEQ ID NO: 810179 - RNA, 19 nt, Homo sapiens
  misc_RNA (1)...(19): siRNA sense strand
gcagcaaggacauuguuua

SEQ ID NO: 810180 - RNA, 19 nt, Homo sapiens
  misc_RNA (1)...(19): siRNA sense strand
gcgauauccugacaauaaa

SEQ ID NO: 810181 - RNA, 19 nt, Homo sapiens
  misc_RNA (1)...(19): siRNA sense strand
ggucaagccuuagcgguaa

SEQ ID NO: 810182 - RNA, 19 nt, Homo sapiens
  misc_RNA (1)...(19): siRNA sense strand
uaaacgaacgucugauuaa

SEQ ID NO: 810183 - RNA, 19 nt, Homo sapiens
  misc_RNA (1)...(19): siRNA sense strand
ggaucaauauuucuggauu

SEQ ID NO: 810184 - RNA, 19 nt, Homo sapiens
  misc_RNA (1)...(19): siRNA sense strand
aaacgaacgucugauuaaa

SEQ ID NO: 810185 - RNA, 19 nt, Homo sapiens
  misc_RNA (1)...(19): siRNA sense strand
gcaugacugugaaggauga

SEQ ID NO: 810186 - RNA, 19 nt, Homo sapiens
  misc_RNA (1)...(19): siRNA sense strand
ggaucuggauucuaaguau

SEQ ID NO: 810187 - RNA, 19 nt, Homo sapiens
  misc_RNA (1)...(19): siRNA sense strand
gacacgcuuucucuauuua

SEQ ID NO: 810188 - RNA, 19 nt, Homo sapiens
  misc_RNA (1)...(19): siRNA sense strand
gaaggacccacuacaaaug

SEQ ID NO: 810189 - RNA, 19 nt, Homo sapiens
  misc_RNA (1)...(19): siRNA sense strand
ucacaccgcugucggaaau

SEQ ID NO: 810190 - RNA, 19 nt, Homo sapiens
  misc_RNA (1)...(19): siRNA sense strand
gcagcgcaauaccaguuua

SEQ ID NO: 810191 - RNA, 19 nt, Homo sapiens
  misc_RNA (1)...(19): siRNA sense strand
gagauuuccugcauccuau

SEQ ID NO: 810192 - RNA, 19 nt, Homo sapiens
  misc_RNA (1)...(19): siRNA sense strand
caagugcaaugauuuaucu

SEQ ID NO: 810193 - RNA, 19 nt, Homo sapiens
  misc_RNA (1)...(19): siRNA sense strand
gacauaauccucucaugaa

SEQ ID NO: 810194 - RNA, 19 nt, Homo sapiens
  misc_RNA (1)...(19): siRNA sense strand
ggaugcaucuggaaaucuu

SEQ ID NO: 810195 - RNA, 19 nt, Homo sapiens
  misc_RNA (1)...(19): siRNA sense strand
gauggauccuauaauuuga

SEQ ID NO: 810196 - RNA, 19 nt, Homo sapiens
  misc_RNA (1)...(19): siRNA sense strand
gugcaaccaugaacauuau

SEQ ID NO: 810197 - RNA, 19 nt, Homo sapiens
  misc_RNA (1)...(19): siRNA sense strand
gaagucauuugaagagaag

SEQ ID NO: 810198 - RNA, 19 nt, Homo sapiens
  misc_RNA (1)...(19): siRNA sense strand
gaucaauauuucuggauuc

SEQ ID NO: 810199 - RNA, 19 nt, Homo sapiens
  misc_RNA (1)...(19): siRNA sense strand
cggcauugcuucuccauau

SEQ ID NO: 810200 - RNA, 19 nt, Homo sapiens
  misc_RNA (1)...(19): siRNA sense strand
gcaaagccaaagcuaauug

SEQ ID NO: 810201 - RNA, 19 nt, Homo sapiens
  misc_RNA (1)...(19): siRNA sense strand
uggaaaccguuguaaauau

SEQ ID NO: 810202 - RNA, 19 nt, Homo sapiens
  misc_RNA (1)...(19): siRNA sense strand
ccacucaucugguuucuac

SEQ ID NO: 810203 - RNA, 19 nt, Homo sapiens
  misc_RNA (1)...(19): siRNA sense strand
ggaagaauggaucacaauu

SEQ ID NO: 810204 - RNA, 19 nt, Homo sapiens
  misc_RNA (1)...(19): siRNA sense strand
gcgcaucccugucauguac

SEQ ID NO: 810205 - RNA, 19 nt, Homo sapiens
  misc_RNA (1)...(19): siRNA sense strand
caacgaggaugugcugaug

SEQ ID NO: 810206 - RNA, 19 nt, Homo sapiens
  misc_RNA (1)...(19): siRNA sense strand
ugaggaacaacuuugauua

SEQ ID NO: 810207 - RNA, 19 nt, Homo sapiens
  misc_RNA (1)...(19): siRNA sense strand
ccaacaaaguagcacauug

SEQ ID NO: 810208 - RNA, 19 nt, Homo sapiens
  misc_RNA (1)...(19): siRNA sense strand
ucuaagaacgcgaaucaua

SEQ ID NO: 810209 - RNA, 19 nt, Homo sapiens
  misc_RNA (1)...(19): siRNA sense strand
gcucagcauuugauagaga

SEQ ID NO: 810210 - RNA, 19 nt, Homo sapiens
  misc_RNA (1)...(19): siRNA sense strand
caaagcaaauuggaagguu

SEQ ID NO: 810211 - RNA, 19 nt, Homo sapiens
  misc_RNA (1)...(19): siRNA sense strand
aagcagaaaucaaacugaa

SEQ ID NO: 810212 - RNA, 19 nt, Homo sapiens
  misc_RNA (1)...(19): siRNA sense strand
gauggaaaggaguauauuu

SEQ ID NO: 810213 - RNA, 19 nt, Homo sapiens
  misc_RNA (1)...(19): siRNA sense strand
gcugauagcagacguuguu

SEQ ID NO: 810214 - RNA, 19 nt, Homo sapiens
  misc_RNA (1)...(19): siRNA sense strand
ggauaacucucucacuuuu

SEQ ID NO: 810215 - RNA, 19 nt, Homo sapiens
  misc_RNA (1)...(19): siRNA sense strand
ggaacaaggcuucaacauc

SEQ ID NO: 810216 - RNA, 19 nt, Homo sapiens
  misc_RNA (1)...(19): siRNA sense strand
uuaaagagcaugucugaug

SEQ ID NO: 810217 - RNA, 19 nt, Homo sapiens
  misc_RNA (1)...(19): siRNA sense strand
gagauuaagagccuacuga

SEQ ID NO: 810218 - RNA, 19 nt, Homo sapiens
  misc_RNA (1)...(19): siRNA sense strand
gcagaucaacaacuacauu

SEQ ID NO: 810219 - RNA, 19 nt, Homo sapiens
  misc_RNA (1)...(19): siRNA sense strand
ccaaauccaugaccacgau

SEQ ID NO: 810220 - RNA, 19 nt, Homo sapiens
  misc_RNA (1)...(19): siRNA sense strand
caaggacauuguuuaagga

SEQ ID NO: 810221 - RNA, 19 nt, Homo sapiens
  misc_RNA (1)...(19): siRNA sense strand
gcgcugagccauauaugaa

SEQ ID NO: 810222 - RNA, 19 nt, Homo sapiens
  misc_RNA (1)...(19): siRNA sense strand
caaagacuaggacaguaua

SEQ ID NO: 810223 - RNA, 19 nt, Homo sapiens
  misc_RNA (1)...(19): siRNA sense strand
gaaaugaaagccaacuaca

SEQ ID NO: 810224 - RNA, 19 nt, Homo sapiens
  misc_RNA (1)...(19): siRNA sense strand
ggcauugcuucuccauaua

SEQ ID NO: 810225 - RNA, 19 nt, Homo sapiens
  misc_RNA (1)...(19): siRNA sense strand
ccacucagcugcaugaaaa

SEQ ID NO: 810226 - RNA, 19 nt, Homo sapiens
  misc_RNA (1)...(19): siRNA sense strand
cagcaaggacauuguuuaa

SEQ ID NO: 810227 - RNA, 19 nt, Homo sapiens
  misc_RNA (1)...(19): siRNA sense strand
gcuaagcucccagugauuu

SEQ ID NO: 810228 - RNA, 19 nt, Homo sapiens
  misc_RNA (1)...(19): siRNA sense strand
ggaguauauuuacaaggaa

SEQ ID NO: 810229 - RNA, 19 nt, Homo sapiens
  misc_RNA (1)...(19): siRNA sense strand
gaagauggaaaggaguaua

SEQ ID NO: 810230 - RNA, 19 nt, Homo sapiens
  misc_RNA (1)...(19): siRNA sense strand
cagaucaacaacuacauua

SEQ ID NO: 810231 - RNA, 19 nt, Homo sapiens
  misc_RNA (1)...(19): siRNA sense strand
gaagaagagggaugucguu

SEQ ID NO: 810232 - RNA, 19 nt, Homo sapiens
  misc_RNA (1)...(19): siRNA sense strand
gaaauacgacagucagaag

SEQ ID NO: 810233 - RNA, 19 nt, Homo sapiens
  misc_RNA (1)...(19): siRNA sense strand
agacuucccuaauuauguu

SEQ ID NO: 810234 - RNA, 19 nt, Homo sapiens
  misc_RNA (1)...(19): siRNA sense strand
gaagguaucuggacaggaa

SEQ ID NO: 810235 - RNA, 19 nt, Homo sapiens
  misc_RNA (1)...(19): siRNA sense strand
gcaaauacccauauccuuu

SEQ ID NO: 810236 - RNA, 19 nt, Homo sapiens
  misc_RNA (1)...(19): siRNA sense strand
ggaaauaccauaucaugaa

SEQ ID NO: 810237 - RNA, 19 nt, Homo sapiens
  misc_RNA (1)...(19): siRNA sense strand
caaauacccauauccuuua

SEQ ID NO: 810238 - RNA, 19 nt, Homo sapiens
  misc_RNA (1)...(19): siRNA sense strand
ucacucugaugucuuauaa

SEQ ID NO: 810239 - RNA, 19 nt, Homo sapiens
  misc_RNA (1)...(19): siRNA sense strand
uaaauucugucccugauuc

SEQ ID NO: 810240 - RNA, 19 nt, Homo sapiens
  misc_RNA (1)...(19): siRNA sense strand
gcccagaggucacuacaau

SEQ ID NO: 810241 - RNA, 19 nt, Homo sapiens
  misc_RNA (1)...(19): siRNA sense strand
ucagagcucuaucuacauu

SEQ ID NO: 810242 - RNA, 19 nt, Homo sapiens
  misc_RNA (1)...(19): siRNA sense strand
gcuacaagccuaccagauu

SEQ ID NO: 810243 - RNA, 19 nt, Homo sapiens
  misc_RNA (1)...(19): siRNA sense strand
gagacuuccugcuacguuu

SEQ ID NO: 810244 - RNA, 19 nt, Homo sapiens
  misc_RNA (1)...(19): siRNA sense strand
gaggaggacuggguguaaa

SEQ ID NO: 810245 - RNA, 19 nt, Homo sapiens
  misc_RNA (1)...(19): siRNA sense strand
gaaccuggaugagccuuuc

SEQ ID NO: 810246 - RNA, 19 nt, Homo sapiens
  misc_RNA (1)...(19): siRNA sense strand
gaucagagagacgcaagua

SEQ ID NO: 810247 - RNA, 19 nt, Homo sapiens
  misc_RNA (1)...(19): siRNA sense strand
cuacaagccuaccagauuc

SEQ ID NO: 810248 - RNA, 19 nt, Homo sapiens
  misc_RNA (1)...(19): siRNA sense strand
gaugagccuuucccugaga

SEQ ID NO: 810249 - RNA, 19 nt, Homo sapiens
  misc_RNA (1)...(19): siRNA sense strand
ggaacuaucgcuucgugaa

SEQ ID NO: 810250 - RNA, 19 nt, Homo sapiens
  misc_RNA (1)...(19): siRNA sense strand
gaaugacaguagauuacau

SEQ ID NO: 810251 - RNA, 19 nt, Homo sapiens
  misc_RNA (1)...(19): siRNA sense strand
ccagguagagggcgacuuu

SEQ ID NO: 810252 - RNA, 19 nt, Homo sapiens
  misc_RNA (1)...(19): siRNA sense strand
ccucucagaugcuuucuuc

SEQ ID NO: 810253 - RNA, 19 nt, Homo sapiens
  misc_RNA (1)...(19): siRNA sense strand
gcacugggacccugauauc

SEQ ID NO: 810254 - RNA, 19 nt, Homo sapiens
  misc_RNA (1)...(19): siRNA sense strand
ggucgucucucccuucucu

SEQ ID NO: 810255 - RNA, 19 nt, Homo sapiens
  misc_RNA (1)...(19): siRNA sense strand
uggcacuucugauggauaa

SEQ ID NO: 810256 - RNA, 19 nt, Homo sapiens
  misc_RNA (1)...(19): siRNA sense strand
gcuuggagcuacuuaaucg

SEQ ID NO: 810257 - RNA, 19 nt, Homo sapiens
  misc_RNA (1)...(19): siRNA sense strand
acucugaugucuuauaaca

SEQ ID NO: 810258 - RNA, 19 nt, Homo sapiens
  misc_RNA (1)...(19): siRNA sense strand
gaaggagugacagauacua

SEQ ID NO: 810259 - RNA, 19 nt, Homo sapiens
  misc_RNA (1)...(19): siRNA sense strand
ucagagagacgcaaguaug

SEQ ID NO: 810260 - RNA, 19 nt, Homo sapiens
  misc_RNA (1)...(19): siRNA sense strand
gauaaugugggcuuagugu

SEQ ID NO: 810261 - RNA, 19 nt, Homo sapiens
  misc_RNA (1)...(19): siRNA sense strand
ggaacccucucugcgaaug

SEQ ID NO: 810262 - RNA, 19 nt, Homo sapiens
  misc_RNA (1)...(19): siRNA sense strand
ccagacauccucaauugga

SEQ ID NO: 810263 - RNA, 19 nt, Homo sapiens
  misc_RNA (1)...(19): siRNA sense strand
caggugcucucaacugcaa

SEQ ID NO: 810264 - RNA, 19 nt, Homo sapiens
  misc_RNA (1)...(19): siRNA sense strand
cagaugcuuucuucacaug

SEQ ID NO: 810265 - RNA, 19 nt, Homo sapiens
  misc_RNA (1)...(19): siRNA sense strand
caagguggccagacuguca

SEQ ID NO: 810266 - RNA, 19 nt, Homo sapiens
  misc_RNA (1)...(19): siRNA sense strand
caguggaaauaccauauca

SEQ ID NO: 810267 - RNA, 19 nt, Homo sapiens
  misc_RNA (1)...(19): siRNA sense strand
gggcugagucuguccuuga

SEQ ID NO: 810268 - RNA, 19 nt, Homo sapiens
  misc_RNA (1)...(19): siRNA sense strand
uaaugugggcuuaguguug

SEQ ID NO: 810269 - RNA, 19 nt, Homo sapiens
  misc_RNA (1)...(19): siRNA sense strand
gugcuagcccuguggagua

SEQ ID NO: 810270 - RNA, 19 nt, Homo sapiens
  misc_RNA (1)...(19): siRNA sense strand
cagacauccucaauuggaa

SEQ ID NO: 810271 - RNA, 19 nt, Homo sapiens
  misc_RNA (1)...(19): siRNA sense strand
gaaauuuuguggcgagaau

SEQ ID NO: 810272 - RNA, 19 nt, Homo sapiens
  misc_RNA (1)...(19): siRNA sense strand
guggaaauaccauaucaug

SEQ ID NO: 810273 - RNA, 19 nt, Homo sapiens
  misc_RNA (1)...(19): siRNA sense strand
aguucacucugaugucuua

SEQ ID NO: 810274 - RNA, 19 nt, Homo sapiens
  misc_RNA (1)...(19): siRNA sense strand
gggauaaugugggcuuagu

SEQ ID NO: 810275 - RNA, 19 nt, Homo sapiens
  misc_RNA (1)...(19): siRNA sense strand
ugaugggcuuuaccuguuu

SEQ ID NO: 810276 - RNA, 19 nt, Homo sapiens
  misc_RNA (1)...(19): siRNA sense strand
auccagacauccucaauug

SEQ ID NO: 810277 - RNA, 19 nt, Homo sapiens
  misc_RNA (1)...(19): siRNA sense strand
gguguuggccuggagcaua

SEQ ID NO: 810278 - RNA, 19 nt, Homo sapiens
  misc_RNA (1)...(19): siRNA sense strand
ggaaugacaguagauuaca

SEQ ID NO: 810279 - RNA, 19 nt, Homo sapiens
  misc_RNA (1)...(19): siRNA sense strand
cagaaggccugggacaagu

SEQ ID NO: 810280 - RNA, 19 nt, Homo sapiens
  misc_RNA (1)...(19): siRNA sense strand
gcugaguccugugagaaug

SEQ ID NO: 810281 - RNA, 19 nt, Homo sapiens
  misc_RNA (1)...(19): siRNA sense strand
gucaguauauacccacuuc

SEQ ID NO: 810282 - RNA, 19 nt, Homo sapiens
  misc_RNA (1)...(19): siRNA sense strand
ucaccucucuacaacuuca

SEQ ID NO: 810283 - RNA, 19 nt, Homo sapiens
  misc_RNA (1)...(19): siRNA sense strand
ggcuuuaccuguuucuaca

SEQ ID NO: 810284 - RNA, 19 nt, Homo sapiens
  misc_RNA (1)...(19): siRNA sense strand
ccaguucacucugaugucu

SEQ ID NO: 810285 - RNA, 19 nt, Homo sapiens
  misc_RNA (1)...(19): siRNA sense strand
gagaaugggaacagaacug

SEQ ID NO: 810286 - RNA, 19 nt, Homo sapiens
  misc_RNA (1)...(19): siRNA sense strand
ggacccugauauccugugu

SEQ ID NO: 810287 - RNA, 19 nt, Homo sapiens
  misc_RNA (1)...(19): siRNA sense strand
cugcagagaaccuggauga

SEQ ID NO: 810288 - RNA, 19 nt, Homo sapiens
  misc_RNA (1)...(19): siRNA sense strand
ggucuuggaaugacaguag

SEQ ID NO: 810289 - RNA, 19 nt, Homo sapiens
  misc_RNA (1)...(19): siRNA sense strand
ccuaaauucugucccugau

SEQ ID NO: 810290 - RNA, 19 nt, Homo sapiens
  misc_RNA (1)...(19): siRNA sense strand
auacccauauccuuuacaa

SEQ ID NO: 810291 - RNA, 19 nt, Homo sapiens
  misc_RNA (1)...(19): siRNA sense strand
gaugcuuucuucacauguc

SEQ ID NO: 810292 - RNA, 19 nt, Homo sapiens
  misc_RNA (1)...(19): siRNA sense strand
gcacuucugauggauaauc

SEQ ID NO: 810293 - RNA, 19 nt, Homo sapiens
  misc_RNA (1)...(19): siRNA sense strand
gaacuaucgcuucgugaac

SEQ ID NO: 810294 - RNA, 19 nt, Homo sapiens
  misc_RNA (1)...(19): siRNA sense strand
cauccucaauuggaacuau

SEQ ID NO: 810295 - RNA, 19 nt, Homo sapiens
  misc_RNA (1)...(19): siRNA sense strand
gcuuccaucuggcccuuug

SEQ ID NO: 810296 - RNA, 19 nt, Homo sapiens
  misc_RNA (1)...(19): siRNA sense strand
augaugggcuuuaccuguu

SEQ ID NO: 810297 - RNA, 19 nt, Homo sapiens
  misc_RNA (1)...(19): siRNA sense strand
gaacccucucugcgaauga

SEQ ID NO: 810298 - RNA, 19 nt, Homo sapiens
  misc_RNA (1)...(19): siRNA sense strand
gcaguggaaauaccauauc

SEQ ID NO: 810299 - RNA, 19 nt, Homo sapiens
  misc_RNA (1)...(19): siRNA sense strand
ucagaugcuuucuucacau

SEQ ID NO: 810300 - RNA, 19 nt, Homo sapiens
  misc_RNA (1)...(19): siRNA sense strand
ucagcugaguccugugaga

SEQ ID NO: 810301 - RNA, 19 nt, Homo sapiens
  misc_RNA (1)...(19): siRNA sense strand
uggaaggagugacagauac

SEQ ID NO: 810302 - RNA, 19 nt, Homo sapiens
  misc_RNA (1)...(19): siRNA sense strand
uccaggaaguccaggaaga

SEQ ID NO: 810303 - RNA, 19 nt, Homo sapiens
  misc_RNA (1)...(19): siRNA sense strand
cauccagacauccucaauu

SEQ ID NO: 810304 - RNA, 19 nt, Homo sapiens
  misc_RNA (1)...(19): siRNA sense strand
agacuucucccaucagcuu

SEQ ID NO: 810305 - RNA, 19 nt, Homo sapiens
  misc_RNA (1)...(19): siRNA sense strand
auucaccucucuacaacuu

SEQ ID NO: 810306 - RNA, 19 nt, Homo sapiens
  misc_RNA (1)...(19): siRNA sense strand
ugauucaccucucuacaac

SEQ ID NO: 810307 - RNA, 19 nt, Homo sapiens
  misc_RNA (1)...(19): siRNA sense strand
gcaaccacucgucccagaa

SEQ ID NO: 810308 - RNA, 19 nt, Homo sapiens
  misc_RNA (1)...(19): siRNA sense strand
gagcuacuuaaucgggaua

SEQ ID NO: 810309 - RNA, 19 nt, Homo sapiens
  misc_RNA (1)...(19): siRNA sense strand
gcugugcugucugcuacaa

SEQ ID NO: 810310 - RNA, 19 nt, Homo sapiens
  misc_RNA (1)...(19): siRNA sense strand
aagagaaugcugcuucaga

SEQ ID NO: 810311 - RNA, 19 nt, Homo sapiens
  misc_RNA (1)...(19): siRNA sense strand
ggcgagaaugggaggauuu

SEQ ID NO: 810312 - RNA, 19 nt, Homo sapiens
  misc_RNA (1)...(19): siRNA sense strand
gcagcaguggcgagaagaa

SEQ ID NO: 810313 - RNA, 19 nt, Homo sapiens
  misc_RNA (1)...(19): siRNA sense strand
ggaagaugcaucggagcuu

SEQ ID NO: 810314 - RNA, 19 nt, Homo sapiens
  misc_RNA (1)...(19): siRNA sense strand
ggcaaauacccauauccuu

SEQ ID NO: 810315 - RNA, 19 nt, Homo sapiens
  misc_RNA (1)...(19): siRNA sense strand
gaugggcuuuaccuguuuc

SEQ ID NO: 810316 - RNA, 19 nt, Homo sapiens
  misc_RNA (1)...(19): siRNA sense strand
guguuggccuggagcauag

SEQ ID NO: 810317 - RNA, 19 nt, Homo sapiens
  misc_RNA (1)...(19): siRNA sense strand
ccagaggucacuacaaugc

SEQ ID NO: 810318 - RNA, 19 nt, Homo sapiens
  misc_RNA (1)...(19): siRNA sense strand
gaucgcgucgugcuugugu

SEQ ID NO: 810319 - RNA, 19 nt, Homo sapiens
  misc_RNA (1)...(19): siRNA sense strand
ggaaguccaggaagaucau

SEQ ID NO: 810320 - RNA, 19 nt, Homo sapiens
  misc_RNA (1)...(19): siRNA sense strand
ugaaccucaugcaggaauu

SEQ ID NO: 810321 - RNA, 19 nt, Homo sapiens
  misc_RNA (1)...(19): siRNA sense strand
caguuccaguucacucuga

SEQ ID NO: 810322 - RNA, 19 nt, Homo sapiens
  misc_RNA (1)...(19): siRNA sense strand
uggaaauaccauaucauga

SEQ ID NO: 810323 - RNA, 19 nt, Homo sapiens
  misc_RNA (1)...(19): siRNA sense strand
ucgcgucgugcuuguguua

SEQ ID NO: 810324 - RNA, 19 nt, Homo sapiens
  misc_RNA (1)...(19): siRNA sense strand
cuacuuaaucgggauaaug

SEQ ID NO: 810325 - RNA, 19 nt, Homo sapiens
  misc_RNA (1)...(19): siRNA sense strand
gaaccucaugcaggaauuc

SEQ ID NO: 810326 - RNA, 19 nt, Homo sapiens
  misc_RNA (1)...(19): siRNA sense strand
gagauggcccucaguucca

SEQ ID NO: 810327 - RNA, 19 nt, Homo sapiens
  misc_RNA (1)...(19): siRNA sense strand
cagagcagccuggcacuuc

SEQ ID NO: 810328 - RNA, 19 nt, Homo sapiens
  misc_RNA (1)...(19): siRNA sense strand
ggaaggagugacagauacu

SEQ ID NO: 810329 - RNA, 19 nt, Homo sapiens
  misc_RNA (1)...(19): siRNA sense strand
cagagagacgcaaguaugg

SEQ ID NO: 810330 - RNA, 19 nt, Homo sapiens
  misc_RNA (1)...(19): siRNA sense strand
gccuggcacuucugaugga

SEQ ID NO: 810331 - RNA, 19 nt, Homo sapiens
  misc_RNA (1)...(19): siRNA sense strand
cuacauugccauccagaca

SEQ ID NO: 810332 - RNA, 19 nt, Homo sapiens
  misc_RNA (1)...(19): siRNA sense strand
cgagacuuccugcuacguu

SEQ ID NO: 810333 - RNA, 19 nt, Homo sapiens
  misc_RNA (1)...(19): siRNA sense strand
gauaauccuggagaagaga

SEQ ID NO: 810334 - RNA, 19 nt, Homo sapiens
  misc_RNA (1)...(19): siRNA sense strand
ccaaagggcugaaauacuu

SEQ ID NO: 810335 - RNA, 19 nt, Homo sapiens
  misc_RNA (1)...(19): siRNA sense strand
ggaacacgcugcccacaaa

SEQ ID NO: 810336 - RNA, 19 nt, Homo sapiens
  misc_RNA (1)...(19): siRNA sense strand
gcacagacaaagauuauuu

SEQ ID NO: 810337 - RNA, 19 nt, Homo sapiens
  misc_RNA (1)...(19): siRNA sense strand
gaaauacuuccaucacuuu

SEQ ID NO: 810338 - RNA, 19 nt, Homo sapiens
  misc_RNA (1)...(19): siRNA sense strand
gcacaggcauucgguuuga

SEQ ID NO: 810339 - RNA, 19 nt, Homo sapiens
  misc_RNA (1)...(19): siRNA sense strand
agacacaacucauguacaa

SEQ ID NO: 810340 - RNA, 19 nt, Homo sapiens
  misc_RNA (1)...(19): siRNA sense strand
gaauacaaaugguggaaca

SEQ ID NO: 810341 - RNA, 19 nt, Homo sapiens
  misc_RNA (1)...(19): siRNA sense strand
gcaaacaguccuauaccua

SEQ ID NO: 810342 - RNA, 19 nt, Homo sapiens
  misc_RNA (1)...(19): siRNA sense strand
gagaaacauugccauaaca

SEQ ID NO: 810343 - RNA, 19 nt, Homo sapiens
  misc_RNA (1)...(19): siRNA sense strand
ugacaaauacucagagaaa

SEQ ID NO: 810344 - RNA, 19 nt, Homo sapiens
  misc_RNA (1)...(19): siRNA sense strand
ccaaugacguugccaagau

SEQ ID NO: 810345 - RNA, 19 nt, Homo sapiens
  misc_RNA (1)...(19): siRNA sense strand
gccaagaucuacuccauca

SEQ ID NO: 810346 - RNA, 19 nt, Homo sapiens
  misc_RNA (1)...(19): siRNA sense strand
gaccaggacuuucaacuac

SEQ ID NO: 810347 - RNA, 19 nt, Homo sapiens
  misc_RNA (1)...(19): siRNA sense strand
ugaaauacuuccaucacuu

SEQ ID NO: 810348 - RNA, 19 nt, Homo sapiens
  misc_RNA (1)...(19): siRNA sense strand
ugaaggaccagucauguaa

SEQ ID NO: 810349 - RNA, 19 nt, Homo sapiens
  misc_RNA (1)...(19): siRNA sense strand
gacgugaucuucuuuuaua

SEQ ID NO: 810350 - RNA, 19 nt, Homo sapiens
  misc_RNA (1)...(19): siRNA sense strand
gcaggaaguacaccaauga

SEQ ID NO: 810351 - RNA, 19 nt, Homo sapiens
  misc_RNA (1)...(19): siRNA sense strand
cagaaucacauuugucuuu

SEQ ID NO: 810352 - RNA, 19 nt, Homo sapiens
  misc_RNA (1)...(19): siRNA sense strand
auaaagagguggccagaau

SEQ ID NO: 810353 - RNA, 19 nt, Homo sapiens
  misc_RNA (1)...(19): siRNA sense strand
gaaucacauuugucuuuga

SEQ ID NO: 810354 - RNA, 19 nt, Homo sapiens
  misc_RNA (1)...(19): siRNA sense strand
gcacagccacacugaugua

SEQ ID NO: 810355 - RNA, 19 nt, Homo sapiens
  misc_RNA (1)...(19): siRNA sense strand
gagacccucuguucuguga

SEQ ID NO: 810356 - RNA, 19 nt, Homo sapiens
  misc_RNA (1)...(19): siRNA sense strand
gaaguacaccaaugacguu

SEQ ID NO: 810357 - RNA, 19 nt, Homo sapiens
  misc_RNA (1)...(19): siRNA sense strand
gcaaagagucugaguacca

SEQ ID NO: 810358 - RNA, 19 nt, Homo sapiens
  misc_RNA (1)...(19): siRNA sense strand
ugaaagcccaccagccuua

SEQ ID NO: 810359 - RNA, 19 nt, Homo sapiens
  misc_RNA (1)...(19): siRNA sense strand
gggaguuucuggauaugaa

SEQ ID NO: 810360 - RNA, 19 nt, Homo sapiens
  misc_RNA (1)...(19): siRNA sense strand
ggaugaagaccacagagaa

SEQ ID NO: 810361 - RNA, 19 nt, Homo sapiens
  misc_RNA (1)...(19): siRNA sense strand
gaacgggaccggagcuuca

SEQ ID NO: 810362 - RNA, 19 nt, Homo sapiens
  misc_RNA (1)...(19): siRNA sense strand
gaugaagaccacagagaaa

SEQ ID NO: 810363 - RNA, 19 nt, Homo sapiens
  misc_RNA (1)...(19): siRNA sense strand
gaaagguuccaaaggcaaa

SEQ ID NO: 810364 - RNA, 19 nt, Homo sapiens
  misc_RNA (1)...(19): siRNA sense strand
ggagcuaaaucgaggcaau

SEQ ID NO: 810365 - RNA, 19 nt, Homo sapiens
  misc_RNA (1)...(19): siRNA sense strand
gggcuccucuuucugcaaa

SEQ ID NO: 810366 - RNA, 19 nt, Homo sapiens
  misc_RNA (1)...(19): siRNA sense strand
gaugaaugcuacucucaag

SEQ ID NO: 810367 - RNA, 19 nt, Homo sapiens
  misc_RNA (1)...(19): siRNA sense strand
ucaccaauguuaugaaugg

SEQ ID NO: 810368 - RNA, 19 nt, Homo sapiens
  misc_RNA (1)...(19): siRNA sense strand
gaugggaauuccacagugu

SEQ ID NO: 810369 - RNA, 19 nt, Homo sapiens
  misc_RNA (1)...(19): siRNA sense strand
ggauccagaagacuacuua

SEQ ID NO: 810370 - RNA, 19 nt, Homo sapiens
  misc_RNA (1)...(19): siRNA sense strand
ggaccaagaacaacaagau

SEQ ID NO: 810371 - RNA, 19 nt, Homo sapiens
  misc_RNA (1)...(19): siRNA sense strand
caacccaggcuucuucaaa

SEQ ID NO: 810372 - RNA, 19 nt, Homo sapiens
  misc_RNA (1)...(19): siRNA sense strand
cugcaaaccuggcacguau

SEQ ID NO: 810373 - RNA, 19 nt, Homo sapiens
  misc_RNA (1)...(19): siRNA sense strand
gcaaacacugucacucuug

SEQ ID NO: 810374 - RNA, 19 nt, Homo sapiens
  misc_RNA (1)...(19): siRNA sense strand
ugaaugguguggccuccua

SEQ ID NO: 810375 - RNA, 19 nt, Homo sapiens
  misc_RNA (1)...(19): siRNA sense strand
gagcuaaaucgaggcaaua

SEQ ID NO: 810376 - RNA, 19 nt, Homo sapiens
  misc_RNA (1)...(19): siRNA sense strand
guggagacguggaaagguu

SEQ ID NO: 810377 - RNA, 19 nt, Homo sapiens
  misc_RNA (1)...(19): siRNA sense strand
gaacugugagcucuacuuc

SEQ ID NO: 810378 - RNA, 19 nt, Homo sapiens
  misc_RNA (1)...(19): siRNA sense strand
ggagagacacaacucaugu

SEQ ID NO: 810379 - RNA, 19 nt, Homo sapiens
  misc_RNA (1)...(19): siRNA sense strand
ggugagaaacauugccaua

SEQ ID NO: 810380 - RNA, 19 nt, Homo sapiens
  misc_RNA (1)...(19): siRNA sense strand
ggcaaacacugucacucuu

SEQ ID NO: 810381 - RNA, 19 nt, Homo sapiens
  misc_RNA (1)...(19): siRNA sense strand
cuaaaucgaggcaauaaug

SEQ ID NO: 810382 - RNA, 19 nt, Homo sapiens
  misc_RNA (1)...(19): siRNA sense strand
caagaucuacuccaucaau

SEQ ID NO: 810383 - RNA, 19 nt, Homo sapiens
  misc_RNA (1)...(19): siRNA sense strand
ggaucaacuucgaguacaa

SEQ ID NO: 810384 - RNA, 19 nt, Homo sapiens
  misc_RNA (1)...(19): siRNA sense strand
gagagacacaacucaugua

SEQ ID NO: 810385 - RNA, 19 nt, Homo sapiens
  misc_RNA (1)...(19): siRNA sense strand
ugagaaacauugccauaac

SEQ ID NO: 810386 - RNA, 19 nt, Homo sapiens
  misc_RNA (1)...(19): siRNA sense strand
caaauaaaggagaaacuuc

SEQ ID NO: 810387 - RNA, 19 nt, Homo sapiens
  misc_RNA (1)...(19): siRNA sense strand
uugggaagaucaaaucauu

SEQ ID NO: 810388 - RNA, 19 nt, Homo sapiens
  misc_RNA (1)...(19): siRNA sense strand
gagcagagagucaccaucu

SEQ ID NO: 810389 - RNA, 19 nt, Homo sapiens
  misc_RNA (1)...(19): siRNA sense strand
ucaggguucuccaaaucua

SEQ ID NO: 810390 - RNA, 19 nt, Homo sapiens
  misc_RNA (1)...(19): siRNA sense strand
cgaccaggacuuucaacua

SEQ ID NO: 810391 - RNA, 19 nt, Homo sapiens
  misc_RNA (1)...(19): siRNA sense strand
cagcaucaucuuugaguuu

SEQ ID NO: 810392 - RNA, 19 nt, Homo sapiens
  misc_RNA (1)...(19): siRNA sense strand
acuccaagcuggugaugaa

SEQ ID NO: 810393 - RNA, 19 nt, Homo sapiens
  misc_RNA (1)...(19): siRNA sense strand
gggccaagcuucacuucca

SEQ ID NO: 810394 - RNA, 19 nt, Homo sapiens
  misc_RNA (1)...(19): siRNA sense strand
ccucuuguccugcugguua

SEQ ID NO: 810395 - RNA, 19 nt, Homo sapiens
  misc_RNA (1)...(19): siRNA sense strand
agugugacccugacaaaua

SEQ ID NO: 810396 - RNA, 19 nt, Homo sapiens
  misc_RNA (1)...(19): siRNA sense strand
ccagccaacucuuauucaa

SEQ ID NO: 810397 - RNA, 19 nt, Homo sapiens
  misc_RNA (1)...(19): siRNA sense strand
aagcagggcuccucuuucu

SEQ ID NO: 810398 - RNA, 19 nt, Homo sapiens
  misc_RNA (1)...(19): siRNA sense strand
ccacagccuucucaguaug

SEQ ID NO: 810399 - RNA, 19 nt, Homo sapiens
  misc_RNA (1)...(19): siRNA sense strand
ccaucaaugucaccaaugu

SEQ ID NO: 810400 - RNA, 19 nt, Homo sapiens
  misc_RNA (1)...(19): siRNA sense strand
gagagucaccaucugcaaa

SEQ ID NO: 810401 - RNA, 19 nt, Homo sapiens
  misc_RNA (1)...(19): siRNA sense strand
aaccacagccuucucagua

SEQ ID NO: 810402 - RNA, 19 nt, Homo sapiens
  misc_RNA (1)...(19): siRNA sense strand
cgucuugaccugcuacuuu

SEQ ID NO: 810403 - RNA, 19 nt, Homo sapiens
  misc_RNA (1)...(19): siRNA sense strand
acaacaagauccacucucu

SEQ ID NO: 810404 - RNA, 19 nt, Homo sapiens
  misc_RNA (1)...(19): siRNA sense strand
uggcagacacagagaauaa

SEQ ID NO: 810405 - RNA, 19 nt, Homo sapiens
  misc_RNA (1)...(19): siRNA sense strand
ggagguggcuggugaucac

SEQ ID NO: 810406 - RNA, 19 nt, Homo sapiens
  misc_RNA (1)...(19): siRNA sense strand
ccaggacuuucaacuacaa

SEQ ID NO: 810407 - RNA, 19 nt, Homo sapiens
  misc_RNA (1)...(19): siRNA sense strand
caggugcaguccacagaaa

SEQ ID NO: 810408 - RNA, 19 nt, Homo sapiens
  misc_RNA (1)...(19): siRNA sense strand
gggaauaccggacgugauc

SEQ ID NO: 810409 - RNA, 19 nt, Homo sapiens
  misc_RNA (1)...(19): siRNA sense strand
gcaccguuaacuucgaaua

SEQ ID NO: 810410 - RNA, 19 nt, Homo sapiens
  misc_RNA (1)...(19): siRNA sense strand
gaacaacaagauccacucu

SEQ ID NO: 810411 - RNA, 19 nt, Homo sapiens
  misc_RNA (1)...(19): siRNA sense strand
gauuauuucuacacacaca

SEQ ID NO: 810412 - RNA, 19 nt, Homo sapiens
  misc_RNA (1)...(19): siRNA sense strand
gcacguaugcagacaagca

SEQ ID NO: 810413 - RNA, 19 nt, Homo sapiens
  misc_RNA (1)...(19): siRNA sense strand
ggccuacacuucagaaugc

SEQ ID NO: 810414 - RNA, 19 nt, Homo sapiens
  misc_RNA (1)...(19): siRNA sense strand
gugagaaacauugccauaa

SEQ ID NO: 810415 - RNA, 19 nt, Homo sapiens
  misc_RNA (1)...(19): siRNA sense strand
gacaaauacucagagaaag

SEQ ID NO: 810416 - RNA, 19 nt, Homo sapiens
  misc_RNA (1)...(19): siRNA sense strand
caaauacucagagaaagga

SEQ ID NO: 810417 - RNA, 19 nt, Homo sapiens
  misc_RNA (1)...(19): siRNA sense strand
uauccagacuccagcauca

SEQ ID NO: 810418 - RNA, 19 nt, Homo sapiens
  misc_RNA (1)...(19): siRNA sense strand
ccuagaagccucugaugug

SEQ ID NO: 810419 - RNA, 19 nt, Homo sapiens
  misc_RNA (1)...(19): siRNA sense strand
caaugacguugccaagauc

SEQ ID NO: 810420 - RNA, 19 nt, Homo sapiens
  misc_RNA (1)...(19): siRNA sense strand
ggagcuucaugccugcaaa

SEQ ID NO: 810421 - RNA, 19 nt, Homo sapiens
  misc_RNA (1)...(19): siRNA sense strand
aaacaguccuauaccuaca

SEQ ID NO: 810422 - RNA, 19 nt, Homo sapiens
  misc_RNA (1)...(19): siRNA sense strand
uccaauggcucagacugua

SEQ ID NO: 810423 - RNA, 19 nt, Homo sapiens
  misc_RNA (1)...(19): siRNA sense strand
caaaugggccaagccgaaa

SEQ ID NO: 810424 - RNA, 19 nt, Homo sapiens
  misc_RNA (1)...(19): siRNA sense strand
gaaugcacagccacacuga

SEQ ID NO: 810425 - RNA, 19 nt, Homo sapiens
  misc_RNA (1)...(19): siRNA sense strand
acacaacucauguacaaau

SEQ ID NO: 810426 - RNA, 19 nt, Homo sapiens
  misc_RNA (1)...(19): siRNA sense strand
agccaacucuuauucaaau

SEQ ID NO: 810427 - RNA, 19 nt, Homo sapiens
  misc_RNA (1)...(19): siRNA sense strand
gaagaccacagagaaagga

SEQ ID NO: 810428 - RNA, 19 nt, Homo sapiens
  misc_RNA (1)...(19): siRNA sense strand
gagaaaggaugggaauucc

SEQ ID NO: 810429 - RNA, 19 nt, Homo sapiens
  misc_RNA (1)...(19): siRNA sense strand
gagucaggguucuccaaau

SEQ ID NO: 810430 - RNA, 19 nt, Homo sapiens
  misc_RNA (1)...(19): siRNA sense strand
agaaucacauuugucuuug

SEQ ID NO: 810431 - RNA, 19 nt, Homo sapiens
  misc_RNA (1)...(19): siRNA sense strand
ucagugggaucaacuucga

SEQ ID NO: 810432 - RNA, 19 nt, Homo sapiens
  misc_RNA (1)...(19): siRNA sense strand
ggaaggcgaggauguagag

SEQ ID NO: 810433 - RNA, 19 nt, Homo sapiens
  misc_RNA (1)...(19): siRNA sense strand
ccacuaacacaauucugaa

SEQ ID NO: 810434 - RNA, 19 nt, Homo sapiens
  misc_RNA (1)...(19): siRNA sense strand
gcuauucccugcucccuuu

SEQ ID NO: 810435 - RNA, 19 nt, Homo sapiens
  misc_RNA (1)...(19): siRNA sense strand
gauggauccucuacaguga

SEQ ID NO: 810436 - RNA, 19 nt, Homo sapiens
  misc_RNA (1)...(19): siRNA sense strand
guacuuuccuuuccuuugg

SEQ ID NO: 810437 - RNA, 19 nt, Homo sapiens
  misc_RNA (1)...(19): siRNA sense strand
ccagauggauccucuacag

SEQ ID NO: 810438 - RNA, 19 nt, Homo sapiens
  misc_RNA (1)...(19): siRNA sense strand
ccacuggccucuugaaagc

SEQ ID NO: 810439 - RNA, 19 nt, Homo sapiens
  misc_RNA (1)...(19): siRNA sense strand
gggcuucccacucaugcua

SEQ ID NO: 810440 - RNA, 19 nt, Homo sapiens
  misc_RNA (1)...(19): siRNA sense strand
cuucaccacuggccguuug

SEQ ID NO: 810441 - RNA, 19 nt, Homo sapiens
  misc_RNA (1)...(19): siRNA sense strand
gguacuuuccuuuccuuug

SEQ ID NO: 810442 - RNA, 19 nt, Homo sapiens
  misc_RNA (1)...(19): siRNA sense strand
gcuucccacucaugcuauu

SEQ ID NO: 810443 - RNA, 19 nt, Homo sapiens
  misc_RNA (1)...(19): siRNA sense strand
ccauuccuccuccuccuuu

SEQ ID NO: 810444 - RNA, 19 nt, Homo sapiens
  misc_RNA (1)...(19): siRNA sense strand
ccacuggccguuugucucu

SEQ ID NO: 810445 - RNA, 19 nt, Homo sapiens
  misc_RNA (1)...(19): siRNA sense strand
uaacagagcugauuauugu

SEQ ID NO: 810446 - RNA, 19 nt, Homo sapiens
  misc_RNA (1)...(19): siRNA sense strand
guaccaaacugaacuuguu

SEQ ID NO: 810447 - RNA, 19 nt, Homo sapiens
  misc_RNA (1)...(19): siRNA sense strand
caacagugguucccuaguu

SEQ ID NO: 810448 - RNA, 19 nt, Homo sapiens
  misc_RNA (1)...(19): siRNA sense strand
gaacuaggccacugguugu

SEQ ID NO: 810449 - RNA, 19 nt, Homo sapiens
  misc_RNA (1)...(19): siRNA sense strand
ugagaaagcuugccaucca

SEQ ID NO: 810450 - RNA, 19 nt, Homo sapiens
  misc_RNA (1)...(19): siRNA sense strand
caguuaaucuugaccagaa

SEQ ID NO: 810451 - RNA, 19 nt, Homo sapiens
  misc_RNA (1)...(19): siRNA sense strand
gcuaauagaagccuuguuc

SEQ ID NO: 810452 - RNA, 19 nt, Homo sapiens
  misc_RNA (1)...(19): siRNA sense strand
gaaagcuugccauccauuu

SEQ ID NO: 810453 - RNA, 19 nt, Homo sapiens
  misc_RNA (1)...(19): siRNA sense strand
cagaacagauaaaaccuua

SEQ ID NO: 810454 - RNA, 19 nt, Homo sapiens
  misc_RNA (1)...(19): siRNA sense strand
gauaauccugcuaauagaa

SEQ ID NO: 810455 - RNA, 19 nt, Homo sapiens
  misc_RNA (1)...(19): siRNA sense strand
guauuaacagagcugauua

SEQ ID NO: 810456 - RNA, 19 nt, Homo sapiens
  misc_RNA (1)...(19): siRNA sense strand
cagauggaccuuugagaaa

SEQ ID NO: 810457 - RNA, 19 nt, Homo sapiens
  misc_RNA (1)...(19): siRNA sense strand
ugauaauccugcuaauaga

SEQ ID NO: 810458 - RNA, 19 nt, Homo sapiens
  misc_RNA (1)...(19): siRNA sense strand
ccagauggaccuuugagaa

SEQ ID NO: 810459 - RNA, 19 nt, Homo sapiens
  misc_RNA (1)...(19): siRNA sense strand
gugguucccuaguuuagaa

SEQ ID NO: 810460 - RNA, 19 nt, Homo sapiens
  misc_RNA (1)...(19): siRNA sense strand
gagaaagcuugccauccau

SEQ ID NO: 810461 - RNA, 19 nt, Homo sapiens
  misc_RNA (1)...(19): siRNA sense strand
guccuccacugguuagaaa

SEQ ID NO: 810462 - RNA, 19 nt, Homo sapiens
  misc_RNA (1)...(19): siRNA sense strand
auuauuguccugaguguua

SEQ ID NO: 810463 - RNA, 19 nt, Homo sapiens
  misc_RNA (1)...(19): siRNA sense strand
aacagugguucccuaguuu

SEQ ID NO: 810464 - RNA, 19 nt, Homo sapiens
  misc_RNA (1)...(19): siRNA sense strand
cugauaauccugcuaauag

SEQ ID NO: 810465 - RNA, 19 nt, Homo sapiens
  misc_RNA (1)...(19): siRNA sense strand
caaacugaacuuguugaaa

SEQ ID NO: 810466 - RNA, 19 nt, Homo sapiens
  misc_RNA (1)...(19): siRNA sense strand
ccugauaauccugcuaaua

SEQ ID NO: 810467 - RNA, 19 nt, Homo sapiens
  misc_RNA (1)...(19): siRNA sense strand
uuaacagagcugauuauug

SEQ ID NO: 810468 - RNA, 19 nt, Homo sapiens
  misc_RNA (1)...(19): siRNA sense strand
ccaaacugaacuuguugaa

SEQ ID NO: 810469 - RNA, 19 nt, Homo sapiens
  misc_RNA (1)...(19): siRNA sense strand
cguauuaacagagcugauu

SEQ ID NO: 810470 - RNA, 19 nt, Homo sapiens
  misc_RNA (1)...(19): siRNA sense strand
uaauucacauugcccugau

SEQ ID NO: 810471 - RNA, 19 nt, Homo sapiens
  misc_RNA (1)...(19): siRNA sense strand
acagugguucccuaguuua

SEQ ID NO: 810472 - RNA, 19 nt, Homo sapiens
  misc_RNA (1)...(19): siRNA sense strand
aacccugcauuacaguuaa

SEQ ID NO: 810473 - RNA, 19 nt, Homo sapiens
  misc_RNA (1)...(19): siRNA sense strand
gcugauuauuguccugagu

SEQ ID NO: 810474 - RNA, 19 nt, Homo sapiens
  misc_RNA (1)...(19): siRNA sense strand
cuuagaccguauuaacaga

SEQ ID NO: 810475 - RNA, 19 nt, Homo sapiens
  misc_RNA (1)...(19): siRNA sense strand
guauucuuagaccguauua

SEQ ID NO: 810476 - RNA, 19 nt, Homo sapiens
  misc_RNA (1)...(19): siRNA sense strand
ugauuauuguccugagugu

SEQ ID NO: 810477 - RNA, 19 nt, Homo sapiens
  misc_RNA (1)...(19): siRNA sense strand
gguauucuuagaccguauu

SEQ ID NO: 810478 - RNA, 19 nt, Homo sapiens
  misc_RNA (1)...(19): siRNA sense strand
gaagaucacuuugaaacua

SEQ ID NO: 810479 - RNA, 19 nt, Homo sapiens
  misc_RNA (1)...(19): siRNA sense strand
ggacuuggcuaaugguuaa

SEQ ID NO: 810480 - RNA, 19 nt, Homo sapiens
  misc_RNA (1)...(19): siRNA sense strand
caaguuaggugauggcuuu

SEQ ID NO: 810481 - RNA, 19 nt, Homo sapiens
  misc_RNA (1)...(19): siRNA sense strand
ggaaauguuugaugaaguu

SEQ ID NO: 810482 - RNA, 19 nt, Homo sapiens
  misc_RNA (1)...(19): siRNA sense strand
agacaaagcucuugacaug

SEQ ID NO: 810483 - RNA, 19 nt, Homo sapiens
  misc_RNA (1)...(19): siRNA sense strand
ggaaugauauuuggcuuaa

SEQ ID NO: 810484 - RNA, 19 nt, Homo sapiens
  misc_RNA (1)...(19): siRNA sense strand
ugaauaugcucaaggauuu

SEQ ID NO: 810485 - RNA, 19 nt, Homo sapiens
  misc_RNA (1)...(19): siRNA sense strand
cagcaaagaucuugaaauc

SEQ ID NO: 810486 - RNA, 19 nt, Homo sapiens
  misc_RNA (1)...(19): siRNA sense strand
gaaagcugcugaacucuuc

SEQ ID NO: 810487 - RNA, 19 nt, Homo sapiens
  misc_RNA (1)...(19): siRNA sense strand
ccaguugggugaaauuuaa

SEQ ID NO: 810488 - RNA, 19 nt, Homo sapiens
  misc_RNA (1)...(19): siRNA sense strand
gcaaagaucuugaaaucac

SEQ ID NO: 810489 - RNA, 19 nt, Homo sapiens
  misc_RNA (1)...(19): siRNA sense strand
gaguaggucugauucauga

SEQ ID NO: 810490 - RNA, 19 nt, Homo sapiens
  misc_RNA (1)...(19): siRNA sense strand
ucaaagagaugaugacuac

SEQ ID NO: 810491 - RNA, 19 nt, Homo sapiens
  misc_RNA (1)...(19): siRNA sense strand
gaucaucucuggcacaaca

SEQ ID NO: 810492 - RNA, 19 nt, Homo sapiens
  misc_RNA (1)...(19): siRNA sense strand
cuacauaguuugugauuuc

SEQ ID NO: 810493 - RNA, 19 nt, Homo sapiens
  misc_RNA (1)...(19): siRNA sense strand
gaucacaucuggauauuuu

SEQ ID NO: 810494 - RNA, 19 nt, Homo sapiens
  misc_RNA (1)...(19): siRNA sense strand
gaacuuaucgcuguuaaug

SEQ ID NO: 810495 - RNA, 19 nt, Homo sapiens
  misc_RNA (1)...(19): siRNA sense strand
ccagaaagcugcugaacuc

SEQ ID NO: 810496 - RNA, 19 nt, Homo sapiens
  misc_RNA (1)...(19): siRNA sense strand
gaaaugcuaagaaugauga

SEQ ID NO: 810497 - RNA, 19 nt, Homo sapiens
  misc_RNA (1)...(19): siRNA sense strand
uaaaauggcuggagaagaa

SEQ ID NO: 810498 - RNA, 19 nt, Homo sapiens
  misc_RNA (1)...(19): siRNA sense strand
ggagcagucugucaaauag

SEQ ID NO: 810499 - RNA, 19 nt, Homo sapiens
  misc_RNA (1)...(19): siRNA sense strand
ggucauuccucuccauuau

SEQ ID NO: 810500 - RNA, 19 nt, Homo sapiens
  misc_RNA (1)...(19): siRNA sense strand
gaaagguuaucaagacaca

SEQ ID NO: 810501 - RNA, 19 nt, Homo sapiens
  misc_RNA (1)...(19): siRNA sense strand
ggaauggaaggaaagguua

SEQ ID NO: 810502 - RNA, 19 nt, Homo sapiens
  misc_RNA (1)...(19): siRNA sense strand
uaaagaaguucagcuauag

SEQ ID NO: 810503 - RNA, 19 nt, Homo sapiens
  misc_RNA (1)...(19): siRNA sense strand
gaaauacuauguggcuaug

SEQ ID NO: 810504 - RNA, 19 nt, Homo sapiens
  misc_RNA (1)...(19): siRNA sense strand
ggacucaaaugguuacuac

SEQ ID NO: 810505 - RNA, 19 nt, Homo sapiens
  misc_RNA (1)...(19): siRNA sense strand
gaggagaaauuccagaaag

SEQ ID NO: 810506 - RNA, 19 nt, Homo sapiens
  misc_RNA (1)...(19): siRNA sense strand
gagcaggcauauugcacua

SEQ ID NO: 810507 - RNA, 19 nt, Homo sapiens
  misc_RNA (1)...(19): siRNA sense strand
ggcuaaugguuaauacuua

SEQ ID NO: 810508 - RNA, 19 nt, Homo sapiens
  misc_RNA (1)...(19): siRNA sense strand
gaaauuuaauguggacuca

SEQ ID NO: 810509 - RNA, 19 nt, Homo sapiens
  misc_RNA (1)...(19): siRNA sense strand
gaacuuggcagcucuccuu

SEQ ID NO: 810510 - RNA, 19 nt, Homo sapiens
  misc_RNA (1)...(19): siRNA sense strand
gaaggaaagguuaucaaga

SEQ ID NO: 810511 - RNA, 19 nt, Homo sapiens
  misc_RNA (1)...(19): siRNA sense strand
gaagagagagcaggcauau

SEQ ID NO: 810512 - RNA, 19 nt, Homo sapiens
  misc_RNA (1)...(19): siRNA sense strand
gaugaaguuuccuauaaca

SEQ ID NO: 810513 - RNA, 19 nt, Homo sapiens
  misc_RNA (1)...(19): siRNA sense strand
gcaagaggugaaacuauuu

SEQ ID NO: 810514 - RNA, 19 nt, Homo sapiens
  misc_RNA (1)...(19): siRNA sense strand
ggaugggaccaacucauua

SEQ ID NO: 810515 - RNA, 19 nt, Homo sapiens
  misc_RNA (1)...(19): siRNA sense strand
agagagagcaggcauauug

SEQ ID NO: 810516 - RNA, 19 nt, Homo sapiens
  misc_RNA (1)...(19): siRNA sense strand
gcaaugcuacccaguuuau

SEQ ID NO: 810517 - RNA, 19 nt, Homo sapiens
  misc_RNA (1)...(19): siRNA sense strand
gaaguucagcuauagaaau

SEQ ID NO: 810518 - RNA, 19 nt, Homo sapiens
  misc_RNA (1)...(19): siRNA sense strand
gaauguguguuuugaagua

SEQ ID NO: 810519 - RNA, 19 nt, Homo sapiens
  misc_RNA (1)...(19): siRNA sense strand
cacugaagcuacuugauuu

SEQ ID NO: 810520 - RNA, 19 nt, Homo sapiens
  misc_RNA (1)...(19): siRNA sense strand
gaagauucaagauacauga

SEQ ID NO: 810521 - RNA, 19 nt, Homo sapiens
  misc_RNA (1)...(19): siRNA sense strand
ggacagaaggaauauuuca

SEQ ID NO: 810522 - RNA, 19 nt, Homo sapiens
  misc_RNA (1)...(19): siRNA sense strand
uacaggaaauguuugauga

SEQ ID NO: 810523 - RNA, 19 nt, Homo sapiens
  misc_RNA (1)...(19): siRNA sense strand
gcacagcaaagaucuugaa

SEQ ID NO: 810524 - RNA, 19 nt, Homo sapiens
  misc_RNA (1)...(19): siRNA sense strand
caacagcaggauggaauua

SEQ ID NO: 810525 - RNA, 19 nt, Homo sapiens
  misc_RNA (1)...(19): siRNA sense strand
gaaaauuggggccucauua

SEQ ID NO: 810526 - RNA, 19 nt, Homo sapiens
  misc_RNA (1)...(19): siRNA sense strand
gaacuugaaggaggucuuu

SEQ ID NO: 810527 - RNA, 19 nt, Homo sapiens
  misc_RNA (1)...(19): siRNA sense strand
gaguuacccugcucaugaa

SEQ ID NO: 810528 - RNA, 19 nt, Homo sapiens
  misc_RNA (1)...(19): siRNA sense strand
gaaccacacacuucucaga

SEQ ID NO: 810529 - RNA, 19 nt, Homo sapiens
  misc_RNA (1)...(19): siRNA sense strand
ugcaagaggugaaacuauu

SEQ ID NO: 810530 - RNA, 19 nt, Homo sapiens
  misc_RNA (1)...(19): siRNA sense strand
ucacugaagcuacuugauu

SEQ ID NO: 810531 - RNA, 19 nt, Homo sapiens
  misc_RNA (1)...(19): siRNA sense strand
aggcaaagcuggagugaca

SEQ ID NO: 810532 - RNA, 19 nt, Homo sapiens
  misc_RNA (1)...(19): siRNA sense strand
guuacuacaucguucacua

SEQ ID NO: 810533 - RNA, 19 nt, Homo sapiens
  misc_RNA (1)...(19): siRNA sense strand
auccagagcugcaauuuga

SEQ ID NO: 810534 - RNA, 19 nt, Homo sapiens
  misc_RNA (1)...(19): siRNA sense strand
cagaggaagauucaagaua

SEQ ID NO: 810535 - RNA, 19 nt, Homo sapiens
  misc_RNA (1)...(19): siRNA sense strand
agaggaagauucaagauac

SEQ ID NO: 810536 - RNA, 19 nt, Homo sapiens
  misc_RNA (1)...(19): siRNA sense strand
gaacuaggaauggaaggaa

SEQ ID NO: 810537 - RNA, 19 nt, Homo sapiens
  misc_RNA (1)...(19): siRNA sense strand
gagacugacccuagacaaa

SEQ ID NO: 810538 - RNA, 19 nt, Homo sapiens
  misc_RNA (1)...(19): siRNA sense strand
ugccaaagguuaagacaau

SEQ ID NO: 810539 - RNA, 19 nt, Homo sapiens
  misc_RNA (1)...(19): siRNA sense strand
gaggaagauucaagauaca

SEQ ID NO: 810540 - RNA, 19 nt, Homo sapiens
  misc_RNA (1)...(19): siRNA sense strand
aauaugaacugucaauguc

SEQ ID NO: 810541 - RNA, 19 nt, Homo sapiens
  misc_RNA (1)...(19): siRNA sense strand
guuaccuucuucaguauuu

SEQ ID NO: 810542 - RNA, 19 nt, Homo sapiens
  misc_RNA (1)...(19): siRNA sense strand
cuuacuaccuccaacauga

SEQ ID NO: 810543 - RNA, 19 nt, Homo sapiens
  misc_RNA (1)...(19): siRNA sense strand
gagagguaccuguggcaua

SEQ ID NO: 810544 - RNA, 19 nt, Homo sapiens
  misc_RNA (1)...(19): siRNA sense strand
gcaggcauauugcacuauc

SEQ ID NO: 810545 - RNA, 19 nt, Homo sapiens
  misc_RNA (1)...(19): siRNA sense strand
cgccucaccugaaauacua

SEQ ID NO: 810546 - RNA, 19 nt, Homo sapiens
  misc_RNA (1)...(19): siRNA sense strand
cgacucaaauacaggaaau

SEQ ID NO: 810547 - RNA, 19 nt, Homo sapiens
  misc_RNA (1)...(19): siRNA sense strand
ucuugaagcuggccuguga

SEQ ID NO: 810548 - RNA, 19 nt, Homo sapiens
  misc_RNA (1)...(19): siRNA sense strand
ugaguuacuuggaaucguu

SEQ ID NO: 810549 - RNA, 19 nt, Homo sapiens
  misc_RNA (1)...(19): siRNA sense strand
ccagacaaacggaaucaaa

SEQ ID NO: 810550 - RNA, 19 nt, Homo sapiens
  misc_RNA (1)...(19): siRNA sense strand
ggaaggaaagguuaucaag

SEQ ID NO: 810551 - RNA, 19 nt, Homo sapiens
  misc_RNA (1)...(19): siRNA sense strand
caauaugaacugucaaugu

SEQ ID NO: 810552 - RNA, 19 nt, Homo sapiens
  misc_RNA (1)...(19): siRNA sense strand
cugaaaaccucaagcguua

SEQ ID NO: 810553 - RNA, 19 nt, Homo sapiens
  misc_RNA (1)...(19): siRNA sense strand
ucaccucucuggacuuugu

SEQ ID NO: 810554 - RNA, 19 nt, Homo sapiens
  misc_RNA (1)...(19): siRNA sense strand
aaacuguucuggaaacgau

SEQ ID NO: 810555 - RNA, 19 nt, Homo sapiens
  misc_RNA (1)...(19): siRNA sense strand
uaacauucacagaggauuu

SEQ ID NO: 810556 - RNA, 19 nt, Homo sapiens
  misc_RNA (1)...(19): siRNA sense strand
ggucugaguuacuuggaau

SEQ ID NO: 810557 - RNA, 19 nt, Homo sapiens
  misc_RNA (1)...(19): siRNA sense strand
gggaccaacucauuacaca

SEQ ID NO: 810558 - RNA, 19 nt, Homo sapiens
  misc_RNA (1)...(19): siRNA sense strand
acaauggaaugguggaaug

SEQ ID NO: 810559 - RNA, 19 nt, Homo sapiens
  misc_RNA (1)...(19): siRNA sense strand
caaacuggauuuaauugcu

SEQ ID NO: 810560 - RNA, 19 nt, Homo sapiens
  misc_RNA (1)...(19): siRNA sense strand
ggaaugguggaaugauauu

SEQ ID NO: 810561 - RNA, 19 nt, Homo sapiens
  misc_RNA (1)...(19): siRNA sense strand
gacuugggcucauaugaca

SEQ ID NO: 810562 - RNA, 19 nt, Homo sapiens
  misc_RNA (1)...(19): siRNA sense strand
ucucagugccaucuaguua

SEQ ID NO: 810563 - RNA, 19 nt, Homo sapiens
  misc_RNA (1)...(19): siRNA sense strand
agagguaccuguggcauau

SEQ ID NO: 810564 - RNA, 19 nt, Homo sapiens
  misc_RNA (1)...(19): siRNA sense strand
guaacaugcucgccuuucu

SEQ ID NO: 810565 - RNA, 19 nt, Homo sapiens
  misc_RNA (1)...(19): siRNA sense strand
gcugcaauuugaugacuau

SEQ ID NO: 810566 - RNA, 19 nt, Homo sapiens
  misc_RNA (1)...(19): siRNA sense strand
gggucaagguguccaucua

SEQ ID NO: 810567 - RNA, 19 nt, Homo sapiens
  misc_RNA (1)...(19): siRNA sense strand
cuaguuaucacuucacuga

SEQ ID NO: 810568 - RNA, 19 nt, Homo sapiens
  misc_RNA (1)...(19): siRNA sense strand
uagccuacauaguuuguga

SEQ ID NO: 810569 - RNA, 19 nt, Homo sapiens
  misc_RNA (1)...(19): siRNA sense strand
cagaaggaauauuucagau

SEQ ID NO: 810570 - RNA, 19 nt, Homo sapiens
  misc_RNA (1)...(19): siRNA sense strand
caagaugacaaguaacaug

SEQ ID NO: 810571 - RNA, 19 nt, Homo sapiens
  misc_RNA (1)...(19): siRNA sense strand
gaucccaagaugacaagua

SEQ ID NO: 810572 - RNA, 19 nt, Homo sapiens
  misc_RNA (1)...(19): siRNA sense strand
ggagaaauuccagaaagga

SEQ ID NO: 810573 - RNA, 19 nt, Homo sapiens
  misc_RNA (1)...(19): siRNA sense strand
caaacggaaucaaacacau

SEQ ID NO: 810574 - RNA, 19 nt, Homo sapiens
  misc_RNA (1)...(19): siRNA sense strand
aauguggacucaaaugguu

SEQ ID NO: 810575 - RNA, 19 nt, Homo sapiens
  misc_RNA (1)...(19): siRNA sense strand
ccaaggauaaguugcaaga

SEQ ID NO: 810576 - RNA, 19 nt, Homo sapiens
  misc_RNA (1)...(19): siRNA sense strand
gaacugucaaugucaagug

SEQ ID NO: 810577 - RNA, 19 nt, Homo sapiens
  misc_RNA (1)...(19): siRNA sense strand
agcguuaccuucuucagua

SEQ ID NO: 810578 - RNA, 19 nt, Homo sapiens
  misc_RNA (1)...(19): siRNA sense strand
ggagugggcuuaucauuua

SEQ ID NO: 810579 - RNA, 19 nt, Homo sapiens
  misc_RNA (1)...(19): siRNA sense strand
gaaacuaguugugaugaua

SEQ ID NO: 810580 - RNA, 19 nt, Homo sapiens
  misc_RNA (1)...(19): siRNA sense strand
ggaaagccauagagcauuu

SEQ ID NO: 810581 - RNA, 19 nt, Homo sapiens
  misc_RNA (1)...(19): siRNA sense strand
gcucaugcacuuacuauua

SEQ ID NO: 810582 - RNA, 19 nt, Homo sapiens
  misc_RNA (1)...(19): siRNA sense strand
ggaugaaacuggaaaugug

SEQ ID NO: 810583 - RNA, 19 nt, Homo sapiens
  misc_RNA (1)...(19): siRNA sense strand
agacauugcugccacagua

SEQ ID NO: 810584 - RNA, 19 nt, Homo sapiens
  misc_RNA (1)...(19): siRNA sense strand
gggcuuaucauuuagcuua

SEQ ID NO: 810585 - RNA, 19 nt, Homo sapiens
  misc_RNA (1)...(19): siRNA sense strand
caagugaccucucagcaau

SEQ ID NO: 810586 - RNA, 19 nt, Homo sapiens
  misc_RNA (1)...(19): siRNA sense strand
ccagagugcuccaccauga

SEQ ID NO: 810587 - RNA, 19 nt, Homo sapiens
  misc_RNA (1)...(19): siRNA sense strand
gauaaauauuccuggauug

SEQ ID NO: 810588 - RNA, 19 nt, Homo sapiens
  misc_RNA (1)...(19): siRNA sense strand
gcaauugcaacuaccauaa

SEQ ID NO: 810589 - RNA, 19 nt, Homo sapiens
  misc_RNA (1)...(19): siRNA sense strand
gaaccaaaauguccucuug

SEQ ID NO: 810590 - RNA, 19 nt, Homo sapiens
  misc_RNA (1)...(19): siRNA sense strand
gcaauacauucccaaacug

SEQ ID NO: 810591 - RNA, 19 nt, Homo sapiens
  misc_RNA (1)...(19): siRNA sense strand
ggaaugguauugaaagacu

SEQ ID NO: 810592 - RNA, 19 nt, Homo sapiens
  misc_RNA (1)...(19): siRNA sense strand
gaacacaucgggcuauucu

SEQ ID NO: 810593 - RNA, 19 nt, Homo sapiens
  misc_RNA (1)...(19): siRNA sense strand
caucaaaccucccuugcau

SEQ ID NO: 810594 - RNA, 19 nt, Homo sapiens
  misc_RNA (1)...(19): siRNA sense strand
gcaacacagugcacuuugu

SEQ ID NO: 810595 - RNA, 19 nt, Homo sapiens
  misc_RNA (1)...(19): siRNA sense strand
gcauuaugauugcauggaa

SEQ ID NO: 810596 - RNA, 19 nt, Homo sapiens
  misc_RNA (1)...(19): siRNA sense strand
gggagugggcuuaucauuu

SEQ ID NO: 810597 - RNA, 19 nt, Homo sapiens
  misc_RNA (1)...(19): siRNA sense strand
gaggaagguauauuucuaa

SEQ ID NO: 810598 - RNA, 19 nt, Homo sapiens
  misc_RNA (1)...(19): siRNA sense strand
agaggaagguauauuucua

SEQ ID NO: 810599 - RNA, 19 nt, Homo sapiens
  misc_RNA (1)...(19): siRNA sense strand
ggcauuaguucaaggaguu

SEQ ID NO: 810600 - RNA, 19 nt, Homo sapiens
  misc_RNA (1)...(19): siRNA sense strand
ggaaauguguugggagaag

SEQ ID NO: 810601 - RNA, 19 nt, Homo sapiens
  misc_RNA (1)...(19): siRNA sense strand
gaauugaaacuaguuguga

SEQ ID NO: 810602 - RNA, 19 nt, Homo sapiens
  misc_RNA (1)...(19): siRNA sense strand
gcucauuucugcagguaug

SEQ ID NO: 810603 - RNA, 19 nt, Homo sapiens
  misc_RNA (1)...(19): siRNA sense strand
gaaugguauugaaagacua

SEQ ID NO: 810604 - RNA, 19 nt, Homo sapiens
  misc_RNA (1)...(19): siRNA sense strand
acaauggcaugucaucuug

SEQ ID NO: 810605 - RNA, 19 nt, Homo sapiens
  misc_RNA (1)...(19): siRNA sense strand
gacuaagacugcaggaguu

SEQ ID NO: 810606 - RNA, 19 nt, Homo sapiens
  misc_RNA (1)...(19): siRNA sense strand
aaaccucccuugcaucaug

SEQ ID NO: 810607 - RNA, 19 nt, Homo sapiens
  misc_RNA (1)...(19): siRNA sense strand
gcacuuacuauuagguuga

SEQ ID NO: 810608 - RNA, 19 nt, Homo sapiens
  misc_RNA (1)...(19): siRNA sense strand
ucaaggaguuucagauuuu

SEQ ID NO: 810609 - RNA, 19 nt, Homo sapiens
  misc_RNA (1)...(19): siRNA sense strand
gaagcaauacauucccaaa

SEQ ID NO: 810610 - RNA, 19 nt, Homo sapiens
  misc_RNA (1)...(19): siRNA sense strand
uagaaggcauccgcuauga

SEQ ID NO: 810611 - RNA, 19 nt, Homo sapiens
  misc_RNA (1)...(19): siRNA sense strand
cucaacagcuucacagaga

SEQ ID NO: 810612 - RNA, 19 nt, Homo sapiens
  misc_RNA (1)...(19): siRNA sense strand
cccagacuaugcacugaua

SEQ ID NO: 810613 - RNA, 19 nt, Homo sapiens
  misc_RNA (1)...(19): siRNA sense strand
caacagcuucacagagaaa

SEQ ID NO: 810614 - RNA, 19 nt, Homo sapiens
  misc_RNA (1)...(19): siRNA sense strand
ucaacacguuacugauaaa

SEQ ID NO: 810615 - RNA, 19 nt, Homo sapiens
  misc_RNA (1)...(19): siRNA sense strand
guucaaggaguuucagauu

SEQ ID NO: 810616 - RNA, 19 nt, Homo sapiens
  misc_RNA (1)...(19): siRNA sense strand
uauggaggcucaugcacuu

SEQ ID NO: 810617 - RNA, 19 nt, Homo sapiens
  misc_RNA (1)...(19): siRNA sense strand
caacgaauaguacaagaag

SEQ ID NO: 810618 - RNA, 19 nt, Homo sapiens
  misc_RNA (1)...(19): siRNA sense strand
gaaggcauccgcuaugaac

SEQ ID NO: 810619 - RNA, 19 nt, Homo sapiens
  misc_RNA (1)...(19): siRNA sense strand
cgugguggcuugggcauuu

SEQ ID NO: 810620 - RNA, 19 nt, Homo sapiens
  misc_RNA (1)...(19): siRNA sense strand
caauugcaacuaccauaaa

SEQ ID NO: 810621 - RNA, 19 nt, Homo sapiens
  misc_RNA (1)...(19): siRNA sense strand
ggaauugaaacuaguugug

SEQ ID NO: 810622 - RNA, 19 nt, Homo sapiens
  misc_RNA (1)...(19): siRNA sense strand
gggcuauucuguuuuguaa

SEQ ID NO: 810623 - RNA, 19 nt, Homo sapiens
  misc_RNA (1)...(19): siRNA sense strand
cuucaacacguuacugaua

SEQ ID NO: 810624 - RNA, 19 nt, Homo sapiens
  misc_RNA (1)...(19): siRNA sense strand
ccaaacaaggaaauagauu

SEQ ID NO: 810625 - RNA, 19 nt, Homo sapiens
  misc_RNA (1)...(19): siRNA sense strand
caggugacaugcuugacaa

SEQ ID NO: 810626 - RNA, 19 nt, Homo sapiens
  misc_RNA (1)...(19): siRNA sense strand
uucaacacguuacugauaa

SEQ ID NO: 810627 - RNA, 19 nt, Homo sapiens
  misc_RNA (1)...(19): siRNA sense strand
uaagcagagagacuuguua

SEQ ID NO: 810628 - RNA, 19 nt, Homo sapiens
  misc_RNA (1)...(19): siRNA sense strand
acaucgggcuauucuguuu

SEQ ID NO: 810629 - RNA, 19 nt, Homo sapiens
  misc_RNA (1)...(19): siRNA sense strand
ggcaugucaucuugugaaa

SEQ ID NO: 810630 - RNA, 19 nt, Homo sapiens
  misc_RNA (1)...(19): siRNA sense strand
uucaaggaguuucagauuu

SEQ ID NO: 810631 - RNA, 19 nt, Homo sapiens
  misc_RNA (1)...(19): siRNA sense strand
gcauggaaugguauugaaa

SEQ ID NO: 810632 - RNA, 19 nt, Homo sapiens
  misc_RNA (1)...(19): siRNA sense strand
caauacauucccaaacuga

SEQ ID NO: 810633 - RNA, 19 nt, Homo sapiens
  misc_RNA (1)...(19): siRNA sense strand
ccaagugaccucucagcaa

SEQ ID NO: 810634 - RNA, 19 nt, Homo sapiens
  misc_RNA (1)...(19): siRNA sense strand
ccaauaaaguagaauuucc

SEQ ID NO: 810635 - RNA, 19 nt, Homo sapiens
  misc_RNA (1)...(19): siRNA sense strand
uagguugaccaauaaagua

SEQ ID NO: 810636 - RNA, 19 nt, Homo sapiens
  misc_RNA (1)...(19): siRNA sense strand
guugaccaauaaaguagaa

SEQ ID NO: 810637 - RNA, 19 nt, Homo sapiens
  misc_RNA (1)...(19): siRNA sense strand
gaugaaacuggaaaugugu

SEQ ID NO: 810638 - RNA, 19 nt, Homo sapiens
  misc_RNA (1)...(19): siRNA sense strand
ucaaaccucccuugcauca

SEQ ID NO: 810639 - RNA, 19 nt, Homo sapiens
  misc_RNA (1)...(19): siRNA sense strand
aaaauguccucuuggagua

SEQ ID NO: 810640 - RNA, 19 nt, Homo sapiens
  misc_RNA (1)...(19): siRNA sense strand
gaguagacauaucaaaaga

SEQ ID NO: 810641 - RNA, 19 nt, Homo sapiens
  misc_RNA (1)...(19): siRNA sense strand
aaaccaggacuugcuuuaa

SEQ ID NO: 810642 - RNA, 19 nt, Homo sapiens
  misc_RNA (1)...(19): siRNA sense strand
gggcaaauccugucuucag

SEQ ID NO: 810643 - RNA, 19 nt, Homo sapiens
  misc_RNA (1)...(19): siRNA sense strand
aaccaggacuugcuuuaag

SEQ ID NO: 810644 - RNA, 19 nt, Homo sapiens
  misc_RNA (1)...(19): siRNA sense strand
agagacuuguuaccucaaa

SEQ ID NO: 810645 - RNA, 19 nt, Homo sapiens
  misc_RNA (1)...(19): siRNA sense strand
guaagcagagagacuuguu

SEQ ID NO: 810646 - RNA, 19 nt, Homo sapiens
  misc_RNA (1)...(19): siRNA sense strand
ucaacagcuucacagagaa

SEQ ID NO: 810647 - RNA, 19 nt, Homo sapiens
  misc_RNA (1)...(19): siRNA sense strand
ucauucccauucaucauau

SEQ ID NO: 810648 - RNA, 19 nt, Homo sapiens
  misc_RNA (1)...(19): siRNA sense strand
ugaaacuaguugugaugau

SEQ ID NO: 810649 - RNA, 19 nt, Homo sapiens
  misc_RNA (1)...(19): siRNA sense strand
gucacugucuguuggcauu

SEQ ID NO: 810650 - RNA, 19 nt, Homo sapiens
  misc_RNA (1)...(19): siRNA sense strand
ucucagcaauugcaacuac

SEQ ID NO: 810651 - RNA, 19 nt, Homo sapiens
  misc_RNA (1)...(19): siRNA sense strand
acagugcacuuuguugugu

SEQ ID NO: 810652 - RNA, 19 nt, Homo sapiens
  misc_RNA (1)...(19): siRNA sense strand
aaagaggaagguauauuuc

SEQ ID NO: 810653 - RNA, 19 nt, Homo sapiens
  misc_RNA (1)...(19): siRNA sense strand
ugacaagguggcaagaaga

SEQ ID NO: 810654 - RNA, 19 nt, Homo sapiens
  misc_RNA (1)...(19): siRNA sense strand
ccauaaaaguaccacaauu

SEQ ID NO: 810655 - RNA, 19 nt, Homo sapiens
  misc_RNA (1)...(19): siRNA sense strand
ggagaagcuuccauaaaag

SEQ ID NO: 810656 - RNA, 19 nt, Homo sapiens
  misc_RNA (1)...(19): siRNA sense strand
augauugcauggaauggua

SEQ ID NO: 810657 - RNA, 19 nt, Homo sapiens
  misc_RNA (1)...(19): siRNA sense strand
gcagagagacuuguuaccu

SEQ ID NO: 810658 - RNA, 19 nt, Homo sapiens
  misc_RNA (1)...(19): siRNA sense strand
cacaauggcaugucaucuu

SEQ ID NO: 810659 - RNA, 19 nt, Homo sapiens
  misc_RNA (1)...(19): siRNA sense strand
ccacaguacagcacacaau

SEQ ID NO: 810660 - RNA, 19 nt, Homo sapiens
  misc_RNA (1)...(19): siRNA sense strand
caagguggcaagaagacuu

SEQ ID NO: 810661 - RNA, 19 nt, Homo sapiens
  misc_RNA (1)...(19): siRNA sense strand
cucaugcacuuacuauuag

SEQ ID NO: 810662 - RNA, 19 nt, Homo sapiens
  misc_RNA (1)...(19): siRNA sense strand
cugguggugucgcaaguaa

SEQ ID NO: 810663 - RNA, 19 nt, Homo sapiens
  misc_RNA (1)...(19): siRNA sense strand
aaauaaugcaguacugguu

SEQ ID NO: 810664 - RNA, 19 nt, Homo sapiens
  misc_RNA (1)...(19): siRNA sense strand
acacaucgggcuauucugu

SEQ ID NO: 810665 - RNA, 19 nt, Homo sapiens
  misc_RNA (1)...(19): siRNA sense strand
gggaaagccauagagcauu

SEQ ID NO: 810666 - RNA, 19 nt, Homo sapiens
  misc_RNA (1)...(19): siRNA sense strand
aagaacacaucgggcuauu

SEQ ID NO: 810667 - RNA, 19 nt, Homo sapiens
  misc_RNA (1)...(19): siRNA sense strand
guagacauaucaaaagaag

SEQ ID NO: 810668 - RNA, 19 nt, Homo sapiens
  misc_RNA (1)...(19): siRNA sense strand
guauugggaauugaaacua

SEQ ID NO: 810669 - RNA, 19 nt, Homo sapiens
  misc_RNA (1)...(19): siRNA sense strand
ucaacgaauaguacaagaa

SEQ ID NO: 810670 - RNA, 19 nt, Homo sapiens
  misc_RNA (1)...(19): siRNA sense strand
gaaagccauagagcauuug

SEQ ID NO: 810671 - RNA, 19 nt, Homo sapiens
  misc_RNA (1)...(19): siRNA sense strand
ugcauggaaugguauugaa

SEQ ID NO: 810672 - RNA, 19 nt, Homo sapiens
  misc_RNA (1)...(19): siRNA sense strand
uauugggaauugaaacuag

SEQ ID NO: 810673 - RNA, 19 nt, Homo sapiens
  misc_RNA (1)...(19): siRNA sense strand
gacuucaacacguuacuga

SEQ ID NO: 810674 - RNA, 19 nt, Homo sapiens
  misc_RNA (1)...(19): siRNA sense strand
cagcugguaggacaguuaa

SEQ ID NO: 810675 - RNA, 19 nt, Homo sapiens
  misc_RNA (1)...(19): siRNA sense strand
cauuaugauugcauggaau

SEQ ID NO: 810676 - RNA, 19 nt, Homo sapiens
  misc_RNA (1)...(19): siRNA sense strand
agcaauacauucccaaacu

SEQ ID NO: 810677 - RNA, 19 nt, Homo sapiens
  misc_RNA (1)...(19): siRNA sense strand
agugaccucucagcaauug

SEQ ID NO: 810678 - RNA, 19 nt, Homo sapiens
  misc_RNA (1)...(19): siRNA sense strand
ugaaagagcuuccuaacaa

SEQ ID NO: 810679 - RNA, 19 nt, Homo sapiens
  misc_RNA (1)...(19): siRNA sense strand
gaaggaucauggaacuaua

SEQ ID NO: 810680 - RNA, 19 nt, Homo sapiens
  misc_RNA (1)...(19): siRNA sense strand
gaagagaucccaguuuguu

SEQ ID NO: 810681 - RNA, 19 nt, Homo sapiens
  misc_RNA (1)...(19): siRNA sense strand
uaacaagaaucaggaagaa

SEQ ID NO: 810682 - RNA, 19 nt, Homo sapiens
  misc_RNA (1)...(19): siRNA sense strand
gaugagcggcagacuaaua

SEQ ID NO: 810683 - RNA, 19 nt, Homo sapiens
  misc_RNA (1)...(19): siRNA sense strand
gaucccaguuuguuagaaa

SEQ ID NO: 810684 - RNA, 19 nt, Homo sapiens
  misc_RNA (1)...(19): siRNA sense strand
gaaagagcuuccuaacaag

SEQ ID NO: 810685 - RNA, 19 nt, Homo sapiens
  misc_RNA (1)...(19): siRNA sense strand
gaacugaaacucaaaucau

SEQ ID NO: 810686 - RNA, 19 nt, Homo sapiens
  misc_RNA (1)...(19): siRNA sense strand
ucauggaacuauaagcuaa

SEQ ID NO: 810687 - RNA, 19 nt, Homo sapiens
  misc_RNA (1)...(19): siRNA sense strand
aagaguaucuccucaacuu

SEQ ID NO: 810688 - RNA, 19 nt, Homo sapiens
  misc_RNA (1)...(19): siRNA sense strand
uggaagagaucccaguuug

SEQ ID NO: 810689 - RNA, 19 nt, Homo sapiens
  misc_RNA (1)...(19): siRNA sense strand
cauuucagcuggauuucua

SEQ ID NO: 810690 - RNA, 19 nt, Homo sapiens
  misc_RNA (1)...(19): siRNA sense strand
uagaugagcggcagacuaa

SEQ ID NO: 810691 - RNA, 19 nt, Homo sapiens
  misc_RNA (1)...(19): siRNA sense strand
ugaagaugcuauugcagaa

SEQ ID NO: 810692 - RNA, 19 nt, Homo sapiens
  misc_RNA (1)...(19): siRNA sense strand
ggaggaacuuggaagagau

SEQ ID NO: 810693 - RNA, 19 nt, Homo sapiens
  misc_RNA (1)...(19): siRNA sense strand
ccacagaccaauuagugua

SEQ ID NO: 810694 - RNA, 19 nt, Homo sapiens
  misc_RNA (1)...(19): siRNA sense strand
uaaugaggcugauggaaca

SEQ ID NO: 810695 - RNA, 19 nt, Homo sapiens
  misc_RNA (1)...(19): siRNA sense strand
ggaaauguuuauucaccau

SEQ ID NO: 810696 - RNA, 19 nt, Homo sapiens
  misc_RNA (1)...(19): siRNA sense strand
acaauccacagaccaauua

SEQ ID NO: 810697 - RNA, 19 nt, Homo sapiens
  misc_RNA (1)...(19): siRNA sense strand
uaauuuagcuguggugaag

SEQ ID NO: 810698 - RNA, 19 nt, Homo sapiens
  misc_RNA (1)...(19): siRNA sense strand
guagaagacaggacaauca

SEQ ID NO: 810699 - RNA, 19 nt, Homo sapiens
  misc_RNA (1)...(19): siRNA sense strand
guacaucacccuaccagau

SEQ ID NO: 810700 - RNA, 19 nt, Homo sapiens
  misc_RNA (1)...(19): siRNA sense strand
ggaacuauaagcuaaauac

SEQ ID NO: 810701 - RNA, 19 nt, Homo sapiens
  misc_RNA (1)...(19): siRNA sense strand
gaaaagccacugcagaaaa

SEQ ID NO: 810702 - RNA, 19 nt, Homo sapiens
  misc_RNA (1)...(19): siRNA sense strand
ggaacaauccacagaccaa

SEQ ID NO: 810703 - RNA, 19 nt, Homo sapiens
  misc_RNA (1)...(19): siRNA sense strand
caaccagaauuauauuugc

SEQ ID NO: 810704 - RNA, 19 nt, Homo sapiens
  misc_RNA (1)...(19): siRNA sense strand
ccagaucacccuucacuuc

SEQ ID NO: 810705 - RNA, 19 nt, Homo sapiens
  misc_RNA (1)...(19): siRNA sense strand
uauucaccaucaacaguua

SEQ ID NO: 810706 - RNA, 19 nt, Homo sapiens
  misc_RNA (1)...(19): siRNA sense strand
gaucauuggaagauucaaa

SEQ ID NO: 810707 - RNA, 19 nt, Homo sapiens
  misc_RNA (1)...(19): siRNA sense strand
ccaauuaguguaacuuugu

SEQ ID NO: 810708 - RNA, 19 nt, Homo sapiens
  misc_RNA (1)...(19): siRNA sense strand
gaucacccuucacuuccuu

SEQ ID NO: 810709 - RNA, 19 nt, Homo sapiens
  misc_RNA (1)...(19): siRNA sense strand
gaccaauuaguguaacuuu

SEQ ID NO: 810710 - RNA, 19 nt, Homo sapiens
  misc_RNA (1)...(19): siRNA sense strand
gaagaugcuauugcagaaa

SEQ ID NO: 810711 - RNA, 19 nt, Homo sapiens
  misc_RNA (1)...(19): siRNA sense strand
caggaucauuggaagauuc

SEQ ID NO: 810712 - RNA, 19 nt, Homo sapiens
  misc_RNA (1)...(19): siRNA sense strand
gggugaagaugcuauugca

SEQ ID NO: 810713 - RNA, 19 nt, Homo sapiens
  misc_RNA (1)...(19): siRNA sense strand
ggaagagaucccaguuugu

SEQ ID NO: 810714 - RNA, 19 nt, Homo sapiens
  misc_RNA (1)...(19): siRNA sense strand
gagcggcagacuaauaaug

SEQ ID NO: 810715 - RNA, 19 nt, Homo sapiens
  misc_RNA (1)...(19): siRNA sense strand
gcagacuaauaaugguguu

SEQ ID NO: 810716 - RNA, 19 nt, Homo sapiens
  misc_RNA (1)...(19): siRNA sense strand
gaucauggaacuauaagcu

SEQ ID NO: 810717 - RNA, 19 nt, Homo sapiens
  misc_RNA (1)...(19): siRNA sense strand
aaugauugcuuuggcacua

SEQ ID NO: 810718 - RNA, 19 nt, Homo sapiens
  misc_RNA (1)...(19): siRNA sense strand
gaacaauccacagaccaau

SEQ ID NO: 810719 - RNA, 19 nt, Homo sapiens
  misc_RNA (1)...(19): siRNA sense strand
ugaaggaucauggaacuau

SEQ ID NO: 810720 - RNA, 19 nt, Homo sapiens
  misc_RNA (1)...(19): siRNA sense strand
gaauaugucacucaaucca

SEQ ID NO: 810721 - RNA, 19 nt, Homo sapiens
  misc_RNA (1)...(19): siRNA sense strand
guucuuucuucaggaauaa

SEQ ID NO: 810722 - RNA, 19 nt, Homo sapiens
  misc_RNA (1)...(19): siRNA sense strand
gaaggaaaagcaagaauca

SEQ ID NO: 810723 - RNA, 19 nt, Homo sapiens
  misc_RNA (1)...(19): siRNA sense strand
gggagcgucuuggugaguu

SEQ ID NO: 810724 - RNA, 19 nt, Homo sapiens
  misc_RNA (1)...(19): siRNA sense strand
ucagcuggauuucuaagag

SEQ ID NO: 810725 - RNA, 19 nt, Homo sapiens
  misc_RNA (1)...(19): siRNA sense strand
gucaaccuguucuuucuuc

SEQ ID NO: 810726 - RNA, 19 nt, Homo sapiens
  misc_RNA (1)...(19): siRNA sense strand
uuaugucccugaaggauca

SEQ ID NO: 810727 - RNA, 19 nt, Homo sapiens
  misc_RNA (1)...(19): siRNA sense strand
ggacaaucagacaguugaa

SEQ ID NO: 810728 - RNA, 19 nt, Homo sapiens
  misc_RNA (1)...(19): siRNA sense strand
cuaacaagaaucaggaaga

SEQ ID NO: 810729 - RNA, 19 nt, Homo sapiens
  misc_RNA (1)...(19): siRNA sense strand
aagagaucccaguuuguua

SEQ ID NO: 810730 - RNA, 19 nt, Homo sapiens
  misc_RNA (1)...(19): siRNA sense strand
aggaggaacuuggaagaga

SEQ ID NO: 810731 - RNA, 19 nt, Homo sapiens
  misc_RNA (1)...(19): siRNA sense strand
cugaaaugcauuggaaaua

SEQ ID NO: 810732 - RNA, 19 nt, Homo sapiens
  misc_RNA (1)...(19): siRNA sense strand
cgaccuuccucaucagagu

SEQ ID NO: 810733 - RNA, 19 nt, Homo sapiens
  misc_RNA (1)...(19): siRNA sense strand
cuaagaguaucuccucaac

SEQ ID NO: 810734 - RNA, 19 nt, Homo sapiens
  misc_RNA (1)...(19): siRNA sense strand
ccaggaucauuggaagauu

SEQ ID NO: 810735 - RNA, 19 nt, Homo sapiens
  misc_RNA (1)...(19): siRNA sense strand
ugaguugccaggaucauug

SEQ ID NO: 810736 - RNA, 19 nt, Homo sapiens
  misc_RNA (1)...(19): siRNA sense strand
guguaacuuuguucaagga

SEQ ID NO: 810737 - RNA, 19 nt, Homo sapiens
  misc_RNA (1)...(19): siRNA sense strand
gacaaucagacaguugaaa

SEQ ID NO: 810738 - RNA, 19 nt, Homo sapiens
  misc_RNA (1)...(19): siRNA sense strand
gggaaaagccacugcagaa

SEQ ID NO: 810739 - RNA, 19 nt, Homo sapiens
  misc_RNA (1)...(19): siRNA sense strand
aaagagcuuccuaacaaga

SEQ ID NO: 810740 - RNA, 19 nt, Homo sapiens
  misc_RNA (1)...(19): siRNA sense strand
cagcuggauuucuaagagu

SEQ ID NO: 810741 - RNA, 19 nt, Homo sapiens
  misc_RNA (1)...(19): siRNA sense strand
gaguaucuccucaacuuac

SEQ ID NO: 810742 - RNA, 19 nt, Homo sapiens
  misc_RNA (1)...(19): siRNA sense strand
ggaaaagcaagaaucagaa

SEQ ID NO: 810743 - RNA, 19 nt, Homo sapiens
  misc_RNA (1)...(19): siRNA sense strand
uguucuuucuucaggaaua

SEQ ID NO: 810744 - RNA, 19 nt, Homo sapiens
  misc_RNA (1)...(19): siRNA sense strand
ugauugcuuuggcacuaaa

SEQ ID NO: 810745 - RNA, 19 nt, Homo sapiens
  misc_RNA (1)...(19): siRNA sense strand
cacagaccaauuaguguaa

SEQ ID NO: 810746 - RNA, 19 nt, Homo sapiens
  misc_RNA (1)...(19): siRNA sense strand
caagucgaccuuccucauc

SEQ ID NO: 810747 - RNA, 19 nt, Homo sapiens
  misc_RNA (1)...(19): siRNA sense strand
ccugaaggaucauggaacu

SEQ ID NO: 810748 - RNA, 19 nt, Homo sapiens
  misc_RNA (1)...(19): siRNA sense strand
aaucauuugcuccuccaua

SEQ ID NO: 810749 - RNA, 19 nt, Homo sapiens
  misc_RNA (1)...(19): siRNA sense strand
gagaucccaguuuguuaga

SEQ ID NO: 810750 - RNA, 19 nt, Homo sapiens
  misc_RNA (1)...(19): siRNA sense strand
uaguguaacuuuguucaag

SEQ ID NO: 810751 - RNA, 19 nt, Homo sapiens
  misc_RNA (1)...(19): siRNA sense strand
ggagcgucuuggugaguuc

SEQ ID NO: 810752 - RNA, 19 nt, Homo sapiens
  misc_RNA (1)...(19): siRNA sense strand
ccuaccagaucacccuuca

SEQ ID NO: 810753 - RNA, 19 nt, Homo sapiens
  misc_RNA (1)...(19): siRNA sense strand
aaggaucauggaacuauaa

SEQ ID NO: 810754 - RNA, 19 nt, Homo sapiens
  misc_RNA (1)...(19): siRNA sense strand
gugaguuccugggugaaga

SEQ ID NO: 810755 - RNA, 19 nt, Homo sapiens
  misc_RNA (1)...(19): siRNA sense strand
acccuucacuuccuuguca

SEQ ID NO: 810756 - RNA, 19 nt, Homo sapiens
  misc_RNA (1)...(19): siRNA sense strand
ggaaaagccacugcagaaa

SEQ ID NO: 810757 - RNA, 19 nt, Homo sapiens
  misc_RNA (1)...(19): siRNA sense strand
agaguaucuccucaacuua

SEQ ID NO: 810758 - RNA, 19 nt, Homo sapiens
  misc_RNA (1)...(19): siRNA sense strand
aagucgaccuuccucauca

SEQ ID NO: 810759 - RNA, 19 nt, Homo sapiens
  misc_RNA (1)...(19): siRNA sense strand
acaggacaaucagacaguu

SEQ ID NO: 810760 - RNA, 19 nt, Homo sapiens
  misc_RNA (1)...(19): siRNA sense strand
uaucuccucaacuuacuuu

SEQ ID NO: 810761 - RNA, 19 nt, Homo sapiens
  misc_RNA (1)...(19): siRNA sense strand
aaagcaagaaucagaacug

SEQ ID NO: 810762 - RNA, 19 nt, Homo sapiens
  misc_RNA (1)...(19): siRNA sense strand
gacaggacaaucagacagu

SEQ ID NO: 810763 - RNA, 19 nt, Homo sapiens
  misc_RNA (1)...(19): siRNA sense strand
uuagaugagcggcagacua

SEQ ID NO: 810764 - RNA, 19 nt, Homo sapiens
  misc_RNA (1)...(19): siRNA sense strand
ccucaaccagaauuauauu

SEQ ID NO: 810765 - RNA, 19 nt, Homo sapiens
  misc_RNA (1)...(19): siRNA sense strand
auacagcuaucaguagaag

SEQ ID NO: 810766 - RNA, 19 nt, Homo sapiens
  misc_RNA (1)...(19): siRNA sense strand
aucauuugcuccuccauau

SEQ ID NO: 810767 - RNA, 19 nt, Homo sapiens
  misc_RNA (1)...(19): siRNA sense strand
ugaggcugauggaacaauc

SEQ ID NO: 810768 - RNA, 19 nt, Homo sapiens
  misc_RNA (1)...(19): siRNA sense strand
cuccucaaccagaauuaua

SEQ ID NO: 810769 - RNA, 19 nt, Homo sapiens
  misc_RNA (1)...(19): siRNA sense strand
cauggaacuauaagcuaaa

SEQ ID NO: 810770 - RNA, 19 nt, Homo sapiens
  misc_RNA (1)...(19): siRNA sense strand
accaauuaguguaacuuug

SEQ ID NO: 810771 - RNA, 19 nt, Homo sapiens
  misc_RNA (1)...(19): siRNA sense strand
auauuugcuuccuguaaug

SEQ ID NO: 810772 - RNA, 19 nt, Homo sapiens
  misc_RNA (1)...(19): siRNA sense strand
gaacgacacucagaaauug

SEQ ID NO: 810773 - RNA, 19 nt, Homo sapiens
  misc_RNA (1)...(19): siRNA sense strand
gaaauuggccugccucauc

SEQ ID NO: 810774 - RNA, 19 nt, Homo sapiens
  misc_RNA (1)...(19): siRNA sense strand
gcagagagcuccgcuaagg

SEQ ID NO: 810775 - RNA, 19 nt, Homo sapiens
  misc_RNA (1)...(19): siRNA sense strand
caucaaggcugucauugga

SEQ ID NO: 810776 - RNA, 19 nt, Homo sapiens
  misc_RNA (1)...(19): siRNA sense strand
gauguuaaccugcgcaauu

SEQ ID NO: 810777 - RNA, 19 nt, Homo sapiens
  misc_RNA (1)...(19): siRNA sense strand
uaaggcagguuuaccagaa

SEQ ID NO: 810778 - RNA, 19 nt, Homo sapiens
  misc_RNA (1)...(19): siRNA sense strand
ucacugagauucccauaca

SEQ ID NO: 810779 - RNA, 19 nt, Homo sapiens
  misc_RNA (1)...(19): siRNA sense strand
ggagcagauugaccucaua

SEQ ID NO: 810780 - RNA, 19 nt, Homo sapiens
  misc_RNA (1)...(19): siRNA sense strand
agaaagggcuacaggaugu

SEQ ID NO: 810781 - RNA, 19 nt, Homo sapiens
  misc_RNA (1)...(19): siRNA sense strand
gacaauagccucuccaucu

SEQ ID NO: 810782 - RNA, 19 nt, Homo sapiens
  misc_RNA (1)...(19): siRNA sense strand
caauagccucuccaucuua

SEQ ID NO: 810783 - RNA, 19 nt, Homo sapiens
  misc_RNA (1)...(19): siRNA sense strand
gggcagagagcuccgcuaa

SEQ ID NO: 810784 - RNA, 19 nt, Homo sapiens
  misc_RNA (1)...(19): siRNA sense strand
gccacucgcuggacaauag

SEQ ID NO: 810785 - RNA, 19 nt, Homo sapiens
  misc_RNA (1)...(19): siRNA sense strand
acacuggacagccaaguua

SEQ ID NO: 810786 - RNA, 19 nt, Homo sapiens
  misc_RNA (1)...(19): siRNA sense strand
acaauagccucuccaucuu

SEQ ID NO: 810787 - RNA, 19 nt, Homo sapiens
  misc_RNA (1)...(19): siRNA sense strand
gggcaugaugguagacuua

SEQ ID NO: 810788 - RNA, 19 nt, Homo sapiens
  misc_RNA (1)...(19): siRNA sense strand
ugaacgacacucagaaauu

SEQ ID NO: 810789 - RNA, 19 nt, Homo sapiens
  misc_RNA (1)...(19): siRNA sense strand
gaacgguggcgucgugaug

SEQ ID NO: 810790 - RNA, 19 nt, Homo sapiens
  misc_RNA (1)...(19): siRNA sense strand
gaaggugguggcagaaaug

SEQ ID NO: 810791 - RNA, 19 nt, Homo sapiens
  misc_RNA (1)...(19): siRNA sense strand
ccacaucaaggcugucauu

SEQ ID NO: 810792 - RNA, 19 nt, Homo sapiens
  misc_RNA (1)...(19): siRNA sense strand
ccacauacccgguccugau

SEQ ID NO: 810793 - RNA, 19 nt, Homo sapiens
  misc_RNA (1)...(19): siRNA sense strand
gaagaaaacaaauggcaaa

SEQ ID NO: 810794 - RNA, 19 nt, Homo sapiens
  misc_RNA (1)...(19): siRNA sense strand
ugacugacuuuggugagaa

SEQ ID NO: 810795 - RNA, 19 nt, Homo sapiens
  misc_RNA (1)...(19): siRNA sense strand
cagccaauguguccacugu

SEQ ID NO: 810796 - RNA, 19 nt, Homo sapiens
  misc_RNA (1)...(19): siRNA sense strand
caucuuacguaccuucuac

SEQ ID NO: 810797 - RNA, 19 nt, Homo sapiens
  misc_RNA (1)...(19): siRNA sense strand
gaugagcagcugagcaguu

SEQ ID NO: 810798 - RNA, 19 nt, Homo sapiens
  misc_RNA (1)...(19): siRNA sense strand
ccgcaugugugccuccuau

SEQ ID NO: 810799 - RNA, 19 nt, Homo sapiens
  misc_RNA (1)...(19): siRNA sense strand
cgggauugguggagauuau

SEQ ID NO: 810800 - RNA, 19 nt, Homo sapiens
  misc_RNA (1)...(19): siRNA sense strand
gugcaacagugcucggaau

SEQ ID NO: 810801 - RNA, 19 nt, Homo sapiens
  misc_RNA (1)...(19): siRNA sense strand
gcaugugugccuccuauuc

SEQ ID NO: 810802 - RNA, 19 nt, Homo sapiens
  misc_RNA (1)...(19): siRNA sense strand
agaaggugguggcagaaau

SEQ ID NO: 810803 - RNA, 19 nt, Homo sapiens
  misc_RNA (1)...(19): siRNA sense strand
gcaugaugguagacuuauc

SEQ ID NO: 810804 - RNA, 19 nt, Homo sapiens
  misc_RNA (1)...(19): siRNA sense strand
ccagaaagggcuacaggau

SEQ ID NO: 810805 - RNA, 19 nt, Homo sapiens
  misc_RNA (1)...(19): siRNA sense strand
cacauacccgguccugaua

SEQ ID NO: 810806 - RNA, 19 nt, Homo sapiens
  misc_RNA (1)...(19): siRNA sense strand
ggauugguggagauuauga

SEQ ID NO: 810807 - RNA, 19 nt, Homo sapiens
  misc_RNA (1)...(19): siRNA sense strand
gaaaccugcugcgggucuu

SEQ ID NO: 810808 - RNA, 19 nt, Homo sapiens
  misc_RNA (1)...(19): siRNA sense strand
gaagacguguccacauacc

SEQ ID NO: 810809 - RNA, 19 nt, Homo sapiens
  misc_RNA (1)...(19): siRNA sense strand
gagaaggugguggcagaaa

SEQ ID NO: 810810 - RNA, 19 nt, Homo sapiens
  misc_RNA (1)...(19): siRNA sense strand
cauacccgguccugauaga

SEQ ID NO: 810811 - RNA, 19 nt, Homo sapiens
  misc_RNA (1)...(19): siRNA sense strand
gcgucgugauggugucuuu

SEQ ID NO: 810812 - RNA, 19 nt, Homo sapiens
  misc_RNA (1)...(19): siRNA sense strand
ggaagacguguccacauac

SEQ ID NO: 810813 - RNA, 19 nt, Homo sapiens
  misc_RNA (1)...(19): siRNA sense strand
aggacaaguucccggauga

SEQ ID NO: 810814 - RNA, 19 nt, Homo sapiens
  misc_RNA (1)...(19): siRNA sense strand
ucacuucgaccacaucaag

SEQ ID NO: 810815 - RNA, 19 nt, Homo sapiens
  misc_RNA (1)...(19): siRNA sense strand
ccucauacgccgcaugugu

SEQ ID NO: 810816 - RNA, 19 nt, Homo sapiens
  misc_RNA (1)...(19): siRNA sense strand
gcaacagugcucggaaugu

SEQ ID NO: 810817 - RNA, 19 nt, Homo sapiens
  misc_RNA (1)...(19): siRNA sense strand
auguuaaccugcgcaauuu

SEQ ID NO: 810818 - RNA, 19 nt, Homo sapiens
  misc_RNA (1)...(19): siRNA sense strand
aaagggcuacaggauguua

SEQ ID NO: 810819 - RNA, 19 nt, Homo sapiens
  misc_RNA (1)...(19): siRNA sense strand
gaaagggcuacaggauguu

SEQ ID NO: 810820 - RNA, 19 nt, Homo sapiens
  misc_RNA (1)...(19): siRNA sense strand
gaaaagguacaggaagaaa

SEQ ID NO: 810821 - RNA, 19 nt, Homo sapiens
  misc_RNA (1)...(19): siRNA sense strand
caacccaucagccaaugug

SEQ ID NO: 810822 - RNA, 19 nt, Homo sapiens
  misc_RNA (1)...(19): siRNA sense strand
aaggcagguuuaccagaaa

SEQ ID NO: 810823 - RNA, 19 nt, Homo sapiens
  misc_RNA (1)...(19): siRNA sense strand
caggguguccuucguggaa

SEQ ID NO: 810824 - RNA, 19 nt, Homo sapiens
  misc_RNA (1)...(19): siRNA sense strand
gguggccucugcugagucu

SEQ ID NO: 810825 - RNA, 19 nt, Homo sapiens
  misc_RNA (1)...(19): siRNA sense strand
gaaccgccugggcaugaug

SEQ ID NO: 810826 - RNA, 19 nt, Homo sapiens
  misc_RNA (1)...(19): siRNA sense strand
caccuucccaguccuuauu

SEQ ID NO: 810827 - RNA, 19 nt, Homo sapiens
  misc_RNA (1)...(19): siRNA sense strand
caucgggauugguggagau

SEQ ID NO: 810828 - RNA, 19 nt, Homo sapiens
  misc_RNA (1)...(19): siRNA sense strand
gagcagauugaccucauac

SEQ ID NO: 810829 - RNA, 19 nt, Homo sapiens
  misc_RNA (1)...(19): siRNA sense strand
ccaaguuaccagccaagug

SEQ ID NO: 810830 - RNA, 19 nt, Homo sapiens
  misc_RNA (1)...(19): siRNA sense strand
gaccucauacgccgcaugu

SEQ ID NO: 810831 - RNA, 19 nt, Homo sapiens
  misc_RNA (1)...(19): siRNA sense strand
guuaaccugcgcaauuuca

SEQ ID NO: 810832 - RNA, 19 nt, Homo sapiens
  misc_RNA (1)...(19): siRNA sense strand
uggaaaagguacaggaaga

SEQ ID NO: 810833 - RNA, 19 nt, Homo sapiens
  misc_RNA (1)...(19): siRNA sense strand
guccacuccuucuacaaca

SEQ ID NO: 810834 - RNA, 19 nt, Homo sapiens
  misc_RNA (1)...(19): siRNA sense strand
cggcuaaagcucugaacga

SEQ ID NO: 810835 - RNA, 19 nt, Homo sapiens
  misc_RNA (1)...(19): siRNA sense strand
gaucacuucgaccacauca

SEQ ID NO: 810836 - RNA, 19 nt, Homo sapiens
  misc_RNA (1)...(19): siRNA sense strand
cagaucacuucgaccacau

SEQ ID NO: 810837 - RNA, 19 nt, Homo sapiens
  misc_RNA (1)...(19): siRNA sense strand
gugcaacccaucagccaau

SEQ ID NO: 810838 - RNA, 19 nt, Homo sapiens
  misc_RNA (1)...(19): siRNA sense strand
aauagccucuccaucuuac

SEQ ID NO: 810839 - RNA, 19 nt, Homo sapiens
  misc_RNA (1)...(19): siRNA sense strand
gauguuaaccugcgaaauu

SEQ ID NO: 810840 - RNA, 19 nt, Homo sapiens
  misc_RNA (1)...(19): siRNA sense strand
gcagagaguuccaccaagu

SEQ ID NO: 810841 - RNA, 19 nt, Homo sapiens
  misc_RNA (1)...(19): siRNA sense strand
gacaagcuuuggugagaaa

SEQ ID NO: 810842 - RNA, 19 nt, Homo sapiens
  misc_RNA (1)...(19): siRNA sense strand
gaaaguaguagaggaguug

SEQ ID NO: 810843 - RNA, 19 nt, Homo sapiens
  misc_RNA (1)...(19): siRNA sense strand
uaagaaggguccuggaagu

SEQ ID NO: 810844 - RNA, 19 nt, Homo sapiens
  misc_RNA (1)...(19): siRNA sense strand
ggucugaacagcucucaaa

SEQ ID NO: 810845 - RNA, 19 nt, Homo sapiens
  misc_RNA (1)...(19): siRNA sense strand
gauaagaaggguccuggaa

SEQ ID NO: 810846 - RNA, 19 nt, Homo sapiens
  misc_RNA (1)...(19): siRNA sense strand
ugagacagcguuacaagaa

SEQ ID NO: 810847 - RNA, 19 nt, Homo sapiens
  misc_RNA (1)...(19): siRNA sense strand
ucggacaccuugauaagaa

SEQ ID NO: 810848 - RNA, 19 nt, Homo sapiens
  misc_RNA (1)...(19): siRNA sense strand
agaaugugcuucaggaugu

SEQ ID NO: 810849 - RNA, 19 nt, Homo sapiens
  misc_RNA (1)...(19): siRNA sense strand
gagacagcguuacaagaau

SEQ ID NO: 810850 - RNA, 19 nt, Homo sapiens
  misc_RNA (1)...(19): siRNA sense strand
ggagcagauugaccucauu

SEQ ID NO: 810851 - RNA, 19 nt, Homo sapiens
  misc_RNA (1)...(19): siRNA sense strand
aagcuggccugccucauug

SEQ ID NO: 810852 - RNA, 19 nt, Homo sapiens
  misc_RNA (1)...(19): siRNA sense strand
agacagcguuacaagaaug

SEQ ID NO: 810853 - RNA, 19 nt, Homo sapiens
  misc_RNA (1)...(19): siRNA sense strand
gagcugugugugacaauuu

SEQ ID NO: 810854 - RNA, 19 nt, Homo sapiens
  misc_RNA (1)...(19): siRNA sense strand
gaggcugaguuuccauaug

SEQ ID NO: 810855 - RNA, 19 nt, Homo sapiens
  misc_RNA (1)...(19): siRNA sense strand
gggcagagaguuccaccaa

SEQ ID NO: 810856 - RNA, 19 nt, Homo sapiens
  misc_RNA (1)...(19): siRNA sense strand
gaaugugcuucaggauguu

SEQ ID NO: 810857 - RNA, 19 nt, Homo sapiens
  misc_RNA (1)...(19): siRNA sense strand
cgggauugguggaaauuau

SEQ ID NO: 810858 - RNA, 19 nt, Homo sapiens
  misc_RNA (1)...(19): siRNA sense strand
gggcagucauuggaucuga

SEQ ID NO: 810859 - RNA, 19 nt, Homo sapiens
  misc_RNA (1)...(19): siRNA sense strand
ccacaucagggcagucauu

SEQ ID NO: 810860 - RNA, 19 nt, Homo sapiens
  misc_RNA (1)...(19): siRNA sense strand
gcaucggacaccuugauaa

SEQ ID NO: 810861 - RNA, 19 nt, Homo sapiens
  misc_RNA (1)...(19): siRNA sense strand
ugacaagcuuuggugagaa

SEQ ID NO: 810862 - RNA, 19 nt, Homo sapiens
  misc_RNA (1)...(19): siRNA sense strand
gaggaguugcugagucgua

SEQ ID NO: 810863 - RNA, 19 nt, Homo sapiens
  misc_RNA (1)...(19): siRNA sense strand
ugaauguucccgaugauau

SEQ ID NO: 810864 - RNA, 19 nt, Homo sapiens
  misc_RNA (1)...(19): siRNA sense strand
aaagcuggccugccucauu

SEQ ID NO: 810865 - RNA, 19 nt, Homo sapiens
  misc_RNA (1)...(19): siRNA sense strand
caucagggcagucauugga

SEQ ID NO: 810866 - RNA, 19 nt, Homo sapiens
  misc_RNA (1)...(19): siRNA sense strand
acucugaacucgagcuugu

SEQ ID NO: 810867 - RNA, 19 nt, Homo sapiens
  misc_RNA (1)...(19): siRNA sense strand
cacauacccaguccugaua

SEQ ID NO: 810868 - RNA, 19 nt, Homo sapiens
  misc_RNA (1)...(19): siRNA sense strand
ccacauacccaguccugau

SEQ ID NO: 810869 - RNA, 19 nt, Homo sapiens
  misc_RNA (1)...(19): siRNA sense strand
ggauugguggaaauuauga

SEQ ID NO: 810870 - RNA, 19 nt, Homo sapiens
  misc_RNA (1)...(19): siRNA sense strand
gaauguucccgaugauauc

SEQ ID NO: 810871 - RNA, 19 nt, Homo sapiens
  misc_RNA (1)...(19): siRNA sense strand
ucucugugcugcgcaguuu

SEQ ID NO: 810872 - RNA, 19 nt, Homo sapiens
  misc_RNA (1)...(19): siRNA sense strand
agaaaguaguagaggaguu

SEQ ID NO: 810873 - RNA, 19 nt, Homo sapiens
  misc_RNA (1)...(19): siRNA sense strand
gacaccacauguacaccaa

SEQ ID NO: 810874 - RNA, 19 nt, Homo sapiens
  misc_RNA (1)...(19): siRNA sense strand
uguugaauguucccgauga

SEQ ID NO: 810875 - RNA, 19 nt, Homo sapiens
  misc_RNA (1)...(19): siRNA sense strand
gagcagauugaccucauuc

SEQ ID NO: 810876 - RNA, 19 nt, Homo sapiens
  misc_RNA (1)...(19): siRNA sense strand
gaaaccugcugcgggucuu

SEQ ID NO: 810877 - RNA, 19 nt, Homo sapiens
  misc_RNA (1)...(19): siRNA sense strand
caucgggauugguggaaau

SEQ ID NO: 810878 - RNA, 19 nt, Homo sapiens
  misc_RNA (1)...(19): siRNA sense strand
ccagagcugugugugacaa

SEQ ID NO: 810879 - RNA, 19 nt, Homo sapiens
  misc_RNA (1)...(19): siRNA sense strand
gugcgcuaccugacacuua

SEQ ID NO: 810880 - RNA, 19 nt, Homo sapiens
  misc_RNA (1)...(19): siRNA sense strand
gcaugaugauagauuuguc

SEQ ID NO: 810881 - RNA, 19 nt, Homo sapiens
  misc_RNA (1)...(19): siRNA sense strand
ugaccaagcagccaaccaa

SEQ ID NO: 810882 - RNA, 19 nt, Homo sapiens
  misc_RNA (1)...(19): siRNA sense strand
aggcugaguuuccauaugg

SEQ ID NO: 810883 - RNA, 19 nt, Homo sapiens
  misc_RNA (1)...(19): siRNA sense strand
guucagacaccacauguac

SEQ ID NO: 810884 - RNA, 19 nt, Homo sapiens
  misc_RNA (1)...(19): siRNA sense strand
cauuggaucugaguucauc

SEQ ID NO: 810885 - RNA, 19 nt, Homo sapiens
  misc_RNA (1)...(19): siRNA sense strand
auguuaaccugcgaaauuu

SEQ ID NO: 810886 - RNA, 19 nt, Homo sapiens
  misc_RNA (1)...(19): siRNA sense strand
uugacaagcuuuggugaga

SEQ ID NO: 810887 - RNA, 19 nt, Homo sapiens
  misc_RNA (1)...(19): siRNA sense strand
gauauccugcagcuucuga

SEQ ID NO: 810888 - RNA, 19 nt, Homo sapiens
  misc_RNA (1)...(19): siRNA sense strand
cguggaggguggucacuca

SEQ ID NO: 810889 - RNA, 19 nt, Homo sapiens
  misc_RNA (1)...(19): siRNA sense strand
ccaagcagccaaccaaucg

SEQ ID NO: 810890 - RNA, 19 nt, Homo sapiens
  misc_RNA (1)...(19): siRNA sense strand
ggacaccaggcuacucauc

SEQ ID NO: 810891 - RNA, 19 nt, Homo sapiens
  misc_RNA (1)...(19): siRNA sense strand
ugggcaugaugauagauuu

SEQ ID NO: 810892 - RNA, 19 nt, Homo sapiens
  misc_RNA (1)...(19): siRNA sense strand
caaguucagacaccacaug

SEQ ID NO: 810893 - RNA, 19 nt, Homo sapiens
  misc_RNA (1)...(19): siRNA sense strand
gggauugguggaaauuaug

SEQ ID NO: 810894 - RNA, 19 nt, Homo sapiens
  misc_RNA (1)...(19): siRNA sense strand
uugcuaacguguccacugu

SEQ ID NO: 810895 - RNA, 19 nt, Homo sapiens
  misc_RNA (1)...(19): siRNA sense strand
acaccaacgucagcggauu

SEQ ID NO: 810896 - RNA, 19 nt, Homo sapiens
  misc_RNA (1)...(19): siRNA sense strand
acaccaggcuacucaucug

SEQ ID NO: 810897 - RNA, 19 nt, Homo sapiens
  misc_RNA (1)...(19): siRNA sense strand
ggaggcugaguuuccauau

SEQ ID NO: 810898 - RNA, 19 nt, Homo sapiens
  misc_RNA (1)...(19): siRNA sense strand
cauacccaguccugauaga

SEQ ID NO: 810899 - RNA, 19 nt, Homo sapiens
  misc_RNA (1)...(19): siRNA sense strand
caucggacaccuugauaag

SEQ ID NO: 810900 - RNA, 19 nt, Homo sapiens
  misc_RNA (1)...(19): siRNA sense strand
gcugcgcaguuucuaugug

SEQ ID NO: 810901 - RNA, 19 nt, Homo sapiens
  misc_RNA (1)...(19): siRNA sense strand
guuaaccugcgaaauuuca

SEQ ID NO: 810902 - RNA, 19 nt, Homo sapiens
  misc_RNA (1)...(19): siRNA sense strand
gugcugcgcaguuucuaug

SEQ ID NO: 810903 - RNA, 19 nt, Homo sapiens
  misc_RNA (1)...(19): siRNA sense strand
ggucagccuccgucucaug

SEQ ID NO: 810904 - RNA, 19 nt, Homo sapiens
  misc_RNA (1)...(19): siRNA sense strand
gggcaugaugauagauuug

SEQ ID NO: 810905 - RNA, 19 nt, Homo sapiens
  misc_RNA (1)...(19): siRNA sense strand
gaaccgccugggcaugaug

SEQ ID NO: 810906 - RNA, 19 nt, Homo sapiens
  misc_RNA (1)...(19): siRNA sense strand
gagaguuccaccaaguuca

SEQ ID NO: 810907 - RNA, 19 nt, Homo sapiens
  misc_RNA (1)...(19): siRNA sense strand
cagagaguuccaccaaguu

SEQ ID NO: 810908 - RNA, 19 nt, Homo sapiens
  misc_RNA (1)...(19): siRNA sense strand
cacuguggcagaucacuuu

SEQ ID NO: 810909 - RNA, 19 nt, Homo sapiens
  misc_RNA (1)...(19): siRNA sense strand
ccucgugccucagaaugga

SEQ ID NO: 810910 - RNA, 19 nt, Homo sapiens
  misc_RNA (1)...(19): siRNA sense strand
cagaucacuuugaccacau

SEQ ID NO: 810911 - RNA, 19 nt, Homo sapiens
  misc_RNA (1)...(19): siRNA sense strand
gccugggcaugaugauaga

SEQ ID NO: 810912 - RNA, 19 nt, Homo sapiens
  misc_RNA (1)...(19): siRNA sense strand
gucauuggaucugaguuca

SEQ ID NO: 810913 - RNA, 19 nt, Homo sapiens
  misc_RNA (1)...(19): siRNA sense strand
guugaauguucccgaugau

SEQ ID NO: 810914 - RNA, 19 nt, Homo sapiens
  misc_RNA (1)...(19): siRNA sense strand
gaccacaucagggcaguca

SEQ ID NO: 810915 - RNA, 19 nt, Homo sapiens
  misc_RNA (1)...(19): siRNA sense strand
guuacaagaaugugcuuca

SEQ ID NO: 810916 - RNA, 19 nt, Homo sapiens
  misc_RNA (1)...(19): siRNA sense strand
agagcugugugugacaauu

SEQ ID NO: 810917 - RNA, 19 nt, Homo sapiens
  misc_RNA (1)...(19): siRNA sense strand
gcaauuagcuugugagauu

SEQ ID NO: 810918 - RNA, 19 nt, Homo sapiens
  misc_RNA (1)...(19): siRNA sense strand
auaaauggcuguaugauga

SEQ ID NO: 810919 - RNA, 19 nt, Homo sapiens
  misc_RNA (1)...(19): siRNA sense strand
uagaagugguggaguaaua

SEQ ID NO: 810920 - RNA, 19 nt, Homo sapiens
  misc_RNA (1)...(19): siRNA sense strand
cagcagacaucccuuuaaa

SEQ ID NO: 810921 - RNA, 19 nt, Homo sapiens
  misc_RNA (1)...(19): siRNA sense strand
gaaacucgcauaugacuug

SEQ ID NO: 810922 - RNA, 19 nt, Homo sapiens
  misc_RNA (1)...(19): siRNA sense strand
gaugaaacccuggaagaua

SEQ ID NO: 810923 - RNA, 19 nt, Homo sapiens
  misc_RNA (1)...(19): siRNA sense strand
ccaaagauugugcuuauaa

SEQ ID NO: 810924 - RNA, 19 nt, Homo sapiens
  misc_RNA (1)...(19): siRNA sense strand
caacaaaagcuguaucuua

SEQ ID NO: 810925 - RNA, 19 nt, Homo sapiens
  misc_RNA (1)...(19): siRNA sense strand
gaucggagauuggcugaga

SEQ ID NO: 810926 - RNA, 19 nt, Homo sapiens
  misc_RNA (1)...(19): siRNA sense strand
ggacgaauagaaguaaaua

SEQ ID NO: 810927 - RNA, 19 nt, Homo sapiens
  misc_RNA (1)...(19): siRNA sense strand
gaacuuaacaccuaugaac

SEQ ID NO: 810928 - RNA, 19 nt, Homo sapiens
  misc_RNA (1)...(19): siRNA sense strand
caaaugauuccucgucaaa

SEQ ID NO: 810929 - RNA, 19 nt, Homo sapiens
  misc_RNA (1)...(19): siRNA sense strand
caauuagcuugugagauua

SEQ ID NO: 810930 - RNA, 19 nt, Homo sapiens
  misc_RNA (1)...(19): siRNA sense strand
ggacagcagacaucccuuu

SEQ ID NO: 810931 - RNA, 19 nt, Homo sapiens
  misc_RNA (1)...(19): siRNA sense strand
gagccuuggucaucauuug

SEQ ID NO: 810932 - RNA, 19 nt, Homo sapiens
  misc_RNA (1)...(19): siRNA sense strand
accaagaacuuaacaccua

SEQ ID NO: 810933 - RNA, 19 nt, Homo sapiens
  misc_RNA (1)...(19): siRNA sense strand
uuuggaaacucgcauauga

SEQ ID NO: 810934 - RNA, 19 nt, Homo sapiens
  misc_RNA (1)...(19): siRNA sense strand
gaaauccagacuuguauca

SEQ ID NO: 810935 - RNA, 19 nt, Homo sapiens
  misc_RNA (1)...(19): siRNA sense strand
gcuuauaaauggcuguaug

SEQ ID NO: 810936 - RNA, 19 nt, Homo sapiens
  misc_RNA (1)...(19): siRNA sense strand
ccaagaacuuaacaccuau

SEQ ID NO: 810937 - RNA, 19 nt, Homo sapiens
  misc_RNA (1)...(19): siRNA sense strand
acaggaggaugagaaagua

SEQ ID NO: 810938 - RNA, 19 nt, Homo sapiens
  misc_RNA (1)...(19): siRNA sense strand
ccacuuacguucauugacu

SEQ ID NO: 810939 - RNA, 19 nt, Homo sapiens
  misc_RNA (1)...(19): siRNA sense strand
aaguagaccuccacaccua

SEQ ID NO: 810940 - RNA, 19 nt, Homo sapiens
  misc_RNA (1)...(19): siRNA sense strand
cuauagagcguuccaaaga

SEQ ID NO: 810941 - RNA, 19 nt, Homo sapiens
  misc_RNA (1)...(19): siRNA sense strand
gacagcagacaucccuuua

SEQ ID NO: 810942 - RNA, 19 nt, Homo sapiens
  misc_RNA (1)...(19): siRNA sense strand
gcuggucgcuuuugcauuu

SEQ ID NO: 810943 - RNA, 19 nt, Homo sapiens
  misc_RNA (1)...(19): siRNA sense strand
caaagugguugcgcucgaa

SEQ ID NO: 810944 - RNA, 19 nt, Homo sapiens
  misc_RNA (1)...(19): siRNA sense strand
caaaagcuguaucuuauuc

SEQ ID NO: 810945 - RNA, 19 nt, Homo sapiens
  misc_RNA (1)...(19): siRNA sense strand
cgagagauauauugaugca

SEQ ID NO: 810946 - RNA, 19 nt, Homo sapiens
  misc_RNA (1)...(19): siRNA sense strand
gaagugguggaguaauaaa

SEQ ID NO: 810947 - RNA, 19 nt, Homo sapiens
  misc_RNA (1)...(19): siRNA sense strand
gcauaugacuuguauuccu

SEQ ID NO: 810948 - RNA, 19 nt, Homo sapiens
  misc_RNA (1)...(19): siRNA sense strand
auagagcguuccaaagauu

SEQ ID NO: 810949 - RNA, 19 nt, Homo sapiens
  misc_RNA (1)...(19): siRNA sense strand
cccaaagcguagggaauua

SEQ ID NO: 810950 - RNA, 19 nt, Homo sapiens
  misc_RNA (1)...(19): siRNA sense strand
uuccaaagauugugcuuau

SEQ ID NO: 810951 - RNA, 19 nt, Homo sapiens
  misc_RNA (1)...(19): siRNA sense strand
gaaaacaggaggaugagaa

SEQ ID NO: 810952 - RNA, 19 nt, Homo sapiens
  misc_RNA (1)...(19): siRNA sense strand
guauuccuguacuucuaua

SEQ ID NO: 810953 - RNA, 19 nt, Homo sapiens
  misc_RNA (1)...(19): siRNA sense strand
aaggccagcuuagacuuua

SEQ ID NO: 810954 - RNA, 19 nt, Homo sapiens
  misc_RNA (1)...(19): siRNA sense strand
uauagagcguuccaaagau

SEQ ID NO: 810955 - RNA, 19 nt, Homo sapiens
  misc_RNA (1)...(19): siRNA sense strand
ucaaaugauuccucgucaa

SEQ ID NO: 810956 - RNA, 19 nt, Homo sapiens
  misc_RNA (1)...(19): siRNA sense strand
ucaggaauccgccaaggaa

SEQ ID NO: 810957 - RNA, 19 nt, Homo sapiens
  misc_RNA (1)...(19): siRNA sense strand
aaaaguaguuggaauguuc

SEQ ID NO: 810958 - RNA, 19 nt, Homo sapiens
  misc_RNA (1)...(19): siRNA sense strand
ugagaaaguaguuaacaug

SEQ ID NO: 810959 - RNA, 19 nt, Homo sapiens
  misc_RNA (1)...(19): siRNA sense strand
gauuaagguucugcacaug

SEQ ID NO: 810960 - RNA, 19 nt, Homo sapiens
  misc_RNA (1)...(19): siRNA sense strand
aguguuaucuggcaauuag

SEQ ID NO: 810961 - RNA, 19 nt, Homo sapiens
  misc_RNA (1)...(19): siRNA sense strand
aauccagacuuguaucaug

SEQ ID NO: 810962 - RNA, 19 nt, Homo sapiens
  misc_RNA (1)...(19): siRNA sense strand
ccggaaauccagacuugua

SEQ ID NO: 810963 - RNA, 19 nt, Homo sapiens
  misc_RNA (1)...(19): siRNA sense strand
gaggaugagaaaguaguua

SEQ ID NO: 810964 - RNA, 19 nt, Homo sapiens
  misc_RNA (1)...(19): siRNA sense strand
agauugugcuuauaaaugg

SEQ ID NO: 810965 - RNA, 19 nt, Homo sapiens
  misc_RNA (1)...(19): siRNA sense strand
acuugaagcuggugccaaa

SEQ ID NO: 810966 - RNA, 19 nt, Homo sapiens
  misc_RNA (1)...(19): siRNA sense strand
gaugcgagagauauauuga

SEQ ID NO: 810967 - RNA, 19 nt, Homo sapiens
  misc_RNA (1)...(19): siRNA sense strand
gacuuuaagcguuacguaa

SEQ ID NO: 810968 - RNA, 19 nt, Homo sapiens
  misc_RNA (1)...(19): siRNA sense strand
caaagcguagggaauuauu

SEQ ID NO: 810969 - RNA, 19 nt, Homo sapiens
  misc_RNA (1)...(19): siRNA sense strand
uaaguguuaucuggcaauu

SEQ ID NO: 810970 - RNA, 19 nt, Homo sapiens
  misc_RNA (1)...(19): siRNA sense strand
ugguugcgcucgaaaguga

SEQ ID NO: 810971 - RNA, 19 nt, Homo sapiens
  misc_RNA (1)...(19): siRNA sense strand
ccacuugaugcgagagaua

SEQ ID NO: 810972 - RNA, 19 nt, Homo sapiens
  misc_RNA (1)...(19): siRNA sense strand
gaugagaaaguaguuaaca

SEQ ID NO: 810973 - RNA, 19 nt, Homo sapiens
  misc_RNA (1)...(19): siRNA sense strand
ugcgagagauauauugaug

SEQ ID NO: 810974 - RNA, 19 nt, Homo sapiens
  misc_RNA (1)...(19): siRNA sense strand
caugcacccucaagacuuc

SEQ ID NO: 810975 - RNA, 19 nt, Homo sapiens
  misc_RNA (1)...(19): siRNA sense strand
ucccggaaauccagacuug

SEQ ID NO: 810976 - RNA, 19 nt, Homo sapiens
  misc_RNA (1)...(19): siRNA sense strand
cguaaccgaucggagauug

SEQ ID NO: 810977 - RNA, 19 nt, Homo sapiens
  misc_RNA (1)...(19): siRNA sense strand
cgaaccggauuucaggaau

SEQ ID NO: 810978 - RNA, 19 nt, Homo sapiens
  misc_RNA (1)...(19): siRNA sense strand
acucgcauaugacuuguau

SEQ ID NO: 810979 - RNA, 19 nt, Homo sapiens
  misc_RNA (1)...(19): siRNA sense strand
uauaaauggcuguaugaug

SEQ ID NO: 810980 - RNA, 19 nt, Homo sapiens
  misc_RNA (1)...(19): siRNA sense strand
gacccuggcgcaaaucuau

SEQ ID NO: 810981 - RNA, 19 nt, Homo sapiens
  misc_RNA (1)...(19): siRNA sense strand
cuuaacaccuaugaacuau

SEQ ID NO: 810982 - RNA, 19 nt, Homo sapiens
  misc_RNA (1)...(19): siRNA sense strand
uuaagguucugcacaugga

SEQ ID NO: 810983 - RNA, 19 nt, Homo sapiens
  misc_RNA (1)...(19): siRNA sense strand
ucgcauaugacuuguauuc

SEQ ID NO: 810984 - RNA, 19 nt, Homo sapiens
  misc_RNA (1)...(19): siRNA sense strand
augaaacccuggaagauag

SEQ ID NO: 810985 - RNA, 19 nt, Homo sapiens
  misc_RNA (1)...(19): siRNA sense strand
ugaagcuggugccaaagug

SEQ ID NO: 810986 - RNA, 19 nt, Homo sapiens
  misc_RNA (1)...(19): siRNA sense strand
agaaaguaguuaacaugca

SEQ ID NO: 810987 - RNA, 19 nt, Homo sapiens
  misc_RNA (1)...(19): siRNA sense strand
aaagcguagggaauuauua

SEQ ID NO: 810988 - RNA, 19 nt, Homo sapiens
  misc_RNA (1)...(19): siRNA sense strand
agauuaagguucugcacau

SEQ ID NO: 810989 - RNA, 19 nt, Homo sapiens
  misc_RNA (1)...(19): siRNA sense strand
ugacucaggcauuacuuga

SEQ ID NO: 810990 - RNA, 19 nt, Homo sapiens
  misc_RNA (1)...(19): siRNA sense strand
ccagacuuguaucauguau

SEQ ID NO: 810991 - RNA, 19 nt, Homo sapiens
  misc_RNA (1)...(19): siRNA sense strand
gcugagacccuggcgcaaa

SEQ ID NO: 810992 - RNA, 19 nt, Homo sapiens
  misc_RNA (1)...(19): siRNA sense strand
uccuagaagugguggagua

SEQ ID NO: 810993 - RNA, 19 nt, Homo sapiens
  misc_RNA (1)...(19): siRNA sense strand
ggaggaugagaaaguaguu

SEQ ID NO: 810994 - RNA, 19 nt, Homo sapiens
  misc_RNA (1)...(19): siRNA sense strand
guucauugacuccacuuga

SEQ ID NO: 810995 - RNA, 19 nt, Homo sapiens
  misc_RNA (1)...(19): siRNA sense strand
guaauaaaaccaccugcua

SEQ ID NO: 810996 - RNA, 19 nt, Homo sapiens
  misc_RNA (1)...(19): siRNA sense strand
uccaaagauugugcuuaua

SEQ ID NO: 810997 - RNA, 19 nt, Homo sapiens
  misc_RNA (1)...(19): siRNA sense strand
gcagcgccacuguaauaga

SEQ ID NO: 810998 - RNA, 19 nt, Homo sapiens
  misc_RNA (1)...(19): siRNA sense strand
cauggagccuuggucauca

SEQ ID NO: 810999 - RNA, 19 nt, Homo sapiens
  misc_RNA (1)...(19): siRNA sense strand
ggaaauccagacuuguauc

SEQ ID NO: 811000 - RNA, 19 nt, Homo sapiens
  misc_RNA (1)...(19): siRNA sense strand
gaauuugggaauagaagca

SEQ ID NO: 811001 - RNA, 19 nt, Homo sapiens
  misc_RNA (1)...(19): siRNA sense strand
uaaauggcuguaugaugaa

SEQ ID NO: 811002 - RNA, 19 nt, Homo sapiens
  misc_RNA (1)...(19): siRNA sense strand
ccacuguaauagaccacuu

SEQ ID NO: 811003 - RNA, 19 nt, Homo sapiens
  misc_RNA (1)...(19): siRNA sense strand
aauggcagaucccggaaau

SEQ ID NO: 811004 - RNA, 19 nt, Homo sapiens
  misc_RNA (1)...(19): siRNA sense strand
ugacuuguauuccuguacu

SEQ ID NO: 811005 - RNA, 19 nt, Homo sapiens
  misc_RNA (1)...(19): siRNA sense strand
uaacaugcacccucaagac

SEQ ID NO: 811006 - RNA, 19 nt, Homo sapiens
  misc_RNA (1)...(19): siRNA sense strand
gcuguaucuuauucaaaug

SEQ ID NO: 811007 - RNA, 19 nt, Homo sapiens
  misc_RNA (1)...(19): siRNA sense strand
agaagugguggaguaauaa

SEQ ID NO: 811008 - RNA, 19 nt, Homo sapiens
  misc_RNA (1)...(19): siRNA sense strand
guccuggaauccugacuca

SEQ ID NO: 811009 - RNA, 19 nt, Homo sapiens
  misc_RNA (1)...(19): siRNA sense strand
gaccacuuacguucauuga

SEQ ID NO: 811010 - RNA, 19 nt, Homo sapiens
  misc_RNA (1)...(19): siRNA sense strand
cugagacccuggcgcaaau

SEQ ID NO: 811011 - RNA, 19 nt, Homo sapiens
  misc_RNA (1)...(19): siRNA sense strand
cggcgacgcgaaagcauuu

SEQ ID NO: 811012 - RNA, 19 nt, Homo sapiens
  misc_RNA (1)...(19): siRNA sense strand
ugauauauacacccggaaa

SEQ ID NO: 811013 - RNA, 19 nt, Homo sapiens
  misc_RNA (1)...(19): siRNA sense strand
cagcgccacuguaauagac

SEQ ID NO: 811014 - RNA, 19 nt, Homo sapiens
  misc_RNA (1)...(19): siRNA sense strand
ccaaagcguagggaauuau

SEQ ID NO: 811015 - RNA, 19 nt, Homo sapiens
  misc_RNA (1)...(19): siRNA sense strand
ugugacuucuuuaaacuag

SEQ ID NO: 811016 - RNA, 19 nt, Homo sapiens
  misc_RNA (1)...(19): siRNA sense strand
acucaggcauuacuugaag

SEQ ID NO: 811017 - RNA, 19 nt, Homo sapiens
  misc_RNA (1)...(19): siRNA sense strand
guagagaucuuguagaaua

SEQ ID NO: 811018 - RNA, 19 nt, Homo sapiens
  misc_RNA (1)...(19): siRNA sense strand
gcacugauauuucuuugua

SEQ ID NO: 811019 - RNA, 19 nt, Homo sapiens
  misc_RNA (1)...(19): siRNA sense strand
gaagaaaccuaugcaaauu

SEQ ID NO: 811020 - RNA, 19 nt, Homo sapiens
  misc_RNA (1)...(19): siRNA sense strand
gaugggagauugaaagaua

SEQ ID NO: 811021 - RNA, 19 nt, Homo sapiens
  misc_RNA (1)...(19): siRNA sense strand
gaagaaaccauguccagua

SEQ ID NO: 811022 - RNA, 19 nt, Homo sapiens
  misc_RNA (1)...(19): siRNA sense strand
cauacgagaucuuaacaua

SEQ ID NO: 811023 - RNA, 19 nt, Homo sapiens
  misc_RNA (1)...(19): siRNA sense strand
gaccauaacuuugaacuug

SEQ ID NO: 811024 - RNA, 19 nt, Homo sapiens
  misc_RNA (1)...(19): siRNA sense strand
gaagaaaucuaccagaaac

SEQ ID NO: 811025 - RNA, 19 nt, Homo sapiens
  misc_RNA (1)...(19): siRNA sense strand
uaacaaggauucucaaagu

SEQ ID NO: 811026 - RNA, 19 nt, Homo sapiens
  misc_RNA (1)...(19): siRNA sense strand
caagagauaccuauuguaa

SEQ ID NO: 811027 - RNA, 19 nt, Homo sapiens
  misc_RNA (1)...(19): siRNA sense strand
cuacuggacuucaugcuua

SEQ ID NO: 811028 - RNA, 19 nt, Homo sapiens
  misc_RNA (1)...(19): siRNA sense strand
ggaagcacauacacaauug

SEQ ID NO: 811029 - RNA, 19 nt, Homo sapiens
  misc_RNA (1)...(19): siRNA sense strand
ggaguuagcacugauauuu

SEQ ID NO: 811030 - RNA, 19 nt, Homo sapiens
  misc_RNA (1)...(19): siRNA sense strand
ggacaagccuuacauugca

SEQ ID NO: 811031 - RNA, 19 nt, Homo sapiens
  misc_RNA (1)...(19): siRNA sense strand
ugaagaugaugaccuagua

SEQ ID NO: 811032 - RNA, 19 nt, Homo sapiens
  misc_RNA (1)...(19): siRNA sense strand
ucaaggaaguggcgauaaa

SEQ ID NO: 811033 - RNA, 19 nt, Homo sapiens
  misc_RNA (1)...(19): siRNA sense strand
gaagaugaccauaacuuug

SEQ ID NO: 811034 - RNA, 19 nt, Homo sapiens
  misc_RNA (1)...(19): siRNA sense strand
gcauacaaguuuggaauga

SEQ ID NO: 811035 - RNA, 19 nt, Homo sapiens
  misc_RNA (1)...(19): siRNA sense strand
ggaagaaaucuaccagaaa

SEQ ID NO: 811036 - RNA, 19 nt, Homo sapiens
  misc_RNA (1)...(19): siRNA sense strand
caacaggcauacaaguuug

SEQ ID NO: 811037 - RNA, 19 nt, Homo sapiens
  misc_RNA (1)...(19): siRNA sense strand
gauuggagcuauccuuaug

SEQ ID NO: 811038 - RNA, 19 nt, Homo sapiens
  misc_RNA (1)...(19): siRNA sense strand
gagauuggagcuauccuua

SEQ ID NO: 811039 - RNA, 19 nt, Homo sapiens
  misc_RNA (1)...(19): siRNA sense strand
gagcacauacgagaucuua

SEQ ID NO: 811040 - RNA, 19 nt, Homo sapiens
  misc_RNA (1)...(19): siRNA sense strand
gggcauauguuaaauacuc

SEQ ID NO: 811041 - RNA, 19 nt, Homo sapiens
  misc_RNA (1)...(19): siRNA sense strand
ggaaugaaguauuugugau

SEQ ID NO: 811042 - RNA, 19 nt, Homo sapiens
  misc_RNA (1)...(19): siRNA sense strand
ggucauguuugcuauguau

SEQ ID NO: 811043 - RNA, 19 nt, Homo sapiens
  misc_RNA (1)...(19): siRNA sense strand
gacuagcucuguccaggua

SEQ ID NO: 811044 - RNA, 19 nt, Homo sapiens
  misc_RNA (1)...(19): siRNA sense strand
gaugaugaccuaguaaauu

SEQ ID NO: 811045 - RNA, 19 nt, Homo sapiens
  misc_RNA (1)...(19): siRNA sense strand
cugaugagguuaugaagaa

SEQ ID NO: 811046 - RNA, 19 nt, Homo sapiens
  misc_RNA (1)...(19): siRNA sense strand
gaaauuggaacagugauug

SEQ ID NO: 811047 - RNA, 19 nt, Homo sapiens
  misc_RNA (1)...(19): siRNA sense strand
gcacauacacaauuguuuc

SEQ ID NO: 811048 - RNA, 19 nt, Homo sapiens
  misc_RNA (1)...(19): siRNA sense strand
gagcaagagauaccuauug

SEQ ID NO: 811049 - RNA, 19 nt, Homo sapiens
  misc_RNA (1)...(19): siRNA sense strand
gaugaguucugccgucguu

SEQ ID NO: 811050 - RNA, 19 nt, Homo sapiens
  misc_RNA (1)...(19): siRNA sense strand
cuucagaucuggagcgaaa

SEQ ID NO: 811051 - RNA, 19 nt, Homo sapiens
  misc_RNA (1)...(19): siRNA sense strand
uggaagaaaucuaccagaa

SEQ ID NO: 811052 - RNA, 19 nt, Homo sapiens
  misc_RNA (1)...(19): siRNA sense strand
ugaagaaaccuaugcaaau

SEQ ID NO: 811053 - RNA, 19 nt, Homo sapiens
  misc_RNA (1)...(19): siRNA sense strand
gagcuauccuuaugaacau

SEQ ID NO: 811054 - RNA, 19 nt, Homo sapiens
  misc_RNA (1)...(19): siRNA sense strand
cuauagcugucuuguguaa

SEQ ID NO: 811055 - RNA, 19 nt, Homo sapiens
  misc_RNA (1)...(19): siRNA sense strand
agacugucauccaacaaua

SEQ ID NO: 811056 - RNA, 19 nt, Homo sapiens
  misc_RNA (1)...(19): siRNA sense strand
gaagaugaugaccuaguaa

SEQ ID NO: 811057 - RNA, 19 nt, Homo sapiens
  misc_RNA (1)...(19): siRNA sense strand
guacuugggcauauguuaa

SEQ ID NO: 811058 - RNA, 19 nt, Homo sapiens
  misc_RNA (1)...(19): siRNA sense strand
ugacagaccuaauggaacu

SEQ ID NO: 811059 - RNA, 19 nt, Homo sapiens
  misc_RNA (1)...(19): siRNA sense strand
uuaugaagaugaugaccua

SEQ ID NO: 811060 - RNA, 19 nt, Homo sapiens
  misc_RNA (1)...(19): siRNA sense strand
gaaaccauguccaguacag

SEQ ID NO: 811061 - RNA, 19 nt, Homo sapiens
  misc_RNA (1)...(19): siRNA sense strand
caaaaucuaucaaggagaa

SEQ ID NO: 811062 - RNA, 19 nt, Homo sapiens
  misc_RNA (1)...(19): siRNA sense strand
uaaggaagcacauacacaa

SEQ ID NO: 811063 - RNA, 19 nt, Homo sapiens
  misc_RNA (1)...(19): siRNA sense strand
ggagcuauccuuaugaaca

SEQ ID NO: 811064 - RNA, 19 nt, Homo sapiens
  misc_RNA (1)...(19): siRNA sense strand
gcaagagauaccuauugua

SEQ ID NO: 811065 - RNA, 19 nt, Homo sapiens
  misc_RNA (1)...(19): siRNA sense strand
gaaagauauugaugaagac

SEQ ID NO: 811066 - RNA, 19 nt, Homo sapiens
  misc_RNA (1)...(19): siRNA sense strand
ugaagaugaccauaacuuu

SEQ ID NO: 811067 - RNA, 19 nt, Homo sapiens
  misc_RNA (1)...(19): siRNA sense strand
ggacugacuggcuucauug

SEQ ID NO: 811068 - RNA, 19 nt, Homo sapiens
  misc_RNA (1)...(19): siRNA sense strand
auaaguggaucuaaaguca

SEQ ID NO: 811069 - RNA, 19 nt, Homo sapiens
  misc_RNA (1)...(19): siRNA sense strand
aaagggaagucauuucuac

SEQ ID NO: 811070 - RNA, 19 nt, Homo sapiens
  misc_RNA (1)...(19): siRNA sense strand
uacgagaucuuaacauagu

SEQ ID NO: 811071 - RNA, 19 nt, Homo sapiens
  misc_RNA (1)...(19): siRNA sense strand
gaaguuacuagacgucgaa

SEQ ID NO: 811072 - RNA, 19 nt, Homo sapiens
  misc_RNA (1)...(19): siRNA sense strand
uaaaguugcugugcugcuu

SEQ ID NO: 811073 - RNA, 19 nt, Homo sapiens
  misc_RNA (1)...(19): siRNA sense strand
gaacauucauaugguuugg

SEQ ID NO: 811074 - RNA, 19 nt, Homo sapiens
  misc_RNA (1)...(19): siRNA sense strand
gcucuguccagguauauaa

SEQ ID NO: 811075 - RNA, 19 nt, Homo sapiens
  misc_RNA (1)...(19): siRNA sense strand
gcacauacgagaucuuaac

SEQ ID NO: 811076 - RNA, 19 nt, Homo sapiens
  misc_RNA (1)...(19): siRNA sense strand
ucaccgugcucuuucauca

SEQ ID NO: 811077 - RNA, 19 nt, Homo sapiens
  misc_RNA (1)...(19): siRNA sense strand
uaauaaucuugcugcagua

SEQ ID NO: 811078 - RNA, 19 nt, Homo sapiens
  misc_RNA (1)...(19): siRNA sense strand
ggagauugaaagauauuga

SEQ ID NO: 811079 - RNA, 19 nt, Homo sapiens
  misc_RNA (1)...(19): siRNA sense strand
aaucuugguugcuuccuuu

SEQ ID NO: 811080 - RNA, 19 nt, Homo sapiens
  misc_RNA (1)...(19): siRNA sense strand
aaaguuggauugguggaaa

SEQ ID NO: 811081 - RNA, 19 nt, Homo sapiens
  misc_RNA (1)...(19): siRNA sense strand
uuguagagaucuuguagaa

SEQ ID NO: 811082 - RNA, 19 nt, Homo sapiens
  misc_RNA (1)...(19): siRNA sense strand
ucucaaaucuugguugcuu

SEQ ID NO: 811083 - RNA, 19 nt, Homo sapiens
  misc_RNA (1)...(19): siRNA sense strand
gaaacaacaggcauacaag

SEQ ID NO: 811084 - RNA, 19 nt, Homo sapiens
  misc_RNA (1)...(19): siRNA sense strand
acaacaggcauacaaguuu

SEQ ID NO: 811085 - RNA, 19 nt, Homo sapiens
  misc_RNA (1)...(19): siRNA sense strand
ccaacaauaacaagaagaa

SEQ ID NO: 811086 - RNA, 19 nt, Homo sapiens
  misc_RNA (1)...(19): siRNA sense strand
gaaauugaagaaaccuaug

SEQ ID NO: 811087 - RNA, 19 nt, Homo sapiens
  misc_RNA (1)...(19): siRNA sense strand
cauacacaauuguuucuca

SEQ ID NO: 811088 - RNA, 19 nt, Homo sapiens
  misc_RNA (1)...(19): siRNA sense strand
ggcaggagcuuuucguaaa

SEQ ID NO: 811089 - RNA, 19 nt, Homo sapiens
  misc_RNA (1)...(19): siRNA sense strand
aaagauggguggagaugag

SEQ ID NO: 811090 - RNA, 19 nt, Homo sapiens
  misc_RNA (1)...(19): siRNA sense strand
gaaaucugguuccauugcu

SEQ ID NO: 811091 - RNA, 19 nt, Homo sapiens
  misc_RNA (1)...(19): siRNA sense strand
aagaugaccauaacuuuga

SEQ ID NO: 811092 - RNA, 19 nt, Homo sapiens
  misc_RNA (1)...(19): siRNA sense strand
ccagguauauaaucugucu

SEQ ID NO: 811093 - RNA, 19 nt, Homo sapiens
  misc_RNA (1)...(19): siRNA sense strand
uaaagggaagucauuucua

SEQ ID NO: 811094 - RNA, 19 nt, Homo sapiens
  misc_RNA (1)...(19): siRNA sense strand
guaaagggaagucauuucu

SEQ ID NO: 811095 - RNA, 19 nt, Homo sapiens
  misc_RNA (1)...(19): siRNA sense strand
cauacaaguuuggaaugaa

SEQ ID NO: 811096 - RNA, 19 nt, Homo sapiens
  misc_RNA (1)...(19): siRNA sense strand
ucagagaaauuggaacagu

SEQ ID NO: 811097 - RNA, 19 nt, Homo sapiens
  misc_RNA (1)...(19): siRNA sense strand
uguguaaccuugucaugga

SEQ ID NO: 811098 - RNA, 19 nt, Homo sapiens
  misc_RNA (1)...(19): siRNA sense strand
ucauuggccuaaacucuau

SEQ ID NO: 811099 - RNA, 19 nt, Homo sapiens
  misc_RNA (1)...(19): siRNA sense strand
gaaaacacuuggaucucaa

SEQ ID NO: 811100 - RNA, 19 nt, Homo sapiens
  misc_RNA (1)...(19): siRNA sense strand
guagcaggagcaagagaua

SEQ ID NO: 811101 - RNA, 19 nt, Homo sapiens
  misc_RNA (1)...(19): siRNA sense strand
uaaacgagagcuucgaaau

SEQ ID NO: 811102 - RNA, 19 nt, Homo sapiens
  misc_RNA (1)...(19): siRNA sense strand
gacuugcgauggaagaaau

SEQ ID NO: 811103 - RNA, 19 nt, Homo sapiens
  misc_RNA (1)...(19): siRNA sense strand
aguaaauucugaugagguu

SEQ ID NO: 811104 - RNA, 19 nt, Homo sapiens
  misc_RNA (1)...(19): siRNA sense strand
agaaacaacaggcauacaa

SEQ ID NO: 811105 - RNA, 19 nt, Homo sapiens
  misc_RNA (1)...(19): siRNA sense strand
aaagcacaaugauggcaaa

SEQ ID NO: 811106 - RNA, 19 nt, Homo sapiens
  misc_RNA (1)...(19): siRNA sense strand
cacaauuguuucucaaauc

SEQ ID NO: 811107 - RNA, 19 nt, Homo sapiens
  misc_RNA (1)...(19): siRNA sense strand
augaugaccuaguaaauuc

SEQ ID NO: 811108 - RNA, 19 nt, Homo sapiens
  misc_RNA (1)...(19): siRNA sense strand
gaagacuugcgauggaaga

SEQ ID NO: 811109 - RNA, 19 nt, Homo sapiens
  misc_RNA (1)...(19): siRNA sense strand
acaaggauucucaaaguug

SEQ ID NO: 811110 - RNA, 19 nt, Homo sapiens
  misc_RNA (1)...(19): siRNA sense strand
cagagacugucauccaaca

SEQ ID NO: 811111 - RNA, 19 nt, Homo sapiens
  misc_RNA (1)...(19): siRNA sense strand
acuuugaacuugaugaaga

SEQ ID NO: 811112 - RNA, 19 nt, Homo sapiens
  misc_RNA (1)...(19): siRNA sense strand
gccacauccuggucuuaaa

SEQ ID NO: 811113 - RNA, 19 nt, Homo sapiens
  misc_RNA (1)...(19): siRNA sense strand
ggaagguggaaagcaauuu

SEQ ID NO: 811114 - RNA, 19 nt, Homo sapiens
  misc_RNA (1)...(19): siRNA sense strand
agauuguucuugcucauga

SEQ ID NO: 811115 - RNA, 19 nt, Homo sapiens
  misc_RNA (1)...(19): siRNA sense strand
gauucgagauuggagcuau

SEQ ID NO: 811116 - RNA, 19 nt, Homo sapiens
  misc_RNA (1)...(19): siRNA sense strand
cgagguggcugugaaagag

SEQ ID NO: 811117 - RNA, 19 nt, Homo sapiens
  misc_RNA (1)...(19): siRNA sense strand
gaacauuggcugcugcaua

SEQ ID NO: 811118 - RNA, 19 nt, Homo sapiens
  misc_RNA (1)...(19): siRNA sense strand
cagaacagcuccuuggaaa

SEQ ID NO: 811119 - RNA, 19 nt, Homo sapiens
  misc_RNA (1)...(19): siRNA sense strand
gagacaagaucacagagaa

SEQ ID NO: 811120 - RNA, 19 nt, Homo sapiens
  misc_RNA (1)...(19): siRNA sense strand
gagcucaccuucacgugua

SEQ ID NO: 811121 - RNA, 19 nt, Homo sapiens
  misc_RNA (1)...(19): siRNA sense strand
gaaggaagccguuuugauu

SEQ ID NO: 811122 - RNA, 19 nt, Homo sapiens
  misc_RNA (1)...(19): siRNA sense strand
gaaugacaccgucuucuug

SEQ ID NO: 811123 - RNA, 19 nt, Homo sapiens
  misc_RNA (1)...(19): siRNA sense strand
gaaccgagcccugauguca

SEQ ID NO: 811124 - RNA, 19 nt, Homo sapiens
  misc_RNA (1)...(19): siRNA sense strand
ggaccaggcucugcagaau

SEQ ID NO: 811125 - RNA, 19 nt, Homo sapiens
  misc_RNA (1)...(19): siRNA sense strand
gcaaaccagugagucgaaa

SEQ ID NO: 811126 - RNA, 19 nt, Homo sapiens
  misc_RNA (1)...(19): siRNA sense strand
ggagagagagacaagauca

SEQ ID NO: 811127 - RNA, 19 nt, Homo sapiens
  misc_RNA (1)...(19): siRNA sense strand
cagcugcgcuugcccugaa

SEQ ID NO: 811128 - RNA, 19 nt, Homo sapiens
  misc_RNA (1)...(19): siRNA sense strand
ggaaaugacaucggagaga

SEQ ID NO: 811129 - RNA, 19 nt, Homo sapiens
  misc_RNA (1)...(19): siRNA sense strand
gcauguggcagcaaacuuc

SEQ ID NO: 811130 - RNA, 19 nt, Homo sapiens
  misc_RNA (1)...(19): siRNA sense strand
aacauuggcugcugcauag

SEQ ID NO: 811131 - RNA, 19 nt, Homo sapiens
  misc_RNA (1)...(19): siRNA sense strand
aacguguacuggaucaaua

SEQ ID NO: 811132 - RNA, 19 nt, Homo sapiens
  misc_RNA (1)...(19): siRNA sense strand
ggaagucagagcgauggua

SEQ ID NO: 811133 - RNA, 19 nt, Homo sapiens
  misc_RNA (1)...(19): siRNA sense strand
accaggcucugcagaauga

SEQ ID NO: 811134 - RNA, 19 nt, Homo sapiens
  misc_RNA (1)...(19): siRNA sense strand
ggaagccguuuugauuuaa

SEQ ID NO: 811135 - RNA, 19 nt, Homo sapiens
  misc_RNA (1)...(19): siRNA sense strand
gcagaaugacaccgucuuc

SEQ ID NO: 811136 - RNA, 19 nt, Homo sapiens
  misc_RNA (1)...(19): siRNA sense strand
uauauuggcaaaccaguga

SEQ ID NO: 811137 - RNA, 19 nt, Homo sapiens
  misc_RNA (1)...(19): siRNA sense strand
ucaauaagacggacaacag

SEQ ID NO: 811138 - RNA, 19 nt, Homo sapiens
  misc_RNA (1)...(19): siRNA sense strand
cgaaaaccguggugaccua

SEQ ID NO: 811139 - RNA, 19 nt, Homo sapiens
  misc_RNA (1)...(19): siRNA sense strand
gacaccgucuucuugaaca

SEQ ID NO: 811140 - RNA, 19 nt, Homo sapiens
  misc_RNA (1)...(19): siRNA sense strand
gacaagaucacagagaauc

SEQ ID NO: 811141 - RNA, 19 nt, Homo sapiens
  misc_RNA (1)...(19): siRNA sense strand
aggaagccguuuugauuua

SEQ ID NO: 811142 - RNA, 19 nt, Homo sapiens
  misc_RNA (1)...(19): siRNA sense strand
ucacguguacauccauaaa

SEQ ID NO: 811143 - RNA, 19 nt, Homo sapiens
  misc_RNA (1)...(19): siRNA sense strand
caacguguacuggaucaau

SEQ ID NO: 811144 - RNA, 19 nt, Homo sapiens
  misc_RNA (1)...(19): siRNA sense strand
gcucacuggccacguuuga

SEQ ID NO: 811145 - RNA, 19 nt, Homo sapiens
  misc_RNA (1)...(19): siRNA sense strand
agagcucacuggccacguu

SEQ ID NO: 811146 - RNA, 19 nt, Homo sapiens
  misc_RNA (1)...(19): siRNA sense strand
cuucacguguacauccaua

SEQ ID NO: 811147 - RNA, 19 nt, Homo sapiens
  misc_RNA (1)...(19): siRNA sense strand
agagagacaagaucacaga

SEQ ID NO: 811148 - RNA, 19 nt, Homo sapiens
  misc_RNA (1)...(19): siRNA sense strand
cagagaauccagucaguac

SEQ ID NO: 811149 - RNA, 19 nt, Homo sapiens
  misc_RNA (1)...(19): siRNA sense strand
ggcccaacguguacuggau

SEQ ID NO: 811150 - RNA, 19 nt, Homo sapiens
  misc_RNA (1)...(19): siRNA sense strand
gaagccguuuugauuuaaa

SEQ ID NO: 811151 - RNA, 19 nt, Homo sapiens
  misc_RNA (1)...(19): siRNA sense strand
ccuaccacaucccacagaa

SEQ ID NO: 811152 - RNA, 19 nt, Homo sapiens
  misc_RNA (1)...(19): siRNA sense strand
gagcucacuggccacguuu

SEQ ID NO: 811153 - RNA, 19 nt, Homo sapiens
  misc_RNA (1)...(19): siRNA sense strand
gaccgaugccuccaacaca

SEQ ID NO: 811154 - RNA, 19 nt, Homo sapiens
  misc_RNA (1)...(19): siRNA sense strand
cacagagaauccagucagu

SEQ ID NO: 811155 - RNA, 19 nt, Homo sapiens
  misc_RNA (1)...(19): siRNA sense strand
ccaggacgagcagaaguuu

SEQ ID NO: 811156 - RNA, 19 nt, Homo sapiens
  misc_RNA (1)...(19): siRNA sense strand
acagaacagcuccuuggaa

SEQ ID NO: 811157 - RNA, 19 nt, Homo sapiens
  misc_RNA (1)...(19): siRNA sense strand
acagagaauccagucagua

SEQ ID NO: 811158 - RNA, 19 nt, Homo sapiens
  misc_RNA (1)...(19): siRNA sense strand
gaccaggcucugcagaaug

SEQ ID NO: 811159 - RNA, 19 nt, Homo sapiens
  misc_RNA (1)...(19): siRNA sense strand
gaacagcuccuuggaaaac

SEQ ID NO: 811160 - RNA, 19 nt, Homo sapiens
  misc_RNA (1)...(19): siRNA sense strand
ggcaaaccagugagucgaa

SEQ ID NO: 811161 - RNA, 19 nt, Homo sapiens
  misc_RNA (1)...(19): siRNA sense strand
guuuacguauauuggcaaa

SEQ ID NO: 811162 - RNA, 19 nt, Homo sapiens
  misc_RNA (1)...(19): siRNA sense strand
ggaucaauaagacggacaa

SEQ ID NO: 811163 - RNA, 19 nt, Homo sapiens
  misc_RNA (1)...(19): siRNA sense strand
aggaugagcucaccuucac

SEQ ID NO: 811164 - RNA, 19 nt, Homo sapiens
  misc_RNA (1)...(19): siRNA sense strand
aaugacaccgucuucuuga

SEQ ID NO: 811165 - RNA, 19 nt, Homo sapiens
  misc_RNA (1)...(19): siRNA sense strand
uaccacaucccacagaaca

SEQ ID NO: 811166 - RNA, 19 nt, Homo sapiens
  misc_RNA (1)...(19): siRNA sense strand
ccagacaggaaaugacauc

SEQ ID NO: 811167 - RNA, 19 nt, Homo sapiens
  misc_RNA (1)...(19): siRNA sense strand
gagaagaacuuuguugaua

SEQ ID NO: 811168 - RNA, 19 nt, Homo sapiens
  misc_RNA (1)...(19): siRNA sense strand
gaacagcuauuucugauga

SEQ ID NO: 811169 - RNA, 19 nt, Homo sapiens
  misc_RNA (1)...(19): siRNA sense strand
acacauagaugguucuuua

SEQ ID NO: 811170 - RNA, 19 nt, Homo sapiens
  misc_RNA (1)...(19): siRNA sense strand
caacucagcuguuagaauu

SEQ ID NO: 811171 - RNA, 19 nt, Homo sapiens
  misc_RNA (1)...(19): siRNA sense strand
gaagauggcucccacauuc

SEQ ID NO: 811172 - RNA, 19 nt, Homo sapiens
  misc_RNA (1)...(19): siRNA sense strand
gaaacaaccucuuagaaau

SEQ ID NO: 811173 - RNA, 19 nt, Homo sapiens
  misc_RNA (1)...(19): siRNA sense strand
gaagcaugcugucaaauuu

SEQ ID NO: 811174 - RNA, 19 nt, Homo sapiens
  misc_RNA (1)...(19): siRNA sense strand
gaugcaagcucucuuagua

SEQ ID NO: 811175 - RNA, 19 nt, Homo sapiens
  misc_RNA (1)...(19): siRNA sense strand
ggagaaguguuuaauauug

SEQ ID NO: 811176 - RNA, 19 nt, Homo sapiens
  misc_RNA (1)...(19): siRNA sense strand
ggacucagacaauaaauua

SEQ ID NO: 811177 - RNA, 19 nt, Homo sapiens
  misc_RNA (1)...(19): siRNA sense strand
gcaaggaaauuauuagaug

SEQ ID NO: 811178 - RNA, 19 nt, Homo sapiens
  misc_RNA (1)...(19): siRNA sense strand
gaugaucucuaaacacaua

SEQ ID NO: 811179 - RNA, 19 nt, Homo sapiens
  misc_RNA (1)...(19): siRNA sense strand
caucuuagcucccacagua

SEQ ID NO: 811180 - RNA, 19 nt, Homo sapiens
  misc_RNA (1)...(19): siRNA sense strand
gggcauaaauucucauaaa

SEQ ID NO: 811181 - RNA, 19 nt, Homo sapiens
  misc_RNA (1)...(19): siRNA sense strand
ggaaaucaguuuacaggaa

SEQ ID NO: 811182 - RNA, 19 nt, Homo sapiens
  misc_RNA (1)...(19): siRNA sense strand
gaacauuggcuacagguua

SEQ ID NO: 811183 - RNA, 19 nt, Homo sapiens
  misc_RNA (1)...(19): siRNA sense strand
gaacaaugaugccuuagau

SEQ ID NO: 811184 - RNA, 19 nt, Homo sapiens
  misc_RNA (1)...(19): siRNA sense strand
gauaauagcaguacaguga

SEQ ID NO: 811185 - RNA, 19 nt, Homo sapiens
  misc_RNA (1)...(19): siRNA sense strand
cgacaucucucucgaacua

SEQ ID NO: 811186 - RNA, 19 nt, Homo sapiens
  misc_RNA (1)...(19): siRNA sense strand
gaacaaacaauucaucuug

SEQ ID NO: 811187 - RNA, 19 nt, Homo sapiens
  misc_RNA (1)...(19): siRNA sense strand
ccacagauauuccaaaugu

SEQ ID NO: 811188 - RNA, 19 nt, Homo sapiens
  misc_RNA (1)...(19): siRNA sense strand
caucaaauccuaaaccuua

SEQ ID NO: 811189 - RNA, 19 nt, Homo sapiens
  misc_RNA (1)...(19): siRNA sense strand
gauaagaguugcucaggaa

SEQ ID NO: 811190 - RNA, 19 nt, Homo sapiens
  misc_RNA (1)...(19): siRNA sense strand
guacugagcuugaugaaag

SEQ ID NO: 811191 - RNA, 19 nt, Homo sapiens
  misc_RNA (1)...(19): siRNA sense strand
gguaagagaugggauauug

SEQ ID NO: 811192 - RNA, 19 nt, Homo sapiens
  misc_RNA (1)...(19): siRNA sense strand
ucuauugacuccugaauua

SEQ ID NO: 811193 - RNA, 19 nt, Homo sapiens
  misc_RNA (1)...(19): siRNA sense strand
uaacaucccuaacagaauu

SEQ ID NO: 811194 - RNA, 19 nt, Homo sapiens
  misc_RNA (1)...(19): siRNA sense strand
ugaagaagaugaugccuuu

SEQ ID NO: 811195 - RNA, 19 nt, Homo sapiens
  misc_RNA (1)...(19): siRNA sense strand
ugacaucgcugccuccuuu

SEQ ID NO: 811196 - RNA, 19 nt, Homo sapiens
  misc_RNA (1)...(19): siRNA sense strand
caagauacauccuacagaa

SEQ ID NO: 811197 - RNA, 19 nt, Homo sapiens
  misc_RNA (1)...(19): siRNA sense strand
gcgaauaucuucauguaug

SEQ ID NO: 811198 - RNA, 19 nt, Homo sapiens
  misc_RNA (1)...(19): siRNA sense strand
gagaaggacagcaauaaua

SEQ ID NO: 811199 - RNA, 19 nt, Homo sapiens
  misc_RNA (1)...(19): siRNA sense strand
ggaaacagccucauucaug

SEQ ID NO: 811200 - RNA, 19 nt, Homo sapiens
  misc_RNA (1)...(19): siRNA sense strand
gaagguaacauaaagguuu

SEQ ID NO: 811201 - RNA, 19 nt, Homo sapiens
  misc_RNA (1)...(19): siRNA sense strand
gacaacaacugauucuauu

SEQ ID NO: 811202 - RNA, 19 nt, Homo sapiens
  misc_RNA (1)...(19): siRNA sense strand
gcccaugacucagcuauua

SEQ ID NO: 811203 - RNA, 19 nt, Homo sapiens
  misc_RNA (1)...(19): siRNA sense strand
gaaaucaguuuacaggaau

SEQ ID NO: 811204 - RNA, 19 nt, Homo sapiens
  misc_RNA (1)...(19): siRNA sense strand
caagaucauucgaccuuua

SEQ ID NO: 811205 - RNA, 19 nt, Homo sapiens
  misc_RNA (1)...(19): siRNA sense strand
guacaagcauguuuagcua

SEQ ID NO: 811206 - RNA, 19 nt, Homo sapiens
  misc_RNA (1)...(19): siRNA sense strand
caaaugcaaucuacaguga

SEQ ID NO: 811207 - RNA, 19 nt, Homo sapiens
  misc_RNA (1)...(19): siRNA sense strand
gagaugauauucuggaaga

SEQ ID NO: 811208 - RNA, 19 nt, Homo sapiens
  misc_RNA (1)...(19): siRNA sense strand
gaggucaucuguucuugua

SEQ ID NO: 811209 - RNA, 19 nt, Homo sapiens
  misc_RNA (1)...(19): siRNA sense strand
gcacacacuucauucacua

SEQ ID NO: 811210 - RNA, 19 nt, Homo sapiens
  misc_RNA (1)...(19): siRNA sense strand
gaagagauacauuagauga

SEQ ID NO: 811211 - RNA, 19 nt, Homo sapiens
  misc_RNA (1)...(19): siRNA sense strand
gaauaagaauccugauaug

SEQ ID NO: 811212 - RNA, 19 nt, Homo sapiens
  misc_RNA (1)...(19): siRNA sense strand
cgaccuggcugcauuauug

SEQ ID NO: 811213 - RNA, 19 nt, Homo sapiens
  misc_RNA (1)...(19): siRNA sense strand
gagcagauguuccuuguag

SEQ ID NO: 811214 - RNA, 19 nt, Homo sapiens
  misc_RNA (1)...(19): siRNA sense strand
gcaaagccauuucuuccuu

SEQ ID NO: 811215 - RNA, 19 nt, Homo sapiens
  misc_RNA (1)...(19): siRNA sense strand
cugaguaucuggcaaguua

SEQ ID NO: 811216 - RNA, 19 nt, Homo sapiens
  misc_RNA (1)...(19): siRNA sense strand
ggaauaagaauccugauau

SEQ ID NO: 811217 - RNA, 19 nt, Homo sapiens
  misc_RNA (1)...(19): siRNA sense strand
ccagaaaccucuccuagug

SEQ ID NO: 811218 - RNA, 19 nt, Homo sapiens
  misc_RNA (1)...(19): siRNA sense strand
gaugguaccuuucuagugu

SEQ ID NO: 811219 - RNA, 19 nt, Homo sapiens
  misc_RNA (1)...(19): siRNA sense strand
uaaagauccuuaugacuga

SEQ ID NO: 811220 - RNA, 19 nt, Homo sapiens
  misc_RNA (1)...(19): siRNA sense strand
uaaccaaacugcaucaaau

SEQ ID NO: 811221 - RNA, 19 nt, Homo sapiens
  misc_RNA (1)...(19): siRNA sense strand
gaaagaugccauagaggua

SEQ ID NO: 811222 - RNA, 19 nt, Homo sapiens
  misc_RNA (1)...(19): siRNA sense strand
uaaggaaucugauaugauc

SEQ ID NO: 811223 - RNA, 19 nt, Homo sapiens
  misc_RNA (1)...(19): siRNA sense strand
ucaagaugguggcuuauuu

SEQ ID NO: 811224 - RNA, 19 nt, Homo sapiens
  misc_RNA (1)...(19): siRNA sense strand
cguaggagauuuaacauga

SEQ ID NO: 811225 - RNA, 19 nt, Homo sapiens
  misc_RNA (1)...(19): siRNA sense strand
agacgaugcuguugguuua

SEQ ID NO: 811226 - RNA, 19 nt, Homo sapiens
  misc_RNA (1)...(19): siRNA sense strand
cuacagaauuucagaagaa

SEQ ID NO: 811227 - RNA, 19 nt, Homo sapiens
  misc_RNA (1)...(19): siRNA sense strand
gaaaggacacgucugcauu

SEQ ID NO: 811228 - RNA, 19 nt, Homo sapiens
  misc_RNA (1)...(19): siRNA sense strand
ggaaauugcugccuugcau

SEQ ID NO: 811229 - RNA, 19 nt, Homo sapiens
  misc_RNA (1)...(19): siRNA sense strand
aaacaacgcuuugaacaau

SEQ ID NO: 811230 - RNA, 19 nt, Homo sapiens
  misc_RNA (1)...(19): siRNA sense strand
guacacauaugaacaucuu

SEQ ID NO: 811231 - RNA, 19 nt, Homo sapiens
  misc_RNA (1)...(19): siRNA sense strand
gcugggcucuucuacauuu

SEQ ID NO: 811232 - RNA, 19 nt, Homo sapiens
  misc_RNA (1)...(19): siRNA sense strand
ccaguggucugaauuaaga

SEQ ID NO: 811233 - RNA, 19 nt, Homo sapiens
  misc_RNA (1)...(19): siRNA sense strand
gcuguuagcuguucauaca

SEQ ID NO: 811234 - RNA, 19 nt, Homo sapiens
  misc_RNA (1)...(19): siRNA sense strand
caauaggaccuuugucaua

SEQ ID NO: 811235 - RNA, 19 nt, Homo sapiens
  misc_RNA (1)...(19): siRNA sense strand
cgaaacaaccucuuagaaa

SEQ ID NO: 811236 - RNA, 19 nt, Homo sapiens
  misc_RNA (1)...(19): siRNA sense strand
gcugauaagucugccuuua

SEQ ID NO: 811237 - RNA, 19 nt, Homo sapiens
  misc_RNA (1)...(19): siRNA sense strand
ggaagaggaggaagaaauu

SEQ ID NO: 811238 - RNA, 19 nt, Homo sapiens
  misc_RNA (1)...(19): siRNA sense strand
aaaguuggaugcccuguuu

SEQ ID NO: 811239 - RNA, 19 nt, Homo sapiens
  misc_RNA (1)...(19): siRNA sense strand
gaacaucaaguuaucauca

SEQ ID NO: 811240 - RNA, 19 nt, Homo sapiens
  misc_RNA (1)...(19): siRNA sense strand
caacggaugauauugauuu

SEQ ID NO: 811241 - RNA, 19 nt, Homo sapiens
  misc_RNA (1)...(19): siRNA sense strand
gauacauccuacagaauuu

SEQ ID NO: 811242 - RNA, 19 nt, Homo sapiens
  misc_RNA (1)...(19): siRNA sense strand
gugcgaauaucuucaugua

SEQ ID NO: 811243 - RNA, 19 nt, Homo sapiens
  misc_RNA (1)...(19): siRNA sense strand
gaguagcugucaucacuuu

SEQ ID NO: 811244 - RNA, 19 nt, Homo sapiens
  misc_RNA (1)...(19): siRNA sense strand
gaacuuaguaugugggauu

SEQ ID NO: 811245 - RNA, 19 nt, Homo sapiens
  misc_RNA (1)...(19): siRNA sense strand
gaagauagauggcgaaaag

SEQ ID NO: 811246 - RNA, 19 nt, Homo sapiens
  misc_RNA (1)...(19): siRNA sense strand
ggaagcaugcugucaaauu

SEQ ID NO: 811247 - RNA, 19 nt, Homo sapiens
  misc_RNA (1)...(19): siRNA sense strand
gacaauacaccauuugaaa

SEQ ID NO: 811248 - RNA, 19 nt, Homo sapiens
  misc_RNA (1)...(19): siRNA sense strand
ggacagaaagcauugaaga

SEQ ID NO: 811249 - RNA, 19 nt, Homo sapiens
  misc_RNA (1)...(19): siRNA sense strand
agucauagcuacagucaaa

SEQ ID NO: 811250 - RNA, 19 nt, Homo sapiens
  misc_RNA (1)...(19): siRNA sense strand
cuaauaugcuggcaagaaa

SEQ ID NO: 811251 - RNA, 19 nt, Homo sapiens
  misc_RNA (1)...(19): siRNA sense strand
gaacgggguuuacauauga

SEQ ID NO: 811252 - RNA, 19 nt, Homo sapiens
  misc_RNA (1)...(19): siRNA sense strand
gaauacagcaugcucuuga

SEQ ID NO: 811253 - RNA, 19 nt, Homo sapiens
  misc_RNA (1)...(19): siRNA sense strand
ggacggcaguguacgaaug

SEQ ID NO: 811254 - RNA, 19 nt, Homo sapiens
  misc_RNA (1)...(19): siRNA sense strand
guucagaugauguugauua

SEQ ID NO: 811255 - RNA, 19 nt, Homo sapiens
  misc_RNA (1)...(19): siRNA sense strand
ucacauccaugauauacuu

SEQ ID NO: 811256 - RNA, 19 nt, Homo sapiens
  misc_RNA (1)...(19): siRNA sense strand
gauaaacaaucagaucaga

SEQ ID NO: 811257 - RNA, 19 nt, Homo sapiens
  misc_RNA (1)...(19): siRNA sense strand
gaugaaugaugaaggagaa

SEQ ID NO: 811258 - RNA, 19 nt, Homo sapiens
  misc_RNA (1)...(19): siRNA sense strand
uggaagagauggccuuuga

SEQ ID NO: 811259 - RNA, 19 nt, Homo sapiens
  misc_RNA (1)...(19): siRNA sense strand
aaaguacgcuucuggaaau

SEQ ID NO: 811260 - RNA, 19 nt, Homo sapiens
  misc_RNA (1)...(19): siRNA sense strand
gaaguucaaagacacauuu

SEQ ID NO: 811261 - RNA, 19 nt, Homo sapiens
  misc_RNA (1)...(19): siRNA sense strand
caacaggaaacuacaguaa

SEQ ID NO: 811262 - RNA, 19 nt, Homo sapiens
  misc_RNA (1)...(19): siRNA sense strand
caaacugcaucaaauccua

SEQ ID NO: 811263 - RNA, 19 nt, Homo sapiens
  misc_RNA (1)...(19): siRNA sense strand
gagcuagugugcuuaugaa

SEQ ID NO: 811264 - RNA, 19 nt, Homo sapiens
  misc_RNA (1)...(19): siRNA sense strand
gaacacgcaacaccaaauu

SEQ ID NO: 811265 - RNA, 19 nt, Homo sapiens
  misc_RNA (1)...(19): siRNA sense strand
guccaucaauacuaucuua

SEQ ID NO: 811266 - RNA, 19 nt, Homo sapiens
  misc_RNA (1)...(19): siRNA sense strand
gcuaagcaguccauauuuc

SEQ ID NO: 811267 - RNA, 19 nt, Homo sapiens
  misc_RNA (1)...(19): siRNA sense strand
gaaaccaguugggcaauua

SEQ ID NO: 811268 - RNA, 19 nt, Homo sapiens
  misc_RNA (1)...(19): siRNA sense strand
gaaaggagauaucaucgau

SEQ ID NO: 811269 - RNA, 19 nt, Homo sapiens
  misc_RNA (1)...(19): siRNA sense strand
gaagaagccucccaguuuc

SEQ ID NO: 811270 - RNA, 19 nt, Homo sapiens
  misc_RNA (1)...(19): siRNA sense strand
cgaagaagccucccaguuu

SEQ ID NO: 811271 - RNA, 19 nt, Homo sapiens
  misc_RNA (1)...(19): siRNA sense strand
guacaaagaagucaucaaa

SEQ ID NO: 811272 - RNA, 19 nt, Homo sapiens
  misc_RNA (1)...(19): siRNA sense strand
ccucagaaauugacaacua

SEQ ID NO: 811273 - RNA, 19 nt, Homo sapiens
  misc_RNA (1)...(19): siRNA sense strand
gagaagacguugguuaugu

SEQ ID NO: 811274 - RNA, 19 nt, Homo sapiens
  misc_RNA (1)...(19): siRNA sense strand
caauggauaugaagauuug

SEQ ID NO: 811275 - RNA, 19 nt, Homo sapiens
  misc_RNA (1)...(19): siRNA sense strand
ugaaagagacgaugagaaa

SEQ ID NO: 811276 - RNA, 19 nt, Homo sapiens
  misc_RNA (1)...(19): siRNA sense strand
gcagagaacgccuugcuaa

SEQ ID NO: 811277 - RNA, 19 nt, Homo sapiens
  misc_RNA (1)...(19): siRNA sense strand
acaaagaagucaucaaauc

SEQ ID NO: 811278 - RNA, 19 nt, Homo sapiens
  misc_RNA (1)...(19): siRNA sense strand
gaggagccguauucugaua

SEQ ID NO: 811279 - RNA, 19 nt, Homo sapiens
  misc_RNA (1)...(19): siRNA sense strand
uggcagaacuuccgaaaga

SEQ ID NO: 811280 - RNA, 19 nt, Homo sapiens
  misc_RNA (1)...(19): siRNA sense strand
ugagaaaccucccgaagau

SEQ ID NO: 811281 - RNA, 19 nt, Homo sapiens
  misc_RNA (1)...(19): siRNA sense strand
ggaagacuuggaugaguua

SEQ ID NO: 811282 - RNA, 19 nt, Homo sapiens
  misc_RNA (1)...(19): siRNA sense strand
ggaccgacgugauggguau

SEQ ID NO: 811283 - RNA, 19 nt, Homo sapiens
  misc_RNA (1)...(19): siRNA sense strand
gaaaagaugaucacaauug

SEQ ID NO: 811284 - RNA, 19 nt, Homo sapiens
  misc_RNA (1)...(19): siRNA sense strand
gaggagagacacauaagaa

SEQ ID NO: 811285 - RNA, 19 nt, Homo sapiens
  misc_RNA (1)...(19): siRNA sense strand
aaacugcaauucaagagaa

SEQ ID NO: 811286 - RNA, 19 nt, Homo sapiens
  misc_RNA (1)...(19): siRNA sense strand
uugcuaggcucaaggaaua

SEQ ID NO: 811287 - RNA, 19 nt, Homo sapiens
  misc_RNA (1)...(19): siRNA sense strand
caaagaagucaucaaauca

SEQ ID NO: 811288 - RNA, 19 nt, Homo sapiens
  misc_RNA (1)...(19): siRNA sense strand
caguggagcuguuacaaga

SEQ ID NO: 811289 - RNA, 19 nt, Homo sapiens
  misc_RNA (1)...(19): siRNA sense strand
gcagcaguaugcagauuau

SEQ ID NO: 811290 - RNA, 19 nt, Homo sapiens
  misc_RNA (1)...(19): siRNA sense strand
ggaugggccugcugaacaa

SEQ ID NO: 811291 - RNA, 19 nt, Homo sapiens
  misc_RNA (1)...(19): siRNA sense strand
caagagaacaaucggauga

SEQ ID NO: 811292 - RNA, 19 nt, Homo sapiens
  misc_RNA (1)...(19): siRNA sense strand
ggauucagcuaaugaugau

SEQ ID NO: 811293 - RNA, 19 nt, Homo sapiens
  misc_RNA (1)...(19): siRNA sense strand
aaaggagacuggaagaaga

SEQ ID NO: 811294 - RNA, 19 nt, Homo sapiens
  misc_RNA (1)...(19): siRNA sense strand
gggaggagcacguguuuga

SEQ ID NO: 811295 - RNA, 19 nt, Homo sapiens
  misc_RNA (1)...(19): siRNA sense strand
ggacacgaguuugaaggaa

SEQ ID NO: 811296 - RNA, 19 nt, Homo sapiens
  misc_RNA (1)...(19): siRNA sense strand
gaaggagacuuuguguaca

SEQ ID NO: 811297 - RNA, 19 nt, Homo sapiens
  misc_RNA (1)...(19): siRNA sense strand
uaauaauucugacccaaug

SEQ ID NO: 811298 - RNA, 19 nt, Homo sapiens
  misc_RNA (1)...(19): siRNA sense strand
gagcacguguuugagaauu

SEQ ID NO: 811299 - RNA, 19 nt, Homo sapiens
  misc_RNA (1)...(19): siRNA sense strand
gagcccagcuugaagucuu

SEQ ID NO: 811300 - RNA, 19 nt, Homo sapiens
  misc_RNA (1)...(19): siRNA sense strand
caagaaaggagauaucauc

SEQ ID NO: 811301 - RNA, 19 nt, Homo sapiens
  misc_RNA (1)...(19): siRNA sense strand
guagaaagucuucgcaguu

SEQ ID NO: 811302 - RNA, 19 nt, Homo sapiens
  misc_RNA (1)...(19): siRNA sense strand
ugagaaagagaaugucuaa

SEQ ID NO: 811303 - RNA, 19 nt, Homo sapiens
  misc_RNA (1)...(19): siRNA sense strand
gaagucaucaaaucaccua

SEQ ID NO: 811304 - RNA, 19 nt, Homo sapiens
  misc_RNA (1)...(19): siRNA sense strand
gaaacuaauuaggguggaa

SEQ ID NO: 811305 - RNA, 19 nt, Homo sapiens
  misc_RNA (1)...(19): siRNA sense strand
aggagaagcugcucguuga

SEQ ID NO: 811306 - RNA, 19 nt, Homo sapiens
  misc_RNA (1)...(19): siRNA sense strand
gaagauuuggacaccuuua

SEQ ID NO: 811307 - RNA, 19 nt, Homo sapiens
  misc_RNA (1)...(19): siRNA sense strand
uaauuaggguggaagaaau

SEQ ID NO: 811308 - RNA, 19 nt, Homo sapiens
  misc_RNA (1)...(19): siRNA sense strand
uaaugaugauggucaaaga

SEQ ID NO: 811309 - RNA, 19 nt, Homo sapiens
  misc_RNA (1)...(19): siRNA sense strand
ccaagugccuucucugucu

SEQ ID NO: 811310 - RNA, 19 nt, Homo sapiens
  misc_RNA (1)...(19): siRNA sense strand
cagauuggcucauuuccau

SEQ ID NO: 811311 - RNA, 19 nt, Homo sapiens
  misc_RNA (1)...(19): siRNA sense strand
ucggaaagcuagccuccua

SEQ ID NO: 811312 - RNA, 19 nt, Homo sapiens
  misc_RNA (1)...(19): siRNA sense strand
ccacuuuccuguucaaugg

SEQ ID NO: 811313 - RNA, 19 nt, Homo sapiens
  misc_RNA (1)...(19): siRNA sense strand
gagaacaaucggaugauga

SEQ ID NO: 811314 - RNA, 19 nt, Homo sapiens
  misc_RNA (1)...(19): siRNA sense strand
ucgcaucucucuugggaaa

SEQ ID NO: 811315 - RNA, 19 nt, Homo sapiens
  misc_RNA (1)...(19): siRNA sense strand
cggaggagccguauucuga

SEQ ID NO: 811316 - RNA, 19 nt, Homo sapiens
  misc_RNA (1)...(19): siRNA sense strand
aaauaacgaugagcgauga

SEQ ID NO: 811317 - RNA, 19 nt, Homo sapiens
  misc_RNA (1)...(19): siRNA sense strand
uagaaacgcucacugaaaa

SEQ ID NO: 811318 - RNA, 19 nt, Homo sapiens
  misc_RNA (1)...(19): siRNA sense strand
gaaaaggacacgaguuuga

SEQ ID NO: 811319 - RNA, 19 nt, Homo sapiens
  misc_RNA (1)...(19): siRNA sense strand
aggagucggugaaguuuaa

SEQ ID NO: 811320 - RNA, 19 nt, Homo sapiens
  misc_RNA (1)...(19): siRNA sense strand
gaacccucuucauaaauca

SEQ ID NO: 811321 - RNA, 19 nt, Homo sapiens
  misc_RNA (1)...(19): siRNA sense strand
agacuuggaugaguuaaau

SEQ ID NO: 811322 - RNA, 19 nt, Homo sapiens
  misc_RNA (1)...(19): siRNA sense strand
agaagacguugguuauguu

SEQ ID NO: 811323 - RNA, 19 nt, Homo sapiens
  misc_RNA (1)...(19): siRNA sense strand
uacccaacauugccuuuaa

SEQ ID NO: 811324 - RNA, 19 nt, Homo sapiens
  misc_RNA (1)...(19): siRNA sense strand
gaggaagacuuggaugagu

SEQ ID NO: 811325 - RNA, 19 nt, Homo sapiens
  misc_RNA (1)...(19): siRNA sense strand
gaggagcggauucagcuaa

SEQ ID NO: 811326 - RNA, 19 nt, Homo sapiens
  misc_RNA (1)...(19): siRNA sense strand
uagaaagucuucgcaguuc

SEQ ID NO: 811327 - RNA, 19 nt, Homo sapiens
  misc_RNA (1)...(19): siRNA sense strand
gggagaaccugcaguuuug

SEQ ID NO: 811328 - RNA, 19 nt, Homo sapiens
  misc_RNA (1)...(19): siRNA sense strand
gagcggauucagcuaauga

SEQ ID NO: 811329 - RNA, 19 nt, Homo sapiens
  misc_RNA (1)...(19): siRNA sense strand
aaagagacgaugagaaaga

SEQ ID NO: 811330 - RNA, 19 nt, Homo sapiens
  misc_RNA (1)...(19): siRNA sense strand
ucacggaaaucugccgaaa

SEQ ID NO: 811331 - RNA, 19 nt, Homo sapiens
  misc_RNA (1)...(19): siRNA sense strand
cuagaaacgcucacugaaa

SEQ ID NO: 811332 - RNA, 19 nt, Homo sapiens
  misc_RNA (1)...(19): siRNA sense strand
aagagcacaugcccacuuu

SEQ ID NO: 811333 - RNA, 19 nt, Homo sapiens
  misc_RNA (1)...(19): siRNA sense strand
gaaucgcucucugcacguu

SEQ ID NO: 811334 - RNA, 19 nt, Homo sapiens
  misc_RNA (1)...(19): siRNA sense strand
ggagagacacauaagaaag

SEQ ID NO: 811335 - RNA, 19 nt, Homo sapiens
  misc_RNA (1)...(19): siRNA sense strand
ccuccuaucugccaaguca

SEQ ID NO: 811336 - RNA, 19 nt, Homo sapiens
  misc_RNA (1)...(19): siRNA sense strand
guucuuacccaacguuuga

SEQ ID NO: 811337 - RNA, 19 nt, Homo sapiens
  misc_RNA (1)...(19): siRNA sense strand
ggugaaguuuaagagguua

SEQ ID NO: 811338 - RNA, 19 nt, Homo sapiens
  misc_RNA (1)...(19): siRNA sense strand
ucaucaaacugcaauucaa

SEQ ID NO: 811339 - RNA, 19 nt, Homo sapiens
  misc_RNA (1)...(19): siRNA sense strand
gaagacguugguuauguug

SEQ ID NO: 811340 - RNA, 19 nt, Homo sapiens
  misc_RNA (1)...(19): siRNA sense strand
ccaucggucugcccaugua

SEQ ID NO: 811341 - RNA, 19 nt, Homo sapiens
  misc_RNA (1)...(19): siRNA sense strand
gagauacgcagaggacuug

SEQ ID NO: 811342 - RNA, 19 nt, Homo sapiens
  misc_RNA (1)...(19): siRNA sense strand
guaugcagauuauuacaac

SEQ ID NO: 811343 - RNA, 19 nt, Homo sapiens
  misc_RNA (1)...(19): siRNA sense strand
gaggagcacguguuugaga

SEQ ID NO: 811344 - RNA, 19 nt, Homo sapiens
  misc_RNA (1)...(19): siRNA sense strand
uuacaagaguaugacagua

SEQ ID NO: 811345 - RNA, 19 nt, Homo sapiens
  misc_RNA (1)...(19): siRNA sense strand
uacaagaguaugacaguaa

SEQ ID NO: 811346 - RNA, 19 nt, Homo sapiens
  misc_RNA (1)...(19): siRNA sense strand
gaugaucacaauugaggaa

SEQ ID NO: 811347 - RNA, 19 nt, Homo sapiens
  misc_RNA (1)...(19): siRNA sense strand
gaaacuggagggcucaauc

SEQ ID NO: 811348 - RNA, 19 nt, Homo sapiens
  misc_RNA (1)...(19): siRNA sense strand
cucagaaauugacaacuaa

SEQ ID NO: 811349 - RNA, 19 nt, Homo sapiens
  misc_RNA (1)...(19): siRNA sense strand
ccaagucuguggaggaucu

SEQ ID NO: 811350 - RNA, 19 nt, Homo sapiens
  misc_RNA (1)...(19): siRNA sense strand
guaauaauucugacccaau

SEQ ID NO: 811351 - RNA, 19 nt, Homo sapiens
  misc_RNA (1)...(19): siRNA sense strand
agaaaccucccgaagauga

SEQ ID NO: 811352 - RNA, 19 nt, Homo sapiens
  misc_RNA (1)...(19): siRNA sense strand
gaucacaauugaggaagca

SEQ ID NO: 811353 - RNA, 19 nt, Homo sapiens
  misc_RNA (1)...(19): siRNA sense strand
ggagaagacguugguuaug

SEQ ID NO: 811354 - RNA, 19 nt, Homo sapiens
  misc_RNA (1)...(19): siRNA sense strand
gggaguggaucuagaaacg

SEQ ID NO: 811355 - RNA, 19 nt, Homo sapiens
  misc_RNA (1)...(19): siRNA sense strand
gcgcagcaguaugcagauu

SEQ ID NO: 811356 - RNA, 19 nt, Homo sapiens
  misc_RNA (1)...(19): siRNA sense strand
uaccugaagugccacagaa

SEQ ID NO: 811357 - RNA, 19 nt, Homo sapiens
  misc_RNA (1)...(19): siRNA sense strand
gaggagucggugaaguuua

SEQ ID NO: 811358 - RNA, 19 nt, Homo sapiens
  misc_RNA (1)...(19): siRNA sense strand
agaacccucuucauaaauc

SEQ ID NO: 811359 - RNA, 19 nt, Homo sapiens
  misc_RNA (1)...(19): siRNA sense strand
ggugugacugguuugaaua

SEQ ID NO: 811360 - RNA, 19 nt, Homo sapiens
  misc_RNA (1)...(19): siRNA sense strand
uaaugagacagacuucaaa

SEQ ID NO: 811361 - RNA, 19 nt, Homo sapiens
  misc_RNA (1)...(19): siRNA sense strand
gugguggacucacggaaau

SEQ ID NO: 811362 - RNA, 19 nt, Homo sapiens
  misc_RNA (1)...(19): siRNA sense strand
cuacugacccaaagcaaga

SEQ ID NO: 811363 - RNA, 19 nt, Homo sapiens
  misc_RNA (1)...(19): siRNA sense strand
gcaguaugcagauuauuac

SEQ ID NO: 811364 - RNA, 19 nt, Homo sapiens
  misc_RNA (1)...(19): siRNA sense strand
cacguuggcaguaauaauu

SEQ ID NO: 811365 - RNA, 19 nt, Homo sapiens
  misc_RNA (1)...(19): siRNA sense strand
uacacaagcugguaaacuc

SEQ ID NO: 811366 - RNA, 19 nt, Homo sapiens
  misc_RNA (1)...(19): siRNA sense strand
cauaagaaagcuccuaucu

SEQ ID NO: 811367 - RNA, 19 nt, Homo sapiens
  misc_RNA (1)...(19): siRNA sense strand
caacaaagaugaagaagaa

SEQ ID NO: 811368 - RNA, 19 nt, Homo sapiens
  misc_RNA (1)...(19): siRNA sense strand
ggaccagccucucuuuaaa

SEQ ID NO: 811369 - RNA, 19 nt, Homo sapiens
  misc_RNA (1)...(19): siRNA sense strand
ugacgagccuguucaguaa

SEQ ID NO: 811370 - RNA, 19 nt, Homo sapiens
  misc_RNA (1)...(19): siRNA sense strand
ugacggagcuccaccgaaa

SEQ ID NO: 811371 - RNA, 19 nt, Homo sapiens
  misc_RNA (1)...(19): siRNA sense strand
agaagaauaugaaggguuu

SEQ ID NO: 811372 - RNA, 19 nt, Homo sapiens
  misc_RNA (1)...(19): siRNA sense strand
gggcaggaauugugaaguu

SEQ ID NO: 811373 - RNA, 19 nt, Homo sapiens
  misc_RNA (1)...(19): siRNA sense strand
cgacauagacaaacugaaa

SEQ ID NO: 811374 - RNA, 19 nt, Homo sapiens
  misc_RNA (1)...(19): siRNA sense strand
ggagugacguuaagcugaa

SEQ ID NO: 811375 - RNA, 19 nt, Homo sapiens
  misc_RNA (1)...(19): siRNA sense strand
uggauaagcuugaacugaa

SEQ ID NO: 811376 - RNA, 19 nt, Homo sapiens
  misc_RNA (1)...(19): siRNA sense strand
caaggugaguuccggauau

SEQ ID NO: 811377 - RNA, 19 nt, Homo sapiens
  misc_RNA (1)...(19): siRNA sense strand
gcagugagacagagaguga

SEQ ID NO: 811378 - RNA, 19 nt, Homo sapiens
  misc_RNA (1)...(19): siRNA sense strand
cagccucucuuuaaacuga

SEQ ID NO: 811379 - RNA, 19 nt, Homo sapiens
  misc_RNA (1)...(19): siRNA sense strand
gcacagaaacggacaguac

SEQ ID NO: 811380 - RNA, 19 nt, Homo sapiens
  misc_RNA (1)...(19): siRNA sense strand
uugaagagaugaacaacaa

SEQ ID NO: 811381 - RNA, 19 nt, Homo sapiens
  misc_RNA (1)...(19): siRNA sense strand
caggugagcaagaguaaua

SEQ ID NO: 811382 - RNA, 19 nt, Homo sapiens
  misc_RNA (1)...(19): siRNA sense strand
gaaguuucaugaacacuac

SEQ ID NO: 811383 - RNA, 19 nt, Homo sapiens
  misc_RNA (1)...(19): siRNA sense strand
gcugcaggcuaucuguaua

SEQ ID NO: 811384 - RNA, 19 nt, Homo sapiens
  misc_RNA (1)...(19): siRNA sense strand
caucagcacuccaaauucu

SEQ ID NO: 811385 - RNA, 19 nt, Homo sapiens
  misc_RNA (1)...(19): siRNA sense strand
gacgggaccuccucucuuc

SEQ ID NO: 811386 - RNA, 19 nt, Homo sapiens
  misc_RNA (1)...(19): siRNA sense strand
caucauggaccagcaauuu

SEQ ID NO: 811387 - RNA, 19 nt, Homo sapiens
  misc_RNA (1)...(19): siRNA sense strand
aagggaagcuccuccaaug

SEQ ID NO: 811388 - RNA, 19 nt, Homo sapiens
  misc_RNA (1)...(19): siRNA sense strand
gcaacaaagaugaagaaga

SEQ ID NO: 811389 - RNA, 19 nt, Homo sapiens
  misc_RNA (1)...(19): siRNA sense strand
gacacagagucaucucauu

SEQ ID NO: 811390 - RNA, 19 nt, Homo sapiens
  misc_RNA (1)...(19): siRNA sense strand
cgugaaaucccaagaagaa

SEQ ID NO: 811391 - RNA, 19 nt, Homo sapiens
  misc_RNA (1)...(19): siRNA sense strand
gaccagcaauuugaagaga

SEQ ID NO: 811392 - RNA, 19 nt, Homo sapiens
  misc_RNA (1)...(19): siRNA sense strand
gcaggacgaugccagugau

SEQ ID NO: 811393 - RNA, 19 nt, Homo sapiens
  misc_RNA (1)...(19): siRNA sense strand
gaagggaagcuccuccaau

SEQ ID NO: 811394 - RNA, 19 nt, Homo sapiens
  misc_RNA (1)...(19): siRNA sense strand
gagaugaacaacaaacuca

SEQ ID NO: 811395 - RNA, 19 nt, Homo sapiens
  misc_RNA (1)...(19): siRNA sense strand
ccacagggccaaugaagau

SEQ ID NO: 811396 - RNA, 19 nt, Homo sapiens
  misc_RNA (1)...(19): siRNA sense strand
ggaagcuccuccaaugagu

SEQ ID NO: 811397 - RNA, 19 nt, Homo sapiens
  misc_RNA (1)...(19): siRNA sense strand
uccauaaccugaagauguu

SEQ ID NO: 811398 - RNA, 19 nt, Homo sapiens
  misc_RNA (1)...(19): siRNA sense strand
ggcaggaauugugaaguuu

SEQ ID NO: 811399 - RNA, 19 nt, Homo sapiens
  misc_RNA (1)...(19): siRNA sense strand
agcagacgcucccgacaua

SEQ ID NO: 811400 - RNA, 19 nt, Homo sapiens
  misc_RNA (1)...(19): siRNA sense strand
aaacuagcaagcucagaua

SEQ ID NO: 811401 - RNA, 19 nt, Homo sapiens
  misc_RNA (1)...(19): siRNA sense strand
cacaagaguuagcccagaa

SEQ ID NO: 811402 - RNA, 19 nt, Homo sapiens
  misc_RNA (1)...(19): siRNA sense strand
ggauaagcuugaacugaag

SEQ ID NO: 811403 - RNA, 19 nt, Homo sapiens
  misc_RNA (1)...(19): siRNA sense strand
gaagcuccuccaaugagua

SEQ ID NO: 811404 - RNA, 19 nt, Homo sapiens
  misc_RNA (1)...(19): siRNA sense strand
ccagcaauuugaagagaug

SEQ ID NO: 811405 - RNA, 19 nt, Homo sapiens
  misc_RNA (1)...(19): siRNA sense strand
guccauaaccugaagaugu

SEQ ID NO: 811406 - RNA, 19 nt, Homo sapiens
  misc_RNA (1)...(19): siRNA sense strand
caagaguaauaacccugaa

SEQ ID NO: 811407 - RNA, 19 nt, Homo sapiens
  misc_RNA (1)...(19): siRNA sense strand
acacagagucaucucauug

SEQ ID NO: 811408 - RNA, 19 nt, Homo sapiens
  misc_RNA (1)...(19): siRNA sense strand
gaggacggcaggaccauga

SEQ ID NO: 811409 - RNA, 19 nt, Homo sapiens
  misc_RNA (1)...(19): siRNA sense strand
ccacccacaucuccuggaa

SEQ ID NO: 811410 - RNA, 19 nt, Homo sapiens
  misc_RNA (1)...(19): siRNA sense strand
aaagggauguccucagucu

SEQ ID NO: 811411 - RNA, 19 nt, Homo sapiens
  misc_RNA (1)...(19): siRNA sense strand
caaaagggauguccucagu

SEQ ID NO: 811412 - RNA, 19 nt, Homo sapiens
  misc_RNA (1)...(19): siRNA sense strand
gaacacuaccugggugaga

SEQ ID NO: 811413 - RNA, 19 nt, Homo sapiens
  misc_RNA (1)...(19): siRNA sense strand
uccaaauucuccagugaaa

SEQ ID NO: 811414 - RNA, 19 nt, Homo sapiens
  misc_RNA (1)...(19): siRNA sense strand
gaagagaugaacaacaaac

SEQ ID NO: 811415 - RNA, 19 nt, Homo sapiens
  misc_RNA (1)...(19): siRNA sense strand
uuacagcgcucacauuucc

SEQ ID NO: 811416 - RNA, 19 nt, Homo sapiens
  misc_RNA (1)...(19): siRNA sense strand
aaggugaguuccggauaua

SEQ ID NO: 811417 - RNA, 19 nt, Homo sapiens
  misc_RNA (1)...(19): siRNA sense strand
gcccuuggguuaccagcaa

SEQ ID NO: 811418 - RNA, 19 nt, Homo sapiens
  misc_RNA (1)...(19): siRNA sense strand
guucauccaugccuucuac

SEQ ID NO: 811419 - RNA, 19 nt, Homo sapiens
  misc_RNA (1)...(19): siRNA sense strand
ggacgggaccuccucucuu

SEQ ID NO: 811420 - RNA, 19 nt, Homo sapiens
  misc_RNA (1)...(19): siRNA sense strand
ccuguucucucccaucaga

SEQ ID NO: 811421 - RNA, 19 nt, Homo sapiens
  misc_RNA (1)...(19): siRNA sense strand
gggaguggauaagcuugaa

SEQ ID NO: 811422 - RNA, 19 nt, Homo sapiens
  misc_RNA (1)...(19): siRNA sense strand
gagcaugacgagccuguuc

SEQ ID NO: 811423 - RNA, 19 nt, Homo sapiens
  misc_RNA (1)...(19): siRNA sense strand
gaaggaggagggaguggau

SEQ ID NO: 811424 - RNA, 19 nt, Homo sapiens
  misc_RNA (1)...(19): siRNA sense strand
ccuccaagcccuuugcaaa

SEQ ID NO: 811425 - RNA, 19 nt, Homo sapiens
  misc_RNA (1)...(19): siRNA sense strand
gcagcgcaaugccauguac

SEQ ID NO: 811426 - RNA, 19 nt, Homo sapiens
  misc_RNA (1)...(19): siRNA sense strand
caacugggcaggguucaug

SEQ ID NO: 811427 - RNA, 19 nt, Homo sapiens
  misc_RNA (1)...(19): siRNA sense strand
ggagggaguggauaagcuu

SEQ ID NO: 811428 - RNA, 19 nt, Homo sapiens
  misc_RNA (1)...(19): siRNA sense strand
aagcucagauacaggagaa

SEQ ID NO: 811429 - RNA, 19 nt, Homo sapiens
  misc_RNA (1)...(19): siRNA sense strand
gagcaucagcacuccaaau

SEQ ID NO: 811430 - RNA, 19 nt, Homo sapiens
  misc_RNA (1)...(19): siRNA sense strand
acgcuuaccugcagagauc

SEQ ID NO: 811431 - RNA, 19 nt, Homo sapiens
  misc_RNA (1)...(19): siRNA sense strand
gagcaggacuuggcaucag

SEQ ID NO: 811432 - RNA, 19 nt, Homo sapiens
  misc_RNA (1)...(19): siRNA sense strand
gccaggcccucacagagau

SEQ ID NO: 811433 - RNA, 19 nt, Homo sapiens
  misc_RNA (1)...(19): siRNA sense strand
uggaccagccucucuuuaa

SEQ ID NO: 811434 - RNA, 19 nt, Homo sapiens
  misc_RNA (1)...(19): siRNA sense strand
ggccuguucucucccauca

SEQ ID NO: 811435 - RNA, 19 nt, Homo sapiens
  misc_RNA (1)...(19): siRNA sense strand
ggacagcaucgccucagau

SEQ ID NO: 811436 - RNA, 19 nt, Homo sapiens
  misc_RNA (1)...(19): siRNA sense strand
gcccaauccugcccuccaa

SEQ ID NO: 811437 - RNA, 19 nt, Homo sapiens
  misc_RNA (1)...(19): siRNA sense strand
ucauggaccagcaauuuga

SEQ ID NO: 811438 - RNA, 19 nt, Homo sapiens
  misc_RNA (1)...(19): siRNA sense strand
ccuuacagcgcucacauuu

SEQ ID NO: 811439 - RNA, 19 nt, Homo sapiens
  misc_RNA (1)...(19): siRNA sense strand
ccaaggugaguuccggaua

SEQ ID NO: 811440 - RNA, 19 nt, Homo sapiens
  misc_RNA (1)...(19): siRNA sense strand
ucagaagagucagccauca

SEQ ID NO: 811441 - RNA, 19 nt, Homo sapiens
  misc_RNA (1)...(19): siRNA sense strand
caaugagcuuugucuccaa

SEQ ID NO: 811442 - RNA, 19 nt, Homo sapiens
  misc_RNA (1)...(19): siRNA sense strand
cgaggaagaggccuacaug

SEQ ID NO: 811443 - RNA, 19 nt, Homo sapiens
  misc_RNA (1)...(19): siRNA sense strand
gcaggaauugugaaguuuc

SEQ ID NO: 811444 - RNA, 19 nt, Homo sapiens
  misc_RNA (1)...(19): siRNA sense strand
caccacggcacaauaagaa

SEQ ID NO: 811445 - RNA, 19 nt, Homo sapiens
  misc_RNA (1)...(19): siRNA sense strand
ugucaccacggcacaauaa

SEQ ID NO: 811446 - RNA, 19 nt, Homo sapiens
  misc_RNA (1)...(19): siRNA sense strand
ggugagaacacaguggaaa

SEQ ID NO: 811447 - RNA, 19 nt, Homo sapiens
  misc_RNA (1)...(19): siRNA sense strand
gaagaaagcaacccaaaac

SEQ ID NO: 811448 - RNA, 19 nt, Homo sapiens
  misc_RNA (1)...(19): siRNA sense strand
gagugaagcgggagacauc

SEQ ID NO: 811449 - RNA, 19 nt, Homo sapiens
  misc_RNA (1)...(19): siRNA sense strand
ugaaguuggucaggaggaa

SEQ ID NO: 811450 - RNA, 19 nt, Homo sapiens
  misc_RNA (1)...(19): siRNA sense strand
ggcaucagcucccauucag

SEQ ID NO: 811451 - RNA, 19 nt, Homo sapiens
  misc_RNA (1)...(19): siRNA sense strand
guacacaucccagcagagu

SEQ ID NO: 811452 - RNA, 19 nt, Homo sapiens
  misc_RNA (1)...(19): siRNA sense strand
gcaguguggccaccaagga

SEQ ID NO: 811453 - RNA, 19 nt, Homo sapiens
  misc_RNA (1)...(19): siRNA sense strand
ccaaugaguaccucuacga

SEQ ID NO: 811454 - RNA, 19 nt, Homo sapiens
  misc_RNA (1)...(19): siRNA sense strand
gaacacaguggaaaacuca

SEQ ID NO: 811455 - RNA, 19 nt, Homo sapiens
  misc_RNA (1)...(19): siRNA sense strand
gaggagacacagagucauc

SEQ ID NO: 811456 - RNA, 19 nt, Homo sapiens
  misc_RNA (1)...(19): siRNA sense strand
uaugaaggguuuucuauca

SEQ ID NO: 811457 - RNA, 19 nt, Homo sapiens
  misc_RNA (1)...(19): siRNA sense strand
caucgggagugacguuaag

SEQ ID NO: 811458 - RNA, 19 nt, Homo sapiens
  misc_RNA (1)...(19): siRNA sense strand
gcugaaugcguccacuuug

SEQ ID NO: 811459 - RNA, 19 nt, Homo sapiens
  misc_RNA (1)...(19): siRNA sense strand
ggugcaggcuguccauaac

SEQ ID NO: 811460 - RNA, 19 nt, Homo sapiens
  misc_RNA (1)...(19): siRNA sense strand
aagaagaaagcaacccaaa

SEQ ID NO: 811461 - RNA, 19 nt, Homo sapiens
  misc_RNA (1)...(19): siRNA sense strand
gcgagaaggagcaggacuu

SEQ ID NO: 811462 - RNA, 19 nt, Homo sapiens
  misc_RNA (1)...(19): siRNA sense strand
gggcaggguucaugcucau

SEQ ID NO: 811463 - RNA, 19 nt, Homo sapiens
  misc_RNA (1)...(19): siRNA sense strand
gaccugcagcugccuguga

SEQ ID NO: 811464 - RNA, 19 nt, Homo sapiens
  misc_RNA (1)...(19): siRNA sense strand
aaaccgggaagcaagcuaa

SEQ ID NO: 811465 - RNA, 19 nt, Homo sapiens
  misc_RNA (1)...(19): siRNA sense strand
guggauaagcuugaacuga

SEQ ID NO: 811466 - RNA, 19 nt, Homo sapiens
  misc_RNA (1)...(19): siRNA sense strand
gcaucagcacuccaaauuc

SEQ ID NO: 811467 - RNA, 19 nt, Homo sapiens
  misc_RNA (1)...(19): siRNA sense strand
gaaacgaagucaauuggua

SEQ ID NO: 811468 - RNA, 19 nt, Homo sapiens
  misc_RNA (1)...(19): siRNA sense strand
aaacaaagauggcaacaaa

SEQ ID NO: 811469 - RNA, 19 nt, Homo sapiens
  misc_RNA (1)...(19): siRNA sense strand
gagcaucacuguuuacuug

SEQ ID NO: 811470 - RNA, 19 nt, Homo sapiens
  misc_RNA (1)...(19): siRNA sense strand
gaagauggccugaagauau

SEQ ID NO: 811471 - RNA, 19 nt, Homo sapiens
  misc_RNA (1)...(19): siRNA sense strand
ucaggaggaucaaacauua

SEQ ID NO: 811472 - RNA, 19 nt, Homo sapiens
  misc_RNA (1)...(19): siRNA sense strand
uaaagaaggcucacaagua

SEQ ID NO: 811473 - RNA, 19 nt, Homo sapiens
  misc_RNA (1)...(19): siRNA sense strand
caacaaaucacuacgguuu

SEQ ID NO: 811474 - RNA, 19 nt, Homo sapiens
  misc_RNA (1)...(19): siRNA sense strand
gaagucaauugguaaagaa

SEQ ID NO: 811475 - RNA, 19 nt, Homo sapiens
  misc_RNA (1)...(19): siRNA sense strand
agaagaagcugcuacaaau

SEQ ID NO: 811476 - RNA, 19 nt, Homo sapiens
  misc_RNA (1)...(19): siRNA sense strand
gaaagaugauucugacagu

SEQ ID NO: 811477 - RNA, 19 nt, Homo sapiens
  misc_RNA (1)...(19): siRNA sense strand
gcacagaucccacccaugu

SEQ ID NO: 811478 - RNA, 19 nt, Homo sapiens
  misc_RNA (1)...(19): siRNA sense strand
caacagauuugaagugaca

SEQ ID NO: 811479 - RNA, 19 nt, Homo sapiens
  misc_RNA (1)...(19): siRNA sense strand
gagagacuacuaccuaaua

SEQ ID NO: 811480 - RNA, 19 nt, Homo sapiens
  misc_RNA (1)...(19): siRNA sense strand
caagagagacuacuaccua

SEQ ID NO: 811481 - RNA, 19 nt, Homo sapiens
  misc_RNA (1)...(19): siRNA sense strand
cuagagaaauccaauaaga

SEQ ID NO: 811482 - RNA, 19 nt, Homo sapiens
  misc_RNA (1)...(19): siRNA sense strand
ggagaaggcucacuuagcu

SEQ ID NO: 811483 - RNA, 19 nt, Homo sapiens
  misc_RNA (1)...(19): siRNA sense strand
ggacaagcaguuugaauug

SEQ ID NO: 811484 - RNA, 19 nt, Homo sapiens
  misc_RNA (1)...(19): siRNA sense strand
ggacaucuucuucucuaua

SEQ ID NO: 811485 - RNA, 19 nt, Homo sapiens
  misc_RNA (1)...(19): siRNA sense strand
agaacgagcucuccuguug

SEQ ID NO: 811486 - RNA, 19 nt, Homo sapiens
  misc_RNA (1)...(19): siRNA sense strand
gaacuuguaugccuucaac

SEQ ID NO: 811487 - RNA, 19 nt, Homo sapiens
  misc_RNA (1)...(19): siRNA sense strand
guccacaucuugaaggaua

SEQ ID NO: 811488 - RNA, 19 nt, Homo sapiens
  misc_RNA (1)...(19): siRNA sense strand
aaagaaggcucacaaguac

SEQ ID NO: 811489 - RNA, 19 nt, Homo sapiens
  misc_RNA (1)...(19): siRNA sense strand
ggacagggaauuucaugaa

SEQ ID NO: 811490 - RNA, 19 nt, Homo sapiens
  misc_RNA (1)...(19): siRNA sense strand
ucgcagaaaugaaagauga

SEQ ID NO: 811491 - RNA, 19 nt, Homo sapiens
  misc_RNA (1)...(19): siRNA sense strand
ucaaucaagugcucaagaa

SEQ ID NO: 811492 - RNA, 19 nt, Homo sapiens
  misc_RNA (1)...(19): siRNA sense strand
aaacccagcugacacuuga

SEQ ID NO: 811493 - RNA, 19 nt, Homo sapiens
  misc_RNA (1)...(19): siRNA sense strand
aaagggagcaucacuguuu

SEQ ID NO: 811494 - RNA, 19 nt, Homo sapiens
  misc_RNA (1)...(19): siRNA sense strand
gcaacaaauucaucacauc

SEQ ID NO: 811495 - RNA, 19 nt, Homo sapiens
  misc_RNA (1)...(19): siRNA sense strand
gaaagcaguugcaguaucc

SEQ ID NO: 811496 - RNA, 19 nt, Homo sapiens
  misc_RNA (1)...(19): siRNA sense strand
acagaaagcaguugcagua

SEQ ID NO: 811497 - RNA, 19 nt, Homo sapiens
  misc_RNA (1)...(19): siRNA sense strand
caaacacucagaucaauga

SEQ ID NO: 811498 - RNA, 19 nt, Homo sapiens
  misc_RNA (1)...(19): siRNA sense strand
gcaccagccucccuacauc

SEQ ID NO: 811499 - RNA, 19 nt, Homo sapiens
  misc_RNA (1)...(19): siRNA sense strand
gcaggucuuugcuaaacuu

SEQ ID NO: 811500 - RNA, 19 nt, Homo sapiens
  misc_RNA (1)...(19): siRNA sense strand
gcaaagggagcaucacugu

SEQ ID NO: 811501 - RNA, 19 nt, Homo sapiens
  misc_RNA (1)...(19): siRNA sense strand
aagauggccugaagauauu

SEQ ID NO: 811502 - RNA, 19 nt, Homo sapiens
  misc_RNA (1)...(19): siRNA sense strand
cgaagucaauugguaaaga

SEQ ID NO: 811503 - RNA, 19 nt, Homo sapiens
  misc_RNA (1)...(19): siRNA sense strand
ccaugcaggucuuugcuaa

SEQ ID NO: 811504 - RNA, 19 nt, Homo sapiens
  misc_RNA (1)...(19): siRNA sense strand
ccaaagcauugaauugcaa

SEQ ID NO: 811505 - RNA, 19 nt, Homo sapiens
  misc_RNA (1)...(19): siRNA sense strand
gaggagguguuacggaugu

SEQ ID NO: 811506 - RNA, 19 nt, Homo sapiens
  misc_RNA (1)...(19): siRNA sense strand
gaaauccaauaagaacuuc

SEQ ID NO: 811507 - RNA, 19 nt, Homo sapiens
  misc_RNA (1)...(19): siRNA sense strand
cuacaucauugcaguguug

SEQ ID NO: 811508 - RNA, 19 nt, Homo sapiens
  misc_RNA (1)...(19): siRNA sense strand
ggauguguguggcaguaaa

SEQ ID NO: 811509 - RNA, 19 nt, Homo sapiens
  misc_RNA (1)...(19): siRNA sense strand
ggaagaaaaugcacaaaag

SEQ ID NO: 811510 - RNA, 19 nt, Homo sapiens
  misc_RNA (1)...(19): siRNA sense strand
guugagauccgaacauuug

SEQ ID NO: 811511 - RNA, 19 nt, Homo sapiens
  misc_RNA (1)...(19): siRNA sense strand
gacagggaauuucaugaau

SEQ ID NO: 811512 - RNA, 19 nt, Homo sapiens
  misc_RNA (1)...(19): siRNA sense strand
ggaaggacagggaauuuca

SEQ ID NO: 811513 - RNA, 19 nt, Homo sapiens
  misc_RNA (1)...(19): siRNA sense strand
caacaaauucaucacauca

SEQ ID NO: 811514 - RNA, 19 nt, Homo sapiens
  misc_RNA (1)...(19): siRNA sense strand
gcagcucgcagaaaugaaa

SEQ ID NO: 811515 - RNA, 19 nt, Homo sapiens
  misc_RNA (1)...(19): siRNA sense strand
ccaugugguuucccaguuu

SEQ ID NO: 811516 - RNA, 19 nt, Homo sapiens
  misc_RNA (1)...(19): siRNA sense strand
gaacaagcucuuuucauuu

SEQ ID NO: 811517 - RNA, 19 nt, Homo sapiens
  misc_RNA (1)...(19): siRNA sense strand
gcugagagacuucccagaa

SEQ ID NO: 811518 - RNA, 19 nt, Homo sapiens
  misc_RNA (1)...(19): siRNA sense strand
agagacuacuaccuaauaa

SEQ ID NO: 811519 - RNA, 19 nt, Homo sapiens
  misc_RNA (1)...(19): siRNA sense strand
caagugcuaucuccauaca

SEQ ID NO: 811520 - RNA, 19 nt, Homo sapiens
  misc_RNA (1)...(19): siRNA sense strand
ggucguccauuacuucugu

SEQ ID NO: 811521 - RNA, 19 nt, Homo sapiens
  misc_RNA (1)...(19): siRNA sense strand
ggcaaaagcuccucauguu

SEQ ID NO: 811522 - RNA, 19 nt, Homo sapiens
  misc_RNA (1)...(19): siRNA sense strand
gagcuuaucauccuguaug

SEQ ID NO: 811523 - RNA, 19 nt, Homo sapiens
  misc_RNA (1)...(19): siRNA sense strand
caugugguuucccaguuua

SEQ ID NO: 811524 - RNA, 19 nt, Homo sapiens
  misc_RNA (1)...(19): siRNA sense strand
gaagaagauugggaacagu

SEQ ID NO: 811525 - RNA, 19 nt, Homo sapiens
  misc_RNA (1)...(19): siRNA sense strand
gaacaaucacugccacauc

SEQ ID NO: 811526 - RNA, 19 nt, Homo sapiens
  misc_RNA (1)...(19): siRNA sense strand
aaacgaagucaauugguaa

SEQ ID NO: 811527 - RNA, 19 nt, Homo sapiens
  misc_RNA (1)...(19): siRNA sense strand
gacaucuucuucucuauag

SEQ ID NO: 811528 - RNA, 19 nt, Homo sapiens
  misc_RNA (1)...(19): siRNA sense strand
cuggucagcuuguuagaaa

SEQ ID NO: 811529 - RNA, 19 nt, Homo sapiens
  misc_RNA (1)...(19): siRNA sense strand
aagagagacuacuaccuaa

SEQ ID NO: 811530 - RNA, 19 nt, Homo sapiens
  misc_RNA (1)...(19): siRNA sense strand
gauauuuacugaagaucuc

SEQ ID NO: 811531 - RNA, 19 nt, Homo sapiens
  misc_RNA (1)...(19): siRNA sense strand
gccugaagauauuuacuga

SEQ ID NO: 811532 - RNA, 19 nt, Homo sapiens
  misc_RNA (1)...(19): siRNA sense strand
aaggacaucuucuucucua

SEQ ID NO: 811533 - RNA, 19 nt, Homo sapiens
  misc_RNA (1)...(19): siRNA sense strand
acaaagauggcaacaaaga

SEQ ID NO: 811534 - RNA, 19 nt, Homo sapiens
  misc_RNA (1)...(19): siRNA sense strand
ggagauuuccagcuacuau

SEQ ID NO: 811535 - RNA, 19 nt, Homo sapiens
  misc_RNA (1)...(19): siRNA sense strand
agggugagcugggagaaua

SEQ ID NO: 811536 - RNA, 19 nt, Homo sapiens
  misc_RNA (1)...(19): siRNA sense strand
gcacagaaaaccugcauuu

SEQ ID NO: 811537 - RNA, 19 nt, Homo sapiens
  misc_RNA (1)...(19): siRNA sense strand
gaagcugaaugacucugau

SEQ ID NO: 811538 - RNA, 19 nt, Homo sapiens
  misc_RNA (1)...(19): siRNA sense strand
guaaagaagcugaaugacu

SEQ ID NO: 811539 - RNA, 19 nt, Homo sapiens
  misc_RNA (1)...(19): siRNA sense strand
aagaaacgguucaaucaag

SEQ ID NO: 811540 - RNA, 19 nt, Homo sapiens
  misc_RNA (1)...(19): siRNA sense strand
aaacaaggacaucuucuuc

SEQ ID NO: 811541 - RNA, 19 nt, Homo sapiens
  misc_RNA (1)...(19): siRNA sense strand
guccucggcuucuuaauag

SEQ ID NO: 811542 - RNA, 19 nt, Homo sapiens
  misc_RNA (1)...(19): siRNA sense strand
gaagaagcugcuacaaauc

SEQ ID NO: 811543 - RNA, 19 nt, Homo sapiens
  misc_RNA (1)...(19): siRNA sense strand
aagaagaagcugcuacaaa

SEQ ID NO: 811544 - RNA, 19 nt, Homo sapiens
  misc_RNA (1)...(19): siRNA sense strand
gaggaucaaacauuaucua

SEQ ID NO: 811545 - RNA, 19 nt, Homo sapiens
  misc_RNA (1)...(19): siRNA sense strand
gaacuggacggacauacca

SEQ ID NO: 811546 - RNA, 19 nt, Homo sapiens
  misc_RNA (1)...(19): siRNA sense strand
ggaaagggguccaucaaag

SEQ ID NO: 811547 - RNA, 19 nt, Homo sapiens
  misc_RNA (1)...(19): siRNA sense strand
aagggagcaucacuguuua

SEQ ID NO: 811548 - RNA, 19 nt, Homo sapiens
  misc_RNA (1)...(19): siRNA sense strand
uccaugaccuauugacauu

SEQ ID NO: 811549 - RNA, 19 nt, Homo sapiens
  misc_RNA (1)...(19): siRNA sense strand
gcaaacacucagaucaaug

SEQ ID NO: 811550 - RNA, 19 nt, Homo sapiens
  misc_RNA (1)...(19): siRNA sense strand
cugaagauauuuacugaag

SEQ ID NO: 811551 - RNA, 19 nt, Homo sapiens
  misc_RNA (1)...(19): siRNA sense strand
acacagaaacgaagucaau

SEQ ID NO: 811552 - RNA, 19 nt, Homo sapiens
  misc_RNA (1)...(19): siRNA sense strand
ucacuuagcucugauugac

SEQ ID NO: 811553 - RNA, 19 nt, Homo sapiens
  misc_RNA (1)...(19): siRNA sense strand
gcagaaaugaaagaugauu

SEQ ID NO: 811554 - RNA, 19 nt, Homo sapiens
  misc_RNA (1)...(19): siRNA sense strand
caaacaaggacaucuucuu

SEQ ID NO: 811555 - RNA, 19 nt, Homo sapiens
  misc_RNA (1)...(19): siRNA sense strand
caaucaagcuggaacuacu

SEQ ID NO: 811556 - RNA, 19 nt, Homo sapiens
  misc_RNA (1)...(19): siRNA sense strand
gaaacaaagauggcaacaa

SEQ ID NO: 811557 - RNA, 19 nt, Homo sapiens
  misc_RNA (1)...(19): siRNA sense strand
cugaagaucucccggaagu

SEQ ID NO: 811558 - RNA, 19 nt, Homo sapiens
  misc_RNA (1)...(19): siRNA sense strand
acaaaucacuacgguuuca

SEQ ID NO: 811559 - RNA, 19 nt, Homo sapiens
  misc_RNA (1)...(19): siRNA sense strand
caaggauggcugaggagua

SEQ ID NO: 811560 - RNA, 19 nt, Homo sapiens
  misc_RNA (1)...(19): siRNA sense strand
ucccuuugauggccucuua

SEQ ID NO: 811561 - RNA, 19 nt, Homo sapiens
  misc_RNA (1)...(19): siRNA sense strand
ugauccagcuauacuguga

SEQ ID NO: 811562 - RNA, 19 nt, Homo sapiens
  misc_RNA (1)...(19): siRNA sense strand
ccacccugcucaagugcua

SEQ ID NO: 811563 - RNA, 19 nt, Homo sapiens
  misc_RNA (1)...(19): siRNA sense strand
agugcuaucuccauacaaa

SEQ ID NO: 811564 - RNA, 19 nt, Homo sapiens
  misc_RNA (1)...(19): siRNA sense strand
acacucagaucaaugacau

SEQ ID NO: 811565 - RNA, 19 nt, Homo sapiens
  misc_RNA (1)...(19): siRNA sense strand
cagcaaacacucagaucaa

SEQ ID NO: 811566 - RNA, 19 nt, Homo sapiens
  misc_RNA (1)...(19): siRNA sense strand
ugcaaggucugaugaagga

SEQ ID NO: 811567 - RNA, 19 nt, Homo sapiens
  misc_RNA (1)...(19): siRNA sense strand
gaaacgaagucaauuggua

SEQ ID NO: 811568 - RNA, 19 nt, Homo sapiens
  misc_RNA (1)...(19): siRNA sense strand
aaacaaagauggcaacaaa

SEQ ID NO: 811569 - RNA, 19 nt, Homo sapiens
  misc_RNA (1)...(19): siRNA sense strand
gagcaucacuguuuacuug

SEQ ID NO: 811570 - RNA, 19 nt, Homo sapiens
  misc_RNA (1)...(19): siRNA sense strand
gaagauggccugaagauau

SEQ ID NO: 811571 - RNA, 19 nt, Homo sapiens
  misc_RNA (1)...(19): siRNA sense strand
ucaggaggaucaaacauua

SEQ ID NO: 811572 - RNA, 19 nt, Homo sapiens
  misc_RNA (1)...(19): siRNA sense strand
uaaagaaggcucacaagua

SEQ ID NO: 811573 - RNA, 19 nt, Homo sapiens
  misc_RNA (1)...(19): siRNA sense strand
caacaaaucacuacgguuu

SEQ ID NO: 811574 - RNA, 19 nt, Homo sapiens
  misc_RNA (1)...(19): siRNA sense strand
gaagucaauugguaaagaa

SEQ ID NO: 811575 - RNA, 19 nt, Homo sapiens
  misc_RNA (1)...(19): siRNA sense strand
agaagaagcugcuacaaau

SEQ ID NO: 811576 - RNA, 19 nt, Homo sapiens
  misc_RNA (1)...(19): siRNA sense strand
gaaagaugauucugacagu

SEQ ID NO: 811577 - RNA, 19 nt, Homo sapiens
  misc_RNA (1)...(19): siRNA sense strand
gcacagaucccacccaugu

SEQ ID NO: 811578 - RNA, 19 nt, Homo sapiens
  misc_RNA (1)...(19): siRNA sense strand
caacagauuugaagugaca

SEQ ID NO: 811579 - RNA, 19 nt, Homo sapiens
  misc_RNA (1)...(19): siRNA sense strand
gagagacuacuaccuaaua

SEQ ID NO: 811580 - RNA, 19 nt, Homo sapiens
  misc_RNA (1)...(19): siRNA sense strand
caagagagacuacuaccua

SEQ ID NO: 811581 - RNA, 19 nt, Homo sapiens
  misc_RNA (1)...(19): siRNA sense strand
cuagagaaauccaauaaga

SEQ ID NO: 811582 - RNA, 19 nt, Homo sapiens
  misc_RNA (1)...(19): siRNA sense strand
ggagaaggcucacuuagcu

SEQ ID NO: 811583 - RNA, 19 nt, Homo sapiens
  misc_RNA (1)...(19): siRNA sense strand
ggacaagcaguuugaauug

SEQ ID NO: 811584 - RNA, 19 nt, Homo sapiens
  misc_RNA (1)...(19): siRNA sense strand
ggacaucuucuucucuaua

SEQ ID NO: 811585 - RNA, 19 nt, Homo sapiens
  misc_RNA (1)...(19): siRNA sense strand
agaacgagcucuccuguug

SEQ ID NO: 811586 - RNA, 19 nt, Homo sapiens
  misc_RNA (1)...(19): siRNA sense strand
gaacuuguaugccuucaac

SEQ ID NO: 811587 - RNA, 19 nt, Homo sapiens
  misc_RNA (1)...(19): siRNA sense strand
guccacaucuugaaggaua

SEQ ID NO: 811588 - RNA, 19 nt, Homo sapiens
  misc_RNA (1)...(19): siRNA sense strand
aaagaaggcucacaaguac

SEQ ID NO: 811589 - RNA, 19 nt, Homo sapiens
  misc_RNA (1)...(19): siRNA sense strand
ggacagggaauuucaugaa

SEQ ID NO: 811590 - RNA, 19 nt, Homo sapiens
  misc_RNA (1)...(19): siRNA sense strand
ucgcagaaaugaaagauga

SEQ ID NO: 811591 - RNA, 19 nt, Homo sapiens
  misc_RNA (1)...(19): siRNA sense strand
ucaaucaagugcucaagaa

SEQ ID NO: 811592 - RNA, 19 nt, Homo sapiens
  misc_RNA (1)...(19): siRNA sense strand
aaacccagcugacacuuga

SEQ ID NO: 811593 - RNA, 19 nt, Homo sapiens
  misc_RNA (1)...(19): siRNA sense strand
aaagggagcaucacuguuu

SEQ ID NO: 811594 - RNA, 19 nt, Homo sapiens
  misc_RNA (1)...(19): siRNA sense strand
gcaacaaauucaucacauc

SEQ ID NO: 811595 - RNA, 19 nt, Homo sapiens
  misc_RNA (1)...(19): siRNA sense strand
gaaagcaguugcaguaucc

SEQ ID NO: 811596 - RNA, 19 nt, Homo sapiens
  misc_RNA (1)...(19): siRNA sense strand
acagaaagcaguugcagua

SEQ ID NO: 811597 - RNA, 19 nt, Homo sapiens
  misc_RNA (1)...(19): siRNA sense strand
caaacacucagaucaauga

SEQ ID NO: 811598 - RNA, 19 nt, Homo sapiens
  misc_RNA (1)...(19): siRNA sense strand
gcaccagccucccuacauc

SEQ ID NO: 811599 - RNA, 19 nt, Homo sapiens
  misc_RNA (1)...(19): siRNA sense strand
gcaggucuuugcuaaacuu

SEQ ID NO: 811600 - RNA, 19 nt, Homo sapiens
  misc_RNA (1)...(19): siRNA sense strand
gcaaagggagcaucacugu

SEQ ID NO: 811601 - RNA, 19 nt, Homo sapiens
  misc_RNA (1)...(19): siRNA sense strand
aagauggccugaagauauu

SEQ ID NO: 811602 - RNA, 19 nt, Homo sapiens
  misc_RNA (1)...(19): siRNA sense strand
cgaagucaauugguaaaga

SEQ ID NO: 811603 - RNA, 19 nt, Homo sapiens
  misc_RNA (1)...(19): siRNA sense strand
ccaugcaggucuuugcuaa

SEQ ID NO: 811604 - RNA, 19 nt, Homo sapiens
  misc_RNA (1)...(19): siRNA sense strand
ccaaagcauugaauugcaa

SEQ ID NO: 811605 - RNA, 19 nt, Homo sapiens
  misc_RNA (1)...(19): siRNA sense strand
gaggagguguuacggaugu

SEQ ID NO: 811606 - RNA, 19 nt, Homo sapiens
  misc_RNA (1)...(19): siRNA sense strand
gaaauccaauaagaacuuc

SEQ ID NO: 811607 - RNA, 19 nt, Homo sapiens
  misc_RNA (1)...(19): siRNA sense strand
cuacaucauugcaguguug

SEQ ID NO: 811608 - RNA, 19 nt, Homo sapiens
  misc_RNA (1)...(19): siRNA sense strand
ggauguguguggcaguaaa

SEQ ID NO: 811609 - RNA, 19 nt, Homo sapiens
  misc_RNA (1)...(19): siRNA sense strand
ggaagaaaaugcacaaaag

SEQ ID NO: 811610 - RNA, 19 nt, Homo sapiens
  misc_RNA (1)...(19): siRNA sense strand
guugagauccgaacauuug

SEQ ID NO: 811611 - RNA, 19 nt, Homo sapiens
  misc_RNA (1)...(19): siRNA sense strand
gacagggaauuucaugaau

SEQ ID NO: 811612 - RNA, 19 nt, Homo sapiens
  misc_RNA (1)...(19): siRNA sense strand
ggaaggacagggaauuuca

SEQ ID NO: 811613 - RNA, 19 nt, Homo sapiens
  misc_RNA (1)...(19): siRNA sense strand
caacaaauucaucacauca

SEQ ID NO: 811614 - RNA, 19 nt, Homo sapiens
  misc_RNA (1)...(19): siRNA sense strand
gcagcucgcagaaaugaaa

SEQ ID NO: 811615 - RNA, 19 nt, Homo sapiens
  misc_RNA (1)...(19): siRNA sense strand
ccaugugguuucccaguuu

SEQ ID NO: 811616 - RNA, 19 nt, Homo sapiens
  misc_RNA (1)...(19): siRNA sense strand
gaacaagcucuuuucauuu

SEQ ID NO: 811617 - RNA, 19 nt, Homo sapiens
  misc_RNA (1)...(19): siRNA sense strand
gcugagagacuucccagaa

SEQ ID NO: 811618 - RNA, 19 nt, Homo sapiens
  misc_RNA (1)...(19): siRNA sense strand
agagacuacuaccuaauaa

SEQ ID NO: 811619 - RNA, 19 nt, Homo sapiens
  misc_RNA (1)...(19): siRNA sense strand
caagugcuaucuccauaca

SEQ ID NO: 811620 - RNA, 19 nt, Homo sapiens
  misc_RNA (1)...(19): siRNA sense strand
ggucguccauuacuucugu

SEQ ID NO: 811621 - RNA, 19 nt, Homo sapiens
  misc_RNA (1)...(19): siRNA sense strand
ggcaaaagcuccucauguu

SEQ ID NO: 811622 - RNA, 19 nt, Homo sapiens
  misc_RNA (1)...(19): siRNA sense strand
gagcuuaucauccuguaug

SEQ ID NO: 811623 - RNA, 19 nt, Homo sapiens
  misc_RNA (1)...(19): siRNA sense strand
caugugguuucccaguuua

SEQ ID NO: 811624 - RNA, 19 nt, Homo sapiens
  misc_RNA (1)...(19): siRNA sense strand
gaagaagauugggaacagu

SEQ ID NO: 811625 - RNA, 19 nt, Homo sapiens
  misc_RNA (1)...(19): siRNA sense strand
gaacaaucacugccacauc

SEQ ID NO: 811626 - RNA, 19 nt, Homo sapiens
  misc_RNA (1)...(19): siRNA sense strand
aaacgaagucaauugguaa

SEQ ID NO: 811627 - RNA, 19 nt, Homo sapiens
  misc_RNA (1)...(19): siRNA sense strand
gacaucuucuucucuauag

SEQ ID NO: 811628 - RNA, 19 nt, Homo sapiens
  misc_RNA (1)...(19): siRNA sense strand
cuggucagcuuguuagaaa

SEQ ID NO: 811629 - RNA, 19 nt, Homo sapiens
  misc_RNA (1)...(19): siRNA sense strand
aagagagacuacuaccuaa

SEQ ID NO: 811630 - RNA, 19 nt, Homo sapiens
  misc_RNA (1)...(19): siRNA sense strand
gauauuuacugaagaucuc

SEQ ID NO: 811631 - RNA, 19 nt, Homo sapiens
  misc_RNA (1)...(19): siRNA sense strand
gccugaagauauuuacuga

SEQ ID NO: 811632 - RNA, 19 nt, Homo sapiens
  misc_RNA (1)...(19): siRNA sense strand
aaggacaucuucuucucua

SEQ ID NO: 811633 - RNA, 19 nt, Homo sapiens
  misc_RNA (1)...(19): siRNA sense strand
acaaagauggcaacaaaga

SEQ ID NO: 811634 - RNA, 19 nt, Homo sapiens
  misc_RNA (1)...(19): siRNA sense strand
ggagauuuccagcuacuau

SEQ ID NO: 811635 - RNA, 19 nt, Homo sapiens
  misc_RNA (1)...(19): siRNA sense strand
agggugagcugggagaaua

SEQ ID NO: 811636 - RNA, 19 nt, Homo sapiens
  misc_RNA (1)...(19): siRNA sense strand
gcacagaaaaccugcauuu

SEQ ID NO: 811637 - RNA, 19 nt, Homo sapiens
  misc_RNA (1)...(19): siRNA sense strand
gaagcugaaugacucugau

SEQ ID NO: 811638 - RNA, 19 nt, Homo sapiens
  misc_RNA (1)...(19): siRNA sense strand
guaaagaagcugaaugacu

SEQ ID NO: 811639 - RNA, 19 nt, Homo sapiens
  misc_RNA (1)...(19): siRNA sense strand
aagaaacgguucaaucaag

SEQ ID NO: 811640 - RNA, 19 nt, Homo sapiens
  misc_RNA (1)...(19): siRNA sense strand
aaacaaggacaucuucuuc

SEQ ID NO: 811641 - RNA, 19 nt, Homo sapiens
  misc_RNA (1)...(19): siRNA sense strand
guccucggcuucuuaauag

SEQ ID NO: 811642 - RNA, 19 nt, Homo sapiens
  misc_RNA (1)...(19): siRNA sense strand
gaagaagcugcuacaaauc

SEQ ID NO: 811643 - RNA, 19 nt, Homo sapiens
  misc_RNA (1)...(19): siRNA sense strand
aagaagaagcugcuacaaa

SEQ ID NO: 811644 - RNA, 19 nt, Homo sapiens
  misc_RNA (1)...(19): siRNA sense strand
gaggaucaaacauuaucua

SEQ ID NO: 811645 - RNA, 19 nt, Homo sapiens
  misc_RNA (1)...(19): siRNA sense strand
gaacuggacggacauacca

SEQ ID NO: 811646 - RNA, 19 nt, Homo sapiens
  misc_RNA (1)...(19): siRNA sense strand
ggaaagggguccaucaaag

SEQ ID NO: 811647 - RNA, 19 nt, Homo sapiens
  misc_RNA (1)...(19): siRNA sense strand
aagggagcaucacuguuua

SEQ ID NO: 811648 - RNA, 19 nt, Homo sapiens
  misc_RNA (1)...(19): siRNA sense strand
uccaugaccuauugacauu

SEQ ID NO: 811649 - RNA, 19 nt, Homo sapiens
  misc_RNA (1)...(19): siRNA sense strand
gcaaacacucagaucaaug

SEQ ID NO: 811650 - RNA, 19 nt, Homo sapiens
  misc_RNA (1)...(19): siRNA sense strand
cugaagauauuuacugaag

SEQ ID NO: 811651 - RNA, 19 nt, Homo sapiens
  misc_RNA (1)...(19): siRNA sense strand
acacagaaacgaagucaau

SEQ ID NO: 811652 - RNA, 19 nt, Homo sapiens
  misc_RNA (1)...(19): siRNA sense strand
ucacuuagcucugauugac

SEQ ID NO: 811653 - RNA, 19 nt, Homo sapiens
  misc_RNA (1)...(19): siRNA sense strand
gcagaaaugaaagaugauu

SEQ ID NO: 811654 - RNA, 19 nt, Homo sapiens
  misc_RNA (1)...(19): siRNA sense strand
caaacaaggacaucuucuu

SEQ ID NO: 811655 - RNA, 19 nt, Homo sapiens
  misc_RNA (1)...(19): siRNA sense strand
caaucaagcuggaacuacu

SEQ ID NO: 811656 - RNA, 19 nt, Homo sapiens
  misc_RNA (1)...(19): siRNA sense strand
gaaacaaagauggcaacaa

SEQ ID NO: 811657 - RNA, 19 nt, Homo sapiens
  misc_RNA (1)...(19): siRNA sense strand
cugaagaucucccggaagu

SEQ ID NO: 811658 - RNA, 19 nt, Homo sapiens
  misc_RNA (1)...(19): siRNA sense strand
acaaaucacuacgguuuca

SEQ ID NO: 811659 - RNA, 19 nt, Homo sapiens
  misc_RNA (1)...(19): siRNA sense strand
caaggauggcugaggagua

SEQ ID NO: 811660 - RNA, 19 nt, Homo sapiens
  misc_RNA (1)...(19): siRNA sense strand
ucccuuugauggccucuua

SEQ ID NO: 811661 - RNA, 19 nt, Homo sapiens
  misc_RNA (1)...(19): siRNA sense strand
ugauccagcuauacuguga

SEQ ID NO: 811662 - RNA, 19 nt, Homo sapiens
  misc_RNA (1)...(19): siRNA sense strand
ccacccugcucaagugcua

SEQ ID NO: 811663 - RNA, 19 nt, Homo sapiens
  misc_RNA (1)...(19): siRNA sense strand
agugcuaucuccauacaaa

SEQ ID NO: 811664 - RNA, 19 nt, Homo sapiens
  misc_RNA (1)...(19): siRNA sense strand
acacucagaucaaugacau

SEQ ID NO: 811665 - RNA, 19 nt, Homo sapiens
  misc_RNA (1)...(19): siRNA sense strand
cagcaaacacucagaucaa

SEQ ID NO: 811666 - RNA, 19 nt, Homo sapiens
  misc_RNA (1)...(19): siRNA sense strand
ugcaaggucugaugaagga

SEQ ID NO: 811667 - RNA, 19 nt, Homo sapiens
  misc_RNA (1)...(19): siRNA sense strand
guacaggugucgagaagaa

SEQ ID NO: 811668 - RNA, 19 nt, Homo sapiens
  misc_RNA (1)...(19): siRNA sense strand
gcaggcagaugggaagaua

SEQ ID NO: 811669 - RNA, 19 nt, Homo sapiens
  misc_RNA (1)...(19): siRNA sense strand
gagcuccucugaauauuga

SEQ ID NO: 811670 - RNA, 19 nt, Homo sapiens
  misc_RNA (1)...(19): siRNA sense strand
gcacagaagggcaugauga

SEQ ID NO: 811671 - RNA, 19 nt, Homo sapiens
  misc_RNA (1)...(19): siRNA sense strand
gagaagagauugagaugac

SEQ ID NO: 811672 - RNA, 19 nt, Homo sapiens
  misc_RNA (1)...(19): siRNA sense strand
uagauucccugaagaacua

SEQ ID NO: 811673 - RNA, 19 nt, Homo sapiens
  misc_RNA (1)...(19): siRNA sense strand
ccaaagaccugcugaaagc

SEQ ID NO: 811674 - RNA, 19 nt, Homo sapiens
  misc_RNA (1)...(19): siRNA sense strand
gcacagauaguaccaggaa

SEQ ID NO: 811675 - RNA, 19 nt, Homo sapiens
  misc_RNA (1)...(19): siRNA sense strand
gaacuggaagcaagaagaa

SEQ ID NO: 811676 - RNA, 19 nt, Homo sapiens
  misc_RNA (1)...(19): siRNA sense strand
ggaaggcccaggcagauaa

SEQ ID NO: 811677 - RNA, 19 nt, Homo sapiens
  misc_RNA (1)...(19): siRNA sense strand
ggaaguggcugggcuuagu

SEQ ID NO: 811678 - RNA, 19 nt, Homo sapiens
  misc_RNA (1)...(19): siRNA sense strand
gcaagccccuggagucuua

SEQ ID NO: 811679 - RNA, 19 nt, Homo sapiens
  misc_RNA (1)...(19): siRNA sense strand
gaacaugagucgggaguac

SEQ ID NO: 811680 - RNA, 19 nt, Homo sapiens
  misc_RNA (1)...(19): siRNA sense strand
gcagagacacagcuagaaa

SEQ ID NO: 811681 - RNA, 19 nt, Homo sapiens
  misc_RNA (1)...(19): siRNA sense strand
gaagaaaggccucccuagu

SEQ ID NO: 811682 - RNA, 19 nt, Homo sapiens
  misc_RNA (1)...(19): siRNA sense strand
agaagaaggugaaguugga

SEQ ID NO: 811683 - RNA, 19 nt, Homo sapiens
  misc_RNA (1)...(19): siRNA sense strand
gcacgugcaucaucaaggu

SEQ ID NO: 811684 - RNA, 19 nt, Homo sapiens
  misc_RNA (1)...(19): siRNA sense strand
gaaguguauuucuccuuga

SEQ ID NO: 811685 - RNA, 19 nt, Homo sapiens
  misc_RNA (1)...(19): siRNA sense strand
gcaagaggccacagucaga

SEQ ID NO: 811686 - RNA, 19 nt, Homo sapiens
  misc_RNA (1)...(19): siRNA sense strand
gugagaagauacaggaaga

SEQ ID NO: 811687 - RNA, 19 nt, Homo sapiens
  misc_RNA (1)...(19): siRNA sense strand
gcagauugcuaccaaacuc

SEQ ID NO: 811688 - RNA, 19 nt, Homo sapiens
  misc_RNA (1)...(19): siRNA sense strand
ccucauagauucccugaag

SEQ ID NO: 811689 - RNA, 19 nt, Homo sapiens
  misc_RNA (1)...(19): siRNA sense strand
ggaagucaagguaucauug

SEQ ID NO: 811690 - RNA, 19 nt, Homo sapiens
  misc_RNA (1)...(19): siRNA sense strand
uggcuuggcuugucuaugu

SEQ ID NO: 811691 - RNA, 19 nt, Homo sapiens
  misc_RNA (1)...(19): siRNA sense strand
gacuaggccuuucaacaga

SEQ ID NO: 811692 - RNA, 19 nt, Homo sapiens
  misc_RNA (1)...(19): siRNA sense strand
cuaccaaacuccgaggaua

SEQ ID NO: 811693 - RNA, 19 nt, Homo sapiens
  misc_RNA (1)...(19): siRNA sense strand
gcccagagcuuaggaaagg

SEQ ID NO: 811694 - RNA, 19 nt, Homo sapiens
  misc_RNA (1)...(19): siRNA sense strand
gaacagcaagggcauugug

SEQ ID NO: 811695 - RNA, 19 nt, Homo sapiens
  misc_RNA (1)...(19): siRNA sense strand
gcagcuuccuugucacaga

SEQ ID NO: 811696 - RNA, 19 nt, Homo sapiens
  misc_RNA (1)...(19): siRNA sense strand
gagucaagcuccagaaugc

SEQ ID NO: 811697 - RNA, 19 nt, Homo sapiens
  misc_RNA (1)...(19): siRNA sense strand
gcaagcccauuucuucucu

SEQ ID NO: 811698 - RNA, 19 nt, Homo sapiens
  misc_RNA (1)...(19): siRNA sense strand
ggaagagugcuccaaguuc

SEQ ID NO: 811699 - RNA, 19 nt, Homo sapiens
  misc_RNA (1)...(19): siRNA sense strand
ucagagagcccucaaagag

SEQ ID NO: 811700 - RNA, 19 nt, Homo sapiens
  misc_RNA (1)...(19): siRNA sense strand
ggaggugccugagaucauc

SEQ ID NO: 811701 - RNA, 19 nt, Homo sapiens
  misc_RNA (1)...(19): siRNA sense strand
acaggcaggugagaagaua

SEQ ID NO: 811702 - RNA, 19 nt, Homo sapiens
  misc_RNA (1)...(19): siRNA sense strand
agacacagcuagaaacaac

SEQ ID NO: 811703 - RNA, 19 nt, Homo sapiens
  misc_RNA (1)...(19): siRNA sense strand
ggagguggcuuggcuuguc

SEQ ID NO: 811704 - RNA, 19 nt, Homo sapiens
  misc_RNA (1)...(19): siRNA sense strand
cagagaagaaggugaaguu

SEQ ID NO: 811705 - RNA, 19 nt, Homo sapiens
  misc_RNA (1)...(19): siRNA sense strand
ggugcaccauccacaauga

SEQ ID NO: 811706 - RNA, 19 nt, Homo sapiens
  misc_RNA (1)...(19): siRNA sense strand
caacauucuuagugacuca

SEQ ID NO: 811707 - RNA, 19 nt, Homo sapiens
  misc_RNA (1)...(19): siRNA sense strand
caggguggcuguccucuag

SEQ ID NO: 811708 - RNA, 19 nt, Homo sapiens
  misc_RNA (1)...(19): siRNA sense strand
gacccuggccucauagauu

SEQ ID NO: 811709 - RNA, 19 nt, Homo sapiens
  misc_RNA (1)...(19): siRNA sense strand
gaagauacaaguggaugga

SEQ ID NO: 811710 - RNA, 19 nt, Homo sapiens
  misc_RNA (1)...(19): siRNA sense strand
aauggcagcuuccuuguca

SEQ ID NO: 811711 - RNA, 19 nt, Homo sapiens
  misc_RNA (1)...(19): siRNA sense strand
gaagcuguggugccaguuu

SEQ ID NO: 811712 - RNA, 19 nt, Homo sapiens
  misc_RNA (1)...(19): siRNA sense strand
ccaccuuccugcccucuga

SEQ ID NO: 811713 - RNA, 19 nt, Homo sapiens
  misc_RNA (1)...(19): siRNA sense strand
cggcaaagcugcgcgagau

SEQ ID NO: 811714 - RNA, 19 nt, Homo sapiens
  misc_RNA (1)...(19): siRNA sense strand
gaugacugaugugcagauu

SEQ ID NO: 811715 - RNA, 19 nt, Homo sapiens
  misc_RNA (1)...(19): siRNA sense strand
gcaaggcgagggucaguca

SEQ ID NO: 811716 - RNA, 19 nt, Homo sapiens
  misc_RNA (1)...(19): siRNA sense strand
ggugcaagauccagaacau

SEQ ID NO: 811717 - RNA, 19 nt, Homo sapiens
  misc_RNA (1)...(19): siRNA sense strand
ugacaugggccaaggauca

SEQ ID NO: 811718 - RNA, 19 nt, Homo sapiens
  misc_RNA (1)...(19): siRNA sense strand
aaagaaagaugaggaaucc

SEQ ID NO: 811719 - RNA, 19 nt, Homo sapiens
  misc_RNA (1)...(19): siRNA sense strand
gccacacacugcagcugua

SEQ ID NO: 811720 - RNA, 19 nt, Homo sapiens
  misc_RNA (1)...(19): siRNA sense strand
ugacugaugugcagauugc

SEQ ID NO: 811721 - RNA, 19 nt, Homo sapiens
  misc_RNA (1)...(19): siRNA sense strand
cagagucacccaccagaaa

SEQ ID NO: 811722 - RNA, 19 nt, Homo sapiens
  misc_RNA (1)...(19): siRNA sense strand
ucauugaacccauggauau

SEQ ID NO: 811723 - RNA, 19 nt, Homo sapiens
  misc_RNA (1)...(19): siRNA sense strand
cagcagcagcucugaugua

SEQ ID NO: 811724 - RNA, 19 nt, Homo sapiens
  misc_RNA (1)...(19): siRNA sense strand
gcucagcacucagguuugg

SEQ ID NO: 811725 - RNA, 19 nt, Homo sapiens
  misc_RNA (1)...(19): siRNA sense strand
gaggagacccagccgcuau

SEQ ID NO: 811726 - RNA, 19 nt, Homo sapiens
  misc_RNA (1)...(19): siRNA sense strand
gaaaggcucccagcugagu

SEQ ID NO: 811727 - RNA, 19 nt, Homo sapiens
  misc_RNA (1)...(19): siRNA sense strand
gcccauuucuucucugagu

SEQ ID NO: 811728 - RNA, 19 nt, Homo sapiens
  misc_RNA (1)...(19): siRNA sense strand
caucauugcucagcucaca

SEQ ID NO: 811729 - RNA, 19 nt, Homo sapiens
  misc_RNA (1)...(19): siRNA sense strand
ggagaagagauugagauga

SEQ ID NO: 811730 - RNA, 19 nt, Homo sapiens
  misc_RNA (1)...(19): siRNA sense strand
gcaccaugacugaguacaa

SEQ ID NO: 811731 - RNA, 19 nt, Homo sapiens
  misc_RNA (1)...(19): siRNA sense strand
cuaccggccugcaaacaau

SEQ ID NO: 811732 - RNA, 19 nt, Homo sapiens
  misc_RNA (1)...(19): siRNA sense strand
gagaucaucccacuguauc

SEQ ID NO: 811733 - RNA, 19 nt, Homo sapiens
  misc_RNA (1)...(19): siRNA sense strand
gaaguuggagaagagauug

SEQ ID NO: 811734 - RNA, 19 nt, Homo sapiens
  misc_RNA (1)...(19): siRNA sense strand
guggagcaguuuccugaug

SEQ ID NO: 811735 - RNA, 19 nt, Homo sapiens
  misc_RNA (1)...(19): siRNA sense strand
gggcagagacacagcuaga

SEQ ID NO: 811736 - RNA, 19 nt, Homo sapiens
  misc_RNA (1)...(19): siRNA sense strand
cagcgaaagcggcgauuga

SEQ ID NO: 811737 - RNA, 19 nt, Homo sapiens
  misc_RNA (1)...(19): siRNA sense strand
agacccagccgcuauuuga

SEQ ID NO: 811738 - RNA, 19 nt, Homo sapiens
  misc_RNA (1)...(19): siRNA sense strand
agacaggagugcacagaag

SEQ ID NO: 811739 - RNA, 19 nt, Homo sapiens
  misc_RNA (1)...(19): siRNA sense strand
gaaagcaagaggccacagu

SEQ ID NO: 811740 - RNA, 19 nt, Homo sapiens
  misc_RNA (1)...(19): siRNA sense strand
ggacacgugcagauaggaa

SEQ ID NO: 811741 - RNA, 19 nt, Homo sapiens
  misc_RNA (1)...(19): siRNA sense strand
gaggacacgugcagauagg

SEQ ID NO: 811742 - RNA, 19 nt, Homo sapiens
  misc_RNA (1)...(19): siRNA sense strand
cgacuaggccuuucaacag

SEQ ID NO: 811743 - RNA, 19 nt, Homo sapiens
  misc_RNA (1)...(19): siRNA sense strand
caggugauccggaagauuc

SEQ ID NO: 811744 - RNA, 19 nt, Homo sapiens
  misc_RNA (1)...(19): siRNA sense strand
gcacacaggaagacagaag

SEQ ID NO: 811745 - RNA, 19 nt, Homo sapiens
  misc_RNA (1)...(19): siRNA sense strand
cagaggacacgugcagaua

SEQ ID NO: 811746 - RNA, 19 nt, Homo sapiens
  misc_RNA (1)...(19): siRNA sense strand
ggagaggccaccacugaca

SEQ ID NO: 811747 - RNA, 19 nt, Homo sapiens
  misc_RNA (1)...(19): siRNA sense strand
acagcaagcccauuucuuc

SEQ ID NO: 811748 - RNA, 19 nt, Homo sapiens
  misc_RNA (1)...(19): siRNA sense strand
uaccagggccucaaggaaa

SEQ ID NO: 811749 - RNA, 19 nt, Homo sapiens
  misc_RNA (1)...(19): siRNA sense strand
acuggaagaugacugaugu

SEQ ID NO: 811750 - RNA, 19 nt, Homo sapiens
  misc_RNA (1)...(19): siRNA sense strand
gaaaugccagaccuuccaa

SEQ ID NO: 811751 - RNA, 19 nt, Homo sapiens
  misc_RNA (1)...(19): siRNA sense strand
caaccacaccugaagaaag

SEQ ID NO: 811752 - RNA, 19 nt, Homo sapiens
  misc_RNA (1)...(19): siRNA sense strand
gcaggugggaggagagaga

SEQ ID NO: 811753 - RNA, 19 nt, Homo sapiens
  misc_RNA (1)...(19): siRNA sense strand
ccagaagggucuuguuucc

SEQ ID NO: 811754 - RNA, 19 nt, Homo sapiens
  misc_RNA (1)...(19): siRNA sense strand
caacacaggcaggugagaa

SEQ ID NO: 811755 - RNA, 19 nt, Homo sapiens
  misc_RNA (1)...(19): siRNA sense strand
aaggagaggccaccacuga

SEQ ID NO: 811756 - RNA, 19 nt, Homo sapiens
  misc_RNA (1)...(19): siRNA sense strand
gcaaccacaccugaagaaa

SEQ ID NO: 811757 - RNA, 19 nt, Homo sapiens
  misc_RNA (1)...(19): siRNA sense strand
gaaggaugcagggagagaa

SEQ ID NO: 811758 - RNA, 19 nt, Homo sapiens
  misc_RNA (1)...(19): siRNA sense strand
agaagggcaugaugacaca

SEQ ID NO: 811759 - RNA, 19 nt, Homo sapiens
  misc_RNA (1)...(19): siRNA sense strand
ggaagccagaguuagagaa

SEQ ID NO: 811760 - RNA, 19 nt, Homo sapiens
  misc_RNA (1)...(19): siRNA sense strand
cugcaaacaauaucccaua

SEQ ID NO: 811761 - RNA, 19 nt, Homo sapiens
  misc_RNA (1)...(19): siRNA sense strand
gaaacuacgacgucaccau

SEQ ID NO: 811762 - RNA, 19 nt, Homo sapiens
  misc_RNA (1)...(19): siRNA sense strand
ucauagauucccugaagaa

SEQ ID NO: 811763 - RNA, 19 nt, Homo sapiens
  misc_RNA (1)...(19): siRNA sense strand
gccaggagguacccacgau

SEQ ID NO: 811764 - RNA, 19 nt, Homo sapiens
  misc_RNA (1)...(19): siRNA sense strand
ggccgcacgugcaucauca

SEQ ID NO: 811765 - RNA, 19 nt, Homo sapiens
  misc_RNA (1)...(19): siRNA sense strand
ggagacccagccgcuauuu

SEQ ID NO: 811766 - RNA, 19 nt, Homo sapiens
  misc_RNA (1)...(19): siRNA sense strand
ggaggcaaccacaccugaa

SEQ ID NO: 811767 - RNA, 19 nt, Homo sapiens
  misc_RNA (1)...(19): siRNA sense strand
ggaaauaucugcacuaucu

SEQ ID NO: 811768 - RNA, 19 nt, Homo sapiens
  misc_RNA (1)...(19): siRNA sense strand
caaagaagcucacagcauu

SEQ ID NO: 811769 - RNA, 19 nt, Homo sapiens
  misc_RNA (1)...(19): siRNA sense strand
ggaaggagguggacugaaa

SEQ ID NO: 811770 - RNA, 19 nt, Homo sapiens
  misc_RNA (1)...(19): siRNA sense strand
gcaaguaguuggagaguug

SEQ ID NO: 811771 - RNA, 19 nt, Homo sapiens
  misc_RNA (1)...(19): siRNA sense strand
gaagauggauuacugaaag

SEQ ID NO: 811772 - RNA, 19 nt, Homo sapiens
  misc_RNA (1)...(19): siRNA sense strand
gaaauuggaucucuguuag

SEQ ID NO: 811773 - RNA, 19 nt, Homo sapiens
  misc_RNA (1)...(19): siRNA sense strand
gaagggaucuugcuauugg

SEQ ID NO: 811774 - RNA, 19 nt, Homo sapiens
  misc_RNA (1)...(19): siRNA sense strand
gaagagaugucugggauau

SEQ ID NO: 811775 - RNA, 19 nt, Homo sapiens
  misc_RNA (1)...(19): siRNA sense strand
uauaaaggcucuuggauug

SEQ ID NO: 811776 - RNA, 19 nt, Homo sapiens
  misc_RNA (1)...(19): siRNA sense strand
gaaaagaccugaaggguau

SEQ ID NO: 811777 - RNA, 19 nt, Homo sapiens
  misc_RNA (1)...(19): siRNA sense strand
gaaagacuaugaagacauc

SEQ ID NO: 811778 - RNA, 19 nt, Homo sapiens
  misc_RNA (1)...(19): siRNA sense strand
gaagggagagaaagaauuu

SEQ ID NO: 811779 - RNA, 19 nt, Homo sapiens
  misc_RNA (1)...(19): siRNA sense strand
ggaaugagcaguaucagaa

SEQ ID NO: 811780 - RNA, 19 nt, Homo sapiens
  misc_RNA (1)...(19): siRNA sense strand
ccaguaaccuuucuaugaa

SEQ ID NO: 811781 - RNA, 19 nt, Homo sapiens
  misc_RNA (1)...(19): siRNA sense strand
gcaauaccaugaacagaug

SEQ ID NO: 811782 - RNA, 19 nt, Homo sapiens
  misc_RNA (1)...(19): siRNA sense strand
aauggaagaugccaaauaa

SEQ ID NO: 811783 - RNA, 19 nt, Homo sapiens
  misc_RNA (1)...(19): siRNA sense strand
ggaagaugccaaauaauga

SEQ ID NO: 811784 - RNA, 19 nt, Homo sapiens
  misc_RNA (1)...(19): siRNA sense strand
caacagaucguuucacaga

SEQ ID NO: 811785 - RNA, 19 nt, Homo sapiens
  misc_RNA (1)...(19): siRNA sense strand
ucacagcauuggaaauuaa

SEQ ID NO: 811786 - RNA, 19 nt, Homo sapiens
  misc_RNA (1)...(19): siRNA sense strand
cgaaauaaaucaguuguuc

SEQ ID NO: 811787 - RNA, 19 nt, Homo sapiens
  misc_RNA (1)...(19): siRNA sense strand
ugacuuggaugcucgagua

SEQ ID NO: 811788 - RNA, 19 nt, Homo sapiens
  misc_RNA (1)...(19): siRNA sense strand
ugaagggucucauuucuau

SEQ ID NO: 811789 - RNA, 19 nt, Homo sapiens
  misc_RNA (1)...(19): siRNA sense strand
gcaaacauucgaccuaauu

SEQ ID NO: 811790 - RNA, 19 nt, Homo sapiens
  misc_RNA (1)...(19): siRNA sense strand
gaagaucugcauuguauau

SEQ ID NO: 811791 - RNA, 19 nt, Homo sapiens
  misc_RNA (1)...(19): siRNA sense strand
guugaaugcuguacaauau

SEQ ID NO: 811792 - RNA, 19 nt, Homo sapiens
  misc_RNA (1)...(19): siRNA sense strand
gaucccaaauacauugaua

SEQ ID NO: 811793 - RNA, 19 nt, Homo sapiens
  misc_RNA (1)...(19): siRNA sense strand
gcacaagggauccaauuug

SEQ ID NO: 811794 - RNA, 19 nt, Homo sapiens
  misc_RNA (1)...(19): siRNA sense strand
gaaaucuucaccaaacaua

SEQ ID NO: 811795 - RNA, 19 nt, Homo sapiens
  misc_RNA (1)...(19): siRNA sense strand
acagaucguuucacagaua

SEQ ID NO: 811796 - RNA, 19 nt, Homo sapiens
  misc_RNA (1)...(19): siRNA sense strand
gaaacuggaucuauacacu

SEQ ID NO: 811797 - RNA, 19 nt, Homo sapiens
  misc_RNA (1)...(19): siRNA sense strand
guaugaagaccuugcuuua

SEQ ID NO: 811798 - RNA, 19 nt, Homo sapiens
  misc_RNA (1)...(19): siRNA sense strand
cagaagggaucuugcuauu

SEQ ID NO: 811799 - RNA, 19 nt, Homo sapiens
  misc_RNA (1)...(19): siRNA sense strand
ugagaagguuggaauuaaa

SEQ ID NO: 811800 - RNA, 19 nt, Homo sapiens
  misc_RNA (1)...(19): siRNA sense strand
gaacagaaacagcaguaug

SEQ ID NO: 811801 - RNA, 19 nt, Homo sapiens
  misc_RNA (1)...(19): siRNA sense strand
uaacauggaaugagcagua

SEQ ID NO: 811802 - RNA, 19 nt, Homo sapiens
  misc_RNA (1)...(19): siRNA sense strand
gaagcucuauguacuguca

SEQ ID NO: 811803 - RNA, 19 nt, Homo sapiens
  misc_RNA (1)...(19): siRNA sense strand
gaaauguagucaaccaaag

SEQ ID NO: 811804 - RNA, 19 nt, Homo sapiens
  misc_RNA (1)...(19): siRNA sense strand
ggucucauuucuauuacua

SEQ ID NO: 811805 - RNA, 19 nt, Homo sapiens
  misc_RNA (1)...(19): siRNA sense strand
ccacaugggcagcguguua

SEQ ID NO: 811806 - RNA, 19 nt, Homo sapiens
  misc_RNA (1)...(19): siRNA sense strand
gaagcccaaucacugagua

SEQ ID NO: 811807 - RNA, 19 nt, Homo sapiens
  misc_RNA (1)...(19): siRNA sense strand
uagagaaccuugccauuuc

SEQ ID NO: 811808 - RNA, 19 nt, Homo sapiens
  misc_RNA (1)...(19): siRNA sense strand
gaccugaucguccagaaua

SEQ ID NO: 811809 - RNA, 19 nt, Homo sapiens
  misc_RNA (1)...(19): siRNA sense strand
gaucugcauuguauaugaa

SEQ ID NO: 811810 - RNA, 19 nt, Homo sapiens
  misc_RNA (1)...(19): siRNA sense strand
gauacagucuaccuaaugu

SEQ ID NO: 811811 - RNA, 19 nt, Homo sapiens
  misc_RNA (1)...(19): siRNA sense strand
gcagacagaugaugcaaaa

SEQ ID NO: 811812 - RNA, 19 nt, Homo sapiens
  misc_RNA (1)...(19): siRNA sense strand
guagauaccugcguacauc

SEQ ID NO: 811813 - RNA, 19 nt, Homo sapiens
  misc_RNA (1)...(19): siRNA sense strand
gaagugggccaaagauaau

SEQ ID NO: 811814 - RNA, 19 nt, Homo sapiens
  misc_RNA (1)...(19): siRNA sense strand
guauacagcuaucccaugu

SEQ ID NO: 811815 - RNA, 19 nt, Homo sapiens
  misc_RNA (1)...(19): siRNA sense strand
ucaagaagcucuauguacu

SEQ ID NO: 811816 - RNA, 19 nt, Homo sapiens
  misc_RNA (1)...(19): siRNA sense strand
gaaguugacuaccagugau

SEQ ID NO: 811817 - RNA, 19 nt, Homo sapiens
  misc_RNA (1)...(19): siRNA sense strand
gauccaauuugugccauaa

SEQ ID NO: 811818 - RNA, 19 nt, Homo sapiens
  misc_RNA (1)...(19): siRNA sense strand
uggauggugugcuugauua

SEQ ID NO: 811819 - RNA, 19 nt, Homo sapiens
  misc_RNA (1)...(19): siRNA sense strand
ggagagaaagaauuuauca

SEQ ID NO: 811820 - RNA, 19 nt, Homo sapiens
  misc_RNA (1)...(19): siRNA sense strand
gaaugucacuggagcuauc

SEQ ID NO: 811821 - RNA, 19 nt, Homo sapiens
  misc_RNA (1)...(19): siRNA sense strand
gauaauggaagaugccaaa

SEQ ID NO: 811822 - RNA, 19 nt, Homo sapiens
  misc_RNA (1)...(19): siRNA sense strand
ggcagaggcuuaccacuuc

SEQ ID NO: 811823 - RNA, 19 nt, Homo sapiens
  misc_RNA (1)...(19): siRNA sense strand
gcaaagaaaggaaguaaac

SEQ ID NO: 811824 - RNA, 19 nt, Homo sapiens
  misc_RNA (1)...(19): siRNA sense strand
agagaugucugggauauga

SEQ ID NO: 811825 - RNA, 19 nt, Homo sapiens
  misc_RNA (1)...(19): siRNA sense strand
caaauaaugagacaugaga

SEQ ID NO: 811826 - RNA, 19 nt, Homo sapiens
  misc_RNA (1)...(19): siRNA sense strand
ugaagugggccaaagauaa

SEQ ID NO: 811827 - RNA, 19 nt, Homo sapiens
  misc_RNA (1)...(19): siRNA sense strand
gagauacagucuaccuaau

SEQ ID NO: 811828 - RNA, 19 nt, Homo sapiens
  misc_RNA (1)...(19): siRNA sense strand
gaaucagacucuugaaggu

SEQ ID NO: 811829 - RNA, 19 nt, Homo sapiens
  misc_RNA (1)...(19): siRNA sense strand
cgagauagccgagcacuga

SEQ ID NO: 811830 - RNA, 19 nt, Homo sapiens
  misc_RNA (1)...(19): siRNA sense strand
gauagcagccucgaaagaa

SEQ ID NO: 811831 - RNA, 19 nt, Homo sapiens
  misc_RNA (1)...(19): siRNA sense strand
caaacauucgaccuaauua

SEQ ID NO: 811832 - RNA, 19 nt, Homo sapiens
  misc_RNA (1)...(19): siRNA sense strand
gcuguugauuccuuuauau

SEQ ID NO: 811833 - RNA, 19 nt, Homo sapiens
  misc_RNA (1)...(19): siRNA sense strand
gaguaucaauucuggaugu

SEQ ID NO: 811834 - RNA, 19 nt, Homo sapiens
  misc_RNA (1)...(19): siRNA sense strand
gcguacaucucaaccaaug

SEQ ID NO: 811835 - RNA, 19 nt, Homo sapiens
  misc_RNA (1)...(19): siRNA sense strand
gauauuaaaggauccagaa

SEQ ID NO: 811836 - RNA, 19 nt, Homo sapiens
  misc_RNA (1)...(19): siRNA sense strand
ggaaauuaaucagaucaca

SEQ ID NO: 811837 - RNA, 19 nt, Homo sapiens
  misc_RNA (1)...(19): siRNA sense strand
gcucacagcauuggaaauu

SEQ ID NO: 811838 - RNA, 19 nt, Homo sapiens
  misc_RNA (1)...(19): siRNA sense strand
uaauggaagaugccaaaua

SEQ ID NO: 811839 - RNA, 19 nt, Homo sapiens
  misc_RNA (1)...(19): siRNA sense strand
ugaagaccuugcuuuagaa

SEQ ID NO: 811840 - RNA, 19 nt, Homo sapiens
  misc_RNA (1)...(19): siRNA sense strand
agaaauuggaucucuguua

SEQ ID NO: 811841 - RNA, 19 nt, Homo sapiens
  misc_RNA (1)...(19): siRNA sense strand
ggagaagacaagaauguau

SEQ ID NO: 811842 - RNA, 19 nt, Homo sapiens
  misc_RNA (1)...(19): siRNA sense strand
gcaaagaagcucacagcau

SEQ ID NO: 811843 - RNA, 19 nt, Homo sapiens
  misc_RNA (1)...(19): siRNA sense strand
gcucuuggauugaggagau

SEQ ID NO: 811844 - RNA, 19 nt, Homo sapiens
  misc_RNA (1)...(19): siRNA sense strand
guaugcaucucauuuacug

SEQ ID NO: 811845 - RNA, 19 nt, Homo sapiens
  misc_RNA (1)...(19): siRNA sense strand
gaacaagcagugacuacau

SEQ ID NO: 811846 - RNA, 19 nt, Homo sapiens
  misc_RNA (1)...(19): siRNA sense strand
gccgagcacugauugagaa

SEQ ID NO: 811847 - RNA, 19 nt, Homo sapiens
  misc_RNA (1)...(19): siRNA sense strand
gcaucuggguacuuugaaa

SEQ ID NO: 811848 - RNA, 19 nt, Homo sapiens
  misc_RNA (1)...(19): siRNA sense strand
gugagcaucuggguacuuu

SEQ ID NO: 811849 - RNA, 19 nt, Homo sapiens
  misc_RNA (1)...(19): siRNA sense strand
gagaugaucaacaaucgaa

SEQ ID NO: 811850 - RNA, 19 nt, Homo sapiens
  misc_RNA (1)...(19): siRNA sense strand
gaagggaaacugccaacau

SEQ ID NO: 811851 - RNA, 19 nt, Homo sapiens
  misc_RNA (1)...(19): siRNA sense strand
uuagaaaucuucaccaaac

SEQ ID NO: 811852 - RNA, 19 nt, Homo sapiens
  misc_RNA (1)...(19): siRNA sense strand
gaggaaaaguuaaaggaaa

SEQ ID NO: 811853 - RNA, 19 nt, Homo sapiens
  misc_RNA (1)...(19): siRNA sense strand
gaccaaaacccaugugaua

SEQ ID NO: 811854 - RNA, 19 nt, Homo sapiens
  misc_RNA (1)...(19): siRNA sense strand
gauauuguaccauuguuug

SEQ ID NO: 811855 - RNA, 19 nt, Homo sapiens
  misc_RNA (1)...(19): siRNA sense strand
acacuguaguuuaugcaua

SEQ ID NO: 811856 - RNA, 19 nt, Homo sapiens
  misc_RNA (1)...(19): siRNA sense strand
gcuguuugcuuugauaaug

SEQ ID NO: 811857 - RNA, 19 nt, Homo sapiens
  misc_RNA (1)...(19): siRNA sense strand
gauaguugguucaguggau

SEQ ID NO: 811858 - RNA, 19 nt, Homo sapiens
  misc_RNA (1)...(19): siRNA sense strand
gagaagacaagaauguaug

SEQ ID NO: 811859 - RNA, 19 nt, Homo sapiens
  misc_RNA (1)...(19): siRNA sense strand
agaaacagcaguaugaaga

SEQ ID NO: 811860 - RNA, 19 nt, Homo sapiens
  misc_RNA (1)...(19): siRNA sense strand
gaucuacucucugcuagca

SEQ ID NO: 811861 - RNA, 19 nt, Homo sapiens
  misc_RNA (1)...(19): siRNA sense strand
ugaaagaaauuggaucucu

SEQ ID NO: 811862 - RNA, 19 nt, Homo sapiens
  misc_RNA (1)...(19): siRNA sense strand
cuacuuugcugaucgacaa

SEQ ID NO: 811863 - RNA, 19 nt, Homo sapiens
  misc_RNA (1)...(19): siRNA sense strand
uucagaaacuggaucuaua

SEQ ID NO: 811864 - RNA, 19 nt, Homo sapiens
  misc_RNA (1)...(19): siRNA sense strand
uggaugagauauuaaagga

SEQ ID NO: 811865 - RNA, 19 nt, Homo sapiens
  misc_RNA (1)...(19): siRNA sense strand
gcagagccuuugggacuug

SEQ ID NO: 811866 - RNA, 19 nt, Homo sapiens
  misc_RNA (1)...(19): siRNA sense strand
augaagaccuugcuuuaga

SEQ ID NO: 811867 - RNA, 19 nt, Homo sapiens
  misc_RNA (1)...(19): siRNA sense strand
ggaaagagaucugugacua

SEQ ID NO: 811868 - RNA, 19 nt, Homo sapiens
  misc_RNA (1)...(19): siRNA sense strand
gaagaagcauaaagugaaa

SEQ ID NO: 811869 - RNA, 19 nt, Homo sapiens
  misc_RNA (1)...(19): siRNA sense strand
gcacuucccuuacuucaga

SEQ ID NO: 811870 - RNA, 19 nt, Homo sapiens
  misc_RNA (1)...(19): siRNA sense strand
gaagaagacucaugugaag

SEQ ID NO: 811871 - RNA, 19 nt, Homo sapiens
  misc_RNA (1)...(19): siRNA sense strand
ggagagcacuggaaagaga

SEQ ID NO: 811872 - RNA, 19 nt, Homo sapiens
  misc_RNA (1)...(19): siRNA sense strand
gaugagaccuuuacauucu

SEQ ID NO: 811873 - RNA, 19 nt, Homo sapiens
  misc_RNA (1)...(19): siRNA sense strand
gaauacaacuucgagagaa

SEQ ID NO: 811874 - RNA, 19 nt, Homo sapiens
  misc_RNA (1)...(19): siRNA sense strand
ccaaugcaguguucaauga

SEQ ID NO: 811875 - RNA, 19 nt, Homo sapiens
  misc_RNA (1)...(19): siRNA sense strand
ucaaugagcuguuugucuu

SEQ ID NO: 811876 - RNA, 19 nt, Homo sapiens
  misc_RNA (1)...(19): siRNA sense strand
ggagacaaauugccaagug

SEQ ID NO: 811877 - RNA, 19 nt, Homo sapiens
  misc_RNA (1)...(19): siRNA sense strand
uaacaagacuccuccauac

SEQ ID NO: 811878 - RNA, 19 nt, Homo sapiens
  misc_RNA (1)...(19): siRNA sense strand
uaacugugguugucuuaaa

SEQ ID NO: 811879 - RNA, 19 nt, Homo sapiens
  misc_RNA (1)...(19): siRNA sense strand
acacacaaauccaagaauu

SEQ ID NO: 811880 - RNA, 19 nt, Homo sapiens
  misc_RNA (1)...(19): siRNA sense strand
gaugaccucugacccauau

SEQ ID NO: 811881 - RNA, 19 nt, Homo sapiens
  misc_RNA (1)...(19): siRNA sense strand
gagaagaagcauaaaguga

SEQ ID NO: 811882 - RNA, 19 nt, Homo sapiens
  misc_RNA (1)...(19): siRNA sense strand
gaauuggccuugcacuuca

SEQ ID NO: 811883 - RNA, 19 nt, Homo sapiens
  misc_RNA (1)...(19): siRNA sense strand
aaacuagagugcugagaaa

SEQ ID NO: 811884 - RNA, 19 nt, Homo sapiens
  misc_RNA (1)...(19): siRNA sense strand
gcugggaacucucuucuuc

SEQ ID NO: 811885 - RNA, 19 nt, Homo sapiens
  misc_RNA (1)...(19): siRNA sense strand
gagagaucaucaagagaaa

SEQ ID NO: 811886 - RNA, 19 nt, Homo sapiens
  misc_RNA (1)...(19): siRNA sense strand
gggauacccuacacacaaa

SEQ ID NO: 811887 - RNA, 19 nt, Homo sapiens
  misc_RNA (1)...(19): siRNA sense strand
gccuugcacuucacaauuu

SEQ ID NO: 811888 - RNA, 19 nt, Homo sapiens
  misc_RNA (1)...(19): siRNA sense strand
uaagggaguugauauuuac

SEQ ID NO: 811889 - RNA, 19 nt, Homo sapiens
  misc_RNA (1)...(19): siRNA sense strand
gaagacucaugugaagaaa

SEQ ID NO: 811890 - RNA, 19 nt, Homo sapiens
  misc_RNA (1)...(19): siRNA sense strand
gugagggccuugaagauau

SEQ ID NO: 811891 - RNA, 19 nt, Homo sapiens
  misc_RNA (1)...(19): siRNA sense strand
ccacaaacacucuaacugu

SEQ ID NO: 811892 - RNA, 19 nt, Homo sapiens
  misc_RNA (1)...(19): siRNA sense strand
agacucaugugaagaaaug

SEQ ID NO: 811893 - RNA, 19 nt, Homo sapiens
  misc_RNA (1)...(19): siRNA sense strand
gaaaaucauccaagucuaa

SEQ ID NO: 811894 - RNA, 19 nt, Homo sapiens
  misc_RNA (1)...(19): siRNA sense strand
gaaccuguaccaugccaaa

SEQ ID NO: 811895 - RNA, 19 nt, Homo sapiens
  misc_RNA (1)...(19): siRNA sense strand
ugagggccuugaagauaua

SEQ ID NO: 811896 - RNA, 19 nt, Homo sapiens
  misc_RNA (1)...(19): siRNA sense strand
cuaacaagacuccuccaua

SEQ ID NO: 811897 - RNA, 19 nt, Homo sapiens
  misc_RNA (1)...(19): siRNA sense strand
guugauauuuacccugaaa

SEQ ID NO: 811898 - RNA, 19 nt, Homo sapiens
  misc_RNA (1)...(19): siRNA sense strand
agaagaagcauaaagugaa

SEQ ID NO: 811899 - RNA, 19 nt, Homo sapiens
  misc_RNA (1)...(19): siRNA sense strand
aagcauuuguggucaauau

SEQ ID NO: 811900 - RNA, 19 nt, Homo sapiens
  misc_RNA (1)...(19): siRNA sense strand
ccaagaagaagacucaugu

SEQ ID NO: 811901 - RNA, 19 nt, Homo sapiens
  misc_RNA (1)...(19): siRNA sense strand
auagagagaucaucaagag

SEQ ID NO: 811902 - RNA, 19 nt, Homo sapiens
  misc_RNA (1)...(19): siRNA sense strand
gaauagagagaucaucaag

SEQ ID NO: 811903 - RNA, 19 nt, Homo sapiens
  misc_RNA (1)...(19): siRNA sense strand
ugacgauccucccagagaa

SEQ ID NO: 811904 - RNA, 19 nt, Homo sapiens
  misc_RNA (1)...(19): siRNA sense strand
gagaucaucaagagaaaug

SEQ ID NO: 811905 - RNA, 19 nt, Homo sapiens
  misc_RNA (1)...(19): siRNA sense strand
gaacucucuucuucuccuu

SEQ ID NO: 811906 - RNA, 19 nt, Homo sapiens
  misc_RNA (1)...(19): siRNA sense strand
gaaagagaucugugacuac

SEQ ID NO: 811907 - RNA, 19 nt, Homo sapiens
  misc_RNA (1)...(19): siRNA sense strand
caagacuccuccauacaag

SEQ ID NO: 811908 - RNA, 19 nt, Homo sapiens
  misc_RNA (1)...(19): siRNA sense strand
agaagaagacucaugugaa

SEQ ID NO: 811909 - RNA, 19 nt, Homo sapiens
  misc_RNA (1)...(19): siRNA sense strand
agagagaucaucaagagaa

SEQ ID NO: 811910 - RNA, 19 nt, Homo sapiens
  misc_RNA (1)...(19): siRNA sense strand
cauugcaucuggaucuuga

SEQ ID NO: 811911 - RNA, 19 nt, Homo sapiens
  misc_RNA (1)...(19): siRNA sense strand
cagaagagaaacaagagaa

SEQ ID NO: 811912 - RNA, 19 nt, Homo sapiens
  misc_RNA (1)...(19): siRNA sense strand
guuaaugaauagagagauc

SEQ ID NO: 811913 - RNA, 19 nt, Homo sapiens
  misc_RNA (1)...(19): siRNA sense strand
gaaaagcauuuguggucaa

SEQ ID NO: 811914 - RNA, 19 nt, Homo sapiens
  misc_RNA (1)...(19): siRNA sense strand
gacaucugccuaaaucuga

SEQ ID NO: 811915 - RNA, 19 nt, Homo sapiens
  misc_RNA (1)...(19): siRNA sense strand
gcuaucaguccaccacaaa

SEQ ID NO: 811916 - RNA, 19 nt, Homo sapiens
  misc_RNA (1)...(19): siRNA sense strand
gccaaagaauucauugcau

SEQ ID NO: 811917 - RNA, 19 nt, Homo sapiens
  misc_RNA (1)...(19): siRNA sense strand
ucuuugauauuccuuguga

SEQ ID NO: 811918 - RNA, 19 nt, Homo sapiens
  misc_RNA (1)...(19): siRNA sense strand
gaucaucaagagaaauguu

SEQ ID NO: 811919 - RNA, 19 nt, Homo sapiens
  misc_RNA (1)...(19): siRNA sense strand
aauacaacuucgagagaaa

SEQ ID NO: 811920 - RNA, 19 nt, Homo sapiens
  misc_RNA (1)...(19): siRNA sense strand
cagagaagaagcauaaagu

SEQ ID NO: 811921 - RNA, 19 nt, Homo sapiens
  misc_RNA (1)...(19): siRNA sense strand
agaagacucaugugaagaa

SEQ ID NO: 811922 - RNA, 19 nt, Homo sapiens
  misc_RNA (1)...(19): siRNA sense strand
acaagacuccuccauacaa

SEQ ID NO: 811923 - RNA, 19 nt, Homo sapiens
  misc_RNA (1)...(19): siRNA sense strand
agagaaauguuaggaaguc

SEQ ID NO: 811924 - RNA, 19 nt, Homo sapiens
  misc_RNA (1)...(19): siRNA sense strand
guuuggagcagaugauaaa

SEQ ID NO: 811925 - RNA, 19 nt, Homo sapiens
  misc_RNA (1)...(19): siRNA sense strand
aaagaaguuuggagcagau

SEQ ID NO: 811926 - RNA, 19 nt, Homo sapiens
  misc_RNA (1)...(19): siRNA sense strand
gcauuuguggucaauauca

SEQ ID NO: 811927 - RNA, 19 nt, Homo sapiens
  misc_RNA (1)...(19): siRNA sense strand
aagaagaagacucauguga

SEQ ID NO: 811928 - RNA, 19 nt, Homo sapiens
  misc_RNA (1)...(19): siRNA sense strand
gaaguucuaauuccucucu

SEQ ID NO: 811929 - RNA, 19 nt, Homo sapiens
  misc_RNA (1)...(19): siRNA sense strand
cgggaagaauuugaugaaa

SEQ ID NO: 811930 - RNA, 19 nt, Homo sapiens
  misc_RNA (1)...(19): siRNA sense strand
ucccagagaagaagcauaa

SEQ ID NO: 811931 - RNA, 19 nt, Homo sapiens
  misc_RNA (1)...(19): siRNA sense strand
acugaucucucucugcuau

SEQ ID NO: 811932 - RNA, 19 nt, Homo sapiens
  misc_RNA (1)...(19): siRNA sense strand
gagcuguuugucuuugaua

SEQ ID NO: 811933 - RNA, 19 nt, Homo sapiens
  misc_RNA (1)...(19): siRNA sense strand
ggccuggucuucacagucu

SEQ ID NO: 811934 - RNA, 19 nt, Homo sapiens
  misc_RNA (1)...(19): siRNA sense strand
gcuuaagggaguugauauu

SEQ ID NO: 811935 - RNA, 19 nt, Homo sapiens
  misc_RNA (1)...(19): siRNA sense strand
ugugagggccuugaagaua

SEQ ID NO: 811936 - RNA, 19 nt, Homo sapiens
  misc_RNA (1)...(19): siRNA sense strand
uugaugagaccuuuacauu

SEQ ID NO: 811937 - RNA, 19 nt, Homo sapiens
  misc_RNA (1)...(19): siRNA sense strand
gagguaaucgggcaguuag

SEQ ID NO: 811938 - RNA, 19 nt, Homo sapiens
  misc_RNA (1)...(19): siRNA sense strand
guggagagcacuggaaaga

SEQ ID NO: 811939 - RNA, 19 nt, Homo sapiens
  misc_RNA (1)...(19): siRNA sense strand
caaagaauucauugcaucu

SEQ ID NO: 811940 - RNA, 19 nt, Homo sapiens
  misc_RNA (1)...(19): siRNA sense strand
caccagccgggaagaauuu

SEQ ID NO: 811941 - RNA, 19 nt, Homo sapiens
  misc_RNA (1)...(19): siRNA sense strand
ugagguaaucgggcaguua

SEQ ID NO: 811942 - RNA, 19 nt, Homo sapiens
  misc_RNA (1)...(19): siRNA sense strand
gaaguuuggagcagaugau

SEQ ID NO: 811943 - RNA, 19 nt, Homo sapiens
  misc_RNA (1)...(19): siRNA sense strand
gugaguuacugaucucucu

SEQ ID NO: 811944 - RNA, 19 nt, Homo sapiens
  misc_RNA (1)...(19): siRNA sense strand
cacagucucucucuuugca

SEQ ID NO: 811945 - RNA, 19 nt, Homo sapiens
  misc_RNA (1)...(19): siRNA sense strand
cuucacagucucucucuuu

SEQ ID NO: 811946 - RNA, 19 nt, Homo sapiens
  misc_RNA (1)...(19): siRNA sense strand
ugagaccuuuacauucuau

SEQ ID NO: 811947 - RNA, 19 nt, Homo sapiens
  misc_RNA (1)...(19): siRNA sense strand
uaagccagcugugccaaag

SEQ ID NO: 811948 - RNA, 19 nt, Homo sapiens
  misc_RNA (1)...(19): siRNA sense strand
cuuaagggaguugauauuu

SEQ ID NO: 811949 - RNA, 19 nt, Homo sapiens
  misc_RNA (1)...(19): siRNA sense strand
ccuugaagauauaaguguu

SEQ ID NO: 811950 - RNA, 19 nt, Homo sapiens
  misc_RNA (1)...(19): siRNA sense strand
cgacaucugccuaaaucug

SEQ ID NO: 811951 - RNA, 19 nt, Homo sapiens
  misc_RNA (1)...(19): siRNA sense strand
ucaagagaaauguuaggaa

SEQ ID NO: 811952 - RNA, 19 nt, Homo sapiens
  misc_RNA (1)...(19): siRNA sense strand
gugcuuaagggaguugaua

SEQ ID NO: 811953 - RNA, 19 nt, Homo sapiens
  misc_RNA (1)...(19): siRNA sense strand
agaauacaacuucgagaga

SEQ ID NO: 811954 - RNA, 19 nt, Homo sapiens
  misc_RNA (1)...(19): siRNA sense strand
cagcugugccaaagaauuc

SEQ ID NO: 811955 - RNA, 19 nt, Homo sapiens
  misc_RNA (1)...(19): siRNA sense strand
ccaccagccgggaagaauu

SEQ ID NO: 811956 - RNA, 19 nt, Homo sapiens
  misc_RNA (1)...(19): siRNA sense strand
ucugauguguccggacuuu

SEQ ID NO: 811957 - RNA, 19 nt, Homo sapiens
  misc_RNA (1)...(19): siRNA sense strand
ggccuugcacuucacaauu

SEQ ID NO: 811958 - RNA, 19 nt, Homo sapiens
  misc_RNA (1)...(19): siRNA sense strand
agaauuggccuugcacuuc

SEQ ID NO: 811959 - RNA, 19 nt, Homo sapiens
  misc_RNA (1)...(19): siRNA sense strand
agcagucgaugaccucuga

SEQ ID NO: 811960 - RNA, 19 nt, Homo sapiens
  misc_RNA (1)...(19): siRNA sense strand
caaugagcuguuugucuuu

SEQ ID NO: 811961 - RNA, 19 nt, Homo sapiens
  misc_RNA (1)...(19): siRNA sense strand
gcauuuggccuggucuuca

SEQ ID NO: 811962 - RNA, 19 nt, Homo sapiens
  misc_RNA (1)...(19): siRNA sense strand
ucagaucccuaugucaaag

SEQ ID NO: 811963 - RNA, 19 nt, Homo sapiens
  misc_RNA (1)...(19): siRNA sense strand
ugaugagaccuuuacauuc

SEQ ID NO: 811964 - RNA, 19 nt, Homo sapiens
  misc_RNA (1)...(19): siRNA sense strand
ucauccaagucuaacaaga

SEQ ID NO: 811965 - RNA, 19 nt, Homo sapiens
  misc_RNA (1)...(19): siRNA sense strand
gcuguuugucuuugauauu

SEQ ID NO: 811966 - RNA, 19 nt, Homo sapiens
  misc_RNA (1)...(19): siRNA sense strand
cuacacacaaauccaagaa

SEQ ID NO: 811967 - RNA, 19 nt, Homo sapiens
  misc_RNA (1)...(19): siRNA sense strand
gaacaaagacaauucguua

SEQ ID NO: 811968 - RNA, 19 nt, Homo sapiens
  misc_RNA (1)...(19): siRNA sense strand
gaaguguucugcuuuauuu

SEQ ID NO: 811969 - RNA, 19 nt, Homo sapiens
  misc_RNA (1)...(19): siRNA sense strand
gcagaacaauacucuaaua

SEQ ID NO: 811970 - RNA, 19 nt, Homo sapiens
  misc_RNA (1)...(19): siRNA sense strand
gaagaaaguacuccuaaua

SEQ ID NO: 811971 - RNA, 19 nt, Homo sapiens
  misc_RNA (1)...(19): siRNA sense strand
ggaagugccuugaaagaaa

SEQ ID NO: 811972 - RNA, 19 nt, Homo sapiens
  misc_RNA (1)...(19): siRNA sense strand
ugaaagagaugcuauaaga

SEQ ID NO: 811973 - RNA, 19 nt, Homo sapiens
  misc_RNA (1)...(19): siRNA sense strand
caagaaaccuggauuaaca

SEQ ID NO: 811974 - RNA, 19 nt, Homo sapiens
  misc_RNA (1)...(19): siRNA sense strand
caacugaccucacuagaga

SEQ ID NO: 811975 - RNA, 19 nt, Homo sapiens
  misc_RNA (1)...(19): siRNA sense strand
gagaucaacuguauuauca

SEQ ID NO: 811976 - RNA, 19 nt, Homo sapiens
  misc_RNA (1)...(19): siRNA sense strand
caaaggguguuacauuuaa

SEQ ID NO: 811977 - RNA, 19 nt, Homo sapiens
  misc_RNA (1)...(19): siRNA sense strand
ucacagagaucaucgauau

SEQ ID NO: 811978 - RNA, 19 nt, Homo sapiens
  misc_RNA (1)...(19): siRNA sense strand
gaacuuaacaccucugaaa

SEQ ID NO: 811979 - RNA, 19 nt, Homo sapiens
  misc_RNA (1)...(19): siRNA sense strand
gaaagaggguccuuacugu

SEQ ID NO: 811980 - RNA, 19 nt, Homo sapiens
  misc_RNA (1)...(19): siRNA sense strand
gaacuuagcccacccaugu

SEQ ID NO: 811981 - RNA, 19 nt, Homo sapiens
  misc_RNA (1)...(19): siRNA sense strand
ucagaaagcuguuaacugu

SEQ ID NO: 811982 - RNA, 19 nt, Homo sapiens
  misc_RNA (1)...(19): siRNA sense strand
gcaaagagcgauucaagaa

SEQ ID NO: 811983 - RNA, 19 nt, Homo sapiens
  misc_RNA (1)...(19): siRNA sense strand
aaagugaaguggcauauaa

SEQ ID NO: 811984 - RNA, 19 nt, Homo sapiens
  misc_RNA (1)...(19): siRNA sense strand
aaacaaaccuucucaucuu

SEQ ID NO: 811985 - RNA, 19 nt, Homo sapiens
  misc_RNA (1)...(19): siRNA sense strand
gaacuuccaugcauauuag

SEQ ID NO: 811986 - RNA, 19 nt, Homo sapiens
  misc_RNA (1)...(19): siRNA sense strand
gcaaaggguguuacauuua

SEQ ID NO: 811987 - RNA, 19 nt, Homo sapiens
  misc_RNA (1)...(19): siRNA sense strand
guucugagauuacccauaa

SEQ ID NO: 811988 - RNA, 19 nt, Homo sapiens
  misc_RNA (1)...(19): siRNA sense strand
caagaaaugucucgcugua

SEQ ID NO: 811989 - RNA, 19 nt, Homo sapiens
  misc_RNA (1)...(19): siRNA sense strand
gcuguuaacuguacacaaa

SEQ ID NO: 811990 - RNA, 19 nt, Homo sapiens
  misc_RNA (1)...(19): siRNA sense strand
gcagucagaugucauguug

SEQ ID NO: 811991 - RNA, 19 nt, Homo sapiens
  misc_RNA (1)...(19): siRNA sense strand
aaucgaagcuuacaagaaa

SEQ ID NO: 811992 - RNA, 19 nt, Homo sapiens
  misc_RNA (1)...(19): siRNA sense strand
gcuuagugauuccaaauua

SEQ ID NO: 811993 - RNA, 19 nt, Homo sapiens
  misc_RNA (1)...(19): siRNA sense strand
ugacaaggauguaguaaug

SEQ ID NO: 811994 - RNA, 19 nt, Homo sapiens
  misc_RNA (1)...(19): siRNA sense strand
guucagagaucaacuguau

SEQ ID NO: 811995 - RNA, 19 nt, Homo sapiens
  misc_RNA (1)...(19): siRNA sense strand
gcaagaaguuaaaguggaa

SEQ ID NO: 811996 - RNA, 19 nt, Homo sapiens
  misc_RNA (1)...(19): siRNA sense strand
gcauuuagcccacuaugua

SEQ ID NO: 811997 - RNA, 19 nt, Homo sapiens
  misc_RNA (1)...(19): siRNA sense strand
caacagagauuacgcuuac

SEQ ID NO: 811998 - RNA, 19 nt, Homo sapiens
  misc_RNA (1)...(19): siRNA sense strand
gaacagccaaucacacuaa

SEQ ID NO: 811999 - RNA, 19 nt, Homo sapiens
  misc_RNA (1)...(19): siRNA sense strand
gaaaguacuccuaauaaug

SEQ ID NO: 812000 - RNA, 19 nt, Homo sapiens
  misc_RNA (1)...(19): siRNA sense strand
gaaaguuggugccguaaca

SEQ ID NO: 812001 - RNA, 19 nt, Homo sapiens
  misc_RNA (1)...(19): siRNA sense strand
ggaagagcauguaguaaca

SEQ ID NO: 812002 - RNA, 19 nt, Homo sapiens
  misc_RNA (1)...(19): siRNA sense strand
ggaguuugcuggaauguuc

SEQ ID NO: 812003 - RNA, 19 nt, Homo sapiens
  misc_RNA (1)...(19): siRNA sense strand
ugugaaugcuugaguaaua

SEQ ID NO: 812004 - RNA, 19 nt, Homo sapiens
  misc_RNA (1)...(19): siRNA sense strand
ucagagaucaacuguauua

SEQ ID NO: 812005 - RNA, 19 nt, Homo sapiens
  misc_RNA (1)...(19): siRNA sense strand
gauuacagcagccucauua

SEQ ID NO: 812006 - RNA, 19 nt, Homo sapiens
  misc_RNA (1)...(19): siRNA sense strand
gaaguggcauauaaauuuc

SEQ ID NO: 812007 - RNA, 19 nt, Homo sapiens
  misc_RNA (1)...(19): siRNA sense strand
ugucagagcuggaaucaug

SEQ ID NO: 812008 - RNA, 19 nt, Homo sapiens
  misc_RNA (1)...(19): siRNA sense strand
aauaaugccucuacaaaga

SEQ ID NO: 812009 - RNA, 19 nt, Homo sapiens
  misc_RNA (1)...(19): siRNA sense strand
gagcuggaaucaugccuuu

SEQ ID NO: 812010 - RNA, 19 nt, Homo sapiens
  misc_RNA (1)...(19): siRNA sense strand
gaagaagaaucagcaguuc

SEQ ID NO: 812011 - RNA, 19 nt, Homo sapiens
  misc_RNA (1)...(19): siRNA sense strand
gaaaggugcuaggagugua

SEQ ID NO: 812012 - RNA, 19 nt, Homo sapiens
  misc_RNA (1)...(19): siRNA sense strand
aaagagcgauucaagaaga

SEQ ID NO: 812013 - RNA, 19 nt, Homo sapiens
  misc_RNA (1)...(19): siRNA sense strand
ccaauggaaugguaccuuu

SEQ ID NO: 812014 - RNA, 19 nt, Homo sapiens
  misc_RNA (1)...(19): siRNA sense strand
gaacagcgaaggcaacaga

SEQ ID NO: 812015 - RNA, 19 nt, Homo sapiens
  misc_RNA (1)...(19): siRNA sense strand
gaguguauaucaucaguug

SEQ ID NO: 812016 - RNA, 19 nt, Homo sapiens
  misc_RNA (1)...(19): siRNA sense strand
gaaauggguucucucuagu

SEQ ID NO: 812017 - RNA, 19 nt, Homo sapiens
  misc_RNA (1)...(19): siRNA sense strand
gguaaaugcuacagaugaa

SEQ ID NO: 812018 - RNA, 19 nt, Homo sapiens
  misc_RNA (1)...(19): siRNA sense strand
gggaauggauccaauuaca

SEQ ID NO: 812019 - RNA, 19 nt, Homo sapiens
  misc_RNA (1)...(19): siRNA sense strand
gaagugccuugaaagaaau

SEQ ID NO: 812020 - RNA, 19 nt, Homo sapiens
  misc_RNA (1)...(19): siRNA sense strand
gaaacuauuugcuguucga

SEQ ID NO: 812021 - RNA, 19 nt, Homo sapiens
  misc_RNA (1)...(19): siRNA sense strand
gaucauggcucagaugucu
